United States Patent Application Publication US 2025/0018062 A1 - sequence listing, part 10

SEQ ID NO: 16517 - DNA, 3033 bp, synthetic construct
  misc_feature 1..3033: note = source = /note="Description of Artificial Sequence: Synthetic coding sequence"
  source 1..3033: mol_type = other DNA
atgggagcttatgctagggcatcgggtgtttgtgctcgaggatgcttagactccgctgggccatggactatgagtcgtgccctcagaccgcctctgcctccactttgtttcttccttctgcttttggccgctgctggtgccagagctggaggatatgaaacctgtcccactgttcaacccaacatgttaaacgtgcatcttttgcctcacactcacgacgatgttggatggttaaaaacagttgatcagtatttttatggaattaagaacgatatccaacacgctggtgtgcaatatattcttgactctgttatatcagcgttacttgcggatccgactagacgatttatttatgtggaaatcgcatttttctccagatggtggcatcaacagactaacgctacacaagaggttgtacgtgatctggttaggcaaggccgattagagttcgcaaatggtgggtgggtgatgaacgacgaagctgccacacactatggtgctattgttgatcagatgactttgggtttgagattcctcgaagatacatttggtaacgatggacgccctagggtagcctggcatattgatccatttggtcactcaagggaacaagccagtttatttgcgcaaatgggtttcgatggtttctttttcggcaggttggactatcaggataaatgggtcagaatgcagaaattagaaatggaacaggtttggcgcgcctccacttctcttaaacccccaacggctgatctatttactggagtcctccccaatgggtataatccccccagaaatctgtgttgggatgttctatgcgtcgatcagccattagtggaagatcccaggtccccagaatataacgcaaaggagctggtcgattatttccttaacgttgctactgctcagggtagatattaccgtacgaatcacacagtgatgaccatgggatcggacttccaatatgaaaacgctaatatgtggttcaaaaatctagataagcttatcaggcttgtcaacgctcaacaagctaaaggaagttcagttcatgtattgtatagcacacctgcttgctacctgtgggaacttaacaaagcaaacttgacctggtctgttaaacatgatgatttctttccttacgccgatggacctcatcaattctggacgggttacttctcatcgagacccgcacttaagaggtacgagagactttcttacaacttcttgcaggtctgcaaccaattagaagctcttgtaggtcttgctgctaacgtgggtccgtatggttctggagattcagcaccgttaaatgaagctatggcggtgctccaacaccatgatgctgtttccggcacatccaggcaacatgttgctaatgattatgcccgacagcttgctgctggctggggtccgtgtgaggtccttctctcaaatgctttggctaggcttcgtggtttcaaggatcatttcaccttttgccaacaattaaatatctctatctgccctctgtcacagacagctgcaaggtttcaagtgattgtttacaacccattgggaaggaaggttaattggatggttaggttgcctgtgtctgagggggtctttgtggtgaaggatccaaacggacgaacggttccgtcagatgttgtcatttttcctagcagtgattctcaggcacatccacccgaactgcttttttccgcctccctgccagcactgggttttagcacctacagtgttgcccaggtacctagatggaaacctcaggcccgagcccctcagcctattcctagacggagctggtctcctgctcttaccattgagaatgagcacatccgagctacatttgatcctgataccgggttactcatggaaattatgaatatgaaccagcagctacttttaccagtgcgtcaaacttttttttggtataacgcttccattggggataacgaatccgatcaagcatccggtgcatatatttttagaccaaatcaacaaaagccactgcccgtctctaggtgggcacaaatacatttggtcaaaacaccacttgtacaagaagttcaccagaacttttctgcctggtgcagccaagtggtaagactttatccaggccaaagacatttggagttggaatggtctgttgggccaataccagtaggcgatacatggggtaaggaggttatctcccggttcgacacaccattggaaaccaaggggcgtttctacactgattccaacggccgcgaaatattggagaggagacgggattatcgacctacttggaagcttaaccagacggagcctgtggctggtaattactatccagttaacacgcgaatttatataacagacgggaatatgcagctgactgtgcttacagatagaagccagggggggagctcgttgagggatgggtcccttgagttaatggttcatcgtcgactcctcaaagatgacggtaggggggtgtcggaaccattgatggagaatgggtctggcgcatgggtgaggggccgacatttggttcttttggacactgcccaggcagctgcagcaggtcaccgcttgttggctgagcaggaagttcttgcaccacaagtcgtgctggctccaggtggcggtgcagcttacaacctgggtgcacctcctaggacacagttttcaggactcaggagagatttacctccttctgtacatcttcttacactggctagctggggtcccgagatggtattgctgcggcttgaacaccaatttgctgttggagaggatagtggtaggaatttatctgcacctgtgacacttaatctcagagatttgttctccacctttactatcacaaggctacaagagacaacgctcgtagctaaccagctcagagaggcggctagtcgtcttaagtggacaacaaatacaggtcctacccctcatcaaaccccttaccagcttgatcccgcgaacattaccttggagcctatggaaattaggacttttcttgcctctgtgcaatggaaggaggtcgacggg

SEQ ID NO: 16518 - DNA, 3033 bp, synthetic construct
  misc_feature 1..3033: note = source = /note="Description of Artificial Sequence: Synthetic coding sequence"
  source 1..3033: mol_type = other DNA
atgggtgcatacgcacgtgcatccggcgtgtgtgcccgcggatgcctggattcggccggaccgtggactatgagccgagccttgaggccgccactgcccccactgtgctttttccttctcctgctggcagccgccggcgccagagctggaggatacgagacgtgcccaaccgtgcagcctaatatgctgaacgtgcacctcctgccgcatacccacgatgacgttgggtggctgaaaaccgtggaccaatacttttacggaatcaagaacgatatccagcatgccggcgtccagtacatccttgactcagtgatctcagccctcctggccgacccgacccggcgcttcatctacgtggagatcgcctttttctcccgctggtggcaccaacagactaacgctacccaagaggtggtccgggacctggtccgccagggacggctcgagttcgccaatggaggatgggtcatgaacgacgaagcagccactcactacggagccatcgtcgatcagatgactctgggcctgcggttcctggaagataccttcgggaacgatggacgaccacgcgtcgcctggcacatcgaccctttcggacattcgagagagcaggcatcattgttcgctcagatgggttttgatgggttcttcttcggacgcctcgattaccaagacaaatgggtgcgcatgcagaagctcgaaatggagcaggtgtggcgggcatccaccagcctgaagccgccgaccgccgacctcttcaccggagtcctgcccaacgggtacaatcccccgcgcaacctctgctgggacgtgctgtgtgtcgaccaacctctggtcgaggaccctcgctccccggaatacaatgccaaggagctcgtcgactacttcctcaacgtggctactgcgcagggaagatactatcggactaatcacactgtgatgacgatggggtccgacttccaatacgaaaatgcgaacatgtggttcaagaatctggataaactcatccggctcgtgaacgcgcagcaagccaaaggttcatccgtgcacgtgctttactcgactcccgcttgctacctctgggagctgaataaggccaatttgacctggtcggtcaagcatgatgacttcttcccatacgctgacggaccgcaccagttctggaccggttacttctcaagcagaccggccctgaagaggtacgaaagactctcgtacaacttcctccaggtgtgcaaccagctcgaagcgctggtcggactcgccgctaatgtgggaccatatggatcaggtgactcggcgcctctgaatgaggctatggccgtgctgcaacaccatgacgcggtgagcgggacctcccggcaacacgtcgcgaatgactacgcacggcaactggctgccggatggggaccttgcgaagtgctcctgtctaatgcactggcacggctgagaggcttcaaagaccacttcactttctgccagcaactgaacatttcgatttgccctctgtcccagactgccgcgagatttcaagtgattgtgtataacccgctgggaaggaaggttaactggatggtgcggttgcccgtgagcgaaggagtgttcgtcgtcaaggatccgaacggcagaactgtgccctccgacgttgtgatctttccttcctccgactcacaggcacacccgccggagttgcttttctcagcatcactgccggcgttgggcttcagcacttacagcgtggcgcaagtgccgaggtggaagccacaggcacgcgcgccccagcctatcccacgcagaagctggtcgccggcccttaccatcgaaaacgagcatatacgagcaaccttcgacccagatacgggcctgctcatggaaatcatgaacatgaaccagcaactcttgctgcccgtccgacagactttcttttggtacaacgcttcgatcggggacaatgagtccgatcaggccagtggagcctacatcttcaggcctaaccagcagaagcccctcccggtttcgcgctgggctcagatccacctggtgaaaaccccgttggttcaggaagtgcaccaaaatttttccgcgtggtgtagccaggtggtacgcctgtacccaggacagcggcatctggaactcgaatggtcagtgggtcctattccggtcggcgacacttggggcaaggaagtgatctcccgctttgacaccccattggaaaccaagggacgcttttacacggactccaacggcagggaaatcctggaacggagaagggattacagaccgacctggaaacttaaccagactgaaccagtggccggaaactactatccagtgaacacgcgcatttacatcaccgatggcaacatgcaactgactgtgctcaccgataggagccagggcggctcgtcgcttagagacggatcgctggagctgatggtccatcggcggctcctgaaggatgatggacgcggtgtgagcgagccgctgatggaaaatggctcgggcgcgtgggtccggggtcggcacctcgtcctgcttgacactgcccaggcggcggccgcgggacatcgccttctggctgaacaggaggtcttggccccacaggtggtgttggcgccggggggaggggcggcttacaatcttggcgcacctccgcgcacgcaattctctggtctgagacgggatctgccgccatcagtccatctgttgactctggctagctggggcccggagatggttctcctccgtcttgaacatcagtttgcagtgggggaagattctggacgcaacctgtcggccccagtgaccctcaacctgcgcgacctgttctccacctttacgatcacccggctgcaagaaaccactctggtggctaatcaactccgggaggccgcaagccgcctcaagtggaccactaacactggaccgaccccgcaccaaactccttaccagctggatccggcgaacatcaccctggaaccaatggagatcagaactttccttgcctcggtgcaatggaaggaggtggacgga

SEQ ID NO: 16519 - DNA, 3033 bp, synthetic construct
  misc_feature 1..3033: note = source = /note="Description of Artificial Sequence: Synthetic coding sequence"
  source 1..3033: mol_type = other DNA
atgggggcatacgcacgcgcatccggcgtgtgtgcacgaggatgcctggattctgcaggcccttggaccatgtcaagagcgctgcgacctccactgccccctctgtgcttctttcttcttttgcttgctgccgcaggcgccagggccggcgggtacgagacctgtccaaccgtgcagcctaatatgctaaacgtacatctgctgcctcacactcacgacgatgttggctggctgaagaccgtagatcagtatttttatggcatcaagaacgacattcagcatgctggtgtgcagtacatcctggacagtgtgatctccgcgctgctcgcagatcctactcgtaggttcatctatgtggagattgcctttttttcgcgttggtggcaccaacagaccaatgccacgcaggaggtggtccgagatctggtgaggcaaggcagacttgagtttgcaaatggcggttgggttatgaacgatgaggctgctacccactacggcgctatagtggatcaaatgactctgggccttcggttcctggaggataccttcggaaacgacggacgaccacgcgtagcttggcatatcgaccccttcggtcacagtagagagcaggcctccctttttgctcagatggggttcgatgggttcttcttcggtagacttgactaccaggataagtgggtgagaatgcagaagcttgagatggagcaggtgtggagagcatcaaccagtttgaaacctcccacagcagatctgtttaccggtgttttacctaacgggtacaatccacctcggaatctgtgttgggatgttctgtgcgtagaccagcccctggtcgaggaccctcgatctccagaatataacgcaaaagaattggttgattatttcctcaacgtagccaccgcccagggcaggtactaccgaactaatcacacagtgatgacaatgggatcagattttcagtacgagaacgcaaatatgtggtttaagaatcttgataaattgatacgtcttgtcaatgcccagcaggctaagggaagcagtgtccatgtcctatatagtacccccgcatgctacctatgggagctgaacaaagccaatttaacttggtctgtaaagcacgacgatttttttccatatgcggatggaccacaccagttctggacgggatacttctcttcaaggcccgcgcttaaacgctacgagagactctcatacaattttctgcaagtgtgcaatcagttggaggcgttagtggggctggccgctaatgtgggcccatatggaagtggtgacagcgccccactcaacgaggccatggcagtgctgcagcatcacgacgcagtctccggcaccagtcgtcaacacgttgccaacgattatgcacgtcagctggccgccggatggggtccatgtgaggtgcttctgtcgaatgctttagccaggctgcgggggttcaaggaccacttcactttctgccaacagttaaatataagcatatgtccactctctcaaacagccgctcgctttcaggtgatcgtgtataaccctctggggcgcaaagtgaactggatggtgcgcctgccagtgtcagagggggtcttcgtcgtaaaggatcctaacgggagaactgtcccttctgatgttgtgatcttccccagtagtgactctcaggcccatccacctgagttgcttttttcagccagtctgcccgccctgggcttttcaacctattcagtggcccaggtgcccagatggaagccacaagcccgggccccccaaccaattcctaggcgctcatggagtcctgcacttacaattgaaaacgagcatattcgggccacctttgatccggacactggcttgttgatggagatcatgaatatgaatcagcagctgctgttgcccgtgcggcaaacatttttctggtacaatgcatctatcggggataatgagtctgaccaagccagtggcgcatatatttttagacctaaccagcagaaaccgctgcctgtcagccggtgggctcaaatccatttggtgaaaacgcctctagtgcaagaggtccatcaaaattttagtgcttggtgcagccaggtggttagactgtaccccggccagagacatctggagctggaatggtcagtcggtccgatccctgtgggtgatacttggggaaaagaggtcatttcaaggttcgacacacctctggagacaaaaggcaggttctacactgactctaacgggcgcgagattctagagaggcgcagggactatcggccgacttggaaacttaatcagacggaacctgttgccggcaattattatcccgtcaatacacgtatctacattaccgacggcaatatgcagctcacagttttgactgaccggtcccagggcggcagctccttacgggacgggtccctcgagttgatggtgcaccggaggctcctgaaggatgacggccgcggcgtgtccgagcctttgatggagaacggatccggagcctgggtgagaggtcgccacttggtgctgcttgacactgcccaggcagctgctgccgggcaccggcttctggccgaacaagaggtgctggcgccacaggtagtattggcaccaggggggggtgctgcctacaatctgggtgcacccccacggactcagtttagcggcttacggcgggaccttccaccttctgtgcatctgctgacattggcctcatgggggcctgagatggtgcttctgaggttggagcaccagtttgccgtgggcgaagattcagggcgtaacttgtcggcgcctgtgaccctgaatctaagggaccttttttctacattcactataacacggctacaagagaccacactcgtggccaatcaactcagggaagccgcctctcggttgaagtggactaccaacaccggtccaacaccacatcagaccccttatcagctggatcccgccaatatcacactcgagcctatggaaattcgtacctttctcgctagtgtacaatggaaggaggtggacggg

SEQ ID NO: 16520 - DNA, 3033 bp, synthetic construct
  misc_feature 1..3033: note = source = /note="Description of Artificial Sequence: Synthetic coding sequence"
  source 1..3033: mol_type = other DNA
atgggtgcatacgctagagcaagcggtgtctgtgcaagggggtgcctcgacagcgcagggccttggacaatgtcgagggcactccggcctccgttgccccccttgtgctttttccttttgttgctcgctgccgccggagcgcgcgcaggcgggtacgagacctgcccaacagtgcagcccaacatgcttaatgtgcacttgctgcctcatactcatgatgacgtcggttggctcaaaactgtggatcaatatttttacggtataaaaaacgatatacagcatgctggcgtccagtatatcttggacagtgttatttcagctctgctcgccgaccccactcgcaggtttatttatgttgaaattgcctttttctcgaggtggtggcaccaacagaccaacgcaacccaagaggttgtgcgtgatttggtgcgccagggcagattagaattcgcaaacgggggttgggtcatgaacgatgaagctgccactcattacggagccatagtggatcagatgacgcttggtctccgttttcttgaagacacttttggtaacgacggacggcctagggtggcttggcatatcgatcctttcggtcattctagagaacaggcctccctctttgcccaaatgggattcgatggtttcttcttcgggcgcctggattaccaggataagtgggtccggatgcaaaagctggagatggagcaggtatggagggcctcgacctctctgaaacccccaactgctgacctatttactggagtattgcctaacggctataatccgccaagaaacctttgttgggacgtcctgtgcgtcgatcaaccactggtggaggatcctcgcagtcctgaatacaacgccaaggagttggtggactactttctgaacgtcgcaaccgcacaaggaaggtattatagaaccaatcacaccgtgatgaccatgggaagcgatttccagtacgaaaatgctaacatgtggtttaaaaacctggacaagctgatcagactcgttaacgctcagcaggccaagggtagcagcgtccacgttctttattccacacccgcatgctacctttgggagctgaacaaggccaacctgacttggagcgtgaaacacgacgacttctttccttacgcggacgggccacaccagttttggacaggctatttcagctcccggcctgcactgaaaaggtacgagaggctgtcatataacttcctgcaagtgtgcaaccaactggaggccctcgtgggccttgctgctaacgtcggtccgtacggcagtggagacagcgctccactgaacgaggccatggcggtgctgcaacatcacgatgctgtatccggcaccagtcgccaacacgttgctaacgattacgcgaggcaactggccgccggctggggtccttgtgaagttctgttatccaacgctctagctaggcttcggggttttaaagaccacttcaccttctgccaacagcttaacatctcgatctgccctttaagccaaaccgcagcccgattccaggtgattgtgtacaacccactcggaagaaaggtcaattggatggttcgacttcctgtgtctgagggggtcttcgtggtcaaggatccaaacgggcggacggttccgagtgatgtcgtcatctttcctagctcagatagccaggcccacccccctgaactcctctttagcgcctctttacctgctcttgggtttagcacctactccgtcgcgcaagtgcctaggtggaagcctcaggcccgggcccctcagcccatccccaggaggagttggagtcctgcactcacaatcgagaacgagcatataagggctacattcgatccagataccggactgctgatggaaattatgaatatgaaccagcaattgctcctccctgtcagacagacattcttctggtataacgccagcattggagataacgagagcgaccaggctagcggcgcctacatcttccgtcccaatcaacagaagcccctcccagtcagcagatgggcgcaaatccatctggtgaaaaccccccttgtacaggaggttcaccagaacttcagcgcgtggtgttctcaggtggtgcgcctgtatcccggtcaacggcatctcgagctggaatggagcgttggacctatccccgtaggcgacacctggggcaaggaagtgatcagccgctttgatactcccttggaaaccaagggccgcttctatacagacagcaatggtagggagatcctggaacgtagacgggactacagaccgacttggaaactgaatcagaccgagccagtcgctggaaactactaccccgtgaacaccagaatttacatcactgacgggaatatgcaacttacggttctcactgatagaagccagggaggttctagtctcagagacggctcccttgagcttatggtgcataggcgcctcctgaaagacgatggtagaggagtttcagagccactgatggagaacggatcaggcgcttgggtgcggggccgccatttggtgcttctggatacggctcaagccgccgctgcaggtcaccgcctcttggctgaacaggaagttttggcaccacaggtggtcttagcacctggtggcggtgctgcatacaaccttggtgctcctccaaggactcagttctccgggcttcgccgggatttgccaccctctgtccacctgctgactcttgcttcatggggacccgaaatggttctcttaagactggagcatcaatttgctgtgggagaggatagcggaagaaacctcagtgccccagtgaccctaaacctgagagatctatttagcacctttaccatcactcgtctgcaagagaccaccctggtggcgaaccagctcagagaggcagctagcaggcttaaatggactactaacacaggacctaccccccaccagacaccttatcagctggacccggctaacatcactctggagcccatggaaataaggaccttcctggcctctgtgcagtggaaagaggtggacggc

SEQ ID NO: 16521 - DNA, 3033 bp, synthetic construct
  misc_feature 1..3033: note = source = /note="Description of Artificial Sequence: Synthetic coding sequence"
  source 1..3033: mol_type = other DNA
atgggtgcctacgctcgggcttcgggtgtctgcgcgcggggatgccttgactctgcgggtccctggaccatgagtcgtgcgctccgcccgccgcttcctccgctatgcttctttctgctcctactggccgcggctggtgcacgcgcaggcggctacgagacatgccctaccgtccagccaaacatgctgaatgttcacctgctgccgcatacccatgatgacgtcggttggctgaaaacagttgaccagtacttctacggaatcaagaacgatattcagcatgcaggcgtgcagtacatcctggactccgtcatctccgcgctcctggccgatcctacgcgtcgatttatctacgtggaaatcgcttttttctcccgttggtggcatcagcagaccaacgcgacccaggaggtcgtgcgggacctcgtgcgtcagggccgtcttgagttcgcaaatggtggttgggtcatgaacgatgaggccgctactcactacggagctatcgttgaccagatgaccttgggtctcaggttcctcgaggacaccttcgggaacgatggcagaccccgcgtggcctggcatatcgatcccttcggccactcccgcgagcaggcctctttgttcgctcagatgggctttgacgggttcttctttggtcgcctggactaccaggacaagtgggttcgcatgcaaaagctggagatggaacaggtgtggagagcgagcacctcactgaagccccctaccgccgacctgtttaccggcgttctcccgaacgggtacaacccacctcgcaacctctgttgggacgtcctctgcgttgatcaaccgctcgtagaagacccgcggtcgccggaatacaacgccaaggagttggtcgattattttctgaatgtcgcaacagcacagggtcgttattaccgtaccaaccacacggtcatgaccatgggcagcgacttccagtatgagaacgctaacatgtggttcaagaatctggacaagcttattcgactggtcaacgctcagcaggcgaagggttcttccgttcacgtgttgtacagcacccccgcctgctacctatgggagctcaacaaggccaacctcacctggagtgtgaagcacgatgacttcttcccatatgcggacggcccccatcagttctggaccggctacttctcaagtaggcccgctctgaagcgttatgaaaggctctcctacaacttcctccaggtctgcaaccagcttgaggccctcgtcggcttagcggctaatgtcgggccctacggctccggagattccgctccccttaacgaggccatggctgtgctgcagcaccacgatgcggtctctggaacttcccgacagcatgtcgctaacgactacgcgcgtcaactcgctgctggctggggcccgtgtgaggtgctgctctctaacgctttggcgcggctgcgcggatttaaggaccacttcactttctgccaacaactgaacataagcatttgtcccctttcgcagaccgccgcccgtttccaggtcattgtctacaaccccctcggtcgtaaggttaactggatggtccggttgcccgttagcgagggcgtcttcgttgtgaaggatcccaacggccgcacggtgccgtcggacgtggttatcttcccgtcctccgactcccaagcccatcccccggagttgctgttttccgctagcctcccggccctgggtttctccacgtatagcgtcgctcaggtcccgagatggaagcctcaggcgcgcgctccccagccgatcccgcgacgtagttggtctcctgctctaaccatcgaaaacgaacacatccgggcaaccttcgacccagacactggcctccttatggaaataatgaatatgaatcaacagcttctgcttcctgtaaggcagactttcttctggtataacgcctccattggtgataacgagtccgatcaggcctcgggagcctatatcttcagacctaatcaacaaaagccgctcccggtcagcagatgggcacagatccacctggttaagaccccgctcgtccaggaagttcatcagaacttttccgcatggtgtagtcaggtcgtgcgcttataccccgggcagcgccacctagagctggaatggtcggtaggcccgattcctgttggtgatacgtggggcaaggaagtgatcagcagatttgacacccccctcgaaacaaaaggccggttttacacggattcgaacggacgtgaaattctggagcgtcgtagagattaccgtccaacctggaagctcaaccagacagaacctgttgccggtaactattaccccgtgaacactcgcatttacatcaccgatggaaacatgcagctcaccgtgctgaccgatcgcagccaagggggatcgtccctccgggatggctcgctggagcttatggtccacagacgcttactcaaggatgacggtcgtggtgtctctgaacctttgatggagaacggttccggcgcctgggtaagaggtcgtcaccttgttttgttagacaccgcccaggctgctgctgccggacacagattgttagctgagcaggaagtgctggccccccaggtcgtcttggcccctggcggtggcgctgcttacaaccttggtgcgcccccgcggacccagttcagcggactccgacgcgatctacccccgtctgtccacctgcttactctcgcttcgtggggtcccgagatggtcctgctccgccttgagcatcaattcgccgtcggcgaggactccggccgtaacctcagtgcgcccgtcaccctgaacctcagagacttgtttagtaccttcaccatcactcggctgcaagagactacactagttgccaaccaactgcgtgaggcagcctcccggcttaagtggacgactaatacaggacctactcctcatcagactccgtaccagcttgaccctgccaacatcaccctggagcccatggagatccgaaccttcttggccagtgtgcaatggaaggaggtggatggg

SEQ ID NO: 16522 - DNA, 3033 bp, synthetic construct
  misc_feature 1..3033: note = source = /note="Description of Artificial Sequence: Synthetic coding sequence"
  source 1..3033: mol_type = other DNA
atgggagcgtacgccagagcgtctggtgtttgcgccagaggttgtcttgattcggccggaccatggacaatgagtcgtgccctacgtccgccgcttcctccgctttgctttttccttctccttctcgccgcagcgggagcaagagccggaggatatgagacttgtccaacagttcaaccaaatatgctaaatgtgcacttgttgccgcatactcatgatgacgtgggatggctgaaaactgttgatcaatatttttatggaatcaaaaatgatattcaacatgccggtgttcaatatattcttgatagtgtcatttccgctctcttagccgatccgactcgccgttttatatatgttgaaatcgcctttttttcacgatggtggcaccaacagacaaatgcaactcaggaggtagttagggacctggtaagacaaggcagacttgaatttgcgaacggaggttgggtcatgaatgacgaggcagcaacgcattatggagccattgttgatcagatgacactgggtttgcgctttttagaggacactttcggaaatgatggtcggccaagggtagcatggcatatagatccatttggacactctcgagaacaagcatcattatttgctcaaatggggtttgatggtttttttttcggacgcctcgattatcaggataaatgggtaagaatgcaaaaactggagatggaacaggtgtggagagcatctactagtctcaaaccaccaacagcagacctcttcacaggagtccttcctaacggatataatcctccacgtaacttgtgctgggacgttctatgtgtggatcagccgctcgtggaagatccacggtctccagagtacaacgctaaggaattggtggattacttccttaatgtggcgaccgcacaaggaagatactatcgaactaatcacacagttatgactatgggcagtgatttccaatatgagaacgctaatatgtggttcaaaaatctggataagttgattcgtttggttaacgcacagcaggccaagggctctagcgtgcatgttttgtactcgacccctgcttgctatctatgggaattgaataaagcaaatttaacttggtctgttaaacatgatgatttctttccttacgctgatggaccacaccagttctggaccggatatttttcgagtcgtccagctttgaaaagatatgaacgattaagttataattttttgcaagtatgcaaccaactcgaagcattggttggactggctgctaacgttggcccgtatggctcaggtgattctgccccactaaatgaagcaatggctgtcttgcaacaccatgatgccgtctctggtactagtcgtcagcatgttgccaatgattacgcacgccaactcgcagctggatggggaccatgcgaggtgttgttatctaacgctttggcacggctcaggggttttaaggatcactttacattctgtcaacaattgaatatttctatctgtccactgtcccagactgcagcacgtttccaagtcattgtctacaatcctttgggccgaaaagtcaattggatggtccgactcccggtgtccgagggagtttttgttgtaaaggacccaaatggacgtacggtcccatcggacgtagtcatttttccatcgtcggattcccaagcccatccccctgagctcctgtttagcgcatccctaccagctttgggattttcaacgtactctgtagcccaagtgccacgatggaaaccacaagctcgcgcgcctcaacctattcctcgccgatcgtggtcaccagctcttaccattgaaaacgaacatattcgtgcgacattcgacccggatactggtcttttgatggagattatgaacatgaaccagcaattgctactacccgttcgccagaccttcttctggtataatgcgagcattggagataacgaaagcgatcaagcaagtggtgcatatattttccgaccaaatcagcaaaagccactaccagtcagcagatgggcacagattcatttagtgaaaacacctttggtccaagaagttcatcaaaatttctcagcttggtgttcccaagtggttaggctgtatccgggacagcgtcatcttgaactcgagtggagtgtagggcctattccagtcggcgatacatggggaaaagaagtcatatcgaggtttgataccccattagaaacaaagggaagattctatactgatagcaatggccgtgagattctggaaagacgacgagattatcgacctacatggaaacttaaccagactgagccagtagcgggcaattattatcccgtcaacacaagaatttacattactgatggaaatatgcagttgacggtcttgactgatcgaagtcaaggaggctcgtctcttcgagatggaagtttggaacttatggtgcaccgtagattgctcaaagatgatggcagaggtgtttcagaacccctcatggaaaacggatccggagcttgggttcgtggacgtcacttagtactccttgatactgcacaagctgccgccgcaggtcatagactccttgcagaacaggaagtcttagcgcctcaggtggtgttggcaccaggaggaggagctgcctataaccttggtgctcctccaagaacacaattctcaggactccgacgagatctgccgccctcagttcatttgttaaccttggcttcctggggaccagaaatggtgctattgcggttagaacaccagttcgcagtgggagaagattcaggaagaaatttgtcggcacctgtcactttgaatttaagagatcttttctctacgttcaccattactcgattgcaggagaccacactcgttgcaaatcagctacgggaagcagcatcaagattgaagtggacaaccaataccgggccaactccacatcaaacaccctatcaacttgacccagcaaatataaccctagaaccgatggagattagaacgttcctagcaagtgtgcaatggaaagaagtggatgga

SEQ ID NO: 16523 - DNA, 3033 bp, synthetic construct
  misc_feature 1..3033: note = source = /note="Description of Artificial Sequence: Synthetic coding sequence"
  source 1..3033: mol_type = other DNA
atgggcgcgtacgccagggcgtccggcgtgtgcgcacgggggtgtctcgactcggccggcccgtggacgatgtcaagagcacttagaccgcccctccccccgttgtgtttcttcctgcttttgctggccgccgcaggagctcgcgccggagggtacgaaacttgcccaactgtccagccgaacatgctgaacgttcatctgcttccgcatacccacgatgacgtcggatggcttaagaccgtggaccaatacttctatggcataaagaatgacatccagcacgccggggtgcagtacattctcgattcggtcatctccgccctgcttgccgacccgacccggcggttcatctacgtggaaatcgcgttctttagcaggtggtggcaccagcaaaccaatgcgacccaggaagtcgtccgcgacctggtgagacaaggacggctcgaattcgcgaacggaggttgggtcatgaatgacgaggcagcgacccactacggtgctatcgtcgaccaaatgacgctggggctgagattcttggaagatactttcggcaatgacggacgcccacgggtcgcctggcatatcgaccccttcggacactcgcgggaacaggccagcctgttcgcccaaatgggcttcgatgggtttttcttcgggcgcctggattaccaggacaaatgggtgcgcatgcagaaacttgaaatggagcaagtgtggcgcgcgtccacctcccttaaaccgccaactgctgatttgttcacgggtgttttgccgaacggatacaaccccccacggaacttgtgctgggacgtgctctgcgtggatcagccgctcgttgaggatcctcggagcccagagtacaacgcgaaggagcttgtggattacttcctcaatgtcgccactgcacagggcagatactacagaaccaatcacacggtgatgacgatgggcagcgactttcagtacgaaaatgccaatatgtggttcaagaatctggacaaactgatcaggctggtcaatgcccaacaggcaaagggctcgtcggtgcacgtgctgtattcgaccccggcctgctatctctgggagctgaacaaggccaacctgacctggtcagtgaagcacgatgatttctttccgtatgccgacggaccgcaccaattttggaccgggtatttcagctcgaggccggccctgaaacgctatgagcgattgtcctacaactttttgcaagtgtgcaaccaacttgaagcactggtcggcctggctgcaaatgtggggccctacggctccggtgattcagccccactgaatgaggcgatggccgtcttgcaacaccatgatgcagtctcgggcacttctaggcagcatgtggcgaacgattacgcgcggcagttggccgccggttggggaccgtgcgaagtgctgctgtcgaatgcgcttgctaggctgcgcggcttcaaggaccactttaccttttgccagcagctgaacatctccatttgtccgctctcgcaaacggccgccaggtttcaggtgatcgtctacaacccactcggacgcaaagtcaattggatggtgcggcttcctgtgtctgaaggagtgttcgtcgtcaaggacccgaacggacgaacggtgccgtcagacgtcgtgattttcccttcatcggatagccaagcgcacccacccgaattgctcttcagcgcgtccttgccggcactcggtttctcaacgtactccgtggcgcaggtcccgcggtggaagccgcaagccagagccccgcagccaatcccccggcgcagctggtcgcctgccctgactattgagaacgagcacatccgcgcgacgtttgacccagacaccggactgctgatggaaatcatgaacatgaaccaacagctcctgctccccgtgcggcagactttcttttggtacaacgcatcaatcggagacaacgaaagcgatcaggcctccggggcgtacatcttcagaccgaaccagcaaaagccactgccggtgtcgcggtgggcgcagatccatctcgtgaaaacgccactggtgcaggaagtgcaccagaacttcagcgcctggtgctcccaagtggtgcggctttacccgggccagcgccacctcgaacttgaatggagcgtcgggcctatcccggtgggagatacttggggcaaggaggtgatctcccgcttcgacacccctctcgaaaccaaggggcgcttttacaccgattcgaatggaagagaaatcctcgaacgcagacgggactaccggccgacttggaaactgaaccaaactgagcctgtcgctgggaattactacccagtcaacactagaatctacatcactgatggaaacatgcagctcaccgtgctcaccgaccggtcgcagggcggttcgtctctgcgggacggctcactggaactgatggtgcaccgccggctgctgaaagacgacgggcgaggcgtctccgagcctctcatggaaaacggatccggagcttgggttcggggacgtcatctcgtgctccttgatactgcccaggccgctgcagcaggacatcgtctgctcgccgaacaagaagtcctggcaccacaggtggttctggcccctggcggaggggccgcctacaacctgggcgcgcctccccgcacgcagttcagcggactccggcgggatctgcccccatcggtgcatctgcttactctggcaagctggggaccggagatggtgttgctgcggctggaacatcagttcgcggtgggagaggactccggtaggaatttgtccgcgccagtgactctgaatcttcgcgacctgttctccaccttcactatcactagactgcaggagacgaccctcgtggcgaatcagctgcgcgaggcagcatcaagactgaagtggactaccaacaccggaccaaccccgcatcaaaccccgtaccagttggacccggcgaacattaccctggagccaatggaaatcagaacgtttcttgcatcggtgcagtggaaagaggtggacgga

SEQ ID NO: 16524 - DNA, 3033 bp, synthetic construct
  misc_feature 1..3033: note = source = /note="Description of Artificial Sequence: Synthetic coding sequence"
  source 1..3033: mol_type = other DNA
atgggagcgtacgctagagcgagtggagtgtgtgcgaggggatgcctcgacagcgccgggccctggactatgtcccgagcactgaggccaccacttcccccactttgctttttcctgctgttgctcgccgctgctggggcccgcgcaggaggctacgagacttgcccaacggtccagcccaatatgttgaacgtccacttactgcctcacacacacgatgatgtcggatggttgaagacagtggaccaatacttttatggaatcaaaaacgatatccagcacgccggggtgcagtacatccttgattccgtgatatccgcgttgttggccgacccaactaggcgttttatttacgtggagattgcatttttctccagatggtggcaccagcaaaccaacgccacacaggaagtggtaagggacttggtgaggcagggacgactcgagttcgcaaatgggggctgggtcatgaacgacgaagccgccacccattacggtgctatcgtcgatcagatgacactgggccttagatttttggaggatacatttggcaatgatggaaggcctcgggtcgcctggcacattgaccccttcggccacagcagggaacaagcgtcactatttgcccagatgggttttgatggtttcttcttcgggcgacttgactatcaggataagtgggtgaggatgcagaagctggagatggaacaggtttggcgagcctctacttctttgaaacctccgactgccgatctctttactggggtcctccctaacgggtataatcctccacgtaacttatgctgggacgtactgtgtgtggaccagcctttagttgaagaccccagatcaccggaatacaatgccaaagaacttgtagattattttctgaacgtggcaacggcccagggccgatactatagaaccaatcacacagttatgaccatgggatccgactttcagtacgagaatgcaaacatgtggtttaaaaacctggacaaacttatccgattggtgaacgctcagcaggcaaaagggtcttccgtccacgtgctgtactccacacctgcttgctatctgtgggaattaaataaggctaacttgacttggagcgtgaagcatgacgatttcttcccctatgccgacggcccacatcagttctggaccgggtacttctcaagccgcccagccttgaaaagatatgagcggctcagctataattttctccaagtttgcaaccagctagaggccctggtgggcctagctgccaacgtcggaccctacggatccggcgacagtgcaccgctgaatgaggcgatggctgtcctgcagcatcatgatgccgttagcggcacttcaaggcagcatgtggctaatgattacgcacggcagctggctgcagggtgggggccatgcgaggttttactgtcgaatgctctggcaagattacgaggatttaaggaccactttacattttgccagcagcttaatatctcaatctgtcctctctcccagacggcggcaagatttcaagtgatagtatataatcctctagggagaaaggtgaactggatggtgaggctcccagtatccgagggcgtgtttgtggtaaaggacccaaacgggcggaccgtacccagcgatgtggttatttttcccagttcagattcacaggcccacccacccgaactgctcttctctgcttccttaccggcacttggtttcagcacttactccgttgcccaggtccctcgctggaagccacaggcccgggcccctcaacctatccccaggagatcatggtctcccgccctaactattgagaatgagcacattagggctacttttgatccagacaccgggttattgatggaaataatgaacatgaaccagcagttgcttctgccggtgaggcaaaccttcttttggtacaacgccagcattggagataacgagtcggaccaggcttcaggcgcttatatcttccggcccaaccagcagaagcctctgcctgtgagcaggtgggctcagattcacctggtaaagacgccgctcgtgcaggaagtgcaccagaacttttctgcctggtgtagtcaggtagtgaggttgtatcctggacagagacaccttgaactcgagtggtccgtgggtcctattccagtgggagacacctggggtaaagaggtaatctccaggttcgacacgccccttgaaacgaaggggaggttttatacggactccaatggtcgagagatactggagcgacggagagactacaggcccacctggaaactaaaccaaacagagccagtggccggaaactattacccagtcaatacacgcatatacatcacagatgggaacatgcagcttacggtcctaactgaccgatctcaaggtggctctagcctgcgcgatggtagccttgagctaatggtgcaccgcagactgctgaaagatgatgggcgtggggtgagcgagcccctcatggaaaacggctctggagcgtgggtccggggacgacacctcgtcctgctagacacggcccaggccgcagccgccggccaccgactcttggcggaacaagaggtgcttgcacctcaggtggtgctagcacccggcggtggagctgcgtacaacttgggcgctccaccaaggacacaattttctggacttagaagggacctgcccccgtcagtgcatttgctgactttggctagttgggggcctgagatggttctgctgagattggaacatcagtttgctgtaggcgaagatagcggcagaaatctcagcgccccggtgacactcaatctgagagacctcttcagtaccttcaccattacgaggcttcaggagacgacactggtggcaaaccagctcagagaggccgcctctaggttgaagtggaccactaacaccggtccgacaccacaccagacaccatatcagctggatcctgctaacatcactctcgaacctatggagatcagaacttttctggccagcgtccagtggaaagaggtggacgga

SEQ ID NO: 16525 - DNA, 3033 bp, synthetic construct
  misc_feature 1..3033: note = source = /note="Description of Artificial Sequence: Synthetic coding sequence"
  source 1..3033: mol_type = other DNA
atgggggcatatgccagggcgtctggtgtctgcgctcgtgggtgcctggatagtgcgggcccttggacaatgtctcgggcactcaggccgccactcccccctttgtgcttcttcctcctccttctggccgccgcgggtgcccgggccgggggctatgagacttgtccaacggtgcaacccaacatgctaaatgtccatctgcttccacacacccatgatgacgtaggctggctgaagaccgtcgatcagtatttctacgggattaagaatgatatccagcatgcaggggttcagtacatactcgatagcgtcatatcagctctcctggctgacccgaccaggcgattcatttacgtggagattgccttcttctccagatggtggcaccagcagacgaacgccacccaggaggtggtgagagacttggtgagacagggcagactggagtttgcaaacgggggatgggtgatgaatgacgaggccgccactcactacggggctattgttgatcagatgacgctaggactaaggtttctggaagacacatttggcaacgacggtcggcctcgggtggcatggcatatcgatcctttcggtcacagtagggaacaggcaagtcttttcgcccagatgggctttgatggctttttctttggacgtttggattatcaagacaagtgggtgaggatgcaaaagctcgaaatggagcaggtgtggcgcgcatctacgtcgcttaaaccacctactgctgacctattcaccggcgtgctgccaaatggctataaccctccccgcaatttatgctgggacgtactatgcgtggaccagccactggttgaggacccgagaagcccagagtacaacgctaaggagctcgttgattatttccttaacgtggcgacagcccagggccgatattatcggactaatcacactgtcatgactatggggtccgacttccagtacgagaacgcgaacatgtggttcaaaaatctcgataagttgataaggttggtcaatgctcagcaggcgaaggggagcagtgtccacgtgctgtatagcacaccagcctgttacctgtgggagctcaacaaagctaatctgacatggtccgtgaaacacgacgattttttcccatacgcggacgggcctcatcagttttggactggatatttctcaagcagacctgccttgaaaaggtacgaacgactcagttacaacttcctacaggtgtgtaaccagctggaggccctggttggcctcgccgctaatgtcgggccctatggttccggcgatagcgcccctctcaacgaggccatggccgttttgcagcaccacgacgcagtgagcggcacctcccgtcaacacgtggctaacgactatgccagacagttagctgcaggctgggggccctgtgaggtgttgttatctaacgcgctagctcgcctgaggggctttaaggaccactttaccttttgtcaacagttgaatataagtatttgtccactgagccaaacagcagcccggtttcaagtgatcgtgtacaatcctttgggccgaaaggtgaattggatggttaggttgcctgtgtcagaaggagtgtttgttgtcaaggaccccaacggacggacggttccttccgatgtcgtgattttccccagtagtgattcacaggcgcacccccccgagttactgttttcagcatccctgcccgccctgggattctctacttactcagtggcacaagtgcctaggtggaaaccacaggcgcgggcgccccagcccatcccgcgtaggtcatggagcccggccctaaccattgagaatgagcatattagggcgacgttcgaccctgacacaggtctcctcatggaaataatgaacatgaaccagcagcttctgcttccggttcgccagaccttcttttggtataatgcttcaatcggggataatgagtctgaccaggctagcggtgcttatattttccggccgaaccagcagaaacccctgcctgtgagtcgctgggcacagatccacctggtaaagacgccgttggtgcaagaggtgcatcagaatttcagcgcctggtgctcacaagtcgtgcggctgtatccgggacagcgtcatttggaacttgaatggagcgtaggacccatacctgtcggagatacgtgggggaaggaagtcatctcacgcttcgacacacctttggagactaaggggcggttttataccgatagcaacggccgggaaatcctggagcgcagacgggactacaggcctacctggaaactgaaccagactgagcccgttgctggtaattactacccagttaacacaaggatctacataaccgatgggaacatgcagcttaccgtgctgacagataggagtcagggcggatcctcattgagagatggctccctggagctcatggtccacagaaggttgcttaaggacgacggcaggggggtgagtgagcccctgatggagaatggctctggtgcatgggtccgggggagacaccttgttctactggacacagcgcaggctgcagctgctggacaccgcctgcttgcagagcaggaggttctcgctccacaggtcgttctggcccccggggggggggctgcctacaatttgggagctcctccacgcacccaatttagtggcctgagaagagatctccccccgagcgtgcatctgttgacacttgcaagttggggccctgaaatggttctgttaaggctggagcatcagtttgctgtcggagaagactccggtcgaaatctctccgctcccgtgacactgaacttgcgggatcttttctccacctttaccatcacccggcttcaggagacgaccctagtcgcgaaccagctccgtgaggccgccagcagactcaagtggactacaaacaccggccctaccccccaccagacaccatatcagctggacccagctaacattacgcttgaacctatggaaatccggactttcctggcctcagtgcagtggaaggaggttgatggg

SEQ ID NO: 16526 - DNA, 3033 bp, synthetic construct
  misc_feature 1..3033: note = source = /note="Description of Artificial Sequence: Synthetic coding sequence"
  source 1..3033: mol_type = other DNA
atgggtgcctacgcacgagcttcgggggtgtgtgctcgaggatgcttggactcagcgggtccttggaccatgtcaagggccttgaggcctcctctgccgccactgtgcttttttctgctgttgctggcagcggcgggggcccgcgctgggggctacgaaacctgtccaacagtccagccgaacatgcttaacgtgcatttactccctcacactcacgacgacgtggggtggctcaagacagttgaccagtacttttacggcattaagaacgatatccagcatgcgggcgttcagtatatcctggatagtgtgatcagcgcattattagcagatccaacacgccgatttatctacgtggagatcgcattcttctctaggtggtggcatcagcagactaacgccacacaggaagtggttagagatctggttcggcaggggagactcgagtttgctaatggaggctgggtaatgaacgacgaggctgccacacattacggagccatcgtggatcagatgacgcttgggctgcgttttctcgaagatacctttggcaacgacgggaggccccgagtcgcctggcacatcgacccgttcggtcactccagagaacaagcctcacttttcgcccagatgggtttcgacgggttcttctttggccgcctggattaccaggataagtgggtacgtatgcagaaactggagatggagcaggtatggcgcgcatctaccagtctcaagccaccaacggctgacctcttcactggcgtcctgccaaacggatacaacccaccccgaaatttgtgctgggacgttctgtgtgtggatcaacctttggtagaggatccccggagccctgagtacaatgccaaggaactcgtcgattattttttaaacgtagcgacagcgcaaggccgctattataggaccaaccacactgtgatgactatgggctcagatttccaatacgagaacgccaacatgtggttcaaaaatttggataagctcataagactcgtcaatgctcagcaggctaaggggagctctgtgcacgtactgtattctactcccgcatgctatttatgggaacttaataaagcgaacttgacatggtccgtgaagcacgacgacttttttccatacgccgacgggccccaccagttctggacaggctacttctcatctaggcctgctctgaagagatacgagaggctctcttacaacttcctgcaggtgtgtaatcagttggaagccttggttggcctcgccgcaaacgtgggtccatatggatctggcgacagtgctcctcttaatgaggctatggccgtgctgcagcaccacgacgccgtgtccggaacgtccagacagcacgtggccaatgactacgcgagacagctggccgcagggtgggggccgtgtgaagtgttgctttccaacgccttggcccggctccgaggtttcaaggaccactttactttctgtcagcagttgaacatttccatatgcccactttcccagacggccgcgagattccaagtcatcgtctacaaccctctggggaggaaagtgaactggatggtgcggctgccagttagcgaaggagtgttcgtcgtgaaggatcctaacggacggacagtgccatcggacgtagtaattttcccgtcatccgattcacaggcacatccccccgaactactgttctcagcctcactgcctgccctgggattttcgacctattcagtagcgcaggtgccccggtggaagccacaggctcgggctcctcagcccatccctaggcgcagctggtcccctgcacttacaatagaaaatgagcatatccgggctacgttcgatcccgacactggactgctgatggaaatcatgaatatgaatcagcagcttcttctgccagtgcggcaaacatttttttggtacaatgcctccataggcgataacgagtccgaccaggcctccggcgcgtacatcttcaggccaaaccagcagaaacccctccccgtcagcaggtgggcgcaaatccacttggtgaaaaccccattggtgcaagaggtgcatcagaattttagcgcctggtgtagccaagttgtgcggttgtatccaggtcaacggcatctggagctggaatggtcggtgggcccaatacccgtcggcgatacctgggggaaggaagtcatctctcgattcgatacccccctggaaacaaaagggcgtttttatactgactcaaacgggagagagatactcgaacgacggcgtgattatcgtcctacatggaaacttaatcagaccgagccagtggcgggcaattattatcccgtgaataccaggatttacattacggacgggaacatgcagctgactgtacttaccgaccgatctcagggcggttcatcacttcgtgacggcagcctggaactcatggttcacagaaggctgctaaaggacgatggccggggggtgtcggagcctttgatggaaaacgggtcaggagcatgggtacgcgggaggcacctcgtgttgctggacacagcgcaggcagcagccgctggacaccgccttctggctgagcaggaggtgctcgccccgcaggtcgtgttggctcctggaggtggcgcagcatataacttgggcgcgccccctaggacccaattttcgggcctccgaagagatcttcccccgtctgttcacttgctgactctggcaagttggggacctgaaatggttctcttacgactggagcaccagttcgctgtgggcgaggactcaggtagaaacctgtccgctcccgtgactctcaacctaagggatctgtttagcacatttactattacgcgtttgcaggagactacactggtggccaaccagctgagagaagctgcaagccggctgaagtggactacaaatactggccccaccccacaccagactccctatcagctggatcctgccaatatcacgctggaacctatggagataagaacgtttcttgcatcagtccaatggaaagaggttgacgga

SEQ ID NO: 16527 - DNA, 3033 bp, synthetic construct
  misc_feature 1..3033: note = source = /note="Description of Artificial Sequence: Synthetic coding sequence"
  source 1..3033: mol_type = other DNA
atgggagcatacgcgagagccagcggtgtgtgtgcacgtggatgcctcgattcggcgggaccctggaccatgtcgagggcactccgcccccctctgccaccactttgcttctttctgcttctccttgcagcagcaggagcaagagcaggcggttacgagacttgtccaactgtgcagccgaacatgcttaatgtgcatcttctgccccacactcatgatgacgtcggatggctgaaaactgtggatcagtacttttatggaattaagaatgatattcagcatgccggtgtgcagtatatccttgattcggtcatctcggcactgcttgcagatccgacccgacgcttcatttacgtggaaattgcctttttctctcgttggtggcatcagcaaactaatgcaactcaagaggtggtccgggaccttgtgaggcaagggcggctggaattcgcaaacgggggctgggtgatgaacgatgaagccgcaacccattacggtgccattgtcgatcaaatgaccctgggacttaggtttcttgaagatacttttggcaacgacggccgcccacgcgtggcgtggcatatcgatcctttcggacattccagggaacaagcaagcctttttgctcagatgggttttgacgggtttttctttggacgccttgactaccaggataagtgggtccgcatgcaaaagctggagatggaacaggtctggcgggcctccacctcccttaaacctcctaccgcagatctctttaccggggtccttccaaacggttacaaccccccacgaaatctttgttgggatgtgctgtgtgtggatcagcctcttgtcgaggacccccggtcgccagagtacaacgcaaaggaactggtggattacttcttgaacgttgccactgctcagggcaggtactacaggacgaaccacactgtgatgactatgggatccgatttccagtacgagaatgctaacatgtggtttaagaacttggataagctcattcggctggtgaacgcccaacaagccaaaggatcatcagtgcatgtcctctactcgaccccagcctgttacctctgggaacttaacaaggccaatcttacctggtccgtgaaacacgacgatttcttcccatacgccgatgggcctcaccaattttggactgggtacttctcgtcacggccagcacttaagaggtacgagcgcctgtcatacaacttcttgcaggtgtgtaaccaacttgaagcattggtgggccttgccgcaaacgtcggaccctacgggtcgggtgattcagcacctctgaacgaggcgatggccgtgctccagcaccatgacgcagtgagcggaacctcgcggcaacatgtggccaacgactacgcgcgacagctcgcagcaggctggggcccttgtgaagtgctgctgtcgaatgcactggcaaggctgcggggttttaaggatcactttaccttctgtcagcagctgaacatatccatctgccctctgtcccagacggcagcacggtttcaggtcattgtgtacaacccccttggccggaaagtgaactggatggtgcgcctcccagtgagcgaaggggtctttgtggtgaaggatcccaacggtagaactgttcccagcgatgtcgtgatctttcccagcagcgactcacaagcacatccccccgagctcctgtttagcgcatccctgcctgccctgggattttccacttactccgtggcacaagtgccacgatggaagccccaagcaagagcaccacaaccaattcccagacgttcatggagtcctgcacttactatagaaaacgagcatattagggcaacgtttgatcctgatactggccttcttatggaaatcatgaatatgaaccagcaacttcttcttcctgtgagacagaccttcttctggtacaatgcctccattggtgataatgaatcggatcaagcatccggagcgtacatcttccgccccaaccagcagaagccgttgcctgtgtccagatgggcacaaattcacctggtgaaaactccactcgtgcaagaagtccatcagaatttcagcgcatggtgttcacaagtggtcaggctgtacccaggtcagaggcatctggagttggagtggtcggtgggtccaattcctgtcggagatacctggggaaaggaagtgatctcgcgctttgatacccccctcgaaactaaggggcgattctacaccgactcgaacggcagagaaatcctggaacgcaggcgcgattacagaccaacttggaagttgaatcaaactgaacctgtggcaggtaactactacccggttaacacgaggatttacatcaccgatggtaacatgcagctgaccgtcctgaccgatcgatcgcagggtggtagctccctgcgtgatggttccctcgagctgatggtccatcgtcggctgctgaaggatgatgggcggggagtgtcggaaccgctgatggagaacggttcaggagcatgggtgagagggcgccacctggtgttgttggacaccgcacaggccgcagcagctgggcatagactcttggcagagcaggaggtcctcgcacctcaagtggtgctggcgcccgggggaggggcagcatacaaccttggggcgcctccacgcactcagttcagcggcctgcgtagagatctcccaccttcggtgcacctcttgaccctcgcttcatggggtccagaaatggtcctcctccggctggagcatcaatttgcggtgggggaggactcgggccggaacctttcggcacctgtgactctcaatctgagagatctgttttcgacctttactatcactaggcttcaagaaactactcttgtcgccaaccagctgcgggaggcagcttccagactcaaatggaccactaataccggtcccacgccgcatcagactccttaccaactggatcctgcaaatatcacccttgagccaatggaaattagaaccttcctcgcttcggtgcaatggaaagaggtagatggt

SEQ ID NO: 16528 - DNA, 3033 bp, synthetic construct
  misc_feature 1..3033: note = source = /note="Description of Artificial Sequence: Synthetic coding sequence"
  source 1..3033: mol_type = other DNA
atgggagcctacgcccgcgccagcggagtgtgcgcgcggggctgcttggatagtgcaggcccctggactatgagtcgggcgctgcggccacccctaccaccactctgcttctttctcctcctactggcagctgcaggcgcaagggccggtggttatgagacatgtccaacagttcagcccaacatgcttaatgtgcacctgctgccccatacacatgacgacgttggctggctcaagaccgtggatcagtacttctacgggatcaagaatgatatacagcacgccggcgtgcagtacatactggactccgtgatctctgccttgcttgcggatcccacacgcagattcatctatgttgagattgcctttttctcccgatggtggcatcagcagacaaacgctactcaggaggttgtgcgagacctggtgcggcaaggacggctggagtttgcgaacggaggatgggtgatgaatgacgaagcagccacccactacggcgccatcgttgatcagatgactctcggcctgagattccttgaggacacatttggaaacgatggtcggcctcgggtcgcctggcacatcgatccattcggacactcccgggaacaggcaagcctgtttgcccaaatgggcttcgatggattttttttcgggaggttggattatcaggacaagtgggtacgaatgcagaagttggagatggagcaggtctggcgggcctcgacatcactgaaacctcctaccgcagacctcttcactggggtgctgccaaatggatataatcctccgcgcaatctgtgctgggatgtgctctgtgtggaccaacctctagtggaggatcctaggagccccgagtataatgccaaagaactggtggactattttctcaacgtggccactgcccagggtcgctactataggacaaaccatactgtcatgactatgggatctgactttcagtatgagaacgccaacatgtggttcaaaaatctggataaactgattcgcttggtgaacgcccaacaggctaaaggcagtagtgttcatgtcttgtactccacccctgcatgttatctgtgggagctcaataaagcaaacctaacttggtctgtgaagcatgatgacttttttccatacgccgacggcccgcatcagttctggacaggttatttcagctcaaggccggccctgaagcggtatgaacgtctgtcgtacaatttcctccaagtgtgcaaccagctcgaagctttggtgggattggccgctaacgtcgggccgtacggttccggtgattccgctcccctgaacgaggccatggctgttctccagcatcatgatgccgtgtctgggacatcacgacagcacgtggctaatgactatgcacgacagttagccgccggttggggcccctgcgaggtcctgctcagtaacgcactggccaggctcagaggttttaaggatcactttaccttctgtcagcagcttaacatatcaatctgccctctaagtcagacagctgcccgcttccaagtcattgtgtacaacccgcttggacgcaaggtgaactggatggtcagattgcccgtgtccgagggagtcttcgtagttaaggatccaaacggacggaccgtcccctctgacgtcgtgatctttccctccagcgacagtcaggcccaccctcccgaactattgttctcagctagtttgcccgctttagggtttagcacttactcggtcgcgcaggtgccccgctggaaaccgcaggctcgggcccctcagcccataccacgccgcagttggtccccggcgttaaccatcgaaaatgagcacatcagagctacattcgaccctgacactggccttcttatggaaattatgaatatgaatcagcaactgctacttcctgtgagacaaacgttcttttggtacaacgcgtctatcggggataatgaaagtgatcaagccagcggagcttatatttttcgacccaaccaacaaaagcctctgcccgtctcccgttgggcccagatccatctcgtgaagacgcccctggtgcaggaagttcaccaaaatttctcagcctggtgttcacaagtggttaggctgtaccccgggcagagacacctggaattagagtggagtgtgggccccatccctgtgggggacacctgggggaaagaggtgatcagcagatttgacactcctcttgagacgaaaggccgtttttacaccgactcaaacgggcgcgagatattagagaggaggcgggattatcggccgacctggaagttaaatcaaaccgaacccgtggcgggaaactattacccagtaaacactcggatatatataaccgacgggaacatgcaacttacagtcctgactgatagatctcaaggggggtcaagcctgagagatggatctcttgagctgatggtgcaccgccggctgctgaaagacgacggacgtggcgtcagtgagccactcatggaaaatggcagcggggcctgggttagaggaaggcaccttgtgcttctggacacagctcaggcggccgctgcaggccatagattgctggctgaacaggaagtgctggctcctcaggttgttctcgcccccggcggaggagccgcctacaacctcggcgcgccacctcgcacccagttcagcggcttgcggcgggacttaccacccagtgttcatttgctaacgttggcttcttggggaccagagatggtcctgctgaggttggaacatcagtttgccgtgggggaagatagcgggagaaatctaagcgcaccagtcacgctcaacttgcgggatctgttctctacatttaccatcactcgtctgcaagaaacgacattggtcgcaaatcagctgcgcgaagccgcctcgcgtctaaagtggaccactaacactggtccaacaccacaccagactccatatcagctcgaccctgccaacatcactctggaaccgatggaaatccgcacttttctggccagcgtccagtggaaagaagtcgatggc

SEQ ID NO: 16529 - DNA, 3033 bp, synthetic construct
  misc_feature 1..3033: note = source = /note="Description of Artificial Sequence: Synthetic coding sequence"
  source 1..3033: mol_type = other DNA
atgggagcctatgctagagcctctggggtgtgtgctcggggctgccttgactccgccggtccttggaccatgtcccgcgcgcttcgacctccactccctcccctttgcttcttccttcttctcctcgcagccgccggtgccagggccggcggatacgagacgtgtccgaccgtacaaccaaacatgctgaatgtgcatctgcttccacatactcatgatgacgtgggctggctgaagacagtggatcagtacttctatggcatcaaaaacgatatccaacacgcgggcgtgcagtatattttggacagcgtaatcagtgctctgctagctgatccgacgagacggtttatctacgtcgaaatcgcttttttctccagatggtggcatcagcaaacaaacgctacgcaggaggtagtgcgtgacctcgtccgtcagggcaggcttgaattcgccaacggcgggtgggttatgaacgacgaggcagccacccactacggagccatcgttgatcagatgacactgggtcttcgcttcctcgaggatacgttcggtaatgacggcagaccccgagtcgcctggcacattgaccctttcggccacagccgtgagcaggcctccctgttcgctcagatggggttcgacgggttcttcttcggccgcctcgactaccaggacaaatgggtgcgaatgcaaaagctcgagatggaacaggtgtggcgggccagcacgagtttgaagccaccaacagcagacttgtttacaggggtgctccctaatggatacaatcccccgcgtaacctatgctgggatgtgctgtgtgtcgaccagcctctggtcgaagacccccggagcccggagtataacgcgaaggaactggtggactatttcctcaacgtggccaccgcccagggccgttactaccggacaaaccacactgtgatgacgatggggtcagatttccagtacgagaacgccaatatgtggtttaaaaatctggataagctcataaggttggtcaatgctcaacaggcaaaaggaagctccgtgcatgtcctatactctacccctgcctgctacctgtgggagctcaataaagcaaacctgacgtggtccgtgaagcacgacgacttcttcccctatgctgacgggccccatcagttctggacaggctatttttcttcccgtccggcactgaaaagatacgagcgactttcctacaatttcctacaggtttgtaaccagctggaagcactggtgggacttgccgctaatgtagggccctatgggtccggcgatagcgcaccactcaacgaagccatggctgtccttcagcaccatgatgcagtgtcagggacatcccggcagcatgtggcaaatgattacgccaggcagctggcagccggctggggtccttgtgaagtgctacttagtaatgccctagctaggctcagggggtttaaagaccacttcaccttttgccagcagctcaatatctccatttgtcctctgtcccagaccgcagcgaggttccaggttattgtctataatcctctgggccgcaaagtaaactggatggtccggctgccggtgagcgaaggagtgtttgtggtgaaggacccaaacggtcgcaccgtgccttcagatgtggtgatcttcccctcatcagattcacaggcacatcccccagaactcttgttctccgccagcctccctgctctcggattcagcacttactctgttgcacaagttccacgctggaagccacaagcccgagcaccccagccaatcccaaggcgaagctggtccccagcattaaccatcgaaaatgagcacatacgggctacgttcgaccccgatacgggactgctgatggagattatgaacatgaatcagcagctattgcttccagttcgtcaaaccttcttctggtacaacgccagcattggtgataacgagtccgatcaggcaagcggggcttatattttccgacctaatcagcagaaacctttaccagtttcccgttgggcccaaattcatctggtcaaaacgcccctggtgcaggaggtgcaccagaatttctctgcctggtgttctcaggtggtaagattgtaccctggacagaggcacttggaactggaatggtcagtgggtccaatccccgtaggcgatacatggggcaaagaagtgatctctcggttcgacacccctctggaaacaaaggggcgcttttatacagacagcaatggtcgggagatcctggaacgcaggagagactaccgaccaacttggaaactgaaccaaaccgagcccgtggcaggtaattactacccggtaaacactaggatctacataacagatggtaacatgcagctcacggtcttaacggatcgttctcagggaggctcaagcctgagggacgggagtcttgagctgatggttcaccgcaggctgctgaaggatgatgggcgtggcgtgagcgagcccctgatggagaacgggtcaggcgcctgggtgaggggccgacacctggtgttgctggacacggcccaggccgccgccgctggacatcggctgctcgctgagcaggaggttctggctccccaggtcgtattggcccctggtggtggagcagcttacaatttgggcgctccccccaggacacagttttccgggctgcggagggacttaccgccaagtgtacatcttctgacgttggcctcctggggtcccgagatggtcttactacgcctagaacatcagttcgctgtgggggaggactccggtaggaatctgtcagccccagtgaccctgaatctgcgcgacctgttttccactttcacaattacccggctgcaggagactaccctggtggccaaccagctcagagaagctgcttccaggctcaaatggaccactaatacgggacccaccccacaccagacaccctaccaactagatcctgctaatataaccctggaaccaatggaaataagaacattcttagcctctgtgcagtggaaggaggtagacggg

SEQ ID NO: 16530 - DNA, 3033 bp, synthetic construct
  misc_feature 1..3033: note = source = /note="Description of Artificial Sequence: Synthetic coding sequence"
  source 1..3033: mol_type = other DNA
atgggcgcatacgctcgggcaagcggcgtgtgcgcaagaggctgcctcgactcggcagggccctggacgatgagccgcgccctgagaccacctctaccacccctatgtttttttctcttgttgctggcagctgcaggcgcccgtgcgggtggctacgagacctgtccaactgtgcaacctaatatgctgaacgtgcacctgctccctcacacgcacgatgatgttggatggctgaagacagtggaccaatacttttacggaatcaagaatgacatccagcatgccggcgtccagtacatcttggatagcgttatttccgcactgctggccgacccaactcgacggttcatttacgtcgagattgcctttttcagtagatggtggcaccagcaaaccaatgctactcaggaagtggtgcgcgacctggtccgccaaggcaggctggagtttgccaatggtggctgggtcatgaatgacgaggccgccactcactacggcgcaatcgtcgaccagatgactctcggcctgcgattcttggaggatacatttggcaatgatggccgcccaagagtcgcttggcacattgaccctttcggccactctcgggaacaggctagcctgttcgcccagatgggatttgacggattcttcttcggtcgtctggattaccaggataagtgggtgaggatgcaaaagttggagatggagcaggtgtggagagcctctacctcactgaaaccccctacagctgatctcttcactggcgtgctccctaacggttacaatcctcccagaaatttatgttgggacgtgctctgcgtagatcaacccctggtcgaggatccacgaagccctgaatataacgccaaggagctcgtggattactttctgaatgtggcgacagctcagggccgctactatcgcacaaatcacacggtgatgaccatgggatccgactttcagtacgaaaatgccaacatgtggttcaagaacctagataagctgatccggctggtgaacgcccagcaggccaagggctcctcagtacatgttctctatagcactccagcctgctacttatgggaacttaataaagccaacctgacttggtcggtgaagcacgatgatttcttcccatacgccgatggacctcaccagttctggacagggtattttagtagccgccccgccttgaaacgttacgagaggctgagctataatttcctgcaagtgtgcaatcagcttgaggctctggtcggcttggctgccaatgtcggaccctacggctctggagactccgccccgttaaacgaggccatggccgtcctgcagcaccacgacgcagtgtcgggcacgtcccgacaacatgtggctaatgattacgctaggcagctcgctgcagggtggggcccctgcgaggtgttactttctaacgctctagctcgtttacgaggcttcaaagaccacttcacgttttgccagcagttgaacattagcatctgcccccttagtcagacggccgcccggttccaagtaatagtttacaatcccctgggccgaaaggtaaattggatggtgcgactccccgtttcagaaggagtttttgtggtcaaggatccaaacggccgcactgtaccttcagacgtcgttatttttccgagctccgacagccaagctcatccaccagaactcctgttctctgccagcctgcctgccctaggattctccacatactctgtggcgcaggtgccaaggtggaagccacaggctcgcgctccacagcccatcccccgaagatcctggagccccgcgctcaccatcgaaaatgagcacattagagcaacttttgaccccgatacaggcttattgatggagatcatgaacatgaatcagcagttactgctcccagtgaggcagactttcttttggtacaacgcctccatcggggacaatgagtcagatcaggcctccggagcctatattttccggccaaaccagcaaaaacctctgccagtaagtcgctgggcccagatccatctcgtgaagacaccactagtgcaggaggtccaccagaacttctccgcatggtgtagccaagtggtccggctataccctgggcagcgccacttggaactggaatggtccgtagggcctatccctgttggtgatacttggggcaaagaggtgatctctaggttcgacaccccactagagacgaaaggcagattctacactgacagcaacggccgcgaaatccttgaacgcaggcgggactatcggccaacgtggaagctgaatcaaacagaaccagtagccggaaactactaccccgtaaatacaagaatatacattactgacggaaatatgcagttgaccgtcctgaccgatcgctcccaagggggctcatctctaagggacggctctctggaacttatggtccaccggagactgctaaaagacgatggtaggggggtgtccgagccattaatggagaacggcagcggagcctgggtgagggggcggcaccttgtattgctagacaccgcgcaggccgctgctgccggccaccggctgctggccgaacaggaagttttagctccacaggtagtcctggcccctggaggcggggcggcttacaatctgggagctccaccgagaacacagttttccggactgagacgagatctccctccaagtgtgcaccttctcacgctggcgtcgtggggaccggagatggtgctactcagactggagcaccagtttgccgtgggtgaagatagcggcagaaacctatccgcccccgtgacgctgaacctgagggacttattttccactttcactataacccgtctgcaggagactacgctagtggctaatcagctgagggaagcagcttcccgactgaaatggactaccaacacgggtcctactccacatcagaccccataccaattagatccagctaatattacgctcgagcccatggagattcgaaccttccttgcctcagtgcaatggaaggaagtggatggg

SEQ ID NO: 16531 - DNA, 3033 bp, synthetic construct
  misc_feature 1..3033: note = source = /note="Description of Artificial Sequence: Synthetic coding sequence"
  source 1..3033: mol_type = other DNA
atgggagcctatgctcgggcaagcggggtctgtgcaagaggctgccttgattctgcaggaccatggacaatgtcccgggctctgcgccctccactccctcccctttgtttttttctcttgctgttggccgccgcaggggctcgggctggcggctatgaaacatgtccaactgtgcagccaaacatgcttaacgtccacctcttgccacacactcacgatgatgtgggatggctgaagaccgtggaccaatacttttatgggattaagaatgacatccagcacgcaggcgtccagtatatcttagactctgtgatctcagcactccttgcagaccctacaaggcgatttatttacgtggaaatagcatttttctctcgctggtggcatcaacaaaccaacgcaacacaagaagtggtgagagatctcgttcgccagggcagacttgaattcgcaaacggcggatgggtaatgaacgatgaggcagcaacccactacggagctattgtcgatcagatgaccctggggctgaggttccttgaagacacgtttggaaacgatggtagacccagggtcgcctggcatatcgacccctttggccattcacgcgaacaggcctctctgtttgcccaaatgggatttgacgggttttttttcggtaggctggactatcaagacaagtgggtccgtatgcagaaattggagatggaacaggtgtggagagcaagtacctcgttaaagcctcctaccgctgacctttttactggagtgctgcctaatggatataatcctccaaggaacctttgttgggatgtcctgtgcgtcgatcagcctttggtcgaagatcctagaagccccgagtacaacgcaaaggaattggtcgattacttcctcaacgttgcaacggcccaggggcgttactacagaaccaaccacaccgtcatgaccatgggctctgacttccagtacgaaaatgcaaacatgtggtttaagaatctcgataagctcatcaggctggtcaacgcacagcaggctaaaggctccagcgtccatgtcctatactcaacccccgcatgctatctgtgggaactcaacaaggcaaatctgacatggtctgtcaagcatgatgacttcttcccttacgctgacggccctcaccaattctggactggatactttagcagcagaccagctttgaagagatacgagagactgagctataacttcttacaggtatgtaatcagttggaggctctagttgggctcgctgccaatgtcgggccttacgggtcaggagatagtgccccccttaatgaagcgatggctgtccttcaacatcacgatgccgtcagtggtacctcccggcagcatgtggctaacgactacgctcgccaactggcagctggctggggcccttgcgaggtcctcctgagtaacgctcttgcaaggctgaggggatttaaagaccattttaccttctgccaacaattgaatattagcatttgcccattaagtcagactgccgcaagatttcaggtgatcgtgtacaatccactgggccgtaaagtgaactggatggttcggcttcccgtaagcgagggcgtctttgtcgtcaaggaccccaacggccgcactgttccctctgatgtagtgatttttcccagtagcgacagccaagctcacccccccgagctccttttctcagcttcactgccagcactgggcttcagcacttacagcgtagcccaagtcccccgctggaagcctcaagcaagggctccgcagccaataccgaggaggtcatggtctcctgcactcacaatcgaaaacgagcatattcgggcaacctttgatcccgacacagggctcctgatggagattatgaacatgaatcagcagctcctgctgcctgtgaggcagacctttttttggtacaacgctagcatcggagacaatgaatctgatcaggctagtggagcctacattttcagacctaaccaacagaaaccactccccgtgagcagatgggcccagatccatttggtgaagacgccactcgtccaagaggtgcaccagaacttttcagcttggtgtagccaggtagtgcgactatacccaggccagcgccacttggaattagaatggtctgtcggccctatcccagtcggcgatacttggggaaaggaggtaattagccggttcgatacccccttagagacaaaaggaagattttacaccgatagcaacggtagagaaatcctggagcgccggagggattacagacccacttggaaactgaatcaaactgaacctgtcgccggtaattactaccctgtgaacaccaggatctatattacagatggaaatatgcagttgactgtgctcacagatcgctcacagggcggaagctctttgcgggatggaagccttgaactgatggttcaccgacgtctgctcaaagacgatggccgcggcgtgagcgagccattgatggaaaatggctcaggggcatgggtgagaggccgccacttagtcctgctcgacaccgcgcaagctgccgcagctggtcatcgactgctggcggagcaggaggtcctggctccacaggtggtactggctccaggcgggggggctgcctataatctgggagcacccccgcggacacagttttctggactccgcagggatttgcccccatccgtccatttgcttacgcttgcgagctggggacccgaaatggtgctgctgcggctcgagcaccagtttgcagtgggggaggactctgggcgcaacttatctgccccagttactcttaacctgcgggacctgttttcgacattcacaatcacaaggttgcaggagactacccttgtggcaaaccagctgcgcgaggcagcctctaggttaaaatggaccactaatacaggcccaaccccccaccagacaccttaccagctcgatccggctaacattaccctagaacctatggagattagaacattcttggctagcgtgcagtggaaggaggtcgacggc

SEQ ID NO: 16532 - DNA, 3033 bp, synthetic construct
  misc_feature 1..3033: note = source = /note="Description of Artificial Sequence: Synthetic coding sequence"
  source 1..3033: mol_type = other DNA
atgggagcgtacgcccgtgcctctggagtgtgcgctaggggatgtctcgacagcgcaggcccttggacaatgagtagggccctccggccaccgcttccaccgctatgtttctttcttctgcttctggctgccgctggcgcccgtgccggcggatatgagacttgtcccaccgtccagcctaacatgctgaatgtgcatctgctgccccatactcacgatgacgtaggctggctgaagaccgtggaccagtacttttatgggatcaagaatgacattcagcacgcgggagtgcagtatattttggattcagttatctctgcactgctggctgatcccactaggcgcttcatttatgtggaaatcgccttctttagccggtggtggcaccagcagacgaacgcaacgcaggaggtggtgcgcgatctggttcgccagggtagactggagttcgctaatggcgggtgggttatgaacgacgaagctgctacgcactacggagcaatagtcgaccagatgactctaggcctgcggttcctagaggatacatttggtaacgacgggagacctcgcgtggcctggcacatagatccattcggccactcccgagagcaggcctctctgtttgcccagatgggcttcgatgggtttttcttcggacgactggattaccaggacaaatgggtgaggatgcagaagctggaaatggaacaggtgtggagagcttcaacatcgttaaaaccccctactgctgacctgtttacgggagttctgcccaatggatataatccaccacggaacctttgttgggacgtcctttgtgtcgaccagcccttagtggaggatcctaggagtccggaatataatgctaaggagctggtggactacttcctgaatgttgccacagcccaggggcgctattaccggaccaatcatacagtaatgaccatgggcagcgatttccagtacgaaaacgcaaatatgtggtttaaaaacctggacaaattgattcgattggtgaatgctcaacaagccaaggggagttcagtgcacgtcctgtactctaccccggcctgttatctctgggaactgaacaaggctaacctgacatggtctgtcaaacacgacgattttttcccctatgctgatggcccccatcagttttggaccggttacttctcctcccggcccgctttaaaacggtatgaaagactgtcgtataatttcctccaggtctgcaatcagctggaggcgctggtgggcttggcagccaatgtgggtccttacggcagcggcgatagcgccccattgaacgaggcaatggccgtgttacagcatcacgatgccgtgagtggtaccagcaggcagcatgtagctaacgattatgcgcggcaacttgcggccggatggggtccgtgtgaagtgctgctgtccaacgccctggcacgcttgcgggggttcaaagaccactttacgttctgccagcagctgaatatcagcatatgccccctgagccagaccgccgctcggtttcaggttatcgtctataaccctctaggaaggaaagtaaattggatggtgaggctaccggtatccgagggagtgtttgtcgtgaaggatcctaatggcaggaccgtcccaagtgatgtcgtaatcttcccttcttccgactcgcaggcccatccacccgagctgttattttccgcgtcgctaccagctctcggtttctctacatacagcgtggcccaggttcctcggtggaagccacaggcaagagcgcctcagcctatacctcggagatcttggtcccccgcccttacaatcgagaatgagcacattcgggctactttcgacccagataccggccttctgatggagattatgaacatgaaccagcagttactgctgccagtgcgccagaccttcttttggtataatgccagcatcggtgacaacgagtctgaccaagccagcggcgcatacatcttccggccgaatcagcagaagcccttgcctgtctccagatgggctcaaatacacttggtgaagacccctttggtgcaagaggtccaccagaatttctccgcatggtgcagccaagtcgtccgactctacccagggcagcggcacctcgaacttgagtggagcgtgggtcccatccctgtgggagacacgtggggaaaggaggtcatctcccggttcgacacacctctggaaacgaagggccgtttttacaccgatagcaatggtcgggaaattctggagcggaggcgggactacagacctacctggaaacttaatcagacagagccagtggccggtaattactaccccgttaacacaaggatatacatcaccgacggtaacatgcagttgactgtgctcacggacaggagccaaggaggcagctccctgcgggacgggagccttgaactcatggtgcaccgtcggctgctgaaagacgatggtcgcggggtcagtgagccccttatggagaatgggagcggcgcttgggtccgcggcaggcatctcgtcttgctggataccgcccaagcagcggcggctggccaccggctgctggcagaacaggaggtcctcgcccctcaggttgtgctggctcccggcggtggagctgcctacaacctcggcgcccccccgcggacgcagttctcgggcctgaggcgcgacttgccacctagtgttcacttactgaccctcgcatcctggggcccggagatggtgctactgcggctagagcatcagttcgccgtgggagaagactcaggcaggaatctctctgcccccgtcacactcaatctcagggatttattctccacatttaccattactcggctgcaggaaaccacactggtcgcaaaccaattgcgggaagccgcgtccagattgaaatggaccaccaacaccggccccaccccgcatcagaccccctatcagcttgatcccgcaaacattacgcttgaaccaatggagattaggaccttcttggcatccgtgcagtggaaggaggtggacggc

SEQ ID NO: 16533 - DNA, 3033 bp, synthetic construct
  misc_feature 1..3033: note = source = /note="Description of Artificial Sequence: Synthetic coding sequence"
  source 1..3033: mol_type = other DNA
atgggtgcctacgcacgtgcttcgggtgtgtgcgcgagaggctgtttggattccgccggaccatggaccatgagcagagctctccggccccctcttccgcctttgtgcttcttcctgctcctgctggcagccgctggagcccgggcgggaggctacgagacttgtccgacggtccagcccaatatgttgaacgtgcacctgctgcctcatactcatgacgatgtcggctggctgaaaaccgtggatcagtacttctacggaatcaagaatgacattcaacatgcaggcgtgcagtacatcctggactccgtgatatcggccctcctggcagaccccactcgcaggttcatctacgtcgaaattgcgtttttctcgaggtggtggcatcagcagacgaacgccacccaggaagtggtccgcgacctggtgcgacagggccgcctcgagttcgccaacgggggctgggtgatgaacgacgaggcggccacccactacggagctatcgtggatcagatgactctcggactccgcttcttggaagataccttcgggaacgatggacgcccgcgcgttgcctggcacatcgatccttttggtcattcacgcgaacaggcgagcctgttcgcgcaaatgggtttcgacggtttcttctttggcaggctcgactatcaagacaagtgggttagaatgcaaaaactcgagatggagcaggtctggagggcctcgacttccctgaagccgccaactgccgacctcttcactggcgtgttgcccaacggatacaacccacctagaaatctctgctgggacgtgctgtgcgtggatcagccgctggtcgaagatccaagatccccggaatacaatgcgaaggaattggtcgactacttcttgaacgttgctactgcacaaggacgttactacaggactaaccacactgtcatgaccatgggatccgacttccagtatgagaacgccaacatgtggttcaagaacttggacaaactgatccgcctcgttaacgcccagcaagccaagggctcaagcgtgcacgtcctgtactcaactccagcatgttacctgtgggaactgaacaaagctaacctcacctggagcgtgaaacacgacgacttcttcccatacgcagatgggccccatcagttctggaccggctacttctcgtcgcggcctgctctgaagcggtacgaacgcctgagctataactttctccaggtgtgcaaccagcttgaggctctcgtgggactggccgcaaatgtggggccttacggaagcggagactccgcaccgctgaacgaggccatggccgtcctgcagcaccatgacgcggtgagcggaactagtcgccaacacgtcgccaatgactacgctaggcagctggctgccggatggggcccttgcgaagtgcttctgtcaaatgcactggccagacttagagggtttaaagaccacttcaccttctgccagcagctgaacatctctatctgccctctgtcgcagaccgcggcgcggttccaagtcatcgtgtacaatccgctgggacggaaggtcaattggatggtgcggctgccggtgtcggaaggcgtctttgttgtcaaggatcctaacggcagaacggtgccaagcgatgtggtgattttcccgagtagtgactcgcaggctcaccctcccgagctcttgttctcggctagcctgccggcgctgggtttctcaacctactccgtggcccaggtgcctaggtggaaaccgcaggcccgcgccccgcaacctattccaaggcggtcctggtcccctgccctgactatcgaaaacgaacatatcagggcaacttttgacccagacaccggactgctgatggaaatcatgaatatgaaccagcaactcttgctgcctgtgcgccaaactttcttttggtacaacgccagcatcggagataatgaatcagaccaggccagcggagcttacatctttagaccgaatcagcagaagcctttgccggtgtcgcggtgggctcagatccatctggtaaagacgccgctggtgcaggaggtgcatcaaaacttttcagcgtggtgtagtcaagtcgtccgcctctaccctgggcaacgccacctcgaactcgaatggtccgtggggccaataccagtgggagatacctggggcaaggaggtcatctcacggtttgatactccgctggagacgaaggggagattctatactgattcgaacggacgcgaaatcctcgagcgtcgccgggactaccggcctacctggaaacttaatcagaccgaaccggtggcggggaactactatccggtcaatacccggatctacatcaccgatgggaacatgcagctcaccgttcttacggatcggtcccagggaggttcctctctgagagacggaagcctggagctgatggtgcaccgccgcttgctgaaagatgacggcagaggtgtcagcgaacctctgatggagaacggttccggagcatgggtccggggccgacacctggtgctcctggacaccgctcaggccgccgccgcgggacacagacttctggcggaacaagaagtccttgctcctcaagtggtgctggcgcctgggggcggagctgcgtacaatttgggagcacccccgcggactcaattttctggacttcgccgcgacctgccgccgtcggtgcatcttcttactttggcttcgtggggacctgagatggtgctccttagactggagcaccaattcgctgtgggcgaggactcagggaggaatctgtccgcgccggtcactctcaaccttcgcgacctgttctcgaccttcacgattactcggctgcaagaaaccactctcgtcgccaaccagctgagagaggcggcatcgcgtctgaagtggactacgaataccggaccgaccccgcaccagactccgtaccaactcgaccccgccaacatcaccctcgaaccaatggagatccggacctttctggcctccgtgcaatggaaagaggtcgatgga

SEQ ID NO: 16534 - DNA, 3033 bp, synthetic construct
  misc_feature 1..3033: note = source = /note="Description of Artificial Sequence: Synthetic coding sequence"
  source 1..3033: mol_type = other DNA
atgggtgcttacgctcgagcgtcgggggtttgcgcgcgtggatgcctagatagcgcagggccatggactatgtcccgcgccttgcgtcccccgttaccccccctgtgcttcttcttgctcctgctggccgcagccggcgcacgggcaggtggttacgagacttgccccaccgtgcagcctaatatgctgaatgtgcacctcctgccccatacccacgacgacgtcggatggttaaagaccgttgaccagtatttttatggtataaaaaacgacattcagcatgccggggtccagtatattctggattctgttatctctgcactgctggccgatccgacacggcgctttatctacgtcgagattgctttcttctccagatggtggcaccagcaaactaatgctactcaagaagtggtacgcgaccttgtgcgacagggacgacttgaatttgccaacgggggttgggtgatgaacgatgaagctgctacacactatggcgcaatcgttgaccagatgaccctgggcctgaggttccttgaggacaccttcggcaacgacggacggccccgtgtcgcttggcacatagatccattcggccactctcgcgagcaggcttccctatttgcccagatgggctttgatggcttttttttcgggagactggactaccaggataagtgggtcagaatgcagaagctggagatggagcaagtgtggagagccagcacgtccctgaagccgcccacagccgatctgttcacgggggtgctcccgaacgggtacaacccccctcggaatctgtgctgggacgtgctgtgtgttgaccagcctttagttgaggacccaagatcccctgaatacaacgccaaggagctggttgactactttcttaacgtcgctaccgctcaagggcggtattatcgaactaatcatacggtcatgactatgggatctgactttcagtatgaaaacgcgaacatgtggtttaagaatttagacaagctcattaggctggtgaatgcccagcaggccaagggctcctcagtgcatgtcctgtactcaactcctgcctgttatctgtgggagctaaataaagccaatctgacctggtctgtaaaacacgacgatttttttccctatgccgacgggccacaccagttctggactggttatttcagttcacggcctgccctgaaaagatatgagagactcagctacaattttctacaggtttgcaaccaacttgaagccttggttggtctggcggcaaacgtcggaccctacggaagcggcgattccgctccactgaatgaggcgatggcagttctgcaacaccatgacgctgtgagtggtacgtctagacagcatgttgccaacgactatgccaggcagttagccgccggttggggaccctgcgaggtcctgctctctaatgcactggcaagacttcgcggatttaaggatcacttcaccttctgccaacaattgaatatctctatttgccccctgagccagaccgccgcacgcttccaagtcattgtctataacccactgggcaggaaagtgaactggatggtccggcttcccgtaagtgaaggcgtctttgtggtcaaggatccgaatggccggacggtgccttctgacgttgtcatttttccttcctccgattcacaggcgcacccaccagagcttttattctcagcgtcactgccagccctgggattctctacctactccgttgctcaggtccccaggtggaaaccccaggctagggccccgcagcctatcccgcgccggtcgtggagtcctgccctcaccatcgaaaacgaacatatccgagctacctttgaccctgacactgggctacttatggagatcatgaatatgaaccaacagcttctgctgcctgtgaggcaaacgttcttttggtacaacgcctctataggtgacaatgagagcgaccaggcgagtggtgcatatatcttcagacctaatcagcagaagccactccccgtgtcccgatgggctcaaatccatctggtgaagaccccgcttgtacaggaagtgcatcagaacttttctgcatggtgctcacaggtcgtcaggctttatcccggccaaagacatctggaactggagtggtccgtgggccccattccggttggcgatacatggggtaaggaagtcattagccgctttgacacgccattggagactaaaggtagattctacacggattccaatggtcgggagatcctagaacgtaggcgtgactatcggcctacatggaagcttaaccaaacagaaccagtggccgggaattattatcctgtgaacacccggatctacattactgatggaaacatgcaattgaccgtgctgacagatcgtagccagggcgggagcagtctgcgcgatggctccctggaactgatggtgcatagacgcctcctgaaagatgatggccgcggagtatcagagcccctaatggagaacggctccggtgcctgggttcgtgggcggcacctggtccttttagacaccgcgcaagccgccgccgccggacaccggctactcgctgaacaggaggttctggctccccaagtggtgctagccccagggggcggggccgcttataatttgggcgcgcctccaagaacccagttctccgggttgagaagggacctgcctccctcagtccatctgctgacccttgctagctgggggccagaaatggtactgctgagactcgagcaccagtttgcggtgggggaggactccgggaggaatctctcagcccccgtcaccctgaatctacgggacctgtttagcacctttacaattacccgcctccaggaaaccaccttggtagccaaccagcttcgtgaggcagcgtctcgactgaaatggactactaacactggtccaaccccccatcagacgccataccagctggaccccgcgaatataacactggaacccatggaaatccggactttcttggcatccgtgcagtggaaggaggtcgatggt

SEQ ID NO: 16535 - DNA, 3033 bp, synthetic construct
  misc_feature 1..3033: note = source = /note="Description of Artificial Sequence: Synthetic coding sequence"
  source 1..3033: mol_type = other DNA
atgggggcatacgcaagagcgagcggtgtctgtgcccgcgggtgtcttgactccgctgggccttggaccatgagccgcgccctgaggccacctcttccacctttgtgcttctttctgctgctgctcgccgcagcaggtgcccgagcaggcggatacgaaacgtgtcccactgtgcaacctaacatgctgaacgtgcatctgctgcctcatacccacgatgatgtcggttggctgaaaactgtcgaccaatacttttacggaattaagaacgacattcagcatgcaggagttcaatacattctggacagcgtgatctcagcattgctcgcggatcctacccgtagattcatttacgtggaaatcgcgtttttctcacggtggtggcaccagcagaccaatgctactcaggaagtggtgagagatctggtccgccagggacggctggagtttgccaacggtggctgggtgatgaacgacgaagctgcaactcattatggtgccatcgtggatcaaatgactctgggccttagattcctggaggacacttttgggaatgatggaaggcctagagtcgcctggcatatcgatcctttcggccacagcagagaacaagcatcgcttttcgcacaaatgggtttcgacggattcttttttggacgattggattaccaagataagtgggtgcgtatgcagaagttggagatggagcaggtgtggcgtgcatcgacctcgcttaaaccgcccaccgcagatctttttactggggtgcttcccaatgggtacaatcctccacgtaatttgtgttgggatgtcctttgcgtggatcagcctctggtggaggatcctcgttctcctgagtataacgcaaaggaacttgtcgattactttctcaacgtggcgacggctcaggggagatactaccgaacgaaccataccgtgatgaccatgggaagcgattttcagtacgaaaacgcaaacatgtggttcaagaacctcgataagctcatccgtttggtgaacgcacaacaagcgaagggttcgtccgtgcatgtgttgtactccacgcccgcctgttacctttgggaattgaacaaggcaaatctgacttggtccgtgaagcatgatgacttttttccctacgcagacggacctcatcaattttggaccggatacttttcgagccgcccagctctcaaaagatacgaaagactgtcatacaattttcttcaagtatgtaaccagcttgaggcacttgtcggcctggcagccaacgtcggcccatacggatcgggtgattcggcgccccttaacgaagcaatggcagtacttcaacatcatgatgctgtgtcgggaacctcgcggcaacatgtggcaaacgattacgcacgacaactggcagcgggatggggtccatgcgaagtcttgctttctaatgcacttgcaaggctccgtggatttaaggatcactttaccttttgtcaacaactgaacattagcatctgtccattgtcccaaaccgcagcaagatttcaagtcatagtgtacaaccctctgggtcgcaaggtcaattggatggtgagactccctgtgtccgagggggtgtttgtcgtgaaggaccccaatggaagaactgtgcctagcgatgtcgtcatctttccttcgtcggatagccaggcccaccccccagaactcctgttctcggcaagcctgcctgccctcggattcagcacttattcagtcgcccaagtgcctagatggaaacctcaagcacgtgcccctcaacccattccacggcgcagctggtcgcctgcgctgactatagaaaatgagcatatcagagcaaccttcgatccagacactggcctgcttatggaaatcatgaacatgaaccagcaacttctgctccccgtgcgtcagaccttcttttggtataacgcgtccatcggggacaatgagtcggatcaggcatccggtgcatacatcttccgtcctaatcagcagaaaccactgcctgtgagccgctgggctcagattcaccttgttaaaactccactcgtgcaggaagtgcaccagaatttctccgcctggtgctcgcaggtcgtccgtctttacccaggacaaagacatttggagctggagtggtccgtgggaccaattccagtgggtgacacgtggggaaaggaggtgatctctcggttcgataccccacttgaaaccaaagggcggttctacaccgattccaatgggcgagaaatccttgagcgccgcagggattaccgacctacctggaagttgaatcagaccgaaccggtggcaggtaactactaccctgtgaatacccgtatctacataacggatggaaatatgcaacttactgtgctcactgataggtcacaaggcggttcgtcacttcgggatggttcacttgaacttatggtgcataggcgcctgttgaaagacgatggccggggtgtctccgaacctctgatggaaaacggtagcggggcatgggtgcgcggacgccatctcgtgctcctggatactgcacaagcagcagcagccggtcaccgactgctggcagagcaagaagtgcttgctccacaagtggtccttgcgcctggtggtggtgcagcgtacaacctgggagcgccgccgcggactcaattctccggcctgagaagagatctgccaccttcggtgcatctcctgactctggcgtcgtggggaccagaaatggtcttgcttcgactggaacatcaatttgccgtcggagaggattcgggaagaaacctgtcagcgccagtcacccttaaccttcgcgatctgttctccacctttaccatcactagattgcaagaaaccacgctcgtcgcaaaccaactgagagaagcggcgtcaagactgaagtggaccactaacactggacccaccccccaccaaaccccataccaacttgatccagcaaacattacgctggagcctatggaaatccgaacctttcttgcatccgtgcagtggaaggaggtggacgga

SEQ ID NO: 16536 - DNA, 3033 bp, synthetic construct
  misc_feature 1..3033: note = source = /note="Description of Artificial Sequence: Synthetic coding sequence"
  source 1..3033: mol_type = other DNA
atgggggcctacgcacgggcctccggtgtgtgtgcccgcggatgcctggactctgccgggccatggaccatgtcacgtgcactgcgtcctccactgcccccactgtgtttctttctcctgctgctggccgccgctggagccagggcaggcggctacgagacctgcccaacagtgcaacctaatatgctgaatgtgcatctgctccctcacacccatgacgatgtggggtggctaaaaaccgtggatcagtacttttatggcattaaaaacgatatacaacatgctggagtgcagtatatcctggactctgtgatcagcgcacttttagcagatcctactcggcgtttcatttatgtggaaatcgccttcttttccaggtggtggcatcagcagaccaatgctacacaagaagtcgttagagatctagttcgacagggacggctagaattcgccaacggcggatgggtgatgaacgacgaggctgctacacactatggcgcaatcgttgatcagatgactctcggtctgcggtttctagaggacactttcggcaatgatgggcgtccacgtgtggcctggcacatagacccctttggccactctcgcgagcaggccagtttattcgcccagatgggctttgatggctttttcttcggtcggctggactaccaggacaagtgggtccggatgcagaagcttgaaatggaacaggtgtggagggcttctaccagtctaaaacccccaacagccgacctcttcactggggtgctgcccaacggctataaccctcctaggaatctatgttgggatgtcctatgtgtcgaccagcctctagtcgaggacccacgaagtccagaatacaacgccaaggaacttgtcgattactttctgaatgttgcaacagcccagggccggtactacagaaccaatcacacagtgatgaccatgggatccgactttcagtatgagaacgccaacatgtggttcaagaatctggataagctgattcgactggtgaacgctcagcaggctaaaggctcctccgtccatgtgctgtattcaacacctgcatgctatctgtgggaactcaataaggctaatctgacctggtccgttaagcatgacgactttttcccctacgccgacggcccccaccagttctggaccggctacttcagttcccgaccagctctgaagagatacgagcggctgtcctacaactttctacaagtttgtaaccagctggaggccctggtgggtctggccgcaaatgttgggccctacggaagcggagactctgctccccttaatgaagccatggccgtgctccagcaccatgacgccgtgagtggtacctctcgccagcacgttgctaacgactacgctcggcagctggcagccggctggggaccatgtgaggtgttactgtcaaatgctttagcacgcctgagaggctttaaggaccatttcaccttctgccagcagctaaacatctccatatgccctctgagccaaacagctgcccggttccaggtcatcgtgtataatcctctggggaggaaagtgaactggatggttagactacctgtgagcgagggtgtgtttgtggtcaaggatcccaatggaaggacagttcccagtgacgttgtcatcttcccatctagcgattcccaggcccatccccccgaactactgttttctgcatctctgcctgctttaggtttcagcacatatagtgttgcacaggtgccccgatggaagcctcaggctcgagcaccacagccaattccccgacggtcctggagtcccgccctaaccatcgagaacgagcacatcagagccacatttgaccccgatacaggactcctgatggagattatgaacatgaaccaacagctgctactaccagttagacagacctttttctggtacaacgcctctataggcgataacgagtccgaccaggcttccggcgcatatatctttcgccctaatcaacagaaaccactgccagtgtctagatgggcacaaatacacctggtcaagaccccactcgtgcaggaggtgcatcaaaattttagtgcttggtgctcccaagtcgtcaggctgtatcccggccagaggcatctcgagctggagtggtcagtgggtccaatcccagtgggggatacttggggcaaagaagtcattagtagattcgacacccctcttgaaacaaaagggagattctacaccgatagcaatgggcgtgaaatcctggaacgccggcgagattatcgtcctacttggaagctcaaccagacagagcccgtagccggcaactactatcctgtgaacacacggatctatataacagacgggaatatgcagctgaccgtcctgaccgaccgctcccaaggcgggtcctccttaagggacggctctctggagctgatggtccaccgacggctgctcaaggatgatggtcggggcgtgtccgagccgttaatggagaacggcagtggcgcttgggtccgcggaagacacttagtgctgttagatactgcccaggctgctgctgccggccaccggctcctggcagaacaagaagtgctggccccacaggtggtgctcgcacccggcgggggagctgcctataatcttggcgcccctccccggactcaattctccggcctgagacgcgacctgccacctagtgtgcacttgcttacactcgcctcatggggcccggaaatggtgctgctgagactcgaacatcaattcgccgtgggcgaagactctggccggaatctatctgctccagtcaccctgaacttaagggacctgttctctacatttacaatcaccagactgcaggaaaccaccctagttgccaatcagctgcgggaagccgcaagtcgattgaaatggaccactaataccgggcctacacctcaccagacaccctaccagttagaccccgctaacatcacattggagcctatggagatacgcacattcctggcttccgtgcagtggaaggaggtggacggg

SEQ ID NO: 16537 - DNA, 3033 bp, synthetic construct
  misc_feature 1..3033: note = source = /note="Description of Artificial Sequence: Synthetic coding sequence"
  source 1..3033: mol_type = other DNA
atgggagcatacgctcgagcatccggagtgtgtgccagagggtgtttggattccgcaggaccgtggactatgtcacgagcgctgcggcctccacttcctccactgtgttttttcctgcttctcctggcggcagcgggagcacgtgcgggaggatacgaaacctgcccaacggtccagccgaatatgctgaacgtgcatcttcttccccatacccatgatgatgtgggatggctgaaaactgtggatcaatacttttacggaattaagaatgacattcaacacgcaggagtgcagtatatcctggattcagtgataagcgcactgctggcggatcccactagaagattcatttacgtggagattgcatttttctcccgctggtggcaccaacaaacgaacgcaacccaggaagtggtcagagatctggtgagacaaggacgcttggaatttgctaacgggggatgggtgatgaacgatgaggcagcaacccactatggtgcaatcgtggatcagatgaccctgggactccgctttctcgaagatacctttggaaatgatggcaggccacgggtcgcatggcatattgatccttttggacattcccgagagcaggcaagcctttttgctcagatgggctttgatggtttcttttttggacgcctggattaccaagacaaatgggtgaggatgcaaaagctggagatggaacaagtgtggcgcgcgtctacctcccttaaacctcctaccgcagacctgtttaccggagtgctcccaaacggttacaatccaccaagaaatctctgttgggacgtgctgtgtgtcgatcagcctctggtggaggatccacggtcgcccgagtacaatgcaaaggaacttgtcgattactttctgaacgtcgcgaccgcacaaggccgatactatcggactaaccatactgtcatgactatgggatcggattttcaatacgagaatgctaacatgtggtttaagaaccttgataaactgattagactggtgaatgcacaacaggcgaagggttcatcggtccatgtgctttactcaactcctgcatgttacctttgggaactgaacaaggcaaacctgacttggtccgtgaagcacgatgacttttttccttacgccgacggaccacaccaattctggacgggatacttctcctcacgtcctgcgctcaagagatacgagcgattgtcttacaactttctgcaagtgtgtaaccaactcgaggcacttgtcggcctggccgccaatgtgggcccctacgggagcggggactcggcgcccctgaacgaagccatggcagttctgcagcatcacgacgcggtgtcgggtacctccagacagcatgtggcaaacgattacgcaagacaactcgccgcgggttggggtccatgcgaagtcctcctgtccaacgccctcgcacggcttcgtggttttaaggatcacttcaccttttgtcaacagctgaacatttcaatttgccctttgtcgcagacggcagcaagatttcaagtgattgtgtacaaccctcttggtcggaaggtcaattggatggtgcggttgccagtgtccgaaggagtgtttgttgtgaaagatccgaacggaaggaccgtgccctcagacgtcgtcattttcccatcctccgattcccaggcccatcctcccgagcttctcttcagcgcatctctgcccgcgctgggatttagcacctactccgtggcccaggtgccaagatggaagccacaagcaagggcacctcagcctatccctagacgctcgtggtcgcccgctctcactatagaaaacgagcacattagagcaacttttgatcctgacactggcctccttatggagattatgaatatgaaccagcagcttctccttcctgtgcgtcaaaccttcttttggtacaatgcgtcaattggggataacgaatccgatcaggcatcaggtgcgtatatcttcaggcctaaccaacagaagccactgcctgtgtcaaggtgggcccaaatacacctggtcaagacccctctggtgcaggaagtgcatcaaaacttctcggcatggtgcagccaagtcgtgcgactttacccaggtcagaggcatcttgaactggaatggagcgtgggaccaatcccagtgggcgacacttggggaaaggaggtgattagcagatttgatacccctcttgaaactaagggaaggttttacaccgactcgaatggtagagaaattctggaaaggcgccgcgactaccgccctacctggaaactcaaccagacggagcccgtggcaggtaattactaccctgtcaacaccaggatttacattaccgatggaaatatgcagctgactgtcctgactgatagatcccagggcggctcctctcttcgcgatggcagcctcgaactcatggtgcataggcgactgctcaaggatgatgggcgtggcgtctcggaacccctgatggagaacggttcaggtgcttgggtgaggggtagacatcttgtcctcctggataccgcacaagcagcagcagccggtcatcgacttctcgctgaacaggaagtactcgcacctcaagtcgtgttggctcccggcggcggggccgcctacaatcttggagcaccacctagaactcagttctccggacttagaagagatctgcctccaagcgtgcatctgcttacgctggcatcatggggaccagaaatggtgcttctcaggctggaacaccagttcgcagtgggagaagattcaggcaggaatcttagcgcgcctgtgaccctgaacctgcgggacctcttttccaccttcactattacccgtctccaggaaactacgctggtggccaaccaactgcgggaggcggcctcgagacttaagtggactaccaacactggtccaacgccccatcagaccccgtaccagcttgatcccgccaacattaccctggagcctatggaaataagaaccttcctggcatccgtgcaatggaaggaagtcgatgga

SEQ ID NO: 16538 - DNA, 3033 bp, synthetic construct
  misc_feature 1..3033: note = source = /note="Description of Artificial Sequence: Synthetic coding sequence"
  source 1..3033: mol_type = other DNA
atgggagcgtacgcgagagcgtctggagtctgcgcacgtggctgtctcgacagcgcaggcccttggaccatgtcgcgagctcttaggccacctctccctcccctttgcttttttcttctgctgttggctgcagcaggtgcgcgtgccggaggttacgaaacttgtccaacggtgcaacctaatatgctgaatgtgcatcttcttccacatactcatgacgatgtgggatggctgaaaactgtcgaccagtacttctacggtatcaaaaacgatattcagcatgccggggtgcagtacatacttgatagcgtgatctccgccctgctggcagaccccactaggcgctttatctacgtggaaatcgcattcttctcacggtggtggcaccaacaaaccaatgcaacccaggaggtggttagggacctggtgaggcaaggtaggctggagtttgcaaatgggggctgggtcatgaatgacgaagccgccactcattacggagcgattgtggatcaaatgaccctggggctccgcttcttggaagatactttcggaaacgacggacggccacgggtggcatggcatattgacccgtttgggcattcccgagagcaggcgtccctctttgcacagatgggattcgatggtttcttctttgggagactcgattaccaagataaatgggttcgcatgcaaaagctcgaaatggagcaagtgtggcgcgcttcgacttcgttgaagccccctactgcagacctgtttacgggtgtgcttccgaatgggtataatcccccaaggaatctttgttgggacgtgctgtgcgtggaccagccgctcgtcgaagatcctcgatcacccgaatacaacgcaaaggaacttgtggattactttcttaacgtcgccaccgcacaaggacggtattaccggactaaccataccgtgatgactatgggcagcgatttccaatacgaaaacgcaaacatgtggtttaagaatctggacaagctgatccggcttgtcaacgcacaacaggcaaagggatcgagtgtgcacgtgctctactcgactccagcatgttacctgtgggagctgaataaggcaaatcttacctggagcgtcaagcacgatgacttttttccatacgcagacggtccacatcagttttggacgggatacttttcgtcccgacccgcactgaagaggtacgagcggctgagctacaattttctgcaagtgtgcaatcaactggaagcgctggtgggactggcagcaaatgtgggcccctacggttcgggcgattccgcccccctcaatgaggcaatggccgtcctgcagcaccatgacgcagtgagcggaacctcgcgtcaacacgtggcaaacgattacgcccgtcagctggcggccggttggggcccttgtgaggtgctgctctccaatgcacttgctcgcctcagaggatttaaggaccattttaccttttgtcagcaactcaacatctcgatctgtcctctttcccaaactgcagcaagatttcaggtgatagtgtacaatcctcttggacgaaaggtgaactggatggtgcggctgccagtgtcagaaggcgtgttcgtggtgaaggatcctaacgggagaacggtcccgtcggatgtggtgatatttccatcctcggatagccaagcacatccacctgagctgctttttagcgccagcctgcctgcccttgggttttctacttacagcgtcgcccaagtgcctcggtggaaaccgcaggcgcgcgcccctcaaccaattccgagacggtcctggtccccagcgctcactattgaaaacgagcatatccgggccactttcgacccggacaccgggctgctgatggaaatcatgaatatgaaccagcaacttcttctcccagtccgccagacttttttctggtacaatgcatcaatcggcgataacgagtctgatcaggcctcaggggcgtacatttttcgccctaaccagcaaaaaccactccccgtgtcacgctgggctcagattcatttggttaagactcctttggtgcaggaagtgcaccaaaacttttcagcatggtgctcgcaagtcgtgcgactttaccctggacagaggcacctggagcttgaatggtctgtagggccaatacctgtcggtgatacttggggaaaagaagtcatttcacgttttgatactccacttgagactaaggggagattctataccgactcaaacggcagagaaatccttgaacgtcgtagggattacaggcctacgtggaagctgaatcagaccgaacccgtggcagggaactattacccagtcaatactcggatctatatcaccgatggtaacatgcaactgaccgtgctgaccgataggagccagggcgggagctcgctcagagatggatccctggaacttatggtacatcgccgccttctgaaggatgatggacggggggtatccgagcctctcatggaaaacggatcgggagcatgggtgagaggcagacacttggtccttctggatacggcccaagcggcagctgcaggccatagactgcttgcagaacaggaggtgcttgccccacaggttgtcctggcacccggcggtggggccgcgtacaaccttggggccccacccaggactcaattctccgggcttagaagagatctcccaccgagcgtgcatttgctgactctggcatcatggggtccagaaatggtgcttcttcgcctcgaacaccagttcgccgtcggagaggactcgggtcgtaacttgagcgcgcctgtcaccctcaacttgcgtgaccttttctccacctttactataaccagactgcaggagactaccttggtggcgaaccagctgcgggaggcagcttctcgtttgaagtggactacgaatactggtcctaccccacaccaaactccataccaattggatcctgcaaacattactctcgaaccgatggaaattcggactttcctggcatccgtgcagtggaaggaagtggatggt

SEQ ID NO: 16539 - DNA, 3033 bp, synthetic construct
  misc_feature 1..3033: note = source = /note="Description of Artificial Sequence: Synthetic coding sequence"
  source 1..3033: mol_type = other DNA
atgggagcatacgcccgcgcctcgggtgtgtgcgcacggggctgtctggattcagcagggccctggaccatgtccagggctcttagaccgccacttccacctctgtgcttctttcttcttctgctggcagcggccggtgcacgtgccggagggtatgaaacttgcccaaccgttcaaccaaacatgttgaacgtgcatctgcttccacatacccatgacgatgtgggttggcttaagaccgtcgaccagtacttctacggaattaagaatgatatacaacatgctggcgtccaatacattttggactcagtgatatccgccttgcttgcagacccaaccagacgatttatctacgtggagattgcatttttctctcggtggtggcaccagcaaaccaatgctactcaggaggttgtcagagatctggtgaggcaaggccgactcgagttcgctaacggtggatgggtgatgaatgatgaagcagcaacccattacggagcaattgtggatcaaatgactctcggactccggtttcttgaggacaccttcggtaacgacggtagacccagagtcgcctggcatatcgatcccttcggccattcgagagagcaagcatccctgtttgcacaaatggggtttgacgggtttttcttcggacgcctcgactaccaggacaagtgggtgcgtatgcaaaaacttgaaatggaacaagtctggcgcgcatcaacttccctcaagccacccaccgcagatcttttcactggcgtcctccccaacgggtacaatccgccacggaatttgtgctgggatgtcctgtgcgtggatcaacccctcgtggaggatcccagatcccctgaatacaacgctaaagaactggtggactactttctgaacgtggccaccgcgcaaggtagatactaccggaccaaccataccgtgatgaccatgggctcagattttcaatacgaaaacgcaaacatgtggtttaagaatttggacaaacttattagactggtgaacgcacagcaggcgaagggttcgtcggtgcacgttctttactccactcccgcttgttacctttgggaacttaacaaggcaaacctgacttggtcagtgaagcatgatgactttttcccctacgcagacggacctcatcagttttggactggatacttttcctcccggccagcgctgaaaagatatgaacgcctcagctacaatttcctccaggtgtgcaaccaacttgaagcattggtgggccttgcagcaaatgtgggcccctacggatcaggcgactcggcacctctgaacgaggccatggcggtgctccagcatcacgatgcagtgagcggtactagccggcaacatgtcgcaaacgattacgccaggcagcttgcagcaggatggggtccctgcgaggtgctgctgtcaaacgccctggcacggctcagaggcttcaaggatcattttaccttttgtcagcagctgaatatctcgatctgtcctcttagccagaccgcggcgcggttccaggtgattgtctataatcctcttggaaggaaggtgaattggatggtgcggcttcctgtctcggaaggtgtattcgtggtgaaggatccaaatggcagaactgtgccgtcagacgtggtcatttttccctcaagtgattcgcaagcacatcctcctgaacttcttttttcggcatcgctccccgcactcggattctcaacgtacagcgtggcacaggtcccgagatggaagcctcaggcaagagcaccacaacctattccccggcgatcgtggtcgcccgccttgactatcgaaaatgaacacatccgtgcaaccttcgaccccgataccggcctcctgatggaaatcatgaacatgaatcaacaactgctgctgccagtgagacagacttttttctggtacaatgcttccattggagacaacgaatcagatcaagcctcaggtgcctacatatttcggcctaatcaacagaagcctcttccagtctcgcgttgggcacaaattcatctggttaagaccccactcgtgcaggaagtgcaccagaacttttctgcatggtgttcgcaggtggtccgactgtaccccggccaacgccatttggaacttgaatggtcagtggggcctattcccgtgggggacacttggggtaaggaagtgatttcccgatttgatactcccctggagactaagggtcgtttttacaccgattctaatggacgagagattcttgaacgccgtcgggattacagaccgacctggaagttgaaccagaccgaacctgtcgcaggaaattactaccctgtcaacaccagaatctacataaccgatggcaacatgcaactgaccgtgctgacggaccgatcccaggggggcagctccctcagagatggatcactggaattgatggtccaccggaggctcctgaaggacgatgggaggggagtcagcgagccacttatggagaatggatccggcgcatgggttcgtggccggcaccttgttctgcttgacactgcacaggccgcagcagcaggtcatcgtttgctggcagaacaagaggtccttgcaccacaagtggtgctcgcccctggtgggggagcagcatataacttgggcgcaccacctagaacccaattttccggactccggcgtgaccttccaccaagcgtgcatttgctgaccctggcctcatggggaccagagatggtgctcctgcgtcttgaacatcagtttgcagtgggagaggactcaggcaggaacctgtcggctccagtcaccctgaatcttagggatctgtttagcacgtttacgatcactcgccttcaagaaaccacccttgtcgcaaatcagctccgtgaagctgcaagccggctcaagtggactactaatacgggacctacgcctcatcaaactccttaccagcttgatcctgcaaatatcactctggagcctatggaaattaggacgtttctggcctccgtgcagtggaaggaagtcgatggt

SEQ ID NO: 16540 - DNA, 3033 bp, synthetic construct
  misc_feature 1..3033: note = source = /note="Description of Artificial Sequence: Synthetic coding sequence"
  source 1..3033: mol_type = other DNA
atgggagcatacgcccgcgcttctggagtctgtgcgcggggatgcctcgattctgcagggccttggacaatgtctcgcgcactccgtccccctttgcccccgctctgcttctttctcctgctgctcgcagccgcaggcgcgagggccggtggctacgagacatgcccaacggtgcagcctaacatgttgaatgtgcacctgctcccccacacgcacgacgatgtcggatggcttaaaactgtcgatcagtacttctatggaatcaagaacgatatccagcatgcgggagtccagtacatcttggacagtgtgatctctgctcttctggccgatcccacccgtagattcatttacgttgaaattgctttcttcagccgctggtggcatcagcagaccaatgcaactcaagaagttgtgagggatctggtcagacagggcagattagagttcgcaaacggcggctgggtcatgaacgacgaggcggcaactcattacggtgcaatcgtcgaccagatgacgttaggactccgctttctcgaggatacctttggcaatgatggacgccccagggttgcctggcacatagacccgttcggccattctagagaacaggcctcgctcttcgcacaaatgggatttgatggcttcttcttcggtcgcctggactatcaagataagtgggtgaggatgcagaaactggagatggagcaagtgtggcgcgcctcgacatcccttaagccgccaaccgcagacctgttcactggagtccttcccaacggttataatccaccgcgcaatctctgctgggacgtactttgcgttgaccagccactggtcgaagatcctcgatcaccagagtacaacgcaaaagagctggttgactattttctgaatgtggctaccgcccagggccgttactatcggacaaaccacaccgtgatgacaatgggtagcgacttccagtacgagaacgcaaacatgtggttcaaaaatctagacaagctgatcaggttggtgaacgcccagcaggctaagggaagctcggtacatgtgctgtactccacccccgcttgttacctgtgggagctaaacaaggcaaacttgacctggtccgtcaagcacgacgacttcttcccctacgccgacggaccacatcaattttggaccggctatttttcctctcgccccgccctgaagaggtatgaacgactgagctacaatttcctgcaggtgtgcaatcaactagaggccctcgtgggtttggccgccaacgtggggccgtatggaagcggcgattcagccccccttaacgaagccatggcggttctccagcaccatgatgccgtcagcggaacctcaagacagcatgttgcgaatgattacgccaggcaactggcggccggatggggtccgtgcgaggtgctgctgtccaacgctttggcacgcctacgaggattcaaggatcacttcacgttctgtcaacaactgaatatatccatctgtccgcttagccaaaccgcggcacgtttccaggtgattgtttacaacccgttgggccgcaaggttaactggatggtgcgcctgcccgtctcagagggcgtattcgttgtaaaggaccctaacggtcgtacagtgccaagcgacgtggtgattttccccagctccgacagtcaggcgcacccccctgagttgctcttcagcgcctctctgccggccctgggattttccacctattcagtcgcccaagtaccgcgttggaaaccacaggccagggctccccaaccgatcccgcgccgcagttggagtcccgctctgaccattgagaacgagcacattcgtgcaaccttcgatccggacacaggattgctcatggaaataatgaacatgaatcaacagctgcttctcccggtgcgccaaacgttcttctggtacaatgccagcatcggtgacaacgagtctgatcaagcttcaggcgcatatatctttcgtcccaaccaacaaaagcccttaccagtgagccgctgggcgcagattcatctggtgaaaaccccgctggtgcaggaggtccaccagaatttctctgcctggtgctcgcaggtcgtgcgtttataccccggccagcgccacttggagttggagtggtccgtcggtccgatccctgttggtgacacctggggtaaggaagtgatttcacgtttcgatactccactagagaccaaggggagattctacacggattccaatggtcgggagatactggaaaggcgacgggattatcgtcctacgtggaaattgaaccagaccgaacctgtcgcgggcaattactacccggtgaatacccgcatttacatcaccgacggaaatatgcagctgaccgtgcttacagatcgcagccaaggtggatcgagccttagagatggcagccttgagctgatggtacaccgaagattgttaaaagatgatggccgtggagtttccgagccccttatggagaatggatccggcgcctgggtccgcggacgccatctggtgttgctcgataccgcgcaagctgcagcggccggtcatcgattgctggctgagcaggaggtcctagccccacaggtcgtgctggcgcctggtggtggggccgcgtacaacctcggggccccaccccgtacccagtttagcggtttgcgaagggatctacccccaagcgtccacctgctgaccttggccagctggggtcctgaaatggtgctgttgcgccttgagcatcaatttgccgtgggcgaagattctggccggaatctatccgcccccgttacgctgaatcttcgcgacctcttctccactttcacaatcacgcggctgcaggagacaacgcttgtggccaatcagcttcgagaggcggcgtctcgtctgaagtggaccacgaacaccggacccaccccacaccagacgccctaccagttggacccggccaacattaccctggagccgatggagattcgtacgttcttggcctctgtgcaatggaaggaggtggatgga

SEQ ID NO: 16541 - DNA, 3033 bp, synthetic construct
  misc_feature 1..3033: note = source = /note="Description of Artificial Sequence: Synthetic coding sequence"
  source 1..3033: mol_type = other DNA
atgggagcttatgctcgggcgtcaggagtctgcgcaagagggtgcctcgacagcgcggggccgtggaccatgagcagagccttgcgccctccgctgcctcctctgtgtttcttcctgctgctgttggctgccgcgggcgcaagagccggcgggtacgaaacatgtcccacagtgcagcccaatatgctgaacgtgcatcttctgccccatacacacgacgacgtgggttggctgaagacagtggaccaatatttctacggcattaagaacgacatccagcacgcgggcgttcagtatatcttggattctgttattagcgcgctccttgctgacccgactcggcgattcatctatgtcgaaattgcgtttttctcccggtggtggcaccagcagacgaatgcaacacaggaagtggtgcgcgatctggtgcgtcagggacgcctggagtttgcgaacggagggtgggtgatgaatgatgaagctgctacccattatggggcgattgtggatcagatgacactgggcctacgcttcctggaggacacttttggaaacgatggcaggccacgtgttgcctggcacatagatccgttcggccatagtagagagcaagcctcactgtttgcgcagatggggtttgatggttttttctttggccgtctggactaccaggacaagtgggtgcgcatgcagaaattagaaatggaacaagtgtggcgagcttcaacatcattaaaaccacccaccgccgacctgttcaccggcgtccttcccaatggttataatcctccaagaaacttgtgttgggacgtattgtgcgtggatcagccattggtggaagatccccggtcacctgaatacaacgccaaggagctggtggattatttccttaacgtggctactgcacaggggagatactacagaaccaaccacaccgtcatgaccatgggcagtgacttccaatacgagaatgctaacatgtggtttaaaaatctggacaaactcatcaggctcgtaaatgctcagcaggccaagggctcttctgtccacgtcctatactccacccccgcttgctacttgtgggagctaaataaggcaaaccttacttggtctgtgaagcatgacgacttctttccttatgccgacggacctcaccagttttggacggggtatttctcctctcgacccgccctaaaacgctacgagaggctaagctataacttccttcaggtgtgcaaccagctagaggcactggtgggcttggcggccaatgtaggcccttatggttctggggattccgcacctctgaatgaagctatggccgtgcttcaacatcacgatgccgttagcgggacgtcgcgccagcacgttgctaacgactacgccaggcagttggccgcgggatgggggccctgtgaggttctcctctcgaatgcgctcgcccgcttacgcggattcaaggatcacttcacgttctgccagcaactcaatatttctatatgtccactgtcccaaaccgctgctaggttccaggtgattgtgtacaacccactgggacgaaaggtgaattggatggttagactccccgtgagtgagggggtgttcgtggtgaaggacccaaacggaaggactgtgccttccgatgttgtgattttcccaagctcagactctcaggcgcatcctcctgaacttctgttttctgctagcctaccggcccttggtttttcgacctactccgtggctcaggtcccacgttggaagccccaggccagggctcctcagcccatccctcgaagaagttggagcccagcactgaccatcgagaatgagcatataagagccactttcgaccctgatactgggctgttgatggagatcatgaacatgaaccagcagctccttcttccagttcgccaaacgtttttctggtataatgctagcataggagataacgaaagcgatcaagccagtggagcctatattttcaggcccaatcagcagaaacccctgccagtgagtaggtgggcacagatccatctcgtaaagacaccacttgttcaggaggtacaccagaacttcagcgcttggtgttcccaggttgttaggctgtaccctgggcagcggcacctggaattagagtggtctgtggggccaatccccgtgggcgacacgtggggcaaagaggttattagccgatttgacacacctctcgaaactaaggggaggttctataccgacagcaatggccgtgagatcctcgagcgcaggcgtgattaccgcccaacctggaagctgaatcagactgagcccgtagctggaaattactatcctgtgaacacacggatctatatcaccgacggcaacatgcagcttaccgttctgacggacagatcccagggtggctcctccttgagagacggctctttggagctcatggtgcaccgcagactgttaaaggacgacggccggggggtgtcagagcccctcatggagaatggcagcggagcctgggttcgaggccgccatctagttctgcttgacaccgcccaggctgctgccgcaggacatcgtctgttggccgaacaggaagtgctcgccccacaggtagtcctggcgcctggtggcggcgcggcttataatctcggagcccctcctagaacccaattctccggcctccgtcgcgacctgccgccgagtgtccatcttctgaccttggccagctggggtccagagatggttctgctaaggctggaacatcagtttgccgtgggggaagactctggaagaaacctgtccgcccccgttaccctgaacctgagagatctattcagtacattcaccattactcgtctccaggagaccaccctggtcgccaatcaactacgggaggccgcaagccggctgaaatggacaacaaatacaggccccactccacatcaaactccatatcagctcgatccagctaatattaccctggaacctatggaaattcggaccttcttggcgtcggtgcagtggaaggaggtggatggt

SEQ ID NO: 16542 - DNA, 3033 bp, synthetic construct
  misc_feature 1..3033: note = source = /note="Description of Artificial Sequence: Synthetic coding sequence"
  source 1..3033: mol_type = other DNA
atgggggcttacgcaagggcctctggcgtctgtgcgagggggtgcttggattctgccggcccgtggacaatgtccagggccctgcggcctcctctccctcccctgtgcttcttcctgctgctgctggcagctgccggcgcacgggcaggcggctatgagacttgccctactgtccagcccaacatgttgaatgtacatttgctccctcacacccacgatgacgtcgggtggcttaagaccgttgaccaatacttctacggcataaaaaacgacattcagcacgccggcgtgcagtatatcctggatagcgtgatcagcgccctgctggcagatccaacacgacggtttatttacgtggagatcgccttctttagccggtggtggcatcagcagactaacgcgactcaggaggtggtgcgagacctggtcagacagggtcggctcgaatttgcaaatggcggctgggtcatgaacgacgaggcagccacgcattacggcgccatcgtggaccagatgaccttgggccttcgctttctcgaggatacctttggtaatgatggaagacccagagtggcctggcacatagatcctttcgggcactctagagaacaagcttccctctttgcacagatggggtttgacggctttttctttgggaggcttgactaccaggataagtgggtgagaatgcagaagctggaaatggaacaggtgtggagagcatcaaccagcctgaaaccaccgaccgcagatcttttcactggtgtcctgcccaacgggtacaatcccccaagaaatctgtgctgggacgtgctgtgtgtcgaccaaccgctggtcgaggacccaaggtccccggagtacaacgcgaaggagctggtggactattttttgaacgttgctactgcacagggcagatattaccgaaccaatcataccgttatgacgatgggtagcgacttccagtacgagaatgccaacatgtggttcaagaaccttgacaagctcatacggcttgtcaatgctcaacaggccaagggatcctccgtgcacgtcttgtatagcacgccagcgtgctatctttgggagctcaacaaagcgaacctgacctggtcagtcaagcatgatgatttcttcccatatgccgacggacctcaccagttttggacgggatacttcagttcaaggcctgctttgaaacgctatgagaggctttcatacaatttcctgcaggtgtgcaatcagttggaggccctggttggcctggccgcaaatgtcggcccatacggctcaggagattccgcgcccctgaacgaggcaatggccgtgctccaacaccatgatgccgtcagcggcactagccggcagcacgtcgccaacgactatgcaagacagcttgcagctggatgggggccatgcgaggtcctcctcagtaatgcactggcccggctcagaggttttaaggaccacttcaccttctgtcagcagctgaatatcagcatttgccccctgtctcagacagccgcacgattccaggtaatcgtttacaatccccttggtcggaaagtgaactggatggtgcgccttccagtgtccgagggtgtatttgtggtgaaagatccaaacgggagaacggtgcccagtgatgtcgttattttccccagctctgattcacaggcacacccgcctgagctcctcttttcagcatctctcccagctttggggttctcaacatacagcgtagcccaggtcccgagatggaagccacaggcccgggccccacagccgatcccgagaagatcttggtccccagcgttgactatcgagaatgaacacattcgggccacttttgatcccgatacaggtttgctgatggaaatcatgaatatgaatcagcaacttcttttgccggtgcgccagacattcttttggtataatgcatcaatcggcgacaacgagagtgatcaagccagcggtgcctacatttttagacctaatcagcagaaacccctccccgtgagcaggtgggcacagatacacctggtgaagaccccactggtgcaagaggtgcaccaaaacttttctgcgtggtgttcccaggtcgtgcgactgtatcctggccagaggcatctcgaactggaatggagcgtcgggccgattccggtgggagacacatgggggaaggaagttatcagtcgcttcgatacccccctggagaccaaggggaggttctatacagattccaacggcagggaaatcctggaacgccgccgggactacaggcccacgtggaagctgaaccagaccgaacccgtcgccggaaattactaccccgtcaataccaggatctacatcacagacgggaatatgcagctcacagtgctgacagataggtctcagggggggagcagcctccgggatgggagtttggaacttatggtgcatagacgcctcctcaaggacgacggtaggggcgtctctgagccactgatggagaatgggtccggcgcttgggtgcgcggaagacatctggtcttgctggatacagcccaggccgcagcagctggacacaggctcctggccgaacaagaagtccttgcgccccaggtcgtcctggcccctggcggcggtgcagcatacaatctgggtgccccgccacggactcagttctctggcctgcggcgggacctcccaccgtcagtgcatctgctgaccctggcctcttggggccccgaaatggttttgcttaggcttgagcatcaatttgccgttggtgaagactccggcaggaatctttccgcccctgtcaccctgaacctcagggatctgttctctaccttcaccatcactagactgcaggagacaactctggtcgctaaccaactgcgagaagctgctagtcgactgaaatggaccacaaatacaggtcctacacctcaccagaccccttaccagttggatccagcaaatatcactcttgaacccatggagatccgcaccttcttggctagcgtccagtggaaggaagtagatggc

SEQ ID NO: 16543 - DNA, 3033 bp, synthetic construct
  misc_feature 1..3033: note = source = /note="Description of Artificial Sequence: Synthetic coding sequence"
  source 1..3033: mol_type = other DNA
atgggggcttatgcacgggcgagtggggtttgcgcacggggttgcctggacagtgcaggtccttggaccatgagtcgcgcattgaggcctccgctcccccccctttgtttctttctgttgctattggcggcggccggagcccgcgccgggggctacgagacatgcccgacagtccagccaaacatgctaaatgtgcatcttttgcctcacacccatgacgacgtcggatggctcaaaactgtggaccagtatttttacggcattaaaaatgacatacaacacgcaggtgtccagtatattctcgattccgtgatttctgctctcctagccgacccaacccgccggttcatatatgtagagatcgctttctttagccgttggtggcaccagcaaaccaatgcgactcaagaagtcgttcgagatttagtcaggcaggggaggctcgaatttgcgaatggcgggtgggtcatgaatgacgaggctgcaactcattatggtgccatagtggatcagatgactttggggcttcgctttctcgaagatacgtttgggaatgatggccggccacgtgtggcgtggcatatcgatcctttcggccattctcgggagcaagcgagcctcttcgctcagatgggcttcgatggcttcttctttggcaggctcgactatcaggataagtgggttcggatgcaaaaactggaaatggaacaggtctggcgggcctctacttccctcaagcctcctacggcagatctgttcactggagtactacctaacggctataaccctccgcgaaacttgtgctgggacgtactttgcgtcgaccagccactcgttgaggatcctagaagtccagaatataatgcgaaagagttagttgactatttcctaaatgtcgcaaccgcccagggccgttactacaggaccaatcatacggtgatgaccatgggatcggattttcagtacgagaacgctaatatgtggtttaagaatttagacaagctgatacgtctcgtaaatgcccagcaggccaagggatcatcagtgcatgttctctattcaacccctgcttgttatctttgggaactgaataaggctaatctgacgtggtccgtaaagcacgacgacttcttcccttatgctgatggcccccaccagttctggacgggctacttttcttcgcgaccggcgttgaagcgttacgaaaggctgagctacaacttcttacaagtttgcaatcagcttgaggctctagtgggcttggctgcgaatgtcggcccgtatggttcgggtgactccgccccattgaacgaggcaatggctgtattgcagcaccacgatgctgtgagtggcacatcgcgccaacacgtcgctaatgattacgccagacagttggctgctgggtggggtccatgcgaggtccttcttagcaatgcactcgctcgattgcgaggttttaaggaccattttaccttctgccaacaactgaatataagcatttgtcccctaagtcaaactgcagcgaggtttcaagttatcgtatacaaccccttgggaagaaaggttaactggatggtccggctccctgtatctgagggagtcttcgtggtgaaggatccgaacggtaggaccgttcccagcgacgttgttatttttccgagctcggacagtcaggctcacccccccgaattgctcttctccgcgtcactcccggccttgggcttcagtacgtattccgttgcacaggtccctcgttggaagccacaggcccgcgcaccacaaccgatcccaaggcgctcctggtcaccagctcttactattgagaatgaacacatacgcgcaaccttcgacccggatacaggccttctaatggagatcatgaatatgaaccagcaactcctcctgccagtacgccagaccttcttctggtacaatgcgtctatcggtgacaacgagagtgatcaggccagtggcgcctatatattccgacccaaccagcagaagccattgcccgtatcgcgttgggcacagatccatttggtgaagactccgctagtccaggaggttcaccagaactttagcgcctggtgttctcaggttgtacgcctttacccgggacagcgccacctcgagcttgaatggagtgtcggtcctattcccgtaggcgacacctggggcaaggaggtgatatcgaggtttgacactccgcttgagacgaaagggcgtttctataccgattcaaatggaagagaaatacttgagagacgcagagactatcgacctacgtggaaactgaatcagaccgagcccgtcgccggaaattactaccctgtcaatactcggatatacatcacagatggaaatatgcaactcaccgttttgactgatagatcgcaggggggttcaagcctccgcgacgggtcgctcgagctcatggtacatcgccgtctgcttaaggatgatggacgaggggtttctgaaccattgatggagaatggttccggcgcatgggtaagaggaaggcacttggttctcctcgacacggcgcaggccgccgccgcagggcatcggctacttgccgagcaggaggtgcttgccccccaagttgttttggcgcctggtggcggtgcagcgtataatctcggagctcctccaagaacccaattctccggattgcggcgtgatttgcctccatccgtacatctcctgactctcgccagctgggggcccgaaatggtactattgaggctcgaacaccaattcgcggttggtgaggatagtggacgaaatctctctgcgcccgtaacgctgaatttgcgagatctcttctccacatttaccatcacacgtctccaagagaccacactcgtggcaaaccaactacgcgaggccgcgtcgcgactgaagtggactacaaacacggggccaaccccacaccaaaccccctatcagctggatcctgccaatatcacattggaacccatggaaattcgcacattcctggcgagcgtgcagtggaaagaagtcgacggc

SEQ ID NO: 16544 - DNA, 3033 bp, synthetic construct
  misc_feature 1..3033: note = source = /note="Description of Artificial Sequence: Synthetic coding sequence"
  source 1..3033: mol_type = other DNA
atgggtgcgtatgcccgggcgtcaggcgtctgcgcccgcggctgcctcgactccgctgggccctggactatgtctagggccctgcggccacccctcccgcccttgtgtttcttcctgctcctgcttgcggccgcgggagcgagggcaggaggctacgaaacctgcccgactgtgcagcccaatatgctcaacgtccatcttctcccccacactcatgacgatgtggggtggctcaagaccgtcgatcagtacttctacggaatcaagaatgacatccagcacgccggcgtccagtacatcctggattcagtgatttcggcactgctggccgatccaaccagacggttcatctacgtggaaatcgccttcttcagccggtggtggcatcaacaaaccaacgcaacgcaagaagtggtccgggatcttgtgcgccagggaaggctggagtttgcgaacggaggatgggtcatgaatgatgaggcagctactcactatggagccatcgtggatcaaatgactctcgggctccggtttctggaggatacttttggaaacgacggacgccctcgggtggcctggcacatcgacccgttcgggcatagccgggaacaggcttcactgttcgcgcagatgggattcgacgggttcttttttggacggctggactaccaggacaaatgggtgcgcatgcagaagttggaaatggaacaggtgtggcgggcgtcgacttcactgaaacctccgaccgccgacctcttcaccggtgtcttgccaaacggatacaacccgccgagaaacctctgttgggacgtgctctgcgtggaccagcctctcgtggaggatccgcggtcgccagagtacaacgcaaaggagctggtggattacttcctcaatgtggcaaccgcccagggacgctactacagaactaaccatactgtcatgactatgggcagcgacttccagtacgagaacgccaacatgtggttcaagaacctggacaagctgatcaggctggttaacgcacagcaggcaaagggtagctcggtgcatgtactgtactctaccccggcttgctacctctgggaactgaacaaggcaaatctgacctggagcgtgaagcacgatgactttttcccgtacgccgacggaccacaccagttctggaccggatatttctcgagcagaccagccctcaagcgttatgagcgcctgtcgtacaacttcctccaggtctgtaaccagttggaagctctggtgggcctggcggcgaacgtcggtccatacggttccggagactctgcccccctgaatgaggccatggccgtcctgcaacatcacgatgctgtgtcgggcacctctaggcagcacgtggccaacgattacgcccggcagctggccgccggctggggtccgtgcgaagtgctgctctcgaacgctctggcccgcctgcgcggattcaaggaccactttaccttctgccaacaactgaacatctcgatttgccctctgagccaaaccgccgcccggttccaagtgatcgtttacaacccgctgggacgcaaggtcaactggatggtgcggctgccggtcagcgaaggagtgttcgtggtgaaagaccctaatgggcggaccgtgccttccgacgtggtgatcttcccatctagtgactcgcaagcccacccgcccgaactgctcttctcggcctcgcttccggccctgggcttttcgacttactcggtcgcccaggtgccaagatggaagcctcaagccagagcaccgcagccgatcccgcgccgcagctggtcaccggcactgaccattgaaaacgaacatatccgcgccaccttcgaccccgatactggactcctgatggaaatcatgaacatgaatcaacagctgcttctgccagtgcgccaaaccttcttttggtacaatgcgtcgatcggagacaacgagtcggatcaggcctcgggagcgtatatcttccggccaaaccagcaaaaaccgctgccggtttcgcgctgggctcagatccacttggtcaagacccctctggtgcaggaggtgcatcagaatttctccgcctggtgctcccaggtggtccgcctgtacccgggacagcggcatctcgagctggaatggagcgtgggaccgatccccgtgggagacacttggggaaaggaagtgatctctcggttcgacactccacttgagactaaaggcaggttttacactgatagcaatggaagggaaatcttggagcggcggagggactacagaccgacctggaaactgaaccagaccgaaccggtggcaggcaactactaccctgtgaatacccggatttacatcaccgacggcaacatgcaactgactgtgctcaccgatcgctcacaaggcggttcctcacttagagacggaagccttgagctgatggttcaccggcgcctcctgaaggacgacggccggggagtcagcgaaccactgatggagaacggttcaggcgcatgggtacgaggacgccacctcgtcttgctggacactgcgcaggccgctgccgccggccacagactgctggcagaacaagaagtcctcgccccacaggtcgtgctggccccagggggaggggcggcttacaacctcggcgctccaccgcgcactcaattttccggactgcgacgggatctgccacccagcgtccacctcctgaccctggccagctggggcccagaaatggtcctgctccgcctggaacaccagtttgcggtgggcgaggactcgggtcgcaacctgtccgcgccagtcactctcaatctgcgcgatctcttcagcactttcaccatcaccagactccaagagactaccttggttgccaaccagctgcgggaagcggcctcgcggctgaaatggactacgaacactggaccaactcctcatcagaccccgtaccaactggacccggcaaacataaccttggaaccaatggaaatccggaccttcctggcgagcgtgcagtggaaggaagttgacggg

SEQ ID NO: 16545 - DNA, 3033 bp, synthetic construct
  misc_feature 1..3033: note = source = /note="Description of Artificial Sequence: Synthetic coding sequence"
  source 1..3033: mol_type = other DNA
atgggcgcctatgcgcgcgcctctggtgtctgtgcccgaggatgcctggattcggctggcccatggaccatgagcagggccttgaggcccccactgccaccgctgtgtttcttcctgctgctgctggcggccgccggggcgagggcagggggttacgaaacctgcccaaccgtgcagccgaatatgcttaatgtccacctgctacctcatactcacgatgatgtcggttggctgaaaaccgtcgaccagtatttttacggcatcaaaaatgacattcagcacgctggcgtgcaatacattttggactctgtgatttctgcattacttgccgatccaacgcgacgcttcatatacgttgaaattgcattctttagcagatggtggcatcaacagacaaacgcaacccaggaagtggtgcgcgatctggttcgccaaggccgtctggagtttgcgaatggcggatgggttatgaatgacgaggcggcgacccactacggggccatcgttgaccaaatgaccctgggactgcgctttctagaagataccttcggcaatgatggtagaccacgcgttgcgtggcatatcgatccatttgggcactcccgcgagcaagcttctctgttcgcccagatgggtttcgacggtttcttttttggccgtcttgactatcaagacaaatgggtccgtatgcagaagctggagatggagcaagtttggcgcgccagcaccagcctgaaaccgccaaccgcagacctgttcacaggcgtcctgccgaatggctataacccacctaggaacctttgctgggacgtcttgtgtgtagaccaaccgcttgttgaggatcctcgtagcccagaatacaatgccaaggagcttgtggattattttttgaatgtggcaactgcgcagggacgctattaccgtacgaatcacactgtgatgacgatggggagtgacttccagtatgaaaacgccaatatgtggtttaaaaacttagataaactgatcagacttgtgaacgcacagcaggccaagggcagcagcgtccacgtgctgtatagcacgccggcctgttacctgtgggaactaaataaggcgaatctgacctggagcgtcaaacacgatgacttcttcccctacgccgatgggccgcatcaattctggacgggctatttctcctcacgccccgcgctaaagaggtacgaacgcctatcctacaacttccttcaggtctgcaaccagctggaggccctcgtcggcctggcggcgaacgttggaccttacggaagcggagactccgcgccgcttaatgaagctatggcggtcctgcaacatcatgacgccgttagcggtacgagcaggcaacatgtggcaaatgactacgcgcgccagctggcggcgggctgggggccgtgcgaggtactgttaagcaacgcactggcacgcctgcgcggcttcaaggaccattttacgttctgccagcaactgaacatcagtatctgccctctgagtcaaacagcggcccggtttcaagtgatcgtctacaatccactcggccgtaaggtcaattggatggttcgcctgccggttagcgagggcgtttttgttgttaaagaccctaatggtcgcacggtgccttccgatgttgttatttttccgagttctgatagtcaggcccaccctccggagctgctctttagcgctagcctgcccgccctgggttttagcacgtatagcgtggcccaggtcccccgttggaagccgcaggctcgcgcgccacagcctattccgcgccgtagttggagtcctgcgctgactattgaaaacgagcacatccgtgcaaccttcgacccggacactggcctgttgatggagatcatgaacatgaaccaacagctgctgctgccggttcgtcagaccttcttctggtacaacgcctccattggtgataatgagagcgatcaggcttccggtgcttacatattcaggccgaaccaacagaaaccattgccggtcagcagatgggcgcagatccaccttgtgaagaccccgctggtgcaggaggtgcatcaaaacttctctgcctggtgtagccaagtcgtgcgcctgtacccgggccaacgccatctagaactggagtggagcgtgggcccgattccagtaggtgacacctggggtaaggaggttatctctcggttcgacactccactggaaaccaaaggtcgattttacacggatagcaacggtcgcgagattctcgaacgccgacgagattacagaccgacatggaaactgaatcaaaccgagccagttgcaggtaactactacccagtaaatacgcgaatctacatcacggacggtaatatgcagctgacggtcctgactgatagaagccaaggcggtagcagtttgcgagacggtagcctggagctgatggttcaccgccgtctgctgaaagatgatggacggggcgtcagcgagcccttgatggaaaacggaagcggggcatgggtccggggtcgccacttagtcttgctggatactgcgcaagccgcggccgcaggccatcgcctcttggcagagcaggaagttctggcaccgcaggtggtgctggcgccaggtggtggagcagcgtataacctgggtgccccgccgcgcacccagttcagcggactgcgccgcgacctgcctcctagcgtccacctgttgaccctggcatcttggggtccagaaatggtcttactacgccttgaacaccagtttgctgtcggcgaagacagcgggcgtaatttaagcgcacctgtcaccctgaacctgagagaccttttcagcacctttaccataactcggcttcaagaaaccactctggttgctaatcagctgcgcgaggcagctagccggcttaaatggacgacaaataccgggccgaccccccaccaaacaccttaccagctggatccggcgaatattaccttggagccaatggaaattcgcaccttcttggcctccgttcagtggaaggaagttgatggc

SEQ ID NO: 16546 - DNA, 3033 bp, synthetic construct
  misc_feature 1..3033: note = source = /note="Description of Artificial Sequence: Synthetic coding sequence"
  source 1..3033: mol_type = other DNA
atgggcgcctacgcaagagcatcaggggtgtgtgctagaggatgcctcgattctgcaggcccttggaccatgagcagagcactgaggcctccactgccaccactttgcttttttcttctgctgctggcagcggcaggggcgagagcaggaggatacgaaacctgccccactgtgcaacccaacatgctgaacgtgcacctgcttcctcacacccacgatgacgtcggatggctgaaaaccgtggatcaatacttttatggtatcaagaacgacatccaacatgccggagtgcaatacattctggattccgtgattagcgcactgctcgccgacccaacgcgacgttttatctacgtcgagattgcgtttttctcgcggtggtggcaccagcagaccaatgcgactcaagaggtcgtccgcgacttggtgaggcagggtagactcgaatttgccaacggaggttgggtgatgaacgatgaggctgcaacccattacggagcgatcgtcgatcagatgactttgggactgcgttttctcgaagatacctttggaaacgacggacgcccaagagtggcctggcacattgacccattcggccatagccgggagcaagctagccttttcgcccagatgggcttcgatggatttttcttcggacgcctggattaccaagataaatgggtgagaatgcaaaaacttgaaatggagcaggtctggcgcgcaagcacgagcctgaagcctcctaccgccgatttgttcaccggagtgctgcccaacggttacaatccaccccggaatctttgctgggatgtgttgtgtgtcgatcagcctcttgtggaagatcctagatcgcctgagtacaacgcaaaagagctcgtggactattttctcaacgtggccacggcccaaggtaggtactaccggactaaccacactgtcatgaccatggggtccgactttcagtatgagaacgcaaacatgtggttcaagaatcttgacaagctgattcggcttgtgaacgcacaacaagcaaagggctcatcagtgcatgttctttactcgacccccgcgtgctacctttgggaacttaacaaagccaacctcacttggagcgtcaagcatgacgatttcttcccttacgcagacggaccacatcagttttggactggatacttttcctcaaggcctgctcttaagcgatacgagcgcctctcttacaactttctgcaggtgtgcaaccaactggaagcgctcgtgggcctggcagcaaacgtgggaccgtacggatcgggtgattctgcacctcttaatgaagccatggccgtgctgcagcatcacgatgcagtgagcggaacctcgcggcagcatgtggcgaatgactacgcaagacaactcgcagcaggatggggtccttgtgaagtgcttctgtccaatgcccttgccaggctcagggggttcaaggatcattttaccttttgtcaacagcttaacatttcgatatgcccactgtcgcagaccgcagcacggtttcaagttattgtgtataaccctctcggcaggaaggtgaactggatggttagactccccgtttccgaaggagtgttcgttgtgaaggatccaaacggtagaactgtcccctcggacgtcgtgattttcccctcgtccgattcgcaggcccacccacctgagctcctttttagcgcctcgctccctgctctggggttttcgacctactccgtggcccaagtgcccagatggaagcctcaagcaagagctcctcaacctataccacgtcggtcgtggtcccccgcacttactatagagaatgagcatattcgcgcaacctttgatcccgatactggtctgcttatggagatcatgaatatgaatcaacaacttttgcttccagtccgacagaccttcttttggtacaacgcatcgatcggagataatgagtcggatcaagcatccggtgcttacatttttcggcctaatcagcagaaaccacttcccgtctcaagatgggcacaaatacatctggtcaagactccacttgtgcaagaagtgcaccagaacttttctgcatggtgctcgcaagtggttagactctaccctggtcagcgacatctcgaactggagtggtcggtgggacccatccctgtcggggacacttgggggaaagaagtcatctcgcgctttgatactccattggaaaccaaaggtagattttacactgactccaatggtagagaaattctggagaggaggagagattacagacctacctggaagctgaaccagactgaacctgtcgcaggcaattactacccagtcaatactagaatctacatcacggacggcaacatgcaacttacggtgctgactgaccgctcacaaggtggatcgagcctgagagatggttctcttgagctgatggtgcatagacggcttctgaaggatgatggcagaggagtttcagaacctttgatggagaatggaagtggcgcatgggtgcggggtcgtcatcttgtgctcctggacactgcacaagctgccgctgcagggcatcggcttcttgcagagcaagaagtgcttgcaccacaggtggtgctggcaccaggaggaggagcagcctacaatcttggagcaccaccaaggacccaattttcagggctgaggcgcgatctgccaccgtctgtgcatctcctcacccttgcgagctggggtccagaaatggtcctgctgagacttgaacatcaattcgcagtgggagaagattcggggagaaatcttagcgcacctgtcacccttaatctgcgagatcttttttctacctttacgattactcgtttgcaggagacgacccttgtggccaatcagctgagagaagccgcgtcgaggcttaagtggactaccaataccggcccaactcctcatcagaccccttaccagctcgatcccgccaacatcacccttgaaccgatggaaattcgcacttttctcgcaagcgtgcaatggaaagaggttgacggg

SEQ ID NO: 16547 - DNA, 3033 bp, synthetic construct
  misc_feature 1..3033: note = source = /note="Description of Artificial Sequence: Synthetic coding sequence"
  source 1..3033: mol_type = other DNA
atgggcgcttatgcacgggcttccggagtgtgcgcaaggggctgccttgacagcgccggtccctggacgatgagccgtgcattacgaccccctctcccccctctgtgtttcttcctgttgcttcttgccgctgcaggcgcaagagccgggggatatgagacctgccccaccgtgcagccgaatatgttgaacgtgcaccttctcccacacactcatgatgatgttggctggctgaagaccgtggatcagtacttctacggcatcaagaatgacatccagcacgccggagtccagtacattttagattccgtaatttccgctctgctcgctgaccctacaagacgctttatttatgttgagatcgccttcttctcacggtggtggcaccagcagaccaacgcaactcaggaggtggtgagggacctggtgaggcaaggacggctggagttcgcgaatggcggctgggtaatgaatgatgaagccgcaactcactatggcgcgatagtggaccaaatgaccttagggctcaggttcttggaggatacattcggtaacgatggacgcccccgagtggcgtggcacatcgatccatttggccattcccgcgaacaggctagtttgttcgcacagatgggcttcgacgggttttttttcggtaggttggactaccaagacaaatgggtgaggatgcagaagctggagatggaacaggtgtggcgggccagtacttctctgaaacctccgaccgcagatctgtttaccggcgtgctgccaaatggctacaaccctcctcgcaatctgtgttgggatgtgctgtgcgtggatcagcccctcgtagaggatccgcgctcgcccgagtataatgctaaggaactcgtcgattactttctcaatgtagccaccgctcaaggaagatactataggaccaaccatacagtgatgacgatgggctccgactttcagtacgaaaacgccaacatgtggttcaagaacctcgataaactcatacggctggttaacgcgcagcaggctaagggttccagcgtccatgttctttatagcacccctgcctgctacctgtgggaattgaacaaggctaatctgacctggtccgtgaagcatgatgatttttttccatatgcggatggcccacaccagttttggacgggctacttttccagcaggcctgccttaaagagatatgaaagacttagctataactttctgcaggtctgtaaccagttagaggcacttgtgggactggccgctaacgtgggcccatacggatccggcgacagtgccccgctgaacgaggctatggctgtcctccagcaccacgatgctgtttccggcacgtctcgccaacatgtcgcgaatgattatgcgagacaattagctgccggatggggcccctgcgaagtcctcctctcaaacgcattagctcgacttcgggggtttaaggaccacttcaccttctgccagcaattgaacatcagcatatgtcccctctctcagactgcagcgcgcttccaggtgattgtgtacaacccactcggcagaaaagtgaactggatggtccggctgccagtctctgagggcgttttcgtggttaaggatcctaatggcagaacagtcccctccgacgtggtgatttttccgtcatctgactctcaagcacatccccctgaacttctttttagcgcttccctccctgctttgggcttcagcacttatagtgtggcccaggtgccccgctggaagcctcaggcgagggcgccacagcccataccacgtagaagttggtcacctgcactgaccatcgagaacgagcatattagagcaacattcgaccccgatacgggtctactcatggaaatcatgaacatgaaccaacagctcttgttaccagttagacagacattcttttggtacaatgcgagcattggcgataatgagagtgaccaagcttctggcgcctatattttccgtcccaaccaacagaagcccctgcccgtgagtcgatgggcccagatacacctggtcaaaactcccctggttcaggaggtgcatcaaaactttagcgcatggtgttctcaggtggtacgactctaccctggccagcggcatttggagctggagtggagcgtgggcccaattcccgtcggagatacatggggcaaggaggtgatcagtcggtttgatactcccctagaaactaaaggccggttttacaccgattccaacgggagggaaatccttgaacggagaagggattacagacctacctggaagctcaatcaaaccgagcctgtggctggcaactactacccagtcaatacccgtatctatattaccgacggaaacatgcaactgaccgtgcttaccgacagatcccaaggcggatcttcactccgcgatgggtccttagagctaatggtgcacagacgcctcttaaaggacgacggcaggggagtttcagagcctttgatggagaacgggagcggtgcttgggtacgcgggcgccatctcgtactcttggacactgcccaggcagccgctgcagggcacaggctgctcgccgagcaggaggtcctggctcctcaggtcgtgctagcgccgggcggaggggccgcctataacctcggagctcccccacgcacacagttctccggccttagacgagatttgccgccgagcgtgcacttattgactctggcctcgtggggtcctgaaatggtgctgctcagactagaacatcaatttgcagtcggcgaggatagcggacgcaacttgtctgctcccgttacactgaacctcagagatctgttttccactttcaccatcacccgactacaagaaacaactctagttgcgaatcaacttcgggaggctgccagccggctgaagtggaccactaatacaggtccgaccccgcatcaaacaccctaccagcttgatcccgctaatatcacactggagcctatggagatccggaccttcttagccagtgttcagtggaaggaggtggacgga

SEQ ID NO: 16548 - DNA, 3033 bp, synthetic construct
  misc_feature 1..3033: note = source = /note="Description of Artificial Sequence: Synthetic coding sequence"
  source 1..3033: mol_type = other DNA
atgggggcgtacgctcgggcgtccggagtgtgtgcaagaggctgtctcgactccgccggaccatggaccatgtcgcgcgcacttaggcccccgttgcccccgctctgtttctttctgttgctgctggcggcggccggggcgcgcgcaggaggatatgagacttgtcccaccgtgcagcctaacatgctgaacgtgcacctgctgccacatactcacgacgatgtgggctggttgaaaaccgtggatcagtacttctacggaattaagaatgatatccaacatgctggagtgcaatacatcctggattccgtgatctctgcactgctcgccgaccctactcggcggttcatctacgtggaaattgcttttttcagcaggtggtggcaccagcaaactaatgccactcaagaggtggttcgtgaccttgtccgccagggaaggttggagttcgcgaacggaggctgggtgatgaacgacgaggcagccactcactacggggctatagtcgaccagatgactctgggcctccgcttcctcgaagatacctttggaaatgacggcagaccccgcgtggcatggcatatagatccgttcggccactcccgggagcaggcgtccttgttcgcacaaatgggattcgatggcttcttcttcggcagactggactaccaggacaagtgggtccggatgcagaagctcgagatggaacaggtatggcgagcctccacctccctgaaaccacctaccgccgatctgttcactggtgtgcttccgaatggatacaatccgccccggaacctgtgctgggacgtgctgtgtgtggaccaaccgctcgtcgaagatccacggtcgccggagtacaacgccaaagaacttgtggattactttctgaatgttgcaacggcgcagggccggtactaccggacgaaccacactgttatgaccatgggatccgactttcagtacgaaaacgcgaatatgtggttcaagaacctggacaaactgatccggttggtgaacgcccaacaggccaaggggtcatcggtgcacgtcctgtactcgacccccgcttgctatctctgggagctgaacaaagcaaacctgacctggtccgtgaaacatgatgatttcttcccgtacgccgacgggccacatcagttctggacgggctacttttcctcccggccagctttgaagcgctacgaacggctgtcgtacaatttccttcaggtctgcaaccagctggaagcactggtgggactcgccgccaatgtgggtccgtacggttcgggtgatagcgccccgctgaatgaggctatggcggtgctgcaacaccacgacgccgtctcggggacttctcggcaacacgtggccaacgattacgcgaggcaactcgcggccgggtggggtccatgtgaagtcctgttgtcaaatgcattggctaggctccgtgggtttaaggaccacttcacgttttgccagcagctgaatatcagcatctgcccgctctcccagaccgctgcgcgctttcaggtgatcgtgtacaaccctctgggccgcaaagtcaactggatggtgcgattgccagtgtctgagggagtgtttgtggtgaaagacccgaatggaagaactgtgccgtcagatgtggtcatcttcccttcgtcggattcacaggcccatccgcccgaacttctgttttcagccagcctgccggcactgggattctcaacttacagcgtggcgcaggtgccaaggtggaaacctcaggcgagggctccacagccgatcccgcgccgctcgtggagcccagctctcactattgaaaatgagcacatccgggccactttcgatccagataccggcctgttgatggagattatgaacatgaaccaacaactgctcctgcctgtgcgccaaaccttcttctggtacaacgcatcgatcggcgataatgagtcggaccaagcgtccggggcctacatctttagaccgaaccagcagaagccgctcccagtctcgcgctgggcgcagatacacttggtgaaaactcctctcgtccaagaagtgcatcaaaacttctcggcatggtgctcacaagttgtgcgactgtacccgggacagcgccatctggagctggaatggtcagtgggtccgatcccggtcggagacacctggggaaaggaggtgatcagccgctttgacactcccctcgaaaccaaaggccggttttacaccgactccaatgggagagagatcctggaacggagaagagactaccgccctacttggaaactcaatcagacggagccggtggcaggaaattactacccggtaaatacccgcatatacatcaccgacggaaacatgcaactgaccgtgctcacggatcggtcccaaggcggatcatccctgcgggacgggtcgctggaactcatggtgcacaggcgcttgctgaaggatgacggacggggagtcagcgagccactgatggaaaacggcagcggcgcctgggtgcgcggacgccatctggtcctcctggataccgcccaggctgcggcagcgggacacagattgctggcagaacaggaggtcttggcgccacaggtcgtgctcgctccgggaggtggcgccgcctacaacctcggtgccccaccaagaactcaattttccggactccggcgcgacctgcctccctcagtgcatctgctcactctggccagctggggacctgagatggtcctgctcagactggaacatcaattcgcagtgggcgaggactctggtcggaacctgagcgcccctgtcactctgaatcttcgcgatctcttctcaaccttcactatcacccgcctgcaggaaaccactctcgtcgctaaccaacttcgcgaggcagcatcgcgcctgaaatggactaccaacactggtcctacgccacaccaaaccccttaccagctggatccggcgaatatcaccctggaaccgatggagatccggacctttctggcctccgtgcagtggaaggaagtggacgga

SEQ ID NO: 16549 - DNA, 3033 bp, synthetic construct; identical to SEQ ID NO: 16524
  misc_feature 1..3033: note = source = /note="Description of Artificial Sequence: Synthetic coding sequence"
  source 1..3033: mol_type = other DNA

SEQ ID NO: 16550 - DNA, 3033 bp, synthetic construct
  misc_feature 1..3033: note = source = /note="Description of Artificial Sequence: Synthetic coding sequence"
  source 1..3033: mol_type = other DNA
atgggcgcctacgcgcgggcatccggagtgtgtgcccgcggatgcctggactcggcgggcccatggaccatgtcgcgggcactccggccgccactcccaccgttgtgcttctttctcttgctgcttgcggctgccggggcgcgggctggaggatacgaaacttgtccgactgtccagccgaacatgctgaacgtgcacttgctcccccacacccacgacgacgtgggctggttgaaaacggtggatcagtacttctacggaatcaagaacgacatccaacacgctggtgtgcagtacattctggacagcgtgatctcagctcttctcgccgaccctactcgcagattcatctacgttgagatcgccttcttctcgcggtggtggcaccaacagaccaacgcaacgcaggaggtggtgcgtgacctggtccggcagggacggttggaattcgctaatggtggatgggtcatgaatgacgaagcagccacccactacggagccatcgtggaccaaatgacgcttggactgcggttcctggaagatactttcggaaacgatggacgcccccgggtggcttggcatatcgacccgttcggacattccagggagcaggcgagcctgttcgcgcaaatgggcttcgatggattctttttcggacgactggattaccaggacaaatgggtcaggatgcaaaagctggaaatggaacaggtctggagagcgtccactagccttaagccaccaaccgcggatctcttcactggcgtgctgccgaacggatacaacccgccgcggaacctctgctgggatgttctgtgcgtggatcaaccactggtggaggaccctcggagcccagaatacaatgcgaaggaactggtggattacttccttaatgtggctaccgcccagggccggtactaccgcactaaccatactgtcatgaccatgggtagcgactttcagtatgaaaacgctaatatgtggttcaaaaatctcgataagttgatcagactggtcaacgcgcagcaagccaagggttcctccgtccatgtcctctactcaacgccggcctgctacctctgggaactgaacaaagccaacctcacctggagcgtgaaacatgacgactttttcccgtacgccgacggtcctcatcaattctggactggatacttctccagccgcccggctctcaaacggtacgagaggctctcgtataactttctgcaggtctgcaaccagctggaggcgctcgtgggactggccgccaacgtgggcccgtacgggtctggcgacagcgctccgctgaacgaggcaatggctgtgctccagcaccatgatgcggtgtccggcacttcgagacagcacgtggcaaatgactacgcgcgccagttggccgccggctgggggccttgcgaagtgctcctctcgaacgcactcgcacggctgcgcggcttcaaagaccatttcaccttttgccagcagctgaacatctccatttgcccgctgtcacagaccgccgccagattccaggtcatcgtgtacaacccgttgggacgcaaggtgaactggatggtgagactgcctgtgagcgagggtgtgtttgtggtgaaagatccgaatggtcggactgtgcccagcgacgtggtcatttttccaagctcagatagccaggcacacccgccagagttgctgttctcggcgtcactcccggctttgggcttttccacctactcagtggcccaggtgcctcgctggaagccgcaggcaagagcaccgcaacctatcccacgccggagctggtcccctgccctgacgatcgagaatgagcacatccgcgcgaccttcgacccggacactggactgctgatggaaatcatgaacatgaaccaacaactcttgttgcccgtccggcagaccttcttctggtacaatgcctccatcggggacaacgaatccgatcaagcgagcggggcctacatcttccgcccgaatcaacagaagccactgccagtgtcacgctgggctcaaattcacttggtgaaaacgccattggtccaggaggtgcatcaaaacttcagcgcatggtgcagccaggtggttcgtctctacccgggacaacgccatctggaattggagtggtccgtaggacctatcccagtgggggacacttgggggaaggaggtgatctcaagatttgatactccattggagactaaaggacggttctacaccgacagcaatggacgtgagatcctcgaacgccgcagagactatcggccgacttggaaattgaaccagaccgagccggtggcgggaaactactacccggtgaatactagaatttacatcaccgacgggaacatgcaactcactgtcctcaccgataggtcacagggcgggtcctcacttcgcgatggaagtcttgagctgatggtccatagacggctcctcaaggacgatggcagaggagtcagcgagcctctgatggaaaacggttcgggcgcatgggttcggggacgccatctggtgctcctggataccgcccaagctgccgccgcggggcaccggctgctggcggaacaggaagtgctggcaccgcaagtggtcctcgcccccggcggaggagccgcctacaatcttggggctccacccagaacccagtttagcggactccggcgcgatctccctccgagcgtccatctgctcactctggcctcgtggggaccggagatggtcctcttgagactcgaacaccaattcgcggtgggcgaggattcaggtcggaacctgtcagctcctgtgaccctcaacctgagagatctctttagcactttcaccatcacgcggctgcaggaaaccaccctggtcgccaatcaactcagagaggccgcttcccgccttaagtggaccaccaacaccggcccaaccccgcaccagaccccgtaccagctggacccagcaaacattacgctggaacctatggaaatccggacctttttggcatcagtgcagtggaaggaagtggatgga

SEQ ID NO: 16551 - DNA, 3033 bp, synthetic construct
  misc_feature 1..3033: note = source = /note="Description of Artificial Sequence: Synthetic coding sequence"
  source 1..3033: mol_type = other DNA
atgggagcctacgccagagcctcaggggtctgtgccaggggatgtcttgacagcgcagggccatggacgatgtccagggcattgcggcctcccctgcccccactttgtttttttcttctcctgctggctgccgctggggcgcgagctgggggatatgaaacctgtcccaccgttcaacccaacatgctgaacgtacatttgctgccgcacactcatgacgatgtcgggtggctcaagactgtggaccagtacttctacggtattaagaatgatattcagcatgccggggtccagtatatcctagatagcgtgatttcagctctgttagcagacccaacgcggcggttcatttacgtggagatcgccttcttttccaggtggtggcatcaacaaacgaacgcgactcaggaagtcgtgcgggacctcgttaggcagggtaggttagagttcgcaaatgggggctgggtgatgaatgatgaagccgccactcactatggggcaatcgtggatcagatgactttagggctgagattccttgaagatacctttggcaatgatgggcgccctcgggtggcttggcacattgacccgtttggacactcaagagagcaagcctccctctttgcgcagatgggcttcgatggcttctttttcgggaggctggactaccaggataaatgggtaaggatgcaaaaacttgaaatggagcaggtgtggagggcatctacctcgctaaaacctccaaccgcagatctgttcacgggggtgctgcctaacggctacaacccccctagaaatttgtgctgggacgtcttgtgtgtagatcagccgctggttgaggacccaaggagtcccgagtacaacgctaaagaacttgtggactatttcttgaatgtggcgaccgcccagggccgatactatcggacaaatcatacagtcatgaccatgggctccgactttcagtacgagaatgcaaacatgtggttcaagaacttggacaaattgatccgcctagttaacgcccagcaagcaaagggatcatccgtccatgtgctgtactctacacccgcctgttatctgtgggagcttaacaaggccaacctgacctggtccgtcaagcacgacgacttctttccatatgcggatggcccgcaccagttttggacagggtatttcagctcgcggcccgccctgaagaggtacgaacgcctgagttacaacttcctccaggtctgtaaccagctggaagctctggttggcctagcggcaaatgttggcccttacgggtctggcgatagtgccccactgaacgaggctatggctgtccttcagcaccacgatgctgtatccgggacttcccggcagcacgtcgccaacgattacgctcgtcagctggctgcgggatgggggccctgcgaggtacttctaagcaatgcgctggctagactgaggggattcaaggatcatttcaccttctgtcagcagttaaatatttctatttgccccctctcacaaactgctgcgcggttccaggtgattgtgtacaatcctttaggccgaaaggtgaactggatggtgagactgcccgtcagcgaaggggtgttcgtggttaaagatcctaacggccgaacagtgccatccgacgtagtgatcttcccgagttccgacagccaggcacatccacctgaactgctgttttccgcgagtctcccagcgctgggcttttctacgtactctgtcgcacaggttcctaggtggaagccacaggccagggcacctcagccaattccgagaagatcctggtctccggcactgacgatagagaatgaacacatccgcgcaacgtttgatcctgacaccggcctgctaatggagatcatgaatatgaaccagcaactcctcctccccgtgaggcagacttttttctggtataatgcatccattggcgacaatgaatcagaccaggcttctggtgcgtacatctttagacctaaccagcagaagccactcccggtctcacgatgggcacaaatccacttggtgaagactcctctggtgcaagaggtccatcaaaacttctcagcatggtgttcccaggtggtgcggctgtatcccggacagagacatctggagctggaatggtctgtaggacctatacccgttggtgatacgtggggcaaagaggtgatctcgcgatttgacactccactcgaaaccaaaggcagattctataccgacagtaacggacgtgagatactcgagcggaggagagattacaggcctacatggaagttgaatcagaccgaacccgtggcaggaaactactatccggttaacacccgcatttacatcacagatgggaatatgcagctgacggtgttgaccgatcgttcccagggcggaagtagtctgcgggacggatcgctcgaactaatggtgcatagacgtctactgaaggacgatggaagaggcgtgtccgagcccctcatggaaaacggctccggagcatgggtgcgagggcgccatttggtgctcctggacaccgcacaggctgcggctgctggccatcgcctcctcgccgaacaagaggttcttgccccccaggtggtgctggcccccggtggaggagccgcttataacctgggggctccccctcgcacccagttttccggcctgagacgggatctgccgccttcggtacatttgctgactcttgcctcctggggtccagagatggtgctcctaaggctggagcatcagttcgcagttggggaggattcgggcagaaatttgtctgctcctgtcacccttaatctccgcgatcttttctcaaccttcaccataaccagacttcaggaaacaacacttgtggccaaccagctaagggaggctgcctcccgattgaagtggaccaccaacacaggtccaaccccacatcaaaccccctatcagcttgacccagcgaatataacactggagccaatggaaatcaggacctttctcgcatccgtgcagtggaaggaagtggacggt

SEQ ID NO: 16552 - DNA, 3033 bp, synthetic construct
  misc_feature 1..3033: note = source = /note="Description of Artificial Sequence: Synthetic coding sequence"
  source 1..3033: mol_type = other DNA
atgggagcttacgcaagagcgtctggtgtgtgtgcccgcgggtgtcttgactccgcgggtccgtggactatgagccgtgctctccgcccacctttgcccccactgtgttttttcctcttgctgctggctgcagcgggagctcgagcaggcggctacgaaacctgtcctaccgtgcagcccaacatgcttaacgtgcatctgctcccacacacccatgatgatgtcggatggcttaagaccgtcgatcagtacttttatggcatcaaaaacgacattcagcatgcgggggtccaatacatcctggatagcgtgatttcagcactgctcgccgaccccactcgtaggtttatctacgtggaaattgcattcttttcgagatggtggcaccaacaaaccaacgcgacccaagaagtcgtcagagatctggtccgccaggggcggctggaattcgcaaatggcggttgggttatgaacgacgaagcagcgactcattacggtgcaatagtcgaccagatgacccttggcctgcgcttcctggaggacactttcggcaatgacggacgaccacgggtggcttggcacattgaccctttcggacattcgcgggagcaggcatctctttttgcccagatgggcttcgacggcttctttttcggacgactggattaccaggataaatgggtgcggatgcagaagctggaaatggaacaagtgtggcgggcatccacttccctgaagccgccaactgcagatttgttcaccggagtccttccgaatggttacaatccaccacgtaatttgtgctgggatgtgctgtgcgtggatcaacctcttgtggaagatccgagatccccggaatacaacgcaaaggaactggtggattactttctgaacgtggcgaccgctcaaggtcggtactaccgtaccaaccatactgtgatgaccatgggttcagattttcaatacgaaaacgcaaacatgtggtttaagaacttggataaacttattaggctggtcaatgcgcaacaagcgaaggggtcgtcggtccacgtgttgtactccacccctgcatgctatctttgggaactgaacaaagcaaacctgacctggtcggtgaagcatgacgacttttttccctacgccgatgggccacatcaattttggaccggttacttctcatcgcggcccgcactgaaaagatacgaacgcctgtcctacaacttcctgcaagtgtgcaatcaactggaggctcttgtcggactcgcagcaaacgtggggccttacggaagcggtgactccgcaccccttaacgaagccatggccgtcctccagcaccatgatgcagtctccggaactagcagacaacatgtcgccaacgactacgcgcggcaactcgcagccggatggggcccatgcgaagtgctcctcagcaacgcgctggcgaggctcagaggttttaaggatcactttactttttgccagcaactgaacatttcaatctgcccgctctcacagaccgctgctagatttcaggtcatcgtgtacaatccgctgggcagaaaggtgaactggatggttagacttccagtgtcagaaggagtctttgtcgtgaaggatcctaacggacgtactgtgccatcagatgtggtgatctttccttcctcagattcccaggcacatcctcctgaactccttttttcagcatcgttgccggccctgggtttctccacttactcagtcgcacaagtgccacggtggaaaccccaggcaagagccccgcagccaattccacggagatcctggagcccagctctgactattgagaatgagcatatccgcgccacctttgatcctgatactggacttctcatggagatcatgaatatgaaccagcagctcctgcttcctgtgcgccaaacgtttttctggtacaacgccagcataggagacaacgagtccgatcaggcctcaggggcatacattttcaggcctaatcaacagaagccacttcccgtgtcacgctgggcgcaaattcatcttgtcaaaactcctctcgttcaggaagtccatcaaaacttctccgcttggtgctcccaagtggttcgtctctaccccggtcagcgccatcttgaactggaatggtccgtggggccaattccagtcggcgatacttggggcaaggaagtgatctcccggttcgacacgccactggaaaccaaaggccgattctatacggattcaaacgggcgcgaaatcctcgaaaggagaagagattaccgccctacctggaagttgaaccagactgaaccagtggcaggaaattactaccccgttaacaccaggatttacattaccgacgggaacatgcagttgactgtgctgacggaccgctcgcaaggtggatcgagccttcgcgacggttcgcttgaactgatggtgcatcgccgccttctcaaagatgacggccggggggtgtccgaaccactcatggaaaacggatcgggggcatgggtcagaggtagacatctcgtgctgctggatactgcacaggcggcagctgcaggacaccgcctccttgctgaacaagaagtgctggcgcctcaagtcgtcctcgcacccggaggcggagcggcgtacaatctgggagcaccgcctagaactcagttctcgggccttagaagggaccttcctccctccgtgcatcttcttactcttgcttcgtggggacctgagatggtgcttcttcgattggagcatcagttcgcagtcggtgaagattcaggaagaaatcttagtgcacctgtgactctcaacctccgcgatctgtttagcacctttactataaccaggctccaggaaaccaccctcgtcgctaaccaacttagggaagcggcctcgaggcttaaatggaccactaataccggacccactccacatcaaactccctaccaacttgatcctgccaatatcactctggaacctatggaaatccggacgtttttggcatcggtgcaatggaaggaggtggacggt

SEQ ID NO: 16553 - DNA, 3033 bp, synthetic construct
  misc_feature 1..3033: note = source = /note="Description of Artificial Sequence: Synthetic coding sequence"
  source 1..3033: mol_type = other DNA
atgggtgcatatgcccgcgctagcggagtgtgtgcacgcggatgcctggactccgcagggccttggactatgagtcgggctctccgcccccctctccctccactgtgttttttcctgctgcttttggccgctgcgggtgcgagggcaggagggtacgaaacctgtcctacggtgcagcctaacatgcttaacgtgcacctcttgccacatacgcacgatgatgtcggctggctgaaaaccgtggaccagtacttttatgggatcaaaaatgatatccaacatgcaggtgtgcaatacattctggattcggtgataagcgccttgcttgcagatccaacccggcgctttatctacgtggaaattgcattctttagccgctggtggcatcagcaaaccaatgcaacccaggaagtcgtgcgcgaccttgtgaggcagggaaggttggaatttgcaaacgggggctgggtcatgaacgacgaggctgcaactcactatggcgctatagtggatcaaatgaccctgggactccgcttcctcgaagatacctttggaaacgacggacgcccaagagtggcttggcatatagatcctttcggacattcgcgggaacaggcatccctttttgcacaaatgggcttcgatggatttttctttggaaggctggattaccaagataagtgggtgcggatgcaaaagctcgaaatggaacaagtgtggagggcatcaacctcgctgaaaccccctactgcagacctctttactggagttctgcctaatggatacaatccacctcgcaatctctgctgggacgtcctttgcgtggatcagcctctggttgaagatcctagatcaccggaatacaatgcaaaggaactggtggattactttctgaatgtggcaactgcccagggaagatactaccgcacgaaccatactgtcatgactatgggctctgattttcagtacgagaatgccaacatgtggtttaagaatcttgataaactgatccgcctggtgaacgcacagcaggccaagggctccagcgtgcacgtgctgtactccaccccggcctgctacctgtgggaacttaacaaggcaaacctcacctggtccgtcaagcatgatgacttctttccatacgcagatggacctcatcagttttggaccgggtacttctcgagccggcctgcacttaagagatacgagcgacttagctacaactttctccaagtgtgtaatcaactggaagccctggtggggctggccgctaacgtgggaccttacggatcaggtgacagcgccccgctgaacgaagcgatggctgtccttcaacatcacgatgcagttagcggcacgtcacgccagcacgtcgccaacgattatgcaagacaacttgcagcaggatgggggccctgtgaagtccttctgtccaatgcgctggccaggctgcgcggatttaaggatcacttcaccttctgccagcagctgaacatttccatctgtcccctgtcgcagactgcagcacgatttcaagtgattgtgtacaatcctttggggagaaaggtgaattggatggtccggcttcccgtgtcagaaggcgtgtttgtggtcaaggacccgaacgggcgcaccgtgccgtcagacgtggtgatatttcccagcagcgactcgcaagcccatcctccagaactgcttttttccgcgtcgctccctgccttgggattttcgacctactcagtggcacaggtccctagatggaagcctcaagcgcgagcaccacagcctattccacgtcgatcgtggtccccggccctgactatagagaacgagcacattcgtgccacctttgaccctgacactggtctgctgatggagatcatgaacatgaaccagcaactgcttttgcctgtgcgccagacttttttctggtacaacgcgtccattggggacaacgagtcggaccaggcaagcggagcctatatctttcgtccgaaccagcagaaacccctcccagtttcccgctgggcccagatccatctggtcaaaacccctcttgtccaagaagtccaccagaatttctcggcgtggtgttcacaagtggttcgcctttacccgggacaaagacatctggaactggaatggtccgtgggtcccattcctgtgggagatacctggggcaaggaggtgatttcacggttcgatactcctctcgagactaaaggcagattttacactgacagcaacggtagagaaattctcgaaagacgtcgtgattaccgaccgacctggaagctgaatcaaactgagccagtggcaggtaactactaccctgttaacacccgtatatacatcactgacggtaacatgcaacttaccgtgctgactgatcggtcacaaggaggatcgtcgctgagagatggttcgctggaacttatggtgcatagacggcttctgaaggatgacgggcgaggtgtctccgagccgttgatggaaaacggatcaggagcatgggtgaggggtcggcatttggtgctccttgacactgcacaggccgccgcggctgggcaccgccttctggcagagcaagaagtgctggcaccacaggtcgtgttggccccaggcggaggggctgcgtacaacctcggcgcaccccctagaacccagttttcgggactgagacgggaccttccgccttccgtgcatctgcttaccctggcgtcctggggaccagaaatggtgctgctgcgcctggaacaccaattcgcagtgggagaggactcgggacgcaacctgtcggctccagtgactctgaatctgagagatcttttctccacttttacgatcactcggctgcaagaaaccactcttgtggcaaatcaacttcgtgaagccgcgagccggttgaaatggactacgaataccggacccacccctcatcaaaccccttaccagcttgatcctgctaacataaccctggaacccatggagattagaacctttctggcatcggtccagtggaaggaagtcgacggc

SEQ ID NO: 16554 - DNA, 3033 bp, synthetic construct
  misc_feature 1..3033: note = source = /note="Description of Artificial Sequence: Synthetic coding sequence"
  source 1..3033: mol_type = other DNA
atgggagcatacgcacgcgcatccggtgtctgtgcgcgaggttgtttggacagcgccggcccctggaccatgtcacgggcattgaggcctcctctccctcctctgtgttttttcctgcttctgctggccgcagcaggtgccagagctgggggttacgagacgtgtcctactgtgcagccgaatatgctgaacgtgcatctgctgccacatactcacgacgatgtgggttggctgaaaaccgtggaccagtacttttacggaataaagaatgatatacaacatgccggcgtgcaatacatccttgatagcgtgatttcagcactccttgcggatccgacgaggcggttcatttacgtcgaaatcgctttcttctcccgctggtggcaccaacagaccaatgcaactcaagaagtggttagagacttggtccgacaaggacgactggagtttgcaaacggtggttgggtcatgaatgatgaagccgcaacccattacggtgcgatcgtggaccagatgaccctcggacttagatttctggaagatacttttggtaacgatggacgtccgcgagtggcctggcatattgacccatttgggcactcgcgcgaacaagccagcctttttgcacagatgggcttcgatggattcttttttgggaggctcgactaccaagataaatgggttagaatgcagaaactcgaaatggaacaggtctggcgggcaagcacttcgctgaagcctccaaccgccgatctgtttaccggggtgcttcctaacgggtacaaccccccaaggaatctgtgttgggatgttctttgcgtggaccaaccgctcgtcgaagatcccagaagccctgagtacaatgcaaaggagctcgtggattacttcctgaatgtggcaaccgcacaaggtaggtattacaggactaaccacacggtgatgaccatgggatccgatttccaatatgaaaacgcaaacatgtggtttaagaacctggataagctgatccgactggtcaatgcacaacaggcaaagggctcctcagtccatgtcctttattccacccccgcatgctacctctgggagctgaacaaggctaacctcacgtggtccgttaaacatgacgacttctttccatacgcagatggcccacaccaattttggaccgggtacttttcaagtcgccctgccctcaagcgatacgaacgactttcgtacaatttccttcaggtgtgcaaccagcttgaagcattggtgggactggctgccaacgtgggaccctacggttcgggagattccgctccgcttaatgaagctatggcagtcctgcaacatcacgatgcagtgtcaggaacttccaggcagcatgtcgcgaatgactatgcaagacaacttgccgctggctggggaccatgtgaggtcctgctctctaatgctttggcacgccttcggggtttcaaagatcatttcaccttttgtcagcaattgaacatctctatttgccctctgagccagactgcagcacgcttccaagtcatcgtgtacaaccccctgggaagaaaggtgaactggatggtgagactcccagtttcggagggagtgtttgtggtcaaggacccaaacggtcggacggtgccttctgatgttgtgatttttccttcctccgactcccaagcgcatccacctgaactcctcttttcggcctctctgcccgcacttgggttctccacttactctgtggcacaggtcccacgctggaagcctcaagcacgggcaccgcaacctattccacggagatcctggtcgccggccctgactattgaaaatgaacatatcagggcgacgtttgatcccgacactggcctgcttatggagattatgaacatgaaccagcaactgctccttcccgtcagacaaactttcttttggtacaacgcgagcatcggagataacgaaagcgatcaggcctccggagcatacatctttagacctaatcagcagaagcctttgccagtgtcgcggtgggcacaaattcatctcgtcaagacccctcttgtgcaggaagtgcaccaaaacttcagcgcctggtgttcgcaagtggtcagattgtacccggggcagcgccatcttgagcttgaatggagcgtggggccaattcccgtcggagatacctggggcaaagaagtgatttcgcgcttcgatactccccttgaaaccaagggaaggttttacaccgatagtaacggtcgggaaatacttgaaagacgtagagactaccggcctacctggaaactgaaccagactgaaccggtggccggtaattactacccagtgaacaccagaatctacattactgacggtaacatgcaacttacggtgctgaccgaccgatcacaaggcgggagctcactgagggatggttcgttggagttgatggtccacagacgactgcttaaggatgatggacgcggagtgtccgagccgttgatggagaacggaagcggtgcctgggtgcgaggacggcacctggtgcttcttgatactgcacaggcggccgcagccggtcatcggcttcttgcggagcaagaagtgctcgcgcctcaggtcgtgctcgccccagggggcggggctgcctacaacttgggtgctcctccacgtacccagtttagcggacttaggcgagatttgcctccatccgtgcatctcctgacccttgcctcctgggggcctgagatggtgctcctgcgcctggaacaccaatttgcagtgggcgaggactcgggacgaaatctcagcgccccagtgaccctcaatctgagggaccttttttcgacttttaccattactcgacttcaggaaaccaccttggtggccaatcaactgcgagaggccgccagccgactgaaatggactacgaacaccggaccgaccccacatcaaactccttaccaactggaccctgccaacattactttggagccgatggaaataaggacgttccttgcgagcgtacaatggaaggaagtggatggc

SEQ ID NO: 16555 - DNA, 3033 bp, synthetic construct
  misc_feature 1..3033: note = source = /note="Description of Artificial Sequence: Synthetic coding sequence"
  source 1..3033: mol_type = other DNA
atgggcgcctatgcaagagcgtccggcgtttgtgcccgcggatgtctggatagtgccggtccatggaccatgagtagagcactgagaccgcctctgccccccctttgcttcttcttgctgctgctagcagccgctggagcccgcgccggcggctacgaaacctgcccgactgttcaaccgaatatgcttaatgtacatcttctcccgcatacacatgacgatgttggctggctgaaaacagtagatcaatacttttatggcatcaaaaatgatattcagcacgcaggagtgcagtatattcttgattctgtgatctctgctctccttgcagaccccacgagacgctttatatatgttgaaatcgcctttttcagtagatggtggcatcagcaaacgaatgcgacccaagaagtagtacgagacttagttcgccaaggccgcctggaatttgccaacggtgggtgggtgatgaacgatgaagctgctacacactatggtgctattgttgatcagatgacgctgggccttagatttctcgaagacacgtttgggaacgacggacgtccgagagtggcgtggcacattgacccattcggtcattcaagagaacaggcgtcgctgtttgctcaaatgggtttcgatggcttctttttcggcagattggattaccaagataagtgggtgaggatgcaaaagctcgaaatggaacaggtctggcgagccagtacttcactcaaaccgccgaccgcagatcttttcactggagtcctgccgaacggttataacccgccgcgcaatctgtgctgggacgttctttgtgtagaccagccgttagtagaggacccgaggtcgcctgaatataatgccaaagagttggtcgattactttctaaatgtagctacggcacaaggccgttactatcggacgaatcacacagtgatgaccatgggttctgattttcagtacgaaaatgcaaatatgtggtttaagaatttggataaattgataaggctggtgaatgctcagcaagctaaaggcagctcggtccatgttttgtatagcacgccggcatgctacctctgggaactgaacaaggcaaacttaacatggagcgtgaaacatgatgacttttttccgtatgccgatgggccacaccagttctggaccggatattttagctcacgcccggccctgaagcgctatgagagactttcttataactttttgcaagtctgtaatcagttagaggcccttgttgggctggccgcaaacgtaggtccttatggaagcggcgattcagcaccccttaatgaggctatggccgtgttgcagcatcacgatgccgtttcaggtacttcccggcagcatgtagccaatgattatgcgcgacaactagcggctggttggggaccttgcgaggtactgttgtcaaacgcactggcacgtttgcgtggttttaaagatcattttacgttctgtcaacaattgaatatctcaatttgcccgctgagccagacggccgcccggtttcaagtaatcgtttataatcctttaggacgtaaagttaactggatggttcgtcttccggtgtcagaaggggtatttgtagtcaaggatccgaacggccggacggtgccatctgacgtggtgatctttccgtcgtccgatagccaagctcatccaccggaacttctatttagtgcatcacttccggcgttaggcttttcaacatattcagttgcgcaggtacctcggtggaaaccacaggcgagagccccgcagccgatcccacggaggagttggtccccggctctcacgatcgagaatgaacatatccgagccacgtttgatccagatactggactgctaatggagatcatgaacatgaatcagcagttgctcttgcccgtgaggcagacattcttctggtataatgccagtattggggacaatgaatctgaccaggcttccggggcctacatttttcggccgaatcagcaaaaaccgttgccggtgtcaagatgggcccagattcatcttgtaaagactcctctggtacaagaagtccatcaaaacttctcagcctggtgctctcaggtcgtccggttatatcctggtcaacgccatctagagttggagtggtctgtcggacctatacccgtgggcgatacctggggaaaagaagttatatcaagatttgataccccgttagaaacaaagggcagattttacacggactcgaatggaagggagatcctggaacggagacgcgattatagaccgacatggaaactgaaccagacggaaccggttgcaggcaattactatcctgtcaacactcgtatttacattactgacggaaacatgcaactgacagtattgacagatagatctcagggagggtcatcactacgcgacggctctttggaactgatggtgcatcggaggcttctgaaagacgatgggcgtggagtgagcgaacctcttatggaaaacggaagcggagcctgggtgcgtggaagacatctagttttattagatacagcacaagctgcggcggctggccatcgcctactggccgaacaagaagttttagccccccaggtagtattggcgcctggtggcggtgcggcatataaccttggggcgccaccgaggactcaattttcgggcttacgcagggatcttcctccttcagtacatctgttaactttagcttcttggggaccggaaatggttcttttacgtctcgaacatcaatttgccgtcggtgaagattcaggtagaaatttatccgcaccggtgacactgaacttaagagacttgttttcgacattcactattaccagactgcaagaaacaacattggtagccaaccagttgcgcgaagcagcctcacgccttaaatggaccacaaatactggaccgacgccgcatcaaacaccgtatcagttggaccctgcaaacatcaccttagaaccgatggaaatcaggaccttcttggcgtcagttcaatggaaagaggttgacgga

SEQ ID NO: 16556 - DNA, 3033 bp, synthetic construct
  misc_feature 1..3033: note = source = /note="Description of Artificial Sequence: Synthetic coding sequence"
  source 1..3033: mol_type = other DNA
atgggtgcttacgcaagagcctccggtgtgtgcgcacggggctgtcttgactcagcaggaccttggaccatgtccagggcgctgcgaccgccacttcctccgctgtgtttctttctcctgctccttgcagcagccggggcaagagcaggaggatacgaaacctgtcccactgtccagccaaacatgctcaatgtgcatcttcttccccatacccacgacgacgtgggttggctgaaaaccgtggatcagtacttctacgggataaagaacgacatccaacatgccggagtgcagtacattcttgattccgtgatctcggccctgctggcagatcctacccggagattcatttacgtggaaatcgcatttttctcacggtggtggcaccagcaaaccaacgccactcaagaagtggtgcgagatctggtgaggcaaggacgactggagtttgcaaatggaggttgggtgatgaacgatgaagcagccacccactacggtgcaatcgtggaccaaatgaccctcggtttgcgctttctcgaggacacctttgggaacgacggacgtccaagagtcgcatggcatatagacccttttggacattcccgcgaacaagcatcgctctttgcgcagatgggttttgatggtttctttttcggccgtctggactatcaggataaatgggtgcggatgcaaaagttggagatggagcaagtctggagggcttcgacttcacttaagcctcctacggctgatctcttcactggcgtgcttcctaacggctacaatcctcccaggaatctttgttgggatgtgctgtgcgtcgatcaaccactggtggaggacccccgttcccctgaatacaacgccaaggaactggttgattactttttgaacgtcgcgaccgcccaagggcggtactacagaacgaatcacaccgtcatgactatgggttcggatttccaatacgaaaatgcgaacatgtggtttaagaacctcgataagctcattagactggtgaacgcacaacaggctaagggatcatccgtgcatgtcctgtactccacccctgcttgttacctttgggagcttaacaaggccaacctgacgtggtccgtcaagcatgatgatttctttccttacgctgatggtcctcatcaattttggactggttacttctcctcccggcccgcacttaagcgctacgaacggctttcatacaactttctccaagtttgtaaccagcttgaagctcttgtgggtctggcagccaatgtgggaccatacggctccggggattcagcgccactcaatgaggccatggcagtgttgcagcaccatgacgcagtgagcggcacttcgcgccagcatgtggccaacgattacgcccgccaacttgcggcaggctggggtccatgcgaagtgctgctctcgaacgccctggcacgcctgagaggtttcaaggatcactttacgttctgtcagcagcttaacatctcaatttgtcctctttcacagacggcagcaagatttcaggtgatcgtgtacaacccccttggtcgaaaggtgaactggatggtgaggctgccagtctccgaaggagtgttcgtggtgaaagaccccaatggacggaccgtcccttcagatgtggtgatcttcccatcctccgattcgcaagcacatcctcccgaattgctgttttcagcctcactgcctgcacttggattctcgacctactctgtggcacaagtgcctagatggaaacctcaggcacgagcaccgcagcccattccacgacggtcatggtcgcccgcactcactattgaaaatgagcatattagagccaccttcgatccagacaccggactcctgatggaaatcatgaacatgaaccagcagctcctccttccggtgagacaaactttcttttggtataacgcatccattggtgataatgaaagcgaccaggcgtccggcgcatacattttccgacctaatcagcaaaagccactgcccgtcagccggtgggcccagatccaccttgtgaaaactcctctggtgcaggaggtccaccaaaactttagcgcatggtgtagccaagtggtgcgactgtacccaggacagcgtcatcttgaacttgaatggtcggtgggacctattcctgtgggggacacctggggaaaagaggtgataagcaggtttgatacgccgctggaaaccaagggccggttttacactgatagcaatggcagagaaattctggaacgtcggcgtgattaccggccaacctggaagctgaatcagactgaacctgtggctggtaattactatccagtgaataccagaatctacataactgacggcaacatgcagctgaccgtcctcacggatcgcagccaggggggttcctccctccgagacggatcgcttgagctcatggtccacagaaggctgttgaaagacgacggccgcggagtgtcagaacctctgatggaaaatgggagcggggcctgggtgagggggaggcatcttgtcctgctggatactgcacaggcagcagccgccggacatagacttctcgcggagcaagaggtccttgccccacaagtcgtgctggcacctgggggtggagccgcttacaatctcggtgcaccccctagaacccagttttcagggcttagacgtgatcttcctcctagcgtccatctgcttacgctcgcatcgtggggccctgaaatggtgctgttgcggcttgaacatcaatttgcagtcggggaagattcgggtcgcaatctttccgcacctgtgacccttaacctccgagatctctttagcacctttactattaccagactgcaagaaacgaccttggtggcaaatcagcttagagaagctgcgtccaggctgaagtggacgacgaataccgggcctaccccgcaccaaacgccataccaactcgatccggctaacattacccttgaacccatggagattcgaacttttcttgcatcggtccagtggaaggaggtcgacggc

SEQ ID NO: 16557 - DNA, 3033 bp, synthetic construct
  misc_feature 1..3033: note = source = /note="Description of Artificial Sequence: Synthetic coding sequence"
  source 1..3033: mol_type = other DNA
atgggagcatatgcaagagcatcaggagtttgtgcaagaggatgtttagattcagcaggaccttggactatgagtcgtgctttacgtccacctttaccaccactttgtttttttttattattattagctgcagcaggggcacgtgccggaggatatgaaacatgtccaactgttcaaccaaacatgttaaatgttcatttattaccacatactcatgatgatgtgggttggttaaaaacagttgatcaatatttttatggtattaaaaatgatattcaacatgctggagtacaatatattcttgattcagttattagtgctcttttagcagatccaactagacgatttatttatgttgaaatcgcatttttttcaaggtggtggcatcaacaaacaaatgcaactcaagaagtagttagagatttagtaagacaaggtagattggaattcgctaatggtggatgggttatgaatgatgaagcagcaacacattatggagcaattgttgatcaaatgacacttgggttaagattccttgaagatactttcggtaatgatggaagaccacgagtagcatggcatattgatccatttgggcatagtagagaacaagcttctttatttgcacaaatgggatttgatggttttttctttggtcgattggattatcaagataagtgggttagaatgcaaaaacttgaaatggaacaagtttggagagcttctacttcacttaaacctccaacagcagatctatttacaggagttttaccaaatggatacaaccctccaagaaatttatgctgggatgtactttgtgttgatcaaccacttgttgaagatccacgttctcctgaatataatgctaaagaattagtagactatttcttaaatgttgctacagctcaaggaagatattatagaacaaatcatacagttatgactatgggttcagattttcaatatgaaaatgcaaatatgtggttcaagaatttagataaattaataagacttgttaatgcacagcaagcaaaaggttcatcagttcatgtattatactcaactccagcatgttacttatgggaacttaataaagctaaccttacatggtctgttaaacatgatgactttttcccatatgcagatggaccacatcaattttggacaggatatttttcatcacgtccagctttaaaaaggtatgaaagacttagctataactttcttcaagtttgtaatcaacttgaagctttagttggattagcagctaatgttggaccttatggatctggtgattctgctccacttaatgaagcaatggctgttttacaacaccatgatgctgtatctggaacatctagacaacatgttgcaaatgattatgcaagacaacttgctgctggttggggaccttgtgaagttttattatctaatgctttggctagacttagaggatttaaagatcattttacattttgtcaacaacttaatatatctatttgtccattatcacagactgctgctagatttcaagtcattgtttataatccacttggaagaaaggttaattggatggttagattacctgtgtcagagggtgtttttgttgttaaagaccctaatggtagaactgttcctagtgacgttgttatttttccatcttcagattcacaagctcatccaccagaattgttattttcagcatcattaccagctttgggtttttcaacatatagtgttgcacaagtacctagatggaaaccacaagcaagagcaccacaacctattccaagaagatcatggtcaccagccttaacaattgaaaacgaacatattagagcaacttttgatccagatactggacttttaatggaaataatgaatatgaaccaacaacttcttttaccagttagacaaacatttttttggtataatgcatcaatcggagataatgaaagtgatcaagcatcgggagcttatatattcagaccaaatcaacaaaaaccattaccagttagtagatgggcacaaattcatttagtaaaaacaccattagttcaagaagtacatcaaaacttttcagcatggtgttcacaagttgttagactttatccaggacaaagacatttggagttagaatggagcgtcggtcctattccagtaggagatacttggggaaaagaagttatatctagattcgacacaccattagaaacaaaaggaagattttatactgattcaaatggaagagaaattcttgaaagaagaagagattatcgtcctacatggaagttaaatcaaacagagccagttgctggtaattattacccagtaaatactagaatctatattactgatggaaatatgcaattaacagttcttactgatagatctcagggaggtagtagtttaagagacggatcacttgaattaatggtgcatagaaggctacttaaagatgatggtagaggtgttagtgaaccacttatggaaaacggttcaggtgcttgggtaagaggtagacatctagttttattagatactgcacaagctgctgcagccggacatagattacttgcagaacaagaagtattagcaccacaagttgttttagcacctggaggaggagcagcttataatttaggagcaccaccaagaacacaatttagtggtttaagaagagatttgccaccttcagttcatttactaactttagcatcttggggtccagaaatggtattattaagactcgaacatcaatttgcagttggtgaagattcaggaagaaacctttcagccccagtaaccttaaatttacgagatttattttcaacatttacaattactagattacaagaaactacacttgtagcaaatcaattaagagaagcagcttcaagactcaagtggacaactaatactggaccaacacctcatcaaacgccatatcaattagatccagcaaatattactttagagccaatggaaattcgtacctttctagcttcagtacaatggaaagaagtagatggt

SEQ ID NO: 16558 - DNA, 3033 bp, synthetic construct
  misc_feature 1..3033: note = source = /note="Description of Artificial Sequence: Synthetic coding sequence"
  source 1..3033: mol_type = other DNA
atgggagcttatgctcgagcgtctggcgtgtgtgcaaggggttgcctggattcagctggcccttggaccatgagcagagccttgcggccaccacttccccctctctgcttttttctgcttcttctggccgccgccggtgcaagagctggaggttacgagacttgtccaaccgtgcagccgaacatgctcaatgtccaccttcttcctcacacccatgatgatgtgggctggctgaaaactgtggatcaatacttctatggaattaagaacgatattcaacacgctggtgtgcaatacatacttgattcggtcatctcggccctgctggcagatccgactaggaggttcatatatgtggaaattgcattcttttcacggtggtggcatcagcaaaccaatgcaacgcaagaagtggtccgcgatcttgtgcgtcagggacgccttgaattcgcaaacggtggatgggtgatgaatgatgaagcagcaactcattatggtgcaatcgtggatcagatgaccctgggcctccgctttctggaagatactttcggaaacgacggcagaccacgagtcgcatggcatattgatccatttggtcatagccgggaacaggcaagcctgttcgcacaaatgggttttgacggtttcttttttggacgtctggattaccaagataagtgggtgaggatgcagaagctggagatggaacaggtctggcgtgcgagcaccagccttaagcctccaactgcagatctctttactggagtgctgccaaacggatacaaccctccccgcaacctttgctgggatgtgctgtgtgttgaccagcctctggtggaggaccctagatcccctgaatacaatgcaaaggagctggtcgactacttccttaacgtcgcaaccgcacaaggacgatactaccgcaccaatcataccgtgatgacgatggggtcggatttccagtacgaaaacgcgaacatgtggttcaagaaccttgataagctcattcgcctggtgaatgcacagcaagcaaagggatcctccgtgcacgtcttgtactccactcccgcctgctacctctgggaactgaacaaagccaacttgacgtggtcagtgaagcatgatgactttttcccgtacgcggatgggcctcatcaattctggactggatacttctccagcagaccggcacttaagcgctacgagagactcagctacaattttcttcaagtgtgtaatcaactggaggcacttgtcggacttgcagcaaacgtgggaccgtatggttcgggagattcggccccactgaacgaagcaatggctgtccttcagcatcacgatgcagtttcagggacttcgaggcaacacgtggctaacgattacgcgcgtcagctggcagcaggatggggcccttgcgaagtgctgctgtcaaacgcattggctaggctgcgagggtttaaagatcatttcactttttgtcaacagctcaacataagcatttgtccattgtcacaaactgcagcccgctttcaagtcatagtctacaacccccttggaagaaaggtgaactggatggtgcggcttccagtctcggaaggagtgtttgtggtcaaggatccaaatggtagaaccgtgccctcagatgtcgtgatctttccttcgtcggatagccaagcccaccctcctgaacttcttttttccgcatcgctgccagcccttggattcagcacctactcggtcgcgcaagtgcccagatggaagccccaggcacgtgcacctcaacctatacctagaagaagctggtcccctgcccttaccatcgaaaatgagcatatccgcgcaacttttgatccagatactggactcctgatggaaatcatgaacatgaaccaacaactccttctgccagtgcgtcaaacctttttctggtacaatgcatccattggtgataacgagtccgatcaggcttcaggtgcctacatattccgccccaaccaacagaagccccttcctgttagccgttgggcccagatacatctggtgaaaacccccctggtccaggaagtgcaccagaatttctccgcctggtgctcccaagtcgtcagactttaccctggtcaacgccacctcgagctggagtggtccgtgggtcctattccagtgggagacacttggggtaaggaagtgatcagccggtttgacactcctctggagacgaagggcaggttctacactgactcaaacggccgcgagattcttgaacgccgaagagactacagacctacttggaaactgaaccaaaccgagcctgtggcaggcaactactaccctgtcaacactcgtatttacattaccgacggcaacatgcaacttactgtgcttaccgatagatcacaaggaggatcctcgctgagagatggatcgctcgaactcatggtccatcgacggttgcttaaggacgacggaagaggagtgtcggagccactgatggaaaatggctcgggtgcctgggttcgaggtcggcacctggtgctgctggacactgcccaggcggcggcggcgggacacagactgctggcggaacaagaagtgcttgcacctcaggtcgtgctcgcacctggtggaggtgcagcctacaacttgggtgcaccacccaggacccagttttccggtcttaggagagatctcccaccatccgtgcaccttctgaccctggcatcatggggacctgagatggttttgctgcgcctggagcaccagttcgccgtgggcgaagattcagggcgtaatctgtcagcgcctgttactttgaacttgagggatcttttttccacgtttaccatcactcgactccaagaaaccactctcgtcgcaaatcaactgagggaagcagcaagccgcctcaagtggactactaacaccgggccgacccctcatcagaccccataccagcttgatcccgcaaacatcaccttggagcctatggagattagaaccttccttgcatccgtccagtggaaagaggtggacgga

SEQ ID NO: 16559 - DNA, 3033 bp, synthetic construct
  misc_feature 1..3033: note = source = /note="Description of Artificial Sequence: Synthetic coding sequence"
  source 1..3033: mol_type = other DNA
atgggggcatacgctagagccagcggtgtgtgcgcccgggggtgcctggattcggccggtccgtggactatgtcgagagctctgaggcctcctctcccacccctgtgtttcttcctcctgctgctggcagcagcgggtgcacgggccggaggatacgagacgtgccctaccgtgcagccgaatatgctgaacgtgcatttgctgccacacacccacgatgacgtgggatggctcaagaccgtggatcagtacttctacggaatcaagaacgacatccagcacgcgggtgtccagtacatcctggattcggtgatctcggcactgctcgctgacccgacccgccgctttatctacgtcgagatcgcgttcttctcccgctggtggcatcagcagactaacgccacgcaagaggtggtgcgggacttggttcgccaagggcggctcgagttcgccaacggtggatgggtgatgaacgatgaagcagcaacccattacggagccatcgtcgaccagatgactcttggactccggttccttgaagatactttcggaaatgatggtagaccccgagtggcctggcacattgacccgttcgggcactcaagggaacaggcatctctgttcgcccagatgggattcgatggattctttttcggccgcctggactaccaggacaagtgggtgcggatgcaaaagttggaaatggaacaggtgtggagagcttccacctccctcaaaccgcctactgccgatctcttcaccggagtgctgcctaatggatacaaccctcctcggaatctgtgctgggatgtgctgtgcgtggatcaaccgctcgtcgaggacccgcgaagcccggaatacaacgcgaaggagttggtggactactttctgaacgtcgcgacggcccaaggaagatactaccggactaatcacaccgtcatgactatgggctccgacttccaatacgagaacgcaaacatgtggttcaagaatctggacaaactgatccgcctggtgaacgcacagcaggccaaaggatcctcagtccatgtgctgtactccactcccgcctgttacttgtgggagttgaataaagcaaatctgacgtggtccgtcaagcatgatgacttttttccatacgcggacggacctcatcagttctggactggatatttctcgtctcggccggcactcaaacgatacgaacgtctctcatacaacttcctgcaagtgtgtaatcaactggaggccttggtgggtttggcggcgaacgtgggcccctacggatccggagattcagccccgctgaatgaggccatggcagtgctccaacaccacgacgctgttagcggaaccagccggcaacacgtggcgaacgattatgccagacagctggccgcgggctggggaccatgtgaggtgctgttgtctaacgccctcgctagactgcgcggtttcaaggaccatttcaccttttgccaacagctcaatatctcgatctgcccgctgtcccaaacggccgcccgcttccaagtgatcgtgtacaaccccttgggacgcaaggtcaactggatggtgcgcctgccagtgtcggagggagtgtttgtggtgaaagacccgaatgggcgcactgtgccgtccgatgtggtgattttcccatcaagcgactcgcaggcacacccaccagagcttctgttctcggcgagcctgcctgctctgggcttcagcacctattcggtggcacaagtcccccgatggaagccgcaggcacgcgctccacaaccgatccccagaagatcgtggagcccagccctcaccatcgaaaacgaacacattagggcaaccttcgacccagacacgggattgctcatggaaatcatgaacatgaatcagcagctccttcttcctgtgcggcagactttcttctggtataacgcctcgatcggagacaacgagtccgaccaggcctcgggagcatacattttcagacctaatcagcagaaaccgctgccagtgtcccggtgggcccagattcatctggtgaaaacccctctggtgcaggaagtgcaccagaatttctccgcctggtgctcgcaggtggtgagactgtaccctggccaacggcaccttgagctcgaatggtccgtgggaccaatcccagtgggtgacacttggggaaaggaagtcatttcgaggtttgatactcctctcgaaactaagggccgcttctacaccgactcaaatggccgcgaaatcctcgaacggaggcgcgattaccggccgacctggaagctgaaccagaccgagcccgtggctggaaactactacccggtgaataccagaatttacatcactgatggaaacatgcaactgactgtgctgaccgaccgctcacaaggcggctcatccctgcgggatggatcgctcgagcttatggtgcatcggcggctcctcaaggatgatgggcggggagttagcgaaccactcatggagaacggaagcggtgcgtgggtcagaggacgccatcttgtgctcctggataccgctcaggctgcggcggcaggccatcgcctgctggccgaacaagaagtgctggcgccacaagtcgtcctggccccaggcggtggagcagcgtacaacctcggagctccgcctcggacccaattctccggcctgcgccgcgatctgccaccctccgtgcatctgctcaccctcgcgtcttggggccccgagatggtgctgctgcgactcgaacaccaattcgcagtcggggaggactcaggaagaaacctctccgctccagtcactctcaatcttagggatctcttctcaactttcactatcacccggctgcaggaaaccaccctggtggccaaccagctgagggaagctgcatcacggctcaaatggactactaacaccggccccactcctcaccaaaccccgtaccagctcgaccctgcaaatatcaccctcgaacccatggagatccgtaccttcctggcatcggtgcagtggaaggaagtggacgga

SEQ ID NO: 16560 - DNA, 3033 bp, synthetic construct
  misc_feature 1..3033: note = source = /note="Description of Artificial Sequence: Synthetic coding sequence"
  source 1..3033: mol_type = other DNA
atgggcgcctacgctagggcgtcaggtgtgtgcgcaaggggctgtctggattccgcagggccatggactatgtctagagcactgcgccccccattgccacctctctgtttcttcctcctcctgctggcagctgctggggccagggccggagggtacgaaacctgcccaaccgtccaacccaatatgcttaatgtccatctgcttccgcacacccatgacgacgtcggatggctgaaaaccgtggaccagtacttttatggcattaagaatgatatccagcacgccggcgtacagtatattctcgactccgtcatctccgccctgttggccgatcccactcggaggtttatctatgtggagatcgccttcttcagtaggtggtggcatcagcaaacaaatgcaacccaagaggtcgtgcgggatttggtgcgccaaggaagactggagtttgctaacggcggttgggtcatgaatgacgaggcagcaacacattacggcgctatcgtggaccaaatgaccctggggctgagatttttggaggacacctttgggaacgacggacgcccgcgggtggcctggcacatcgaccctttcggccacagtagggaacaggcctcccttttcgctcagatgggcttcgacgggtttttcttcggtaggctggactatcaagataaatgggttaggatgcagaagttggaaatggagcaggtgtggcgagcttctaccagtctgaagccgcctaccgctgatctgttcaccggcgtcctgcccaatgggtacaacccacctcggaatctttgctgggatgtgctctgcgtagaccagcccctggtggaagatccccgcagcccagaatataacgctaaggaacttgtggattattttttgaacgtcgcgaccgcacagggtcgctactatagaactaaccatacagtgatgacaatgggtagcgacttccagtatgaaaacgccaacatgtggttcaaaaacctggacaagctcatccggctggtcaacgcacaacaggccaaagggtcttccgttcacgtgctctattccaccccggcctgctatctgtgggagttgaacaaggccaacttgacatggtcagtgaagcacgatgattttttcccttacgccgatggccctcatcaattctggactgggtacttctcatcaaggcctgctcttaagcgctatgaaagactgtcctataattttctgcaggtatgcaatcagctcgaggccctcgtaggactggctgccaatgtgggcccttacgggagcggagactctgccccgcttaacgaggcgatggctgtgctgcaacaccacgacgcagtgagcggcacctccagacagcacgtcgctaacgattacgcgaggcagctggccgctggctggggcccctgtgaggtactcctctctaacgcactcgcaagactgcgcgggttcaaggaccatttcactttctgccagcagctgaatatatccatctgtccgcttagccagactgccgcaagattccaagtgatcgtgtataacccccttgggcggaaggtaaattggatggtgcggctgcccgtcagtgagggagtgtttgtggtaaaagaccccaatgggcggaccgtgcctagcgacgtggtgattttcccctcaagcgactcacaggctcatccgcctgagctgctgttctccgccagtctgcctgctctgggctttagtacttacagcgtagcccaggttcccagatggaagccccaggctcgggcaccacagcctatcccaagacgctcctggagcccagccctgacaattgagaatgagcacattagagccaccttcgatcctgacacgggcctgttgatggagattatgaatatgaatcaacaacttctcctcccggttcgacagacattcttttggtataacgcctcaatcggggataatgagtctgaccaggctagcggagcatacatctttaggcctaaccagcagaagccgcttccagtgtccagatgggcccagatacatcttgtgaagacaccgttggtgcaagaggtgcatcagaacttctcagcttggtgcagtcaagtcgtcaggctgtatcctggtcagcggcatctggagctggagtggtccgtcgggcccatcccagtgggtgatacttggggaaaagaggtaatttcccgctttgacactcccttggagacaaaaggtcgcttctacaccgacagcaatggacgcgaaattctcgagcgcaggcgagactataggccaacttggaagctgaatcagaccgagccggtggctggaaactactatccagtaaataccagaatctatatcaccgatgggaatatgcagttgaccgtgctgaccgataggagtcagggcggctcttctctgcgggatggatctctcgaacttatggtacatcgccggctgttgaaggacgacggaaggggagtgtccgagccattgatggagaatggcagcggcgcttgggtgcggggtaggcatttggttctgctcgatacagctcaggcggccgcagctgggcataggcttctggccgagcaggaagtgctggcacctcaagtggttctcgcgcccggaggcggagccgcctataaccttggagctccgccaaggacacaattcagcggcttgcggcgcgacctgcccccgagtgtccaccttctgactctggccagttgggggcctgaaatggttttgctgcggctcgagcatcaattcgcagtcggggaagattctgggcgcaatttgagcgctcccgtaacactgaacctcagggacctgttttccacgttcaccattacacggttgcaggagactacacttgtcgctaaccagctgcgggaagcggcgtcccggttgaaatggaccactaacactggacctacaccccatcagactccctatcaactggatccggctaatattacactggagccaatggagatacgaacatttctggcctcagtccaatggaaggaggtcgacggc

SEQ ID NO: 16561 - DNA, 3033 bp, synthetic construct
  misc_feature 1..3033: note = source = /note="Description of Artificial Sequence: Synthetic coding sequence"
  source 1..3033: mol_type = other DNA
atgggggcctatgcgagagcaagcggtgtgtgcgcgcgggggtgcctggattctgccggaccttggacaatgtcgcgcgcccttaggccccctctcccccctctgtgtttctttctgctgctcctggcagcggccggcgctcgggcaggcggatacgagacatgccctacggttcagcctaatatgctcaacgtgcacctccttcctcacacgcacgacgacgtggggtggctcaaaacagtggatcagtacttctatgggatcaagaatgatatccagcatgccggagttcaatatattctagattcagtgatttcagcattgttggcagaccctacgcgacgcttcatttatgttgagatcgcgtttttcagtcgctggtggcaccagcagacaaatgcaacacaggaagtagtgcgggacctggtcaggcaaggtcgtctagaatttgctaatggggggtgggtcatgaacgatgaggctgccacacactacggcgccatagtcgatcagatgacactgggacttcgttttttggaagatacgtttggcaatgatggccgcccccgagtggcttggcacattgacccgtttggccatagcagagagcaggcgtcactttttgcccaaatggggttcgatgggtttttctttggcagattggattaccaggataagtgggtgcgaatgcagaaactagaaatggaacaagtctggagagcatcgacgtctctgaagcctcccacagctgacctgttcacaggagtgttgcctaacgggtataacccccctcggaacctctgctgggatgtgctgtgcgtggatcagcctcttgtggaagatccacgctcacccgagtataacgcgaaggaactcgtggattacttccttaatgtcgccaccgcccaggggagatactatcgtaccaatcacacggtcatgacaatgggcagcgactttcagtacgagaatgccaatatgtggtttaagaaccttgataagttgatcaggcttgtcaatgctcaacaggccaaaggaagcagcgtccatgtgctatattcaacaccggcatgttacctgtgggaattaaataaagctaacttgacatggagcgtcaagcacgacgacttttttccatatgccgacggcccccaccaattttggacgggttacttctcgtcgcgcccagcactcaagagatacgaacgcctgagctacaacttcctgcaagtgtgtaaccaactagaggctctggtagggctggcagcaaatgtggggccctatggatccggagatagtgcgccactgaatgaggcaatggccgttttgcagcaccacgacgccgttagtggcacatctcgccagcatgttgccaatgactacgctaggcagctcgccgccggatggggaccttgtgaagttctgttgtcaaatgccttggcccggctccgcggctttaaggatcatttcaccttctgccagcagttgaacatctctatttgtccattaagccagaccgccgcccgattccaagtgatagtctataatccccttggacgcaaagttaattggatggtgcggctccctgtgtccgaaggagtgtttgtggtgaaggatcctaacggccggactgtccctagcgacgtcgtgatcttcccgagtagcgactcacaggctcatcctcccgagctactgtttagcgcctcacttcccgctctaggcttttccacctattctgtggctcaggtgcctagatggaagccacaagcacgggcgccacagccaattcccagacgcagttggagccctgctctgaccatcgagaacgagcatattcgagcgacgtttgacccagatactggactcctcatggagatcatgaacatgaaccagcagctcttactaccagtgaggcagacctttttttggtacaacgccagcataggcgataacgagtcggaccaggcctccggcgcctatatcttccgacctaaccagcaaaagcccctgcctgtctctcgctgggcgcagatccatctggttaaaacacccctggtacaagaagttcatcagaacttttctgcctggtgctcccaagtcgtgaggttgtacccaggtcagcgccacctcgaactagaatggagcgtggggccgattccagtgggagacacatggggtaaagaagttatttctcgatttgatactccacttgagactaaggggcgtttctacactgactcaaatggccgagagatattggagaggagaagagactataggcctacgtggaagctgaatcagacggaaccagttgcagggaactactatccagtgaatacacgcatttacattaccgatggcaatatgcagctaacagttcttaccgatcgatcccagggcggttcttcactgagagatggcagcctggagctgatggttcatagacgcctgctgaaggacgacgggagaggtgtgtccgaacctctaatggaaaacggatctggcgcttgggtgcgcggtcgacacctggtactcctggacaccgcacaggccgccgccgccggccatcgtcttcttgcggagcaggaggttttggccccacaggtggtgctggccccaggcggcggtgccgcgtacaatctgggagctccacctagaacacaatttagcggcctgaggcgggatctgccgccgagcgtccatcttctgaccctggcttcgtggggaccagagatggttttactcaggctggaacaccagtttgcggtaggcgaggactccggccggaatctttccgctccagtcacattgaacctgcgggatctgttttccacctttactatcacacggctgcaggaaaccaccctcgtagccaaccagctgagggaagcagcctcgaggttgaaatggaccactaacactgggcctactccacaccaaacaccctaccaactggatcccgctaatatcactctggaacctatggagattcgcacctttctggcatccgtacagtggaaagaggtcgatggt

SEQ ID NO: 16562 - DNA, 3033 bp, synthetic construct
  misc_feature 1..3033: note = source = /note="Description of Artificial Sequence: Synthetic coding sequence"
  source 1..3033: mol_type = other DNA
atgggcgcttacgcccgggcttccggggtttgcgcccggggctgcctcgactctgccggaccctggactatgagcagagctctgcgaccgccattgccccccttgtgtttcttcttacttctgctggcagcagccggcgcgcgcgccggtggatacgaaacttgcccgactgtgcagcccaacatgttgaatgtccatttgctgcctcatactcatgacgacgtggggtggctcaagacagtggaccaatacttctatgggatcaaaaatgacattcagcacgcaggtgtccagtacatcctggactctgttatctctgcattgcttgccgacccaacgcggcgcttcatctatgttgaaattgcttttttcagcaggtggtggcatcaacagaccaacgccacacaggaggtcgtgcgggatctcgtgaggcagggacgcttagagtttgccaatggcgggtgggtgatgaatgatgaggctgcaacccattatggtgccatagtcgaccaaatgacactcggactgcgttttctggaggacacctttggaaacgatgggaggcctagggttgcatggcatatcgatcccttcggccattcgcgcgaacaggcgagtcttttcgctcaaatgggcttcgacggattttttttcggaaggctcgactatcaggataagtgggtgcgaatgcaaaagttggagatggagcaggtgtggagggctagtactagcttgaaaccccccactgccgatctgtttactggcgtgcttcccaacggttacaatccccccagaaatctctgttgggatgtgctgtgtgtggatcagcctctggtggaagatcctcggtcacctgaatataacgccaaggagctagtggattacttcctgaacgtcgctaccgcgcaggggaggtattatcgcacgaaccatactgtcatgacaatgggctcggatttccagtacgaaaatgctaacatgtggtttaagaatctggacaagctcatccgtctcgtgaacgcgcagcaggcaaagggtagcagtgtccatgtgctgtattccacccccgcctgttacctatgggaactgaacaaagcgaacttaacctggagcgtgaaacatgatgactttttcccttacgctgacggcccacaccaattttggacaggttacttttcctcccgacctgctctgaaacgatacgagcgcttaagctataattttctccaggtatgcaaccagctggaggcactcgtgggtctagccgctaatgtgggcccttatggctcaggcgactcggctcctctcaatgaggccatggcagtcctgcagcaccatgacgccgtcagtgggacatccagacagcatgtggctaatgactatgcccgacaactagctgctgggtggggcccctgcgaagtgctcttatcaaatgccttggccagattgcgagggttcaaagatcactttacattttgccagcagctgaatattagtatctgtccactgtcccagaccgctgcacgtttccaggtgatcgtgtataacccgcttggtaggaaggtgaattggatggttcgcctgccagtgagtgagggagtgttcgttgtcaaagaccccaacgggaggactgtgccttctgatgtggttatttttccgagcagcgactctcaagctcatccacccgagctgttatttagtgccagtctgcctgcactgggcttcagtacatacagtgtcgcgcaagtacctcgctggaaaccacaggcgagagccccacagcccatccccagacgcagctggtccccagcactgacaatagaaaacgagcacatcagagccactttcgaccctgatactgggctgctgatggagattatgaatatgaaccagcagcttcttcttcccgttagacaaacttttttttggtacaacgcttctataggggataacgagtccgatcaggcaagtggtgcgtatatatttaggcctaatcagcagaaaccgcttccagtgtctaggtgggcccagattcatctggtgaaaactcctcttgtacaggaggtccaccaaaacttttcggcctggtgcagtcaggttgttcgcctgtacccaggccagcgccatctggaactcgagtggtcggttggaccaattcctgtgggagacacgtggggcaaggaggtcatcagtcgattcgatacacctctggagacgaaaggcaggttctatacagactctaatgggcgggaaattctggagcgaaggagagactaccggcccacgtggaaattaaatcagaccgagcctgttgccggaaattactatcctgtgaacacacgtatctacattactgacggaaacatgcaactcactgtcctaacggatagatcacaggggggatccagcctccgggatgggtctttagagctaatggtgcatagacgcctccttaaggacgacggtcgcggggtaagcgaaccattaatggagaacgggtccggcgcctgggtcaggggaaggcacttggtacttcttgacaccgctcaggccgcggctgcagggcaccgcctattagcagagcaggaggtccttgcacctcaggtggtgctggcacccggaggcggggccgcctataacctcggcgccccccctcggacccagttctcagggctccgcagggacctgccgccttcagtccatttgcttactttagcctcatgggggcctgagatggttctcctacgcctggaacaccagttcgctgtcggcgaggacagtggccggaacctcagcgcacccgtgaccctgaatttgcgcgaccttttctctacgttcactataacacgtcttcaggaaacaacgctcgtcgctaatcagcttcgggaagccgcttcacggcttaagtggaccaccaacacgggccccacaccacatcagacaccttatcagctcgaccctgcaaacatcacactcgaaccaatggaaataagaactttcctagcatcagtgcaatggaaagaggttgacggc

SEQ ID NO: 16563 - DNA, 3033 bp, synthetic construct
  misc_feature 1..3033: note = source = /note="Description of Artificial Sequence: Synthetic coding sequence"
  source 1..3033: mol_type = other DNA
atgggagcgtacgcccgcgcttcgggagtgtgcgctcgcggatgcctggactcggctggaccatggaccatgtctcgcgccctccggccaccactgccaccactctgtttctttctgctcctgctggctgcggccggagcgagggccggagggtacgaaacctgtcctaccgtgcagccgaacatgctgaacgtgcatctcctcccacatacccacgacgatgtgggttggctgaaaactgtggatcaatacttttatggcatcaagaatgacatccaacatgccggggtccagtacatccttgactcggtgatctccgcgctgctggcggacccaacgcggcgcttcatctacgtggagattgcgttcttctcgcggtggtggcatcagcagactaatgccactcaggaggtcgtgcgggacctggtgcggcagggaaggctggagttcgccaacggaggttgggtgatgaacgatgaggccgccacccattacggggcgattgtagaccagatgacgctcggacttagattcctggaggatacctttgggaacgatggcaggccgcgggtcgcctggcatatcgatccttttggacactccagagagcaggctagtcttttcgcgcagatgggtttcgacggcttcttcttcggtcggctcgattaccaggataagtgggtccgcatgcaaaaactggaaatggaacaggtgtggcgggcgtcgactagcctgaaacctccgaccgccgacctgttcactggcgtcctgccgaacgggtacaacccgccaaggaacctctgctgggacgtgctgtgcgtggaccagcccctggtggaggacccccggtcccctgagtataatgccaaagaactggtcgactacttcttgaacgtggcaacggcgcaggggcggtactaccgcaccaaccacaccgtgatgaccatgggcagcgatttccaatacgagaacgctaacatgtggttcaagaacctcgacaagctcatcaggctggtgaatgcccaacaggccaaggggtctagcgtgcacgttctctactcgactccagcatgttacctgtgggaactcaacaaggccaacctgacctggtccgtcaagcacgacgacttctttccgtatgcagacggaccacaccagttctggactggatacttttcatcccgacccgcgcttaagcggtacgagaggctgtcctacaatttcctccaagtgtgcaatcagctggaagctctggtgggcctcgccgcaaacgtcggaccctacggcagcggagattccgctcctctgaacgaagccatggcagtgctgcaacatcacgatgcagtgtcaggaacctcccgccagcacgtggcaaatgattacgcccgacagctcgccgccggctggggtccatgtgaagtccttctctccaatgcgttggcaaggctgcgcgggttcaaggaccacttcaccttttgccagcaactcaacatatccatctgtccgctgtcgcagactgcggcgcggttccaggttatcgtgtataatccgctgggtagaaaggtgaactggatggtgcggcttccggtgtccgagggagttttcgtcgtgaaggaccccaatggcaggactgttccgtcggatgtcgtgatattcccgtcctccgattcacaagcccacccgccggaactcttgttctcggcttcgctccctgctttgggattctccacctactcggtggcgcaggtgccaaggtggaaacctcaggcacgagccccgcagcccatcccgcggcgctcttggtcgccggctctcactattgagaacgaacacatccgcgcaaccttcgacccggataccggactgttgatggagattatgaatatgaaccaacaacttttgctccccgtgcgccagacgttcttctggtacaacgcgtcaatcggagacaacgagagtgaccaggcctcaggagcatacatcttcagaccgaatcaacaaaagccactgccggtgtcgaggtgggcccaaattcatttggtgaaaacgcctttggtgcaagaagtgcaccaaaacttttccgcctggtgttcccaggtggtccggctgtacccgggacagcggcacttggagcttgagtggtcggttggccctattcccgtgggcgacacttggggaaaggaggttatttcgcgcttcgacactccgctggagactaagggccgcttttacacggattcaaatggacgcgaaatcctggaacgacgaagagactacagacccacgtggaagttgaaccagactgaaccggtggcgggaaactattacccggtgaacactcgtatatacatcaccgatggcaatatgcaactcacggtcctcactgatagatcgcaaggaggcagctccctgcgcgacgggtccctcgagctgatggtacaccgcagactgctcaaggatgacggtcgcggcgtctccgagcctctgatggagaacggttccggagcatgggtgcgtggacgccatctggtcttgttggacaccgcacaagcagcggcggccgggcaccggctcctcgccgaacaggaagtgcttgcccctcaggtcgtcctggcccctggaggaggagccgcctacaatctcggagcaccgccgcgcactcagttttcgggcttgcggcgcgacctgccgccttccgtgcatctgcttacgcttgcatcatggggaccagagatggtgctcctgagactggaacaccagtttgcggtcggagaagatagcggaagaaacctgagcgcccccgtgaccctgaatctccgggacctgttcagcactttcaccatcactcgcctgcaggagactactcttgtcgcaaaccaactccgcgaggctgcctcacggctcaaatggactaccaatactggtccgacccctcatcaaactccataccagttggacccggccaacattaccctggagccaatggaaatccgaaccttcctggcttccgtgcaatggaaagaagtggacggt

SEQ ID NO: 16564 - DNA, 3033 bp, synthetic construct
  misc_feature 1..3033: note = source = /note="Description of Artificial Sequence: Synthetic coding sequence"
  source 1..3033: mol_type = other DNA
atgggcgcctacgccagggcatccggcgtgtgcgctagaggatgcctcgactccgctggaccgtggaccatgagccgagcgctgcgccccccactgcctcccctttgcttttttcttctgctgcttgccgcggccggagcgcgtgcaggcggctatgaaacttgccctaccgtacagccaaacatgctgaacgtgcacctgctgccgcatacccacgatgatgtgggatggctgaaaacagtggatcagtacttctacgggatcaagaacgacattcaacacgccggggtccaatatatccttgattctgtgatatcagctctccttgccgatcctactcgacgattcatatacgtggaaatcgcatttttttcccgctggtggcatcaacagaccaatgcgacccaggaggtggtgcgcgatctggttcgtcagggccggctggaatttgccaatggtggctgggtgatgaacgacgaggctgcaactcactacggagcaattgttgaccagatgacactgggtttacggttcctagaagacacttttggcaacgatggcaggcctcgcgtggcatggcacattgatccattcggtcacagccgcgagcaggcatccctttttgcccagatgggatttgacggattcttcttcggccgtctagattatcaggataaatgggtacgcatgcagaagctggaaatggagcaagtctggcgtgcgtctacttctcttaagccgcctactgctgatctgttcacaggtgtgctaccaaacggatacaaccccccaagaaacttatgttgggacgtgctgtgtgtagatcagcctcttgtagaagacccaagatctccagagtataatgccaaagagttggtggactattttctgaacgtagccacagcacagggtaggtattacagaacaaaccatactgtaatgacgatgggatcagatttccaatacgagaatgccaatatgtggtttaaaaacctcgataaactcattcgactggtcaatgcacagcaggctaaaggaagcagcgtccatgtgctgtacagtacacctgcctgctacctttgggaactgaacaaggcaaaccttacgtggtctgtgaagcacgatgacttcttcccttacgctgatgggcctcatcaattctggacgggatactttagctcccgccctgctctgaagcgttatgaaagactctcctataactttctacaggtgtgcaatcagctggaagctttagtgggcctggcagctaatgtgggaccttatggatccggcgacagtgcccctctgaacgaagctatggccgtgttgcaacaccatgacgccgtctccgggacctcaagacagcatgtggcaaacgattatgcgcgacaattggcagcaggctggggaccatgtgaagtccttctgtcaaatgcgcttgcccggcttagagggttcaaggaccactttaccttttgccagcagctcaacatttccatctgccccctctcccagaccgccgcccgatttcaggtcatcgtctacaatcccctgggccgaaaggtgaactggatggtgagacttcccgtaagcgagggcgtgtttgtggtaaaagaccccaatggcaggactgtgccaagcgacgtggtgattttccctagctctgactcccaggcccacccccctgagttgctcttcagtgcttccttgccagctcttggtttttccacctactccgtggcgcaagtcccaagatggaaaccgcaggcccgcgcccctcagccaatcccgcgccgctcctggagcccggctctgactatcgaaaacgagcacattagggctactttcgaccctgacaccggcctactgatggagatcatgaacatgaaccaacagctcttactgcccgtgaggcagacattcttctggtacaacgcaagcatcggcgataatgaatcagaccaggcttccggggcctatatcttccgcccaaatcagcagaagccccttccagtgagtcgatgggcccagatccacctcgtgaagactccactcgttcaagaagttcaccagaacttctccgcctggtgtagccaggtcgttagactgtacccaggacagcgtcaccttgaactggagtggagcgtgggtccaattcccgtgggggatacttggggtaaggaagtgatctccaggtttgacacgccactggagaccaaggggagattttacacagattcgaacggacgggaaatcctggaacgcaggagagattaccggccgacgtggaagctaaaccagactgagccagtcgccggaaattattaccccgtaaacacacgaatatacatcacagacggcaacatgcagctcacagttcttaccgacagaagtcagggagggagttccctccgggatgggtccctcgaattgatggtgcaccgtaggctgctgaaggacgacggaaggggcgtgtctgaacccctgatggagaacgggtctggcgcatgggtgaggggcaggcacttagtgctgctggacactgcgcaggcagcggcagctgggcaccgcctgctggctgaacaggaggtcttagcccctcaagtggtcttggctcctggcggcggcgcagcctataatctaggtgctcccccacgcacccagttcagtggcctgcgacgagacctccccccatcagtgcacctcctcacactggcttcgtggggcccagaaatggtcctgctacgactggaacaccagttcgcggtcggcgaggatagtggccggaacctctccgcacccgtgaccctgaacctgcgggatttgttctcaacgttcactataacccggctccaggaaaccacgttggtggcaaaccagctgagggaggctgcatcccgcctgaagtggacaacgaacaccggaccaacgccccaccagaccccctaccaattggatccagctaacattacactggaacctatggagatccggacctttctagcatccgtgcagtggaaggaggtggacggg

SEQ ID NO: 16565 - DNA, 3033 bp, synthetic construct
  misc_feature 1..3033: note = source = /note="Description of Artificial Sequence: Synthetic coding sequence"
  source 1..3033: mol_type = other DNA
atgggtgcgtatgcgcgtgcgtcgggtgtatgtgcgcgaggttgtttagattcggcgggtccgtggacgatgtcgcgagcgctacgtccgccgctaccgccgttatgtttttttctattactattagcggcggcgggtgcgcgtgcgggtggttatgaaacgtgtccgacggttcaaccgaatatgttaaatgtacatctattaccgcatacgcatgatgatgtaggttggttaaaaacggtagatcaatatttttatggtataaaaaatgatatacaacatgcgggtgtacaatatatattagattcggttatatcggcgctactagcggatccgacgcgacgatttatatatgttgaaatagcgtttttttcgcgttggtggcatcaacaaacgaatgcgacgcaagaagttgtacgtgatttagttcgacaaggtcgtttagaatttgcgaatggtggttgggtaatgaatgatgaagcggcgacgcattatggtgcgatagtagatcaaatgacgctaggtttacgatttttagaagatacgtttggtaatgatggtcgtccgcgagttgcgtggcatatagatccgtttggtcattcgcgtgaacaagcgtcgttatttgcgcaaatgggttttgatggttttttttttggtcgactagattatcaagataaatgggtacgtatgcaaaaattagaaatggaacaagtatggcgtgcgtcgacgtcgctaaaaccgccgacggcggatttatttacgggtgtattaccgaatggttataatccgccgcgtaatctatgttgggatgtactatgtgtagatcaaccgttagtagaagatccgcgttcgccggaatataatgcgaaagaactagttgattattttctaaatgttgcgacggcgcaaggtcgatattatcgtacgaatcatacggtaatgacgatgggttcggattttcaatatgaaaatgcgaatatgtggtttaaaaatctagataaactaatacgattagtaaatgcgcaacaagcgaaaggttcgtcggtacatgtactatattcgacgccggcgtgttatttatgggaactaaataaagcgaatttaacgtggtcggtaaaacatgatgatttttttccgtatgcggatggtccgcatcaattttggacgggttatttttcgtcgcgaccggcgctaaaacgttatgaacgtttatcgtataattttttacaagtttgtaatcaattagaagcgttagtaggtttagcggcgaatgtaggtccgtatggttcgggtgattcggcgccgttaaatgaagcgatggcggttttacaacatcatgatgcggtatcgggtacgtcgcgacaacatgttgcgaatgattatgcgcgtcaattagcggcgggttggggtccgtgtgaagttctactatcgaatgcgttagcgcgactacgtggttttaaagatcattttacgttttgtcaacaattaaatatatcgatatgtccgctatcgcaaacggcggcgcgatttcaagttatagtttataatccgctaggtcgtaaagttaattggatggtacgtttaccggtttcggaaggtgtatttgtagttaaagatccgaatggtcgaacggttccgtcggatgttgtaatatttccgtcgtcggattcgcaagcgcatccgccggaattactattttcggcgtcgttaccggcgctaggtttttcgacgtattcggtagcgcaagtaccgcgttggaaaccgcaagcgcgtgcgccgcaaccgataccgcgtcgatcgtggtcgccggcgttaacgatagaaaatgaacatatacgtgcgacgtttgatccggatacgggtctattaatggaaataatgaatatgaatcaacaattactattaccggttcgacaaacgtttttttggtataatgcgtcgataggtgataatgaatcggatcaagcgtcgggtgcgtatatatttcgtccgaatcaacaaaaaccgctaccggtttcgcgttgggcgcaaatacatctagttaaaacgccgttagttcaagaagtacatcaaaatttttcggcgtggtgttcgcaagtagtacgattatatccgggtcaacgtcatttagaactagaatggtcggtaggtccgataccggtaggtgatacgtggggtaaagaagtaatatcgcgatttgatacgccgttagaaacgaaaggtcgattttatacggattcgaatggtcgagaaatactagaacgtcgtcgtgattatcgtccgacgtggaaattaaatcaaacggaaccggtagcgggtaattattatccggtaaatacgcgaatatatataacggatggtaatatgcaactaacggtattaacggatcgttcgcaaggtggttcgtcgctacgtgatggttcgttagaattaatggttcatcgtcgactattaaaagatgatggtcgaggtgtatcggaaccgttaatggaaaatggttcgggtgcgtgggtacgtggtcgtcatctagttctattagatacggcgcaagcggcggcggcgggtcatcgattactagcggaacaagaagtactagcgccgcaagtagtactagcgccgggtggtggtgcggcgtataatttaggtgcgccgccgcgaacgcaattttcgggtctacgacgtgatctaccgccgtcggtacatctactaacgttagcgtcgtggggtccggaaatggtattactacgtctagaacatcaatttgcggttggtgaagattcgggtcgaaatttatcggcgccggtaacgttaaatctacgtgatttattttcgacgtttacgataacgcgattacaagaaacgacgttagtagcgaatcaactacgagaagcggcgtcgcgactaaaatggacgacgaatacgggtccgacgccgcatcaaacgccgtatcaattagatccggcgaatataacgctagaaccgatggaaatacgtacgtttttagcgtcggttcaatggaaagaagttgatggt

SEQ ID NO: 16566 - DNA, 879 bp, synthetic construct
  misc_feature 1..879: note = source = /note="Description of Artificial Sequence: Synthetic coding sequence"
  source 1..879: mol_type = other DNA
atggggtttcccgcagctgccctgctgtgtgctctttgttgcggtctcctagcacctgcagcccgggctggttactccgaagagcgctgctcatggcgaggatcgggactgactcaggaaccagggtccgtgggtcagctagcactcgcctgtgcggaaggagccgttgaatggctatacccagcaggagccttacggctgacactcggaggccctgatccacgcgctcgtccgggtattgcatgcctgcgtccggttcgtccgtttgccggcgcacaggtgtttgctgagagagctggaggcgcactcgagctgttactcgccgaggggccaggaccagcaggagggcgatgcgtgcggtgggggccacgtgagcgacgcgccttattcctgcaggctacacctcaccaggacatcagcagaagggtagcagcttttcgtttcgagttgcgagaggatggacgtcccgagctgcccccccaggctcatggcctcggagtggacggtgcctgccggccctgctccgacgccgaattgttactggcagcctgtacatccgacttcgtcatccatggaatcattcatggagttacacacgatgtagaactgcaagagtctgtgattaccgtcgtggcagcccgggtccttcgtcagactccaccgctattccaggccggcaggtcaggtgaccaaggattaacgtctattcggactccacttaggtgcggagtgcaccctggaccagggacattcctctttatgggttggagcagattcggtgaggcgcgattggggtgtgcaccacgctttcaggagttccgcagggcctatgaggccgctagagctgctcaccttcacccttgcgaagtagcactccat

SEQ ID NO: 16567 - DNA, 879 bp, synthetic construct
  misc_feature 1..879: note = source = /note="Description of Artificial Sequence: Synthetic coding sequence"
  source 1..879: mol_type = other DNA
atgggtttccctgcagccgctttgctgtgtgccctgtgctgtggattgctcgctcctgctgctagggccgggtactccgaagagcgatgttcctggcggggaagtggcttaacacaggagcccggctctgttggtcagctcgctctggcttgtgcagaaggagcggttgagtggctatatcccgccggggcactgcggttgaccttgggaggccctgatcccagagcccgcccaggcattgcttgtctacggcctgtcaggcccttcgcaggggcacaggtttttgccgagagggccggaggggctttagaactccttcttgctgaaggcccaggcccggctggcggaaggtgcgttcgctggggcccgcgggagaggcgcgccttgttcttgcaagccactcctcatcaggatattagcaggcgcgtagctgctttcaggttcgagcttagggaggatggcagaccggaactgcctcctcaagctcatggtctcggagtggatggcgcctgtcggccttgcagtgacgctgagcttctgctcgccgcatgcacaagcgatttcgtaattcacggtattattcacggagtgacgcacgacgtggaactgcaggaatctgtgatcacagttgtggccgctagggtactgcggcagacccctcccctgtttcaggcaggccggagcggcgaccaaggtctgactagcatcaggaccccacttcgctgtggcgtgcaccctggacccggtaccttcctgttcatgggatggtcacgctttggtgaggcaaggcttggttgcgcccctaggtttcaggaatttcgacgggcctatgaagcagcgagggctgcccatctgcatccctgcgaggttgctttgcat

SEQ ID NO: 16568 - DNA, 879 bp, synthetic construct
  misc_feature 1..879: note = source = /note="Description of Artificial Sequence: Synthetic coding sequence"
  source 1..879: mol_type = other DNA
atgggttttccggcggcggcgttattatgtgcgttatgttgtggtctactagcgccggcggcgcgtgcgggttattcggaagaacgatgttcgtggcgaggttcgggtctaacgcaagaaccgggttcggtaggtcaattagcgttagcgtgtgcggaaggtgcggtagaatggttatatccggcgggtgcgttacgattaacgttaggtggtccggatccgcgagcgcgtccgggtatagcgtgtttacgtccggtacgaccgtttgcgggtgcgcaagtatttgcggaacgtgcgggtggtgcgttagaattattactagcggaaggtccgggtccggcgggtggtcgatgtgtacgttggggtccgcgagaacgtcgtgcgctatttttacaagcgacgccgcatcaagatatatcgcgtcgtgttgcggcgtttcgttttgaactacgtgaagatggtcgtccggaactaccgccgcaagcgcatggtttaggtgttgatggtgcgtgtcgaccgtgttcggatgcggaattactattagcggcgtgtacgtcggattttgttatacatggtataatacatggtgtaacgcatgatgttgaactacaagaatcggtaataacggttgttgcggcgcgtgttttacgtcaaacgccgccgttatttcaagcgggtcgttcgggtgatcaaggtttaacgtcgatacgtacgccgttacgttgtggtgttcatccgggtccgggtacgtttctatttatgggttggtcgcgttttggtgaagcgcgattaggttgtgcgccgcgatttcaagaatttcgacgtgcgtatgaagcggcgcgagcggcgcatctacatccgtgtgaagtagcgctacat

SEQ ID NO: 16569 - DNA, 879 bp, synthetic construct
  misc_feature 1..879: note = source = /note="Description of Artificial Sequence: Synthetic coding sequence"
  source 1..879: mol_type = other DNA
atgggctttcctgccgcggccctgctctgtgcactatgctgcggcctgttggcccccgccgcccgggccggttattccgaggaacgatgctcatggaggggaagcggattaacccaggagccagggtcagtgggacaactggcactagcttgcgctgagggggcagtggaatggctttaccctgccggtgccttacgcctgacgctggggggcccagacccacgcgcacgacctggtattgcatgtcttaggcccgtccgccccttcgccggagcacaagtatttgccgagcgagccgggggagccctcgaactgcttttggccgagggtccagggcctgctggcgggagatgtgtacgctgggggcccagagagcggcgtgcactgtttctccaagccacgccacaccaggacatttccaggcgggtggccgcctttagattcgagctcagggaggatggccgaccggagctgcctcctcaggctcatggactgggagttgatggtgcctgccgcccttgcagcgatgctgaactcttgctggccgcatgtacatcagacttcgtgatccacggtatcatacacggggtaacccatgatgtggaacttcaggagtcggtaatcaccgtggtcgctgcccgggtccttcgacagacacccccactgtttcaagctggaagatctggagaccagggtctgactagcatccgcacacctctcaggtgtggggtgcaccctgggccagggacgttcctcttcatgggatggagcaggtttggagaagcccggctgggatgtgctccaaggttccaggaatttcgtcgtgcatatgaggccgcccgcgccgcgcacctccatccttgcgaggtggccttacac

SEQ ID NO: 16570 - DNA, 879 bp, synthetic construct
  misc_feature 1..879: note = source = /note="Description of Artificial Sequence: Synthetic coding sequence"
  source 1..879: mol_type = other DNA
atggggtttccggccgcagctctgctgtgtgccctgtgctgtggcctgctcgcccccgccgctagagccggatactccgaggagcgctgttcctggcgagggagcgggctgacgcaagaaccaggctccgtgggacagctcgctttagcctgtgcggagggtgccgtcgaatggctatatcccgcgggtgctttgagactcacattgggaggccccgatccacgagctcgccccggcatagcatgcctgcgtccagttaggcctttcgcaggcgctcaggtttttgctgagcgggccggcggtgccttggagctgctgctcgccgaggggcccgggccagctggaggcagatgcgtgcggtggggcccgagagaacgaagagctctgttcctgcaagctactccgcaccaggacatctcccgccgcgttgccgccttccgatttgaattgcgcgaggacggcagacctgaacttccccctcaggctcacggcctaggcgtggatggagcttgccgtccttgctctgacgccgagctactcctggccgcgtgtacgagcgattttgtgattcacggtattatccatggagttacgcacgatgtagaacttcaggagtctgtcattaccgtggtggccgcaagagtcctcaggcagactccccctctcttccaggccggccgctcgggcgatcagggactcacatcaatccggactcctctcagatgtggggtccaccccggacccggcacctttctgtttatgggttggtctcggtttggtgaggcacggttaggttgcgcgccgcgcttccaggaatttcggagggcttatgaagcagcccgtgcggcccacttgcacccctgcgaggtggctttgcac

SEQ ID NO: 16571 - DNA, 879 bp, synthetic construct
  misc_feature 1..879: note = source = /note="Description of Artificial Sequence: Synthetic coding sequence"
  source 1..879: mol_type = other DNA
atggggtttccagcggctgccctgttgtgcgcactatgctgcggcctcttagcacccgcggcacgcgcaggctatagtgaggagcgatgcagctggcgcggttcaggcttgactcaggaacccgggagcgtcggacaattggctctggcttgtgctgaaggagcggtggagtggctttaccccgctggtgccctccggctgactctgggcggcccggacccaagggctcgccccggaattgcttgtctgaggcccgtaaggccctttgcgggtgcccaggtgtttgccgagcgcgcaggaggagcactggagctgctgctggccgagggacccggccctgcaggcggacgctgcgtccgatgggggccaagggagagaagggcattattcctgcaggcaaccccgcaccaagacatcagccgccgggttgccgcgtttcggttcgagctgcgggaagacgggagaccagaattgccaccgcaagcccacggactgggcgtggatggcgcctgcaggccgtgtagcgatgctgaactgctgctggccgcctgcacgagcgacttcgttatccatgggataattcacggcgtcacccatgatgtcgaactgcaggagagtgtgatcactgtggtagccgcccgagtcctgagacagaccccacctctgttccaggccggacggtccggagaccagggacttacttctatacggaccccgctgcgctgcggcgtgcaccctgggccaggcacgttcttgtttatggggtggagtcgttttggcgaggcgcgcctcgggtgcgcgccaaggtttcaggaatttcgtagagcttacgaagcagccagagctgctcacctacacccttgtgaagttgccctgcac

SEQ ID NO: 16572 - DNA, 879 bp, synthetic construct
  misc_feature 1..879: note = source = /note="Description of Artificial Sequence: Synthetic coding sequence"
  source 1..879: mol_type = other DNA
atgggcttcccagcagcagcgcttttgtgcgctctctgctgcggcctgctcgcaccggcggccagagccgggtactccgaggaacggtgctcatggcgcggcagcggacttacccaggaaccgggttcagtcgggcaactggccctggcttgcgccgaaggagcagtggagtggttgtacccggccggtgcgctgcgtctcactctgggagggccagatccgagagcccggccgggaatcgcgtgcctgcgcccagttagacctttcgccggggcacaggtgttcgctgaacgggccgggggagcgctggagctgctgctggcggagggacccggcccagcaggaggccgctgcgtccggtggggacctagagagcgccgggcactcttcctgcaggcgaccccgcaccaggacatctccagacgagtggctgcttttagatttgagctgcgggaggacggaaggcccgaacttccgcctcaagcccacggccttggcgtggatggcgcttgtagaccatgctcagatgcagaactgctgctggctgcgtgcacttcggacttcgtcattcatggaatcatccacggagtgacccatgacgtggagctgcaggaatcggtgatcactgtcgttgccgccagagttctccggcaaactcctccccttttccaggcgggaagatccggagatcagggactcacttcgattaggactccgctccgctgcggggtgcatccggggcctggaactttcctgttcatgggctggtcccgctttggcgaagcccgcctcggatgcgcccccagattccaagagttccggcgggcttacgaagcagcccgggccgcccacttgcacccgtgcgaggtggctttgcac

SEQ ID NO: 16573 - DNA, 879 bp, synthetic construct
  misc_feature 1..879: note = source = /note="Description of Artificial Sequence: Synthetic coding sequence"
  source 1..879: mol_type = other DNA
atgggtttccctgcagcagcactgttgtgtgcactctgttgtggtttgctggcacctgccgcacgggcaggatacagcgaggagcgatgttcatggaggggctcaggactcacccaggaacctggctccgtcggacaacttgcgcttgcatgtgccgaaggagcggtggagtggctgtacccagcaggagctctgcgtctcactcttgggggtccagatccacgggctcgccccggtatagcgtgtcttagaccagtgcgcccctttgcaggagcccaagtctttgcagaacgggccggtggcgcacttgaactgctccttgcggaaggacctggacccgcaggagggagatgtgtcaggtggggtcccagggagaggcgtgcacttttccttcaagcaaccccacatcaggatatctcaagacgtgtcgcagccttccggtttgaacttagagaagatggtagacctgaactgcctcctcaggcacacggacttggagtggatggtgcctgtagaccatgctccgatgcagagctgctgctggctgcctgtacttcagactttgtgattcatgggattatacacggcgtgacccatgatgtggagttgcaggagagcgtcatcacggtggtcgcggcacgagttctgagacagacccctccactttttcaagcaggccgaagcggtgaccagggactcacctccattcgcactcctctgaggtgtggtgtgcacccaggtccaggcaccttcttgtttatggggtggagccggtttggagaggccaggctgggctgcgcaccaaggtttcaagaatttaggagggcatacgaagccgccagggcagcgcacctgcatccatgtgaagtggccctccac

SEQ ID NO: 16574 - DNA, 879 bp, synthetic construct
  misc_feature 1..879: note = source = /note="Description of Artificial Sequence: Synthetic coding sequence"
  source 1..879: mol_type = other DNA
atgggatttccggcggcagctctgttgtgcgccctctgttgcggactgctcgcacctgcagcccgggccggatactcagaagaacgttgctcctggcgcggtagcggcctgactcaggagccgggatcggtgggccaactcgccctcgcctgcgctgagggagccgtggaatggctgtacccggccggcgctcttcgcctgacgctgggaggacccgatccgagagcgaggcctggaatcgcatgcctgcggcctgtgcggccattcgccggagctcaggttttcgctgaacgcgccggtggcgccctggaattgctgttggctgaaggacctggacctgctggaggtcgatgcgtccggtggggcccgagagaaagacgcgcactgtttctccaagccacccctcatcaggacatcagccgacgggtcgcagcgtttaggttcgaacttcgggaagatgggcggcccgaactgccgcctcaggcccacggattgggcgtggacggagcgtgtcgcccctgctcggacgcggagcttctcctggccgcgtgtacgagcgatttcgtgatccacggaatcattcatggtgtcacccacgacgtggaactccaggagtccgtgatcaccgtcgtcgcggctagagtgctgcggcagactccccctctcttccaagcgggacggtcaggtgaccagggcctgacttctatccgcactccactccggtgcggggtgcatcccggccctggtaccttccttttcatgggatggtcgcgctttggcgaggccagactcggctgcgccccacgcttccaagagttccgccgtgcctacgaagcggccagagcggcccatctgcatccatgtgaggtggctctgcat

SEQ ID NO: 16575 - DNA, 879 bp, synthetic construct
  misc_feature 1..879: note = source = /note="Description of Artificial Sequence: Synthetic coding sequence"
  source 1..879: mol_type = other DNA
atgggatttccggccgctgcactgctgtgtgcactctgctgtggtctgctggcgccggcagcaagggctgggtactccgaagaacgctgctcctggagaggttcaggacttacccaagaaccaggctccgtgggacagcttgcactcgcctgcgccgaaggtgctgtcgagtggctttacccggctggtgctctgcgccttacgctgggcggtccggacccgagggccaggccaggtatcgcatgcctccgcccggtccgcccgttcgcaggggcccaggtgttcgccgaacgcgcgggcggcgctctcgagcttctgctggcagaaggcccaggcccggccggcggacggtgcgtgagatggggtccccgagagcgacgggccctgtttctgcaagccacccctcaccaggatatatccaggcgggtggcggcgtttagattcgagctgcgggaggacggtagaccagaacttcccccgcaagcgcatggcctcggggtggacggtgcatgccgcccatgctcagatgccgaactgttgctggccgcatgcacctccgacttcgtgatccacggaatcatccacggcgtcactcacgacgtcgaacttcaggaatcggtaatcaccgtggttgccgcacgggttttgcggcagactcctccgctcttccaggcgggaagatcaggagatcagggactcacttcgattcgcactccactgcggtgcggcgtgcatcccggaccaggcaccttcttgtttatgggctggagccgcttcggggaggcccggcttggatgtgcaccgagattccaagaattccggagagcttacgaggccgcgagggccgcccatctgcatccgtgtgaggtcgcgctccac

SEQ ID NO: 16576 - DNA, 879 bp, synthetic construct
  misc_feature 1..879: note = source = /note="Description of Artificial Sequence: Synthetic coding sequence"
  source 1..879: mol_type = other DNA
atgggattccctgccgcagcacttctctgtgcactgtgttgcggcctgctggcgcccgctgcccgcgctggatattcggaagagcgctgttcttggaggggcagtggtctgacccaggagccaggatccgtcgggcagctggctttggcctgcgccgagggagcagtcgaatggctgtacccagctggcgccctcaggcttacactgggcggacccgaccccagggcccgcccaggtattgcatgcttgcgtcccgtgcgtccgtttgcaggcgcacaggtcttcgccgaacgcgcagggggggcattggaactccttctagcagagggcccagggccagcaggaggaaggtgtgtgcgttgggggccacgggagaggcgtgccttatttctacaagcaacccctcaccaggatatttccagacgcgtagccgcctttcgcttcgaattgagggaagacggccgaccagagctgcccccacaggctcacggcctgggggtggacggggcatgtcgcccgtgctctgacgcagaacttctgctagcagcctgtacttccgatttcgtcattcacggaattatccacggggtgacacacgatgttgagctccaagagtcggtcattactgtcgtggccgcccgagtcctacgacaaacccctcctctgttccaggcaggcaggtctggcgaccaggggctaaccagtattcggacacccctgcgctgtggtgtgcaccccggcccgggaactttcctctttatgggctggtctcgattcggggaagcccggctggggtgcgcccctcggtttcaggagttccggagggcttacgaagccgctcgggcagcacatctgcacccatgtgaggtcgcgctacat

SEQ ID NO: 16577 - DNA, 879 bp, synthetic construct
  misc_feature 1..879: note = source = /note="Description of Artificial Sequence: Synthetic coding sequence"
  source 1..879: mol_type = other DNA
atgggttttccagcggcagcccttctgtgtgcactctgctgtggcctgcttgctccggctgcgcgggcaggatactcagaagaaaggtgtagctggcgcggatctggcctcacccaggagcctggttcggtgggccagttggcactcgcgtgtgccgaaggggccgtggagtggctgtatccagcaggtgcccttcgcctgactcttggggggcctgatcctcgggcacgaccaggaatagcgtgcctcagacccgtcaggcctttcgcgggggcacaagtgtttgccgaaagggcaggaggagcactggagcttctgctcgcagagggtcccgggccggccgggggccgctgtgtgcgctggggacctcgggaacgtcgagcactttttctgcaagccaccccccatcaggacatctcacgtagggtggctgcattcaggttcgagctgagagaggatgggcggccagaactcccaccgcaagcgcacggactgggtgttgatggagcttgccgaccatgcagcgatgcagaacttctcctggcggcctgcacctcggactttgttatccacggcattattcacggtgtgacgcatgacgttgaattgcaggaatccgtgatcaccgtggtcgcagcaagggtgttgcgacaaactcctcccctgtttcaggcaggaagatcgggggaccaaggacttacttcaatccgcactccactgagatgtggtgtgcatccgggtcctggtacctttctcttcatgggctggtcccgatttggagaggctcgacttggatgtgcacctcgttttcaagagttcaggagagcatacgaagcagctagagcagcacatctgcatccgtgtgaagtcgcgctccat

SEQ ID NO: 16578 - DNA, 879 bp, synthetic construct
  misc_feature 1..879: note = source = /note="Description of Artificial Sequence: Synthetic coding sequence"
  source 1..879: mol_type = other DNA
atgggattcccggcagctgcattgctttgtgcactttgctgcggtctgcttgcaccagccgcgcgagctggctactcggaagaacgctgtagctggcggggatctggcctgacccaagagccaggatcggtcggacagctggccctcgcctgcgccgaaggagccgtggaatggttgtacccggcaggggccctgcggctgaccctgggcggccccgatccgcgcgcccgccctggaatcgcctgcctgcgtccggtgcggcctttcgcgggcgcccaggtgttcgctgagagggcggggggagccctcgaactcttgctcgccgagggacccggaccggcgggaggccggtgcgtgcggtggggaccaagagaacgccgcgccctgttcctgcaagcgactcctcaccaagacatctccaggcgcgtggccgccttcagatttgaactccgcgaggacggcagacccgagctgcctcctcaggcacacggtctgggagtggatggagcgtgtagaccgtgctccgacgcggagctgctgctggccgcgtgtacctcagattttgtgattcacggaatcatccacggtgtgactcatgacgtggagttgcaggaatccgtgatcactgtcgttgcagcccgggtcctcagacaaaccccgccactgttccaggctggaaggtcgggggaccaggggctcacttcaatcagaaccccactgcggtgcggtgtccatccaggaccggggacgttcctctttatgggctggagccgcttcggagaggctcgcctgggctgcgcaccgcggttccaggaatttcgccgggcgtacgaggccgctagggcggctcatctccacccgtgcgaagtcgcactccat

SEQ ID NO: 16579 - DNA, 879 bp, synthetic construct
  misc_feature 1..879: note = source = /note="Description of Artificial Sequence: Synthetic coding sequence"
  source 1..879: mol_type = other DNA
atgggcttccctgctgctgctctcctctgtgccctgtgctgcggccttctcgcgcctgcagccagggcagggtatagcgaagagagatgttcttggcgcggctccggcctaacacaggagcctggatctgtcggacagttggccttggcgtgcgcagagggggcagttgagtggctttatcctgcaggggcactccgcctgacgcttgggggccctgacccacgagcacgcccaggaatagcatgcctccgccccgtacgcccctttgccggcgctcaggtgtttgcggagcgggcagggggcgcactcgagcttctgctggctgagggcccggggcccgcaggcgggcggtgcgtgcgatgggggccacgagagcgccgtgctctgtttttacaggcgacgccccaccaggatattagccgtcgggtggcggcgtttaggtttgagttgcgagaggatggtcgaccggagctgccgccccaggctcacggattaggcgtggacggtgcttgccgcccttgcagcgatgccgagctgctgttggcagcctgtacaagcgacttcgtgatacatgggataattcatggcgtgactcatgacgttgaattgcaagagtccgtgatcacagttgtggcggcccgagtcttacgacagaccccgccactcttccaggcgggcaggtccggcgaccagggactcactagtattagaacccctctgcggtgcggagtgcacccgggccctggaacgttcctgtttatgggatggagccggtttggggaggcaaggcttggctgtgctccacgcttccaggaattcagacgtgcatacgaggccgcccgcgccgctcacttacatccctgtgaagtggcactgcat

SEQ ID NO: 16580 - DNA, 879 bp, synthetic construct
  misc_feature 1..879: note = source = /note="Description of Artificial Sequence: Synthetic coding sequence"
  source 1..879: mol_type = other DNA
atgggattccctgcggcagcacttctgtgtgcactgtgctgtgggctgcttgcacccgccgcaagagcaggttactcggaggagcgttgtagctggcgtggatccggcctcactcaagaacccggatcggtcggtcagttggctcttgcatgcgctgaaggcgcggtggaatggctttacccggcaggagccctcagactgactctcggtggcccggatcctcgagcgcgtcccggaattgcatgcctgcgtcctgtgcggcccttcgctggcgcacaagtgttcgcggaaagggcaggaggagcactggaactgctgctcgcagaaggccctggacctgccgggggccgatgcgtccgatgggggccccgggaaagaagagctctctttcttcaggccaccccacatcaggatatcagcaggcgtgtagcagcgttccggtttgagcttcgcgaggacggaaggccagagttgccacctcaagcacatggactgggagtcgatggagcgtgtcggccatgctcggatgcagaactgctcctcgccgcctgtacctcagactttgtgatccacggtatcattcatggtgttacgcatgacgtggaacttcaggagtccgtgataaccgtggtcgcagcacgcgtacttagacaaaccccgccattgtttcaagccggtaggtcaggtgatcagggactgacctcgattagaactcccctgcggtgtggtgtgcatccaggcccgggaacttttctctttatgggttggtcccgattcggagaggcgcgacttggctgtgcaccgcgctttcaagagtttagacgcgcttacgaagctgcacgcgcggcccacctccacccttgtgaagtggcactccat

SEQ ID NO: 16581 - DNA, 879 bp, synthetic construct
  misc_feature 1..879: note = source = /note="Description of Artificial Sequence: Synthetic coding sequence"
  source 1..879: mol_type = other DNA
atgggttttcctgcggccgcccttttgtgcgcgctgtgttgcgggctgctggcccccgcggcccgggctggatactctgaggaacgatgttcctggagaggatccggtctcacacaggaacctggttccgtaggacagttggcgctggcctgcgcagagggcgccgtggaatggttgtaccctgccggagcgcttcgactcacgttgggggggccagatccaagggctcggcctgggattgcctgcttgagacccgtcaggccctttgcgggcgctcaggtgttcgccgaacgagcgggaggggccctagagctgctgctggctgaaggtcccggaccggcggggggccgttgtgttaggtggggtccgagggagcgccgcgcattgttcctgcaggccacaccacaccaggatatcagccggcgcgttgctgctttccgcttcgagcttcgagaagatggccgccccgaactccccccccaagcccacggactcggagtcgacggtgcctgtcgaccatgcagtgatgctgaattactgctggccgcctgtacctccgattttgtcatccatggcattattcatggagtcacgcacgatgtcgagctgcaggaatccgttattaccgttgtagcagccagggtcctcagacagacacccccactgttccaggccggacgctccggagaccagggcctcactagcatccggaccccactccgttgcggagtgcaccctgggccgggtacctttctctttatgggatggagtagattcggggaagccaggctgggctgcgcccccagatttcaggagttccgcagagcctatgaggcggcaagggctgcacacttgcacccgtgcgaggtagctttgcac

SEQ ID NO: 16582 - DNA, 879 bp, synthetic construct
  misc_feature 1..879: note = source = /note="Description of Artificial Sequence: Synthetic coding sequence"
  source 1..879: mol_type = other DNA
atgggtttccccgctgccgcgctgctgtgcgctctgtgttgtggactgctggccccagctgctcgtgcgggctatagcgaggaacgctgcagctggcgcggttctggcctgacgcaagagcctggtagcgtgggtcagcttgcactggcatgtgccgagggagccgtcgaatggttgtaccccgcgggcgctctgagattgaccctgggcggcccagatccgcgcgctcgcccgggtatcgcgtgcttacgccctgtgcggccatttgctggtgcacaggtatttgccgaacgggctggtggcgcattggaactgctcctggcagaaggtccaggcccagcgggtggtcggtgtgtccgctggggtcctcgtgagaggagagcgctgttcttacaggcaaccccgcaccaggacatttcccgcagagtcgccgcgttccggttcgagctgagagaggatggacgtcccgagctgccgccacaggcccacggcctgggcgttgacggtgcttgccgcccttgctccgacgcggagcttctgctggcggcgtgtaccagcgacttcgtcattcacggcatcatccacggcgttacccacgatgtggaactgcaagagagcgttatcacggtggttgccgcgcgggtgctgcgccagacgccacctcttttccaggccggccgctctggtgaccagggcctcacctctattaggacgccactccgttgcggcgttcacccaggccccggcacatttctttttatgggctggtcccgctttggtgaagcacgcctcggatgcgctcctcgctttcaagagtttcgtcgagcgtatgaagctgctagagcggcccacttgcacccgtgcgaagtcgcgctccac

SEQ ID NO: 16583 - DNA, 879 bp, synthetic construct
  misc_feature 1..879: note = source = /note="Description of Artificial Sequence: Synthetic coding sequence"
  source 1..879: mol_type = other DNA
atgggatttccagccgctgcgcttctctgtgcactgtgttgtggactcctggcccctgccgctcgcgccggatactcagaagaacggtgttcttggcgcggctcagggctcacccaggaacccggctcagttgggcagcttgccctcgcatgtgcagagggagcagtggagtggctctacccggccggggccctgcgtctcactttaggcggtcccgacccccgggcaagaccaggtattgcatgtctgaggcctgtgagaccgttcgccggggcccaagtgtttgcggaacgcgcggggggagcacttgaactgctgctggctgaagggccaggccccgcaggggggagatgcgtccgctggggaccgcgggaaaggcgcgccctgttcctgcaggccaccccccaccaagatatcagcaggcgggtggctgcgttccggtttgagctaagagaggatggacggcccgaactcccccctcaggctcacggtcttggcgttgacggagcgtgtcgaccatgctctgacgcagaactgttgctggccgcctgcacaagcgactttgtgatccacggtatcatccacggcgtaacccacgacgtggaattacaagaatctgtgatcacggtagttgccgcaagagttttgcggcagactcctcctctgtttcaggctggccggagtggggatcagggattgactagcattagaacgcctctgcgctgtggcgtccaccccggccccggtaccttcctctttatgggatggtctcggttcggggaggctcggctgggatgtgcccctcgctttcaggaatttcgccgcgcttatgaagccgccagggccgcacacctccacccctgcgaggtggctttgcac

SEQ ID NO: 16584 - DNA, 879 bp, synthetic construct
  misc_feature 1..879: note = source = /note="Description of Artificial Sequence: Synthetic coding sequence"
  source 1..879: mol_type = other DNA
atgggctttccagccgcagctcttttgtgcgccctgtgttgcggcctgcttgcacctgctgcacgagcaggatacagcgaagagaggtgttcgtggaggggaagcggacttacccaagaacccggctccgtcggtcaacttgcacttgcctgcgcagaaggagcggtggaatggctgtacccggcgggcgcactccggctcactctggggggaccagaccctcgggcacggcctggcattgcatgcctccggccagtgcggccattcgcgggggcccaggtgtttgccgaacgagcaggtggcgcgctggaactcctcctggccgaaggacctgggcccgcagggggaaggtgtgtgcggtggggaccacgcgaaagacgtgctctgtttctccaagcaacccctcaccaagacattagccgccgcgtggcagcatttcgctttgagctgagagaggacggtcgccccgagcttccaccacaagcacacggtcttggagtggacggagcatgtagaccatgttccgatgctgagcttcttttggcagcatgtacttccgattttgtgattcatggaattatccatggggtgacccatgacgtcgaacttcaagaatcggtgattaccgtcgtggcagcccgcgtcctgagacaaactccgcctctcttccaggcaggacggtctggtgatcaaggactcacttcaataagaacccccctccgttgtggtgtccatcccggtcctggaacctttcttttcatgggttggtcccggtttggggaggcgagactgggatgtgccccacggtttcaagaatttagaagagcctatgaagcagcacgagcagcacatttgcacccttgtgaagtcgcacttcat

SEQ ID NO: 16585 - DNA, 879 bp, synthetic construct
  misc_feature 1..879: note = source = /note="Description of Artificial Sequence: Synthetic coding sequence"
  source 1..879: mol_type = other DNA
atggggttcccagcagcagccctgctttgcgcgctttgttgtggattgttggcacctgccgcacgtgcaggctactccgaagaaaggtgtagctggagaggatcgggactcactcaagagcccgggtctgtgggacaactggcactggcctgcgcggaaggagctgtggaatggctttacccggcaggtgcacttagactgactctggggggaccagaccctcgcgcgcgccctggaatagcctgtcttagacctgtgcgtccttttgcaggcgcacaggttttcgccgaacgggccggaggggcccttgaattgcttctggcagaggggcctggacccgcgggaggtcggtgtgtccgatggggtccacgcgaacgccgggcactgtttcttcaagccacccctcatcaagatatctcccgacgggtggcagcattccgtttcgaactccgggaagatggacggcctgaactccccccacaggcccatggactgggcgtggatggcgcttgtcggccctgttcggatgcagaacttcttcttgccgcctgcacctcggattttgtgattcatggtattatccacggcgtcactcatgatgtcgaactgcaagaatcagtcattaccgtggttgccgcccgtgtgcttcgtcaaactccgcccctgtttcaggccggccggtccggtgatcaaggcctgacctcaataagaacccccctcagatgtggggtgcatccaggcccaggaacgtttctgttcatggggtggtcccgctttggcgaagctagactgggttgcgcaccccgcttccaagaatttcgtagagcatacgaggcagctagagcggcgcacctccatccttgtgaggtggcactgcat

SEQ ID NO: 16586 - DNA, 879 bp, synthetic construct
  misc_feature 1..879: note = source = /note="Description of Artificial Sequence: Synthetic coding sequence"
  source 1..879: mol_type = other DNA
atgggtttcccagcagcagcacttttatgtgcattatgttgtggattattagcaccagctgcacgagcaggatattctgaagaaagatgttcatggagaggatcagggttaactcaagaaccaggaagtgttggtcaattagctttagcttgtgctgaaggagctgttgaatggctttacccagcaggagccttaagattgacacttggaggaccagatccaagagcaagaccaggaattgcttgtttaagaccagttagaccatttgcaggagctcaagtatttgcagaaagagcaggaggtgcacttgaattacttttagctgaaggaccaggaccagcaggaggaagatgtgtaagatggggtccaagagaacgaagagcactttttcttcaagcaacaccacatcaagatattagtaggagagttgcagcatttagatttgaattgagagaagatggaagaccagagttacctccacaagctcatggtcttggagttgatggagcatgtagaccatgtagtgatgcagaattgttgttagcagcttgcacttctgattttgttatacatggaattattcatggagtgacacatgatgtagaattacaagaaagtgttattacagttgttgcagcaagagtcttacgtcaaacaccaccattatttcaagctggaagatcaggagatcaaggtttaacctcaattcgtacaccattacgttgtggtgttcatcctggaccaggtacctttttgtttatgggatggtcacgatttggtgaagcaagattgggttgtgctcctcgatttcaagaattcagaagagcctatgaagctgcaagagcagctcatttacatccttgtgaagtagctcttcat

SEQ ID NO: 16587 - DNA, 879 bp, synthetic construct
  misc_feature 1..879: note = source = /note="Description of Artificial Sequence: Synthetic coding sequence"
  source 1..879: mol_type = other DNA
atggggttcccagccgccgccctgctatgtgccctatgctgtggactcctcgctcctgccgcacgggccggatattcggaggaacggtgctcttggcgggggtctgggctgacacaggaacccggatctgtcgggcagcttgccctggcctgcgccgagggggcagtagagtggctgtatcccgctggagccctacgcctgactctcggggggccagatcccagagcgcgccctggaattgcctgcctgaggcctgtgaggcccttcgcaggagcccaggtattcgccgaaagagcaggaggggctcttgagctcttacttgctgaggggcccggaccggccggggggaggtgcgtcaggtggggaccacgggaacgcagggctctgtttctacaagccacaccccatcaggatatatcaaggcgtgtggccgcatttcgattcgagttacgggaagatggacgcccagaactgcctcctcaggctcatgggctcggagtggacggagcatgccggccttgttctgacgcagaacttttactagcggcatgtacatccgacttcgtgatacacggaataattcatggggtaacacatgacgtcgaactgcaggaatcagtcattactgtagtggcagcaagggttctcagacagacaccaccactcttccaggccgggcggtctggagatcagggactcacatcaatccggactcccctgcgatgcggagtccatcccgggccaggaacattcctgttcatggggtggagtagattcggagaagccagactagggtgtgcccccaggttccaagaattccgacgcgcctacgaagcagcccgggccgcacaccttcatccttgcgaagtggccctccac

SEQ ID NO: 16588 - DNA, 879 bp, synthetic construct
  misc_feature 1..879: note = source = /note="Description of Artificial Sequence: Synthetic coding sequence"
  source 1..879: mol_type = other DNA
atgggatttcccgcggcagcactgctttgtgcgctttgctgcggattgctggccccggccgcccgggctggttactccgaagaaaggtgctcgtggcggggatccggactcactcaagagccgggcagcgtgggacaactggcactggcgtgtgcagaaggagcggtggagtggctgtacccagcaggagcgctgcgcctcaccctcggcgggcccgacccacgtgccaggccaggaatcgcgtgccttcgcccggtcagaccttttgccggagctcaggtgttcgccgaacgcgccggcggggcactcgagctgctcctggctgagggaccggggccggcaggaggaagatgcgtgagatgggggcctcgcgaaaggagggctctctttcttcaagccacgccccaccaggacatctcgcggcgcgtggcagcattccgcttcgaactgcgcgaggacggaaggcctgagctgccgccgcaagcacatggcctgggcgtggacggagcatgccggccgtgttcagacgccgaacttctcctggcggcgtgcaccagcgatttcgtcattcatggcatcattcatggagttactcacgacgtggagcttcaagagagcgtgatcaccgtcgtggctgcaagagtgctgagacaaacccctccgttgtttcaagccggtcggtcgggagatcaaggcctgacgtctatcagaaccccactgcggtgcggtgtgcaccccggaccaggaaccttcctcttcatgggatggtcgagattcggagaggccagactgggttgcgctccacgcttccaagaatttcgccgcgcgtacgaggctgcacgcgcggcacatctgcacccgtgcgaggtggccctccat

SEQ ID NO: 16589 - DNA, 879 bp, synthetic construct
  misc_feature 1..879: note = source = /note="Description of Artificial Sequence: Synthetic coding sequence"
  source 1..879: mol_type = other DNA
atgggctttcccgcagcagctctactgtgcgctctgtgttgtggcttactggctccagccgcaagggccggatacagcgaagaaagatgttcctggaggggcagtgggctcacccaggaacctggaagcgtgggccagctggcacttgcttgtgccgaaggcgccgtggagtggctctatcccgccggcgctctacggttaacactgggaggacccgatccccgcgcaagaccaggcattgcttgcctgaggccagtaagacccttcgctggggctcaggtcttcgcagagcgggctgggggcgccctcgaactgctcttggccgaagggcccggccccgccggaggacgctgcgtgcgatgggggcccagggagaggcgagccctgttcctgcaggccacccctcaccaggatattagtcggagggtcgctgcctttcggtttgagctgcgtgaggatggcaggccagagttgccaccccaggcacacgggttgggcgttgacggcgcttgtagaccatgttccgacgctgagctacttctcgccgcctgtaccagtgatttcgtaattcatggtataattcatggagtgactcacgatgtggagttacaggagtctgtgataaccgtcgtggctgcacgagttctcagacagacccctcctctgtttcaggctggtaggtctggtgatcaagggctgactagcattaggaccccattgcgctgcggtgtgcatcccggccccggcactttcttgtttatggggtggtcaaggttcggcgaagcccgcctagggtgtgcaccacgatttcaggagtttcgaagggcttatgaagccgcacgagctgctcatttgcacccatgcgaagttgccctgcat

SEQ ID NO: 16590 - DNA, 879 bp, synthetic construct
  misc_feature 1..879: note = source = /note="Description of Artificial Sequence: Synthetic coding sequence"
  source 1..879: mol_type = other DNA
atgggtttccccgcggctgcactgttgtgtgccctttgctgcggtcttttggccccagccgcccgggcaggctatagtgaggagagatgctcctggcgcggcagcggcttgacccaggagcctggctctgttggtcaactggctctcgcctgcgccgagggcgcagtggagtggctatatcccgccggtgcgctgcgcctcaccttaggtggacctgatccccgggcacgccccggaattgcctgtctacgccctgttcgtccctttgcaggagcccaagtgtttgccgaaagggccggtggtgccctggaattgttgctggccgagggcccgggaccggctggtggccgatgcgtccgctggggaccccgggagcgtcgcgctctgttccttcaggccaccccccatcaggatatctcccgccgcgtggccgcctttaggtttgaactccgtgaggacgggcgaccggagctgcccccacaggctcatggactgggcgtcgacggtgcctgccgcccatgctctgatgccgaactgttgctggcggcttgcactagcgattttgttattcacggcataattcatggagtgactcatgacgtggaactgcaggagagcgtaattacagtagtcgctgctcgtgtgctgcgtcagactcctcccttgttccaggcaggccgcagcggagaccagggcctgacctcaatccgcacacccctgcgctgtggcgtgcaccccggacccggaacattcttgttcatgggctggtcccgattcggcgaagcacgcctgggctgcgcacccaggttccaggagttccgccgggcgtatgaggccgcgcgcgccgctcacctgcacccttgcgaggtggcgttgcac

SEQ ID NO: 16591 - DNA, 879 bp, synthetic construct
  misc_feature 1..879: note = source = /note="Description of Artificial Sequence: Synthetic coding sequence"
  source 1..879: mol_type = other DNA
atgggctttccagccgcagctctcctgtgcgccctgtgctgtggactgctggctcctgcagctcgggctggctactccgaagagagatgctcctggcgcggatcaggactcacccaagaaccggggtcggtaggtcaactggccctggcatgcgccgaaggcgccgtcgagtggctgtacccagcaggggccctcagactgactctgggaggaccggaccctagggcgcgcccaggaatcgcgtgcttgcgcccagtgcggcccttcgcgggtgctcaggtgttcgcggaacgggccggaggtgccctcgagcttctgttggcagagggaccaggtccggctggcggacggtgtgttcggtggggaccaagagaaagacgcgctctgttcctgcaggctactccacatcaagacatcagccgcagagtcgctgcgttcaggttcgagcttcgggaggacggcaggccagagctgccgccgcaggcgcacggcctcggtgtggatggagcgtgcaggccgtgctcagatgccgaacttttgttggcggcttgcacctcagacttcgtgatccatggtatcattcacggtgtgacccacgacgtggaactgcaagaaagcgtgatcactgtcgtggctgcccgggtcctccgacaaactccgccgctgttccaagctgggaggtccggagatcagggactcacgtctatccggacgcctctccgctgcggggttcacccggggccggggacttttcttttcatggggtggagccggtttggtgaagcacgcctgggatgtgcccctcggttccaggagtttagacgagcatacgaagctgccagggcggctcatctgcacccttgcgaagtcgcactccac

SEQ ID NO: 16592 - DNA, 879 bp, synthetic construct
  misc_feature 1..879: note = source = /note="Description of Artificial Sequence: Synthetic coding sequence"
  source 1..879: mol_type = other DNA
atggggtttcctgcagcggcactcctgtgcgcactgtgctgtggtctgcttgctccggctgcaagagcaggatactcagaggaacggtgttcctggcgaggatcgggtctgacgcaagaacctggttccgtgggccaactggcactggcctgcgctgaaggtgcagtcgagtggctctaccccgcaggtgcactgagattgactcttggtggccccgatccaagagcgcgtcccggcatcgcgtgtctgcgcccggtgaggccatttgctggagctcaagtctttgcagaaagggccggtggcgccctcgagctgctgttggcagaaggtcctggtcctgcggggggtaggtgtgtgagatggggcccaagggaacgaagggccctctttctgcaagctactccgcatcaggacatttcgcgcagagtggcagcctttaggtttgaactgcgcgaagatggacgacccgagctccctcctcaagcacacggacttggagtggatggagcatgcaggccctgttcagatgcagagttgcttctcgcagcctgcaccagcgactttgtgattcatggcattatccatggtgtgactcacgatgtggaacttcaggagtccgtcattactgtcgtggcagcacgcgtcctgaggcagacccctcctctttttcaggcaggccgctcgggcgatcaaggcctcacctccattcgcaccccacttcgatgtggtgtgcatcctggacctggaactttcctgttcatgggatggagcagatttggtgaagcccgacttggatgtgcacctagatttcaggaattcagaagagcatacgaagcagcaagagcagcccatcttcatccatgcgaagtggcccttcat

SEQ ID NO: 16593 - DNA, 879 bp, synthetic construct
  misc_feature 1..879: note = source = /note="Description of Artificial Sequence: Synthetic coding sequence"
  source 1..879: mol_type = other DNA
atgggcttccctgccgcagcattgctttgtgccctgtgttgtggccttctggcgcccgcggctagagcaggatacagcgaagaaaggtgttcatggagagggtctgggctcactcaagaacctggatcggtgggacagctggctcttgcatgtgcagagggagcggtggagtggctgtaccctgcaggtgcacttcgtcttaccctcggagggccagatccccgggcacggccaggtatcgcctgcctccgaccagtgcgccctttcgcaggggcacaggtgttcgccgaacgggcagggggtgcactcgaactgcttctcgcggagggacccggtcctgcaggcggtcgttgtgtaagatgggggccccgggagaggcgggcgctgttcctccaagcaactccgcatcaagacatttcaagaagggtggcagcatttcgctttgaactcagggaagatggtcggccggaacttcccccgcaggcacatgggcttggagtcgatggtgcctgtagaccttgtagcgatgcggaacttctgcttgctgcatgcaccagcgattttgtgatacacgggattatccacggagtgactcacgacgtggaattgcaggaatcggtcattaccgtggttgcagcgcgcgtgttgcggcaaacgccacctctttttcaggccggcagatcgggagatcaagggctgacttcaattaggaccccactgcggtgcggtgtccatcccggaccgggcaccttccttttcatgggatggagtaggttcggagaagcgaggctcggatgcgccccaagatttcaggaatttcgacgtgcgtacgaggcggcacgagccgcccatctccatccatgtgaggtcgcacttcat

SEQ ID NO: 16594 - DNA, 879 bp, synthetic construct
  misc_feature 1..879: note = source = /note="Description of Artificial Sequence: Synthetic coding sequence"
  source 1..879: mol_type = other DNA
atgggcttccccgctgccgctcttttgtgcgcgctctgctgtggactcttggcgcctgccgcccgcgccggttactctgaagagcgatgctcatggcgtgggtctggcctgacgcaggagccgggttccgtcggccagttggctttggcgtgtgccgagggcgcagtggagtggctctatcctgccggcgcccttaggctgacgttgggcggcccggatccacgtgcccgccccggcatcgcctgcctgcggcccgttcgccccttcgcgggggcccaggtcttcgccgagcgcgccggtggtgccctcgagctgctgctcgccgagggaccgggtcccgctggcggccgctgtgtgcggtggggtccgcgtgaacgccgtgcccttttcctccaggccacaccccaccaggacatctcccgccgcgtcgccgctttcagattcgagctgcgcgaagatggccgccccgagctgccccctcaggcccacggcctgggtgtcgatggtgcttgccgcccctgttctgacgccgagctgctgctcgccgcctgcacgtctgatttcgttatccatggcatcatccacggcgtcactcacgacgtcgagttgcaggaatctgtgatcacggtggtcgcagccagggtcctgcgccagaccccacctctcttccaggccggtcgatccggtgatcagggtcttacatctatacggacacccctgagatgcggcgtacacccaggcccgggtacgttcttgttcatgggttggtcacgcttcggggaggcccgactgggctgtgctccacgcttccaggaatttcggcgggcctacgaggcggctcgtgccgcccacctccacccctgcgaagtcgcccttcac

SEQ ID NO: 16595 - DNA, 879 bp, synthetic construct
  misc_feature 1..879: note = source = /note="Description of Artificial Sequence: Synthetic coding sequence"
  source 1..879: mol_type = other DNA
atgggttttcctgctgcggctctgttatgtgcactgtgttgcggcttgttggcgcccgcagcccgggccggctattccgaagagcgttgctcttggcgcggctcaggcttaactcaggagccaggaagtgttggccaactggccttggcatgtgcagaaggagccgtcgaatggctctatcctgccggggcactgcgactcacactggggggcccggaccccagagcccgccccggaatagcttgtctgagaccagttagaccctttgcgggagcgcaagtgtttgctgagagagccgggggcgctctcgaactgctcctggctgagggccctgggcccgcgggcggtaggtgtgtcaggtgggggccccgagagaggcgagccctgttcttgcaggcaactcctcatcaggacatctctcgccgcgttgccgcttttcgctttgagttacgcgaggatggacgacccgaattgcccccccaggctcacggcttgggggtggatggtgcttgtcggccctgcagcgacgcagaactacttctagccgcttgcacctccgattttgtcattcacgggattattcatggtgttacccacgacgtggaattgcaggagtctgtaatcacagtggtcgctgcccgtgttcttcgtcagacgcctccactgttccaagctggcaggtccggggaccagggcctgacgtccatccggactcctcttcggtgcggcgtgcatccaggcccgggcacattcttattcatggggtggtctcggttcggagaagcacgccttggctgtgctcctaggttccaggaattccgcagggcatacgaggccgcaagagcagcccatcttcacccatgtgaggtggccttgcat

SEQ ID NO: 16596 - DNA, 879 bp, synthetic construct
  misc_feature 1..879: note = source = /note="Description of Artificial Sequence: Synthetic coding sequence"
  source 1..879: mol_type = other DNA
atgggatttcccgcagcggctctgctttgtgccctgtgttgcggactccttgctccagcagcaagggccggctacagcgaggagcgttgctcctggcgcggctcaggactgacccaggagcccggttccgtgggccaactggcacttgcatgcgctgaaggcgcagtcgagtggttgtacccagccggggccctgcgtctgactctcggagggcccgatcctcgagcaagacctggaattgcgtgccttagaccagtgcgacctttcgccggagcacaagtttttgccgaacgcgcgggtggtgcactggaactgctcctcgccgaaggacctggacccgcggggggtcgttgcgtgcggtgggggccccgcgaaagacgcgcgctctttttgcaagcgactcctcatcaggacatttcacggcgggtggctgcctttcggtttgaacttagggaagatggacgtcccgaactcccaccacaagcacatggccttggtgtcgatggagcgtgtagaccttgttcggacgcagagctgctgctcgctgcatgtacctcggattttgtgatccacggaatcattcatggtgtgacccacgacgtcgaactgcaagaaagcgtgataactgtggtggcagctcgagtcctgagacagactccgcccctcttccaagcaggacgctcgggagatcagggcctcacctcgattagaacccctttgcgctgtggcgtgcatccgggtccaggtaccttcctctttatgggatggtcgagattcggtgaagctagactcggatgtgctccgaggtttcaggaatttcggcgcgcttacgaggcggccagagcggcccacctgcacccatgcgaggtcgcattgcat

SEQ ID NO: 16597 - DNA, 879 bp, synthetic construct
  misc_feature 1..879: note = source = /note="Description of Artificial Sequence: Synthetic coding sequence"
  source 1..879: mol_type = other DNA
atgggttttccggctgccgcccttctgtgtgccctctgttgtggtctcctggcgcccgcagccagggccggatacagtgaggaacgctgttcatggcgaggttccggcctcactcaggagccgggttcggtaggacagctggcgctggcctgtgcagagggcgctgtcgagtggctctaccccgccggcgcactccgtctcacccttggagggccagacccacgtgctaggcctggaattgcctgccttcggccggttcgcccattcgccggagcgcaagtgttcgcagaacgagccgggggagctttggagttgctcttggcggagggcccgggaccagcaggcggtcgttgcgtgcgttggggaccacgggagcggcgtgctctttttttgcaagcaacgccccaccaggacatatccagacgtgtcgcggcgtttagattcgaactgcgtgaagacggccgacctgaacttcctccacaagctcatggactgggtgtggacggagcttgccgcccatgtagtgacgctgaactcctcctagctgcgtgcacatcagactttgttatacatggcatcattcatggggtgacgcatgacgtggagctccaagaaagtgtgattacagtggtcgctgctagagtattgagacagaccccacccctgtttcaggcgggacgtagtggagatcaggggctgacatctatccgtacgcctctccgctgtggggtgcaccctggtcccggtacctttctcttcatgggctggagtcgctttggcgaagcgcggcttggctgcgcgccaaggtttcaggagttcagacgagcttatgaagctgcacgggcggcgcatctccatccgtgcgaggtagccctacat

SEQ ID NO: 16598 - DNA, 879 bp, synthetic construct
  misc_feature 1..879: note = source = /note="Description of Artificial Sequence: Synthetic coding sequence"
  source 1..879: mol_type = other DNA
atgggtttccccgccgccgcgctactgtgcgcattgtgctgcggattactcgctcctgctgcacgtgccgggtactcggaagagcggtgcagttggcgagggtctggtctgacacaagagcccggctcggtgggccagctggccctggcatgtgccgaaggtgccgtggaatggctgtatccggccggcgctctgcgactgactctgggggggccggaccctcgagcacggcctggtattgcctgtctgaggcctgtacggcccttcgccggagcacaggtttttgctgagcgtgctggaggcgcactggagctgctgttggcagaggggcccggtcccgccggcggcaggtgcgtccgatggggcccacgagaacggagagccctctttctgcaggctaccccccaccaggacataagccggagggtggcagcgtttaggtttgaacttcgtgaggacggacgacctgagctgccacctcaggcccatggccttggcgtggatggcgcctgtagaccctgctcggatgcagaactcctgttagcggcctgtacatctgacttcgtcatccacggcatcattcatggggtcactcacgatgtagagctccaggagtccgtaatcacagttgtggccgcaagggtgctgcgccagactccaccgctcttccaagccgggcgttcaggagatcagggactgacctccatcaggactccattgaggtgcggcgtgcaccctggaccaggtacctttctcttcatgggctggtctcgcttcggagaagcacgacttggctgtgctcctagatttcaggagtttaggcgggcctatgaggccgccagggcagcccacctacacccatgcgaagtggcgctgcac

SEQ ID NO: 16599 - DNA, 879 bp, synthetic construct
  misc_feature 1..879: note = source = /note="Description of Artificial Sequence: Synthetic coding sequence"
  source 1..879: mol_type = other DNA
atggggtttccggcagccgcacttttgtgcgcactttgttgcggccttcttgcccctgcagcgcgcgcgggatactcggaagaacgctgcagctggaggggatcgggactcacccaggaaccaggatcggtcggccaactggcacttgcgtgtgcagagggtgcggtggaatggctctacccagctggggcacttcgccttactctcggcgggccagatcctcgtgcaaggcccggaattgcttgtctccgccccgtgaggcctttcgccggagcccaggtgttcgcagaacgggctgggggtgccctggagctgcttcttgccgaaggcccggggcctgcgggaggtaggtgtgtgagatggggaccacgggaaagaagggcgctgttccttcaggcaacccctcaccaagatatctcccggagagtcgcggccttccgcttcgaactgcgggaggatggcagacctgagcttcctccccaagcccacggtcttggtgtggatggtgcctgccgcccttgttcggacgcagaactgcttctggcagcatgcacttcagattttgtgattcatggcattattcacggagtgacgcatgatgtcgaacttcaagaatcagttattaccgtggtcgcagcgcgcgtcctgcgccagactcctccactgttccaagccggccgtagcggcgaccaagggcttacgtctataaggactcctctgagatgtggagtgcacccaggaccaggtacctttctcttcatgggctggtcgagattcggggaggccagattgggctgtgcgccgaggtttcaggaattcagaagagcatatgaagccgcaagggcggcccatctgcatccatgtgaggtggctctccat

SEQ ID NO: 16600 - DNA, 879 bp, synthetic construct
  misc_feature 1..879: note = source = /note="Description of Artificial Sequence: Synthetic coding sequence"
  source 1..879: mol_type = other DNA
atggggttcccagctgcagcgcttttatgcgccctgtgctgcggtctgctggcacctgccgccagagccgggtattcagaagaacgatgctcttggaggggctctggcctgactcaggagcccggttctgtgggacagctggctctcgcatgtgccgaaggagcagtcgaatggttatacccggccggggcactgagactgacactcggaggtcccgacccgagggctcggccagggattgcttgcctgcgcccagttaggccattcgctggcgctcaggtgttcgccgagcgggccggaggcgccctggaacttctcctcgccgaaggtcctgggccggcaggcgggcggtgcgtgcgttggggacccagagaacgccgggccctcttcctacaggccactcctcaccaggacatctcccgcagagtcgccgcattccgattcgagctgcgcgaggacggtcgcccagagctccctccacaggcacacggactaggggtggacggcgcctgtcgaccgtgtagtgacgcagaactgctgctagcagcctgcacctctgacttcgtgattcacggtattattcacggagttacccacgatgtagaacttcaggagtccgtgatcaccgtggtcgccgcacgcgtgcttcgacaaaccccccctttattccaggccggacggagtggcgaccaaggtcttacatccattagaacacctctcagatgtggggtacatcctggcccaggtactttcctctttatgggctggtctaggttcggggaagctagacttggctgcgctcctaggttccaggagttccgcagggcgtacgaggccgcacgagccgcgcacctgcatccctgtgaagttgctctacac

SEQ ID NO: 16601 - DNA, 879 bp, synthetic construct
  misc_feature 1..879: note = source = /note="Description of Artificial Sequence: Synthetic coding sequence"
  source 1..879: mol_type = other DNA
atgggctttccagcagccgctctgttgtgtgccctgtgttgcgggctgctggcaccggccgcgagggccggttacagtgaggagcgttgttcctggagaggcagtggcttgactcaggaaccagggtccgtcggccagctggccttggcttgcgccgaaggagccgtcgaatggctgtatcctgccggcgcactgcgactgactctggggggcccagatcctagagctcggcccgggattgcttgccttcgtcctgtcaggcctttcgctggggcacaggtctttgcagagagagcgggaggtgcgctggaactgcttctggctgagggacctggacccgctggtgggaggtgtgtgcggtggggtccaagagaacgacgggcgctttttcttcaggccacgccacaccaggacatctcccgacgcgtggctgctttccgatttgagctgcgcgaagacgggaggcctgaactacccccacaggcacatggtttaggggtggacggagcctgtcgcccatgtagtgacgccgaacttctactcgccgcctgcacctccgatttcgttatacatggaattatccacggcgtgacgcacgatgtcgaactccaggagtcagtaataacagtagtcgccgcgagggtgctgcgccagaccccacccctcttccaggctgggaggagtggtgaccaaggactgacttctatccggacgcccctgagatgcggagtgcacccaggccctggcacattcctgtttatggggtggtcacggttcggggaggcacgccttggttgtgcgcctagattccaagagtttaggcgtgcatacgaggccgccagagccgctcacctccacccctgtgaggttgccttgcac

SEQ ID NO: 16602 - DNA, 879 bp, synthetic construct
  misc_feature 1..879: note = source = /note="Description of Artificial Sequence: Synthetic coding sequence"
  source 1..879: mol_type = other DNA
atgggattccctgccgccgcgctcctgtgtgccctgtgctgtggcttgcttgcgccggccgcgcgcgcaggatactccgaagagaggtgcagctggagaggctccggcttgactcaagaaccaggctcggtggggcagttggcattggcatgcgcagaaggagccgtggaatggctgtaccctgcgggggcactccggctgaccctgggcggtcccgacccacgtgcccgcccgggtattgcttgtctgcggccggtcagaccatttgcgggtgcacaagtgttcgcggaaagggcaggaggggcactggaattgctgctggctgaaggccctggtccggccggtggacgctgcgtgcggtgggggccaagggagcgccgcgcgcttttcctgcaggccaccccgcatcaagatatctcccgccgcgtcgcggcgttccggttcgagctgcgcgaagatggccgcccggaactgccgccgcaggcacacggcctcggcgtggacggcgcatgcaggccctgctccgatgcggagttgctgcttgccgcctgcacctcagatttcgtgatccatggcatcattcacggcgttactcatgacgttgaactgcaggagtccgtcatcacggtggtggcagcgcgcgtgctccgacagaccccgccgctctttcaggccggacgatcaggagatcaaggacttaccagcattcgcacccccctccgctgcggggtgcacccgggaccgggaacgtttctgtttatgggatggagccggttcggtgaggccagactcggctgcgccccaagattccaggaattcagacgcgcatacgaagctgcgcgggcggcacaccttcatccttgcgaagtggcgctgcat

SEQ ID NO: 16603 - DNA, 879 bp, synthetic construct
  misc_feature 1..879: note = source = /note="Description of Artificial Sequence: Synthetic coding sequence"
  source 1..879: mol_type = other DNA
atgggctttccagcagcagctttgctctgtgctctgtgctgtggcctcctcgcgccggccgctcgggctgggtactcagaagagagatgtagctggcgagggtccggcctgacccaagagccagggtcggtaggccaactggccctagcatgcgctgaaggcgcagtggagtggctttacccagccggcgccctgagattgaccctgggaggaccagatccccgagctcgacctggtatcgcctgtctgcgcccagtccgacctttcgcaggtgcacaggtcttcgcggaacgtgcaggcggcgctttggaacttttacttgcagagggccccggcccggctgggggacgatgcgtacgttggggacctcgagagaggagggccctgttcttgcaagcaactcctcaccaagacattagccggagggttgcagcctttcgattcgaattaagggaggatggaagaccagagcttccaccacaggctcacggccttggagtggatggagcctgtaggccatgtagtgacgccgaattattgctggctgcatgcacctcggacttcgtaatacatggcatcatccacggagtaacccacgatgtagagttacaggaaagtgtcatcacagtggtggccgcccgggtgttgagacagacacctcctttgttccaggctggtcgctctggggatcagggtttgactagcatcagaacccctctgaggtgcggggtgcaccccgggcctggcactttcctcttcatggggtggagccgatttggagaggccagactgggatgcgctccccgattccaagaatttcgacgtgcatacgaggctgcccgggctgcccacttgcatccatgcgaagtggccctgcat

SEQ ID NO: 16604 - DNA, 879 bp, synthetic construct
  misc_feature 1..879: note = source = /note="Description of Artificial Sequence: Synthetic coding sequence"
  source 1..879: mol_type = other DNA
atgggattcccggcagcggcactcctctgcgcattgtgttgtggactgctggcgcctgctgcccgcgcaggatactcggaggaaagatgctcctggcgggggtctgggctcactcaggagccgggatccgtcgggcaattggctctggcgtgcgccgaaggtgccgtcgaatggctgtatccggcgggagcccttaggcttaccctgggcggaccagacccaagagcccgcccgggtatcgcctgcctgcgtccggtgcgccctttcgccggggcgcaggtctttgcggaacgggctggcggcgccctggagttgctgctcgcggaagggccgggaccggcaggcggacgatgtgtacggtggggaccgcgcgaaaggagagccctgttcctgcaagctactccgcatcaggatatttcacggagggtggcagctttcagattcgaactgcgcgaagatggcaggccagagcttccgccccaggcgcacggactcggagtggatggagcgtgtcgcccctgctcagacgcagagctcctcctggccgcctgtacgtccgacttcgtgattcacggtatcatacatggagtgactcacgacgtcgaactccaggagtccgtgatcaccgtggtcgccgctcgggtcctcaggcagaccccaccattgttccaagctggtagaagcggtgaccaagggcttacctccatcagaactcctttgcggtgcggggtccaccctggaccgggcacctttctctttatgggctggagcagattcggagaagcgaggttggggtgcgccccaagattccaggaatttaggagggcctacgaggccgcccgggccgcccacctgcatccgtgcgaagtcgcccttcat

SEQ ID NO: 16605 - DNA, 879 bp, synthetic construct
  misc_feature 1..879: note = source = /note="Description of Artificial Sequence: Synthetic coding sequence"
  source 1..879: mol_type = other DNA
atgggattccctgctgcagctttgctctgcgctctgtgttgtgggctgcttgcccccgctgcacgagcaggatactctgaggaaagatgctcctggagggggagcggcctgacccaggagcctgggagcgtagggcagctggctctcgcgtgtgccgagggcgcagttgagtggctctacccagctggcgccttgagactgactctgggtgggcctgatcctagagcaagaccgggtatcgcctgtctgcggcccgtaaggccttttgctggggctcaggtcttcgctgaaagggctgggggagccctggagttgctactcgccgaaggtccaggcccagcaggagggaggtgtgttcgatgggggccccgggagcggcgggccctttttctccaggccacgccacaccaggacatctctcgtcgcgtcgccgccttcaggtttgagctgagggaggacgggcgcccagagctgccgccccaggctcacggcctgggcgtggacggcgcatgtcgtccatgtagcgatgccgagctgctgcttgcagcctgtacatcagatttcgtgattcacggcatcatccacggagtgactcatgatgtcgagctgcaggagtctgttattactgtagtagctgcaagggtgctgcgtcagacacctcccctttttcaagccggacggagtggggatcaggggctgaccagcatccggacccccttgcgatgcggagtgcaccccgggcccggtacttttttattcatgggctggagccgatttggggaggccaggttgggttgcgcccctcgctttcaggagtttcgtagagcttacgaagcagcccgggctgcacacctgcatccctgtgaggttgctttacat

SEQ ID NO: 16606 - DNA, 879 bp, synthetic construct
  misc_feature 1..879: note = source = /note="Description of Artificial Sequence: Synthetic coding sequence"
  source 1..879: mol_type = other DNA
atgggattcccggcagccgccctgctgtgcgcgctgtgctgcggtctgctcgcccctgctgcgcgcgcgggctattcggaggagaggtgttcgtggcgcggatccggacttacccaagagcctgggtcagtcggacagctcgcgctggcatgcgctgagggcgccgtggagtggctctacccggccggcgcacttagactcaccctgggaggaccagatccgcgcgcccgccctgggatcgcctgcctccggccggtccgcccgttcgctggagcccaagttttcgcggagcgggccggtggcgcgctggagctgcttctcgccgagggaccaggacccgcagggggcaggtgtgttcgctggggaccccgggaacggcgcgcactctttcttcaggcgacgccacatcaggatatcagccggcgcgtggccgcattccggtttgagctgagagaggacggcagaccggagctgccaccgcaggcccacgggctcggagtggacggggcgtgtagaccatgctcagacgcggagttgctgctggccgcgtgtacctcggactttgtgatccacgggatcatccacggagtgactcacgatgtggaactccaagaatccgtgatcactgtggtcgccgctagagtcctgcgacagactcccccgctgttccaggcagggagatccggtgaccaaggactcacttccatcaggactcccctccggtgcggagtccatccgggccctggaaccttcttgttcatgggttggtccagattcggcgaggcacggcttggatgcgccccgagattccaggagttcagaagagcctacgaagccgcaagggccgcccatctccacccgtgcgaagtcgctctgcac

SEQ ID NO: 16607 - DNA, 879 bp, synthetic construct
  misc_feature 1..879: note = source = /note="Description of Artificial Sequence: Synthetic coding sequence"
  source 1..879: mol_type = other DNA
atggggtttcccgctgccgccctcctctgtgccctatgctgtgggttactggcccctgccgccagagctggatactccgaggaaagatgttcttggagagggtctgggctcactcaggaacctgggtcagttgggcagctcgccttggcttgtgcagaaggagcagtcgaatggctttatcccgccggagctctgcgcctgacactgggggggcctgaccccagagcccgccccgggatagcctgtttgcgccccgtcaggcctttcgctggggctcaggtttttgccgaacgagccgggggagcactggaactcctactggcggaagggcctggaccggccggggggcgctgcgttcgatgggggcccagggaaaggagagccttattcctccaggctacacctcaccaggatatatccaggagagtggcagcatttaggttcgagctcagggaagatggacgacccgaactccctccacaggcccatggacttggagttgatggagcctgccggccctgctctgacgccgaactcctgctagccgcatgtacatctgatttcgttatacacggaatcatccatggggttactcacgatgttgaacttcaggaatctgtcattacagtggtagccgcacgggtcttaagacagactcctccattattccaggccggacggagtggagaccaggggctgacttctataagaacaccactgcggtgtggagtgcacccaggaccaggaacttttctatttatggggtggtctcgcttcggagaggcccggctcggatgtgccccccggttccaggaatttaggcgggcatacgaagctgcaagagcagctcaccttcatccatgcgaagtagctttgcat

SEQ ID NO: 16608 - DNA, 879 bp, synthetic construct
  misc_feature 1..879: note = source = /note="Description of Artificial Sequence: Synthetic coding sequence"
  source 1..879: mol_type = other DNA
atgggtttcccagcagccgcactgttgtgtgccctttgctgtggtttgctggcacccgcagcccgcgcaggatactcagaagaaaggtgttcctggagagggtcgggacttactcaggaacctggatcagtcggtcagctggcccttgcatgtgcagagggtgccgtggagtggctttatccagcaggcgcactgagactcactctgggtggtccagaccctagggcacgcccagggattgcatgcttgcgacccgtgcggccttttgcaggcgcccaggttttcgcagagagagcaggtggagcacttgaactcctccttgccgaggggcctggtcccgccggtggcaggtgcgtgaggtgggggcctagagaaagacgcgccctcttcctccaagcgacccctcatcaggatatctcccggagagtcgctgcgtttcgatttgaattgcgggaggatggacgaccggagcttccccctcaggcccacggactgggggtggatggagcttgccgtccatgtagcgacgcagagctcttgcttgccgcgtgcacctcggattttgtgatccatggaattatccacggggtgacccatgacgtggaacttcaggaaagcgtcattactgtggttgcggcaagagtgttgcgacagacccctccgctgtttcaagccggtcgttcaggtgatcaagggctcacgtcgatcagaacccccttgcgctgtggtgtccacccgggtccaggcacctttctgttcatggggtggtcgcgcttcggagaagcgcgtcttggctgcgcaccccgctttcaggaatttaggcgagcatacgaagcagcacgcgctgcgcaccttcatccttgtgaggtcgcattgcat

SEQ ID NO: 16609 - DNA, 879 bp, synthetic construct
  misc_feature 1..879: note = source = /note="Description of Artificial Sequence: Synthetic coding sequence"
  source 1..879: mol_type = other DNA
atgggttttccggctgctgctttgctctgcgctttgtgttgtgggcttctcgcccccgcagcacgcgccggatatagcgaggaaaggtgctcctggagggggtccggtctgactcaggaacctggatctgtgggacagctggccctggcatgcgcagagggcgcggtggaatggctgtatcccgcgggcgctttgcgacttactctcgggggccccgacccccgcgcgcgacccggaatagcatgcttgcggccagtcaggccattcgcaggtgctcaagtgtttgcagagagagctggaggcgctcttgaactcctgttggccgagggcccaggaccagctggcggtcgatgcgtccgctgggggccacgagaacgccgagcactgttcctgcaagccacaccgcaccaggatatctcacgaagagtcgccgcattcaggttcgagctgcgcgaggacggcagacctgaattgccccctcaggcgcatggtctgggagttgacggcgcttgcagaccctgttccgatgcggaactgctgctggcagcctgtacatcagactttgtcatacacggcattatccacggagtgactcatgacgtcgagttgcaggaatctgtgattaccgtggtggcggctagggtactgcgccagacacccccactcttccaagcaggcaggagtggagatcaggggctgacgagcatacgcaccccccttcgctgcggggtgcaccctgggcctgggacttttctgtttatgggctggtccaggtttggggaggcccggctgggatgcgccccgcggttccaggagtttcgcagggcttacgaagcggctagagctgcacatctccatccctgtgaagtggcactgcac

SEQ ID NO: 16610 - DNA, 879 bp, synthetic construct
  misc_feature 1..879: note = source = /note="Description of Artificial Sequence: Synthetic coding sequence"
  source 1..879: mol_type = other DNA
atggggtttccggcagcagcacttctgtgtgcactgtgttgtggcttgcttgcccctgcagcaagagcggggtactcggaggaaagatgttcctggaggggcagtggtctgacccaggaacccggcagcgtgggtcagctcgcactggcctgtgcagaaggggcggtcgaatggctttatcccgcgggagccctgaggctgactctgggaggccctgatcctagagctcgtcccgggattgcatgccttaggcctgtccggcctttcgcgggagcacaggtgtttgcggaacgggccggcggagcactcgagctccttcttgcagaaggtcccggtcctgcgggaggacggtgcgtgcgctgggggccgagagaaaggcgtgcgcttttcttgcaggctacccctcatcaggatatatcccgccgggtcgccgcatttcgctttgagctgcgagaagatggtaggccagaactcccaccacaggcacacggtcttggcgtggacggagcatgtcgaccttgctcggatgcagaacttctgctggctgcttgcaccagcgacttcgtgattcacgggattattcatggggtgactcatgatgtggaactgcaagaatccgtgatcactgtcgtggcagcgagagtgctgcggcagaccccgccccttttccaagcgggacggtccggagatcaaggtcttaccagcataagaactccacttagatgcggcgtccatcctggacctggtacttttctgttcatgggatggtcacgtttcggagaagcccgcctgggatgtgcacccagatttcaggaattccgtcgggcatacgaggccgcaagagccgcccaccttcatccttgtgaagtggcacttcac

SEQ ID NO: 16611 - DNA, 879 bp, synthetic construct
  misc_feature 1..879: note = source = /note="Description of Artificial Sequence: Synthetic coding sequence"
  source 1..879: mol_type = other DNA
atgggcttcccagctgccgctctactatgcgccttatgctgcggcctacttgcccctgccgcaagagctggatactccgaggaacgttgctcttggcgtgggtcaggactcactcaggagcctggctctgtcggccaactcgcccttgcctgtgcagagggcgctgtggagtggctatatcctgccggggccttgcgtctgactttgggagggcctgatcctcgagccagaccaggcatcgcttgtctcagacccgtacgtccttttgcaggggctcaggtgttcgcagaacgggctgggggcgctctggaactgttgctggccgagggtcctgggcctgccggagggagatgtgttagatgggggccccgagaaagacgcgcacttttcctgcaggcgacaccacatcaggatatatctagaagggttgccgcctttcgtttcgagctgagggaagacggtagaccagaattgccgccgcaagcgcatgggctcggtgtggacggcgcctgccgcccgtgcagcgacgctgaactccttctggcggcctgcacatccgactttgtgatccacggcataatccacggagtaacccatgacgtggaattgcaggagtccgtgattaccgtggtggctgcccgagtgctcagacaaaccccacccctattccaggcaggacgaagcggcgaccagggcctgaccagcatcagaactcccctccgttgtggcgttcaccccgggcctggcacttttttattcatgggttggtcccgattcggcgaggccagactggggtgtgcacccagattccaggaattccgaagggcctacgaagcggctcgggcggcccacctccacccctgtgaggtcgctctgcac

SEQ ID NO: 16612 - DNA, 879 bp, synthetic construct
  misc_feature 1..879: note = source = /note="Description of Artificial Sequence: Synthetic coding sequence"
  source 1..879: mol_type = other DNA
atggggtttccagctgcggcactgctgtgtgcactgtgttgcggtctgctcgctccagcagctagggccggctactcagaggagagatgctcctggcgtggaagtggcttaacccaggagcccggatccgtgggccagctggcccttgcgtgtgctgagggcgccgttgagtggttgtaccccgcgggcgccctcaggttgacgctcggaggacctgacccaagggctcgacccgggattgcctgcttgcgtccagttcgcccttttgccggcgcccaggtgttcgcagagcgagccggcggagccctggaactgttgctggctgagggccccggacctgccggaggaagatgcgtacgttgggggccccgcgaaaggcgcgcgctcttcctgcaagccacacctcatcaggacatctctcgaagagttgccgcattccggtttgagttacgcgaggacggacggccagagctgcctccccaggcacacgggttgggcgtggacggcgcttgtcgcccatgtagcgacgctgagctcctgctggcggcctgcaccagcgacttcgtcatccacgggattatacatggcgttactcacgatgtggagctccaggaatccgtgataactgtcgtggctgcccgggtgctgcggcaaactccgcctctttttcaggcgggacgtagtggtgaccagggcctgactagcatacgcacgcccctgaggtgtggcgtgcacccaggccccggtacatttctgttcatggggtggtcgagattcggtgaagctcgtctagggtgtgccccacgattccaggaatttaggagggcatacgaggctgccagagctgcccatctccatccttgcgaagtagctcttcac

SEQ ID NO: 16613 - DNA, 879 bp, synthetic construct
  misc_feature 1..879: note = source = /note="Description of Artificial Sequence: Synthetic coding sequence"
  source 1..879: mol_type = other DNA
atgggctttcccgccgccgctctcctgtgtgccctgtgttgcggcctgctagccccggccgcccgggctggctacagcgaggaaaggtgctcatggagaggaagtggcctgacacaggagccaggctcagtgggacagctggccctcgcatgtgcagaaggcgcagtcgaatggctgtatcccgcgggggccctccgattaacactaggcggacctgatcccagagcaagaccgggaatcgcatgtctccggcctgtcagacctttcgccggagctcaggtgttcgccgagcgcgccgggggagcgctggagctgttgctggcggagggtcccgggcctgccggagggaggtgtgtgcgctgggggccacgtgagcgccgcgccctgtttctgcaggcaaccccgcatcaggacataagccgaagagtcgctgcttttcgctttgaactaagagaggatgggcgccctgagcttccaccccaggcgcacgggctgggcgtggatggagcttgtcgaccttgtagtgacgccgagctcttactagccgcatgtacgtctgacttcgtgatacatgggatcatacacggcgttactcatgacgtggagcttcaggaaagtgtgatcaccgtggttgcagccagagtgcttcggcagaccccacctttgttccaagctggtaggagcggcgaccagggcctcacctccatcagaactcccctaaggtgcggagttcatcctgggcccggcactttcttatttatggggtggagccgattcggggaagctaggttgggttgcgcacctcggttccaagaatttcgaagggcttacgaggccgccagagcggctcacctccacccttgcgaggtcgccctgcac

SEQ ID NO: 16614 - DNA, 879 bp, synthetic construct
  misc_feature 1..879: note = source = /note="Description of Artificial Sequence: Synthetic coding sequence"
  source 1..879: mol_type = other DNA
atgggcttcccggctgcagccctgttgtgtgctctctgctgtggcttactggcccccgcagcaagggctggctacagtgaagagcgttgctcttggcgaggttcagggctgacacaggaacccggctcggtcggccaattggctttggcctgcgctgagggagcagtagagtggttatacccagctggcgccttgagacttactttaggtggccccgacccccgggctcgtcctggcatcgcctgtttgcggcccgtgcgccccttcgccggagcccaggtgtttgccgaaagagcgggaggggcattagagctgctcctggccgagggccccggccctgctggcggcaggtgcgtacggtggggacccagggagcgccgtgccctctttctacaggctactcctcatcaggacatatcgagaagagtggcagcctttcgttttgagctgcgcgaggacgggcgcccagaactgccgccacaggcccacggccttggcgtggacggggcatgtaggccttgttccgacgccgagctgttgttggccgcttgtacttctgacttcgtgattcacggaatcatacacggcgtgacgcacgatgtggagctccaagaaagcgtgatcactgtggtggccgctcgtgtgcttcggcagacaccccctttgttccaggctggacgatctggggatcaggggctgacctcaattaggacaccacttcgttgcggggttcatccaggccccgggacattcctctttatgggttggagtaggttcggggaagccagactggggtgcgcacccaggttccaggagtttcgccgggcctatgaggctgctagagcagcacacttgcacccctgcgaagtggcgttgcat

SEQ ID NO: 16615 - DNA, 879 bp, synthetic construct
  misc_feature 1..879: note = source = /note="Description of Artificial Sequence: Synthetic coding sequence"
  source 1..879: mol_type = other DNA
atgggattccctgccgctgcactgctttgcgcgctctgttgtgggttgctcgcacctgcagcccgtgccggatactccgaagagcgctgttcgtggagagggagcggacttactcaagagcctggttcggtgggccaactggcactggcatgtgcggagggagcagtggaatggctttacccagcgggtgctcttcgtcttacgcttggggggcccgacccccgggcccgtccaggaatcgcatgtcttagacctgtacggccctttgccggagcacaggtgtttgcagaaagggccggaggcgcactcgaactgctgctcgcggagggacctggacctgccggtggacggtgcgttcgttggggacctcgtgaacgccgagctctgtttctgcaagcaaccccacatcaggatatttcaagacgggtggccgcttttcgattcgagttgcgggaggacgggcgtccagaactgccgccccaggcacacggcctgggagtcgatggtgcgtgccggccctgtagcgacgcggaacttcttttggcagcctgtacctcagatttcgtgattcacggtattatccatggagtgactcatgatgtagagttgcaagaatcggtcattaccgtggtggccgcacgcgtgcttcggcagactcctcctctctttcaagcaggacgatccggtgatcaagggctcacctctatcagaactccccttcggtgcggggtgcatcccggacccggtacctttctgtttatggggtggtccagattcggcgaggcacgacttggttgcgcaccgcggttccaggaatttagaagagcgtacgaagcagcacgagccgcgcatctgcacccttgtgaggtggcactccat

SEQ ID NO: 16616 - DNA, 879 bp, synthetic construct
  misc_feature 1..879: note = source = /note="Description of Artificial Sequence: Synthetic coding sequence"
  source 1..879: mol_type = other DNA
atggggttccccgccgctgctctgttgtgcgccctctgctgtggtttactggcccctgcagctcgcgcagggtattccgaagaaagatgctcgtggcgtggatccggcctgacgcaggaacccgggtctgttggtcaactagccttggcctgtgcagaaggggctgtcgagtggctgtatcccgccggggctttaaggctcacgcttggaggaccggatccaagggccaggcccggcattgcttgcttgcggccggtcaggccgttcgccggtgctcaagttttcgctgaaagagctggcggagccctcgagctgctgcttgccgagggtcccggcccggcagggggccgatgtgtccggtgggggccaagagaaaggagagctcttttcctgcaggccaccccacatcaagatatctctcggcgggtagcagcgttcagattcgagctacgcgaggacggtaggcctgagctgcccccccaggcacacggcctgggagttgatggcgcatgccgcccgtgttccgatgccgaactgctgctggctgcctgcacttccgactttgtgatacacggaatcatccacggtgtgacacacgatgttgaattgcaagaaagcgtgatcacggtggttgccgccagggttttgaggcaaacccctccgctctttcaagctggcagatcaggcgatcagggccttacctctattcgaacccctctcaggtgcggcgttcatccagggccagggaccttcctctttatgggctggtctaggtttggcgaagccaggctaggctgtgcgccgaggttccaggagtttagacgcgcttacgaagcagctagagctgcgcatttgcacccgtgcgaggtagccttgcac

SEQ ID NO: 16617 - DNA, 879 bp, synthetic construct
  misc_feature 1..879: note = source = /note="Description of Artificial Sequence: Synthetic coding sequence"
  source 1..879: mol_type = other DNA
atgggctttccagccgccgctctgttgtgcgcgctgtgctgcggcctgctcgccccggctgcgagagcaggatactcagaagaaaggtgcagttggagaggatctggactcacccaagagccaggttcagtgggtcaactcgccctggcgtgtgccgaaggcgctgtggagtggctgtatccagctggagcgctgagactgacactcggaggcccggacccccgcgctaggccaggcatagcgtgcctgaggccggtcaggcccttcgcaggcgcccaggtgtttgctgaaagagctggaggcgcactggagctccttctggctgaaggcccaggaccagccggaggtagatgcgttaggtggggcccgcgcgagaggagagctctcttcttgcaggccacgccgcaccaggacatttcaagacgcgttgcggctttccgcttcgagctgagagaagacggcaggccggagctgccaccccaagcccatggcttgggcgtggacggtgcctgccgcccctgttccgacgctgaactcctgctggccgcgtgtaccagcgacttcgtgattcacggaatcatccacggagtgacacacgatgtggaacttcaggagtccgtgattaccgtagttgccgctagggtcctgaggcagactcctcctctttttcaagccggcaggagtggcgatcagggcctgacatctatccgcacccccttgaggtgtggcgtccaccccggccctggcacatttctgtttatgggctggagcagattcggcgaggctagacttggatgcgccccaagattccaagaattcagaagagcctacgaggccgccagggcagctcacctccacccctgcgaagttgcgctgcat

SEQ ID NO: 16618 - DNA, 879 bp, synthetic construct
  misc_feature 1..879: note = source = /note="Description of Artificial Sequence: Synthetic coding sequence"
  source 1..879: mol_type = other DNA
atggggtttcccgctgctgcccttttgtgcgctctgtgttgtggactgttagcgcccgcagcacgagcaggctacagtgaggagaggtgctcctggagaggaagcgggctcacacaagaaccaggcagtgtgggccagttagctctcgcatgcgccgagggcgccgtcgagtggctctatcccgcgggtgctctgcgcctgactctgggaggtcccgaccctagagccagacctgggatcgcgtgcctgcggcccgtccgaccattcgctggtgcacaggtttttgccgaaagagcagggggcgcactagaactgctgctggccgagggacccggaccagccggcggccggtgtgtgcggtggggacccagggaacggagggccctgtttttacaagctaccccccaccaggatatatcgcgaagagtagccgcctttcgctttgagctccgggaggatgggaggccagagctccccccccaggcccacggcttaggagtggacggtgcctgtcgcccttgttccgacgcggagctcttgctcgccgcctgcacctctgacttcgtaattcacgggattattcatggagtaacgcatgatgtagagctgcaggaaagcgtgattaccgtggtagctgcccgggtcctcaggcagacccctccgctttttcaggcaggacgatcgggcgatcagggcttgacttctattcgcacgcccctgcgatgcggagtccacccaggacctggaaccttcttgtttatgggctggtcccgctttggagaagctcgcctgggttgcgccccacgcttccaagagttcagacgcgcttatgaggcggctagggccgcccacctgcatccttgcgaagtggcgctgcat

SEQ ID NO: 16619 - DNA, 879 bp, synthetic construct
  misc_feature 1..879: note = source = /note="Description of Artificial Sequence: Synthetic coding sequence"
  source 1..879: mol_type = other DNA
atgggattcccagccgctgccttgttgtgcgcgctttgctgcggtctccttgctccagctgctcgtgccggttacagcgaagagagatgcagttggagaggcagcggacttactcaagaaccaggttctgttggtcagttagccctggcttgcgctgaaggcgctgttgaatggttataccctgcaggtgccctcaggctcactttagggggacctgatccacgtgcaaggcctggtattgcttgcctcaggcctgtaagaccttttgcaggggcccaagtcttcgctgagagggcgggcggagcccttgaacttcttcttgctgagggtccgggcccggctggaggtagatgtgtccgatggggcccaagagagcgtagagccctttttttacaggctaccccgcatcaagatatatcaaggagagtggctgcttttagattcgaactgcgtgaagacggaagaccagaactgccaccacaggcccatggcttgggagttgatggggcgtgcaggccttgcagtgatgccgagttgttgcttgccgcctgtacatcggattttgtgatacatggtataatacacggagttactcatgatgtcgaactccaggagagcgtgattacagtggtggctgctcgtgttcttaggcaaaccccgcctctttttcaagctggcagatcaggggatcagggactcacgtccataaggacacctcttaggtgtggagtgcatccgggccctggcactttccttttcatgggatggtccagattcggcgaggcacgattgggttgtgctccacgattccaagaattccggcgtgcatatgaggccgcccgcgccgcccaccttcatccatgcgaggtcgccttgcat

SEQ ID NO: 16620 - DNA, 879 bp, synthetic construct
  misc_feature 1..879: note = source = /note="Description of Artificial Sequence: Synthetic coding sequence"
  source 1..879: mol_type = other DNA
atggggttcccggcggcggccctgctctgcgccctctgttgcgggctgctggccccagcggctagagctggatacagcgaagagaggtgttcgtggaggggctcgggcctcactcaggaaccggggtccgtcggacagctcgcactggcctgtgcggagggtgccgtggagtggctctacccggctggtgcgctgcggcttactcttggaggacccgatccgcgcgcaaggcccggaatcgcgtgcctccgcccggtccgtccgttcgccggagcacaggtgttcgccgagagagccggaggcgcactggaactcctgctcgcggagggtccgggcccggcaggaggacgttgcgtgcggtgggggcctcgagaaagacgggcgctgttcctgcaggcaaccccgcaccaagatatctcaagacgggtcgccgcatttcgctttgaattgagagaggacggtaggccggaactgcctcctcaggcccatgggctgggagtggatggagcgtgtagaccttgctccgatgccgagctgctccttgccgcgtgcacctcagacttcgtcatccacgggatcatccacggagtgacccacgacgtcgagcttcaagaatcggtcatcaccgtggtcgccgcccgcgtcctgagacaaactccgccactgttccaggctggacgcagcggtgaccaaggcttgacgtccatcaggacccccctgcgctgcggagtgcaccccggaccgggcaccttcctgtttatgggatggtcgagattcggagaggcgagactcggatgcgcaccaagatttcaggaattccgcagagcatacgaggccgcccgcgccgcccacctgcatccgtgcgaggtcgcgcttcac

SEQ ID NO: 16621 - DNA, 879 bp, synthetic construct
  misc_feature 1..879: note = source = /note="Description of Artificial Sequence: Synthetic coding sequence"
  source 1..879: mol_type = other DNA
atgggtttcccagccgctgctcttctctgcgctctttgttgtggacttctggcaccagcagctagagccggctacagcgaggaacgctgctcttggaggggttctggccttacacaggaacctggctcagtcggccagctggccttggcttgtgccgagggagcagttgaatggctgtacccagcaggtgctctgcgtcttactctcggaggcccagaccccagggcacgtcccggcatcgcatgtcttcgccctgtcaggccctttgccggagcacaggtgttcgccgaaagagccggaggagctctggagcttctcctcgctgagggtcctggtcccgccggcggcaggtgtgtcagatggggcccaagagagcgtcgtgctctttttctgcaggcaaccccccaccaggatatcagcagacgtgttgccgcctttcgctttgagctccgtgaggatggcagaccagaactgcccccccaagcccatggcctcggagtggatggcgcctgtagaccatgctctgacgctgaactcttgctggctgcctgcacttccgatttcgttattcatggcatcattcacggtgtaacccatgacgtagaactgcaggagagtgtgattactgtggtagctgccagggtgctgagacagacacctccactgttccaggccggcaggtcaggagaccagggcctcaccagtattcgtactccactccgttgtggcgtacatcccggacccggaactttcctgttcatgggatggtctaggttcggtgaagctagattgggatgcgctccacgctttcaggagttcaggagagcatatgaagcagcaagggccgcacatctgcacccctgcgaagtggcactgcat

SEQ ID NO: 16622 - DNA, 879 bp, synthetic construct
  misc_feature 1..879: note = source = /note="Description of Artificial Sequence: Synthetic coding sequence"
  source 1..879: mol_type = other DNA
atggggtttccagccgccgctctgctctgtgcactctgttgtggcctccttgcgcctgccgcccgtgcaggatattccgaggaacgatgctcctggaggggaagcggcctgacccaagaaccagggtcggtgggccaactcgccctggcatgcgcagaaggagccgtcgagtggttgtaccccgcgggagcactgcggcttacccttggcggccctgatccaagagctagaccaggaattgcatgcctgcgtcccgtgcggccatttgccggcgcccaagtgtttgccgagcgcgcaggaggagcgctggagctgcttttggcggaaggtcctggcccagcaggtggtcggtgtgtgcggtgggggccgagggaaaggcgtgccctgttcctccaggcaactcctcatcaggatatcagccgacgggtggctgcgtttcgctttgaactcagagaagatggtcgacctgaattgccgcctcaagcacatggactcggagtcgatggcgcatgtagaccttgttcagatgcggaacttctgcttgccgcatgtaccagtgactttgtgatccacggaataatccatggagttactcatgacgttgaactccaagaatccgtgatcaccgtggtcgcagctcgtgtcctccgacagacccctccgctcttccaggcagggagaagcggagatcaaggtctgacttcaattagaacccctctgcgctgtggcgtgcacccgggaccgggaactttcctgttcatgggatggtccagatttggagaggcacgtctgggatgtgcacctcggttccaagaattccgaagagcctacgaggcagccagagccgcacacctgcatccctgtgaagtggccctgcat

SEQ ID NO: 16623 - DNA, 879 bp, synthetic construct
  misc_feature 1..879: note = source = /note="Description of Artificial Sequence: Synthetic coding sequence"
  source 1..879: mol_type = other DNA
atgggattcccagccgccgctttgctttgtgcgctttgttgcgggcttctggcccctgcagcaagagcaggatactcggaggagcgctgttcctggagaggctcgggcctgacccaggaacctggctcggtggggcaactggcgctggcatgcgctgaaggtgcagtggaatggctttaccccgcaggtgcgctccgccttaccctgggtgggcccgatccccgcgcaaggcctggcatcgcatgtcttagaccggtccgtccctttgcaggtgcacaggtgtttgcagaacgggcaggtggggctcttgagcttctgctggcggaaggtccaggacccgccgggggacggtgtgtccgctggggcccacgggaacggagagcactttttctccaggcaaccccacatcaggacatttcccgacgggtcgcagcttttcggtttgaacttcgcgaggacggccgacctgagttgcctccacaagcacacggactgggagtggacggggcatgtaggccgtgttcagacgcagaattgcttcttgcagcttgcacctctgattttgtcatccatggtatcattcacggtgtcacgcacgatgtggaactccaggagagcgtgattactgtggttgccgccagagtcctgcgacaaaccccaccactgtttcaagccggacgctcaggtgatcaaggtcttaccagcattagaacccctctgaggtgtggagtgcatcctggacctggaacctttctgttcatgggctggagcagatttggggaagcaagactgggatgcgctccacgattccaagaatttcgccgggcctacgaagctgctagggcagcccacctgcatccatgcgaggtggcactccat

SEQ ID NO: 16624 - DNA, 879 bp, synthetic construct
  misc_feature 1..879: note = source = /note="Description of Artificial Sequence: Synthetic coding sequence"
  source 1..879: mol_type = other DNA
atgggatttccggccgccgcccttctttgtgccctgtgttgcggactgctggcgccggccgcacgcgcgggctattcggaggagcgctgctcctggcgcggctccggactcacccaagaaccgggatcagtgggccagctggcactggcctgcgcggaaggcgccgtcgaatggctgtacccagccggagcactgagactcactctgggtggcccagacccgagggcgcggccgggcatcgcctgcctccgcccggtccgtccgtttgccggggcacaagtctttgcggaaagagccgggggtgccctcgaactgctcctggccgaaggccctggaccagccgggggacggtgcgttcgctggggaccccgggaacggcgggcgctcttccttcaggctaccccgcaccaggacatcagcagacgcgtcgccgcctttcgcttcgagttgcgggaagatggacggccagaactgcctccacaggcgcacgggcttggtgtggatggcgcttgcagaccgtgttctgatgctgaacttctgctggcggcttgtaccagcgatttcgtcatccacggaatcatccacggagtgacccatgacgtcgaactgcaggaaagcgtgattacggtggtcgccgcacgggtgcttcgccagaccccgcccttgttccaggcggggcgctcgggagatcaaggcctcacgtctatcaggactcctctgagatgcggagtgcatccaggaccgggaacctttctcttcatgggatggtcgagatttggagaagccaggctgggttgcgcaccgcggttccaggagttcagacgggcgtacgaggctgcccgggccgcacacctgcatccgtgtgaggtcgcactccat

SEQ ID NO: 16625 - DNA, 879 bp, synthetic construct
  misc_feature 1..879: note = source = /note="Description of Artificial Sequence: Synthetic coding sequence"
  source 1..879: mol_type = other DNA
atgggcttccccgcagctgcgctcctgtgcgccctatgttgcggcctgctggcccctgccgcccgggctggatactccgaagagcggtgctcttggagaggctccggcctgacgcaggagccaggtagcgtggggcagctggcccttgcctgtgcagagggagcagtcgagtggttgtaccccgctggtgcactgaggctgaccttgggcggccctgacccacgggcacgtccagggattgcgtgcctccggccagtgcgccccttcgctggggcccaggtattcgctgagcgagctggcggcgccctcgaattgttgctggctgaaggtcccggccccgccggagggaggtgtgtacgatgggggccccgcgagcggagggccctgtttctccaggctactccccaccaggatatctcccgcagagtcgccgcctttcgattcgagctgagggaggatggtagacccgagctcccccctcaggcacatggcctgggggtagatggagcatgcagaccttgttccgatgcggagttgcttctggccgcgtgtaccagcgacttcgtgatccacggcatcattcacggggtgactcatgatgttgaactgcaggagagcgtgataaccgtggtcgctgcgagagttctcagacaaacaccaccgctgttccaggctgggcgctctggcgatcaaggtctgaccagtattcgaacacctttacgctgcggagttcaccctgggcccggcactttccttttcatgggctggagccggtttggtgaggccagactgggctgcgcgcccagatttcaagagtttcgccgtgcctacgaggcagctagggcggcccacctgcacccttgtgaggtcgccttgcac

SEQ ID NO: 16626 - DNA, 879 bp, synthetic construct
  misc_feature 1..879: note = source = /note="Description of Artificial Sequence: Synthetic coding sequence"
  source 1..879: mol_type = other DNA
atgggattcccggctgctgcgctcctctgcgcgctctgctgcggactgctggcgcctgcagcccgggccgggtactccgaagagagatgctcctggagaggaagcggactcacccaggaacctgggtcagtgggccaactcgctctggcatgcgccgagggagccgtcgagtggctgtacccggctggcgcgctccggctcacgctcgggggccctgacccacgcgcccgaccaggcatcgcgtgtcttagaccggtgcgcccgtttgctggagcccaagtgttcgcagaacgggccggaggggcgcttgaattgctgctggctgaaggtccgggccctgccggaggccgctgcgtgcgttggggcccgcgggaacgccgcgcactctttctgcaagctaccccacaccaggatatcagcagacgggtggcggcttttaggttcgaacttagagaagatggaaggccggagctgccgccgcaagcgcacggtctgggcgtcgacggtgcttgcagaccgtgcagcgacgccgaactcctcttggcggcttgcacctcagactttgtgattcacggaatcatccatggtgtcacccacgatgtggaattgcaagagtcggtcatcaccgtcgtggcagcccgcgtcctgcgccaaactccaccgctgttccaggcgggacgctccggagatcaagggctgactagcatccgcactccgctccggtgcggggtgcatccgggacctggcaccttcctcttcatgggatggtccagatttggagaagccagactgggatgtgcaccgcgattccaggagttccggcgggcctacgaagcagcccgagctgcacatctccatccctgcgaggtggcactgcac

SEQ ID NO: 16627 - DNA, 879 bp, synthetic construct
  misc_feature 1..879: note = source = /note="Description of Artificial Sequence: Synthetic coding sequence"
  source 1..879: mol_type = other DNA
atggggttccccgcagcagcccttctgtgcgcattgtgctgtggactgctggccccggctgctcgggccggctacagcgaagaaagatgctcgtggcgggggtccgggctgacccaggaaccaggctcggtgggacagctggcgcttgcatgcgcagagggagctgtcgagtggctgtacccggctggggcactgcgcctgacgctgggaggtccagaccctagagctcggccgggcatcgcgtgccttcgtccggtgcgcccttttgcgggagctcaagtgttcgctgaacgggcaggaggggctctcgagctgcttctggccgagggccctggcccggccggtggaaggtgtgtgcggtgggggcctagagaacgccgagccttgttcttgcaagctactcctcatcaggacatctcacgccgggtggcggctttcagatttgagctccgagaagatggccgcccagaactgccgccacaggcccacggactcggagtcgatggagcctgccgaccgtgttcggacgccgaactgctgctcgctgcttgcactagcgacttcgtgatccacgggatcattcacggtgtcactcatgatgtggagctgcaggagtccgtcatcaccgttgtggcggcgagagtgctccggcagaccccgccgctttttcaagctggacgaagcggagatcagggattgacctcaatccggactccactcaggtgtggcgtccaccccggccctggaaccttcctgtttatgggctggtcccgcttcggagaggcaaggctcggatgcgcgccgcgctttcaagaattccgccgggcttacgaggccgcgcgggcggcacatctgcacccgtgcgaagtggcactgcac

SEQ ID NO: 16628 - DNA, 879 bp, synthetic construct
  misc_feature 1..879: note = source = /note="Description of Artificial Sequence: Synthetic coding sequence"
  source 1..879: mol_type = other DNA
atgggttttccagcagcagccctgctttgtgctctttgttgtggccttctggctcccgcagctcgcgccggatactcggaagagcgctgtagctggcgcggatccgggcttactcaagagcctggatcagtgggccaacttgcactggcctgcgcagaaggtgcagttgagtggctgtaccctgcaggggctctgagattgacccttggaggtccggatccgagagccagaccggggattgcgtgtcttagacctgtgaggcctttcgcaggagcacaagtgttcgcagagcgggcaggaggagcactggaattgctgcttgcagaagggcctggacctgcaggaggccggtgcgtgcgatggggaccccgggaaagacgcgcgctttttctgcaagccacccctcatcaagatatttccagacgggtcgccgctttcagatttgaacttagagaggacggtcgacccgaactgcctcctcaagcacatggccttggcgtggatggagcgtgtcgcccgtgttccgatgcggaactgctcctggcggcctgtacctctgactttgtcatccatggaattatccacggagtcacccacgacgtggaattgcaggaatctgtcatcactgtcgtcgccgccagagtgttgagacagactccacctctctttcaggcaggacgttcaggcgatcagggtcttacgtcaattagaacccccttgcgttgtggggtgcaccctggtccaggtacctttcttttcatgggatggtcgcggtttggcgaggcgcgccttggatgcgcacccagatttcaggagtttcgccgggcatacgaagcagcacgggcggcacatcttcatccctgtgaagtggccctgcat

SEQ ID NO: 16629 - DNA, 879 bp, synthetic construct
  misc_feature 1..879: note = source = /note="Description of Artificial Sequence: Synthetic coding sequence"
  source 1..879: mol_type = other DNA
atgggctttcccgctgcagctctgttgtgcgccctctgttgtggactgctagcgccagcagcacgggctggttattctgaggagaggtgctcctggaggggctcagggttaactcaggagcccgggtcggtagggcagcttgccctggcctgtgctgagggtgccgttgagtggctgtatcctgctggcgctctgaggctcaccctgggcggaccagacccaagggcacgccccggaattgcatgcttgcgccctgtgcgaccatttgcaggcgcccaagttttcgcggagagggcaggcggcgccttagagctcctcctggcggagggacccggccctgctggcggccggtgcgtacgctgggggccccgggagaggcgtgcactgttcctacaggctactccccaccaagatatcagcagaagagtggctgcttttcggtttgagcttagagaagacgggcgacccgaactgcccccccaggcgcacggcttgggagtcgatggggcctgcaggccgtgctccgatgccgagcttctccttgctgcttgcacttctgatttcgtaatccatggtattatccatggagtgacgcacgatgtggagctgcaggaaagtgttatcaccgtcgttgcagccagggtgctaaggcagactccacccctgtttcaggccggtcggtctggtgatcaaggattaacgtccatccgtacaccgttaagatgtggcgttcatcccggacccggtacctttttgttcatgggatggtctcgttttggagaagcccggctggggtgcgcacctcggttccaagaattccggagggcttatgaggccgccagggcggcacacctgcatccctgcgaggtcgctctgcat

SEQ ID NO: 16630 - DNA, 879 bp, synthetic construct
  misc_feature 1..879: note = source = /note="Description of Artificial Sequence: Synthetic coding sequence"
  source 1..879: mol_type = other DNA
atggggttcccggcagcggccctcctttgtgcgctgtgttgtggactcctggcgccagccgcgcgcgcaggctactcggaagagcgctgttcgtggcgcggatccgggctcactcaagaaccgggatccgtgggacaactggctctcgcttgcgccgaaggagccgtggaatggctgtacccggcaggcgctctgcgcctcaccctgggaggacctgacccgagggcccgccctggcatcgcctgcctgcgaccggtgcggccgttcgccggagcccaggtctttgcagagcgggctggcggagcactggagctgctgctggccgagggtccagggcctgcaggtggccggtgcgtgcggtggggtcctagagagcggcgcgcactcttccttcaggccactccgcaccaggacatttcgaggcgcgtcgcggcctttcggttcgaactgcgggaagatggacgcccggagctgccaccccaagcccacggcctgggcgtggatggagcttgccgcccctgtagcgacgccgagttgctgctcgctgcctgtaccagcgacttcgtcatccacgggatcattcacggtgtcacccatgatgtggagctccaggagtcggtgattaccgtcgtggccgcccgcgtgctccggcagactccgccactgttccaggctgggcgctccggagatcaaggactgacctctatcagaactccactgcgctgtggagtgcatccgggaccgggaaccttcttgttcatggggtggtcgcgttttggagaggctagactcggatgcgcgccgagatttcaggaatttcgcagggcatacgaggctgctagggcagcacatctccacccgtgcgaagtggcactgcac

SEQ ID NO: 16631 - DNA, 879 bp, synthetic construct; identical to SEQ ID NO: 16612
  misc_feature 1..879: note = source = /note="Description of Artificial Sequence: Synthetic coding sequence"
  source 1..879: mol_type = other DNA

SEQ ID NO: 16632 - DNA, 879 bp, synthetic construct
  misc_feature 1..879: note = source = /note="Description of Artificial Sequence: Synthetic coding sequence"
  source 1..879: mol_type = other DNA
atgggattccctgccgcagccctcctgtgcgcgctgtgttgtggcctcctcgcgccagcggcaagggccggatattcagaggagcgctgctcttggagagggtcaggtctgacccaggagcctgggtcagtgggccaattggcactggcgtgcgctgaaggtgctgtcgagtggctttaccccgctggtgccttgcggcttaccttaggaggccctgaccctagggccagaccggggatcgcctgccttaggccggtacgcccgtttgctggggcccaggtctttgctgaaagagccgggggggcacttgagctgttgctggcggagggtcccggaccagccggcggacgatgtgtgcgctggggcccccgggagcgccgagctttgttcctgcaggcaaccccccatcaagacatatctaggcgcgtggccgcattccggttcgagttgagagaagacggaagacccgagctgccaccccaggcgcacggcttgggcgtggacggcgcatgcaggccttgtagtgatgccgaacttctgctcgcggcctgcacctccgattttgttatccacggcatcatccacggggtcacccacgacgttgaactccaggaatctgtcatcaccgtggtcgctgcaagagtcctgagacagacacctcctctgtttcaggctggacgcagtggagaccaagggctgacctctatcagaactcccctcaggtgtggagtgcatcctgggcctggaacatttttgttcatgggctggtcacgatttggcgaagccagactgggttgcgccccaagattccaagagttcaggagggcttacgaggctgcccgggcagctcaccttcatccctgcgaagtggcacttcat

SEQ ID NO: 16633 - DNA, 879 bp, synthetic construct
  misc_feature 1..879: note = source = /note="Description of Artificial Sequence: Synthetic coding sequence"
  source 1..879: mol_type = other DNA
atgggctttccagccgccgctctgctctgtgccttgtgctgtggcttgctggcccctgcagcacgtgctgggtactccgaggaacgttgcagctggcgagggagcggactaacccaggagcccggatctgttgggcagttagccctagcttgcgccgaaggagctgtagagtggctgtatcccgcgggtgcattgcgactgaccttgggcggaccagatccaagagctcgccccggcatcgcctgtctgagaccagtccgccctttcgccggagcacaggtattcgctgaacgggcaggtggggctttggaattactcctcgctgaagggcctggccctgcaggaggtcggtgcgttcgctggggacctcgtgaaagaagagccctatttctgcaggccaccccccatcaggatattagcaggcgcgtggccgcctttcgctttgagctgagagaagatggccgcccggagctgccccctcaggcgcacggtcttggcgtcgacggggcctgccgcccgtgttctgatgcagaactgctcctcgccgcctgtacttctgacttcgtgatccatggcataatccacggggtgacccatgatgttgagttgcaagaaagcgtcattaccgtcgttgccgctcgcgtcctccggcagactcctccactttttcaagcgggaaggagcggggatcagggactgacaagcatccggactccactgagatgcggggtgcaccccggccccggtacattcctatttatgggatggagcaggtttggagaggcacgccttgggtgtgctccaagattccaagagttccgcagggcctatgaagccgcccgtgctgcccacctgcacccctgcgaagtggccctgcat

SEQ ID NO: 16634 - DNA, 879 bp, synthetic construct
  misc_feature 1..879: note = source = /note="Description of Artificial Sequence: Synthetic coding sequence"
  source 1..879: mol_type = other DNA
atgggctttcctgcagccgcactcctgtgcgccctgtgctgtggcctgctggcaccggccgctagagcaggatattccgaagaaaggtgcagctggagaggatccggactgacccaggaaccaggctccgtgggacagctggccctggcttgcgccgagggagcggtggaatggttgtatcctgctggagcattgcgccttactttgggtggccctgacccaagggctcggccaggcatcgcctgtctaaggccagtaaggcccttcgctggagctcaggtgtttgccgagagggccggcggagccctggaacttctgctcgccgaaggtcccggaccggccggcggccgctgcgttaggtggggacctcgagagaggcgggcactgttcctgcaagccactccacaccaggacattagcagaagagtggccgcgttccggttcgaacttagggaggatggaaggccggaacttccccctcaggcacatggcttgggcgtagacggagcctgccgcccttgttcagatgctgaactcctgctcgcggcctgcaccagcgacttcgtcatccacggcatcattcatggggtcacccacgacgtggagctccaggaatccgtcatcactgtggttgctgcaagggtgctcagacagactccccctctgttccaagcgggaaggtctggagaccagggcctcactagcatccggacccctctgaggtgcggcgtccaccctggccccggcaccttcttgtttatgggttggagcagatttggagaggctagattgggctgtgctcctaggttccaggagttccgcagagcttacgaggcggctagggctgcacaccttcatccatgcgaggtagccctgcat

SEQ ID NO: 16635 - DNA, 879 bp, synthetic construct
  misc_feature 1..879: note = source = /note="Description of Artificial Sequence: Synthetic coding sequence"
  source 1..879: mol_type = other DNA
atgggatttcctgccgcggcactgctgtgtgccctgtgttgcggcctgttagcacctgcggcgcgagcaggatacagtgaggaacgctgcagctggagaggaagtggacttacacaagagccgggatcagttggtcaattagcgcttgcttgcgccgaaggtgctgtagaatggttgtatccggcaggagctcttagacttaccttgggggggcctgacccaagagcacgcccggggatcgcctgtttaagacctgtacggcctttcgcaggagcacaggtgtttgccgaacgagcaggcggagctttggaactgctcttagcggagggaccaggcccggcgggcgggcgttgcgttagatgggggcctcgcgaacgcagagctttatttctccaagccactccgcatcaagatatttcacgacgcgttgcggcatttcgatttgaactgcgcgaagatggcagacctgagctgccgccgcaggcgcatggattaggagtcgacggtgcgtgtcgcccttgtagcgacgcagagttgttattggccgcttgcacatctgattttgttatacacggcatcatccatggcgtgacgcatgacgtcgaattacaggaatctgtgatcacagttgttgccgcacgcgtgctccgtcaaaccccgccattattccaagcaggaagatccggcgaccagggtctaacatcaatccggaccccgcttcgttgcggagtccatccgggcccgggaacatttctgtttatgggatggtctcgtttcggagaagcacgactcgggtgcgctccgaggtttcaggagtttcgaagagcctatgaagcagctagagcagcccatttgcatccttgtgaggtggctttgcat

SEQ ID NO: 16636 - DNA, 879 bp, synthetic construct
  misc_feature 1..879: note = source = /note="Description of Artificial Sequence: Synthetic coding sequence"
  source 1..879: mol_type = other DNA
atgggattccccgctgccgctctgctgtgtgcactctgctgtggcctcctggctcctgccgcaagagctggttacagcgaggagagatgttcttggcgggggtctggtctcactcaggagcctggctcagttggacagctggccctggcctgtgcagaaggtgccgtggaatggctttacccagccggcgcccttcgcctgaccttgggaggacccgaccctagagcccggcctggtatcgcgtgcttgcgccccgtccgcccatttgccggtgctcaggtgtttgcggaacgggccggaggggccctcgagcttctgctcgcggagggccccgggccagccggaggacggtgcgtgcgatggggtcctcgggaacggcgggctcttttcctgcaggcaacgccccaccaggacatttcacggagagtcgcggcgtttaggttcgagctccgagaagacggtcggcctgaactcccaccacaggcccacgggttgggggtcgacggagcctgtcgaccatgcagcgacgccgaactgctgctggccgcttgtacatcagacttcgttattcacggcatcatccacggcgttacgcacgatgtcgaattgcaggagagcgtgattactgttgtggccgccagagtacttcggcagactccaccactgttccaggcaggcagatcaggtgaccaaggtctgacttccatcaggacccctctgcggtgtggggtccatcccggccccggaacattcctttttatggggtggagtcggtttggagaggccagattgggttgtgctccccggttccaggagtttcgaagagcctatgaggccgcaagagctgcacatctgcatccctgcgaggtggccctccac

SEQ ID NO: 16637 - DNA, 879 bp, synthetic construct
  misc_feature 1..879: note = source = /note="Description of Artificial Sequence: Synthetic coding sequence"
  source 1..879: mol_type = other DNA
atgggctttccagccgctgcgcttctctgtgccttatgctgcgggctacttgctccggctgctcgcgcgggttatagtgaggaacgatgtagctggagagggtccggcctgacacaggaaccaggctcggtgggtcaattagctctggcttgcgccgagggtgccgtggagtggctttacccagccggggctctgcgcctcacgctaggggggcctgaccctcgcgcgcgaccgggcattgcctgtctgaggcccgtcagacctttcgccggtgcacaggtgtttgcggagagagccggaggcgctttagaactgcttctggccgaaggacccggacccgcaggcggtcgatgcgtgaggtggggccctagggagcgacgggccctgttcctgcaggccacaccgcatcaggacataagccggcgggtggcggcttttagattcgagctacgggaggacgggcggcctgagttgccacctcaggcgcatggcctgggagtagacggggcatgccggccttgttccgatgccgagctgctgctagccgcttgcacaagcgacttcgttatccacggcattatccatggggtgacccacgatgtcgagttgcaggagtcagtcattacagttgtggcggcccgggtccttagacagacaccccctctgttccaagctggacggtctggcgatcaggggttaacaagcattagaacaccactgagatgtggcgtccacccagggcctggcacctttttgttcatgggctggagcagattcggggaggccagattaggatgtgctcctaggtttcaggagtttcgaagagcttacgaagctgccagagctgcccacttgcacccctgcgaggtggctttacac

SEQ ID NO: 16638 - DNA, 879 bp, synthetic construct
  misc_feature 1..879: note = source = /note="Description of Artificial Sequence: Synthetic coding sequence"
  source 1..879: mol_type = other DNA
atggggtttcccgctgctgctttgctctgcgcgctctgttgcggtctgctcgcacctgcggctcgagccggttactccgaggagcgatgtagttggcgtggttctggactgacacaggagcctggctctgtgggtcagctggccctcgcatgcgcagaaggagcggtggagtggctgtacccggccggcgccctccgcctgaccttaggtggacctgacccccgagcgaggcccggtatcgcatgtctgagaccggtgagaccatttgcaggtgcccaggtcttcgccgagagagctgggggggccttggagctgctgctggctgagggaccaggcccagctgggggcaggtgtgtgaggtggggtcccagggagcgcagggctctgtttctgcaggcgaccccgcaccaggatatcagtcgccgggtagccgcatttcgcttcgagcttagagaagatggcaggccagagctgcctcctcaagcacatggcttgggcgtggacggagcctgtaggccctgctctgatgctgagttgctgcttgctgcgtgtaccagcgacttcgtgatccacggcattatccatggagttacccatgacgtggaactccaggagagcgttattaccgtggtcgccgctcgggtccttaggcagaccccccccctgttccaggcaggacgatccggagatcaggggctaacctctatcaggacacctcttcgttgtggcgttcacccaggacccgggacttttctctttatggggtggagccgtttcggtgaagcacggctggggtgtgccccgagatttcaagaattcaggcgagcgtacgaagcggccagggcagcccatctccatccctgcgaagtggcattgcat

SEQ ID NO: 16639 - DNA, 879 bp, synthetic construct
  misc_feature 1..879: note = source = /note="Description of Artificial Sequence: Synthetic coding sequence"
  source 1..879: mol_type = other DNA
atgggattcccagctgctgcgctcctttgtgcgttgtgctgcgggctgctggccccagcggctcgcgcaggctatagcgaagaaaggtgtagttggcgaggcagcgggctgactcaggaaccaggaagcgtcggccaactggcccttgcctgcgccgagggagctgtggagtggttgtacccagccggcgctctgagactgacactggggggcccggacccgcgagcccggccaggtattgcctgtctgcgacctgtgcgcccattcgcgggcgcccaggtttttgcggagcgagcgggaggagcattggagctgttgttggccgagggccccggtcctgctggcggccggtgtgtccgatggggacctcgggagcggagggcactgttcctccaggctaccccgcatcaggatatcagtcgacgggtagccgcgtttcgattcgaactgagagaagatggtcgccccgagctcccaccccaggcgcatggtcttggggtggacggagcgtgcaggccgtgctcagatgcagaattgctgctcgccgcttgtacttcagattttgtcattcatggcatcatccacggggtcactcatgacgttgagctgcaggagtccgtgattaccgtggtagcggctagggtcctcagacagacgcctcctctcttccaagccggacggagcggggaccaggggcttaccagcatccggacccctctccgctgcggggttcaccctggaccgggcaccttcctgtttatgggttggtcccgcttcggtgaggccagattggggtgtgcgccgcggtttcaggagtttaggagagcatatgaagctgccagggcagcccacctccacccctgtgaagtcgccctccat

SEQ ID NO: 16640 - DNA, 879 bp, synthetic construct
  misc_feature 1..879: note = source = /note="Description of Artificial Sequence: Synthetic coding sequence"
  source 1..879: mol_type = other DNA
atgggcttccccgcggccgccttgttgtgcgcgttgtgttgcggcctgctggctccagccgcgcgcgccggatactcagaagaaagatgttcgtggagaggatcaggactgacccaggaacctggctcggtgggacagcttgcgctggcgtgcgctgaaggagcagtcgagtggctgtacccggctggagcactgaggctcactctgggaggaccggatccgcgcgcgcgacctgggatcgcatgccttcggccggttcgcccattcgcgggcgcccaggtctttgcggagcgggcgggcggagcgctcgaactgctgctggctgagggcccgggtcctgcgggtgggcggtgcgtgcgttggggaccgagagaacggcgggccctgttcctgcaggctactccgcatcaagacatttcgaggcgggtcgctgctttccgcttcgagctgcgagaagatggaaggcctgaactcccccctcaagcccatggactcggcgtcgacggggcctgtcggccgtgcagcgacgcagaattgttgctggctgcatgcacctccgatttcgtgatccatggtattatccatggagtcacccatgacgtggagttgcaggaatcagtgatcaccgtggtggcggcacgcgtcctgaggcaaacgcccccgctctttcaggcaggacgctcgggggaccaaggactgacctcaatccgcactccgcttaggtgcggcgtgcatcctggaccgggcactttcctgttcatgggctggtcaagatttggagaggcccgcctgggttgtgctcccagattccaagaatttcgcagagcctacgaggcggcccgagccgcccacttgcacccctgcgaagtcgcgctccat

SEQ ID NO: 16641 - DNA, 879 bp, synthetic construct
  misc_feature 1..879: note = source = /note="Description of Artificial Sequence: Synthetic coding sequence"
  source 1..879: mol_type = other DNA
atgggcttccccgcagctgccctactttgcgcattgtgctgtggactgttggcccccgcagcacgagccgggtattctgaagagcgttgctcttggagaggctccgggctgactcaggaaccaggcagcgtgggccagctggccctcgcctgtgccgagggagccgtggaatggctctaccctgcaggtgcgttgagactcacgttaggtggccccgaccctcgagcacgcccaggcatcgcctgtctccgcccagtccggccttttgccggcgcccaggtctttgccgagcgggctggcggggcccttgagctcctcctggctgaaggtccgggacccgcgggtggcagatgcgttcgatggggcccccgggaaagaagggccttgttcttacaggccacccctcatcaggatatcagtagacgcgtggctgcctttcggttcgaactacgtgaggacggtagacccgaactgcccccgcaggcacatggccttggcgttgacggtgcttgtagaccatgctctgatgccgagcttctcctggcggcgtgcaccagcgattttgtgatccacgggattatccacggagtgacccacgacgtggaactgcaggaaagtgtcatcacggtagtggccgccagagtactgagacagactcctccactgttccaggctggacgtagtggcgaccagggactgacaagcatccgcacaccccttcggtgcggagtgcatcccggacccggtacgttcttattcatgggttggtcccgctttggtgaagctaggcttgggtgcgcccccagattccaagagtttcgacgggcctacgaagcggcccgcgccgctcacctccacccttgcgaggtcgccttgcac

SEQ ID NO: 16642 - DNA, 879 bp, synthetic construct
  misc_feature 1..879: note = source = /note="Description of Artificial Sequence: Synthetic coding sequence"
  source 1..879: mol_type = other DNA
atgggatttccggccgctgcacttttgtgcgcactctgctgtggcctcctcgccccggccgccagggccggatacagcgaagaacggtgctcgtggcggggatccggattgactcaagagccgggctcggtgggtcagctcgccctggcgtgcgccgagggtgcagtcgagtggctgtacccagcgggtgcccttcggctcactctgggcgggcccgatccaagagcgaggccgggaatcgcctgtcttaggccggtgcgcccgttcgccggagcgcaagtgttcgccgagagggccgggggcgcgctcgaactgctgctcgccgaagggcccggtccggcgggaggcaggtgcgtgcgctggggaccccgggaacgccgcgccctcttcctgcaggcaaccccgcaccaagacatctcacggcgggtcgctgcctttcggttcgaacttagagaggacgggcggccggaattgcctccgcaagcccacggccttggcgtggacggagcttgccggccttgctcagacgctgagctgctcctcgcagcgtgcacttccgatttcgtcattcacggaattatccatggagtgacgcatgatgtcgaactccaggaatcagtgattactgtggttgcggctcgtgtcctgcgccagactcctcctctgtttcaagcgggacggtcgggcgaccagggtctgacttccatcagaactccgctccgctgcggggtgcatcccgggccaggaacttttctcttcatgggatggtcgcgcttcggggaggctagactgggctgcgcaccgcggttccaagagtttcggcgcgcctacgaggccgcacgggccgcacacctgcatccgtgcgaggtcgccctccac

SEQ ID NO: 16643 - DNA, 879 bp, synthetic construct
  misc_feature 1..879: note = source = /note="Description of Artificial Sequence: Synthetic coding sequence"
  source 1..879: mol_type = other DNA
atggggtttcccgcagccgcgctgctctgcgctttgtgctgtggcctgttagcacctgccgccagggccggctattcggaggagcgctgtagttggcgaggaagtggtttaacccaagagcccggaagtgtgggtcaactcgccctggcttgtgccgagggagcagtagaatggctgtaccctgctggggccctcaggctcacgctaggggggcctgatccccgagcccgaccaggtatcgcatgcttgcggccagtgcggccgtttgctggggcgcaggtgttcgccgagcgagccggaggggctctggagttgctactcgccgaaggccctgggcccgccggtggccggtgtgtacggtggggccctagggagcgcagggcactctttcttcaggccactccccaccaggatatctcccggcgtgtggctgcattcaggttcgagctgagggaggacggtcgccctgaactacctccacaggctcatggactgggggtggacggtgcgtgcaggccatgtagtgatgctgaacttctgctcgccgcctgcaccagcgattttgtcatccatgggatcattcacggtgtgacccacgacgtggagctgcaagagagtgtgattacagttgtggcagcacgggttctaagacagacccccccactgtttcaagccggacgctccggcgaccagggcctgaccagcatccggacgcctctgcggtgcggcgtgcatcccggcccgggaacctttctttttatgggatggagtcggtttggcgaggcgcgccttggctgcgcccccaggttccaggaatttcggcgtgcctacgaggccgccagggccgcccatctgcatccgtgcgaggtggccttacac

SEQ ID NO: 16644 - DNA, 879 bp, synthetic construct
  misc_feature 1..879: note = source = /note="Description of Artificial Sequence: Synthetic coding sequence"
  source 1..879: mol_type = other DNA
atgggattcccagctgccgcgctcctgtgtgcactgtgttgcggtttgctggcgccggcagcccgggcgggatactcagaagaacgctgctcctggcgggggtcgggtctgacccaggaacctggatccgtgggacagttggcgcttgcgtgcgctgagggagcggtggagtggctttatccggccggagcccttaggctcacgctgggaggcccagatccccgcgctcgcccaggcatagcatgcctccggcctgtccgaccttttgcgggagcccaagtctttgctgagcgcgccggaggagcgctcgagcttctgctggcggaagggccgggaccggctggagggaggtgcgtgcgctggggcccacgcgaaagaagagcgctgttcctccaggcaactccgcaccaggatatctccaggcgcgtggccgctttcagattcgaactcagagaagatggtagaccagaacttccgcctcaggctcacggactgggtgtggacggcgcgtgccgcccgtgttcagacgcagaactcctgctggccgcatgcacttccgatttcgtgatccatggtatcatccacggggtcactcacgatgtggagttgcaggaatcagtcattactgtggtggcggcacgcgttctgagacagaccccgcccctgtttcaagcggggagatccggagatcagggcttgacctcgatcagaactccattgcgctgtggtgtgcatcctggcccgggaaccttccttttcatgggatggtcgcgcttcggcgaagctcggctgggatgcgccccacgcttccaggagttccggcgggcctacgaggctgcacgcgctgcccacctgcacccgtgcgaagtggcgctccat

SEQ ID NO: 16645 - DNA, 879 bp, synthetic construct
  misc_feature 1..879: note = source = /note="Description of Artificial Sequence: Synthetic coding sequence"
  source 1..879: mol_type = other DNA
atgggttttccagcggctgcattgttgtgcgctctttgttgcggtctgctcgcacctgcggcccgtgccgggtactcggaagaacgatgctcttggcgtggatcgggcctgacgcaagaaccgggaagcgtgggacagctggccctggcgtgtgccgagggagcagtggaatggctctaccctgcgggtgcccttcgcttgactctgggaggacccgacccacgggcacggcccggcattgcttgtcttaggcctgtgcgtcctttcgctggtgcacaggtgtttgcagaacgagcaggaggtgcgcttgaactgctgctggcggaaggcccaggccctgcaggtggtcggtgtgtgcgatggggtcctcgggagcggagggccctttttctgcaagcaactccacatcaggacatttcccgccgggtggctgcatttcgctttgaactccgggaggatggaaggcctgagcttccgccacaggctcatgggcttggtgtcgatggagcttgcagaccttgttccgacgcggaactccttctggccgcatgcactagcgacttcgtcattcatggtataatccacggagtgactcatgatgtcgagcttcaggaaagcgttatcaccgtagtggcagcaagggtcctgaggcagaccccaccgctcttccaggccgggcgatcgggagatcagggcctgacctcgatccggactccactccgctgcggagtccatcccggtcccgggacgttcctgtttatgggatggagcagatttggcgaggcaagattgggatgcgcaccaagatttcaggaatttcggcgggcatatgaagccgcaagagcagcccacctgcatccatgtgaggtggcactgcat

SEQ ID NO: 16646 - DNA, 879 bp, synthetic construct
  misc_feature 1..879: note = source = /note="Description of Artificial Sequence: Synthetic coding sequence"
  source 1..879: mol_type = other DNA
atgggattccctgctgccgcactgttgtgtgcactttgttgtgggcttctggcccctgcagcaagagcagggtactccgaagaacgttgctcgtggcggggatccggacttacccaggagccaggaagcgtcggacaactggcactggcatgcgcagaaggtgcagtggaatggctttaccctgcaggagcacttcgcctcacccttggcgggcccgatcctcgcgcaagacctggcattgcctgtctccgacccgtccggccttttgccggagcccaggttttcgccgaacgcgctggaggagccctcgagctgctgctcgcggagggaccagggcctgctggagggaggtgcgtgcgctggggacctcgggaaagaagggcactgtttctgcaagcaactcctcaccaagatatttcccggcgtgtggcagcgtttcgatttgaacttagggaggacggcagaccagagcttccaccacaggcgcatggcctgggtgtggatggcgcctgtcggccatgtagcgatgccgagcttctgcttgcagcctgtacttccgatttcgttatacacgggatcatccatggtgtgacccacgacgtggaacttcaggaatcggtgattaccgtggtcgcggcacgagtgcttcggcaaactcctccactgtttcaagccggcagatcgggggatcaaggtctgacttccattcggacccctctgcgctgtggtgtgcatccagggcctggaacttttctgtttatgggatggtcccgctttggggaagcaaggctgggatgtgccccgcgctttcaggaatttaggagggcctacgaagcagcacgtgcggctcatctccatccttgtgaggtggccctgcat

SEQ ID NO: 16647 - DNA, 879 bp, synthetic construct
  misc_feature 1..879: note = source = /note="Description of Artificial Sequence: Synthetic coding sequence"
  source 1..879: mol_type = other DNA
atgggatttccggctgctgccctgctgtgcgcactgtgctgtggcctgctcgccccggcagcacgcgccgggtactccgaagaaagatgctcgtggcgaggatccggcttgactcaggagccaggctccgtgggacaactggctctcgcctgcgccgaaggagcagtggaatggctgtacccagccggagccctgcgcctgactctcggaggaccggatccacgcgcgcggccaggaatcgcatgccttcgcccggtgcggccgttcgctggggcgcaagtctttgccgagcgcgcgggcggggccctggagctgttgctggcagaaggaccggggcccgccggtggacggtgcgtgcgctggggaccacgagaacgcagagctctgttcctgcaggcgactccgcaccaggacatctcgagacgggtagcggccttcagattcgagctccgcgaggacggacggcccgagctgccccctcaggcgcacggcctgggcgtggatggtgcttgccgcccgtgctcagacgcagagcttctgctggcagcttgcacgtcagacttcgtcatccacggaattatccatggtgtgacccatgacgtcgaactccaggaaagcgtgatcactgttgtggctgcgcgcgtgctgagacagacccctccactcttccaggccggccgctcgggagatcagggactgacctcgatccgcactccgctgagatgcggagtccacccaggacctggcaccttcctctttatgggatggtcgcggttcggagaagccagactgggatgtgccccaagattccaggaattccgccgcgcctacgaggccgcccgcgcagcgcatctccacccttgtgaggtcgcgctgcac

SEQ ID NO: 16648 - DNA, 879 bp, synthetic construct
  misc_feature 1..879: note = source = /note="Description of Artificial Sequence: Synthetic coding sequence"
  source 1..879: mol_type = other DNA
atgggctttcctgcagcagctttactctgtgctttgtgctgtgggctgctcgccccggctgcccgggctgggtacagtgaagaaagatgttcctggcgaggcagtggcctcacccaggaacctgggtcggtggggcagctggccctggcctgcgcagagggggcggtggagtggttatatccagcaggtgccctgcgactcaccttgggtgggcctgatccgagggcacggccgggaattgcctgcctccgaccagtgaggcccttcgctggcgctcaggttttcgctgagcgcgccgggggagctctcgagctcctgctggctgaagggcccggcccggcaggcgggcgttgtgtccgttggggacctagggagcggcgggccctgttcttgcaggcaaccccacaccaggatataagcagacgggtcgccgcattccgtttcgagcttcgtgaggatggcaggccagaactcccccctcaggcacatggcttaggagtggacggtgcttgccggccatgcagtgatgcagagttactcctggccgcttgcactagtgacttcgtgatccacggaatcatccacggggtgacccatgacgtggaactgcaggagtccgtcatcactgtggtggccgcccgtgtgcttaggcagacacctcccctcttccaggcaggccggtctggtgaccagggcttgactagcataagaaccccactccgctgcggggtgcatcctgggcctggaacatttttatttatggggtggtcacgcttcggagaggctcggcttggctgtgccccacggttccaggaatttaggagggcctacgaggcagctcgggcggcacatctccatccctgcgaagtagctcttcat

SEQ ID NO: 16649 - DNA, 879 bp, synthetic construct
  misc_feature 1..879: note = source = /note="Description of Artificial Sequence: Synthetic coding sequence"
  source 1..879: mol_type = other DNA
atgggcttcccagctgccgctctgctgtgcgcgctgtgctgtgggttacttgctccagctgcccgggctgggtattccgaagaaaggtgttcctggcggggctcaggtttgactcaggaaccaggttccgtgggccagctggctctggcatgcgcagagggggccgtcgagtggctttatcctgctggggccctgcgcctgacactcggtgggcctgaccctcgggccaggcctggtattgcgtgcctgcggccggtgcgaccatttgctggggctcaggtcttcgccgaaagggctggcggcgcactggagctgctcttagccgaggggccagggccggcgggtggtcgctgtgtgaggtggggtccaagagaacgccgtgcccttttcctgcaggcgaccccacaccaggacatcagcaggagggtagccgccttcagatttgaactgagagaggatggacggcccgagctgccccctcaggcacacgggttaggggtggacggagcctgtcgtccatgctcggatgcagagctgttgctggctgcgtgcaccagtgacttcgtgatccacggtatcattcacggagtgacgcatgacgtggaacttcaggaatcagtaattacggtggtagcggccagagtcctgagacaaacaccacctttgtttcaagccggtcgttctggagaccaggggctgacgtctattcggaccccactgcgatgcggtgtccaccccggcccgggaacttttctctttatgggatggtcccggttcggcgaagcgaggctcggatgcgctcccaggttccaagagttcagaagggcctacgaagccgcccgggccgcacatttacatccctgtgaggtggccctgcac

SEQ ID NO: 16650 - DNA, 879 bp, synthetic construct
  misc_feature 1..879: note = source = /note="Description of Artificial Sequence: Synthetic coding sequence"
  source 1..879: mol_type = other DNA
atgggctttcctgcagctgcgctcctttgtgccctgtgttgcgggctacttgcacctgccgcccgagcaggctactccgaggagcgatgttcatggcgcggctctggcctgacacaggaacctggctccgtgggccagctggccctggcctgcgcagaaggggcagtggagtggttgtaccccgctggtgcactcaggctcactctgggcggtccagatccgagggccagacctggaatagcttgtttgcggccagtgcgacctttcgccggggcccaagtgttcgctgaaagggctgggggagcactggagttactgcttgccgaaggtccagggcctgccgggggcagatgcgttagatggggaccacgagaacgccgcgccctgtttcttcaggcaaccccccatcaggatattagccgaagagtcgcggcgtttagattcgaactacgggaagatggacgccccgagttacctccccaggcgcacggcctgggggtagacggtgcctgccggccctgctctgacgcagagctgttattggcggcatgtacctcagacttcgttattcacggtatcatccatggtgtaacccacgacgttgagctccaagaatccgtaatcaccgtggtggcggcccgggtgctgcgccaaacacccccactgttccaagcaggcagatccggtgatcagggtctcacaagtattcggacccctctcagatgcggagtgcaccccggtcccggaacttttctctttatggggtggtcaaggttcggggaggcacggctaggctgcgctccaaggtttcaggagttcaggcgggcctatgaggccgcgcgcgccgcacatctccatccctgtgaggtggccctccac

SEQ ID NO: 16651 - DNA, 879 bp, synthetic construct
  misc_feature 1..879: note = source = /note="Description of Artificial Sequence: Synthetic coding sequence"
  source 1..879: mol_type = other DNA
atgggattcccagctgcagcacttctttgcgctctttgctgcgggttgttagcacctgcagcccgtgcaggatattccgaggagcgatgttcttggcgaggttctgggctgacacaagagccaggatccgtaggacagttagctctcgcatgcgcggagggtgccgtggagtggctttacccggctggcgcattgcgtttgactcttggaggaccggatccaagagcacgcccaggtattgcttgccttcgaccagtcagaccatttgcaggcgctcaagttttcgcagagcgagcgggaggagctctcgagctcctattggcagaaggaccaggaccagcgggaggccgttgcgttagatggggacctcgcgagagacgcgctttattcctccaagctactccacatcaagatatctcacgaagagttgccgcgttccgattcgaacttcgtgaagatggtcgaccagagttgccacctcaagctcatggcctcggagttgatggagcgtgtcgtccttgttcagacgctgagctcttgcttgcagcatgtacgtcagatttcgtcattcacggaattattcacggggttactcatgatgtcgaactgcaggaatctgttattacagtggttgcagctcgggttctacgtcagacgccaccacttttccaggcgggtcgaagtggggaccaaggattgacgagtattagaactccattacgatgtggagtgcacccgggaccgggaactttccttttcatgggttggagtcggttcggggaggcaagacttggatgtgcaccaagattccaagaattccgtagagcctacgaggcagcacgtgctgcacatctgcatccatgcgaggtagcgttgcat

SEQ ID NO: 16652 - DNA, 879 bp, synthetic construct
  misc_feature 1..879: note = source = /note="Description of Artificial Sequence: Synthetic coding sequence"
  source 1..879: mol_type = other DNA
atgggcttcccggccgcggccctgctgtgcgctctctgctgcggactgctggccccggcggccagagcaggctactcggaggaaaggtgcagctggcgcggctcgggtctgacccaggagcctggatccgtcggccagctcgcactcgcgtgtgccgaaggcgccgtcgagtggctgtaccctgctggagcccttcgactcacccttgggggcccagatcctcgcgcccggcctggaattgcctgtctcagaccggtaagaccctttgccggagctcaggtttttgctgaacgcgcaggaggggccctggagcttttgctggcagaaggcccaggcccagcaggaggaagatgcgtgcggtgggggccgcgagaaaggcgggccctcttcctgcaagcgaccccgcaccaggacatctcccgccgggtcgccgctttcagattcgaactccgcgaggacggacggccggagctgccacctcaggcccatggactcggagtggatggcgcctgtagaccctgttccgacgctgagttgctcctggcagcctgcaccagcgacttcgtcatccatggaatcatccatggagtgacccacgacgtcgaacttcaagaatccgtgatcactgtggtggccgcacgggtgttgaggcagactccacctctgtttcaggctggtcgctcgggagatcagggactgacctcgatccggactcccctccgctgcggcgtgcatccgggccccggtaccttcctcttcatggggtggtcaaggttcggagaagctcgcctcggatgcgcccctcgctttcaagagttccgacgcgcctacgaagctgctcgcgctgcccacctgcatccatgcgaagtcgccctccac

SEQ ID NO: 16653 - DNA, 2250 bp, synthetic construct
  misc_feature 1..2250: note = source = /note="Description of Artificial Sequence: Synthetic coding sequence"
  source 1..2250: mol_type = other DNA
atgctccgagcaaaaaatcagctattcttgctctccccccattatctgagacaggtgaaagaatcctcgggctctcgactcatacagcagagactgttacaccagcaacaaccactgcaccccgaatgggctgccctggccaaaaagcagctcaaaggcaagaacccagaggacctcatctggcatactccggagggaatcagtattaaaccattgtatagcaaacgcgatacaatggacttgcccgaagagctgcccggggtgaagccattcactaggggaccttatcctacaatgtatacgtttagaccgtggacaatccgacagtatgcgggtttctcaacggtggaagaaagtaataagttttacaaggacaatatcaaagcgggtcagcaaggcctttctgtggcattcgatctggcaacacatcgaggctacgatagcgataacccccgggtgcgcggtgatgtgggtatggccggcgtggctatagatactgtggaggacaccaagatcctcttcgatggaattcccctcgaaaaaatgtctgtgtccatgaccatgaacggagccgtgattccagtgcttgccaattttatagttactggtgaggaacaaggggttcccaaggagaagctgactggcacaatccagaatgacattctgaaagagttcatggttagaaacacttacatttttccgccggaacctagcatgaagatcattgcagacatctttgaatatactgcaaagcatatgccaaaatttaacagcattagcatatctggctaccacatgcaagaggctggagcagacgccattctggaactggcgtatacacttgctgatggcttggaatacagccgaacgggcttgcaggccggcctcacaattgatgagttcgcccctcgcctatctttcttctggggaatagggatgaatttttatatggagattgccaaaatgagagccggaagacggctttgggctcacctgattgaaaagatgttccagcctaaaaatagcaagagtctacttttgcgagcacattgtcagacttccgggtggtcactgaccgagcaggatccctataataacatcgtgagaaccgccatcgaagcgatggcggcagtatttggtgggacccagtcactgcacaccaactcctttgatgaagcgttgggcctgccgaccgtgaagagcgctcgaatagcacgaaatacacaaatcattatccaggaagagtctggcattcccaaggtggccgatccatggggcgggtcgtatatgatggagtgtcttacaaacgacgtgtacgacgccgctttgaagctgatcaacgaaattgaagaaatgggcggcatggccaaagcagtcgcggaggggatccccaagttacgaatcgaagaatgcgccgctaggcgacaggcaaggatcgatagcggcagtgaagtgattgtgggcgttaataaatatcagttggaaaaggaggatgcagttgaagtcctggccatagacaatacttcagtgcgaaatcgccaaatcgagaagctcaaaaaaataaagagcagtagagaccaggcgcttgccgagcgatgtttggctgctctgacggaatgcgcggcctcgggagacgggaacattttggccctcgctgttgacgccagccgagcacgatgcacagtgggggaaatcaccgacgctctgaagaaagttttcggagagcacaaggctaatgatcgaatggtgagcggggcctatcgacaggaatttggggaaagcaaggaaattaccagtgcaataaaacgtgtgcataaatttatggagagagaggggaggcgacccaggcttctggtggccaagatgggacaggatggccacgacagaggtgcgaaagtaatcgctacagggtttgcagatctgggtttcgatgtcgatattggaccgctgtttcaaactcctcgagaggtggcgcaacaggctgtagatgctgatgtacacgcagtggggatctccaccttagctgctggccacaagacattggtccccgagctaattaaagagttgaattctctcgggaggcccgacattcttgtgatgtgtggcggagtaatcccaccccaggattatgagtttctgttcgaagttggtgtttctaatgtctttggacctgggacccgaatcccaaaggcagccgtgcaggtattggacgatatcgagaagtgtttggaaaagaaacagcagagcgtc

SEQ ID NO: 16654 - DNA, 2250 bp, synthetic construct
  misc_feature 1..2250: note = source = /note="Description of Artificial Sequence: Synthetic coding sequence"
  source 1..2250: mol_type = other DNA
atgctgcgggctaagaaccaattgtttttgctgtccccacactacctgcgccaggtcaaggaatcgtcaggtagccgcctgatccagcaacggctcctccatcagcaacaaccgcttcacccggaatgggctgcccttgcgaagaagcaactgaaaggcaagaatcctgaagatttgatttggcacactcctgagggaatctcgatcaagccgttgtactccaagcgagacactatggacctcccggaagaactcccgggtgtgaagccgttcactcgcggcccgtacccgacgatgtacaccttccgcccatggaccattcggcagtacgctggcttctcgaccgtcgaggagtccaacaagttttacaaggacaacatcaaggctgggcagcagggcctctccgtggcgttcgacctggccacccatagaggatatgattcggacaacccgagggtgcggggtgatgtgggaatggctggtgtggcgattgacacggtggaggacaccaaaattctgttcgatggaatccctctcgagaagatgagcgtgtcgatgaccatgaacggagcagtgatccccgtgctggcaaacttcatcgttaccggggaggaacaaggagtgccgaaggagaaactgacgggaactatccaaaatgacatcctgaaagagtttatggtccgcaacacgtacatctttcccccggaaccgagcatgaagatcatagctgacatcttcgaatacaccgccaagcatatgcccaagtttaactcgatctctatctctggataccacatgcaggaagcgggcgcggacgccattctggaactggcatacaccctcgcggacggactggagtactcgagaaccggtctgcaggcaggattgactattgacgagttcgcccctcgcctgtcgttcttttggggaatcggcatgaacttctacatggaaatcgcaaagatgcgtgcaggacgccgcctgtgggctcacctgatcgaaaagatgtttcaaccgaagaacagcaagtctctgcttttgagagcgcattgtcaaacttccggctggtcgctgactgagcaagacccttacaacaacatcgtgagaacggccatcgaagcgatggccgcggtgttcggaggaactcagagcctgcacactaactccttcgatgaagcactcgggctcccgaccgtgaaaagcgccaggatcgccagaaatactcagatcattatccaggaggagagcggaatcccgaaggtcgccgacccttggggaggatcctacatgatggaatgtctgaccaacgacgtgtatgatgcagccctgaagctgatcaacgagatcgaggagatgggaggtatggccaaggcggtggccgagggcattcctaagctccgcatcgaggaatgcgcggcgcggcgccaggccaggatcgattccggctcggaggtgatcgtgggagtcaacaaataccagctcgagaaagaggacgcggtcgaagtgttggccattgacaatacttcagtgaggaaccgccagatcgagaagctgaagaaaatcaaatcatcaagagatcaggctctcgcagaaagatgtcttgcagccctgactgagtgcgccgcgtcaggcgacggaaatatcctcgcgctcgcggtggatgcgtcacgcgcccggtgcaccgtcggagaaatcactgatgccctgaagaaggtgttcggagagcataaggcaaacgaccggatggtatcaggagcctaccgccaggagtttggcgagtctaaggagattacttcggctattaagcgcgtgcacaagtttatggaacgggaaggacgccgcccgagactgctggtcgcaaagatgggacaggatggccacgatagaggagccaaagtgattgccactggattcgcggatctgggattcgatgtggacatcggacctctgttccaaacgcctcgggaagtggcgcaacaggccgttgacgcggacgtgcacgcggtgggaatctccaccctggcggccgggcacaaaacccttgtgccggaactcatcaaagaattgaacagcctcggacgcccggatatccttgtgatgtgtggcggcgtgatccccccgcaggactacgagttcctctttgaagtgggcgtctcgaacgtctttggaccgggaacccggatcccaaaggctgcggtgcaggtgctcgatgacatcgagaagtgccttgagaagaagcagcagtcagtc

SEQ ID NO: 16655 - DNA, 2250 bp, synthetic construct
  misc_feature 1..2250: note = source = /note="Description of Artificial Sequence: Synthetic coding sequence"
  source 1..2250: mol_type = other DNA
atgcttcgggcaaagaatcaactttttcttctttcccctcattacctccgtcaggtgaaggaatcgtcggggtcaaggcttattcagcagcgcctccttcatcagcagcagcctttgcatccagaatgggccgcactcgctaagaaacaactgaaggggaagaatcccgaagatttgatttggcatactcctgagggcatatcgattaagcctctgtacagcaagcgggacactatggacctgcctgaggaactcccgggtgtgaaaccattcactaggggaccttacccaaccatgtacaccttcaggccctggaccatccggcagtacgcaggattctcgaccgtcgaggaatccaacaagttttacaaggataacatcaaggcagggcagcagggcctgtcggtggcattcgatttggcgacccatcgaggatacgactcggacaacccaagagtcagaggcgacgtgggaatggccggcgtcgcaatcgacacggtggaggatactaagattctctttgatggaatcccactggagaaaatgtccgtgtcgatgaccatgaacggagcagtgatcccggtgcttgcaaactttattgtgactggagaagagcagggagtccccaaggaaaagttgaccggaacgatacagaatgacatcctgaaggagtttatggtgaggaacacttacatatttcccccggaaccatcgatgaagattatcgcggatatctttgagtacacggccaagcacatgccaaagttcaattcgatcagcatctctgggtaccatatgcaggaagcaggagcggacgccattctggaactcgcatacactcttgccgatgggctggaatactcgaggactggactgcaagcaggacttactatcgatgagttcgcacctcgcctgtcgtttttctggggaattggcatgaacttttacatggaaatcgcaaaaatgagagccgggcgccgcctgtgggcacatcttattgagaaaatgttccagccaaagaattcaaagagcctgcttcttagggcacactgccaaacttcaggatggtcgctgactgaacaggacccatacaataacattgtccgcaccgcaatcgaagcaatggcagcggtgtttggtggtacccagtccctgcacaccaattcctttgatgaggccctcggtctgcccaccgtgaagtccgcgagaatcgcaagaaacacgcagatcattatacaagaagaaagcggtattcctaaggtggccgacccttggggaggatcatacatgatggaatgcctgaccaatgacgtctacgatgccgcgctcaagctgattaacgagatcgaagaaatgggaggaatggcaaaggcagtggccgaggggattccgaaacttagaatcgaagaatgtgcagcacggcgtcaagctcggatcgactcggggtcagaggtcatcgtgggagtgaacaagtaccagctggaaaaggaggatgcagtggaagtgctggctattgacaatacttcagtgagaaaccgccagatagagaagctgaagaagatcaaaagttcccgtgatcaggcactcgccgaaagatgtctggccgcactgaccgagtgtgcagcatcgggagatggaaacattctcgcactggcagttgatgctagcagagctcgatgcactgtgggggaaattaccgatgcgcttaagaaggtgttcggcgagcataaggcaaacgataggatggtgtccggcgcgtaccgacaagaatttggagaatcgaaagaaatcacgtccgcgattaagcgggttcataagttcatggaaagagagggtcggcgccctcggctgctggtggcaaaaatgggtcaggatggccacgataggggcgcaaaagtgattgcaaccggatttgctgatctcggctttgatgtcgatattggacctctttttcagaccccaagggaagtggcacaacaggcagtggatgctgatgtgcatgctgtgggaatttcaactctggcagctgggcataaaaccctcgtccccgagctgatcaaagagctgaactccctgggacgtccagatattcttgtgatgtgtggaggggtgattcctcctcaagattacgagtttttgtttgaggtgggtgtgtccaacgtgtttggccctggtacccgtatccctaaagcagcagtccaagtcctggacgatattgagaaatgcttggaaaagaaacaacagtcagtc

SEQ ID NO: 16656 - DNA, 2250 bp, synthetic construct
  misc_feature 1..2250: note = source = /note="Description of Artificial Sequence: Synthetic coding sequence"
  source 1..2250: mol_type = other DNA
atgctgagagctaaaaaccagctctttctgctctcccctcattacctgcgccaggtcaaggagtcttctggctcacgcctcatccagcaaaggctgctgcaccagcaacagcctctccaccctgagtgggccgctttggccaaaaaacagctgaaggggaagaatcctgaagatcttatctggcacactccagaaggtatatctatcaagcctctgtactcaaaaagagataccatggatcttccggaggagttgcccggggtgaagccattcacccgaggcccttacccgacgatgtacaccttcagaccctggactatcaggcagtacgccggcttcagtacagtagaagaatcaaataaattttataaagacaatatcaaagccgggcaacagggactgtccgtcgctttcgacctggcaacgcaccgcgggtatgatagcgataaccctcgggttagaggtgacgtgggcatggccggagtggccattgacacagtcgaggacactaaaattctgttcgatggcatacccctggaaaaaatgagcgtctcaatgacgatgaacggagccgtgattcctgtcttggctaactttatcgtgacaggagaggaacaaggggttccaaaggagaaattgacgggaaccatccagaacgacatcctcaaggagtttatggtaagaaatacttacatcttccctcctgagccctcaatgaagatcatagccgatatcttcgagtacactgctaaacatatgccaaagtttaattccatctccatctctggctatcatatgcaggaggctggagctgacgccatcctggaactcgcgtataccctggcagacggcctggagtacagtcgcactggcctccaggccggattgacaatagacgagttcgctccgcgactgtcttttttctgggggatcggcatgaatttttacatggagatagctaagatgcgggctgggcgcagactttgggctcatctcatcgagaaaatgttccagcctaaaaactctaaatcacttctgcttcgggcacattgccaaacatccggttggtcactgacggaacaggacccgtacaacaacatcgtgcgaactgcaatcgaagcaatggccgccgtgttcggtggaacacagtcactgcataccaattcttttgacgaagctctcggcttgcccacagtaaaaagcgcccggatcgctcggaatacgcagatcatcatccaggaggagtctggcattcctaaagtcgctgacccatggggggggagttacatgatggagtgcttgacaaacgatgtgtatgacgccgccctcaaacttataaatgagatcgaggaaatgggcggcatggctaaggccgtggcggagggcattcccaagctgcgaattgaggaatgcgcggcccggaggcaggccaggatcgatagcgggtctgaggttatcgtgggggtgaataagtatcagctggagaaggaagatgccgtcgaagtgctggccatcgacaacacctctgtgaggaacagacagattgaaaaactcaaaaagatcaagagctcacgagaccaggcgcttgcggaacgatgcctggcggccctcaccgagtgtgctgccagcggggacggaaacatcctcgctctcgctgtggatgcgtctagagctcgctgtaccgttggcgaaatcacagacgcactgaagaaagtcttcggagagcacaaagctaatgatcggatggtaagtggcgcttataggcaggaattcggggagtccaaagagataacatcagcgatcaagcgggtacataagttcatggagcgcgaaggcaggaggccacgactcctcgttgccaagatgggccaggatggtcatgacaggggggccaaagtcattgccaccggtttcgctgatctgggtttcgacgtggacatcggacctcttttccaaacccctagagaggtcgcacagcaagcggtcgatgctgatgtccacgccgtcggcatctccactttggctgcgggccacaaaactctggtgccggagttgatcaaagaactgaactccctgggcagaccagatatcctggtgatgtgtgggggagtgataccaccgcaagactacgagttcctgtttgaggtaggtgtcagtaatgtctttggcccagggactaggatcccaaaggccgccgtccaagtcctcgacgatatagaaaaatgcctggaaaaaaagcagcagtcagtg

SEQ ID NO: 16657 - DNA, 2250 bp, synthetic construct
  misc_feature 1..2250: note = source = /note="Description of Artificial Sequence: Synthetic coding sequence"
  source 1..2250: mol_type = other DNA
atgctgagggccaagaaccagctgtttttgctgagcccgcactacttgcggcaggtgaaggaatcgtcaggatcaaggctgattcagcagcgcctcctccatcagcagcaaccgctccatccggaatgggccgcgctggcgaagaagcaactgaaaggaaaaaacccagaagatcttatttggcacacccccgaaggtattagcatcaagccactgtactccaagcgcgacaccatggacctgccggaagagcttcctggtgtcaagccctttacccggggcccgtacccaaccatgtacactttccggccatggactatcaggcaatacgcgggattctccaccgtggaggaatctaataagttttacaaggacaacatcaaagcgggtcaacaggggctctccgtggccttcgaccttgcgacgcaccggggatacgactccgataatccgcgcgtgcgcggagatgtcggaatggcaggagtcgccatcgacactgtcgaagatactaagatcctcttcgacggaatcccgctcgagaagatgtcggtgtctatgactatgaatggagctgtgatcccagtgctggcgaactttattgtgactggtgaggaacagggagtgcctaaagagaaacttaccggaaccattcagaacgacatcctgaaggagttcatggtcagaaacacgtacatcttcccaccggagccctcaatgaagatcatcgcagacatctttgagtacaccgcgaagcatatgccgaaattcaactcaatctcaatctcgggataccatatgcaggaagccggcgccgatgccatcttggaattggcttatacgctggccgacggactcgaatactcgcgcactggacttcaggcaggcctcaccatcgacgagttcgcccctcggttgagctttttctggggtatcgggatgaacttctacatggaaatcgccaagatgcgcgcaggacggcgcctgtgggctcacctgattgagaaaatgttccaacccaagaattccaagtccctcttgctcagggctcactgtcagacgtcgggatggtcgttgactgagcaggacccgtacaataacatcgttcggactgccatcgaagccatggctgccgtgttcggcggaacccagagcctccacactaactcatttgacgaagcgctgggactgccgactgtcaagtcagccagaatcgctcggaacacccagatcatcatccaagaagagtcaggaatcccgaaagtcgccgatccatggggaggctcctacatgatggaatgcctgacgaacgacgtctacgatgccgctctcaagttgatcaatgagatcgaggaaatgggaggaatggctaaagccgtggccgagggcatcccgaagctccggatcgaagaatgcgccgcgagacgacaggctaggattgactcgggctcagaggtcatcgtcggagtcaacaaataccagctggaaaaagaagatgctgtcgaggttctggccatcgacaacacctccgtcagaaacagacagatcgagaagctgaagaaaatcaagtcaagcagagatcaagccctggctgagcgttgccttgcagccctcaccgaatgcgctgcgtctggagacgggaatatccttgccctcgcggtcgacgcttcccgggcgcggtgtaccgtgggcgagataacggacgccctgaaaaaggtgtttggagaacacaaggctaacgaccgcatggtgagcggagcttaccgccaagaatttggagaaagcaaggaaattacttcggccatcaagagagtgcataagttcatggagcgcgaaggccgcagacctcggctcctggtcgcaaagatgggccaggacggccacgatcggggagctaaggtgatcgcaaccggattcgccgacctgggattcgacgtggacatcggaccactgttccaaacgccgcgagaagtggcgcaacaagctgtggacgcggacgtgcatgccgtgggtatctcaaccctcgctgccggacacaagaccctggtcccggaactgatcaaggaactgaacagcctgggacgcccggatattctggtgatgtgcggaggagtgatacccccgcaagactacgagttcctcttcgaggtgggagtcagcaatgtctttgggccgggtactcgcatccctaaggcggccgtccaagtgctggacgatatcgagaagtgcctggaaaagaagcagcagtccgtg

SEQ ID NO: 16658 - DNA, 2250 bp, synthetic construct
  misc_feature 1..2250: note = source = /note="Description of Artificial Sequence: Synthetic coding sequence"
  source 1..2250: mol_type = other DNA
atgctcagggctaagaatcagctgttcctgctgtctccccactatctgagacaggtgaaagagagctcagggagcagactcatccagcagagactcctacaccagcagcaacccctgcaccccgaatgggcagctctggcaaaaaaacaactcaagggtaagaatccggaggatctcatatggcacactccagaagggattagcattaagcccctgtacagtaaacgagatactatggacctcccagaagaactgcccggggtcaagccttttacccggggaccatacccaacaatgtatacatttcgaccttggacaattcggcagtacgctggattctccaccgtagaagagtctaacaaattctacaaagacaacataaaagccggtcagcagggattgagcgtggctttcgaccttgccacccacagaggatatgattctgataaccctagagtccggggtgacgtgggcatggccggagtcgcaatagacacagtcgaagacaccaagatattgtttgatggcatcccattggagaagatgtctgtatctatgaccatgaacggggctgtaattcctgtcctggccaacttcatcgttacaggagaggagcagggtgtgcccaaggagaaactgactgggacaatccagaatgatattttgaaggagtttatggtccggaatacttacatttttcctccagagccatcaatgaaaataattgctgacatattcgagtatacagctaaacacatgccaaagtttaacagtatatcgatcagcggatatcacatgcaggaggctggcgctgacgccattcttgagttggcctatacgctcgccgacgggctggaatacagccggactggcctccaagcagggctgaccatcgacgaatttgccccacgtctttcctttttctggggcatcggaatgaacttttatatggagatcgctaaaatgcgcgccgggcggaggctgtgggcccacctgattgagaagatgttccagcctaagaatagcaaaagcctgcttctaagagctcactgtcaaacttccggctggagcctgacggaacaggatccttacaacaatatagttaggacagcgattgaggcgatggccgcagtgtttggcggtactcagtctctccacacaaatagcttcgatgaggcacttggactgcctactgtcaagtctgcacggatcgctagaaatacccagatcatcatccaagaagagagcggcatccccaaggttgctgacccctggggaggctcctacatgatggagtgcctgaccaacgacgtgtacgatgccgcactcaagctcattaatgagatcgaggaaatgggggggatggcgaaggccgtggctgaaggcatacccaagcttcgtatcgaggagtgcgccgctcgtcgtcaggcacggatcgatagcgggagcgaagtcattgttggcgtgaacaaatatcagctggagaaggaagatgcagtggaagtactggccatcgataatacttccgtccgaaatcgccagattgaaaaactgaagaagattaagtcatcacgtgaccaagcactagccgaacgttgtttggcggccctgacagaatgtgcggcttccggtgacgggaatattctagccctagccgtggacgccagccgagcccggtgtaccgttggcgaaatcaccgatgcactgaaaaaagtctttggcgagcataaagccaacgatcggatggttagtggtgcgtaccgacaagagttcggcgagagtaaggagataacatctgctattaagagggttcataaatttatggagagggagggccggaggccacgcctcctcgtcgcaaagatggggcaggacggtcatgaccggggggcgaaggttattgccaccggcttcgcagatctgggctttgacgtagatattggtccacttttccagaccccccgagaagtcgctcagcaggccgtggacgccgacgtccatgcagtggggatttccactttggctgcgggacacaagactctggtcccggaactcatcaaggagctcaattcactcgggcgacccgatatcctggtaatgtgcgggggagttatccccccgcaggattatgaattcctgtttgaggtgggcgtctctaacgtgtttggccctggaacaaggatccccaaagcagcagtccaggtgctggacgacatcgaaaagtgtctggaaaagaagcagcagtcggtg

SEQ ID NO: 16659 - DNA, 2250 bp, synthetic construct
  misc_feature 1..2250: note = source = /note="Description of Artificial Sequence: Synthetic coding sequence"
  source 1..2250: mol_type = other DNA
atgctgagagctaaaaaccaacttttcttgctttccccacattatcttcggcaagtgaaggaaagctcgggttcgagattgattcaacaacgacttctgcaccagcaacaacccctccatcctgaatgggccgcccttgctaaaaagcagcttaagggaaagaatccagaggatctgatttggcatactccagaaggcataagcatcaaacctctttactcaaagagggataccatggatctccctgaagaacttccaggcgtgaagccattcacgcggggtccttaccctactatgtacacgttcagaccttggaccattcggcaatacgccggattttctactgtcgaagaatcaaataagttctacaaagacaacattaaagcaggtcagcagggactctcggtggcctttgacctggccacccatcggggatacgatagcgataatccaagagtgaggggagacgtgggaatggctggggtcgcaatcgatactgtcgaggatactaagatcttgttcgacgggatacctttggagaaaatgtcggtgagcatgaccatgaacggagcggtgatccctgtcttggcaaactttattgtcactggagaagagcagggagtccctaaggaaaagctcaccggaactattcagaacgatatacttaaagagtttatggtcagaaacacttacatctttcctcccgaacctagcatgaagataattgctgatatctttgaatacactgccaagcacatgccgaagtttaactcaatcagcatcagcggctaccatatgcaagaggccggtgcagatgcaattctcgaactggcttacacccttgcagatggtctggagtactctcggactggccttcaagccggccttaccatagacgagttcgcaccgaggctctcgttcttttggggaataggaatgaatttctacatggaaatcgcaaagatgagagctggacgcagactgtgggcacatcttatcgagaagatgtttcagccaaagaattccaaatcgcttctgctccgggcccactgtcaaacgagcggttggtcgcttaccgagcaggatccatacaacaatatcgtcagaacggccattgaagccatggcagccgtctttggcggaacccagagccttcatacgaactcctttgatgaggcacttggactccctaccgttaaatcggccagaatagcacgtaatacccagataatcattcaggaagaatccggcatccctaaggtcgccgatccctggggtggatcatacatgatggagtgtctcaccaatgatgtgtatgacgcggcactcaagctcattaacgaaatagaagaaatgggaggcatggcgaaggcagtggcagaaggcatacccaaactcagaattgaagaatgtgcggcacgtaggcaggcacgaatagattcgggatccgaagtgatcgttggagtgaataagtaccagctggaaaaggaggatgcggtggaggtcctggctatagataacacttcggtgcggaacagacagatcgaaaagctgaagaagattaagtcgtccagagatcaagccctggcagagaggtgtcttgcagcacttaccgagtgtgcagcatcaggtgatgggaacatcttggcacttgcagtcgacgcatccagggcacgatgcactgtgggggaaatcaccgacgcattgaagaaagtgtttggtgaacacaaggcaaatgaccggatggtgtccggggcgtaccgacaagagtttggagaatcgaaagagattacctcggcaattaagagagtgcataagtttatggaacgcgaagggcgcagaccgcggttgctcgttgctaagatgggacaagatggccacgatcgaggtgcgaaagtcattgcgactggatttgcagacttgggattcgacgttgacatcggccccctctttcagactcccagagaggtcgcacagcaggcagtggatgcagatgtgcacgcagtgggtattagcactcttgcggcaggacataaaactcttgtccctgaactgattaaagagctgaattcattgggtcgcccggatattctcgttatgtgtggcggagtcatcccacctcaagactatgagtttctgtttgaggtgggagtctctaacgtctttggaccgggcactcgaatccccaaagcagccgtgcaggtccttgatgacattgaaaagtgccttgagaaaaagcaacaatcagtc

SEQ ID NO: 16660 - DNA, 2250 bp, synthetic construct
  misc_feature 1..2250: note = source = /note="Description of Artificial Sequence: Synthetic coding sequence"
  source 1..2250: mol_type = other DNA
atgctgagagccaagaatcagctcttcttgctctccccgcattaccttcgccaagtgaaagaatcctccggaagcaggttgatccaacaaagacttctccaccagcagcagccactgcacccagaatgggcggccctggccaaaaaacagctgaagggaaaaaaccctgaagatctcatctggcacactccagagggaatctcaatcaagcctctttactccaagcgcgacactatggacctgccggaagagctgccgggtgtgaagccattcacgagaggcccgtacccaacgatgtatacctttcgcccatggactatccggcaatacgctggattttccaccgtcgaagagagcaacaaattctataaagacaacatcaaggccggacagcagggactgtctgtggctttcgacctggctacccatcggggttacgacagcgacaacccgcgcgtgcggggtgacgtgggcatggcaggagtcgccatcgacaccgttgaggatacgaagatcctctttgacggaatcccgctggaaaagatgtcggtcagtatgactatgaatggagcggtgatcccggtgctcgcaaactttattgtgacgggagaagagcagggagtcccgaaggagaagctcaccggaacgatccaaaacgacatccttaaggagtttatggtgcggaacacctacattttcccgcccgagccgtcgatgaagattatcgcggatatcttcgaatacaccgcaaaacacatgccgaagttcaatagcatctcaatctcggggtaccacatgcaagaagcgggagccgacgcaattctggaattggcctacaccctggcagatggtcttgaatactccaggaccgggctgcaggcaggactcaccatcgatgaattcgccccacgcctgtctttcttttggggcattgggatgaatttctacatggagatcgcaaaaatgcgcgccggacggcgtctctgggcgcatctcatcgagaagatgttccaaccgaagaattccaaatcgctgctgctgcgagcacactgccaaacctcgggatggtccttgaccgaacaagacccttacaacaacatcgtgagaactgccatcgaggccatggccgcagtgtttggaggaactcagtcactgcatactaacagcttcgacgaagccttgggccttccgactgtgaaatcggcccggatcgcacgcaacacccagattatcatccaggaggaatcgggaattccgaaagtagccgacccctggggaggctcctacatgatggagtgtctcactaacgatgtgtacgacgccgcgctcaagctcatcaacgagatcgaggaaatggggggaatggccaaagcggtggccgaagggatcccaaaattgcgcatcgaagagtgcgccgcgagaaggcaggcaagaattgattcaggatcagaggtcattgtcggagtgaacaagtaccagctcgaaaaggaggacgccgtggaagtgcttgcaattgacaacacttcggtgcgcaaccgtcagatcgagaagttgaagaaaatcaagtcgagccgcgatcaggcgctggctgaaagatgcctcgccgccctgaccgagtgcgctgcctccggtgacggaaacattctggcgctcgctgtggacgcctccagagcccggtgcacggtgggggaaatcactgacgctctcaagaaggtgttcggagaacataaggctaatgaccgcatggtgtcgggagcctacagacaagagttcggtgagtcaaaagaaatcactagcgcgatcaaacgcgtgcacaagttcatggagcgagagggaagaaggcctcggctgctggtcgccaaaatgggtcaggatggacacgaccgcggagcgaaagtcatcgcgaccggcttcgctgacctgggattcgatgtggatatcggcccactgttccagacgcctcgcgaagtcgcccaacaggccgtcgatgccgatgtgcatgcagtgggaatcagcactctggctgcgggtcataaaacgctggttccagagctgatcaaggaactgaactccctgggacgcccagacatcctggtgatgtgcggcggtgtgatcccgccacaggattacgaattcctgttcgaagttggagtctccaacgtgttcggcccagggacccggattccaaaggccgctgtccaggtcctggacgacatcgaaaaatgtctggaaaagaaacagcagtcagtg

SEQ ID NO: 16661 - DNA, 2250 bp, synthetic construct
  misc_feature 1..2250: note = source = /note="Description of Artificial Sequence: Synthetic coding sequence"
  source 1..2250: mol_type = other DNA
atgttgagagcgaaaaatcaactgttccttctgagcccacattacctgagacaggtgaaagagagctcaggatcacgccttatccagcaaagactcctccaccagcagcaacctctccatcctgagtgggcagctctggccaagaagcagcttaagggaaagaaccctgaggacctgatatggcatacgccggaaggaatctcaattaagccgctgtacagtaaacgggatactatggatctgcccgaggaattgcccggagtgaagccgttcacccgcggtccttaccccactatgtacactttccgcccgtggaccatccggcaatatgcagggttctccactgtcgaagaatctaacaagttctacaaggataacatcaaggccgggcaacagggcctgagcgtggcgtttgacctggctactcatagaggctacgactcagataacccgcgagtgaggggagacgtcggtatggcaggcgtggcaatcgacacggtggaggacaccaagatccttttcgatggaatcccgctggaaaagatgtccgtgagcatgacgatgaacggggctgtgatcccggtactggcaaacttcatcgtcacgggagaagagcaaggagtccctaaagagaaactgactggaacgatccaaaatgatatcctgaaggaattcatggtgcggaacacttacattttcccaccagagccatccatgaaaatcattgcggatatcttcgagtacactgcgaaacatatgccaaagttcaattcaatctcaatctcgggttaccatatgcaggaggcgggggcggatgccatactcgaacttgcctacaccttggcggatgggctcgaatacagccggactggactccaggcaggccttaccatcgatgaattcgccccgcggctttctttcttttggggcattgggatgaacttttacatggagatcgccaaaatgcgcgctgggcgcaggctgtgggcccatcttatcgaaaagatgttccaaccgaagaatagcaagagcctgctcttgagagcccattgtcagacctcgggttggtcactgactgaacaagatccatataacaacatcgtcagaactgcaatcgaggcaatggccgcggtgttcggtggaacccagtcacttcacaccaacagctttgacgaggccttgggcctcccaacggtgaaatcggcgcggatcgctcggaatacgcagatcatcatccaggaggagagcggaatcccgaaggttgcggacccttggggaggatcatacatgatggaatgcctgaccaatgacgtgtacgatgctgcgctgaaactcatcaatgagattgaggaaatgggaggtatggccaaggctgtcgcggaaggcattcctaaactccgcattgaagaatgtgcggcccggcggcaggccagaatcgattcgggaagcgaggtcatcgttggagtgaacaaataccagctggagaaggaggacgccgtggaggtgctggccattgataacacttcagtcagaaatagacagatcgagaagctgaagaagataaagtcatcgagggaccaagcgctggccgagcgctgcctcgccgctttgacggagtgcgcagcgagcggggacggcaatatcctggccctcgccgtggacgcctcgcgtgctagatgcactgtcggagaaatcaccgacgcgttgaaaaaggtgttcggcgagcacaaagcaaacgataggatggtgtctggtgcgtaccgacaggaatttggagaatcaaaggagatcacctcggccatcaagagagtgcacaaattcatggagagggaaggcaggaggccgcggctgctggtggccaagatgggtcaggacggacatgaccgcggagctaaggtgatcgcaaccggatttgccgatctcgggttcgacgtcgacattggaccgctctttcagacccctcgcgaagtggctcaacaggccgtcgatgcagatgtccacgcagtggggatttccactctcgccgcaggtcataaaacccttgtgccagagctcatcaaggagctcaattcgctgggcagacccgacatccttgtgatgtgcggaggggtgatcccgccgcaagattacgaatttctcttcgaagtgggagtgtccaacgtgttcggccctggaacccggatcccaaaggctgcagtgcaggtcctcgacgacattgaaaagtgcctggagaagaagcaacagtcggtg

SEQ ID NO: 16662 - DNA, 2250 bp, synthetic construct
  misc_feature 1..2250: note = source = /note="Description of Artificial Sequence: Synthetic coding sequence"
  source 1..2250: mol_type = other DNA
atgctccgtgctaagaatcagctgttcctgttatcgcctcactacctcaggcaggtcaaagagtcaagcggctcgcggctgattcaacagcgactcctgcaccagcaacagcccctacacccggagtgggcagccctggctaagaagcaattaaaaggcaaaaacccggaggatctgatctggcacacacctgaagggatcagcattaagcctttgtattccaaaagagatacgatggacctgcctgaagagttacctggggtcaagccattcacaagaggcccatatcccaccatgtatacgttccgaccatggacaattaggcagtatgcggggttctccactgtggaggagagtaacaagttttataaggacaacattaaggccgggcagcaggggctgagcgtggcctttgacctggcgactcatagagggtatgatagcgataatccacgggtgagaggggatgtgggcatggcgggcgtagcaattgacaccgtggaggacactaaaattctgttcgatgggatacccctggagaagatgagcgtttccatgacaatgaatggggcggtcatcccggtgcttgccaacttcattgtcaccggagaggagcagggcgttcctaaagaaaagttaacaggaaccattcagaacgatattctaaaggagttcatggtgcggaacacctatattttcccgcccgagccgtccatgaagatcatagcagatatttttgagtatactgcgaagcatatgcccaaattcaactccatctcaataagcggttatcatatgcaggaggctggggcagatgccattctcgagctcgcctacacactggcggatggccttgaatactctaggaccggactgcaagccggcttgaccatcgatgagttcgcaccgagactgtcatttttttggggcatcggcatgaatttctacatggaaattgccaaaatgagagccggacgcagactgtgggcgcatttgatagagaaaatgttccagcctaaaaatagcaagtctcttcttctgcgcgcccattgccagaccagcggttggtcactaactgagcaggatccctataacaacatagtacggaccgccatagaagcaatggcggctgtatttggaggaacacagtccctccatactaattcattcgacgaggccctcggactgcccaccgtgaagagcgcccgcatcgcaaggaatacccagattatcatacaggaggaatccgggatccctaaagtggccgacccatggggaggctcttatatgatggaatgtctgacaaacgatgtctacgatgccgccctcaagcttatcaacgaaatcgaggagatgggcggcatggctaaggcggtcgctgaagggattcccaagcttcggatcgaagagtgcgctgcccggaggcaggccagaatagatagtgggagcgaggtgatcgtcggagtgaacaagtatcaacttgagaaagaagacgctgtggaagtgctggcaattgacaatacctctgtgagaaatcgacagattgagaaactcaagaagatcaagagttcgcgggaccaggcacttgctgagaggtgcttagcagctctgacagaatgtgcagcttccggagacggcaatattttggctctcgcagtcgatgcctctagggctcggtgcaccgtcggcgaaattacagatgcgctgaagaaagtgtttggagagcacaaggccaacgacagaatggtgtctggagcttacaggcaggagttcggagagtcaaaggaaatcacctccgccattaaacgtgtccataaattcatggaacgagagggcagacgaccgcggctgctcgtggccaagatgggccaagatggccatgacagaggtgccaaggtcatcgctacaggctttgcagatttggggttcgacgtcgacatcggacctctatttcagaccccccgagaagttgcacagcaggcggtcgacgccgacgttcacgctgtcgggatctctacattggcagctggccacaaaaccctggtgcccgagttgatcaaagaacttaacagcttggggaggcccgatattctagtgatgtgcgggggggtgattccccctcaagactacgagttcctgtttgaagtcggggtgtcaaatgtgtttggcccaggaacccgaattcccaaagccgcagtgcaggtcctggatgacatcgaaaagtgcctcgaaaaaaaacaacaatccgtg

SEQ ID NO: 16663 - DNA, 2250 bp, synthetic construct
  misc_feature 1..2250: note = source = /note="Description of Artificial Sequence: Synthetic coding sequence"
  source 1..2250: mol_type = other DNA
atgcttagggccaagaaccaactgtttcttctctcgccgcattaccttcgccaggtcaaagaatcgtcaggatcccgactcatccagcagagacttctgcaccagcaacaacctcttcaccccgagtgggcagccctcgcaaagaaacaactgaaggggaaaaatcccgaggatttgatttggcataccccggagggtatctcaatcaagccactctactccaaacgcgacaccatggatctgccggaagagctgcccggagtgaaaccgtttacccggggaccttaccccactatgtacaccttccgcccttggacgatacgccaatatgcgggtttttctactgtcgaggaatcgaacaagttttacaaggacaacattaaggccgggcaacaagggctttcagtggcctttgatctcgcaacgcatcgcgggtacgatagcgataatccacgtgtgagaggtgatgtgggaatggctggtgtggcaattgacaccgtcgaagatactaagatactctttgacggaattccactggaaaagatgtcggttagtatgaccatgaacggagcagtcattccagtcctcgctaacttcattgtgactggtgaagagcaaggagtgcctaaggaaaaacttaccggaactattcaaaacgatatcttgaaggaattcatggtgcggaacacttacatattccctcctgagccttccatgaagatcattgcagacatattcgaatacactgccaagcatatgccgaagttcaactcgatctcgatatctggataccatatgcaggaagcaggcgccgatgcaatcctggaactggcatacactcttgcagatggtcttgaatactcccgaacgggattgcaggcaggcctgaccatcgatgagttcgcaccacgacttagtttcttttgggggatcggtatgaatttctatatggagatagcaaagatgcgggcaggtcggcgcctctgggcccacctgattgaaaagatgtttcagcccaagaatagtaagtcccttctgcttcgcgcacattgtcagacctcaggatggtcccttaccgaacaggacccatacaacaatatcgttagaactgcaattgaagcgatggcagcagtgtttggtggtactcagagcttgcacactaactcctttgatgaagcgcttggtctgccaactgtcaagtccgcgagaatcgcacggaacacccagattatcattcaagaagaatcggggattcccaaggtcgccgatccctggggagggagctacatgatggaatgcctgactaacgacgtgtacgacgccgcactgaagctcattaacgagattgaagaaatgggtggaatggccaaagcagtggcagaaggaataccgaaacttagaatcgaggagtgtgcagcccggagacaagcccggattgactcaggcagcgaggtgattgtgggagtgaacaaataccaactcgaaaaagaggacgcggtggaagtgttggccattgataatacctcggtccgaaataggcagattgaaaagctgaagaagatcaagtcctcaagggaccaagcgttggcagagcgctgcctggcagctctcaccgaatgtgcagcctcaggagatggaaacatacttgctcttgcggtggatgcatcaagagctagatgtacggtgggcgaaattaccgatgcacttaagaaagtgttcggtgaacataaagctaatgatcggatggtcagcggcgcttataggcaggaatttggagaatctaaggagatcactagcgcgataaagcgggtgcacaaattcatggagcgtgaagggcggaggcctagactgctggtggcgaaaatggggcaagatggacacgatcgcggtgccaaggtcattgcaaccggttttgcagatctgggatttgacgtcgatattggtccgctttttcagacgccccgagaagtggcccagcaagcggtagatgcggacgtccatgccgtaggaatctccactttggcagcaggacataaaacgctcgtcccagagcttatcaaggagcttaacagcttgggcaggccagacatcctcgtgatgtgtggcggggtgattccgcctcaagactacgagtttctgtttgaggtgggagtgtccaacgtctttgggcctgggactagaataccaaaggcagcggtgcaagtgcttgacgatatcgagaagtgcctggaaaagaagcagcaatccgtg

SEQ ID NO: 16664 - DNA, 2250 bp, synthetic construct
  misc_feature 1..2250: note = source = /note="Description of Artificial Sequence: Synthetic coding sequence"
  source 1..2250: mol_type = other DNA
atgctgcgggccaaaaatcaactatttttgctgtcaccccattatctccggcaggtaaaggagagttcaggttcccgcctgattcagcagcgcctgcttcatcaacaacagccacttcaccccgagtgggccgcactcgctaaaaagcaactcaaggggaagaacccagaagacctgatttggcacacccctgagggcatttcaataaagcctctttacagcaaacgggatacaatggatctacctgaggagttgccaggagtgaagcccttcacacgagggccctaccctaccatgtacacctttagaccttggaccataaggcagtacgccggcttctctacagtggaggaaagcaacaagttttacaaggataatataaaggccggacagcagggactgtctgtggcatttgatcttgctacgcatcggggctacgatagcgacaatccacgcgtgagaggcgatgtgggcatggccggagtggcaatcgacaccgtagaggacacgaaaatcctgtttgacgggatcccactggagaagatgtctgtgagtatgactatgaacggggctgttatccctgtcttagccaacttcatagtgaccggagaagagcagggtgtgcctaaggagaagctgacaggcacaatccagaatgatatcctcaaagaatttatggttcgaaacacatacatcttccctcctgagccaagcatgaaaatcattgcggacatattcgagtacacagctaagcacatgcctaagttcaatagtatctctataagcggctatcacatgcaggaggctggagctgacgccatcttagagctagcttacaccttagctgacggtctcgaatactctcggactggcctgcaggccggcttgaccatagacgagtttgccccacgcctatcttttttttggggaataggcatgaatttctacatggagattgcaaagatgagagccggacgcagactttgggcgcatttgattgagaaaatgttccaacccaagaactccaaatccctcttgctgcgcgcgcactgccaaacctctggatggagcttgacagaacaggatccttataacaacatcgtcaggactgccatcgaagctatggccgcggtgttcggcggcacccaatcccttcacactaactccttcgatgaggctctcgggctgccaacagtcaaatctgctaggatcgcccgcaacacgcagataattattcaagaggagtcgggaattcccaaagtggctgatccctggggggggagctacatgatggagtgtctcactaatgatgtctacgatgccgctctgaaactgataaatgagatcgaggaaatgggaggtatggctaaggcggtagcagagggcatccctaaactgaggatcgaagagtgtgctgctcgcaggcaggctaggatagactcgggatccgaagttattgtcggggtgaacaaatatcagctggagaaggaagacgctgtggaagtgttggccatagacaatacatccgttcggaaccgccagatcgagaaactgaaaaagatcaaatccagcagagatcaggccctggctgagaggtgtctggcggcactgacagagtgcgcggcgagtggcgacgggaatattctcgctctggcagttgacgcttccagagcacgctgtactgtgggagagataacagatgcacttaaaaaggtattcggagagcacaaggcaaacgacaggatggtgtccggcgcgtacaggcaggaattcggcgaaagcaaggagatcacatccgcaataaaaagagtgcataagttcatggaacgggaaggtcgtcggcccagactgctggtagctaaaatgggccaagacggccatgaccgaggtgcaaaggtcattgccaccggctttgcagatctcggcttcgacgttgatatcgggccactgttccaaaccccacgcgaagtcgctcaacaggccgtggacgctgacgttcatgcagtgggcatttctacgctggcagcaggccacaaaaccctagtgcccgaactgatcaaagaattgaacagcctagggcggccagatattttggtcatgtgcgggggagtcatcccacctcaggactacgaattcttatttgaagttggcgtctcaaacgtctttggtcctggcacacgcattcctaaggctgcagtacaggtgctcgacgacatcgagaaatgcctggagaaaaagcagcagtctgtg

SEQ ID NO: 16665 - DNA, 2250 bp, synthetic construct
  misc_feature 1..2250: note = source = /note="Description of Artificial Sequence: Synthetic coding sequence"
  source 1..2250: mol_type = other DNA
atgctccgtgcaaagaaccagttatttctgctgtcgccccattatctgaggcaagtcaaggaaagttcaggctcccgactcatacagcagcggctcttacatcagcagcagccgttgcaccccgagtgggcagcactggccaagaaacagctgaaggggaaaaaccccgaagatctgatctggcacactcctgagggcatttctataaaaccactgtactcaaagcgggatactatggacctgcctgaagaactaccaggagtgaaaccattcactagagggccctatccgactatgtacacttttagaccatggactatacggcaatacgctggattctcaaccgtagaggaatctaataaattttataaggataacatcaaagcaggacaacagggactatccgttgctttcgatctggccacacatcgaggctacgattctgataatcctagagttcgaggggatgttgggatggcaggggttgccattgacacagtggaagataccaagatactgtttgacgggatccctttggagaagatgtctgtgtccatgactatgaacggagctgtcatacccgtgctcgcaaacttcatagtcactggcgaggagcagggggtgccgaaagaaaaactgaccggcacaattcagaatgacattctcaaggagttcatggtgcggaacacatacattttccctccagaacccagcatgaagattatagcggatattttcgagtatactgcgaaacatatgccgaagttcaacagtatctccatatccggctaccacatgcaagaagcaggagcagatgcgattctggaactggcatatactctggcggatggtttggaatatagcagaacggggttgcaggcaggtctcacgatcgacgagtttgccccacgtttgtctttcttttggggaattggaatgaatttttacatggagattgctaagatgcgcgctggtagacgattatgggctcacctgatcgagaagatgtttcagcctaagaacagtaagtcgctgcttctccgagcccattgtcagacttccggatggagcctcacagagcaggacccatacaacaacatcgtccgtaccgccatcgaagccatggctgccgtcttcggcggcacgcagagcttacatacaaacagctttgatgaggcactcggattaccaacagtgaaatccgcgagaatcgcgcgcaatacccaaatcattatccaggaggagtcaggcattcccaaggtagccgacccctgggggggtagctatatgatggagtgcctaactaatgatgtgtatgacgctgcgctcaaactcataaacgaaattgaagagatgggagggatggctaaggctgtcgcagaaggaattcccaaactccggattgaagagtgcgcagcccgacgtcaggcccgcatcgattccggctccgaggtcattgtgggagtgaacaaataccagttggagaaggaagacgccgtggaagtattggccatcgataatacgagcgtccggaatcgacaaatcgagaagctgaagaaaattaaaagcagtagggatcaagcattggccgaacgttgcttagctgccctcacagagtgcgcagcttctggggatggcaacatcctggctctggccgtcgacgcctctcgtgcacgatgcaccgtgggggagataaccgatgcactgaaaaaggtcttcggagaacataaagccaacgacagaatggtgtccggggcatatcgacaagagttcggagaaagcaaagagataacatcagccatcaaaagggttcataagtttatggaacgcgagggaagacgtcccaggttgctagtcgctaagatgggccaggatgggcacgaccgcggcgcaaaggttattgcgaccgggtttgcagatttaggctttgatgtcgacatcgggcccctgttccagactcccagggaagtcgcacagcaggcagtggacgccgacgtccacgctgtgggtatatctacccttgccgccggtcataaaacattggtgcctgagcttattaaggagttgaacagcttgggtcggcctgatatcctggtcatgtgtgggggggtcattcccccacaggattacgagtttctcttcgaggtgggagtatccaatgtgtttggacccggcacccggatccccaaggcagctgtgcaagtgctcgacgacatagagaagtgtctggagaaaaaacaacagagtgtg

SEQ ID NO: 16666 - DNA, 2250 bp, synthetic construct
  misc_feature 1..2250: note = source = /note="Description of Artificial Sequence: Synthetic coding sequence"
  source 1..2250: mol_type = other DNA
atgctaagggctaaaaaccagctatttctgttgtctccccactatctgaggcaggtcaaagagtcaagtgggagccgcctgattcagcagcgcctgcttcaccaacagcagccactacacccagagtgggccgccctcgctaaaaaacagttaaagggaaaaaatcccgaagacctgatatggcacactccagaaggcatctccataaagcccctttactcgaaacgcgataccatggaccttccagaagagttgcctggtgttaaaccattcactaggggaccttacccaacaatgtacacattccgaccttggacaatccgtcagtacgccggctttagcactgtagaggagtctaataagttctacaaggacaacataaaagccggtcagcaaggcctgtctgtggctttcgatctggccactcatcgggggtacgattccgataatcctagagtccggggggacgtgggaatggctggggtagcaattgatacagtcgaggataccaagattttgttcgatggtatcccgctggagaagatgagcgtttcaatgactatgaacggtgcggtgattccggttctggccaattttattgtgactggagaggagcaaggagtccccaaagagaagctgaccggaactattcagaatgatatactcaaggagttcatggtccgaaacacatacattttcccccctgaaccttccatgaaaattatagcggacatcttcgaatacactgctaagcatatgcctaagttcaattcaatctctatctctggataccacatgcaggaggcgggcgcagatgccattcttgagctcgcatacacactggcggacgggcttgagtacagtaggacaggtctccaagcagggttgacaatcgacgaattcgctcccaggctatcattcttttggggcatcggaatgaacttctatatggagatcgcaaaaatgcgtgcaggccgtcggctctgggcccacctgattgaaaagatgtttcagcccaagaactctaaaagcctcctactgcgagctcattgccagacttccggctggtctctcactgaacaagatccatataataatatcgtgcggactgccattgaggcgatggctgctgtattcggagggacgcaatcgttgcataccaactcttttgatgaggctctgggactgcccactgttaaatcggctcggatcgcgagaaatacccagatcataattcaggaggagagcggtatccccaaagttgcggacccttggggtgggtcatacatgatggagtgtctgaccaacgacgtttacgatgctgctcttaagctgataaacgagatcgaagaaatgggtggcatggctaaggcagtggccgagggcattccgaagctccgcatcgaagaatgcgcagcccgccggcaggcacgcatcgattctggctccgaagtcatcgtcggtgtcaataaataccaactggaaaaagaagacgcagtggaggttctggctattgacaataccagtgttagaaacaggcagatcgagaaactcaaaaagatcaaaagttcccgtgatcaggcactggctgaaaggtgcctcgccgcgctaaccgaatgcgcggcctccggggatgggaatatcctggcattggctgttgacgcctccagggcacggtgcactgtgggcgaaatcactgatgctttgaagaaagtgttcggagaacacaaggctaatgacagaatggtgtctggcgcctatagacaggagtttggcgagagtaaagagattacatccgcaataaaaagagtccataagttcatggagcgtgagggccggagaccaaggctgttagtggctaaaatgggccaggatggccacgacaggggagctaaagttattgccaccgggttcgccgacctcggctttgacgttgatataggtcccttattccagacgccacgcgaggtagcgcagcaagccgtggacgcagacgtccacgctgttgggatctccacgctggccgccggacataaaaccctggttccagaactgattaaggaattaaacagtctcggaaggccagacattctggttatgtgcggcggtgtcatacctcctcaggactacgagttcctgttcgaggtcggagtttccaatgtgtttggaccagggacaaggatcccaaaggccgctgtgcaggtcctcgacgatatcgagaagtgtctggagaagaagcagcagtctgtc

SEQ ID NO: 16667 - DNA, 2250 bp, synthetic construct
  misc_feature 1..2250: note = source = /note="Description of Artificial Sequence: Synthetic coding sequence"
  source 1..2250: mol_type = other DNA
atgctgcgcgcaaagaatcaacttttcctcctgagccctcattacctgcgccaggtcaaagagtcctccggttcacggctgatccagcagcggctccttcatcagcagcaacctctccaccctgagtgggccgccttggctaagaaacaactcaagggaaagaacccggaggacctcatatggcacacccccgagggcatctcgatcaagcccctctatagcaagcgcgacacgatggacttgcctgaagaactgcctggagtgaagccttttactagaggtccatacccgactatgtacacctttagaccgtggactatccgccagtacgccggattctcaaccgtggaagaatccaataagttctataaagataacattaaagcgggccagcaaggactgtcggtggccttcgatctggcgacgcaccgcggttacgattcagataacccaagggtgagaggagacgtggggatggctggtgtggcgatcgatactgtggaagataccaaaattctgttcgacggcatcccgctcgagaagatgtccgtgtcgatgactatgaacggagctgtgatcccagtcctggccaacttcattgtgactggcgaagagcaaggggtgccgaaggagaagctcacgggtacgatccaaaatgacatcctgaaggagtttatggttcgcaatacttacatctttccgccagagccatcgatgaagatcattgcagatatcttcgaatacactgcaaagcatatgccaaagttcaactccatttcgatttccggataccacatgcaagaagcaggtgcagatgctatcctggaactggcttacaccctcgcggatggactcgagtactcgcgcactggactgcaggcgggcctgactattgacgagtttgcgccacggctctcgttcttctgggggatcggaatgaacttctacatggagatagcgaagatgcgcgccggacggcggctgtgggcgcatctcattgagaagatgttccagcccaagaacagcaagtccctgctgctgcgcgcacattgtcaaacctcgggatggtcgctgactgaacaggatccatacaacaacatcgttcgaactgcgattgaggccatggccgccgtctttggaggtacccaatcactgcacaccaacagctttgacgaagccctgggactcccgactgtgaaaagcgccaggatcgcccgcaacacccagatcatcatccaggaggaatcgggcatccccaaggtcgccgacccatggggaggttcctacatgatggaatgcctgacgaacgacgtgtacgatgcggcgctgaaactgatcaatgagattgaagagatgggaggaatggcaaaggccgtggccgagggaatccccaagctgaggatcgaagaatgcgcggcgcggagacaggcacgcattgactctgggtctgaggtgatagtcggagtgaataagtatcaattggaaaaagaggacgctgtggaagttctcgcgatcgacaatacttccgtgaggaataggcagatcgaaaagctcaaaaagatcaaatccagccgggatcaggcgctggcggaacggtgcctggcagccctgactgagtgcgccgcctcgggagacggaaacattctggcactcgctgttgacgcttcccgcgctcggtgcactgtgggcgagatcactgatgcactgaagaaagtgtttggcgagcataaggcaaacgaccgcatggtgtccggagcgtacaggcaggagttcggagaatccaaggaaatcacttcggctatcaagagagtgcacaagttcatggagcgcgaaggaaggcgcccgcgcctcctggtcgcaaagatgggacaggacggtcacgatcgcggagccaaggtgatcgcgaccggcttcgccgacctgggattcgacgtggatatcggcccgttgttccaaacccctcgcgaggtggcccaacaggcggtcgacgccgatgtccacgctgtgggtatctcgactctcgcagcaggacacaagaccttggttccggaacttatcaaggagcttaactccctgggacggcccgacattctggtgatgtgcggaggagtcattcccccacaagactacgaatttctgttcgaagtgggagtctcgaatgtgttcgggcccggaacccgcatcccaaaggccgccgtgcaagtgctggacgacatcgaaaagtgtcttgagaagaagcaacaatcggtc

SEQ ID NO: 16668 - DNA, 2250 bp, synthetic construct
  misc_feature 1..2250: note = source = /note="Description of Artificial Sequence: Synthetic coding sequence"
  source 1..2250: mol_type = other DNA
atgctgagagccaaaaatcagctcttcctgctttcgccacactacctgagacaggtcaaagagtcatccgggtcacgcctaattcagcagcggctcctccatcaacaacagccattgcatccagagtgggcagctctcgccaagaagcagctgaaggggaaaaatccagaggacctgatttggcatacgccggagggtatcagtattaaacccctgtactctaaacgtgatacgatggacctacctgaagaactgcctggagtcaagccgtttacccgcggtccttatccaacaatgtacacttttcgcccctggaccattcgacagtatgctggattctccacagtcgaagagtccaacaagttctacaaagataacattaaggctggccagcaggggcttagtgttgccttcgacctagcaacccatagaggatatgattccgacaatccaagagttagaggggacgtgggaatggccggagttgccatcgacaccgttgaagacacgaagattctattcgatggtatccccctagagaagatgagtgtgtccatgactatgaacggggcagtcatcccggtcttggcaaactttattgtgaccggtgaggaacaaggcgttcccaaggaaaagctgacagggactatccaaaacgacatcctgaaggagtttatggtccgtaatacatacattttcccgcctgagccttctatgaagattatcgctgatatctttgagtataccgctaaacacatgcctaagttcaactcgatatcaatctctgggtatcatatgcaggaagccggcgctgatgcaatcctggaacttgcttacacactggcggacgggctggagtactctcgaactggcctgcaagccggtttaactatcgatgagtttgctccacgcctctccttcttttggggaataggcatgaacttctacatggagattgcaaagatgcgagctggccgtcgactatgggctcatcttattgagaagatgtttcagccaaagaacagcaagtctctgttactccgagcccattgccagacaagcggctggagtctcactgaacaggatccgtataacaatattgttcggaccgccatcgaggcaatggccgcggtgttcgggggcacccagtctcttcatacaaactctttcgacgaagccctcggtcttccaaccgtgaagagtgcgcggatcgcccggaatactcagatcataattcaggaggagagtggtatccctaaagttgctgacccctgggggggttcgtacatgatggagtgtctgaccaatgatgtttacgacgctgccctgaagctcatcaatgagatagaggagatggggggaatggccaaagcggtcgcggagggaatacccaagctgaggattgaggaatgtgctgcccgtcgccaggctcgaatcgacagtggctccgaggtgattgtgggggtgaacaagtatcagctggagaaggaggacgctgtggaggtcctggccatcgataacacgagtgttcgtaatcgccagattgagaaactgaaaaagatcaaaagctcaagagaccaggccctggctgaacggtgcctggctgccctgaccgaatgcgctgcatctggagatgggaacatattggctttggctgtggacgcaagccgcgccagatgcacggtaggggaaattactgacgccctcaagaaagtgttcggcgagcacaaggctaatgataggatggtgtctggtgcttatcggcaggaattcggcgagtcgaaggagattacatcagcaattaaacgcgtccataagtttatggagagggaaggacgtagacccagactgctggtagcaaaaatgggtcaagacggtcatgaccgaggagccaaggttattgccaccggctttgccgaccttggctttgacgtggatataggcccattgttccaaactccgagagaagtggcacagcaggccgtggatgctgatgtgcatgccgtgggtattagcaccctcgctgccgggcacaaaaccttggttcccgagcttattaaggagctgaactcacttggacgaccggatatattggttatgtgcgggggcgtaatccctccacaggactatgagtttctctttgaggtcggagttagcaacgtgttcggccctggtactagaatccctaaagctgcagtccaagttttggatgacattgagaagtgcctggagaaaaaacagcaatcagta

SEQ ID NO: 16669 - DNA, 2250 bp, synthetic construct
  misc_feature 1..2250: note = source = /note="Description of Artificial Sequence: Synthetic coding sequence"
  source 1..2250: mol_type = other DNA
atgctccgtgccaagaatcagctcttcctcctgtcaccgcattacttgagacaggtgaaggaatcgagcggatcacgcctgatccagcaaaggctcctgcatcagcaacagccgctgcatcctgagtgggcggctctggccaaaaagcaacttaagggcaagaaccccgaggacctgatctggcacactccagaaggaatctccatcaagccgctgtactccaagcgcgataccatggatctgcctgaagagctgccgggtgtgaagccgttcactagaggaccttaccctaccatgtacacttttcgcccttggaccatccgccagtacgcgggtttttccacggtggaggaaagcaacaaattctataaggacaacatcaaggcaggacagcagggcctcagcgtggctttcgacttggccacgcatagaggttacgattccgacaaccctcgggtgcggggggacgtgggcatggccggagtggccatcgacactgttgaggacaccaagatcctgttcgatggaatcccgctggagaagatgtcggtttcgatgactatgaatggggcagtgatcccggtgctcgcgaactttattgtgaccggcgaggagcagggcgtgccgaaagagaagctgaccgggaccatccagaacgatatcctgaaagagttcatggtccgcaacacctatatcttcccacctgagcctagcatgaaaatcatcgctgatatcttcgaatacaccgccaagcacatgcctaagtttaactcaatctcgatctcaggataccacatgcaggaggccggggccgacgcgatcctggaactggcctataccttggccgatggactggagtattctcggaccggcctgcaagcaggactcaccatcgacgaattcgccccgagactgtccttcttttgggggatcggaatgaacttctacatggaaatcgccaaaatgagagcaggacgcagactttgggcccatctgatcgagaagatgttccagccaaagaacagcaaatcccttctcctgcgcgcccattgccagacttcaggttggtcattgaccgaacaggatccatacaataacatcgtgcggaccgccatcgaggcgatggcagcggtgtttggtggaacgcagtcgctgcacaccaattcgtttgacgaagcgctcggactcccgactgtcaagtccgcccgcatagctcggaacactcagatcatcatccaggaagaatcgggaattccaaaagtcgctgatccgtggggcggaagctacatgatggaatgtctcaccaacgacgtgtatgacgcagcgctcaaactcatcaatgagatcgaagagatgggcggaatggccaaggcggtcgccgaggggatcccgaagctgcgcattgaagaatgcgccgcgagacgacaggcgcggatcgatagtggctccgaggtgatcgtgggagtgaacaaataccagctggaaaaggaggacgcagtcgaagtgctggcgatcgacaatacctcggttcggaatcggcagatcgaaaaacttaagaagatcaagagctcaagggaccaggcgctcgcggaaagatgccttgccgccttgaccgagtgcgcagcctcgggagatggtaacatccttgcgctggccgtggatgcatcccgcgcgagatgcaccgtgggggaaattacggacgcccttaagaaggtgttcggcgagcacaaggccaatgaccggatggtgtcaggagcctacaggcaagagttcggtgaatccaaagaaatcacctcggcgatcaaaagggtgcacaagttcatggaacgcgaggggcgccggccgcgcctgctcgtggctaagatgggacaggacggtcacgacagaggagccaaggtgatcgccaccgggttcgcggacctgggcttcgatgtggacatcggaccactgtttcaaacccctagggaggtggcccagcaagcagtcgacgccgatgtgcacgcggtcgggatttcgacgctggccgcgggacacaaaaccttggtgcctgagctgatcaaggagctgaactccctgggcaggccggatattctggtgatgtgcgggggcgtgatccctccgcaagactacgagtttttgttcgaagtcggagtgtcgaacgtgtttggacctggaacccggatccccaaagccgcggtgcaagtcctggacgatattgaaaaatgtctggaaaagaagcaacaatcggtg

SEQ ID NO: 16670 - DNA, 2250 bp, synthetic construct
  misc_feature 1..2250: note = source = /note="Description of Artificial Sequence: Synthetic coding sequence"
  source 1..2250: mol_type = other DNA
atgcttagagccaaaaatcagctgttccttctgagccctcattatctgcgccaagtcaaggaaagcagcggatcccggctgatccaacagagacttctgcatcaacaacagcctctgcacccagaatgggcagcacttgcaaagaagcaactgaagggaaagaatccagaagatcttatctggcacacgccagagggaatatcgatcaaaccactctactcgaagagagatactatggatcttccagaagagcttcctggagtcaagccctttacccgcggaccttacccaaccatgtacacttttaggccgtggaccatccgccaatacgctggattctcgaccgtggaggaaagcaacaagttttacaaggataacataaaggcgggacagcaagggctttccgtggcctttgatctcgcaacccatcgcggctacgattcggacaatccccgggtcaggggtgatgtgggtatggctggcgtcgcaattgatactgtggaagataccaaaatcctcttcgacggaatcccacttgagaagatgtcagtctccatgactatgaacggtgccgtcattcccgtgctggcaaactttatcgtgaccggtgaagaacaaggagtgcctaaggaaaagctgactgggactattcagaacgatattctcaaggagtttatggtgagaaatacctacatttttccccctgaaccttcgatgaaaatcatcgcagatatcttcgagtacactgccaagcatatgcccaagtttaactctattagcatctcgggttatcacatgcaggaggcaggagccgatgcaattctggagctcgcctacacgctggctgacgggcttgagtactctcgtaccggtctgcaagcaggtcttactatcgacgaatttgcgccaagactttcgttcttttggggtatcggcatgaacttttacatggaaattgccaaaatgcgcgcagggagacgcctctgggcgcaccttattgaaaagatgttccaacctaagaattccaagagccttcttctgcgtgcacattgtcaaacctctggatggtcactgactgaacaagatccttacaacaatattgtcagaacggcgattgaagcgatggcagcagttttcggtggaacccagagcctccatactaactcctttgacgaagctctgggcctgcctactgtgaaaagcgccagaattgcacgcaacactcagattatcattcaagaggaatcgggcatacctaaggttgccgacccttggggaggatcgtacatgatggagtgccttacgaacgacgtgtacgatgcagccctgaaactgatcaacgaaatcgaagaaatgggcggcatggcaaaagcagtggccgagggtattccaaagctcaggatagaagaatgtgcagctcggcggcaggcccggattgacagcggatccgaagtcatcgtgggcgtgaataagtaccagctggaaaaagaggacgccgtggaagtgctcgcaattgacaacacttcggtcagaaacagacagatcgagaaactgaagaagattaagtcgtcacgggaccaagcgctcgcagaaaggtgcctggctgccctcacggagtgtgcggcatctggcgatgggaacattcttgcactggctgtggatgctagccgcgcgcgttgtactgttggagaaataaccgacgcactcaaaaaagtgtttggagaacacaaggcaaatgacagaatggtcagcggagcttaccgccaggaattcggagagtcaaaggagattacttcggcaattaagagagtccataagtttatggagagagaaggtcgcagaccacggctccttgtggcgaagatggggcaagatggtcacgatagaggggcaaaggtgatcgccactggcttcgcagatctgggcttcgacgttgatataggccctctcttccagacccctcgggaagtggcgcaacaggcagtggatgcagatgtgcatgcagtcggtatttcgacccttgcggctgggcataagaccctcgtgccagaattgataaaggaacttaactcactgggtagaccggatattctggtgatgtgcggtggagtgattccacctcaagactacgaatttctgtttgaagttggagtgtcaaatgtttttggcccaggcaccaggataccaaaggcggccgtccaggtgctcgacgatattgagaaatgtctggagaagaaacaacaatcggtg

SEQ ID NO: 16671 - DNA, 2250 bp, synthetic construct
  misc_feature 1..2250: note = source = /note="Description of Artificial Sequence: Synthetic coding sequence"
  source 1..2250: mol_type = other DNA
atgctgagggctaagaatcagctgtttttgctgtctccacattacttacgccaggttaaagaaagctcagggtctcggctgatacagcagcgtctcctccatcaacagcaaccattgcacccagagtgggcggccctcgcaaagaagcagcttaaaggaaaaaaccctgaagatttaatttggcacacaccggaggggatttctatcaagccattgtacagcaagagggataccatggatctaccagaggagttgccgggcgtgaaaccctttacacgagggccataccccactatgtacacttttcgtccatggacaatccgccaatacgccgggtttagtactgtggaagagtcaaataaattttacaaagacaacataaaggctggacagcagggcctcagtgtggcctttgacctcgccacccatagaggttacgatagcgacaatcctagagtaagaggagatgtgggcatggccggtgtggcaattgatacggttgaagacactaagatcctgtttgacgggatcccgttggaaaaaatgtcagtttccatgactatgaatggggctgtcattccggtactcgcgaacttcattgtgaccggggaagagcagggcgttccaaaggagaagctgaccggcactatacagaacgacattttgaaggagttcatggtgaggaacacctatatcttcccaccggaaccttcaatgaaaataattgccgacatttttgagtataccgcgaagcacatgccgaaatttaacagcattagcatcagcggatatcacatgcaggaagctggggccgatgccatcctggaactggcttacacactagcggacggcctggagtactcaagaacaggtctgcaggccgggctgacaattgacgagttcgcgcctcggctgtctttcttttgggggattggcatgaacttctacatggagatagctaaaatgcgggccggaagaaggctctgggctcacctgatcgaaaagatgtttcagcctaaaaactcaaagagcctcctgttgcgtgcacattgtcaaacaagcggttggagtttgaccgagcaggacccctataataatatcgtgaggaccgcaatcgaagccatggccgctgtgttcggtggaacccagtccctgcacacaaattcttttgatgaggcactgggacttcctactgttaagtccgctagaatagccagaaacacccagatcatcatacaagaggagtccggtattcccaaggtggccgacccatggggcggcagctacatgatggaatgtctgacgaacgatgtctacgatgcagctcttaagttgataaacgagatcgaggagatgggggggatggccaaggcagttgcggaaggcataccgaaactgcgaatcgaggaatgtgctgctcggagacaggctcggatcgactccggaagcgaagttatcgtaggggtgaataagtaccagttggagaaagaggacgcggtggaagtgctggcgattgataacacttccgtgcgaaatcgccaaattgagaagttgaagaaaattaagagctcaagagatcaggccctcgccgaacgatgtctcgctgccctgaccgagtgtgctgcttcaggcgatggcaacatcctggctcttgcagtggacgccagcagggctcgttgtacagtcggtgaaataacggacgctctgaaaaaagtatttggcgagcacaaagcgaacgatcgaatggtcagcggagcttacagacaggagttcggggagagtaaggagatcacttcagccattaagcgagtgcacaagtttatggaacgggagggacgcaggccccgactgctggtggcaaagatgggtcaggacgggcacgaccgaggcgccaaggtgattgcgaccgggtttgcagatctggggttcgatgtcgatattggcccactgtttcagacgccgagggaggtggcccagcaggctgtggacgcagacgtgcatgccgtaggtatctcaacactcgcagccgggcacaaaacgctcgtgcccgagctcattaaagaactgaattcattgggccgaccagatatcctggtgatgtgtggtggcgtaatcccccctcaggactacgaattcttgtttgaggtcggcgtatcaaatgtattcggccccgggaccaggatccccaaggctgctgtccaggttctcgatgacatcgagaagtgtctcgaaaagaagcagcaaagcgtg

SEQ ID NO: 16672 - DNA, 2250 bp, synthetic construct
  misc_feature 1..2250: note = source = /note="Description of Artificial Sequence: Synthetic coding sequence"
  source 1..2250: mol_type = other DNA
atgctcagagccaagaatcagttgtttctcttgagtccgcattatcttcgccaggtcaaggaatcaagcggctccaggttaattcagcagaggctcctgcatcagcaacagcctttgcacccagagtgggctgccttagccaagaagcaactgaaggggaaaaacccagaggacctgatatggcacacacccgagggaatatccattaaaccactatattccaagagggacactatggatctacctgaagagctgccaggcgtgaaaccattcacccgtgggccgtaccccaccatgtacaccttcagaccatggacgattcggcagtatgccggattttctacagttgaggagagtaataagttctataaggacaatattaaggcaggccagcaggggctctccgtggcatttgatctggctacacacagaggctatgattccgataacccaagagtgagaggggatgtcggaatggccggggtggctatcgacacagtggaagatacaaaaatcctgttcgacggaatccctctggaaaagatgtccgtgtccatgaccatgaatggcgcagtgatacccgtactggcgaacttcattgtaacgggggaggagcaaggcgtgcccaaagaaaagcttacaggaaccattcagaatgacattctgaaagaattcatggtgcgtaacacatatatatttccccccgagccatccatgaagatcatcgccgatatttttgaatataccgccaagcacatgcccaagttcaacagtatttctatctccggatatcacatgcaggaggccggggctgatgcaatcctggaactggcgtacacccttgctgatggcctcgaatactctaggacagggctccaagctgggctgactatagacgaattcgcccctcgcctatccttcttctggggaatagggatgaacttttatatggaaatcgctaaaatgagggcaggaagaagattgtgggcccatcttatcgagaaaatgtttcagccaaagaactctaaatcccttctgctcagagcccactgtcagacctcgggctggagtttgaccgagcaggacccatataacaatatagttcggacggcaatcgaggctatggctgcagtctttggagggacccaatcgctgcacacgaactcgtttgatgaggctttaggcctgcctacagttaagtctgcacgaatagcgaggaatactcagatcattattcaagaagagtccggcatacccaaggtggccgacccctggggcggttcctatatgatggagtgcttgacaaacgacgtttacgatgctgccctgaagctgatcaacgagattgaagaaatgggcggtatggccaaggcggtggcagaagggatcccaaaactaagaatcgaagagtgcgcagcacgcagacaggcacgaatcgacagtggaagcgaggtgattgtcggggtcaacaaataccagctggaaaaagaggacgctgttgaggtgttggccattgataacaccagcgtgaggaataggcaaatcgaaaagttgaaaaaaatcaagtcttcccgagaccaagcccttgccgaaagatgcctggccgcgctcactgaatgtgctgcctcgggggacggtaacatacttgcgctggccgttgacgccagcagagcccgctgcacagtcggagagatcactgatgccctgaagaaggtattcggagaacacaaagcaaacgatcggatggtctctggagcctatcgtcaggaattcggagagagcaaagagattacatccgccatcaagagagtccataagttcatggaaagagaaggtcggagaccccgcttgctggtagcaaagatgggccaagatgggcacgatagaggcgccaaggtcatcgccacaggctttgctgacctggggtttgacgttgacataggcccattattccagacccccagagaggttgctcagcaggcggtggatgccgacgttcacgccgtgggtataagtaccctggcagccgggcacaaaacgctggtaccggaactaatcaaggaacttaattccttgggtcggcccgatattttggtgatgtgcggtggtgtgatcccaccccaggattacgaatttctttttgaggttggggtcagcaatgtcttcggccctggcactaggatccctaaagcggctgtacaggtgctcgacgacattgaaaagtgcttggagaagaagcaacagtctgtc

SEQ ID NO: 16673 - DNA, 2250 bp, synthetic construct
  misc_feature 1..2250: note = source = /note="Description of Artificial Sequence: Synthetic coding sequence"
  source 1..2250: mol_type = other DNA
atgctgcgcgctaagaaccagctcttcctgctctcgccacactacctgcgtcaggtcaaagagtcatccgggtccagactgatccagcaacgactgctgcatcagcagcaaccactgcacccagagtgggccgctctggcgaaaaagcagttgaagggcaagaatcccgaagatctgatctggcacaccccggagggcatctctatcaagcctctctactcgaaacgcgatactatggacttgccggaagagttgcctggcgtgaagccgttcacccgcggcccgtacccgactatgtatacctttcggccatggacgatccggcaatacgccggctttagcactgtcgaggaatccaacaagttctacaaagacaacatcaaagccggacagcaaggcctttcggtggcgtttgacctggcaactcatcggggctacgacagcgacaacccaagagtgcgcggagatgtaggtatggcaggggtggcgattgacaccgtggaagataccaagatcctcttcgacggtattccgcttgagaaaatgtcggtgagcatgactatgaatggggccgtgatacccgtgctcgcaaatttcatcgtgaccggcgaagagcagggggtgccgaaggagaaattgactggaaccatccaaaacgatatcctgaaagaattcatggtgcggaacacgtacatctttccgcctgagccttcgatgaagattattgcggatatctttgaatacactgcaaaacatatgcccaagttcaactcgatcagcatctccggctatcacatgcaggaggcgggggctgatgcaatcctggagctggcgtacaccctcgccgacggattggaatactctaggaccggactccaagcaggactgaccatcgacgagttcgcgccacggctttcgttcttctggggcatcggtatgaacttctacatggaaatcgcgaagatgcgcgcgggccgccggctgtgggctcaccttatcgagaaaatgttccaacctaagaattccaagtcactgctgttgcgggcacattgccaaacctcaggatggtcccttaccgaacaagacccatacaacaatattgtcagaaccgccatagaagccatggcagctgtgttcggaggcacccagtcactgcatactaatagctttgatgaagcacttggacttccgaccgtgaaatctgccaggatcgcccgtaacacccagattatcatccaagaggaatcagggatcccaaaggtggccgacccatggggaggctcatatatgatggagtgcctcactaacgacgtctacgatgccgccctgaagctcattaacgaaatcgaggagatgggagggatggccaaggcggtcgcggaggggattccaaagctccggatcgaagagtgcgctgcccggcgccaggccagaattgattcggggagcgaagttatcgtcggagtgaataagtaccagctcgaaaaggaggatgcggtggaagtgttggccatcgataatacctcagtgcggaacagacagatcgagaagctgaaaaagatcaagtcctcgcgtgaccaggccttggccgaacggtgcctggctgccttgaccgagtgcgccgcctccggagacggtaatatcttggccctggccgtcgacgcctcccgggcacgctgtactgtcggagaaatcactgacgccctgaagaaggttttcggagagcataaggcaaacgaccggatggtgtccggcgcctaccgccaggaattcggagaaagcaaggagatcacttcagctatcaagcgggtgcacaaattcatggaaagagaagggcgccgcccgagactgcttgtggccaaaatgggccaggacggccacgacagaggggccaaggtgatagcgaccggattcgccgatctcggattcgatgtggatatcggacccctctttcagactccaagggaggtggcacaacaagccgttgacgcggacgtgcacgctgtcgggatcagcacgctcgcggccggtcataagactctcgtcccggaattgatcaaggaactcaactcactgggacgcccggacattcttgtgatgtgcggaggagttattcccccacaggattacgagttcctgttcgaagtcggagtgtcgaacgtgtttggaccagggacgcgcatcccgaaggccgcagtgcaggtactcgacgatattgagaaatgtctggagaaaaagcaacagtcggtc

SEQ ID NO: 16674 - DNA, 2250 bp, synthetic construct
  misc_feature 1..2250: note = source = /note="Description of Artificial Sequence: Synthetic coding sequence"
  source 1..2250: mol_type = other DNA
atgcttcgcgccaagaatcagctgtttttgctttcgcctcactacctcagacaagtgaaagaatcttccggatcccgattgattcaacagaggcttcttcatcagcagcaacctctgcaccctgagtgggcggcacttgcgaagaaacagctcaagggcaagaatccagaagatcttatctggcatactccagaaggcatttccattaagccgctttactccaagagggatactatggatcttcctgaagaattgcccggagtgaagccattcacgcggggcccttaccctaccatgtacactttccggccatggactatcaggcagtatgccggtttctcgaccgtcgaggaatccaacaagttttacaaagacaacattaaagcaggacagcaaggcttgagcgtggcgttcgacctcgccactcatcgcggttacgactcagacaacccacgggtgcgtggtgatgttgggatggcaggagtggcgatagatactgtagaggataccaaaattctgtttgatggcatccctttggagaaaatgtctgtgtcgatgaccatgaacggtgcagtcattcctgtgcttgcaaactttatagtgacgggcgaagagcagggagtgcctaaggaaaagctgaccggtaccattcagaacgacattctcaaggagtttatggttcggaatacctacattttcccaccagaaccttcgatgaagattattgcagacatctttgaatacactgcgaagcatatgcctaaattcaattccatttcaattagcggctatcatatgcaggaggccggtgccgatgcaatcctggagctggcatatactctggccgacggtcttgaatactcccgaaccggactccaagcaggattgaccatagacgagttcgcacctagactttcgtttttctggggaatagggatgaacttctacatggagatcgccaagatgagagcaggtcggagactctgggcacatcttatcgagaagatgttccagcctaagaattcgaaatcgcttctgcttcgcgcgcactgtcagaccagcgggtggagcctgaccgaacaggatccttacaacaacattgtgagaactgcaattgaggcaatggcagctgtgtttggcggaactcagtcgcttcataccaattcctttgatgaagcactcggacttcctactgtgaagtccgccaggatcgcaagaaacacccagataatcatccaagaagaatcgggaatcccgaaggtggcggacccatggggcggttcatacatgatggaatgtctcactaacgacgtgtacgacgcagcgctgaagttgatcaacgaaattgaagaaatggggggaatggcgaaggcagtggcggaaggaattccaaaactgcggatagaagaatgtgcagcacggcgtcaagcacggattgactcgggttcggaggtgatcgtcggagtgaataagtaccagctcgagaaggaagatgcagtggaggtgctcgctatcgataacacctccgtcagaaacagacagatagaaaaactcaaaaagatcaagtcaagccgtgatcaggccctggcagagcggtgcctggccgccctcaccgaatgtgcagccagcggagatggtaacattctggcacttgcggtggatgccagcagggcacgctgtaccgtcggagaaattactgacgcactgaagaaggtctttggtgaacataaagcgaatgatcggatggtgtcgggggcgtatcgccaggaattcggcgaaagcaaggaaataacctcggcgattaaacgtgtgcacaagttcatggaacgcgaaggacgccgcccgaggctgctggtcgcaaagatgggtcaggatggtcacgataggggggccaaggtcatcgcaaccggattcgcggatctgggatttgatgtggacatcggtcctctgtttcagacgccacgggaggtggcacaacaggcagtggacgccgatgtgcacgcagtcggcatttcgactcttgcagcaggtcacaagaccctcgttccagaactcattaaagagctcaacagcctgggtagacccgacatcctggtcatgtgtggaggtgttataccaccccaagattacgaatttctgtttgaagtgggggtgtcgaatgtgttcggtccaggaactcgtatcccaaaagcagccgtgcaagtcttggatgacatcgaaaaatgcctggaaaagaagcaacagtcggtg

SEQ ID NO: 16675 - DNA, 2250 bp, synthetic construct
  misc_feature 1..2250: note = source = /note="Description of Artificial Sequence: Synthetic coding sequence"
  source 1..2250: mol_type = other DNA
atgctgcgggccaagaatcaactatttctgttaagtcctcactacctgcgtcaggtgaaggaaagctccggtagcaggctgattcaacagcgcctgcttcaccagcaacaacctctgcatccggagtgggccgcactggcaaaaaagcagctaaaaggcaagaacccggaggatctgatctggcataccccggaggggatcagtatcaagcccctgtatagtaagcgcgataccatggacctgccggaggagctgcctggagttaaaccatttacccgagggccgtacccgaccatgtatacgttcagaccttggacgattcgtcagtatgctggcttctcaaccgtcgaggagagcaacaaattctataaggacaacatcaaggcgggtcaacaagggctgagcgtggctttcgatctggccactcaccgtggctacgacagcgacaaccctcgcgtgaggggtgatgttggcatggcgggggtggctatcgatacggtggaagatactaaaattctgttcgatggcattccgttggaaaagatgagcgtaagcatgaccatgaatggtgcggttatccctgttctggctaacttcatcgtcacgggtgaagagcagggcgtgccgaaggagaaattgaccggtacgattcagaacgatatactgaaggaatttatggttcgtaacacctacattttcccgccagagccatcgatgaagatcattgccgacatttttgagtatacggcaaagcacatgccaaaatttaactctattagcatcagcggttatcatatgcaggaggcgggcgcggatgcaatccttgaattggcatacactctggcggacggtttggaatatagcaggaccggcctgcaggcgggcctgactatcgacgagttcgctccacgactgtcgttcttctggggtattggaatgaatttttatatggagatcgctaaaatgcgcgcgggccgacgcctatgggcccacctcatcgaaaagatgttccaaccgaagaacagcaagagcctgttactgagggcacactgccagaccagcggttggagcctgactgaacaagacccttacaacaatattgtccgtacggcaatagaagcaatggcggccgttttcggcggcacccaaagcttgcatacgaattcctttgatgaagccctgggtctgccgactgtgaaaagcgcccgcattgcccgtaacacccaaattattatccaagaggagtcaggtattccaaaggttgccgatccgtggggtgggtcgtatatgatggagtgtttgaccaacgacgtgtatgacgcagctctgaaactgatcaatgagattgaagagatgggcgggatggccaaggctgtggctgaaggtatcccgaaactgcgcatcgaggaatgcgcggcgaggaggcaagcaagaattgacagcggctccgaggtgatcgtgggtgtcaacaaataccagcttgaaaaggaggatgcggtagaggtgttggcaatcgacaacaccagcgtgcgcaatcgacagatcgaaaagttgaagaaaattaagtccagccgcgatcaggcactggcagaacgctgcttagcagcactaaccgagtgtgctgcgtccggtgatggcaacattttggccttggccgtagacgcaagcagggcgcgctgtacggttggtgagattacggatgccctgaaaaaagtgttcggcgagcataaagcgaatgaccgcatggttagcggcgcgtatcgacaggaatttggggaatccaaagaaattacctccgccattaagcgggtgcataaatttatggaacgcgagggccggcgccctcgcctgttggttgccaagatgggccaggatggccacgatcgaggtgcaaaagttattgccaccggttttgccgacctgggatttgacgtggatattggaccactgtttcaaacgcctagagaagttgcgcaacaggcagttgatgccgacgtgcatgctgtgggcatctctaccctggcagccggtcataagaccctcgtgccggagttgataaaggaactcaatagcttgggacgccccgatatcctggttatgtgtggaggcgtgatcccacctcaggactatgagtttttgttcgaggttggcgtgagcaacgtgttcggtccaggtaccaggattccaaaggctgccgtgcaggttctggacgacatcgaaaagtgcctggagaagaagcaacaaagcgtg

SEQ ID NO: 16676 - DNA, 2250 bp, synthetic construct
  misc_feature 1..2250: note = source = /note="Description of Artificial Sequence: Synthetic coding sequence"
  source 1..2250: mol_type = other DNA
atgctgagggccaagaatcaactattcctgctgtcaccacactacctgcgtcaggtgaaagaaagctccggttcccgtttaatacagcagaggctcttgcatcagcagcagcctctgcaccccgagtgggccgccttggcaaagaagcagctcaaaggcaaaaaccctgaggacctgatctggcatactcctgaaggcatcagtataaaacccctttacagtaagcgagataccatggatctacccgaggagctgcctggagtgaagccgtttaccagaggtccctacccaacaatgtacacattccgcccctggaccatcagacaatacgctggcttttctaccgtggaagagagcaacaaattctacaaagataatattaaggccgggcaacaggggctgtccgttgccttcgatctggcaactcacaggggatacgacagcgacaatcctcgcgtgaggggggatgttggaatggcaggggtggcgattgacaccgtggaggacaccaagattctttttgacggcatccccctggagaagatgagtgtgagcatgaccatgaacggcgccgttattccagtgctcgccaactttatcgtcaccggagaggaacagggcgtgccaaaagagaaactgactggcacaatacagaatgatatattaaaagaattcatggtcaggaatacctatatattccctccagaaccctctatgaagattatagcagacatttttgagtacacagctaagcacatgcccaaattcaattctattagtatctccgggtatcatatgcaggaagcgggcgccgatgccatcttggagctggcgtacacactggcagacggcctggagtattcacgcaccggcctgcaagcaggactgacgatagacgaattcgctcctcggctgtccttcttttggggtattggaatgaacttctacatggagatcgctaagatgcgcgcgggccgccgcctgtgggcccacttaattgaaaaaatgtttcagcctaaaaattccaagagcctgctgctgagggcccattgtcagaccagcggttggtcgctgaccgagcaggatccttataacaatattgtgcggaccgctatcgaagctatggcggctgtctttggtggcacccagtccttacacacgaacagttttgatgaggcattaggcctgccaactgtgaaaagcgctcggattgctcggaacacccagatcatcattcaggaggaatctggaatccccaaggttgccgacccctggggagggtcctacatgatggagtgtcttacaaacgacgtctatgacgccgccctgaaattgatcaatgagatcgaggaaatgggcgggatggctaaggccgtggccgagggcatccctaaattgagaatcgaagagtgcgccgccagacgacaagcaagaatagattctggctctgaggtgatcgtcggagttaataaatatcagctggaaaaagaggacgccgtggaagttctcgcaattgataatacttcagtgcggaacaggcagattgaaaaactgaagaagattaagagctctagggaccaggccttggccgaacggtgtctggctgccttaacggagtgcgcagcatctggggatggaaacatcctggcactggcagttgatgccagcagagcccgttgcaccgtgggagagattaccgacgctttgaagaaggtcttcggagagcacaaggctaacgataggatggttagcggagcgtacaggcaggaatttggggagagtaaagagatcacctcagccatcaagagggttcataagtttatggaacgcgagggacgacgacccaggctgcttgtggccaagatggggcaggacggccacgataggggagccaaagttatcgcgaccggattcgctgacctaggtttcgatgtcgatattgggcccctgttccaaacacctcgggaggtagctcagcaggccgtggacgccgacgtccatgctgtggggatttccacgctagccgccggccataagacgctggtgccagaactgatcaaggaacttaacagcctgggtcggcctgatatcctcgtgatgtgcggaggagtcattccccctcaggactacgaattcctcttcgaggtgggtgtgagtaacgtgtttggccccggaacccgcataccaaaagctgcagtacaagtgttagatgatattgagaagtgtttagaaaagaagcagcagagtgtg

SEQ ID NO: 16677 - DNA, 2250 bp, synthetic construct
  misc_feature 1..2250: note = source = /note="Description of Artificial Sequence: Synthetic coding sequence"
  source 1..2250: mol_type = other DNA
atgctgagggctaaaaaccagctgtttttactaagcccccattatttgagacaggtgaaagaaagtagtgggagccgactgatccagcagcgactcctccatcagcagcaacccctgcacccggagtgggccgcactcgctaaaaaacagctaaaaggaaagaatcccgaggacctgatctggcacacgccagaaggcataagcataaagcccctgtacagtaagcgggacacaatggacctgccagaggaactgccgggggtcaagccattcacacgcggtccataccctaccatgtataccttcagaccctggaccatccgccagtacgccgggttcagcactgtggaagagtcaaacaagttttacaaagacaacatcaaggccgggcaacagggcctgtccgttgccttcgacctggcaacacatcgcggatatgattccgacaatcctagagtgcggggcgatgtgggaatggctggcgtagcgattgatacagtggaagataccaagatcctcttcgacggaatcccgctggagaagatgtccgtgtctatgaccatgaacggggctgtgatccctgttttggctaatttcatagtgaccggggaggagcaaggagtacctaaggaaaaattaacaggtaccatacaaaacgacatccttaaggagttcatggtgcgaaatacatacattttcccgcctgagccaagtatgaaaatcatagcggacatttttgagtacaccgcgaagcacatgccaaagttcaactctatctctattagcggctatcatatgcaagaagcaggcgcagatgcgatccttgaactagcatataccttggctgacggcctggaatatagtcgaacaggactgcaggctgggctgacaattgacgagtttgcccccaggctttcattcttctggggcatcgggatgaacttctacatggagattgccaaaatgcgggcaggccgtaggctctgggctcacctcatagaaaaaatgtttcaacctaaaaactcaaagtcgctccttctccgggcacattgtcaaacatccggctggagcttaacagaacaggacccttacaataatattgttcgcacagctattgaagccatggcggccgtcttcggaggaacacaatcactccacactaactccttcgacgaggcactcggcctgcctactgtaaagtctgctcggatcgcacgtaacacacagatcattatccaggaagagtcagggattcccaaggtcgccgatccctgggggggctcttacatgatggagtgcctgacaaatgatgtgtatgatgcggccttgaaattgatcaatgagatcgaggaaatgggaggaatggctaaggctgtggccgagggtatccctaagttaagaatagaggaatgcgccgcgcgccgacaggccaggattgacagtggctcagaggtgatagtcggggtgaataagtaccaattggagaaagaagacgccgtagaagtgctggctatcgacaatacatcagttagaaacaggcagattgagaaactaaaaaagattaagagcagcagagaccaggccctcgcagaacggtgcttggctgcactaaccgaatgtgcggcctcaggggacggaaacattttggcccttgctgttgatgcgtcgcgagctagatgtaccgttggtgaaatcaccgatgctctgaagaaagtttttggtgagcacaaagccaacgatcggatggtttccggggcttatcgccaggaattcggagagagcaaagagattacgtcagccatcaaaagagtgcacaagttcatggagagggagggtagaaggccacgactgctggtcgcaaagatgggacaggatggacacgaccgcggagcaaaggtgatagcaacaggctttgcagaccttggtttcgatgtggatattggaccacttttccaaaccccacgggaggttgcccagcaggccgtggatgccgatgtgcatgcggtcggaatatctacattggcagccggccataagacactggtgccagagctgatcaaagaattgaactctcttgggcgcccagacatactggtgatgtgcgggggtgtcatacccccgcaggattacgagttccttttcgaggtgggagtgtcgaacgtgttcgggcctggcacccgtatacccaaagctgcggtgcaagtattggacgacatcgaaaagtgtctggagaaaaaacaacagagtgtt

SEQ ID NO: 16678 - DNA, 2250 bp, synthetic construct
  misc_feature 1..2250: note = source = /note="Description of Artificial Sequence: Synthetic coding sequence"
  source 1..2250: mol_type = other DNA
atgcttcgggcaaagaaccagctgttcctcctgtccccccactacttgcgccaggtgaaggaatcgtccgggtcaaggcttattcaacaacggcttcttcatcagcaacagcctctgcacccagaatgggccgcactggcaaagaaacagcttaaggggaaaaaccctgaagatcttatctggcatactccagaaggcatctcaatcaagccactttactcaaagcgcgacaccatggatcttcctgaggaacttccgggtgttaaaccgtttaccaggggtccttaccccaccatgtacacttttagaccatggaccattcgccaatatgcaggtttctcaaccgtcgaagagtccaacaagttctataaagataacattaaggctggacaacaaggactttcggtggcctttgacctcgcaactcataggggttacgacagcgacaatccccgtgtacggggagacgtcggcatggcaggcgtggccattgacactgtcgaggacaccaaaatcctttttgacggcattccactcgagaagatgtcggtgtccatgaccatgaatggtgcggtgattcctgtgcttgcaaactttatcgtgactggcgaggaacagggtgtgcctaaagagaaactgaccggcaccatccagaacgacatactcaaggagtttatggtgagaaacacctacattttcccccctgaaccctcaatgaagataattgcagacatcttcgagtataccgctaagcatatgcccaagttcaattcgatttcgatctccggataccatatgcaggaagctggagctgacgctatcctggagctggcgtacactcttgcggatgggcttgaatactcgcgtactggccttcaggcgggcctcacgattgacgaatttgcacctcggctgtcgttcttttggggaattggaatgaacttttacatggagattgccaagatgcgtgcagggcgacgactttgggcacacctgattgaaaagatgtttcagccgaaaaacagcaagagccttctgctccgtgcacactgtcaaactagcggatggtcacttactgagcaagatccatacaacaatatcgtccggaccgcaattgaagccatggctgcagtgtttggcggcactcagagcctccacaccaattcctttgatgaagcactgggtctgcccaccgtgaaatcggcaagaatcgcccgaaacacgcagattatcatacaagaagaatcagggattcctaaggtggcagatccttggggtggatcgtacatgatggaatgcctcaccaacgatgtgtacgatgcagcgcttaagctgattaatgaaattgaagaaatgggtggaatggcaaaggcagtcgcagagggcatccccaagctccgcattgaagaatgtgccgcaaggagacaagcacgaatagatagcggatcagaggtcatagtcggggtcaacaaataccagctggaaaaagaagatgccgtcgaagtgctggcaatcgacaacacgtctgtgcggaacagacaaatagaaaagctgaagaagatcaagagttccagagatcaagcactggcagaaagatgtctggccgcactgactgaatgcgcggcatccggagacggcaacatccttgcacttgccgtggacgcatccagagctcgctgtactgtcggagaaattaccgacgctctcaaaaaggtgtttggtgagcataaggcaaacgaccgcatggtcagtggagcatacagacaagagttcggggaatcgaaggaaatcaccagcgcgatcaaacgcgttcataagttcatggagagagaagggcgacgtcctagacttctggtggccaagatggggcaagatgggcatgaccggggagcaaaggtcatagcaactggctttgcagacttgggcttcgatgtggatataggccctctttttcaaaccccgcgggaggtcgcacaacaggcagtggatgccgacgtccacgcagtcgggatctcaactcttgcagctggtcataaaactctcgtgccagagcttatcaaagaacttaactctctgggcagaccggatattctcgtcatgtgtggcggagtgattccacctcaggattacgaattcctgtttgaagtgggggtttcaaacgtgttcggtcctggcacccgtattcctaaggcagcagtgcaggtgctggacgacattgaaaagtgccttgaaaagaagcagcaatccgtg

SEQ ID NO: 16679 - DNA, 2250 bp, synthetic construct
  misc_feature 1..2250: note = source = /note="Description of Artificial Sequence: Synthetic coding sequence"
  source 1..2250: mol_type = other DNA
atgctccgggcaaagaatcagctgtttctcctgagtccgcattatctgcgccaagtgaaagagtcgtctggaagcagactgattcaacagcgcctgctccaccagcaacagccactccatcccgagtgggctgccctcgctaaaaagcagctcaagggaaagaacccagaggatcttatctggcacacgccagagggaatttcaatcaaacctctatatagtaagcgcgacacaatggacttacctgaggaactgcccggagtgaagccatttacaagaggtccatatccgacaatgtacaccttccgcccttggacgattcgtcagtacgcgggattcagcaccgttgaagagagcaataagttttacaaggacaatataaaagctggccagcagggcctgagcgtggccttcgacctcgctacacatcgtggctacgatagcgacaatccacgagtacgtggcgacgtgggcatggccggagtggccattgacaccgtcgaggacacaaaaatcctcttcgatggcattcccctggagaaaatgtccgtgagcatgacgatgaacggggcagtcattcctgtcttggccaactttatcgtgacaggagaggagcaaggcgttcccaaggaaaaactgacgggtacaattcagaatgatatcctcaaggaattcatggtccgaaatacttatatttttccgccggagccttctatgaaaatcatcgcggacatttttgagtacaccgcaaagcatatgccgaaatttaacagcataagcatatccggatatcacatgcaagaggccggcgctgacgcaattctggagctcgcatataccctggcggatgggcttgagtactcccgaaccggactccaagcaggtctgaccatagatgagtttgccccccgtctgtcattcttctgggggatcggcatgaacttctacatggaaatagcaaagatgagagccggacgcaggctctgggcccaccttattgaaaagatgttccagccaaagaactccaaatcccttctgctccgcgctcactgccagacctccgggtggtccctgacagagcaggatccctataataacatcgtccgcaccgccatcgaggctatggctgctgttttcggaggcacccagagtctccacaccaactctttcgacgaggctctcggtctgcctaccgtgaagtcagcgcgcattgcccggaatacacagattatcatacaagaggaatccggcatacccaaggttgccgacccctgggggggaagttatatgatggaatgtctgacaaatgacgtgtatgacgcagcattgaagctgattaacgagatagaggagatggggggcatggccaaggccgtggccgaaggcatccccaaactccgaatcgaagagtgtgcagctagacgacaagcaagaattgattcaggaagcgaagtgatcgtaggagtaaataagtaccaactggagaaggaggacgctgttgaagtcttggccattgataacactagtgttcgaaatcgacaaatcgagaaactgaaaaagattaagagctcaagggatcaggccctggccgagcgctgtctcgctgccttaacggaatgtgctgctagtggcgatggcaatatcctggcactggccgtcgacgcatccagagcgaggtgcacagtcggagaaattactgatgccctgaagaaggtgtttggcgagcacaaagctaacgatcgtatggtttcaggggcctaccggcaggaatttggagaaagcaaggagattacctcagcaataaagcgtgtgcataagtttatggaacgagaggggagacggcctagattattggtggctaaaatgggtcaggacggccacgaccgaggagccaaggtcatcgcaacagggttcgccgatctagggttcgacgtcgatatcggaccgctgttccaaacaccccgcgaagttgcacagcaggctgtggatgctgacgtacacgctgttggaatctcgactcttgcagccggacacaagactctggttcctgagctaatcaaggagctcaattcccttggtcgccctgacattctagtaatgtgtggcggagtcattccaccacaggactatgagttcctgtttgaggttggtgtgagtaacgtgttcgggccgggaacaagaatacctaaggctgccgtacaggtgcttgacgacatcgaaaaatgcctggaaaagaagcaacagtccgtt

SEQ ID NO: 16680 - DNA, 2250 bp, synthetic construct
  misc_feature 1..2250: note = source = /note="Description of Artificial Sequence: Synthetic coding sequence"
  source 1..2250: mol_type = other DNA
atgttaagggctaaaaatcagctgtttttgctcagtccacactatttacgtcaggtgaaggagtcaagcggatcccggttgatccagcagcggttgctacatcagcagcaacccctgcacccagagtgggctgcactcgcgaagaagcagctcaagggaaagaatcctgaggatctgatttggcacacaccggaaggcatcagtattaaacctctgtatagcaaacgggacaccatggacctaccggaggagcttccaggagttaaaccctttactagagggccctatcctaccatgtatacattccggccgtggacaattagacaatacgctggcttttctactgtggaggagtcaaacaagttttataaggataatatcaaagcggggcagcagggactgtctgtggcattcgacttagctacgcaccgtgggtacgatagtgacaatccaagggtgcgcggggatgtgggcatggccggtgtggccatcgacaccgtcgaagacacaaaaatcctcttcgatggaatccccctggagaagatgagcgtcagtatgaccatgaacggcgcagtaatacctgtcctcgctaacttcatcgtgactggagaggagcagggggtgccaaaggagaaactcactgggacaatccagaacgacatactcaaagagttcatggtccggaatacatacatctttcctcctgaaccctctatgaaaatcatcgctgacatcttcgagtacaccgctaaacacatgcccaagtttaacagtattagtatttccggctaccacatgcaggaggccggtgctgatgcgatcctggaactcgcttatactctagccgatggactcgagtattcacgcacaggactgcaggccgggctaaccatcgatgagtttgctccccgacttagctttttttggggtataggaatgaacttctatatggaaattgcaaagatgagggccggaaggcgcctgtgggctcacctgattgaaaagatgttccagccaaagaacagcaagtcactcctgctgagagcacattgtcaaacaagcggttggagtctcacagagcaggatccgtacaacaatatagtcagaacggcgattgaagctatggctgcagtttttggaggtacacagtccctacataccaattcatttgacgaggccctcggacttccaactgtgaaatctgccagaatcgcccgcaacacacagatcataattcaagaggagtctggaatcccaaaagttgcagacccatggggcggatcctacatgatggagtgtctgacaaacgatgtctatgacgccgctcttaagctgattaacgagattgaggagatgggtggaatggctaaggctgtggccgagggcattcctaagctgcggattgaagaatgcgcagcccgaaggcaggctcgcatcgatagtgggtccgaggttattgtgggcgttaacaaatatcaactagaaaaggaggatgccgtggaagtgctggctatcgacaacacatctgtaaggaacagacagatagaaaaactgaagaagatcaagtctagtcgcgatcaagcactggcggagaggtgtctggctgcgttgacagagtgcgcagcgagcggcgacggtaacatccttgccttggcggtggacgcatccagggctcgttgtaccgtgggcgaaatcacagatgcactaaagaaggtgttcggagagcataaggccaatgaccggatggtctcaggagcctaccgacaggaattcggggagtcgaaagagataacgtcagcaatcaaacgagtgcacaagttcatggagagggagggcaggcgcccacggctgctcgtggctaaaatgggacaggatggccacgatcgcggtgctaaagttattgctaccgggttcgccgacttggggttcgatgtggacatcgggccgttgttccagaccccaagggaagtcgcacagcaagctgtggacgccgacgtccatgccgtcggcatttcaactctcgccgcaggccataaaacactcgtccccgagttgatcaaggaacttaattcactgggccggccggatatacttgtgatgtgcggcggggtgattcctccacaagattatgaatttctattcgaggtgggtgtgagcaacgtgtttgggcccggtacaaggattcccaaagctgctgtccaggtcttggacgatattgaaaagtgtctggaaaagaagcagcagtccgtt

SEQ ID NO: 16681 - DNA, 2250 bp, synthetic construct
  misc_feature 1..2250: note = source = /note="Description of Artificial Sequence: Synthetic coding sequence"
  source 1..2250: mol_type = other DNA
atgctccgtgctaagaatcaactcttccttctctcgcctcattaccttaggcaggtcaaggagagcagcggatcgagacttatacagcagagactgctgcaccaacagcaaccccttcatcctgaatgggcagcactcgcaaagaaacaactcaaaggcaaaaacccagaagatctcatatggcatacccccgaaggcatttctattaagccactttattccaaacgggacaccatggatctgcctgaagaactgcctggcgtaaagccatttaccaggggaccttaccctactatgtacacttttcgaccctggaccattagacaatacgccggcttctcaaccgtggaagaaagcaacaaattctacaaggataacatcaaagctgggcagcagggactctcggtggcatttgatctggcaactcatagaggatatgattcggataacccaagggtccgcggcgatgtgggaatggcgggagtggcaattgacactgtggaggataccaagattctgttcgatggtatacctttggagaaaatgtctgtgagcatgaccatgaatggtgcagtcattccagtgctggccaactttattgttaccggcgaggaacaaggagtgccgaaagagaagctgacgggaactatacaaaacgatatactgaaggaattcatggtgagaaacacctacatttttccacccgagccaagcatgaagattatcgccgacattttcgaatacactgctaaacacatgccaaaattcaactctatatcgatctccggataccatatgcaagaggccggtgcagacgccatcctggaactcgcgtacacgctggcagatggcctggaatatagcagaaccggactccaggcgggactcactattgacgagttcgcgccacgcctgtcattcttttggggaattgggatgaacttctacatggaaatcgccaagatgcgtgcaggaaggcgcctttgggcgcacctgattgagaaaatgtttcaacccaaaaactccaagagccttctcctccgggcccattgtcaaacctccggttggtcgctgaccgaacaagatccttacaacaatattgtgagaactgccatcgaagccatggcggcagtctttggcggtacccaatcccttcatactaatagcttcgatgaggctctcggtctgccgaccgtcaagtcagcacggatagccagaaacacgcagataatcattcaagaagaatcaggtattccgaaagttgccgacccatggggaggtagctacatgatggagtgtctgacgaacgatgtgtacgacgctgctctgaagttgattaacgaaattgaagagatgggaggaatggccaaggccgtcgcagagggcatccctaagctgcgtattgaggaatgcgcagcccgtagacaagcaaggatcgacagcggaagcgaagtgatagttggtgttaacaagtaccagctggagaaagaggacgcggtggaggtgctggctatcgataacacttccgtgcgcaatagacaaattgagaagctgaagaaaatcaaatcctccagggatcaggcactcgcagaacgctgcctggccgccctgactgaatgtgcagctagcggggatggaaatatcctggcccttgcggtcgatgcctcccgcgcacgatgtactgtgggagagattaccgacgcgctgaaaaaggtgtttggagagcacaaggcaaatgatagaatggtgtcgggggcttacagacaggaatttggagaatcgaaggaaattactagcgctattaagcgagtccataagttcatggagcgtgagggccgacgcccgagattgctcgttgcaaaaatggggcaggacggtcacgatagaggggcaaaggtgattgcaaccgggtttgcagatctgggcttcgatgttgatattggcccacttttccagactccacgagaggtcgcccagcaggcagtggatgcggatgtgcatgcagtgggaatatccacccttgccgcaggacacaagactcttgtgccagaattgatcaaagaactgaacagcctgggtcgtccggatattcttgtgatgtgcggtggcgtcatccccccgcaagactacgaatttctgtttgaagtgggagtctcaaacgtgtttggacccggaactcggattcccaaagccgcagtccaggtccttgatgatatcgagaagtgcctcgaaaagaagcagcaatccgtc

SEQ ID NO: 16682 - DNA, 2250 bp, synthetic construct
  misc_feature 1..2250: note = source = /note="Description of Artificial Sequence: Synthetic coding sequence"
  source 1..2250: mol_type = other DNA
atgctgagggctaagaaccaactgttcctgctttccccccattacctgagacaggttaaggaatcaagcggtagtaggctgatccagcaacgtctcttgcaccagcaacaacccctgcaccccgaatgggctgctttagccaagaagcagctgaaaggcaagaaccccgaggaccttatctggcatactccagaaggcattagtataaaacctctctacagtaagcgagacaccatggatttaccagaggagctgcctggcgttaaacctttcactagaggcccatatcccaccatgtatacatttcgcccctggaccatacgacagtatgctggttttagtactgtcgaggagtccaacaaattctacaaagacaacattaaggccggacagcagggcctgtccgtggcctttgatctggccacccatcgcggctatgactctgataatccccgggtcaggggggatgtgggcatggctggcgtggccattgacacagtggaggatacaaaaatactattcgatggcattccgctagaaaaaatgtccgtgagtatgaccatgaatggagcagttatcccagttctggcaaattttatcgtgacaggcgaggagcagggcgtcccaaaagaaaagctgacaggaactatccagaatgatatcttaaaggagttcatggtgagaaatacctatatcttcccacctgagcccagtatgaagatcatcgctgatattttcgagtatacagcaaaacacatgcctaagtttaatagcataagcatcagcgggtaccacatgcaggaagcaggtgccgacgcaattctggaactggcttacacactggcagacggcctggagtacagtcgcactggactgcaagctggcctgaccatagatgaattcgcacctagactttcattcttctgggggattggtatgaacttttacatggaaatagctaaaatgcgggccgggagaaggctgtgggctcatctgatcgaaaagatgttccagccaaagaattccaagagtctacttctcagagcccattgccagacctccggctggagtctcaccgagcaggacccttataacaacatcgttcggaccgctattgaggctatggccgccgtgttcggcggcactcagagtttgcacaccaactcctttgatgaggctctcggcctgcccacagttaagtccgctagaattgcccggaatacccaaatcattattcaggaggagtccgggataccgaaggtcgctgacccctggggcggctcatacatgatggagtgtttaaccaacgatgtatacgatgctgccctcaagctgataaacgagatagaggagatgggcggcatggctaaagccgtggctgaaggcatacccaagctgaggatagaggagtgtgctgcacgcaggcaagcccgtattgattccgggagcgaggtgatcgtgggggtgaacaagtatcagctggaaaaagaggatgccgtggaagtcctggcaatcgataatacatcagttaggaatcggcaaattgaaaaactgaaaaagataaaatcttctcgcgaccaggctctggccgagcgctgccttgcagccctgactgaatgcgcagctagcggcgacgggaacattctagcactggccgtcgacgcaagccgcgctagatgtaccgtgggggaaataacagacgccctgaagaaagtttttggcgaacataaggctaacgatcgaatggtgtctggcgcctaccgtcaggagttcggcgagtcaaaggagattacctcagccataaagcgggtgcacaagtttatggaaagggaagggagacgccccagattactggtggccaaaatgggccaggacggccacgacaggggcgccaaagtcatcgctaccgggttcgcagacctcggctttgacgtggacatcggacccctattccaaacaccgagggaggtcgcccagcaagccgtggatgcagatgttcacgccgtgggcatctccacactggctgccgggcacaaaaccctggttccagaactcattaaggaactaaattctcttggaaggcccgatatactggtcatgtgtggcggggttattccaccacaggactacgagtttctcttcgaagtgggtgtctccaatgtcttcggccctggaactcggatcccaaaggcagccgtccaggtcctggacgacatcgaaaaatgcctagagaagaaacagcagagcgtg

SEQ ID NO: 16683 - DNA, 2250 bp, synthetic construct
  misc_feature 1..2250: note = source = /note="Description of Artificial Sequence: Synthetic coding sequence"
  source 1..2250: mol_type = other DNA
atgctgagggctaagaaccagctgtttctgctgagccctcattatcttaggcaggtcaaagagagctcaggcagtcgccttatacagcagcgactcctccaccagcaacagccccttcaccccgaatgggcagcactggccaagaagcagcttaaagggaagaatccagaggatttgatatggcacaccccggaagggatctccataaaaccgctgtacagcaagcgggacactatggatcttcccgaggagctgccgggagtgaagccattcacacggggaccatatcccaccatgtacacttttagaccatggacgatacggcagtatgcaggattcagcaccgtggaggagagcaacaaattttataaggacaatatcaaagcagggcaacagggattgagcgttgcatttgacctggcgacccatagaggttatgactcagacaaccctcgcgtgagaggggatgttggcatggctggggtggctattgatacggtggaggacaccaaaattttgttcgatggcatcccgttagagaagatgagtgttagcatgacgatgaacggagccgtgattccggtcttggctaattttatcgtaactggggaagaacagggggtgccaaaggagaagttgactggtaccatccaaaatgacattctcaaggaatttatggtgagaaatacctacattttccctcctgaaccttctatgaagattattgccgacatctttgagtatacggccaagcacatgcccaaattcaattctatctccatcagcggctaccacatgcaggaggccggagccgacgcaatcttagagctcgcttacactctggccgacggtcttgagtactcacggacgggactccaagcaggattaaccatcgacgaattcgcaccccgtctgtcattcttttgggggattggcatgaacttctacatggagatcgccaagatgcgagccggcagacgcttatgggcgcacttgatcgagaaaatgtttcagcccaagaactccaagtctctgctgcttcgggcacattgtcagaccagtggctggtcactgacagaacaggatccttacaataatattgtgcgaaccgctattgaagccatggccgctgtgttcggaggcactcagtcactgcacaccaattcttttgacgaggccttagggctcccaacagtgaagtcagctcggattgctcgtaacacccagattattatccaagaagagtctggtatccctaaagtagccgatccttgggggggtagttatatgatggagtgcctcacaaatgacgtttacgatgccgccttgaagctcatcaatgaaattgaggagatgggcgggatggccaaggcggtggcagaggggatacccaaattgcgcattgaagagtgtgccgcgcgccgtcaggcacgcatcgattccggaagtgaggtcattgtgggcgtcaataaataccagctggagaaggaggatgccgtggaagtgctagccatcgacaatacgtcggtgcgtaataggcagatagagaagctcaagaaaattaagagttcgcgcgatcaggcactggccgaacgctgtctggctgcgttgacagaatgcgctgcttctggcgatggaaatatcttggcactggctgtggatgccagccgtgcacgctgcacagtaggcgaaatcaccgatgccttgaaaaaggtgtttggagaacataaggctaatgaccggatggtgagcggagcatatagacaagagttcggcgagagcaaagaaataacttctgccatcaaacgcgttcacaaattcatggagcgagaaggtcgaagaccccggctgctcgtggccaagatggggcaggacggtcatgaccgaggtgcaaaggtgatcgctacggggttcgcggatctcggctttgacgttgacatcgggccgttattccaaactcctagggaggtcgctcagcaggctgtcgacgctgacgtgcatgccgtgggcattagtactctcgccgctggccacaagactctagtccccgagctgatcaaagagcttaactccctcggtcgccccgatatcctagtgatgtgtggaggcgtgattccgccacaggactacgaatttctcttcgaggtcggtgtgagtaatgttttcggaccgggaaccagaattcctaaagcagctgtacaggtcctcgacgacatcgagaagtgtctcgaaaagaaacaacagtccgtt

SEQ ID NO: 16684 - DNA, 2250 bp, synthetic construct
  misc_feature 1..2250: note = source = /note="Description of Artificial Sequence: Synthetic coding sequence"
  source 1..2250: mol_type = other DNA
atgctgcgggcaaagaaccagctgttcctcctgtccccgcattacctgcgccaggtcaaggaatcatcgggcagccggctgatccagcaacgcctgctgcaccagcagcaacctctgcaccccgaatgggcagctctggccaagaagcaactcaaagggaagaacccggaggacctgatctggcatacgcctgaaggaatctcgatcaagccgctgtactccaaaagggacacgatggatctgcccgaagagcttcccggtgtgaagccgtttacccgcggaccgtaccctactatgtacacttttcggccctggaccattagacaatacgccggcttctccactgtggaggaatccaacaagttttacaaagacaacatcaaggccggccagcagggtctgagcgtcgcttttgacctggctactcaccgaggttatgatagcgacaatccgcgcgtgcgcggggacgtggggatggccggggtggcaattgacaccgtcgaggatactaagatactgttcgatggaatcccattggagaagatgtctgtgagcatgaccatgaacggcgccgtgattcctgtgctggccaatttcatcgtaactggagaagagcagggagtgccgaaagagaagctcaccggaaccatccagaatgatatcctgaaagagtttatggtgagaaacacttacattttcccgcctgagccatcgatgaagattatcgccgacatcttcgagtacacggcaaagcacatgcctaagttcaactctatcagcatctcaggataccatatgcaagaggcgggagccgacgcgatcctcgagctggcctacacccttgcagacggtctggaatactcgcgaactggcctgcaagcagggctgactatcgatgaattcgccccacgcctctccttcttctggggaataggaatgaatttctatatggaaattgcaaagatgagagctggcagacgcctgtgggcccatttgatcgagaaaatgttccagcctaaaaactccaaatcccttctgttgcgcgctcactgccaaacgagcggatggtccctcaccgaacaagatccgtacaataacatcgtgcgcaccgccatcgaggctatggctgcagtgttcggtggcacccagtcactgcacaccaacagcttcgacgaggcgctcggcctgccgaccgttaagtctgcacgcatcgcccgcaacacccagattatcatccaggaggaatcgggaattccaaaggtcgccgacccgtggggtggatcttacatgatggagtgtctcactaatgacgtgtacgacgcggccttgaagctgattaacgagatcgaagaaatgggaggcatggccaaagcagtggctgaaggcatcccgaagttgaggattgaggaatgcgctgcaaggcggcaggcgagaatcgactccggttcggaagtgatcgtgggcgtcaataagtaccagttggaaaaagaagatgcagtggaagtcctcgcgatcgataacacttcggtccggaacaggcaaatcgaaaagctgaagaaaatcaagtcgtcacgcgatcaggcgcttgctgaacgctgcctggccgccttgacggaatgcgcagcatcaggggatggaaacatcctcgccctggccgtcgatgcgtcccgggcgcggtgcactgtgggagagatcactgacgcgctgaagaaggtgttcggagagcacaaggccaacgaccggatggtgtccggagcctatagacaagaattcggagaatccaaggagatcacttccgcaatcaaacgagtccataagttcatggaaagagagggacggcgtccaagactcctcgtggccaagatgggacaggacggccacgacaggggcgccaaggtgatcgcaactggattcgcggacttgggttttgatgtagacataggtccactcttccagaccccacgcgaagttgcgcagcaggctgtagacgcggacgtgcatgcagtgggaatctcaactctcgcagctgggcataaaactctggttccggagctgattaaggagctcaattcgctcggccggccagacatccttgtgatgtgtggcggggtgatacccccgcaagactacgaattcttgtttgaagtgggagtcagcaatgtgttcgggccgggcaccaggattcccaaagctgcagttcaagtgctcgacgatatcgaaaagtgcctggagaaaaaacagcaatcagtg

SEQ ID NO: 16685 - DNA, 2250 bp, synthetic construct
  misc_feature 1..2250: note = source = /note="Description of Artificial Sequence: Synthetic coding sequence"
  source 1..2250: mol_type = other DNA
atgctcagggcaaaaaaccagttgtttttgttgagcccacattatctgcggcaggttaaggaatcttctggcagccgtctgattcagcagagactcctgcatcaacagcagcctctgcatccagaatgggccgccttggccaagaaacagcttaagggtaagaacccagaggacctgatctggcacacacctgaggggatctcaataaagccactgtactcaaagagggacactatggacctgcctgaggagcttcctggggtcaaaccttttacccgcggaccctatccgacgatgtacacttttaggccttggaccattcggcaatacgctggcttctctaccgtagaggaatcaaacaagttctacaaggacaacattaaggcagggcaacaggggctctctgtggccttcgaccttgcgacacatcgggggtatgactctgacaaccccagggtgcggggggatgtgggaatggcgggtgtggctatagatacggtggaggacaccaaaatcctgttcgatgggattccacttgagaaaatgagcgtgagtatgacgatgaacggggccgtgatcccggttttggcaaatttcatcgtcactggtgaggagcagggagtgcccaaagaaaaattgacgggcactatccagaacgatatcctgaaggagttcatggttcgcaacacgtatatcttcccaccagagccgtcaatgaagatcatcgccgatatcttcgagtacacagccaagcatatgccaaaattcaattcaatctcaatttcaggctatcacatgcaggaggctggggctgatgctatcctcgagttggcgtatacacttgcagacggcctagaatattcccggacggggctgcaggctggcctcacaatagacgaatttgctcctaggctgagtttcttctggggtattggcatgaatttttacatggagatcgccaagatgcgtgctggccgacgtctttgggcccacctgatcgaaaagatgttccagccgaagaattctaagtccctccttctgagggcccattgtcagacatccgggtggtcattgacagagcaggatccctacaacaatatagtgcgaacagccattgaggctatggctgccgtgtttggaggaacccagagcctgcatacaaactcctttgatgaagcactagggttgcccactgtgaaatccgcgcgcattgctagaaatacacagattattatccaggaggagagcggcattcctaaggtcgctgatccctggggaggttcatatatgatggaatgccttacaaacgacgtgtatgatgctgcgctcaagctcattaacgagatcgaagaaatggggggcatggccaaagccgtggccgaaggcattccaaagctgaggattgaggagtgcgccgcaagaagacaagccagaatagactctgggtcggaagtgatcgtgggcgtgaataaataccagctggaaaaagaggacgcagtagaggtgctggcaattgataacacctcagtacgtaataggcagatagagaaactgaagaagataaaatctagccgggatcaggcactcgccgagaggtgcctagcagctttaacagagtgcgccgcgagcggggacggtaatatcttggcccttgccgttgatgcttccagagcaagatgtacagtcggagagattacggatgccctcaaaaaggtgttcggtgagcataaagccaacgatcgcatggtgtccggtgcataccgacaagagttcggtgagtccaaagagattaccagcgcgataaaaagggtgcacaagtttatggagagagagggccgacgtccccggctgttggtagccaagatgggtcaagacggtcacgacaggggcgcaaaggtgatcgccaccggctttgccgatcttgggttcgacgttgatataggtccgttattccagacacctcgcgaggtggctcaacaggcagtagacgccgatgtacatgctgtaggtatctctaccctggcggccggacacaagactctggtgccagagcttatcaaggaactgaattccctgggacggcctgatatcctggtgatgtgcggaggagtgattcctccccaagattacgagtttctattcgaagtcggtgtgtctaacgtgttcggaccgggtacaagaatccctaaggcagcagtacaggtattagacgacatcgagaaatgtctagaaaaaaaacagcagtctgtg

SEQ ID NO: 16686 - DNA, 2250 bp, synthetic construct
  misc_feature 1..2250: note = source = /note="Description of Artificial Sequence: Synthetic coding sequence"
  source 1..2250: mol_type = other DNA
atgttgcgcgccaaaaaccagttgtttctgctgtccccacactatctgcgacaggtgaaagaatcatcggggagtaggttgatacagcagcgcttgttacatcaacagcagccccttcaccctgagtgggccgctctggcaaagaagcagcttaagggcaagaatcccgaagacctgatctggcacacccccgagggtattagtattaagcccctctactccaaacgggacacaatggacctccccgaggagctgccgggcgtgaagccatttactcgcggcccttatcccaccatgtacactttcaggccgtggacgatccgtcagtacgcaggatttagcaccgtggaggagtcaaataagttttacaaggacaacatcaaagcaggccagcagggtctgagtgtggccttcgatctcgctacgcacagggggtacgactctgataatccacgggttcgcggcgatgtcggaatggctggggtcgcgatagacaccgtcgaggataccaagatcctgtttgacggtatccctttggaaaagatgagcgtatctatgactatgaatggcgctgtcatccctgtgttggccaactttatcgttacaggagaagaacagggcgtgccaaaagaaaaactgactggcaccattcagaacgatatactgaaggagttcatggtcagaaacacctatatcttcccgcccgagccatccatgaagataatcgcagacatcttcgaatatacagccaagcacatgcctaagttcaacagcatctccatcagtgggtaccacatgcaggaggccggagccgacgccatcctagagctggcctatacacttgccgacggtctagagtattcgagaactggacttcaggccggcctcacaattgatgagttcgccccccggctgtcctttttttggggaattgggatgaatttttacatggaaattgctaaaatgcgtgccggcaggcgcctgtgggcacacttgattgaaaaaatgtttcagcctaaaaacagtaagagtctgctgctacgtgcgcattgccagacatcggggtggtccctaacggagcaggacccctacaataacattgtacgcactgccattgaagccatggccgcagtgtttggggggactcaatctttgcacaccaattcattcgatgaggctttaggcctgcctactgtcaaatccgcgagaatagcacggaacacgcaaatcataattcaggaagagtctggcattcctaaggtggcagacccctggggaggcagttatatgatggagtgtttgaccaatgatgtctacgacgccgccttgaagctgattaatgagattgaagaaatggggggcatggccaaggctgttgctgaggggattccaaagctgaggatcgaggaatgtgccgctcgtcggcaggcccggatcgactccggctctgaagtgattgttggcgtgaacaagtaccagctggagaaggaagacgctgtggaagttttggccattgacaatacaagcgtgcgcaaccgccagatcgagaagctaaagaagattaagtcgtcaagggaccaggcattagccgagaggtgccttgccgccctaactgagtgcgcagcaagtggagatggcaacatactagcactcgccgtggatgcctccagagcacgttgcactgtaggggaaatcactgacgcactgaagaaggtgtttggagagcacaaagccaacgacagaatggttagcggggcgtatcgccaggaattcggagagagcaaagagatcacatcagctatcaagagagtccataaattcatggaacgagagggtcggagacccagactgctagtggctaaaatgggacaggacggccatgaccgaggagctaaagtaattgcaacgggttttgcagatttaggttttgacgtggatatcggacccctgttccaaacccctcgggaagtggcccagcaagccgtagacgccgacgtgcatgccgtcggtatcagcactctggccgccggacataagacactggtccccgagctcattaaagagctaaactccctcggccggcctgatatcctggttatgtgtggcggagtgatcccccctcaggactatgaattcttgtttgaggtcggagtctcaaacgtttttggcccgggcacccgaattccgaaagccgcggtgcaggtcttggatgacatcgagaagtgtctggagaaaaaacagcagtcggtc

SEQ ID NO: 16687 - DNA, 2250 bp, synthetic construct
  misc_feature 1..2250: note = source = /note="Description of Artificial Sequence: Synthetic coding sequence"
  source 1..2250: mol_type = other DNA
atgctccgcgccaaaaaccaactttttcttctctcaccgcactacttgcggcaggtgaaggagtcctcagggagtaggctaatccagcagaggctgttgcaccagcagcaacctctacatccagaatgggcggcccttgctaaaaagcagctgaagggtaagaatccagaggacctcatctggcatacaccagaaggcatctccatcaagcccttgtatagcaagcgggacacaatggacctgcctgaggagctccctggcgtaaaaccttttacaaggggcccttacccgactatgtacactttccgaccttggaccatacgacagtacgctggttttagcaccgttgaagagtcgaacaagttctataaggacaatattaaagctggacagcaggggttatcagtagctttcgacctggcaacacaccgagggtacgactctgataatccccgcgttcgaggagacgtgggcatggccggggtggcaattgacactgtggaggacaccaagattctctttgatggtatcccgctggagaagatgtccgtcagtatgacaatgaatggtgccgtgattcccgtgctagcaaatttcattgtgacgggggaggagcagggagtgccgaaagaaaagttaacgggcaccatacagaacgatatccttaaggaattcatggttagaaacacgtatatctttccccctgagccctcaatgaaaatcattgcagatatctttgagtacacagccaagcacatgcctaagttcaactcgatcagcatctccggttatcacatgcaggaagcgggagccgacgctatcctggagctagcttacactttggcagatggtctcgagtatagcagaacaggtttgcaggctggcctcacgatcgacgaatttgcgccacgattgtctttcttctggggcatcgggatgaatttctatatggaaattgcgaaaatgcgcgcgggtcgcaggctttgggctcatctcattgaaaagatgttccagccaaaaaacagcaaatccctccttctgagagcacattgtcaaacatcgggctggagtcttactgaacaggacccatataacaacatcgtgagaacagctattgaagccatggccgcggtttttgggggaacacaatcactgcatactaactcattcgatgaggctctcggtttgccgaccgtcaaatcggccaggatagcccgcaatactcagatcataatccaggaggagtctggaatccccaaggtcgctgatccttggggcgggagctacatgatggagtgcctcaccaatgacgtgtatgacgctgctcttaaactaatcaacgagatcgaggagatgggcgggatggcaaaagccgtagctgaaggtattcctaagttgcgaatcgaagagtgcgcagctaggaggcaggcaagaatagatagcggatctgaagtgatcgttggagtgaacaagtatcagctggagaaagaggatgctgtggaggtgttggccatcgacaatacaagcgtgagaaatagacagatcgaaaagttgaaaaaaattaaatccagtcgagaccaggcactagcagaaagatgcctggctgctctgaccgagtgtgctgcctcaggagacgggaatattctagctttggccgtggacgcctcccgagccaggtgtacagtgggtgaaataaccgatgcgcttaagaaagttttcggcgagcataaggcgaatgacaggatggtttcaggagcataccgccaagagtttggcgagagtaaggagataacaagcgccatcaagcgcgtgcataagttcatggagcgagaggggagaaggcctcggctactagtcgctaagatgggtcaggatggccacgaccggggcgccaaagtcatcgctacgggctttgccgatctaggcttcgatgtggacataggaccccttttccaaacaccaagggaggtggcccagcaagccgtagatgcagacgtacacgctgtcggaatatccaccctggccgccggtcataagaccctggtgcctgagctgatcaaagagcttaacagtctggggaggcctgatatattggttatgtgtggaggggtgattcctccgcaagattacgagtttctcttcgaggtaggtgtgagtaatgtgtttggtcctgggaccaggatccccaaggctgccgtccaggtcctggacgacatcgagaaatgcctggaaaagaaacagcagtccgtg

SEQ ID NO: 16688 - DNA, 2250 bp, synthetic construct
  misc_feature 1..2250: note = source = /note="Description of Artificial Sequence: Synthetic coding sequence"
  source 1..2250: mol_type = other DNA
atgctgagggcgaaaaaccagctgtttctgctgagcccacattatctccgacaagtgaaagagtcctccggctcccgactcattcaacaaaggcttctgcaccaacagcagcctctccatcccgaatgggccgcgctggcgaagaagcagcttaaggggaaaaaccccgaggacctgatttggcacactcctgagggcatctcaatcaagcctctctatagtaagagagacaccatggatctgcccgaagagctacctggcgtgaagccctttacacgtggcccatatcccaccatgtacacctttaggccatggactattaggcagtacgcaggattttctactgtggaggagtcgaacaaattctataaagacaacatcaaagctggccaacagggcttgagcgtggcattcgatttagcgacacacagaggttatgatagcgacaatccacgcgtgagaggcgacgtggggatggcgggcgtggcaatagacacagtcgaagatactaaaatcctgttcgatggcatccctttagagaaaatgagcgtcagcatgactatgaacggcgccgtgattcctgtacttgctaacttcattgtgacgggtgaggaacaaggggtgcctaaggaaaagctgacgggcactattcaaaacgacatcctaaaggaatttatggttagaaatacgtacatctttccacccgagccttctatgaaaataatcgctgacattttcgagtacacagccaaacacatgcctaagttcaactcgatctccatctccggttatcacatgcaggaagctggggcagatgccatcctggaattggcatacaccctggcagacggattggagtactctaggacgggtctgcaggccggactgacaattgatgaatttgccccccgcctgtcatttttttggggcataggaatgaacttttacatggagattgctaagatgagagccgggcggcggttatgggcacacctcattgagaaaatgttccagcctaaaaactcaaagagtcttcttctgcgcgcacattgccagacctccggctggtccctaaccgaacaggacccctacaacaatatcgtgcgtacagctatcgaagccatggctgctgtgttcggaggtacgcaatctctccacacaaactcattcgatgaggctctaggtctgcccaccgttaagtcagcccgtatcgctagaaatacccagatcatcattcaggaggagtccggtattcccaaggtggctgacccatggggtgggagctatatgatggagtgtctcacaaacgatgtgtatgacgcagcattgaaactgattaacgaaattgaagaaatgggaggtatggccaaagctgtagcagaagggattcccaagctgcgcatagaagagtgcgccgccagacgccaggcgcgtattgacagtggaagcgaggttatagttggggtgaacaagtaccagcttgagaaggaagacgctgtggaggtgctagctatcgataacacttccgttcgcaaccggcaaatcgaaaaactgaaaaaaattaagagcagtcgtgatcaggctctggccgagagatgtcttgcggccctgaccgagtgcgccgcctccggagatggaaacatcctggccttagccgtggacgcgtcgcgcgcacggtgcacggtgggagagataaccgatgctctcaagaaggtctttggagagcataaggccaacgatcgcatggtatcaggcgcctaccgacaggaattcggagagtccaaagagatcacctctgccataaaacgagttcacaagttcatggagagggagggaaggagaccgaggctccttgtggccaagatggggcaggatggtcatgatcgtggtgctaaagtcatagctaccggattcgctgatttaggtttcgacgttgatatcgggccattatttcagacacccagagaggtcgcccagcaggccgtcgatgcagacgttcacgccgtcggaatttccactcttgccgccgggcacaagaccctcgtgccagagctcattaaagagctgaattcccttgggcggcctgatatcctggtcatgtgcggtggcgtgattcccccccaggactacgagttcctgttcgaggtgggcgtgtcaaacgtgtttggtcctggtactaggatcccgaaagccgcagttcaggtgttagacgatatagagaagtgtcttgagaagaagcagcagtctgtg

SEQ ID NO: 16689 - DNA, 2250 bp, synthetic construct
  misc_feature 1..2250: note = source = /note="Description of Artificial Sequence: Synthetic coding sequence"
  source 1..2250: mol_type = other DNA
atgctgagggccaagaaccagctttttctgctttcgccgcattacctgcgccaagtcaaggaaagctccggttcgcgtctgattcagcaacggttgctccaccagcaacagcctcttcatcccgagtgggcagcactcgccaagaaacaacttaagggcaaaaaccctgaagatcttatatggcatactccagaaggaatttcaattaagccgctgtactccaagcgggataccatggatctcccagaagagctgcccggtgtgaaacccttcaccaggggcccgtatccaacgatgtacacttttagaccatggaccatccggcaatacgcaggtttcagcactgtggaggaatcgaacaagttttacaaggacaacattaaggcagggcaacagggtttgtcagtcgcattcgatctcgccacccacaggggatatgatagcgacaaccctagagtgaggggagacgttggtatggcaggcgtcgctattgatactgtggaggataccaagattctgttcgacggaatcccgctggagaaaatgagcgtttcgatgaccatgaacggagccgtaatccctgtgctcgcaaatttcatcgtcactggtgaagagcagggtgtgcccaaagagaaactgactgggaccattcaaaatgatattctgaaggaattcatggtgaggaacacctacatattcccaccggagccaagcatgaagattattgcagacattttcgaatacaccgcaaagcacatgcccaagtttaactccatttccatttcaggataccatatgcaggaagcaggtgcagatgcgattcttgaactggcctacactctcgcagacggactggagtactcgaggactggcctccaggcaggactcactattgatgagtttgctcctcgactgagctttttctggggaattgggatgaacttctacatggaaattgcaaagatgcgtgcaggcaggcgcctgtgggcacatttgatcgagaagatgtttcaaccaaaaaactcgaagagccttctcctgcgtgcccattgtcaaacctctggatggtcccttaccgaacaagatccatataacaacatcgtgcgcaccgcaatcgaagcaatggcggccgtctttggtggaacccagtcacttcataccaattcgtttgacgaggcactggggcttccaactgtgaaatccgccagaattgcccggaacactcagattatcattcaagaggagtccggaattcccaaggtggctgatccgtggggaggtagctatatgatggagtgtctcactaacgatgtgtacgacgctgcacttaagctcattaatgaaattgaagagatggggggtatggcaaaggcagtggccgaaggaatccccaaattgcgcattgaagaatgcgcagcgcgccggcaagcacggatcgattctgggtccgaagtcattgtgggggtcaacaagtaccaactcgagaaggaggacgcagtggaagtgcttgccattgataacacgtcggtgcggaacaggcaaatcgaaaagttgaagaagataaagtccagccgggaccaggccctcgcagagagatgtctggccgctctgactgaatgtgcggcaagcggagacgggaacattctcgcactggcagtggacgcctccagagcacgctgtaccgtgggtgaaattaccgacgcactcaagaaagtgttcggagagcacaaggcaaatgacagaatggtgtcaggagcatacagacaggaatttggcgaatccaaagaaatcacgtcagcaattaagagagtgcacaagtttatggaacgagaaggacgaaggccacggttgcttgtggcaaaaatgggtcaagacggccacgatcgcggcgcaaaagtgattgctactggctttgccgatcttggatttgacgtggacataggcccgctgtttcaaacgccccgcgaagtggcacagcaagcggttgatgccgacgtgcacgcggtcggcatcagcacccttgcagcaggtcataagactctggtgccagaattgatcaaagagcttaattcgctcggccgtcctgacattctcgtgatgtgtggtggagtgatccctccccaagactacgaattcctgttcgaagtcggagtttccaatgtctttgggcctgggaccaggatcccaaaggcagcggtgcaggtgctggacgacattgaaaagtgtctcgaaaagaaacaacaatcggtc

SEQ ID NO: 16690 - DNA, 2250 bp, synthetic construct
  misc_feature 1..2250: note = source = /note="Description of Artificial Sequence: Synthetic coding sequence"
  source 1..2250: mol_type = other DNA
atgttgcgagctaagaatcagctgttcctcttaagcccccactacctgcgccaagttaaggaatcctcaggctcacgactgatccagcagcgtctcctgcatcagcagcaacctcttcaccctgagtgggcagctcttgctaagaaacagctgaaagggaaaaatccagaggatctgatctggcatacccctgaaggaatatccatcaaaccactatattcaaagcgggacacaatggatctgcctgaagagctgccaggtgtgaaaccgtttacccgcgggccgtatcccactatgtacaccttccgtccttggaccatccgccagtatgccgggttttctactgtcgaggagagcaataaattctataaagacaatatcaaggcaggacagcaggggctgtccgtcgcctttgatctggctactcaccgggggtatgacagtgacaaccccagggtgcgcggcgatgtcggaatggccggcgtggctatcgacactgtcgaagacacaaaaattctgtttgatggcattcctttggaaaagatgagcgtaagtatgactatgaacggcgccgtgattcccgttctggccaattttatcgtaacgggggaagagcagggtgtgccaaaggaaaaactcaccggtacaattcaaaacgatatactgaaagagtttatggtcaggaatacatatatctttcctcctgaaccctctatgaagatcatagccgatatattcgagtacacagcgaaacacatgcctaaatttaactccatctcaatatctggctaccacatgcaggaggcaggagctgatgccattctagagttggcctacacactagcggacggtctggagtacagtaggacgggactgcaggccggtctgacgattgacgagtttgccccccggttgtccttcttttggggtattggcatgaatttttacatggagatagccaagatgcgggctggacgaaggctgtgggcccacctgatcgaaaagatgtttcagccaaaaaactcaaaatccctgttactcagagctcattgccagacctctgggtggagtcttacagagcaggatccctacaacaacattgtgcgaacagcgattgaagcaatggcagccgtgtttggaggcacgcagtccctgcacacaaacagcttcgatgaggctctcggcctccccacagtgaaaagtgcgagaattgctcgcaacacacagatcattattcaggaagagtcaggaatccccaaggtggcggatccctgggggggctcctatatgatggagtgtctgacaaacgatgtctatgatgccgccctcaagctgattaacgagatcgaggaaatggggggaatggccaaagcagtcgcagaagggatacctaagctacggatcgaggaatgcgccgctcgacgccaagcacggatagactccgggagtgaagtaatcgtgggcgtgaacaagtatcagttggaaaaagaggacgccgtcgaagtgttggccattgataatacaagcgtgagaaatcgacagatagagaagctcaagaaaatcaaatcatcccgggatcaagcgctggcagaaaggtgtctcgcggccctcaccgaatgcgccgccagcggggacggaaacatcctggccctggccgtcgatgcctcacgagctcgttgcaccgttggagagattacagatgcgctgaagaaagtgttcggggagcacaaggccaatgatcggatggtgtcgggagcttaccgacaggagtttggcgaaagcaaagagattacctctgccatcaaacgggttcataaatttatggagcgggaggggcggaggccacgtctactagtcgctaaaatgggtcaggacgggcacgacagaggggctaaagtgatagcaacaggcttcgccgacctgggtttcgacgtcgacatcggccccctttttcagacaccccgggaggttgcgcaacaggccgtcgacgcagacgtccatgctgtgggcatctcaaccttagctgccggacataaaacactcgtgccagagctcatcaaagagctcaatagtctcggacgaccagatattctcgttatgtgtgggggcgtgatccccccccaggattacgagtttctctttgaggtgggcgtgagcaatgtgttcgggcctggtactagaatcccaaaggccgctgtgcaggttttagatgacatcgaaaagtgtttggagaagaaacaacagagcgtt

SEQ ID NO: 16691 - DNA, 2250 bp, synthetic construct
  misc_feature 1..2250: note = source = /note="Description of Artificial Sequence: Synthetic coding sequence"
  source 1..2250: mol_type = other DNA
atgctacgggccaagaatcagcttttcttgctttcaccgcattatttacgtcaagttaaggagagctctgggtcccgtttaatccagcagaggttgctgcatcaacagcaacctttacaccctgaatgggcagctttagctaagaagcaactgaagggtaaaaacccagaggatctgatctggcacacgccagaaggaatcagcattaaaccgttatactccaaacgggacaccatggatctgccagaggaacttccaggggttaagccttttactagagggccatatccgactatgtacacctttagaccatggaccattaggcaatacgctggtttttcgacagtagaagaaagtaacaaattttacaaagataatattaaggctgggcaacaaggtctcagcgtggccttcgatttggccacacaccgtggttatgattccgataaccctagagttcgtggcgatgtcggaatggctggtgttgcaatagacaccgtcgaagacacaaaaattttgtttgacggtattccattagagaagatgtccgtgtctatgaccatgaacggagcagttattcctgtccttgctaacttcattgtcactggtgaagagcaaggagttcctaaagaaaaacttaccggtaccattcaaaacgatatcctcaaagaatttatggttcgaaacacctatatcttcccacctgagcccagcatgaagatcatcgctgatatatttgagtataccgctaaacacatgcctaaatttaactcaatctctatatctgggtatcatatgcaagaagcaggtgccgatgctatactcgagttggcctatactttggccgacggacttgaatactctcgtactggactccaggccggactcactatagatgagttcgctcctcgtctctccttcttttggggaataggaatgaatttttatatggaaatcgctaagatgcgggctgggcggagactttgggctcacttgatcgaaaagatgtttcaacctaagaatagtaagagcctacttctcagagctcactgtcaaacatcgggttggtccctaactgaacaagatccatacaataacatcgttaggacagcaatagaagctatggcagcagtttttggtggaactcaatctctccatacaaatagctttgatgaggccttaggcctccccactgttaaatctgctcgtatcgctagaaacactcaaattataattcaagaagaatcgggaataccaaaagttgcagacccttggggaggttcttacatgatggagtgccttaccaacgatgtatacgatgctgccctcaagctaatcaatgaaattgaggaaatgggaggtatggctaaggcagttgccgagggtattccaaaattgcgaatagaagaatgcgcagcccggaggcaagctcgtattgatagcggcagtgaggtaattgtcggcgttaataagtatcagctagaaaaggaagatgcggttgaagtcctcgccatagataacacctcggtccgtaataggcagattgaaaaactgaagaaaattaagtcgtcaagagaccaggctttggccgagagatgtcttgcggctttgacagaatgtgctgctagtggtgatggtaatattttagctctagcagtcgatgcatccagagcaagatgcactgtcggagaaataaccgatgctctgaaaaaggtcttcggggagcacaaggcaaacgatcgaatggtcagcggagcatatagacaagagtttggggaatcaaaagaaattacttcagctatcaaacgagtgcataagtttatggaaagggaagggaggcggccacgtcttctcgttgccaaaatgggccaggacggacacgacagaggagccaaggtgattgctacaggctttgctgatttgggctttgacgtagatatcggtccactgtttcagactcctcgtgaagttgctcaacaagcagttgatgcggatgtgcatgcggtcgggattagcactcttgctgcaggacacaagacactcgtaccggagctcattaaggagttgaattccttgggtaggccggatatactagtcatgtgcggtggtgtcatcccaccccaggactatgaatttctgtttgaagttggggttagtaacgtctttggacccggtaccagaattcctaaggcggcggttcaggtgttagatgacatagaaaagtgcctagaaaagaagcaacagagtgtt

SEQ ID NO: 16692 - DNA, 2250 bp, synthetic construct
  misc_feature 1..2250: note = source = /note="Description of Artificial Sequence: Synthetic coding sequence"
  source 1..2250: mol_type = other DNA
atgcttagagcaaagaatcagttgttcttgctctcgcctcattacctgcgccaggtgaaagaatcgtccggttcgcggctgattcagcaacgactgctgcatcaacagcaacctctgcacccagaatgggctgccttggcaaaaaagcaactgaaaggcaaaaaccctgaagatcttatctggcacactcctgagggaatttcgatcaagcccctttacagcaagagggataccatggatctccctgaagagctgcctggagtgaaaccctttacccgagggccgtatcctactatgtacacctttcggccatggactatcaggcaatacgctgggtttagtactgtggaagaatcgaacaagttttacaaggataacataaaggcaggtcagcagggactttcggtggcatttgatcttgcaacccacaggggttacgattcagataatcctagagtccggggggatgtgggaatggcaggcgtcgccatcgacaccgtggaagatacgaagatactttttgacggcataccgttggaaaagatgtctgtgtccatgaccatgaacggagccgtcattccggtcctcgcaaactttatagtcaccggagaggagcaaggagttcccaaggagaagctcactggaactattcaaaacgatatcttgaaggagttcatggtgcgcaacacttacatcttccctcccgagccatcaatgaagatcatagccgatatctttgaatacaccgcaaagcatatgccgaaattcaactcaatctcaatttccggttaccacatgcaagaagcgggagccgatgcaattcttgagcttgcctacaccctggcagatggccttgaatacagccggactggtctgcaagcgggactgactatcgacgagtttgcaccacgactgagcttcttttggggaattggaatgaatttctacatggagatcgcaaagatgagagcaggacgacgtctgtgggcacatcttattgaaaagatgttccagcctaaaaactcaaagtcgctgctgctcagagctcattgtcaaacctccggatggtcccttactgaacaagatccgtacaacaacatcgtgagaacggcgatagaagcgatggcagctgtgtttggcggaactcaatcgctccacaccaactcatttgatgaagcattgggacttccgactgtcaagtcggctcgcattgctagaaatactcagattatcatccaagaagaaagcggcatccctaaggtggcagatccatggggtggatcatacatgatggagtgccttaccaacgacgtgtacgacgccgcactgaaattgattaatgaaattgaagagatgggaggtatggcaaaggcagtggccgaaggcattccaaagctccggatcgaagagtgtgcagcacggaggcaagcacgcatcgattcggggtcggaagtgatcgtgggggtcaacaagtaccagcttgaaaaggaagatgcagtcgaagtgctggcaattgataacaccagcgtgcgaaacagacagattgaaaaactcaagaagatcaaatcttcacgcgaccaggcccttgcagagagatgtttggcggcccttacggaatgtgccgcctcgggggacggcaatatccttgcactcgcagttgacgcctcgcgggcccgatgcaccgtcggagaaattactgatgcactcaagaaggtgtttggagaacacaaggccaatgacagaatggtcagtggtgcatataggcaagagtttggtgaatcgaaagaaattacctccgcaatcaagcgcgtgcacaaattcatggaaagagaggggagacggccccgcctgctcgtggcaaaaatgggtcaggatggacatgacagaggagcaaaggtgattgctaccggatttgcagaccttggatttgatgtggatattggccctttgtttcagaccccacgcgaagtggcccagcaggcagttgatgcagacgtgcatgccgttggcattagcacgctcgcggccgggcacaaaacccttgtgcccgagctgattaaggagttgaattcgttgggaaggcctgatatccttgtgatgtgcggtggcgttattccacctcaagactacgagttcctgtttgaagtgggagtatcaaatgtattcgggcccggaacccggataccaaaggcagcagtccaggtccttgatgacatcgaaaagtgtctcgaaaagaaacaacaatcagtg

SEQ ID NO: 16693 - DNA, 2250 bp, synthetic construct
  misc_feature 1..2250: note = source = /note="Description of Artificial Sequence: Synthetic coding sequence"
  source 1..2250: mol_type = other DNA
atgctcagagcaaagaaccagctgtttctcctttccccgcattatctgagacaggtcaaagaaagctcggggagccgcctcatccagcagaggctcctccaccagcaacagccactgcatcctgaatgggcggccctggcgaaaaagcagctgaagggcaaaaatccggaagatctcatctggcacactcccgagggtatcagcattaagcctctctactcaaaaagggatactatggacctgccagaagagctccccggagtgaaacctttcaccagaggaccttacccgaccatgtacaccttccgcccgtggaccattagacagtacgccggatttagcaccgtcgaagaatcaaacaagttctacaaggacaatatcaaggccggtcagcagggcctgtccgtggcattcgacctcgcgactcaccgtggatacgactcggacaacccaagggtccgcggcgacgtcgggatggccggcgtcgccatcgacaccgtggaggacactaagattctgtttgatggtatcccactggagaaaatgagcgtgtccatgactatgaacggcgcagtgatcccggtcctggcaaactttatcgtgaccggggaggaacagggtgtgccaaaggaaaaactcaccggaactatccaaaacgacattctcaaagagttcatggtgcgaaatacctacatcttcccgccggaaccttcaatgaagatcatcgctgacattttcgaatacacggccaagcacatgccgaagttcaattcgatctcaatttcgggatatcatatgcaggaggctggtgcggacgccatcctggagctggcgtacactctggccgacggcctggaatactcgagaaccggcctccaagccggcctgaccatagacgagtttgccccacgcctgtcgttcttctggggaattggcatgaacttctacatggaaatcgccaaaatgagggcaggccgccggctgtgggcccatctgattgagaagatgttccaaccgaaaaacagcaagtcccttcttctgagagctcactgtcagacctccggatggtccctcactgaacaagacccttacaacaacatcgtgcggaccgccatcgaagccatggcggcggtgttcggcggaactcagtcgctgcacaccaattcttttgatgaggcactgggacttccgaccgtgaagtcagcaaggattgctagaaacactcagatcattatccaagaagaaagcggtatcccaaaggtggccgatccatggggaggcagctacatgatggagtgcctgaccaacgacgtgtacgatgccgctcttaagctcatcaatgaaatcgaagaaatggggggtatggccaaagctgtggccgaaggcatcccgaaacttcgcatcgaagagtgcgccgcgagacggcaggctaggatcgattcgggatcagaggtgattgtcggagtgaacaagtaccagctcgaaaaggaggacgccgtggaggtcctggcgatcgataatacctcggtgagaaaccgccaaattgagaagctcaaaaagatcaagtcgtcccgggaccaggcgctggcagaacgctgcctggctgctttgactgaatgcgccgcgtccggagatgggaatatcctggccctggcggtggatgcgtcgcgagcccgctgcactgtcggtgaaatcactgatgcgctgaagaaagtctttggcgagcacaaggccaacgaccgcatggtgtcaggagcctaccgtcaagagttcggggaatccaaggaaatcacctcggccatcaagagggtgcacaaattcatggagcgggaagggagacgcccgcgactcctggtcgcaaaaatgggacaggacggacatgatagaggggccaaagtgatcgcaaccggattcgccgacctcggcttcgatgtggacatcggaccgttgtttcagactccgcgcgaggtggcccagcaagcggtggacgccgacgtgcacgccgtgggaatctcgactctggcggctgggcataagacccttgtccccgagctgatcaaggagctgaactcgctgggtcgccctgatattctcgtgatgtgcggaggtgtcatacctccgcaggactacgagtttctcttcgaggtcggcgtgtcgaacgtgttcggcccgggaactcgcatcccgaaggctgctgtgcaagtgctggatgatatcgagaaatgcctcgaaaagaagcagcagtcggtt

SEQ ID NO: 16694 - DNA, 2250 bp, synthetic construct
  misc_feature 1..2250: note = source = /note="Description of Artificial Sequence: Synthetic coding sequence"
  source 1..2250: mol_type = other DNA
atgctgcgcgcaaagaatcagttgttcctgctctcgccgcactacctgcgacaggtaaaggaatcaagcggaagccgcctcattcaacagcggcttctccaccagcagcagccactccacccagagtgggcagcgttggcgaagaaacaactgaagggaaagaacccggaggacctgatctggcacaccccagaaggaatctcgatcaagccgctgtactcgaagagagatactatggatctgccagaagagctgccaggcgtcaagccgttcaccaggggcccgtacccgactatgtacacctttcgcccttggaccatcagacagtatgcgggcttctcaactgtggaagaaagcaacaagttctacaaagacaatatcaaggccggacagcaaggactttcggtggccttcgatttggccacccatcgcgggtacgattcggataatcctcgtgtcaggggtgacgtcggaatggccggagtcgctatcgacaccgtcgaggacactaagatcctgttcgacggaatcccgttggaaaagatgtccgtgtcaatgactatgaatggagcggtcatcccagtgctggcaaacttcatcgtcaccggagaagaacaaggtgtcccaaaggagaaacttactgggactatccagaacgacatcctgaaggaattcatggtgcgcaacacttacattttcccacccgaaccatccatgaaaatcatcgcggacatttttgaatacactgccaagcatatgccaaaattcaactcgatttcgatctccggataccacatgcaagaagccggcgcagatgctatcctggaactcgcttatacccttgccgatggattggaatactcccgcaccgggctccaagcaggactgaccattgatgagttcgctccgagactcagctttttctggggcattggcatgaacttctacatggagatcgcgaagatgagggcaggacgcaggctgtgggctcatctcattgaaaagatgttccaaccaaagaattcgaaatccctgctgttgcgagcgcactgtcagactagcggatggtcgctgacggaacaagacccgtacaacaacatcgtcagaaccgccatcgaggcaatggcggccgtgttcggggggactcagtcgctccacaccaattcattcgatgaggccctcggactgccgactgtgaagtccgcccggattgcgcggaatactcagatcatcatccaagaggaatcaggcatccctaaggttgccgacccctggggtggatcctacatgatggagtgtcttaccaatgatgtgtatgacgctgcactgaaactgatcaacgaaatcgaagaaatgggtggcatggcaaaagcggtggccgaggggattccgaagctccgaattgaagagtgcgctgctcggcgccaagctcggattgattcgggatccgaggtgatcgtgggagtcaacaagtaccaactggagaaggaggacgcagtggaagttctggcaatcgacaacacttcagtccgcaaccgacaaattgagaagctcaagaaaatcaaatcctcacgggaccaggcgctggccgagagatgcctggccgcactcaccgaatgcgcagctagcggagatggaaacatcctcgccctcgcggtggacgccagtcgcgcgcgttgcaccgtgggagaaatcaccgatgctctgaagaaggtgtttggagaacataaggccaatgacaggatggtgtcaggggcgtaccgccaggagtttggagaatcgaaagagatcacctccgcgatcaagagggtccacaagttcatggagcgcgagggcagaaggccgaggctgctcgtcgctaagatgggacaagacggccatgaccggggcgcaaaggtcatcgctaccggattcgcggacctcggatttgacgtggatattggtcctctcttccagacgccgcgcgaggtcgcccaacaggcggtggatgcagatgtgcacgccgtcggaatctccacgctcgccgctggccataagaccctggtcccagagctgatcaaggaactgaacagtctggggcgccctgatatcctcgtgatgtgcggaggagtgattccacctcaggattacgaatttctgttcgaggtgggagtctcaaacgtgttcggaccgggaaccagaatcccgaaggcagctgtccaggtgttggatgatatcgaaaagtgtttggaaaagaagcagcaatccgtc

SEQ ID NO: 16695 - DNA, 2250 bp, synthetic construct
  misc_feature 1..2250: note = source = /note="Description of Artificial Sequence: Synthetic coding sequence"
  source 1..2250: mol_type = other DNA
atgttacgagcgaaaaatcaactatttctattatcgccgcattatttacgtcaagttaaagaatcgtcgggttcgcgattaatacaacaacgtttactacatcaacaacaaccgctacatccggaatgggcggcgctagcgaaaaaacaattaaaaggtaaaaatccggaagatttaatatggcatacgccggaaggtatatcgataaaaccgctatattcgaaacgagatacgatggatttaccggaagaactaccgggtgttaaaccgtttacgcgtggtccgtatccgacgatgtatacgtttcgaccgtggacgatacgacaatatgcgggtttttcgacggtagaagaatcgaataaattttataaagataatataaaagcgggtcaacaaggtctatcggtagcgtttgatttagcgacgcatcgaggttatgattcggataatccgcgagtacgaggtgatgttggtatggcgggtgtagcgatagatacggtagaagatacgaaaatactatttgatggtataccgttagaaaaaatgtcggtatcgatgacgatgaatggtgcggttataccggtattagcgaattttatagtaacgggtgaagaacaaggtgtaccgaaagaaaaactaacgggtacgatacaaaatgatatattaaaagaatttatggttcgaaatacgtatatatttccgccggaaccgtcgatgaaaataatagcggatatatttgaatatacggcgaaacatatgccgaaatttaattcgatatcgatatcgggttatcatatgcaagaagcgggtgcggatgcgatattagaactagcgtatacgttagcggatggtttagaatattcgcgaacgggtctacaagcgggtttaacgatagatgaatttgcgccgcgattatcgtttttttggggtataggtatgaatttttatatggaaatagcgaaaatgcgtgcgggtcgtcgtttatgggcgcatctaatagaaaaaatgtttcaaccgaaaaattcgaaatcgttactactacgtgcgcattgtcaaacgtcgggttggtcgctaacggaacaagatccgtataataatatagttcgaacggcgatagaagcgatggcggcggtatttggtggtacgcaatcgctacatacgaattcgtttgatgaagcgctaggtttaccgacggtaaaatcggcgcgtatagcgcgaaatacgcaaataataatacaagaagaatcgggtataccgaaagttgcggatccgtggggtggttcgtatatgatggaatgtctaacgaatgatgtttatgatgcggcgctaaaactaataaatgaaatagaagaaatgggtggtatggcgaaagcggttgcggaaggtataccgaaattacgtatagaagaatgtgcggcgcgtcgtcaagcgcgaatagattcgggttcggaagtaatagtaggtgtaaataaatatcaactagaaaaagaagatgcggtagaagtattagcgatagataatacgtcggtacgtaatcgtcaaatagaaaaattaaaaaaaataaaatcgtcgcgagatcaagcgttagcggaacgttgtctagcggcgttaacggaatgtgcggcgtcgggtgatggtaatatactagcgttagcggttgatgcgtcgcgtgcgcgttgtacggttggtgaaataacggatgcgttaaaaaaagtttttggtgaacataaagcgaatgatcgtatggtttcgggtgcgtatcgacaagaatttggtgaatcgaaagaaataacgtcggcgataaaacgagttcataaatttatggaacgagaaggtcgacgaccgcgtctactagtagcgaaaatgggtcaagatggtcatgatcgtggtgcgaaagttatagcgacgggttttgcggatttaggttttgatgtagatataggtccgttatttcaaacgccgcgtgaagttgcgcaacaagcggtagatgcggatgtacatgcggtaggtatatcgacgttagcggcgggtcataaaacgttagttccggaattaataaaagaactaaattcgttaggtcgtccggatatattagttatgtgtggtggtgttataccgccgcaagattatgaatttctatttgaagtaggtgtttcgaatgtatttggtccgggtacgcgtataccgaaagcggcggttcaagtattagatgatatagaaaaatgtttagaaaaaaaacaacaatcggta

SEQ ID NO: 16696 - DNA, 2250 bp, synthetic construct
  misc_feature 1..2250: note = source = /note="Description of Artificial Sequence: Synthetic coding sequence"
  source 1..2250: mol_type = other DNA
atgctgagggccaagaatcaactgtttcttctaagccctcactatcttaggcaggtgaaagaaagctctggaagccgattaatccaacaaagattgctgcaccagcagcaaccactgcacccagaatgggcggccctggctaaaaagcagcttaaaggcaagaatcctgaagatctcatctggcatacacccgagggtatcagcatcaagcctctctacagcaaaagggacacaatggatcttcccgaagaactgcccggggtcaagcctttcacccgcggcccctaccccaccatgtacactttccgaccatggacaattaggcagtatgccggctttagcactgtggaggaatcaaacaagttttacaaagacaacatcaaagcaggccaacaaggactctccgtcgccttcgaccttgcaactcatcggggatacgatagcgataatccgcgcgtcagaggcgatgtgggcatggcaggcgtggcaatcgacaccgtggaggataccaagatcctcttcgatggcatacctcttgaaaagatgtcagtatcaatgaccatgaatggggcagtaattcccgtgcttgccaacttcatcgttaccggcgaggaacagggggtcccaaaagagaagctcactggcaccattcagaatgacattttaaaggaatttatggtgaggaacacttacatattcccccccgagccaagtatgaaaattatcgccgacatcttcgagtatactgctaaacatatgcccaaattcaacagcatcagtatctcggggtatcatatgcaggaggcgggggctgacgctatcttggagctcgcatataccttagcggacggactcgagtactctaggacaggactgcaggctggtctcactatcgacgaatttgcaccccgccttagtttcttctggggaatcggaatgaacttctatatggagatagccaaaatgagggcaggtagacgcctctgggcccatcttatcgaaaagatgtttcaaccaaaaaactctaagtcactgctcttaagagcccactgccagacatcaggatggtccctgaccgagcaggatccttataataatatcgtcaggaccgctatagaagctatggctgcggttttcggcggaactcagagcttgcatactaacagctttgatgaagcacttggtcttccaacagttaagagcgcgcgcatcgcgaggaacacacagatcattatccaggaggaatccggaattcctaaagttgctgacccttggggtggctcttatatgatggagtgcctgactaatgatgtctacgatgctgctctgaaattgatcaatgagatcgaagaaatgggaggcatggcaaaggcggtagcggagggaattccaaagctcaggatcgaagaatgcgcagcgaggcgccaggccagaatcgatagcggcagcgaggtcatcgtcggtgttaacaaataccagcttgagaaggaggacgctgttgaggtgctggctattgacaatactagtgtgcgcaaccgccagatcgagaaacttaagaagatcaagtcctctcgcgatcaagccctggccgaaaggtgcctcgctgcactgaccgagtgcgctgccagtggagacggcaatattcttgctcttgcagtagatgctagcagagcacgatgcactgtgggtgaaattaccgacgcgctgaagaaagtattcggcgagcataaggcaaacgacaggatggtgagcggagcctaccggcaagaatttggagagagtaaggagatcaccagcgcaataaagcgtgtacacaaatttatggaacgtgaggggagacggcccagacttctggtggctaaaatgggccaggatggccacgatagaggggccaaggtcatcgctaccggttttgccgacctcggcttcgatgtggatataggacctctgttccagacaccaagagaagtggctcagcaagctgttgacgcagatgtgcatgccgtaggcatctctactctcgcagccgggcataaaaccctcgtcccagagctcattaaagaactgaactcactgggtaggccagatatactcgtcatgtgcgggggagtgatcccaccccaagactatgagtttctctttgaggtgggtgtatccaatgttttcggtcctgggacaagaatccccaaagctgccgtccaggttttagacgacattgagaagtgtcttgaaaagaaacaacaatctgtg

SEQ ID NO: 16697 - DNA, 2250 bp, synthetic construct
  misc_feature 1..2250: note = source = /note="Description of Artificial Sequence: Synthetic coding sequence"
  source 1..2250: mol_type = other DNA
atgcttagagctaagaatcaattatttttattatctccacattatttacgacaagttaaggaatcatctgggtcaagattaattcaacaaagattattacaccaacaacaaccattacatccagaatgggcagcattagccaaaaaacaacttaaaggaaaaaatccagaagatttaatatggcatacaccagaaggaatttcaattaaaccattatattctaaaagagatactatggatcttccagaagaattacctggagtaaaaccattcactagaggtccatatcctactatgtatactttcagaccttggacaattagacaatatgcaggattttcaactgtagaggaatcaaataaattctataaagataatataaaagcaggacaacaaggactaagtgttgcattcgacttagctacacatagaggatatgatagtgataatccaagagttagaggtgacgttggtatggcaggagtagcaattgatactgttgaagatactaaaatattatttgatggaatacctcttgaaaaaatgtctgtttcaatgactatgaatggagctgttattccagttttagctaatttcattgttacaggtgaagaacaaggagttccaaaggaaaagcttactggaactattcagaatgatattttaaaggagtttatggttagaaatacctatatatttccacctgaaccatcaatgaaaattattgccgatatttttgaatatactgctaagcatatgccaaaattcaattctatttcaattagtggatatcatatgcaagaagctggagctgatgctattcttgaattagcatacacactcgctgatggacttgaatattcaagaaccggtttacaagcaggattaacaattgatgaatttgcaccaagattgtcttttttctggggaattggaatgaatttttatatggaaattgcaaaaatgagagcaggacgtcgattgtgggctcatttaattgaaaaaatgttccaaccaaagaattctaaatctcttcttttaagagctcattgccaaacatcaggatggtctttaactgaacaagatccatataataacattgtaagaacagctatagaagctatggcagcagtatttggaggtacacaatctcttcatacaaattcttttgatgaagcattgggattacctaccgtaaaatcagcaagaattgctagaaatactcagattattattcaagaagaatcaggaattccaaaagttgctgatccatggggaggatcttatatgatggaatgtttaacaaatgatgtttatgatgcagctcttaaacttattaacgaaattgaagaaatgggaggtatggcaaaggctgtggcagaaggaattcctaaacttagaattgaagaatgtgcagccagaagacaagcaagaatcgatagtggatcagaagtaattgttggagttaacaaatatcaattagaaaaggaagatgctgtagaagtattagcaattgataatacaagtgtaagaaatagacaaattgagaagttaaaaaaaattaagtcatcaagagatcaagccttagctgaaagatgtctagcagcattaactgaatgtgccgcatcaggagatgggaatatccttgctttagcagttgatgcttcacgtgctagatgtactgtaggtgaaattacagatgctcttaaaaaagtatttggggaacataaagctaatgatagaatggtttcaggagcttatcgtcaagaattcggagaaagtaaagaaattacaagtgccattaaaagagttcataaatttatggaaagagaaggaagaagaccaagacttttagttgctaaaatgggacaagatggtcatgatagaggagcaaaagtaattgcaacaggtttcgctgatttaggatttgatgtagatattggacctctttttcaaacaccaagagaagtagctcaacaggctgtagatgctgatgtacatgcagttggtatttcaactttagctgctggacacaaaactcttgttccagaattaattaaggaattaaattcattaggaagacctgatattttagtgatgtgtggtggagtcattccaccacaggattatgaattcttattcgaagtaggagtatcaaatgtttttggacctggaacaagaattccaaaggcagccgtacaagttttagatgatatagaaaaatgtcttgaaaaaaaacaacagtcagtt

SEQ ID NO: 16698 - DNA, 2250 bp, synthetic construct
  misc_feature 1..2250: note = source = /note="Description of Artificial Sequence: Synthetic coding sequence"
  source 1..2250: mol_type = other DNA
atgttgagagctaaaaatcagttgtttctattaagccctcactaccttcgccaggtgaaggaatcctcaggcagcagactaattcagcaacgactactgcatcagcagcagccacttcatccagagtgggctgccctagccaagaagcaattaaaagggaagaaccccgaggacctgatttggcatactccagaggggatctccattaagccgctgtattccaagcgagacactatggacctcccggaggagctcccaggagtgaagccatttacccgaggcccataccccactatgtacacatttaggccttggactatccgtcagtacgccgggttctccacagtcgaggaatctaacaagttttataaggataacattaaagcgggccagcagggtctgagtgttgctttcgatctggcaacccacagggggtatgacagcgacaatccgagagtgaggggagacgtaggcatggctggcgttgccattgacaccgtcgaggacactaaaatcctgttcgacgggatccccctggagaagatgagcgtgtccatgaccatgaatggagcggttattcctgtattggccaactttatcgttactggcgaggaacaaggcgtgcctaaagaaaagctaacaggcacaattcagaacgatattttgaaggagttcatggtcagaaatacttacatcttccctcctgagcctagcatgaagatcattgccgacatatttgaatatacggcaaagcatatgccaaaatttaactccataagtattagtggatatcacatgcaggaggctggggcagatgctattctagaattagcctatactttggcagacggcctggagtactcacgcacagggctgcaagccggactgaccattgatgagtttgcccccaggttgagttttttttgggggatcggtatgaacttctatatggaaattgcgaagatgcgtgccgggcgacgcttgtgggcccacttaatcgaaaaaatgtttcagcccaagaattctaagagtctgctgctcagagcccactgtcagacctctggctggtccctgactgaacaggatccctacaacaacattgtgagaacggctatcgaggccatggccgccgtttttggcgggacccagagtttgcacactaattcctttgatgaagccttgggtctgccaactgtcaaaagtgcgcgaatagcccgcaatacccaaatcatcattcaggaggagagcggaattcctaaggttgccgacccttggggtggtagctacatgatggaatgtctgaccaacgatgtgtatgacgctgcccttaagctgatcaacgaaattgaagaaatgggcggaatggctaaggctgtcgcagagggcatcccaaagctccgtatagaggaatgtgctgccaggcggcaggcccggatagatagcggaagtgaggtgatcgtgggggtgaataagtaccaattagagaaggaagacgcagtggaggtacttgctattgacaataccagtgtcaggaacaggcagattgaaaaactgaaaaaaattaaatccagtagggatcaggctctagccgaacgctgcctggccgcactgaccgaatgcgcagcctcaggggacggaaatatccttgccctagccgtcgacgcctcaagggccaggtgtacagtcggcgagatcacggatgctttgaagaaagtattcggagagcacaaggcaaacgacagaatggtgtcgggcgcttatagacaagaatttggagaaagtaaagagattacttcagcaattaagcgggtccacaaatttatggagcgggaagggcgaaggccccgccttcttgtggctaaaatgggccaagacgggcacgaccgcggcgcaaaagtgattgccactggattcgccgatctgggctttgatgtggatatcggacctctgtttcagactcctagagaagtcgcacagcaggccgtcgatgcagacgtgcatgctgtcggaatcagcacactggctgcaggacataagaccctggtgccagaactgattaaggagctgaattccctggggcgcccagacatcctcgtaatgtgcggtggggtgatcccgccccaggattatgagttcttgttcgaagtaggcgtctcaaatgtcttcgggcctgggacgcggattcccaaagcagccgtgcaggtcctggacgacatcgagaagtgtctcgaaaaaaagcagcagagcgta

SEQ ID NO: 16699 - DNA, 2250 bp, synthetic construct
  misc_feature 1..2250: note = source = /note="Description of Artificial Sequence: Synthetic coding sequence"
  source 1..2250: mol_type = other DNA
atgttgcgtgcaaaaaaccaactttttctcctctcccctcattatctgaggcaggtgaaggaatcgtccggatcccgacttattcagcaaaggctgcttcaccagcagcagccccttcaccctgaatgggcagctcttgcaaagaagcaactgaagggcaaaaacccagaggacctgatatggcacacccccgaaggaatctctattaagccgctgtacagcaagcgagatactatggatctcccagaggaactgccgggggtgaagcctttcacccgcgggccttaccctaccatgtacacttttaggccctggaccatacgtcaatatgctgggttcagcaccgtggaggaatccaataagttttacaaggataacattaaagcaggacagcaaggtctttctgttgcatttgatctggccactcacagaggttacgattcggacaatcctcgggtcaggggcgacgtgggaatggcaggtgtggcaatcgataccgtggaagatactaaaatcctttttgatggcataccccttgaaaagatgtccgtgtccatgactatgaatggagccgtcattcctgtgctggcaaactttatagtgactggtgaagagcaaggagtgcctaaggagaagctgaccggtactattcaaaatgacatccttaaggagttcatggtgcgcaacacctacatctttccaccagaaccctccatgaagattatcgcagacattttcgaatacactgccaaacatatgcccaagttcaactccatttcgattagcggataccatatgcaagaagcaggcgcggatgcaattctggagctggcatacactctcgccgatggtcttgaatactcaaggaccggcctccaagccggactgactatcgatgaatttgctccacgtctctcatttttctggggtattgggatgaacttttacatggaaattgcaaaaatgcgggcgggtcggaggctttgggcacatctcatcgagaagatgtttcagccaaagaattcgaagtcgctcctgctgagagcacattgtcaaacttcgggatggtcgctgaccgaacaggatccctacaataacattgtgcgcaccgcaattgaagcaatggcagcggtgtttggaggtacccaatccctccatactaattctttcgatgaagcactgggactgcccactgtcaaatccgcacgcatcgcccggaacacccaaatcatcatacaggaggagtccggaatccctaaggtggccgatccttggggaggatcatacatgatggagtgccttacgaatgacgtttacgacgccgcacttaagctcattaacgagattgaggagatgggagggatggctaaggcagtggcagaaggcattcctaagctccggatagaggagtgtgccgcccgtcgtcaagcgaggatcgactccggatcggaagtgatcgtcggagtgaacaagtaccaacttgagaaagaagatgcggtggaagtgcttgcaattgacaacacttccgtccgaaatagacagatcgaaaagttgaaaaagattaagtcatccagagatcaagcattggcagaacggtgtctggcggcgctgactgaatgtgcagctagcggcgatggtaacatcctggcgctggctgtggacgcatcgagagctcggtgtaccgtcggagaaattactgatgcactgaaaaaagtgttcggagagcacaaagccaacgatcgaatggtgtctggtgcctacagacaagagttcggagagtccaaggagattacctcggccattaagcgagtgcataagtttatggagagggaaggacgccgaccacgactccttgtcgccaagatgggtcaggatgggcatgatcgcggtgccaaagtcatcgcaactggttttgcagatctgggctttgatgtggatatcggcccactgttccagacgccccgtgaagtggcccagcaagcagtggatgcagatgtccacgcagtggggatttcaacccttgcggcgggacataaaacccttgtgcccgaactgattaaggaactgaatagccttggccggccagacattcttgtgatgtgcggaggggtgattccacctcaagactacgaattcctgtttgaagtcggagttagcaacgtgttcggccctggcacccgcatccctaaagctgcagttcaagttctcgatgatatcgagaaatgtctcgaaaagaagcagcaaagcgtg

SEQ ID NO: 16700 - DNA, 2250 bp, synthetic construct
  misc_feature 1..2250: note = source = /note="Description of Artificial Sequence: Synthetic coding sequence"
  source 1..2250: mol_type = other DNA
atgctgcgcgctaagaaccagcttttcttactttccccccattacctgcgtcaggtgaaagaaagcagcggcagcaggctgatccagcaacgattgctacaccagcaacagccccttcatcctgaatgggccgctctggcaaaaaagcagctgaagggcaaaaatccagaggacctgatctggcacacacccgaagggatcagcatcaagcccttatactcaaaacgcgacacaatggatttgccggaagaattacccggtgtgaaaccttttacacggggcccctatcccaccatgtatacgtttaggccctggacgatacgacaatacgcaggtttctcaactgtcgaagaaagcaataagttttacaaagacaacattaaagccggacagcagggacttagcgtcgctttcgatctagccacacaccggggatacgacagcgataaccctcgggtccgcggcgacgttggaatggccggcgtcgccattgataccgtggaggacaccaagatattattcgacggcatcccgctcgagaaaatgagcgtttccatgacaatgaatggggccgtgattccagtactcgcaaacttcattgttacgggtgaggagcagggcgtacccaaggaaaaactgaccgggaccattcagaacgacatcctaaaggagtttatggtgcgcaatacatacatatttcctccggagccctccatgaagattatagcagatatctttgagtacaccgcgaaacacatgcccaagttcaactcaattagcatttctgggtaccatatgcaagaggccggggctgatgccattctggagctggcatatactttagctgacggcctggaatattctaggaccggcctccaagccggcctaacaatcgacgaattcgccccacgcttgagtttcttttggggcatcgggatgaacttctacatggaaatagctaaaatgcgggctggaagacggctgtgggcccaccttatagagaagatgtttcaacctaaaaacagcaagtctttactgctgagggcgcactgtcagacctccggatggagtctgacagagcaggacccctataataatatcgtccggactgcgattgaagccatggccgccgtatttggaggcactcaaagcctccacacaaattcctttgacgaggcactcgggctgcccactgtgaagtccgctagaatagcacgaaacacccagattataatccaggaggagagcggcatcccgaaggtagccgatccctggggaggttcatacatgatggagtgtctgactaacgacgtatacgatgcagcactgaagttgataaacgagattgaggagatgggagggatggccaaggcggtggcagagggtatacctaagctgcgaattgaggagtgtgccgcccgaagacaggcacggattgatagcgggtccgaagttattgtaggggtgaacaaataccagctcgaaaaggaggacgccgtcgaggtgctggctattgataatacaagtgtgcgcaatagacagattgagaaattaaaaaagatcaagagcagcagggaccaggcactggcagaaagatgcctcgccgcactcactgagtgtgcggcgagtggagatggtaatatactggcgctcgccgtggacgcttcacgagcccggtgtacagtgggcgagatcaccgacgctctgaagaaagtgttcggtgaacacaaagccaatgatcgcatggtctccggagcatacaggcaagaattcggagagagcaaggagatcacctcagcaatcaaacgggttcataaatttatggagagagagggacgccgtcctagattacttgttgccaaaatgggccaggacggacacgacagaggcgctaaggtgatcgccacagggtttgcagatctgggctttgacgtcgacattggacctctattccaaacgccgagggaggtggcccagcaggcagtggatgctgacgtgcacgctgttggcatcagtactttggccgcaggacacaagacactggtgcccgaactaatcaaggaactcaattctttgggcaggcccgacatcctagtcatgtgcggtggagtcatcccaccccaggactacgagttcctgttcgaagtgggggtctctaacgtttttggtccgggcacacgtattcccaaggcggctgtccaggtgctggatgatattgaaaagtgcctcgagaaaaagcagcagtcagtt

SEQ ID NO: 16701 - DNA, 2250 bp, synthetic construct
  misc_feature 1..2250: note = source = /note="Description of Artificial Sequence: Synthetic coding sequence"
  source 1..2250: mol_type = other DNA
atgttgcgagccaagaaccaactctttctgttgtctccccactatctaagacaggtgaaagagtcttccggcagcaggctaattcagcaaaggctgcttcaccagcagcagccactgcaccccgaatgggcggccctagctaagaagcagctcaaaggtaaaaacccagaggatctgatttggcacactccagaagggattagcatcaagccgctctactccaaacgtgatacaatggacctgcctgaggaactgcctggtgttaagccctttacacgtggcccatatcctaccatgtacaccttcaggccctggacgattcgtcagtatgctgggttcagtacagtggaagaaagcaacaagttctataaagacaacatcaaggctggacagcagggactgtcagtcgcctttgatttggccacacacagggggtatgattctgataacccccgggtacgaggagacgtgggtatggctggggtagcgatcgacaccgtggaagataccaagatcctttttgacgggattcccttggagaagatgtccgtctccatgaccatgaatggagcggtaattcctgtcttagctaactttatcgtgactggtgaggagcagggagttcctaaggagaagttgaccggcacaatacagaacgacatcctgaaagaattcatggtcaggaacacatacatcttcccacctgaacccagcatgaagatcatagcggacatttttgagtacacagccaagcatatgcccaagttcaattccatctcgatctctggctaccatatgcaggaggctggcgccgacgccatactggagctggcttatacactggccgacgggttagagtattcacggacgggcctgcaggccggcttaaccattgatgaattcgcaccacgcttgtcgtttttttggggtatcggaatgaatttctatatggagatagccaaaatgcgggcgggaaggaggttgtgggcccacctgattgagaaaatgttccagcccaagaatagcaagtctttgctactgcgagcacactgccaaaccagtgggtggtcgctgacagagcaggatccctataacaatatagtgagaaccgctattgaagccatggccgccgtcttcgggggaacgcagagtctgcacacaaattcctttgacgaagccctgggcctgcctacggtcaagtccgctcgaatcgcccggaacactcaaatcatcattcaggaagagagtggaatcccaaaagtcgccgacccatggggaggttcttacatgatggaatgtttgaccaatgatgtgtatgatgcagccttgaaactaattaatgagatcgaggaaatgggaggcatggcaaaggccgtagcagaaggcattcctaaacttcgtatagaggagtgtgccgctagaaggcaggcgcgcatagattccgggagcgaggttattgtgggcgtcaacaagtatcagctggagaaggaggatgccgtggaagttctggcgattgacaatacaagtgtcagaaataggcagatcgagaagctgaaaaaaatcaagtctagtagggaccaggccctcgctgaacggtgcttggctgcactcacagaatgcgccgcctccggtgacggcaacatcctggcactggccgtagacgcgtcacgagctagatgtactgtaggggagataaccgatgcgctcaagaaagtcttcggagagcacaaggcaaacgatcggatggtaagcggggcctataggcaggagtttggcgaatccaaggagattacgagcgctattaagagagtgcacaaattcatggagcgcgagggccggaggccccggcttttggtggccaaaatgggacaagacgggcacgacaggggggcaaaggtcatcgcgacaggtttcgccgacttaggctttgatgttgatataggacccctatttcaaacaccgagggaggtcgctcagcaggcggtggatgctgacgtgcacgcagtgggcatctcaaccttagccgccggacacaagactcttgtccctgaactgataaaagaactaaactcacttggccgaccagatatcctggtcatgtgcgggggtgtaatcccaccacaggactacgagttcttgttcgaggtgggcgttagtaatgtatttggcccaggcacacggatccctaaagccgcagttcaggtgttggatgacatcgaaaagtgcttggaaaaaaaacagcagagtgtg

SEQ ID NO: 16702 - DNA, 2250 bp, synthetic construct
  misc_feature 1..2250: note = source = /note="Description of Artificial Sequence: Synthetic coding sequence"
  source 1..2250: mol_type = other DNA
atgctgcgggcaaagaaccagctgtttctgctgtcacctcactacttgagacaagtgaaggaatcctcgggcagcagactgattcagcagcggttgcttcaccaacaacagccactgcatcctgaatgggcagctctggcaaaaaagcagctgaaaggaaagaaccctgaagatctcatctggcatactccagaagggatctccatcaaaccgctgtactcgaagcgggacaccatggatttgcccgaggagttgccaggagtcaaaccattcaccaggggtccctacccaaccatgtacaccttcagaccatggactatcaggcaatacgccggattctcaacggtggaggagagcaataagttctacaaggataacattaaggcaggacaacagggtctttcggttgcgtttgatctcgcaactcaccggggctacgactccgataatccgcgcgtcaggggagacgtgggcatggccggagtcgcgatcgatactgtggaggataccaaaatacttttcgatggaatccctcttgagaagatgtcagtgtccatgaccatgaacggagcagtcattcctgtgctggcaaactttattgtgactggtgaagaacagggtgttccaaaggagaaacttacgggcactattcaaaacgacatacttaaggaattcatggtgagaaacacctacatttttccccccgagccttccatgaagattattgcagacatattcgaatacaccgcgaagcacatgccgaagtttaactcgatttcgatttcgggctaccacatgcaagaagcaggtgcagatgcgattcttgaattggcatacaccctggcagatggacttgagtactcgcggacggggctgcaagcagggcttactatcgacgaatttgccccccggctctcattcttttggggcattggaatgaacttctacatggaaattgcaaagatgcgggcgggcaggcggctttgggcgcaccttatcgaaaagatgttccagcctaagaatagcaagtcactgctcctccgggcacattgtcaaacgagcggttggagccttactgagcaagatccttacaacaatattgtccgaactgcgattgaagcgatggcagcggtgttcggagggacgcagagcctgcacaccaacagctttgatgaagcgctgggacttccaaccgtgaagtctgcacgtatcgctcgcaacacccaaatcatcatacaggaagagtccggtattccaaaggtcgcagatccttggggagggagctacatgatggaatgtcttaccaatgatgtctacgatgcagccctgaaactcattaacgaaattgaagaaatgggcggaatggccaaggccgtcgccgaaggaatcccgaaactccgcatagaggaatgcgctgcacgcagacaagcacgcattgactcaggttccgaggtcattgtgggtgtgaataagtaccaacttgaaaaggaagatgctgtggaagtgcttgcaattgacaacacgtcggtccgaaatagacaaatcgagaaactcaagaaaatcaagtcgtccagggaccaggcgctcgcagaaagatgcctggccgccctgaccgaatgtgcggcatccggagatggcaacattcttgcactggcagtggatgcttcgagagcacgctgcactgtgggtgaaatcaccgatgcacttaagaaagtctttggagaacacaaagcaaatgatagaatggtcagtggtgcctacagacaagagttcggtgaaagcaaagaaattacctcagcaattaagagagtccacaagttcatggagagagagggacgccgacctcgccttctggtcgcaaaaatgggacaggatggtcatgatagaggcgcaaaggttatcgcaactggcttcgcggatttggggtttgacgtggatattggtccactttttcaaaccccacgggaagtggcccaacaggcagtcgatgcagatgtgcatgcagtgggcatctcaacccttgctgctggacataagactctggtcccagaactcatcaaagagcttaactcgcttggcagacccgatattcttgtgatgtgcggaggcgtgattccaccccaagactacgaatttcttttcgaagtgggtgtcagcaacgtctttggtccgggtaccagaattcctaaagcagccgtgcaggtcttggacgacatcgaaaaatgccttgagaaaaagcagcaatctgtc

SEQ ID NO: 16703 - DNA, 2250 bp, synthetic construct
  misc_feature 1..2250: note = source = /note="Description of Artificial Sequence: Synthetic coding sequence"
  source 1..2250: mol_type = other DNA
atgttgagggccaagaaccagttgttcctgttgtcacctcattacctgcggcaggtgaaagaatcctcgggaagccggcttattcaacagaggcttctgcatcaacaacagcccctgcatccagagtgggcagccctggccaaaaaacaactcaaagggaaaaaccccgaagatctgatctggcacacccctgaaggaatatctattaagccattgtactcaaaaagagacaccatggatcttcctgaagaactcccaggagtgaagccatttacccgaggcccctatccaaccatgtatacctttcgcccttggaccataagacagtacgcaggtttttcaactgtcgaggagtcgaacaagttttacaaggataacattaaggcgggtcaacaaggactctcagtggcatttgatcttgctacccatagaggttacgattcagacaaccctagagtgaggggagatgtgggaatggcaggagtagcgatcgacactgttgaggataccaagattctcttcgatggaatccccctcgagaagatgtccgtgagcatgactatgaacggtgcggtgattcctgtcctcgcaaactttatcgtgacgggagaagaacaaggggtcccaaaggaaaaacttactgggacgattcagaacgacatcctcaaagagtttatggtccgcaacacttacattttcccacctgaaccttccatgaagattatagcagatatctttgaatacaccgcgaagcacatgccgaagtttaacagcattagcatatcgggataccacatgcaggaagccggagcagacgcgattcttgaactggcatacacccttgccgatggcctggagtactcaagaactgggcttcaggctggtctgaccatcgatgaattcgcaccgcgactgtcctttttctggggaatcggtatgaatttctacatggaaattgcaaaaatgcgcgccggacggcgactttgggcgcatcttattgagaagatgtttcagccaaagaactccaagtcgctgctcctgcgtgcacattgtcagacctcagggtggtcccttaccgaacaagatccttacaacaatattgtgcgcactgccatcgaagcaatggcagctgtgttcggaggaacccagagcctgcataccaattcttttgatgaagccctgggtttgccgaccgtcaagtcggcccgcattgcacggaacactcaaatcatcatacaagaggagtcgggtattcctaaggtggcagatccttggggagggtcctacatgatggagtgtcttactaatgatgtgtacgacgcagctctgaagctcattaacgaaatcgaggagatgggaggaatggccaaggccgtcgcagagggtatccccaaacttaggatcgaagaatgtgcagcaagacgacaagcacgaatagactccgggtcggaagtgatcgttggagtgaataagtatcaactcgaaaaagaggacgcagtggaagtgctggccattgacaatacttctgtgaggaacagacaaatcgaaaaacttaagaagattaagtcgtccagagatcaagcgctcgccgaaaggtgtctggccgcacttaccgaatgcgcagcgtcgggcgacggaaacatactggcactcgccgtggacgcctcaagagcaaggtgcactgtcggtgagattaccgatgccctgaagaaggtctttggtgagcacaaggcaaacgatagaatggtcagcggagcataccgacaagagtttggggaatcaaaagaaatcacttcggcaatcaaacgcgtccataagtttatggaaagggaagggcggcgcccacggctccttgtcgcaaagatggggcaggacggccatgaccgaggcgcgaaggtgatcgcgaccggatttgcggacctggggtttgatgtcgatatcggaccgctttttcaaaccccgagggaggtcgcccaacaagcagtggatgcggacgtccatgcagtgggcatttcaacccttgcagcgggacataagacgctggtgccggaactgataaaggagcttaattccttgggacgccccgacattcttgtcatgtgtgggggcgtcatcccaccacaagattacgagttcctgtttgaggtgggtgtgtccaacgtgtttggccccggaacccgcatccccaaggcagcggtgcaagtcctcgatgatatcgagaagtgcttggagaagaagcaacagtcggtg

SEQ ID NO: 16704 - DNA, 2250 bp, synthetic construct
  misc_feature 1..2250: note = source = /note="Description of Artificial Sequence: Synthetic coding sequence"
  source 1..2250: mol_type = other DNA
atgctgcgcgcaaaaaaccagctgttcctgctctcaccacactacctcagacaggtcaaggagtccagcgggagccggttgatacagcagcgccttttgcaccagcagcagccgctccaccctgagtgggctgctctggccaaaaagcagctgaaaggcaagaaccccgaggatctgatttggcatacgccagaaggaatcagcataaaacccctttactccaaacgcgacaccatggacctgccggaggagttgcctggcgtaaagccattcaccagaggcccttaccccaccatgtacactttcagaccctggaccatccggcaatacgccggattctctacagtagaggagtccaataagttctataaggacaatatcaaggctggacagcagggcttgtccgtggcatttgacctcgcaacccaccggggatacgacagtgacaaccctcgagtgaggggagatgtgggaatggcaggggtggcaattgatacagtggaggacacgaagatcctgtttgatggaattcctctggagaagatgtccgtcagcatgaccatgaacggagcggtcatcccagttttggctaacttcatcgtgacaggcgaagaacagggggtgccgaaagagaagctgacgggcaccattcagaatgatatcctcaaggagtttatggtgagaaatacttacattttcccaccagagccctcaatgaagatcatcgccgacatatttgagtataccgctaagcacatgcctaaattcaactctatttcaatctcaggataccatatgcaggaggcaggggcagacgctattctcgaactggcatacactctggccgacggcctcgaatacagcagaactgggctgcaggcaggattgacgatcgatgaattcgcccctcggctctccttcttttggggcattggtatgaacttttacatggaaatcgcgaagatgagagctggccgccgcctctgggcgcatcttattgagaagatgttccagcctaagaatagcaagagcctgttgctgcgcgcccattgccagacctctggatggagtctgactgagcaagacccctacaataatattgtacgcactgctattgaagctatggcagcagtctttggcgggacacagagcctccacaccaatagtttcgatgaggccctgggcctgcctactgtcaagagtgccagaatcgcccgaaatacccagatcatcattcaggaagaatctggtattccgaaggtggcagacccctggggaggatcctacatgatggaatgcttgactaacgacgtatacgacgccgccctgaaactgatcaacgaaatcgaggaaatgggtggtatggcaaaagccgtggccgaggggatacccaagttgagaattgaggagtgcgcagccagaaggcaagcccgaatcgacagcggaagcgaggtcatcgtcggagtgaataagtaccagttggagaaggaggatgcagtggaagtacttgctatcgataacacctcagttcgcaaccggcaaattgagaagctcaagaagataaaatcatctcgggatcaggccctggctgagaggtgtctggccgccctgacagaatgtgctgcgtcaggcgacggcaatattctggctctggctgtggacgctagccgcgctagatgcacagtgggtgagatcactgatgccctcaagaaagttttcggcgagcataaggctaacgaccgcatggtcagtggtgcttataggcaggagtttggtgagtccaaggaaattacatctgcaataaaaagggttcacaaatttatggaacgcgaagggcgacggcctcgacttctggtggccaagatggggcaggacggacatgataggggcgcgaaggttatcgctacgggcttcgcagacctgggatttgacgtggacatcgggcccctgtttcagacaccccgggaggtagcacaacaggcagtcgacgctgacgtacacgccgtcggcatctcaaccctggccgcaggtcataagacgctcgttcctgaactgatcaaggagcttaatagcttgggaaggcctgacatactcgtgatgtgtggaggggtcatacctccccaggattacgaattcttgtttgaggtcggcgtatccaacgtgttcggccccggcacccggatacccaaggccgctgtacaggttcttgacgatattgagaaatgcctggagaagaagcagcagtctgta

SEQ ID NO: 16705 - DNA, 2250 bp, synthetic construct
  misc_feature 1..2250: note = source = /note="Description of Artificial Sequence: Synthetic coding sequence"
  source 1..2250: mol_type = other DNA
atgttgagagctaaaaaccagctcttccttctttccccgcattacctgagacaggtgaaagagtcaagtggctcacgcctcatccagcagcgcctgctccaccaacagcagccacttcaccccgagtgggccgccctggccaaaaagcaacttaaaggaaagaaccctgaagatttgatctggcacacacccgagggcataagtattaaaccactttatagcaaaagggacacaatggacctgcctgaggagcttcccggcgtgaagccattcactagaggtccctatcctaccatgtacaccttcagaccctggacgatcagacagtacgcaggcttttcaactgttgaagagtctaacaagttctataaggataacatcaaagccggccagcaaggtctttccgtggcattcgatctggcaactcaccgcggctatgattccgataaccccagggtgcgcggcgacgtaggaatggccggagtggcaattgacacagtcgaggacaccaaaatactgtttgacggcatcccactggagaagatgtcagtgagcatgacgatgaatggagccgtgattcccgtactggccaacttcattgttacaggagaggagcagggcgtccccaaagagaagctgaccggcactatccagaacgacatcctcaaggagtttatggtgagaaatacttatatttttccgcctgagccaagtatgaagataatcgctgacatattcgagtacacagcgaagcacatgcctaagttcaattctatctcaatcagtggttaccacatgcaagaagccggagctgacgccattttggaactcgcatacacgctcgctgatggactggaatactctaggacaggtcttcaggcaggcttgacaatcgatgagttcgcaccaagactgtctttcttttggggtattggtatgaacttttacatggagatcgccaaaatgcgcgctggcagaaggttgtgggctcacctgattgagaaaatgttccagcccaagaactcaaagtctcttcttctgagagctcactgccagacaagcggctggtctctcacggagcaagacccttataacaacatcgtcaggaccgcaattgaagccatggctgctgtattcggtggcactcagagcctccacacgaactcattcgatgaggccctgggcctcccaaccgtgaagagcgctcgcatcgccagaaacacccagatcattatccaggaggagtccggtatacctaaggtggcggacccatggggcggttcctatatgatggagtgtcttacaaacgatgtttatgacgccgccctcaagctgattaacgagattgaggaaatgggaggaatggcaaaggctgtcgctgagggcatacctaagttgagaatcgaagaatgcgccgctaggaggcaggcgaggatcgactctggatcagaagtgatcgtgggcgttaataagtaccagctggagaaagaggatgccgtcgaagtgctggccattgacaacacaagcgtgaggaatcgccagatcgaaaaactgaaaaagattaaatcctctagggaccaagcccttgccgaaaggtgccttgcggccttgaccgagtgtgccgcgagtggcgacggtaacattctggccctggccgtggacgcaagtagggccagatgcactgtgggtgaaatcaccgatgctttgaagaaggttttcggagagcacaaggcaaacgatagaatggtgagcggtgcctacaggcaggaattcggtgagagcaaggagattaccagcgcgatcaaaagggtgcataaattcatggagagagagggcagaagaccgaggttgctggtggctaagatgggccaggatggacacgacagaggcgccaaagttattgccaccggctttgctgatcttggtttcgatgttgatatcggcccattgtttcaaactccaagggaggtcgcccagcaagctgtcgacgctgacgttcacgctgtcggcatcagcacattggccgccggccataagaccttggtgcccgagttgattaaagagctgaacagcctgggaaggcccgacatcttggtcatgtgcggcggtgtcataccaccgcaggactatgagttcctgttcgaagttggagtcagtaatgtgtttggaccaggtacacgcattcccaaagccgcagtccaggttctggatgatatagagaagtgtttggagaaaaaacagcagtctgtg

SEQ ID NO: 16706 - DNA, 2250 bp, synthetic construct
  misc_feature 1..2250: note = source = /note="Description of Artificial Sequence: Synthetic coding sequence"
  source 1..2250: mol_type = other DNA
atgctgcgcgcgaaaaaccagctgttcctgttgagcccgcactacctgcggcaagtgaaggaaagctctggatcccggctcatccagcaacgcctgctgcatcaacagcagccgctgcacccggaatgggccgcactggcaaagaaacagctcaaaggtaaaaacccagaagatttgatttggcatactccagaagggattagcatcaaaccgctgtactcaaagagggacaccatggacctgccagaggaactgcctggggtgaagccattcacccgtgggccttacccgaccatgtacacctttaggccgtggactatccgacaatacgctggctttagcaccgtagaggaatcaaataagttctataaagacaacatcaaagctggacagcaaggcctcagcgtcgctttcgatctggccactcatcggggatacgactcggacaacccaagagtccgcggagatgtgggaatggcaggagtggccatcgacactgtcgaagataccaaaattctgttcgacgggatcccattggagaagatgtcagtgtccatgaccatgaacggagccgtcataccagtcctggcgaatttcatcgtgactggagaggaacaaggcgtgccgaaagaaaagctgaccgggaccatccagaatgacatcctcaaggaattcatggtgcggaatacgtacatcttccctcctgagccctcaatgaagatcattgcagatatcttcgagtacaccgcgaaacacatgccgaagttcaattcgatctcaatttccggataccatatgcaagaggctggtgctgacgccatcctggagctggcatacactctcgcggacggattggagtactcccgaaccggactgcaggctgggctgaccatcgacgaattcgccccacggctctcgttcttttggggaatcggcatgaacttctacatggaaatcgccaagatgagggcagggcggaggttgtgggcccacctgatcgaaaagatgttccagccgaagaactctaagagcctgttgctgcgcgcgcattgccagaccagcggttggtccttgactgaacaagacccttacaacaatatcgtgcgcaccgcaatcgaggccatggcggccgtctttggcggcacccaatcgctccacactaactccttcgacgaggctcttggactgccgactgtcaagtcggctcggatcgcgcggaacacccagatcatcatccaggaggaatccggtattcccaaggttgcagatccgtggggtggatcctacatgatggaatgcctgactaatgacgtctacgacgcggccttgaaactgatcaatgaaatcgaggaaatgggtggcatggcgaaagccgtggcagaagggatcccgaagttgaggatcgaggaatgcgcggcgcgcagacaggcgcgcatcgattcgggatcagaagtcatcgtgggagtgaataagtaccagctcgagaaagaggacgcagtcgaagtgctcgcaattgataacacttcggtccggaaccggcagatcgaaaaactgaagaagatcaagtcgtcgagggaccaggctctggcagagcggtgtttggcggctttgaccgagtgtgcagcgtcgggcgatggcaacatcctggcgctggctgtcgacgcctcgcgcgcccggtgcactgtgggggaaattaccgacgctctgaaaaaggttttcggtgaacacaaggcgaacgataggatggtgtcgggggcgtaccggcaagaattcggagagtcgaaggagatcactagtgcgattaagagagtgcacaagttcatggaacgggagggacggcgccctcgcctcctggtggcgaaaatgggccaggacggacatgacaggggtgcaaaagtcatcgcaaccggctttgctgacctgggattcgatgtggacatcggaccattgttccagactccgcgcgaggtggcccagcaagcggtcgatgccgacgtgcacgcggtcggaatttcaacgctcgcggccggccacaagacgctggtgcctgaattgataaaggagctgaactcactcgggcgaccggatattctcgtgatgtgcggaggagtgatcccgccccaggattacgaatttctgtttgaggtcggcgtgagcaacgtgttcggacctggaaccaggatcccaaaggccgctgtgcaggtgctcgatgacattgagaaatgccttgaaaagaagcagcaaagcgtg

SEQ ID NO: 16707 - DNA, 2250 bp, synthetic construct
  misc_feature 1..2250: note = source = /note="Description of Artificial Sequence: Synthetic coding sequence"
  source 1..2250: mol_type = other DNA
atgctgagagcaaaaaatcagctgttcctgctttcaccccattatctgcggcaggttaaagaaagttctggaagtaggctcatccagcagcgcctgcttcatcagcagcagcctcttcatccagagtgggccgctctggccaaaaaacagctgaaagggaaaaatccagaagaccttatatggcacactccggaagggatctctataaagcctctctactccaaacgggatacaatggatttgcctgaagaacttccaggagtgaaaccctttactcgaggaccttacccaactatgtacacttttcggccttggactattagacagtacgccgggttcagtacagtggaggagtcaaacaaattctataaagataatatcaaagccggacaacaggggctatcggttgctttcgatctggcaactcaccgaggatacgacagtgataatccccgcgtgcggggagatgtaggaatggccggagtcgcaatagatacagtcgaagatacaaaaatcctctttgatgggattccactcgaaaaaatgtccgtatccatgacaatgaatggagcagttatacctgtgctcgccaatttcattgtcactggagaggaacagggggtgccaaaagaaaaactcacagggactatccagaatgacatactcaaagaatttatggtacgtaatacatatatctttccacccgagcccagtatgaaaatcattgctgacatattcgaatatactgctaaacacatgccaaagtttaattctatctcaatctcaggataccatatgcaggaagcgggggccgatgccatcctcgaactcgcttatacacttgccgatgggctagaatactctaggacagggttgcaggccgggctaactatcgacgaatttgcaccacgcctcagttttttttggggaattggaatgaatttctatatggaaattgctaaaatgagggcaggacgtagactttgggcacacctcatagaaaaaatgttccagccaaaaaactccaaatcactgctcctcagggcacattgtcagactagtgggtggtctctgactgaacaggatccctataataatatcgtacgcactgctatcgaggcaatggccgcagtgttcggaggaactcagtctctccacacaaactcatttgatgaagcccttgggctgccaactgtgaaatccgcccgcatcgcaaggaatacacagataataatccaggaagaaagtgggatacccaaagtcgctgacccatgggggggatcctatatgatggagtgcctgactaacgacgtttatgatgcagccctgaaactgatcaatgaaatcgaagaaatgggagggatggccaaggccgtagccgaagggatccccaaactgcgcatcgaagaatgtgccgcacggcgacaggctaggatagattctggatcagaagttatcgtaggagtgaacaaatatcagctagaaaaagaagatgccgtggaggtgcttgccatcgataatacttctgtcaggaataggcagatagaaaagctaaaaaaaatcaaaagtagtagggatcaggcacttgccgagaggtgtttagcagctctcactgaatgcgcagctagtggagatggaaacattctcgctctggctgtggatgcttcccgagctaggtgtacggtgggagaaatcacagatgcactcaaaaaagttttcggagagcataaagctaacgatcggatggtgtcgggggcttacaggcaggaattcggggaatccaaagaaataacttctgcaatcaagagggtccataaattcatggaaagggaagggaggagacctaggctgctggtagcgaaaatggggcaggatggacatgatcggggggccaaagtcattgcaacaggatttgcagatctgggattcgacgttgatatagggcctctctttcagactcccagggaggtggcccagcaggccgtcgatgctgatgtgcacgccgtggggatatcaacacttgctgcagggcacaaaacacttgtcccagagctcataaaggaacttaactctctcggacggcccgatatactcgtaatgtgtggaggggttataccccctcaagattacgagtttctcttcgaagtaggagtgtcaaatgtgtttgggcctgggactagaatccccaaagctgccgttcaggtgcttgatgacattgagaaatgcctggaaaaaaagcagcagtcagtg

SEQ ID NO: 16708 - DNA, 2250 bp, synthetic construct
  misc_feature 1..2250: note = source = /note="Description of Artificial Sequence: Synthetic coding sequence"
  source 1..2250: mol_type = other DNA
atgctccgggccaaaaatcaactttttctcctgtctccccactacctgcggcaagtgaaggaaagcagcggttcacggcttatccagcagcgcctccttcatcagcagcagccgctgcacccagaatgggccgcactcgcgaagaaacaactgaagggcaagaatccagaagatctcatctggcacactccggaaggaattagtatcaagccactctactccaagcgtgacactatggatctgccggaggagctgccgggcgtcaagccgttcacccgaggaccttaccctaccatgtacaccttcagaccatggaccatacgccagtatgccggtttctccactgtcgaagaatcgaacaaattctacaaagataacatcaaagctggccagcagggcctcagcgtggcattcgatctcgcaacccacagaggatacgactccgacaatcccagagttcggggggatgtggggatggccggagtggccatcgacaccgtggaagatactaagatcctgttcgatggaattccgttggagaagatgagcgtctcaatgactatgaacggcgctgtgatccctgtcctcgccaacttcatcgtgactggagaggagcagggggtgccgaaggagaaactcaccgggaccatccagaatgatatccttaaggaattcatggtgagaaatacttatatcttcccgccggagccatcgatgaagattatcgctgacatctttgaatacacggcgaaacatatgccgaaattcaactcgatctcgatcagcggttaccacatgcaggaagccggagcggacgctattctggagttggcctataccctggcagacggactggaatactccagaactggcctgcaggcgggcctgaccatcgacgagttcgctccgcggctgagcttcttttggggaatagggatgaacttttacatggaaatcgctaaaatgcgggcgggacgccgcctttgggcccacctgatcgaaaagatgttccagccgaaaaactcgaagtcgttgctgctcagggcgcattgccaaacttcggggtggtccctgacggagcaagacccctacaacaacatcgtgcgcactgccattgaagctatggcggccgtgtttgggggtacgcagtcgctccataccaactcattcgatgaagcgctggggctcccaactgtgaagtcggctcggatcgcgagaaacactcagatcatcattcaagaggagtcgggaattccgaaagtggccgacccttggggaggtagctatatgatggaatgccttactaacgacgtgtacgatgcagctctgaaactgatcaacgaaatcgaggaaatgggaggcatggccaaggccgtggccgaagggatccctaaactcaggatcgaggaatgtgcggcaagacggcaggctagaatcgactcgggatcggaggtcatcgtgggcgtgaataagtaccaactggaaaaggaggatgccgtcgaggtcctggcaatcgacaacacttcagtgcggaatagacagatcgagaagctgaaaaagatcaagtcatcgcgggatcaggcgctggctgagaggtgcctggcggcgctgactgagtgtgctgcgtccggagacggcaacattctcgccctcgcggtggatgcttcacgcgcccgctgcactgtgggtgaaatcactgatgccctcaagaaggtctttggagagcacaaggcaaacgacagaatggtgtcaggcgcctaccggcaagaattcggagaatcaaaagaaatcacttccgcaatcaagcgcgtccataagtttatggagcgtgaaggacgccgcccacgcctcctggtggcgaagatgggacaggacggtcacgaccggggggcaaaagtgattgcgacgggattcgccgacctgggattcgacgtggacatcggtccgctgttccagaccccacgagaagtggcacagcaggcggtggacgctgacgtgcatgctgtgggaatctctaccctcgcggcgggccataaaacgctcgtgccggagctcattaaagagttgaattcgctggggaggccggacatccttgttatgtgtggcggcgtgattccgccgcaggattacgaattcttgttcgaggtgggtgtctccaacgtctttgggccgggaacccgcatcccgaaggctgccgtgcaggtgttggacgatatcgagaagtgcctggagaaaaaacaacaatcggtc

SEQ ID NO: 16709 - DNA, 2250 bp, synthetic construct
  misc_feature 1..2250: note = source = /note="Description of Artificial Sequence: Synthetic coding sequence"
  source 1..2250: mol_type = other DNA
atgcttagagctaagaatcaactgtttcttctttcccctcactaccttaggcaggtgaaggaaagctcaggatccagacttattcaacaacgccttctgcatcaacaacagcctcttcatcctgagtgggctgctctggcgaagaagcagcttaaaggaaagaacccagaagatcttatatggcacactccagagggaatctcgattaaaccactgtactccaagagagatacgatggatctgcctgaagagctgccaggcgtcaagccttttacgagaggtccataccctactatgtacacgttccgtccttggaccatccgacagtacgcgggatttagcaccgtggaagagtcgaataagttttacaaagataacataaaagccggtcaacagggcctgtctgtggcatttgatctggcaacccaccggggttatgattcggataacccccgggtgaggggtgacgtcggcatggcgggggtggcgatagataccgtggaggataccaagatactgttcgatggtatcccacttgagaagatgtccgtgagcatgaccatgaacggcgccgtcattccggtccttgcgaactttattgtgactggcgaagaacaaggtgtcccaaaagagaagttgaccggcaccattcaaaatgacattcttaaggaattcatggtgagaaacacgtacattttccctcccgaaccaagcatgaagataatagcagacattttcgaatacactgcgaagcacatgcctaaattcaacagcatctccatctcgggatatcacatgcaggaagccggggcagatgccatcctcgaactggcatacactcttgcagacggattggagtactcgcggactggcctgcaagctggactcactatagacgagttcgcgccaagactgtctttcttctgggggatcggaatgaacttttacatggagatcgctaaaatgcgcgcaggaagaaggctttgggcacaccttatagagaagatgtttcaaccaaagaacagcaagtcgctgttgctgcgggcacactgccagacctcaggatggtcactgactgaacaggacccatataacaacattgtgcgcacggccatcgaagcaatggcagcagtgtttggcggcacgcaatctctgcacaccaactcgtttgacgaagcgctcggccttcctaccgtgaaaagcgctaggattgcccgtaacacccagatcattatccaagaggaatccggtattccaaaggtcgcagacccatggggcggttcctacatgatggagtgtctcaccaatgatgtgtacgacgcagcactgaaattgatcaacgaaatcgaggaaatgggaggtatggcaaaggctgtggcagaagggatcccaaagctgcggatcgaggagtgtgccgctcgcagacaggcgcgcattgattcgggatcagaagtcatcgtcggagtcaataagtaccaactggaaaaagaggatgccgtggaagtgctggctattgacaatactagcgtgagaaatcgccaaatcgagaagctgaaaaagattaagtcctcacgtgatcaagcgcttgcagaaagatgccttgcggcactgactgaatgtgcagcgtcgggggatggaaacatactggcacttgcagtcgatgcatcccgtgcgcggtgtaccgtgggagaaatcaccgatgcactgaagaaggtttttggagagcataaggcaaacgaccggatggtttcaggcgcctaccgccaggaatttggagaaagcaaagaaattactagcgccattaagagggtgcacaaattcatggagagagagggtaggcgccctcggcttctggtcgccaagatggggcaagatggccatgatagaggtgcgaaagtgatcgcgaccggttttgccgacctcggtttcgatgtggatatcggaccactttttcagactccaagagaagtggcccagcaggcagtggatgccgacgtccatgctgtcgggatctctaccctggcagcaggacataagaccctcgtccccgaacttatcaaggaattgaattccctgggacgccctgatatcctcgtgatgtgtggaggcgtgatacccccacaggattacgaatttctcttcgaagtcggggtgtcgaatgtattcggtccaggaactaggatccccaaagcggcggtgcaagtgttggatgatattgagaagtgtctggaaaagaagcagcagtcggtg

SEQ ID NO: 16710 - DNA, 2250 bp, synthetic construct
  misc_feature 1..2250: note = source = /note="Description of Artificial Sequence: Synthetic coding sequence"
  source 1..2250: mol_type = other DNA
atgctgcgggcaaaaaatcagctgttcctcctttcaccgcattacctgaggcaagtgaaggagtccagtgggtctagacttattcagcaacgactgctgcaccagcagcagcctctgcatccggagtgggccgcattagctaaaaagcagctgaaaggcaaaaacccagaggaccttatttggcacaccccagagggtatctccataaagcccctgtacagcaagagagatactatggatttgccggaggaactccctggcgtgaaaccatttacccggggcccgtacccaacgatgtatacgttcagaccttggaccatcagacagtatgcggggttctccactgtcgaagaatctaacaaattctataaggataatatcaaggcggggcagcagggacttagtgtcgcattcgacttggctacccaccgtggatatgatagcgataatcccagagtcaggggtgatgttgggatggcgggtgtcgccatagataccgtagaagatacgaagatattatttgacggaatccctctggagaagatgtccgtcagtatgactatgaatggggccgtgatccccgtgctggctaacttcatcgtaacgggtgaggaacagggggtaccaaaggagaagttgacaggcactatccaaaacgatatccttaaagagttcatggtccggaatacctacatatttcccccggaaccttctatgaagattatcgcagacatctttgagtatactgcaaagcacatgcccaagtttaatagcatttcaatcagtggctatcatatgcaggaagcgggcgccgacgccattctagagcttgcctacactctggcagatggcctggagtattccaggactggactgcaagccggacttacaatagacgagtttgcccccaggctgtctttcttctggggcattggcatgaacttctacatggaaatcgctaaaatgcgcgctggtcggcgcttgtgggctcatctcatagagaaaatgttccagcccaagaattcaaagtcccttctgcttcgcgctcactgccagaccagcggatggtccctgaccgaacaggacccatataacaatatcgtccgaaccgctattgaggctatggccgcagtgtttggcgggacccagtccctgcataccaactcgttcgacgaggcactgggcctgccaaccgtgaaatccgccaggattgcccggaatacacagattattatccaggaggagtccggaatccccaaggtcgccgatccctggggcggatcctacatgatggagtgtctgactaacgatgtgtacgatgcagccctgaagctgataaacgaaatcgaggaaatgggtggtatggcaaaggcggtcgccgagggtattcccaaactccgcattgaggagtgcgcagccaggaggcaggctcggatcgattctggctctgaagtaattgtgggcgtgaacaaatatcagctcgagaaggaggatgccgtggaagtgctcgcaattgataacacttctgttcggaacaggcagatagaaaagctgaaaaaaattaaatcttctcgggatcaggctctcgccgaacgctgcttagctgccttaaccgagtgcgctgcctctggggacggcaacattttggcgctcgctgtcgatgcctctagagctcgctgtactgtcggcgagataaccgatgcattaaagaaggtttttggggaacataaggccaacgacaggatggtttccggcgcctatcgacaggaatttggggagtcgaaagaaattacatctgcaattaagcgggtgcataagttcatggaacgtgaggggcgccgtccacggttgctagtagcaaagatggggcaggacggccacgacagaggggcaaaggtaattgccacgggtttcgccgacctcgggttcgatgtggacatcggaccactgtttcaaacgccccgagaggtcgcccagcaggctgtcgacgcggacgttcacgccgtcgggatctctacactggcggcgggtcacaagactctagtgcccgagctgattaaagaactgaactcgctagggcggccagacatcctggtcatgtgcggcggcgtcatccctccgcaggactacgaattcctgttcgaggtgggggtttctaacgttttcggtcccggcactcgcatcccaaaagccgcagtccaggtgctcgatgacatcgagaagtgtctggaaaagaagcagcagtctgtt

SEQ ID NO: 16711 - DNA, 2250 bp, synthetic construct
  misc_feature 1..2250: note = source = /note="Description of Artificial Sequence: Synthetic coding sequence"
  source 1..2250: mol_type = other DNA
atgctgagagcgaaaaaccagctttttctgctgtcacctcactacctcaggcaagtgaaggaaagctccggtagccgtcttattcagcaacgcctcctgcatcagcaacagcctctgcatcccgaatgggcagcacttgccaagaagcaactgaaggggaagaacccggaggacctgatatggcacacccctgaagggatctcgataaaacccctgtacagcaagcgagataccatggacctcccagaagaactgcctggggtgaaaccatttactcgcggcccataccctaccatgtacacgtttagaccatggaccattaggcagtacgcagggttttccaccgtagaagaatctaataagttctacaaggacaacattaaagcaggacagcaaggactcagcgtggcattcgacctggcaactcatcgcggatacgattcggacaacccacgggtgagaggggatgtaggtatggctggagtggcgattgacacggtggaagatactaagattctcttcgatggaatcccacttgagaaaatgtcagtctcgatgactatgaacggagcagtgattcctgtcctcgcaaactttatagtaaccggcgaggaacaaggagtgccgaaagaaaagttgaccggaaccattcaaaacgatatactgaaagaattcatggtcagaaacacttacatttttccacccgagccatcaatgaaaatcatcgcagatatcttcgaatacaccgcaaagcatatgccgaagtttaactcgatctccatttccggttatcatatgcaagaggcgggggcggatgcaatccttgaacttgcatacactttggccgatggactcgagtactcacggaccggactgcaggcaggactgaccatcgacgaatttgcacccagactttcgttcttctggggaattgggatgaatttctacatggagatcgccaagatgagagcaggccggagactttgggcacaccttattgaaaagatgtttcagccaaagaactccaagagcctgctgctgcgagcacactgtcaaacttccggttggtcccttacggaacaggacccctataacaatatcgtgcggactgcaatagaggcaatggcggcggttttcggtggcacccaatccctccataccaattcgtttgacgaggcgcttgggctgcctactgtgaaaagcgcaaggatcgctcgaaacactcaaatcattatccaggaagagtcaggtattccaaaggttgccgacccgtggggaggttcctacatgatggaatgcctgactaacgatgtttacgatgcagccctcaaactcattaatgaaatcgaagaaatgggcggtatggcaaaggcagtggcagagggcattcctaaactccggattgaagagtgcgcggcacgtaggcaggcccgcatagattcggggagcgaagtcattgtaggtgtgaataagtaccagctggaaaaagaggatgccgttgaagtgctcgcaattgataatacgagcgtcagaaatcgccaaattgagaaactgaagaagattaagtcatcgagggatcaggcactggcagagcggtgtctggcagcccttaccgagtgtgcggcctctggtgacggaaacatacttgcgcttgctgtggacgcatcgagagcacgatgtactgtgggagaaattaccgatgcccttaagaaggtctttggtgagcacaaggctaacgataggatggtttcgggcgcctacagacaagaatttggcgaatcaaaagaaattaccagtgctataaagagggtgcataagtttatggagcgtgaaggtcgtcgacctcggctgctggtggccaaaatgggacaagatggtcatgacaggggtgctaaggtcatagcaactggatttgctgatctggggtttgacgtggatatcggaccccttttccagacgcctcgggaagtggcacaacaggccgtggacgctgatgtccatgccgtgggcatctctactctcgcagctgggcacaaaacgctcgtgcccgagctcattaaggaattgaactcgttgggtagaccggatattctggtcatgtgcggaggcgtcattccgcctcaagactacgagtttttgttcgaagtgggagtctcaaatgtgttcggccctggaacccgcataccaaaggcggcagtccaagtccttgatgatatcgaaaagtgtcttgaaaagaagcaacagtcggtg

SEQ ID NO: 16712 - DNA, 2250 bp, synthetic construct
  misc_feature 1..2250: note = source = /note="Description of Artificial Sequence: Synthetic coding sequence"
  source 1..2250: mol_type = other DNA
atgttgcgtgctaagaaccagctatttctgctgtcgccacactacctgcggcaggtcaaggaatctagtggaagtcggttgatccagcagcgacttctgcatcagcaacagccgttacaccctgagtgggcggccctcgctaagaaacagttgaagggcaagaacccggaggatctaatctggcatacaccagagggtatctcaattaagccactgtactcaaagcgtgacactatggacctgccggaggagctacctggtgtcaagccgttcacacgtggcccttatcctaccatgtatacttttcgtccgtggacaattagacaatacgccgggttctccacagtggaagagtctaataaattctacaaagacaatatcaaggccggtcagcagggactctccgtcgcgtttgatcttgccacacaccgcggatatgacagtgataacccgagggtgaggggagatgttggcatggcaggggtggcaatagatacggttgaggacacaaagatcttattcgatgggattcctttagagaaaatgtctgtcagcatgaccatgaatggcgcggtcattcccgtcttagccaatttcatagtcacgggtgaagagcagggagtgccgaaggaaaaactgacgggcacaatccagaacgatattctgaaggagttcatggtcagaaacacttacatcttccctccagagccatcgatgaaaattattgccgatattttcgagtatactgcaaagcatatgccaaaatttaactccattagcatttccggatatcacatgcaggaagctggggctgacgcgatcctagagcttgcgtatacattggccgatggacttgaatattctaggacaggactacaggctggtttgaccatcgacgaattcgcgccacgattgagctttttttggggtattggtatgaacttttatatggaaatcgccaagatgcgagcaggaaggcgcctttgggcacaccttatagagaagatgttccagcccaaaaacagtaagtcgttgctgttgcgggctcattgtcagacatctggctggtcgcttacagaacaggacccctacaataacattgttcgaactgccatcgaggctatggccgcagtattcggcggcacacagtcccttcataccaactcctttgacgaagcccttggtctccccaccgtgaaaagcgctaggatcgcacgaaatacacagattattatccaagaagagagcgggatccccaaagtcgcggacccttgggggggctcttatatgatggaatgcttgacgaatgacgtgtacgatgcggcgctcaagctgattaatgagatcgaggaaatgggaggtatggctaaggccgtggctgagggcatccccaagctacgaattgaggaatgcgctgcccgtaggcaggcacgaattgactccggatcagaagtaatcgtaggtgtcaacaaatatcaactagagaaggaagatgccgtggaggtactagccatcgataatacctccgttcggaatagacagattgagaagcttaaaaagatcaagtcgtcaagagatcaggccctcgctgaacggtgtctggcggccctgaccgaatgtgccgcttcaggcgatggtaacatcttagccctcgctgttgacgctagtcgggctaggtgtactgttggtgaaatcaccgacgctctaaagaaggttttcggtgagcacaaagcgaacgacagaatggtgtcgggagcatatcgtcaggaattcggcgaatcgaaggagattacttcggctatcaaaagggttcacaagtttatggagcgtgaaggccgccgaccaagactccttgtggccaaaatgggccaggatggacatgatcgaggtgctaaggtcatagcgacgggtttcgcagatctgggcttcgatgtagacattggaccgttgttccaaacgcctcgggaggtcgcccaacaggctgtcgacgcagacgtccacgcggttggtatcagtacactggcggccggtcacaagactctagtacctgagttgataaaagaactgaattctttgggtcgccccgacatcctcgtgatgtgtggaggagtcatccccccccaggactatgagttcctgttcgaagtcggtgtaagtaacgttttcggtcctggtactcgaatccccaaggctgccgtccaggttctcgatgatattgaaaagtgtctggaaaaaaaacagcaatccgtg

SEQ ID NO: 16713 - DNA, 2250 bp, synthetic construct
  misc_feature 1..2250: note = source = /note="Description of Artificial Sequence: Synthetic coding sequence"
  source 1..2250: mol_type = other DNA
atgttaagagcaaaaaaccaattgttcctcctgtcaccgcactacctcagacaggtgaaagagagcagcgggtctaggctgatccagcaacggctcttacaccagcagcagcctttgcacccagaatgggccgcactggccaaaaagcagttaaaaggaaaaaatcctgaagatttaatttggcatacaccagagggaataagcattaagcctctctacagcaaaagggatactatggatctcccagaggagctccccggggtaaagccattcaccaggggtccttaccccacgatgtacacattccgtccctggacaatcaggcaatatgccggattcagcaccgtcgaggagagcaataaattctataaggataacatcaaggctggccagcaggggctgtctgtggccttcgatctagcaacacacaggggctacgacagcgataacccaagagtgaggggagacgttgggatggcgggcgtcgctatagatacagtagaggacaccaagattctatttgacggaatcccattggagaagatgtccgtttctatgacgatgaatggcgccgtcatccctgtcttggccaacttcattgttacaggagaggagcagggggtccccaaagagaagttgacgggcaccatccagaacgatatcctgaaggaattcatggtgcgaaacacatatatcttccccccagaaccttccatgaagatcattgcagacatcttcgagtataccgcaaaacatatgcccaagttcaattccatcagcatcagcggctatcacatgcaagaggccggcgctgacgccattctggagttggcatatacactggctgacggtcttgaatattcgagaacaggacttcaggctgggctcactatcgacgagttcgcccccagactctcctttttctggggcatagggatgaatttttacatggaaatagccaagatgcgagcgggcaggagactgtgggcgcatctgattgaaaaaatgtttcagccaaagaacagcaagagcctcctgctgagggcacattgccagacctctggctggtcacttacagaacaagacccctacaacaatatagtcagaaccgccatagaagctatggccgctgtgttcggaggcactcagtcccttcacaccaactctttcgacgaggcccttgggctccccactgtcaaatccgctcgtatcgctagaaatactcagatcatcatccaagaggaatccgggatccctaaagtcgcagacccctggggagggtcttacatgatggaatgtctcacaaacgatgtgtacgacgctgctctgaaactcattaacgagatcgaggagatgggaggaatggccaaggcagtggccgagggaataccaaagctacgaatcgaagaatgtgccgcccgccgacaagcccgcatagactcgggatctgaagtgattgtgggggtcaataagtaccagctcgaaaaggaggatgccgtcgaagtcctcgctattgacaacacctccgtgcgtaatcgccaaattgagaaattgaaaaaaatcaaatcatccagggaccaggcactagctgagcggtgcctggccgccctgaccgaatgtgccgcaagcggcgacggaaacatcctggcccttgcagtggatgcttcccgggcacggtgtacggtcggagaaatcaccgacgccctcaagaaggtgtttggtgaacataaggctaacgataggatggtatctggagcatacagacaggagtttggagagtccaaggagataacttctgcaataaagcgggtgcacaagtttatggagagggaggggcggcgacccaggctcctggtggcgaagatgggtcaggacggacatgatagaggggcaaaggttatcgccaccggtttcgccgacttgggatttgacgtggatatcggacctttgttccagaccccaagagaagtcgcccagcaggctgttgacgctgatgtccacgctgtgggtatttcaaccctggcagccggccacaagactttggtccccgagcttatcaaggagcttaatagtctcgggaggcccgacatcttagtgatgtgcggaggtgtgatccccccgcaggattacgagttcctgtttgaggtaggtgtgtccaacgtgttcggacctggcacacggatccccaaggctgccgtgcaggtcctggatgatatagagaaatgcctagaaaagaagcaacagtccgtg

SEQ ID NO: 16714 - DNA, 2250 bp, synthetic construct
  misc_feature 1..2250: note = source = /note="Description of Artificial Sequence: Synthetic coding sequence"
  source 1..2250: mol_type = other DNA
atgcttcgagctaaaaatcagctattcctattgtctccgcactatctccgtcaagttaaagaatcatcaggatctcgtctcatccagcaacgattattgcatcaacaacaaccactccatccggaatgggctgctctggcaaaaaaacagctcaaaggaaagaatccggaagatctgatttggcatacaccagaaggcatttcgataaagccgctctattccaaaagagacacaatggacctaccagaggaactaccaggtgttaagccatttactagaggaccatacccaactatgtatactttccgtccgtggactattagacaatatgcaggattttcgacagtcgaagaatcgaacaaattctacaaagataatataaaagcgggtcaacagggattgagtgttgcttttgatcttgctacccacagagggtatgactcagataatcctagagtccgaggagacgtaggaatggccggagttgcgatcgacactgttgaggatacaaagattctttttgatggaattccattggaaaaaatgtctgtctccatgacaatgaatggagcagttattccggttctagcgaattttatagttacaggcgaggaacaaggcgttcctaaggagaaattgaccgggaccattcaaaacgatatattgaaggaattcatggttcgtaatacatatattttcccgccggagccttctatgaagatcatcgcagacatttttgaatacaccgctaagcacatgcctaaatttaattccatctctatttcgggatatcacatgcaagaagccggagccgatgccattctggaacttgcttatacacttgctgacggccttgaatactctagaacgggtctccaagctggacttacaatcgatgaatttgcaccgcgtctctcttttttttggggaattgggatgaatttctatatggaaatcgcaaaaatgcgggcaggcagacggctctgggcacacctaatagagaaaatgttccaaccaaaaaattcgaagtcattgctactgcgtgcgcattgccaaacttcaggatggtcgcttacggagcaggacccatataataacattgttagaacagcgattgaagctatggctgctgtttttggtggcacacagtctctgcacaccaactcatttgacgaagcgcttggattgcctacagttaagagcgcacgcattgcaaggaatacccaaattatcattcaagaggaaagcggcattccaaaagttgcagatccgtggggtgggtcgtatatgatggaatgcttaactaatgacgtttacgatgcagctctcaaactgattaatgagattgaggagatgggaggaatggctaaggcagtggccgaagggatcccgaaactcagaattgaagagtgtgcagctcgtagacaagccagaatcgattcaggatctgaggtcatcgttggagtcaataaatatcagttggagaaggaagatgcggttgaggtactagctattgataatactagcgtgcgaaatcggcaaatagaaaagctaaaaaagatcaaatcatcgagagaccaggctctcgccgaaagatgcttggcagctcttaccgaatgcgccgcttctggagatggaaacattctggcattagcggtagatgcttcgagagctcgatgtactgttggcgagatcacggatgcgttgaagaaggtgttcggggaacataaggctaatgatcgtatggtttcaggcgcataccgccaggagttcggagaatccaaggaaattacttctgcaataaaacgggtgcataagttcatggaaagagagggaagaaggccacgtctactggttgcgaaaatgggacaagatggacatgatcgaggtgccaaagtaattgcaaccggattcgcggatttgggatttgatgtcgatattggaccgctgttccaaactcctagagaagttgcgcaacaggcggtcgatgctgatgttcatgcagtgggtattagtactctcgcagccggacataaaacactagttccagaactcattaaggaattgaatagtctgggacgacccgacatccttgtgatgtgcggaggtgttatcccaccgcaggactatgaattcctttttgaggtaggcgtatctaatgtttttggaccgggaactcggatcccgaaagcagcggtgcaagttttggatgacattgagaagtgtttagagaagaaacaacagtccgtg

SEQ ID NO: 16715 - DNA, 2250 bp, synthetic construct
  misc_feature 1..2250: note = source = /note="Description of Artificial Sequence: Synthetic coding sequence"
  source 1..2250: mol_type = other DNA
atgctgagagcaaaaaaccaacttttcctgctgtctccgcactacctccggcaggtgaaggaatcgtccggatcgagactcatccaacagcgcctgttgcatcagcaacaaccactccatccggagtgggccgcactcgccaaaaaacaacttaaaggcaagaatccagaggatcttatctggcacaccccggagggtatcagtattaagccgctgtactcgaagcgggacactatggatctcccagaggagctcccgggggtgaagcctttcacccggggcccttacccaactatgtataccttccggccgtggaccatccggcaatacgccggatttagcactgtggaggaatccaacaagttctacaaggacaacatcaaagcgggccaacagggactgtcagtggcgtttgaccttgccactcatagaggatacgatagcgacaacccgagagtgaggggggatgtgggaatggccggcgtcgcgatcgacaccgtggaagatactaagattctgtttgacggtatcccgttggaaaagatgagtgtgtcaatgactatgaatggagctgtgatccccgttttggccaatttcatcgtcactggggaagaacagggagttcccaaggaaaagctgaccggtaccatccagaatgatatcctgaaagaattcatggtgcggaacacttacatcttcccccctgagccatcgatgaagatcatagccgacatctttgaatacaccgcgaagcatatgccgaagttcaacagcatctcgatctccgggtaccacatgcaagaagcgggtgcggatgcgatcctggagctcgcctataccctggctgacggactggaatactcgaggaccggactccaggccggtctgacgatcgacgagtttgctccgcggctgtctttcttttggggcatcggcatgaacttttacatggagatcgccaaaatgcgcgccggacgccggctctgggctcacctgatcgaaaagatgttccagccaaagaattcaaaatctctgctgttgcgagcacactgtcagacctcaggatggtccctgaccgaacaggacccgtacaacaacatcgtcaggactgccatcgaggccatggcagctgttttcggcggcactcagtccctgcataccaactcgttcgacgaggcgctcggactgccaaccgtaaaatcggctcgcattgcccgtaacacccagatcatcatccaagaagaaagcggaatcccgaaggtcgccgatccgtggggaggctcctacatgatggaatgtctgactaacgacgtgtacgatgcggcgctcaagctcatcaatgaaatagaagagatgggcgggatggccaaggcagtggcagaaggcatccctaagctgagaatcgaggaatgcgctgcacgcaggcaggcgcgaattgacagcggatcagaggtcatagtgggcgttaacaaatatcagctggagaaggaggacgctgtcgaggtgctggctattgataacactagcgtgcgaaatagacaaattgagaagttgaagaaaatcaagtcgagtcgtgaccaggcactcgccgagcgctgcctggccgccctgactgaatgcgctgcctcgggagatggaaatatcctcgcactggcggtcgacgcctcgcgggccagatgcaccgtgggcgagattactgacgcgctcaagaaggtgttcggagaacataaggcgaacgaccgcatggtgtccggtgcgtaccgccaagaattcggagagtcgaaagaaataacgtcagccattaagcgggtccacaagtttatggagcgcgaagggcggcggcctagactgctggtggcaaagatggggcaggatggacacgaccggggagccaaggtgatcgccaccgggttcgcggatcttggcttcgacgtggacataggcccgctcttccaaacgccgcgtgaggtggcacagcaggccgtggacgccgacgtgcacgcggtcggaatttcgaccctggcggctggacacaaaacgctcgtcccggagcttatcaaagagctcaactccttggggcggcctgatatcttggtgatgtgcgggggtgtgatccctccccaagattacgaattcctgttcgaagtgggagtctccaatgtattcggtcccggaactcgcatcccgaaggctgccgttcaggtcctggatgacatcgaaaagtgcctcgaaaagaaacagcagagcgtg

SEQ ID NO: 16716 - DNA, 2250 bp, synthetic construct
  misc_feature 1..2250: note = source = /note="Description of Artificial Sequence: Synthetic coding sequence"
  source 1..2250: mol_type = other DNA
atgcttcgggcgaagaatcagctgttcctgctgtctccgcactacctgcgtcaggtaaaggaatcatccggttcgagactcatccagcagcggctcctgcaccagcagcaaccactgcaccctgaatgggctgccctggccaagaagcagctgaaaggaaagaacccggaagatcttatctggcacaccccggaagggatcagcatcaagcctctgtactcgaaacgcgatactatggatctgccggaagagttgccgggagtcaaaccgtttacccgggggccatacccgaccatgtacactttccggccgtggactattagacagtacgccgggttttccacggtcgaggaatcgaacaagttctacaaggataacatcaaagccggccagcaagggttgtcggtcgcgttcgacctcgccacccatagagggtatgactcggataatcctagagtcagaggagatgtcggtatggccggcgtggcgatcgacactgtcgaggacacgaaaattttgttcgacggaatcccactggaaaaaatgagcgtttcaatgaccatgaacggggccgtgatccccgttttggcaaatttcatcgtgaccggtgaggaacagggagtgcccaaggaaaagctgactggcaccatccaaaacgacatcctcaaggagttcatggtgaggaatacgtacatcttcccgcccgaaccatccatgaagatcattgctgatatcttcgaatacaccgctaagcatatgccaaagttcaacagcatcagcatctccggttaccacatgcaggaagcaggagcagacgcgatcctggaactggcctacactcttgccgacggactggagtattctaggactggactccaagcgggcctgactatcgacgagttcgctccgcggctcagcttcttctggggcattggaatgaacttctacatggaaatcgccaagatgcgggccggacgcaggctgtgggcccatctcatcgaaaagatgtttcagccgaagaacagcaaatcactccttctgcgggcacattgccaaacctcaggctggtccctcactgagcaggacccatacaacaacatcgtgcggactgccatcgaggcaatggcagcagttttcggcggtactcagtcactgcacaccaattcgtttgatgaggcgttgggactccctaccgtgaagtccgctcgcattgctcgcaacacccagatcattatccaggaggagagcggaatcccgaaggtggccgacccttggggcgggagttacatgatggagtgcctcaccaatgatgtgtacgatgcagcactcaagctgatcaacgaaattgaagaaatgggcggcatggcgaaagctgtggcggaaggcatcccgaagctccggatcgaagaatgcgctgccaggcgccaggcgcgaatcgactcgggatccgaagtgatcgtgggagtgaacaagtaccagctggagaaggaggatgctgtcgaggtgctggcaatcgacaataccagcgtgcgcaaccggcaaatcgagaaactgaaaaagatcaagtcctcccgggaccaagccctggcagagcgctgtctggccgcactgactgaatgcgcggcatcgggagacggcaacatactcgccctggcggtggatgcgtcgagagcgagatgcactgtcggcgagatcaccgacgctttgaagaaggtctttggagaacataaagcgaatgacagaatggtgtcaggggcctaccgccaagagtttggagagtccaaggaaatcacctcggccattaaacgcgtccacaaattcatggaacgagagggacgccgccctcggctccttgtcgctaagatgggccaggacggacacgatcgcggagccaaagtgatcgccactggatttgcggacctgggtttcgacgtggatattggtccgctgttccaaaccccgagagaagtggcccaacaggccgtggatgccgacgtgcacgctgtcggaatctcgactctggcggccggacataagaccctcgtgcctgagttgatcaaggagcttaactcactgggaaggccagacattttggtgatgtgtggaggtgtcataccaccccaagactacgaattccttttcgaagtgggggtgagcaatgtgtttggacccggaacgcgcatcccaaaggccgcagtgcaggtgctcgacgatatcgaaaagtgcctggagaagaaacaacaatccgtc

SEQ ID NO: 16717 - DNA, 2250 bp, synthetic construct
  misc_feature 1..2250: note = source = /note="Description of Artificial Sequence: Synthetic coding sequence"
  source 1..2250: mol_type = other DNA
atgctaagagctaaaaaccaactatttctacttagcccgcattacttgcgtcaagtaaaagaaagttcagggtctcgtcttatccaacaaaggttgttacatcagcagcaacctctacatccggaatgggccgcgctggccaaaaagcagctgaagggtaagaatcctgaagatctgatctggcatacgccggaaggaatttctatcaaaccactctatagcaaacgcgatacgatggatttaccagaagaactcccgggcgttaaaccgttcacgagaggaccgtacccgacaatgtatacattcagaccctggactattcggcagtacgccggctttagcactgtcgaagaatcaaataagttttacaaagacaatattaaggctggacaacaaggtcttagcgtcgcgtttgacctggcgactcatcgtggatatgactctgataacccgcgggtgcgcggagatgtcgggatggccggtgtggcaatcgatacagtcgaagacacaaaaattctgtttgacggcattccactggagaaaatgtccgtttcgatgacgatgaatggagcggtaataccggtgttggcgaatttcattgtgacgggtgaagaacaaggagtccccaaggagaaactaactggaacaattcaaaatgatatcctaaaagagtttatggtgcggaatacatacatttttcctcctgaaccgtcgatgaaaattatcgctgacatttttgaatacacagctaaacatatgccgaagtttaactcaatctcaatcagcgggtatcatatgcaagaagcgggtgcagacgcgatactcgaactagcgtatacactggctgatgggttggaatacagtcgcaccggactacaagctggtttaacaatcgacgaatttgcacctagactttcttttttttgggggataggtatgaatttctatatggaaatagcaaagatgagagctggtcggcgactgtgggcgcatctgatcgaaaaaatgtttcaaccgaaaaattctaaaagcttgttgttaagagcacactgtcagacaagtggctggtctctcacggagcaagatccgtacaacaatatcgtgcgaacggctattgaggctatggcggcagtatttggtggtacacagagcttacatacgaattcctttgacgaagctctaggactgccgacggttaaaagcgcgcggattgctcgtaatacacagatcatcattcaggaagaaagcggcatcccgaaagtcgcggatccctggggcggtagttatatgatggaatgcttgacgaatgatgtttatgacgcggcacttaaattgattaatgaaatagaagaaatggggggcatggcgaaagcggtcgccgaaggaataccgaaactcagaattgaagagtgtgctgcgcgccgtcaggcgcgtatcgatagtggatccgaggtgattgtcggagtaaacaagtaccaattagaaaaagaagatgctgtagaagtgcttgcgattgataatacttcagttcgcaaccgtcaaatcgaaaagttaaaaaaaataaagagctcaagagaccaagcattagcggagagatgtctggcagctcttacagagtgcgctgcgtcaggagatggaaacattcttgcattagcggtggatgctagccgcgctcgatgtacagttggagaaatcacagacgcgttgaaaaaagtctttggagaacataaagctaacgacagaatggtttctggggcctatcggcaagagtttggtgagtctaaggagataacatcagccattaaacgcgtacataaatttatggaacgggaaggccgtaggccgaggttacttgtagcaaaaatgggccaagatggccatgataggggagccaaagttatagccacgggctttgccgatttaggattcgatgttgacatcggacctctttttcagacacccagagaagtcgcccaacaggcggtggatgcggatgtccacgcagttggaatctctacgcttgcagcaggacataaaactttggtccctgagcttatcaaggaactgaattcacttggcaggccggacattcttgtgatgtgtggtggagttattccgccgcaagactatgagtttctttttgaggttggcgtttcaaatgtatttgggccgggtacccgtattccgaaggctgctgtgcaagtgttagacgatatcgaaaagtgtcttgagaaaaaacaacaatctgtg

SEQ ID NO: 16718 - DNA, 2250 bp, synthetic construct
  misc_feature 1..2250: note = source = /note="Description of Artificial Sequence: Synthetic coding sequence"
  source 1..2250: mol_type = other DNA
atgctgcgagcgaagaatcagctgttcttgctgtcaccgcattaccttaggcaggtgaaggaatcctcgggatcaagactcatccagcaaaggctcctgcaccaacagcaaccgctgcacccggaatgggcggcccttgcgaagaagcaactcaagggtaagaatcccgaagatctgatctggcatactcctgaaggcatctcgatcaagccgctgtactccaagagagatacgatggatctgccggaagagctcccgggcgttaagccattcacccgcggaccgtatccgaccatgtacaccttccgcccttggaccattcgccaatacgccgggttctcgactgtcgaagagagcaataagttctacaaggacaacattaaagcgggccaacagggactctcggtggcgttcgatctggctacccacagaggctacgattcggacaacccgagagtccgcggtgatgtgggcatggccggggtggctatcgacaccgtggaggacaccaagatcctgttcgacggaattccgctcgagaagatgtcagtcagcatgactatgaacggagctgtcatccccgtgttggcaaactttatagtgactggagaggagcagggcgtccccaaggagaaactgactgggactatccaaaatgacatccttaaggagttcatggtgaggaacacctacattttcccgccggaaccttccatgaaaatcattgccgacatcttcgaatataccgcaaagcacatgccgaaattcaattctattagcatctccggataccacatgcaggaggccggggcagatgcaatcctcgagctggcctacactttggccgatggccttgagtacagccgcactggactgcaggcgggactcacgatagatgaattcgcgcctcggctttccttcttctggggaattggtatgaacttttacatggagatcgccaagatgcgcgccggacggagactctgggcccacctgatcgaaaagatgttccagccgaagaactccaaatcgttgcttctgagagcccattgtcagacctcagggtggtcgttgaccgaacaggatccttataacaacatcgtgcgcactgcaatcgaagctatggccgcagtctttggcggcactcagtcgttgcacaccaattccttcgacgaggccctgggcctcccgaccgtgaagagcgctcgcattgcgagaaacactcaaatcatcatccaggaagagtcgggcatcccgaaggtggccgatccttggggtggaagctacatgatggaatgtctgactaacgacgtctacgacgccgccctcaaactcatcaacgagatcgaagaaatgggcggaatggcaaaggcggtcgcggagggtatcccgaagctgcggattgaagagtgcgccgcacggcggcaggcaagaatcgacagcggatccgaagtgatcgtgggtgtcaataagtaccagttggaaaaggaggacgccgtggaggtgctggccatcgataacacgtcagtcaggaaccggcagatcgaaaagctgaagaaaatcaaatcctcgcgggaccaagcactcgccgaacgctgcctggctgctctgaccgagtgcgcggcctcgggggatggaaacattctggcactggccgtcgatgcctcgcgggcccgctgcacggtgggcgagattactgacgccctgaagaaggtgtttggcgaacacaaggctaacgatcgcatggtatcgggagcctaccggcaggaattcggcgagagcaaagaaattacctcggccatcaagcgggtccacaagttcatggaacgcgagggtcgccggccgcgcctgctggtggcgaagatggggcaggacggacacgatagaggcgcaaaagtgatcgccacgggattcgcggatctggggttcgacgtggatattggcccgctgtttcagaccccccgcgaagtcgcacaacaagcggtggatgccgatgtgcacgccgtgggaatctccactctggccgcaggacataagactctggtgcctgagctgatcaaggaattgaattcactgggacggccggacatcctcgtgatgtgcgggggagtgataccgccccaggattacgagttcttgttcgaagttggcgtttccaacgtgttcggccccggcacccgcattccaaaggctgcggtgcaagtgctggacgatatcgaaaagtgcctggaaaagaagcaacaatcggtc

SEQ ID NO: 16719 - DNA, 2250 bp, synthetic construct
  misc_feature 1..2250: note = source = /note="Description of Artificial Sequence: Synthetic coding sequence"
  source 1..2250: mol_type = other DNA
atgctcagagcgaagaatcagctattcctgctctcacctcactatctgaggcaggtcaaggagagctcggggagtaggcttatccagcagcgcctcctacatcaacaacagcctctccatcctgagtgggctgctctggccaagaaacagcttaaaggcaaaaatcctgaggatctgatttggcataccccagagggcatttctattaaacccctgtacagcaagagggacaccatggatttgcccgaagaacttccaggtgtgaagccttttacaagagggccatacccaaccatgtacaccttccgaccctggaccattcgacagtacgctggattttctactgtggaagaatccaataagttttacaaagacaacataaaagcaggtcagcagggtctgtctgtcgctttcgacttggcgacacaccgggggtacgattcggacaaccctagggtgaggggagacgtcggcatggctggcgtcgccatagacactgttgaagacacaaagatcttgttcgatggaataccacttgagaaaatgagtgtcagcatgactatgaacggtgcagtgatacctgttttggccaactttatcgttaccggcgaggagcagggagtaccgaaggagaagctcacaggtacaattcagaacgacatcctcaaggagttcatggtgagaaatacttatatatttccccctgagccgtccatgaaaattatagccgacatcttcgaatacaccgcgaagcacatgccaaagtttaactccatctcgatctctgggtaccacatgcaggaggccggcgcagacgctattcttgaactcgcctataccctcgccgatggcctggaatatagtcgcacgggcttacaggctggtctcaccattgacgaatttgcgccaaggctcagtttcttttggggcatcggtatgaatttctatatggagatcgcaaagatgcgggccgggcggcgcctctgggcccacctgatagaaaagatgtttcagcccaaaaatagcaagagcttactcttaagggcccactgtcagacctctggctggtccttaactgaacaggacccttacaacaacatcgtgagaactgcaatcgaagctatggcggcagtatttggcggaacccagtctttgcacactaacagcttcgatgaggccctgggccttcccactgtcaagtctgcaagaatcgcaagaaatacccagatcatcatccaggaggagtcgggtattccaaaggtcgcggacccttggggcggatcctacatgatggagtgcctgaccaatgatgtgtacgacgccgccttgaagcttatcaacgagatcgaagagatggggggaatggccaaagcagtggccgaagggattcccaagctcaggatcgaggaatgtgccgctaggagacaggcccggatcgattcagggtctgaggtaattgtcggcgtgaataagtatcagctggaaaaggaggatgccgtggaagtgctggctattgacaacacatccgttagaaaccgtcagatcgaaaagctgaaaaagattaaatcaagcagagaccaggcgttagcggagagatgcctcgctgctttgacagagtgtgcagcttccggcgacgggaatattttagccctggctgtggatgcttctagggctaggtgcaccgtcggagagatcactgacgcactgaagaaggttttcggcgagcacaaagcaaacgataggatggtgtccggcgcgtataggcaagagttcggggaatcaaaggagattacaagcgcgattaaaagggtgcacaagtttatggaacgagaaggccggcggcccagattactggttgctaagatgggtcaggatgggcatgaccgcggggctaaggttattgccaccggctttgcagatcttggctttgatgttgatattggaccactgttccaaaccccccgggaggtagcccagcaggccgtcgacgccgacgtgcatgcggttggcatctccactctagcggcagggcacaagactctggtgcctgaactgatcaaagagctaaacagccttggccgacctgatattctagtaatgtgtggcggagttatccccccccaggactatgaattcctgtttgaggtgggtgtgagtaatgtgtttggcccgggtacccgcatcccgaaagccgccgtccaagtgttagatgatatcgagaaatgcctggaaaagaagcagcagtccgtt

SEQ ID NO: 16720 - DNA, 2250 bp, synthetic construct
  misc_feature 1..2250: note = source = /note="Description of Artificial Sequence: Synthetic coding sequence"
  source 1..2250: mol_type = other DNA
atgttgagagcaaagaatcaactgtttttgctctcgccgcactatctccgccaggtgaaagagagctcggggtcacgcctcatccagcaaaggctcctccatcagcagcaaccgttgcatcctgaatgggcggccctggccaagaagcaactgaaggggaaaaacccagaggatcttatctggcacactccagagggcatctctattaagccgctctacagcaaacgcgacactatggatctgcccgaagaacttcctggagtgaagcccttcacccggggaccctacccgaccatgtacacgttccgcccctggaccatacggcagtacgccggcttcagcaccgtcgaagaatctaacaaattctacaaggacaacattaaggcaggccaacaaggtctgtccgtcgcgttcgacctggcaactcatcggggctatgattccgacaatcctcgagtccgcggtgacgtgggaatggcgggcgtcgctattgatactgtggaagatactaagatcctgttcgatgggattccgctggagaaaatgtctgtcagcatgaccatgaacggagcagtgatcccagtgcttgccaacttcatcgtgactggagaagaacagggagtgccaaaggaaaagctcaccggtactatccagaatgatatcctcaaagagttcatggtccggaatacctacatcttcccgccggagccgtcgatgaagataattgccgacattttcgagtacaccgccaaacatatgccaaagtttaacagcatatcgatcagcgggtaccacatgcaggaagcaggagcggacgctatcttggaactggcgtacacccttgccgacggactggaatattcccgcaccggactgcaggccgggctcaccatcgatgaattcgcccctcggcttagcttcttctggggtatcggcatgaatttctacatggaaatcgcgaagatgagagccgggcgccggctgtgggcgcacctcatcgaaaagatgttccagccaaaaaactcaaagtcactcctcctccgcgcccactgtcagacctcaggctggtcgcttacggaacaggacccgtacaacaatatcgtgaggaccgcgatcgaggcaatggccgcggtgtttggaggaacgcagtcgctgcacaccaactcatttgatgaggcactgggtctgccgacggtgaagagcgcaagaatcgcccgcaacactcagatcatcatccaagaggaatcggggatcccgaaggttgcagatccttggggtggatcctacatgatggagtgtttgacgaatgacgtctacgacgcggccctgaagctgatcaacgaaatcgaagagatgggtggaatggccaaggcggtggctgagggaattccgaagctgaggatcgaggagtgcgcagccaggcggcaagccagaattgactccgggtccgaggtgatcgtgggcgtcaacaagtaccagctcgagaaggaggatgcggttgaagtcctggctatcgataacacctcagtcagaaatagacagatcgagaaactcaaaaagatcaaatcctcacgggaccaagccctggctgaaagatgtctcgccgcgctcactgagtgcgcggcatcgggcgacggtaatatcctggcactggccgtcgacgcatcgagggccagatgcactgtcggcgaaataaccgatgctctgaagaaagtgttcggagaacataaagccaatgaccgtatggtgtcaggtgcttacagacaagagtttggagagagcaaggaaatcacctcggcgatcaagcgcgtgcataagttcatggaacgcgaggggcgcaggccacggctgctcgtggccaaaatgggccaagacggacatgaccgtggagcaaaagtgatcgcgaccggcttcgcagacttgggatttgatgtggacatcggtcctctttttcagactccgcgcgaagtggcgcagcaggcggtggatgccgacgtgcacgctgtgggaatctccacccttgcagctggccacaaaactctggtgccagaactgattaaggaactgaattcgctgggccgcccagatatcctggtgatgtgcggaggagtgatccctccgcaagactacgagttcctgttcgaggttggagtgtccaacgtgtttggaccaggaacgagaatcccgaaggccgccgtccaggtcctcgacgacattgagaagtgtctggaaaagaagcaacagtccgtg

SEQ ID NO: 16721 - DNA, 2250 bp, synthetic construct
  misc_feature 1..2250: note = source = /note="Description of Artificial Sequence: Synthetic coding sequence"
  source 1..2250: mol_type = other DNA
atgcttagggcgaagaaccagctcttcctgctgtccccacattacttgcgccaggtaaaggaatcaagcggttcccgcctgatccagcagcgactgttgcaccaacagcagcccctgcacccggaatgggccgccctcgccaagaaacagctaaagggcaaaaatccagaagatctaatctggcatactcccgaaggaatttcaattaagcccctatattccaagcgcgataccatggacctgccagaagagctgcctggggtcaaaccgttcactcgcggcccctacccaaccatgtacactttccgcccatggaccataaggcagtacgccgggttctctaccgttgaggagtccaacaaattttacaaagataatattaaggcagggcagcaaggtttgagcgtcgctttcgacctcgctacacaccgggggtatgacagcgataaccctagagtccgcggtgatgtgggaatggcgggtgtcgccatcgataccgtcgaagatacaaaaattctttttgacggcatccccctggaaaaaatgagcgttagcatgaccatgaacggggctgtaatcccagtgctggcgaactttattgtaaccggcgaagagcagggagtgcccaaggagaagctcactggcactatccagaatgacatcttgaaagaatttatggtgcgaaacacatacattttcccaccggagccaagtatgaagattatcgcagacattttcgagtacactgctaaacatatgcccaaatttaactctatctctatatcaggataccacatgcaagaagcgggcgctgacgccatactcgaattggcgtatacgttggcagatggactggagtacagcagaactggcttacaggctggcttgactattgacgaatttgcacctaggctctcatttttttggggtatcggtatgaacttctacatggagattgccaagatgcgagctggccgcagattgtgggcacacctgattgagaagatgttccagcctaaaaacagtaagagtttactcttacgggcccactgtcaaacgtccggttggtccctcaccgaacaggatccatacaacaacatcgtcaggactgccattgaggccatggccgcggtcttcggcggtacacagtccctgcatactaattccttcgacgaagcgctcggtctgcccacagtgaaatcagccaggattgccagaaacacccagataatcattcaggaggagagcggcattccaaaagtggccgatccttggggtgggtcttacatgatggaatgtctcaccaatgatgtgtatgacgccgcattaaagctcatcaacgagatagaggagatggggggaatggcaaaggctgtggccgaaggcatacctaagcttcggatcgaggagtgtgctgcgcggaggcaggctcggattgacagcggatctgaggtgatagtgggagtaaacaaataccagctggagaaagaggacgccgtggaggtgctggccatcgataatactagcgtgagaaacagacaaatcgagaaactcaagaaaataaagagtagcagagatcaggcactcgccgagagatgtttggcagcccttactgagtgtgccgcaagcggcgatgggaacatcctggctttggccgtagatgcctctagggcaaggtgtactgtgggagagattaccgatgcactgaagaaggtgtttggcgagcacaaagcaaatgatcgcatggtgtctggggcctataggcaagagttcggggaatctaaagagatcacaagcgcaattaaacgcgttcataaattcatggaacgagaaggtagaaggccacgcctgctggtcgctaagatgggacaggacgggcacgacagaggggcgaaagtcatagccacagggttcgcagacctcggctttgacgtcgacatcggaccactgtttcagacgccgagagaagtggctcaacaagccgtcgacgcagatgttcatgccgttgggatctctacgttggccgcggggcacaagaccctggttcccgaactgatcaaggaattgaattctcttggtcggccagacatcttggttatgtgtggcggcgtaatcccaccccaagactatgaattcttgttcgaggtgggcgtctcaaacgtgttcggtcctgggacaagaatacccaaagctgccgtccaggttctagatgatatcgaaaagtgccttgagaaaaagcagcagtctgtt

SEQ ID NO: 16722 - DNA, 2250 bp, synthetic construct
  misc_feature 1..2250: note = source = /note="Description of Artificial Sequence: Synthetic coding sequence"
  source 1..2250: mol_type = other DNA
atgctgcgcgcgaagaaccagctcttcctgctgtcccctcattacctcagacaggtcaaagagtcctcgggctcaaggctgatccagcagcggctgctccatcagcaacaacccctccaccctgaatgggccgcgctggccaagaagcaactgaagggaaaaaacccggaagatttgatctggcacaccccggaaggaatctcaatcaaacctctgtattctaaacgggacactatggacttgccggaagaactgccaggggtcaagccttttactcggggaccctacccaaccatgtacacttttaggccgtggaccatacgccaatacgccggcttcagcaccgtggaggaatccaacaaattctacaaggacaatatcaaggcgggacagcagggattgtccgtggcgttcgacctggccacccacagaggatacgactcggataatccaagagtgagaggcgacgtggggatggctggtgtggcaatcgacactgtggaggacaccaagatccttttcgacggaattccccttgaaaagatgtcggtgagcatgactatgaacggagcggtgatcccggtgctcgccaacttcatcgtcacgggcgaggagcaaggagtgcccaaggagaagctgactggcaccatccaaaatgacatcttgaaagaattcatggtccgaaacacctacatcttcccgccagaaccttccatgaagatcatcgcggacattttcgaatacactgccaagcacatgccgaagttcaacagcatctcaatctctggctaccatatgcaggaggcaggagcagacgcaatcttggaactggcttacacgctcgctgacggattggagtattcgcgcactggactgcaagcgggattgacgattgatgagttcgccccgcgcctctcctttttctggggcattgggatgaatttctacatggagattgctaagatgcgggccggtcgccggctctgggcccacctgatcgaaaagatgttccagccgaaaaactcaaagtcgctcttgctccgcgcccactgtcagacttccggatggtccctcaccgagcaagacccttacaacaatatcgtgcggaccgcaatcgaggcaatggccgcggtgttcggtgggacccaatcactgcatactaattcttttgacgaggcactcgggctcccgactgtgaagtcagcccggatagcgcgaaacactcagatcatcatccaggaagaatcgggcattccaaaggtggcggatccgtggggagggtcctacatgatggagtgcttgactaacgacgtgtacgacgctgcgctgaagctgatcaacgagattgaagagatgggagggatggcgaaggcggtggccgaaggaattcctaagctgaggatcgaagaatgtgcagctagacggcaggctcgcatcgattcgggaagcgaagtgatagtcggagtcaacaaataccagctggagaaggaggacgctgtggaagtgctcgcaatcgataatacctccgtgcgcaataggcagatcgagaagctgaagaagatcaagtcctcgcgcgatcaggcgctggctgagaggtgcctggcagcgctcaccgaatgcgcggcgtccggcgacgggaacatcctggcgctggcagtggacgccagccgagcgcgctgcaccgtcggagagatcactgacgcactgaaaaaagttttcggcgaacacaaggctaacgatagaatggtgtcaggagcctaccggcaggaatttggagagtccaaggagatcacttcggccatcaaaagagtgcacaagtttatggagcgggaaggtagacggcctcggcttctggtggcaaagatgggacaggatggacatgatcggggggcaaaggtgatcgctaccggcttcgcggatctcggattcgacgtcgatatcggcccactgttccagaccccaagagaagtggcccaacaagccgtggatgccgatgtgcacgctgtcgggatcagcactctggccgcaggccacaagacccttgtgccagaactgatcaaggaactgaattctctgggacgcccagatatcctggtgatgtgcggcggagtcatcccaccgcaggattatgaattcttgttcgaagtgggagtctccaacgtgttcggacccggaactcgcatccctaaagcggcggttcaagtgctcgacgatatcgagaagtgcctcgagaaaaagcagcaatcggtc

SEQ ID NO: 16723 - DNA, 2250 bp, synthetic construct
  misc_feature 1..2250: note = source = /note="Description of Artificial Sequence: Synthetic coding sequence"
  source 1..2250: mol_type = other DNA
atgctgcgggctaagaatcagttgttccttctgtcgcctcattacctcagacaggtgaaggagtcaagcggcagtcgcctgatccagcagcgtctgctgcaccagcagcaaccgctgcaccccgaatgggcagctctagcgaagaaacaacttaagggaaaaaaccccgaggacctgatttggcacacgcccgagggaatctcaatcaagcctttatactcaaagcgcgatacaatggacttgcctgaagagcttcccggtgtcaagccgttcacccggggaccctacccaaccatgtacaccttccgaccctggaccatacggcaatacgctggcttttctactgtggaggagtccaacaaattctacaaagacaatattaaggcaggccaacaaggtttgtcggtcgcctttgacttagctacccatagaggatacgattcggacaaccctagagtaaggggggatgttggtatggcaggcgtggcaatcgataccgtggaagacaccaagattctgtttgatggaatcccactggaaaaaatgagcgtaagcatgacaatgaatggcgctgtgatccctgtcctggcaaactttatcgtgacaggggaggaacaaggcgtgcccaaggagaaactgacgggcaccatacaaaatgatatcctgaaagagtttatggtccgcaatacatatatcttcccccctgagccttccatgaaaatcattgcagatatcttcgagtacacagctaaacatatgccaaaatttaactcaatctccatcagcggataccacatgcaagaagcaggcgcagatgctatactggaattagcgtataccctggccgatggactggagtatagtcggaccgggctgcaggctggactcaccatagatgaatttgcgcctcgtctctcattcttctggggcattgggatgaacttttacatggaaatcgctaagatgagagccggtagaaggctgtgggcacatctgattgagaagatgttccaaccaaagaatagcaaatctttgctgttgagagcacactgccaaactagcggatggtcacttaccgaacaagacccgtataacaacatcgtaagaaccgcaattgaggctatggcagcagtctttgggggcacccagagtctgcataccaactccttcgatgaggcccttggcctgccaaccgttaagagcgctaggatcgctaggaacacgcaaatcattatccaggaggaaagcggcatcccaaaagttgcggatccatggggtggctcctatatgatggaatgtcttaccaacgacgtgtacgatgctgcgctgaagcttattaacgaaattgaagagatgggaggaatggcgaaagcggtcgccgaggggatccctaagctgaggatcgaagagtgcgctgcacgacgacaggctcgaatcgacagcggatctgaggttattgtgggagtgaacaaatatcagctggaaaaagaagacgctgtcgaggtgctggctatcgacaatacctccgtgagaaatagacagatcgagaagctgaaaaagatcaagagcagcagagaccaggcattggccgagagatgccttgcggcgctgactgaatgtgctgcttccggcgatggtaatattctcgcccttgcggtggacgctagcagagcaaggtgtaccgtgggagaaatcactgacgccctgaagaaggtcttcggggagcataaggccaacgatagaatggtcagcggagcctacaggcaagagtttggagaatctaaggaaatcacatcagctattaaaagagtgcataagttcatggaacgcgagggcagaaggccacgcttactggttgctaagatgggtcaggatggccacgaccgcggtgcaaaagtgattgctaccggatttgccgatttgggctttgatgtcgatatcgggcccctatttcagacacctcgggaagtagctcagcaggctgtcgacgccgacgtccacgccgtgggcatcagcacccttgctgctggccacaagacactggttcccgaactgatcaaggaactcaatagcctgggacgcccagatatcttagtgatgtgcgggggagtcattcccccccaggactatgaattccttttcgaggttggagtctcaaacgtttttggacccggcactagaatccccaaagccgctgtgcaagttctcgacgatatcgagaaatgtctggaaaagaagcaacaaagtgta

SEQ ID NO: 16724 - DNA, 2250 bp, synthetic construct
  misc_feature 1..2250: note = source = /note="Description of Artificial Sequence: Synthetic coding sequence"
  source 1..2250: mol_type = other DNA
atgctacgagctaaaaaccaactgttcctgctgtccccccactaccttaggcaggtgaaggaatcttctgggagtcgcctgatacagcagcgcctactccatcagcagcagccattacaccccgagtgggccgctctcgctaaaaagcagcttaaaggtaagaaccccgaggacctgatttggcacacacccgaaggaatttccatcaagcctctgtactctaagagggataccatggatttgccagaggagcttccaggggtgaagcctttcacgcgggggccatacccaaccatgtatactttccggccctggacgatacgccaatatgccggattctcaaccgtggaagagtctaacaaattctataaggataatattaaggcgggacagcaggggctgtcagtggctttcgatcttgcaacccatcgaggttacgatagcgacaacccacgcgtgcggggcgatgtgggcatggcaggggtggctattgacactgtcgaggacacgaaaattcttttcgatggcatcccgcttgagaagatgtccgtgtccatgacaatgaatggcgctgtgatccctgtcttagcaaactttatagtcacgggtgaggaacagggagtgcctaaggaaaagcttacaggcaccattcaaaacgatatcttgaaggagtttatggttcggaatacctatatcttccctcctgaaccatcaatgaaaataatagccgacatcttcgagtatactgctaagcatatgcccaaattcaactctatcagtatcagcggataccacatgcaggaagccggtgccgacgctattctggagctggcctacactctggctgatggactggagtacagcaggaccggtctgcaggccgggctgacgatcgacgagttcgctccgagactgtccttcttctggggtatcgggatgaacttctacatggagatagcaaaaatgcgggctggtagacggctgtgggcccatcttatcgagaagatgtttcagcctaagaactctaagtctttattacttcgagcccattgtcagacttcaggatggtctctgacagagcaggatccttacaataatattgtccgcaccgcgatcgaggctatggccgccgtgttcggcgggactcagagcctacacacaaactccttcgacgaagctctaggcctacctacggtaaagtcagccagaatcgcccggaatacccaaatcatcatccaggaggagtccggcatccccaaggttgccgacccttggggaggatcttatatgatggaatgcctgactaatgatgtgtatgacgcagccctaaagctgatcaatgagatcgaggaaatgggagggatggccaaagccgtggccgaaggaattccaaaactgcgcatagaagagtgtgcagcacgtagacaagctcggatcgactccggctctgaggtgatagtaggagtgaataagtaccagctggagaaagaggacgctgtggaagtcctggcaattgataacacctctgtgcgcaaccgtcaaatcgagaagctgaagaaaattaagagttctagggatcaagcgttggccgagcgctgcctcgctgccctgaccgaatgcgctgcctctggcgatgggaatattctcgcactggcagtggatgccagtcgagcccgatgtacagttggtgagatcaccgatgctctcaagaaggtattcggggagcataaggccaatgacaggatggttagcggagcttaccgccaagagtttggggagtccaaagagatcacttctgccatcaaaagagtgcacaagtttatggaacgagaggggaggcggccacgactcttggtcgcgaagatgggacaggatggacatgatagaggggccaaagtgatagccactggctttgctgacctgggctttgacgtcgacatcgggccgctgttccagactccaagggaggttgcacagcaggctgtagacgctgacgtgcacgccgtgggcattagcactctggcggccggccataaaactctggtgcccgaactcattaaagaactgaattctttagggagacctgatatcctggtcatgtgcggaggagtaattcccccgcaagactatgaattccttttcgaagtgggtgtcagcaacgtgttcggacccggcacccgtattcctaaagctgccgtgcaagtgctcgatgatatcgagaagtgcctggaaaagaaacagcagagcgtt

SEQ ID NO: 16725 - DNA, 2250 bp, synthetic construct
  misc_feature 1..2250: note = source = /note="Description of Artificial Sequence: Synthetic coding sequence"
  source 1..2250: mol_type = other DNA
atgctgagggcaaagaatcagctgtttctgttgagccctcactatctgcggcaggtgaaagaaagtagtggcagccgacttatccagcaacgactcctccaccagcaacagcctctgcatcctgaatgggcagccctggctaagaagcagcttaaagggaagaaccctgaggatctgatctggcatacacctgaggggatctctattaaacccctctactccaaacgggatacaatggacctgccagaagaactgccgggcgtgaagccatttactcggggcccttaccccactatgtatacgttccggccttggactataaggcagtacgccggcttcagtactgtggaagagtcaaacaagttttataaggataacattaaggcgggtcagcagggactcagcgtagcatttgacctggctacgcatcggggatacgactctgacaaccctcgggtgaggggcgacgtgggtatggcgggtgtggccattgacactgtcgaggacaccaaaatcctcttcgacgggataccactggagaaaatgtctgtttcaatgacaatgaacggagcggtgatccccgttctggccaacttcatcgttacaggcgaggaacagggcgtgcctaaagagaaattgacagggactattcagaacgatattctgaaagaattcatggttcgcaacacctacatcttccctcccgagccctcaatgaagattatcgcagatatttttgaatatacagccaagcatatgccgaagtttaactctatttctattagcggctaccacatgcaagaggccggagcggacgcaattttggagctggcatacacactggctgatggactcgagtattcacgaacaggccttcaggcaggtctcacaatcgatgaatttgcccctaggctgtcattcttctggggcatcgggatgaacttttatatggaaattgcgaaaatgcgcgccgggcgaagactttgggctcacttgattgagaagatgttccaaccaaaaaactccaaatctctgcttcttagagctcattgccagacttccggatggagtctgaccgaacaggatccttataataatattgtacggactgcaattgaggccatggccgccgtgtttggtggaacacagtctctccacactaactctttcgacgaggctttgggccttccaacggtgaagtcagcccggatcgcaagaaacacccagatcattatccaggaggagtctggcatccccaaagtggccgacccctgggggggatcttacatgatggagtgtctgaccaatgacgtctacgatgccgccctcaagctgatcaatgagatcgaggaaatgggcggtatggccaaagccgtggccgaaggaattcccaagcttcgaatcgaagagtgcgccgctcggcggcaggcccggatagatagcggctccgaagtcatagtgggagtgaataaataccaactggagaaggaggacgccgtggaggtgctggcaattgacaacaccagtgtcaggaatcgacagatcgaaaagttgaaaaaaatcaaatcttcccgagatcaggctctggcagaaaggtgtcttgctgcactcacagaatgtgccgcctctggcgatgggaacattctggccctcgccgttgacgcctctcgcgccaggtgcactgtaggtgagattaccgatgccctgaagaaggtatttggggagcataaagcgaatgatcggatggtgagcggagcctaccgccaggagttcggagaaagcaaagagatcacaagcgccattaagcgcgtgcataagttcatggagcgggaggggcgccgacctcggctgctggtggccaaaatgggtcaggatggtcacgacagaggagcaaaggtaattgcaactggctttgcggatctgggctttgacgtagacattggtcctctcttccagacacctcgagaagtggcccaacaggcggttgacgcggatgtgcacgcggtgggcatcagcacactcgctgcagggcataagactctcgtgcctgagttgatcaaggaactgaactcactgggacggccagacatcctggtcatgtgcggaggcgtcattccgccacaagactacgagttcctgttcgaggtgggcgtaagcaatgtctttggccctggaaccagaatcccgaaggccgctgtgcaggtgctcgatgatatcgaaaaatgtctcgagaagaaacagcagtctgta

SEQ ID NO: 16726 - DNA, 2250 bp, synthetic construct
  misc_feature 1..2250: note = source = /note="Description of Artificial Sequence: Synthetic coding sequence"
  source 1..2250: mol_type = other DNA
atgctgagagctaaaaaccagctatttctgctgtctccccactatcttaggcaggttaaagaatcttctgggtctagactgatacagcagcggttgttgcatcagcagcagccattacatcccgaatgggccgccctagcaaaaaaacaacttaagggaaaaaatcccgaggatctgatttggcacacacctgaaggaatcagtatcaaacctctctatagtaaacgggatacaatggatcttcccgaggaactgccaggagtaaagccatttactagaggaccatatcccactatgtatacatttcggccttggactattcggcagtatgcagggttctctacagtagaagaaagtaacaaattctataaagataatatcaaagccggacagcagggactgagtgtagctttcgatttagccactcatcgcggatatgactcagataacccaagggttaggggggatgtggggatggccggggtcgccatcgatactgtcgaggatactaaaatacttttcgatggaatccccctcgaaaaaatgtctgtgagtatgacgatgaacggagctgtcatacctgtcctggcgaattttatagtgacaggggaagagcagggggtgccaaaagaaaaattgacaggaacaatacagaacgatattttgaaggagttcatggtccgcaatacatatatattcccccctgaaccctctatgaaaatcatcgccgatatcttcgaatacacagcaaagcatatgccaaaattcaatagtatctctatttctggatatcatatgcaggaagctggggcagatgcgatcctcgaactagcttatactctagctgatgggctggaatacagtagaacagggctccaggctggactgactatcgatgaattcgctccacgactatccttcttctggggaatagggatgaacttttacatggaaatagcaaaaatgcgcgctgggcgacgcttatgggcccacctcattgaaaaaatgtttcagcctaaaaactctaaatccctcctactgagagctcattgccagacaagtgggtggagtcttacagaacaggatccatacaataacattgtgcggacagccatagaagctatggccgcagtattcggggggacacaaagtctgcacacaaattctttcgacgaagcccttggactccctacagtgaagagtgctagaatcgccaggaatacgcagattataatccaagaagaaagtggaattcctaaagtggccgacccctgggggggatcctacatgatggaatgcctcactaatgacgtctatgatgccgctttgaaactcattaatgaaattgaagaaatggggggaatggcaaaggctgttgctgaaggaattccaaaactccgaatagaagaatgtgctgcacgacgccaggcacggatagattcagggtccgaggtgatcgttggggtcaacaaatatcagctggaaaaagaagatgccgtggaggtcctcgccatagataatacatctgtgcgcaatcgacaaatagaaaaactaaaaaaaatcaaatcatctagagatcaggcactagctgagaggtgcttagcggctcttactgaatgtgcggcatctggggatgggaacatcctcgctctcgcagtagatgcttctcgcgctcgctgtacagtaggggagattacagatgctttaaaaaaagtgttcggggaacataaagcgaatgatcgcatggtatctggagcatataggcaggaatttggggaatctaaagaaataactagtgctataaagcgggtgcacaaattcatggaacgggaggggagacgacctcggctccttgtggccaaaatgggacaggatggacacgatagaggggccaaagttatcgccacaggattcgcggatttgggattcgatgtggatatcgggccactgtttcagacacctcgggaagtggcccaacaggctgtggatgcagacgttcacgccgtggggatcagtactctcgctgcaggacacaaaacactggtgcctgagctaatcaaagaacttaattccttggggcgtcctgatattctggtgatgtgcggaggagtgatcccaccccaggattatgaattccttttcgaggttggagttagtaatgtgttcgggccagggactcggatacctaaggccgccgttcaggtgttagatgatatagagaagtgccttgaaaagaaacagcagagtgta

SEQ ID NO: 16727 - DNA, 2250 bp, synthetic construct
  misc_feature 1..2250: note = source = /note="Description of Artificial Sequence: Synthetic coding sequence"
  source 1..2250: mol_type = other DNA
atgctgcgggcaaagaaccagctttttctcctgtcccctcactacctgagacaggttaaggaaagtagcggctctcggctgatccagcaacgcctcctgcaccaacagcaaccgttgcatcctgagtgggctgcgctggccaagaagcagttaaaaggcaagaacccagaggacctcatctggcacacacccgagggaatctcaatcaagcctctctattctaaacgggacaccatggacttgcctgaggagttgcctggcgtcaaacctttcacacgcgggccttacccaaccatgtataccttccgcccctggacgattcggcagtatgccggcttcagcacagtggaagaatcgaacaagttttacaaggacaatataaaggccggtcagcaaggcctgagcgtggcattcgacctcgccacacacagagggtacgactcggacaatcccagggtgcggggggatgtcggcatggccggggtagctatcgacaccgtggaggacactaagatccttttcgatggcataccactggagaagatgagtgtgagcatgactatgaatggggctgtgattcccgtgctggccaactttattgtgacaggggaggaacagggtgtacccaaagaaaagctcaccgggactatacaaaacgatattcttaaggagtttatggttagaaacacgtacatctttcctccagaacccagtatgaagatcatcgccgacatctttgaatataccgcaaagcatatgcccaagttcaatagcattagcatcagcggataccacatgcaagaggcaggagctgacgctatcctggaactggcttataccttggcggacggtctagaatactcgagaaccgggctgcaggccggtctgacaatcgacgagtttgccccaaggctgtctttcttttgggggatcggcatgaatttttacatggagattgccaagatgcgagcagggcgcagattgtgggcgcacctgattgagaagatgttccagccaaagaactccaagtctctgttgcttcgggcacactgtcagactagcgggtggtcccttacagagcaggatccgtacaacaatattgtgcgtactgctatcgaggccatggcagctgtgttcgggggcacacaatcattgcataccaattcatttgatgaggccttgggtctgcctacagtaaagagcgctagaattgcacgcaatacacagatcatcatccaggaggaatcagggattcccaaagtggcagatccttggggggggagctatatgatggaatgcctcacaaacgatgtgtatgatgcagcattgaaactcattaacgagatagaggagatgggaggcatggccaaagccgttgctgaaggtatccctaagcttaggatcgaggagtgtgccgccaggaggcaggctcgcatcgatagtggaagcgaggtgattgtgggagtgaacaaatatcaactggaaaaggaggatgcagttgaggtgctagccatagataatacctcagttcgcaaccggcagattgagaaactcaaaaagataaagtcgagccgagaccaggcgttggcggagaggtgccttgcagcactcactgagtgtgcggcgtccggtgacggtaacattctggctctggctgtggatgccagtagagcaaggtgcacagtgggcgaaatcacagacgctctcaagaaggtgtttggagagcacaaagccaatgatagaatggttagcggggcgtaccgccaggaattcggggagtcaaaagagattacaagcgctattaagcgcgtgcacaagttcatggagcgggaggggaggagaccccgattactggtggcaaaaatgggccaagatgggcatgacaggggagccaaagtcatcgccacggggttcgcagaccttggctttgatgtggatatcggtcctctgtttcaaacaccacgcgaggtggcccagcaggctgtggatgctgacgtgcatgccgtaggaatcagcacattggccgccggacacaagaccctggtccctgagctgatcaaggaactgaatagcttgggaaggccggacattctagtcatgtgcggaggcgtgatccccccccaggactacgaattcctctttgaggtgggcgtttccaatgttttcggacccggaacacgaatcccaaaagctgcagtccaggttctggacgatatcgagaagtgtctggagaagaaacagcagagcgtg

SEQ ID NO: 16728 - DNA, 2250 bp, synthetic construct
  misc_feature 1..2250: note = source = /note="Description of Artificial Sequence: Synthetic coding sequence"
  source 1..2250: mol_type = other DNA
atgctcagggcgaaaaaccaactgtttcttctcagcccccattacctcagacaagtgaaagagtcatcaggctcgagattgatccaacagcgactgctccatcagcagcagcctctgcatcctgagtgggcggcccttgcgaaaaaacagctgaagggaaagaacccagaagatcttatctggcatacgcctgagggtatttcgattaaacctctttactctaagagggatacgatggatctgcctgaagagcttccaggtgtgaagccatttaccagaggaccctacccgaccatgtacacttttagaccatggactattagacaatacgcaggtttctccacggtggaagagtcgaataagttttacaaagataacataaaggcgggacagcaaggcctttcggtcgcctttgatctggcaacgcaccgaggttatgattccgataaccctagagtgcggggcgacgtgggcatggcaggagtggcaatagataccgtggaggataccaaaattctgttcgacgggatcccgcttgaaaagatgtctgtgtccatgactatgaacggcgctgtcatccctgtgcttgccaatttcatcgtcaccggtgaagaacaaggagtccctaaggagaaactcactggaactatacagaacgatattctgaaggagttcatggtgaggaatacgtacattttccctccagagcctagcatgaagattattgctgatatctttgagtataccgcgaaacatatgccaaagtttaactcgatatccatatctggataccatatgcaggaagcaggggcagatgcaatccttgaactcgcttacacccttgccgacggattggagtattccaggaccggcctccaagccggcctgacgatagatgagtttgcacctcgtctgtcctttttctggggaattggtatgaacttctacatggaaattgccaagatgagagcaggccggagactgtgggcccatttgattgagaagatgttccaaccaaagaacagcaagtcgttgctcctcagagcacactgccagacttcagggtggagccttaccgagcaggatccgtacaacaacatagtgcgtaccgcaattgaggccatggctgccgtgttcggtggaactcagtcgcttcatacgaactcgttcgacgaagccttgggtctgcctactgtcaaatcggcaagaattgcacgaaacactcagatcataatccaggaggagtcagggattcccaaggtcgccgatccttggggaggttcctacatgatggaatgtctcactaacgatgtctacgatgcagcactcaaactgattaacgaaatcgaagagatgggaggtatggcaaaagccgtggcggaaggaatccctaaacttcgaattgaagaatgcgccgcacgccggcaagctcgcattgattcaggaagcgaggttattgtgggcgtgaataagtaccaacttgagaaggaggatgccgtggaagtgcttgctatagacaatacctccgtccgtaatagacagatcgaaaagctgaaaaagatcaagtcgagccgagatcaggcacttgcagagcgctgtcttgccgccctgaccgaatgtgctgcaagcggagacggcaatatcctggccctggctgtcgatgcatcacgcgcacgctgtaccgtgggagagatcactgacgcacttaagaaggtctttggagaacataaggcaaatgacagaatggtgagcggggcctaccgccaagaattcggtgaatccaaggaaattacctcggcaatcaagcgggtgcataagtttatggagagagaaggaaggcgtcctcggttgctcgtggccaaaatgggccaagatggccatgatagaggggcgaaggtgattgcaacgggttttgcggatcttgggtttgatgtggatattggacctctcttccaaacccctagggaagtcgcacaacaagcagtcgatgccgatgtgcatgccgtcggcatctcaaccctggcagccggtcataaaaccctcgtgccggaactcatcaaggaacttaattcactcgggcgtcccgatattctcgtgatgtgtggaggagtgatacccccacaggattacgagtttctcttcgaagtgggagtgtcaaatgtctttggaccaggtacccggattccaaaggcagctgtccaagtgctggacgatatagagaaatgtctcgaaaagaagcaacaatcagtt

SEQ ID NO: 16729 - DNA, 2250 bp, synthetic construct
  misc_feature 1..2250: note = source = /note="Description of Artificial Sequence: Synthetic coding sequence"
  source 1..2250: mol_type = other DNA
atgctgcgggctaagaaccaactcttcctgttgtcaccgcactaccttagacaggtcaaagagagctccggctccagactgatccagcagcggctcctgcatcagcagcagccactgcatccagagtgggcagcacttgcaaagaagcaacttaagggcaagaatcccgaagacctcatctggcacacccctgaagggattagcattaaaccgctgtactctaaaagggataccatggacctcccggaggagcttcctggggtgaagccgttcaccagaggcccatacccgactatgtacaccttccggccgtggaccatccgccagtacgccggattctcaactgtcgaagaatcaaataagttttacaaagataacataaaggccggacagcagggtctgagcgtggccttcgatctggcaacccatcggggttacgactcagataaccctcgggtccgcggcgacgtgggaatggctggagtggcgatcgataccgtggaagacaccaagatcctcttcgatggaatccctctggaaaagatgtcggtaagcatgactatgaatggagcggtgatccctgtgctggctaacttcattgtgaccggtgaggaacaaggcgtccctaaagagaagctgactggcactattcagaacgacatcttgaaggaatttatggtccggaatacttacatttttccaccagagccatccatgaagatcatcgcagacatctttgagtataccgcaaagcacatgcctaagtttaactccatctcgatctccggatatcacatgcaggaagcaggagccgacgcaatcctcgaattggcttacaccctggccgacggcctggagtactcgcggacgggtctgcaggccggattgactattgatgagttcgctcctcggctgtcgttcttctggggtatcggaatgaacttttacatggaaattgccaagatgcgggcgggtcggcgcctgtgggcgcatctcatcgaaaagatgtttcaaccgaaaaattcgaaaagcctgctgcttagagctcattgtcagacgtcggggtggagcctgactgagcaggacccgtacaataacatcgtccgcactgcaattgaagccatggcggccgtcttcggagggactcagtcgctgcacaccaactcgttcgacgaggccctggggctgcctaccgtgaagagcgcccgcatcgccagaaatactcagatcattatccaggaagaaagcggaatcccaaaggtggcggatccctggggaggctcgtacatgatggagtgcctgaccaacgacgtctatgatgcggcattgaagctcatcaacgaaatcgaagagatgggcggaatggcgaaggccgtggcagaaggaatcccgaaactccggatcgaagaatgtgcagcgcgccgccaggcgcggatcgactccggaagcgaggtgatcgttggagttaacaagtaccagctggaaaaggaagatgccgttgaggtgctggccatcgacaatactagcgtgcggaatcgccagatcgagaagctgaagaagatcaagtcctcccgcgaccaggccctcgcggagagatgccttgcggcgctgactgagtgcgctgcctcgggagacggtaacattcttgctctggccgtcgacgcctcgcgggcacggtgcactgtgggggaaatcaccgatgctttgaagaaggtcttcggagaacacaaggccaatgaccgcatggtgtctggagcgtaccgccaggagttcggagagtcaaaagaaatcactagcgccatcaagcgcgtccataagttcatggaacgagagggtcggcggccgcggctgttggtggcgaagatgggacaagacggacacgatagaggcgctaaggttatcgctaccggattcgccgacctcgggttcgacgtggatatcggacctctgtttcagaccccgagagaagtggcgcagcaagctgtcgacgcagacgtgcacgcggtcggcatctcgaccctcgctgcaggccacaagactctggtcccagaactgatcaaggagctgaactcactgggacggcctgatatcctcgtgatgtgtgggggcgtgatccctcctcaagattatgaatttctcttcgaagttggagtctccaacgtgttcggtccgggcactcgcatcccgaaggccgccgtgcaggtgctggacgacatcgagaagtgccttgagaagaagcagcaatccgtg

SEQ ID NO: 16730 - DNA, 2250 bp, synthetic construct
  misc_feature 1..2250: note = source = /note="Description of Artificial Sequence: Synthetic coding sequence"
  source 1..2250: mol_type = other DNA
atgctgagggcaaagaatcaactttttctgctctctccccattacctgcgacaagtgaaggagtcaagcggatcgagacttattcagcagcgtttgctgcaccaacagcagcccctgcacccagagtgggcagcattggcaaagaagcaacttaaggggaaaaatcccgaggatctgatttggcatactcctgagggcattagcataaagcctttgtacagcaagcgggacactatggacctgcctgaggaacttccaggagtgaaacctttcaccagggggccttaccccactatgtacacgttcagaccctggacgatccgtcaatacgcaggattttcgactgttgaagagtcaaacaagttttacaaggacaacataaaagccgggcaacaaggattgtccgtggcgttcgatcttgcaacccataggggttacgatagtgacaatccacgcgtgagaggcgatgtgggcatggcaggagtggccattgacactgtcgaagatacgaagattctgtttgatggaatacctctggagaaaatgtcggtgagcatgactatgaatggcgccgtgattcccgtccttgctaactttatcgtgactggagaagagcagggagtgcctaaagagaagctgacgggaacgatccagaacgacattcttaaggaattcatggtcagaaatacctacatctttcctcctgaaccttccatgaagattatcgcagatatcttcgaatacaccgctaagcatatgccgaagtttaactcaatcagcatatccgggtatcacatgcaggaagcgggagcagatgcaatccttgagcttgcctacaccctggcagacggacttgaatactcccggactggccttcaagccggacttacgattgatgaatttgcaccccggctctcgttcttctggggcattggaatgaatttctacatggaaattgcaaagatgagggcaggtcgcaggctgtgggcccaccttattgagaagatgttccaaccgaagaacagcaagtcactgttgttgagagcacactgtcagactagcggttggtcgcttaccgagcaagatccatacaacaatatcgtgcggaccgcaatcgaagctatggcggcagtgtttggaggtactcagagcctgcacactaacagctttgacgaagcgcttggacttccaaccgtcaagtcagcgcgcatcgcaagaaatacccaaatcataattcaggaagagtcgggcattccaaaggtggccgatccttggggaggaagctatatgatggagtgcctgactaacgatgtctacgatgcagccctcaaactcatcaacgagatcgaggaaatgggtggtatggccaaggccgtcgcagaaggaatcccaaagctgcgaattgaagagtgtgcagcgcgcaggcaagcacgcattgatagcggatcagaagtgatcgtgggagtgaacaagtaccaacttgagaaagaagatgcagtcgaagtgctggcaattgataacacttcggtgcgaaaccgccagattgaaaagctcaagaagatcaaatcctcccgtgaccaagcacttgcagaaagatgcctggcagccttgactgaatgcgcagcatccggtgatgggaacattctggcactcgctgtggatgcgtcgagagctaggtgtactgtgggagaaatcactgatgcactgaaaaaggtgttcggagaacataaggcaaacgatcggatggtgtcgggtgcataccggcaggaatttggcgagagtaaggaaattacctccgctataaagagagtgcacaaattcatggagcgggaaggcaggcgcccaagacttctcgtggcaaagatgggtcaggatggccacgataggggcgcgaaagtcatcgctactggatttgctgatctgggttttgatgttgatattgggccgctctttcaaaccccaagagaagtggcacagcaagcagttgatgcagatgtgcatgctgtcggaatttccaccttggccgccgggcataagacccttgtgccagagcttatcaaggaactgaactcgttgggacgacccgatattctggtgatgtgtggcggcgtgataccacctcaggattacgaatttcttttcgaagtgggtgtgtcgaacgtgttcggacccggcaccagaattcccaaagcggcggtgcaagtgttggacgacattgaaaaatgtctggaaaagaagcaacaatctgtc

SEQ ID NO: 16731 - DNA, 2250 bp, synthetic construct; identical to SEQ ID NO: 16664
  misc_feature 1..2250: note = source = /note="Description of Artificial Sequence: Synthetic coding sequence"
  source 1..2250: mol_type = other DNA

SEQ ID NO: 16732 - DNA, 2250 bp, synthetic construct
  misc_feature 1..2250: note = source = /note="Description of Artificial Sequence: Synthetic coding sequence"
  source 1..2250: mol_type = other DNA
atgctgagagctaagaaccagttgttcctgctcagtccacactatttgcgtcaggtgaaggagtcgtcaggcagcagactcatccagcagaggctgctgcaccagcaacaacctctgcaccccgaatgggctgccctggccaagaagcagcttaaaggcaaaaatccagaagatcttatctggcacacgccggagggcataagtatcaaaccattgtattcaaaaagggatactatggacctgccagaggagctgcccggcgtcaaacccttcactaggggcccgtaccccactatgtatacatttagaccctggactattagacaatacgctggatttagtactgtcgaagagtctaataagttttataaggacaatattaaggcgggacagcagggtctgtctgtggccttcgatcttgcaacccatcgcggctatgatagtgataaccctcgcgttcgcggcgatgtaggcatggctggggtcgctattgatactgtcgaggatacgaagatactgttcgatggtatccctctggagaagatgtccgtttccatgacaatgaatggcgccgtaatccctgtactcgctaacttcatagtgacaggggaagaacagggagtgcccaaagaaaaactgaccgggaccattcagaacgatatcctaaaagagtttatggtcaggaacacttacatctttccaccagaaccgtctatgaagatcattgctgacatttttgaatacactgcgaaacacatgcccaaatttaattcgatcagtatatctgggtatcacatgcaggaagctggcgcagatgcaatcctggagctcgcatatacattggccgatgggttggagtattctagaactggactgcaggccggacttaccatcgacgaattcgctccacggctctcgtttttctggggcatcggtatgaatttctatatggagatcgccaaaatgcgggctggaaggaggctgtgggcccatttgattgagaagatgtttcagccgaaaaacagcaagtctctgttgttgcgggcccactgccagaccagcggctggtctttgacggaacaggatccctacaacaacatcgtccgaactgctatcgaggcaatggctgccgtcttcggaggcacccagagccttcacaccaatagtttcgatgaggccttaggcctgcccactgttaaaagcgctcggatagccagaaatacacagattattattcaggaagagtccggaattcctaaggtggccgatccgtgggggggctcttatatgatggaatgtctcaccaatgacgtctacgatgccgccctgaaactcattaatgagattgaggagatgggcggaatggccaaagctgtggcggaaggaatccctaaactgaggatagaagagtgtgctgctagaaggcaagcccggatcgacagcggttcagaggtcattgtgggtgttaataagtatcaactggagaaagaggacgcagtcgaggtcttggcgattgacaatacctcagttcgaaacagacaaatagagaaactcaaaaagatcaaatccagtcgcgaccaagctctcgctgagcgctgtctggctgcactcaccgaatgtgccgcctccggtgacggtaatatcctggccctggccgttgatgcctcacgagcgcgttgcaccgttggtgagatcactgacgcattgaagaaagtgttcggggaacacaaagccaacgacagaatggtgtccggagcctatagacaggagttcggggagtccaaagaaatcacctcagcaataaaaagagtccacaagttcatggaaagggaaggccggaggccacgactgctagttgcgaaaatgggtcaagacggacatgataggggcgccaaggtaattgccactggttttgccgacctcggatttgatgtcgatatcggtcccctgtttcagaccccgagggaagtcgcccagcaggctgtggacgcggatgtccacgcggtcggaatttctaccctagctgctgggcataagaccttagtccccgagctgatcaaggaattgaatagtctaggcagaccggatattctcgtgatgtgtggcggagttatccccccacaggactatgagttcttgttcgaagttggcgtgtctaacgtctttggcccaggaacaaggatccctaaagctgccgttcaggttctggatgacattgagaaatgccttgaaaagaagcagcagagcgtt

SEQ ID NO: 16733 - DNA, 2250 bp, synthetic construct
  misc_feature 1..2250: note = source = /note="Description of Artificial Sequence: Synthetic coding sequence"
  source 1..2250: mol_type = other DNA
atgctcagggccaaaaatcaactctttttgctgtctccccactatttgcgtcaagttaaggaatcatccgggtcacgcctcattcagcagcgactcctgcaccaacagcaacctctgcaccccgaatgggccgccctcgctaagaagcagctgaaaggcaagaatccagaagatttgatttggcatactcccgaagggatcagcattaaacccctgtatagtaagcgagatacaatggatcttccggaagaactgccaggcgtcaagcctttcacacgtggtccctaccccaccatgtacacgttccgtccttggacaatcagacaatatgctggattttcgaccgtagaagaatccaacaaattttataaggacaatataaaggcaggacagcagggactgtctgtcgcctttgatctcgcgacgcatagaggctatgactctgacaatcctcgggtacgcggcgacgtcggtatggccggagtggctatagataccgtcgaagacaccaagattctattcgacggaatcccccttgagaaaatgtcagtgagcatgaccatgaatggagctgttatacctgtgctcgcaaattttattgttaccggggaagagcagggagtccctaaggagaaacttactgggacaattcagaacgatatattaaaggagttcatggttcgcaacacgtacatcttcccccctgagccatcaatgaagatcattgccgatatctttgagtatacagccaaacacatgcctaaattcaacagtatctcaattagtggttaccacatgcaggaggctggggccgatgccatcttggagctcgcgtacacactggccgacggcctagaatactctcgcacaggacttcaggctggactgactattgatgaatttgctcctcgtctgtcattcttctgggggattgggatgaatttttatatggagattgccaagatgcgggctgggcgacgactttgggctcacttgattgagaaaatgttccagcctaaaaattccaagtcactgctcttacgagcacactgtcagacttctgggtggtccctgaccgagcaggatccgtataataacatagtgaggactgccatcgaggcgatggctgcggtgttcggaggtacacaaagtctccacacaaattcctttgatgaggccctgggcttgcccacagtgaagtctgccaggatcgcccggaacacccagattattatccaggaggaaagtggcattcctaaggttgctgacccatggggcggaagttacatgatggaatgtctgacaaacgatgtgtatgacgccgctttgaagctcataaacgagatcgaggagatgggagggatggccaaggccgtggccgaggggattcctaagcttcgaatcgaggagtgcgccgcccgacgacaggctaggattgactccggctctgaagtaatagtgggagtaaacaagtaccagctggaaaaagaggatgccgtcgaggtcttggccatagacaatacttcagtgagaaacagacaaatcgagaagttgaaaaaaattaagagtagccgtgaccaggcactcgccgagcgctgcctcgccgcgctcaccgaatgtgctgcttctggcgacggtaacattcttgctttagctgtcgacgcaagccgggcgcgctgcacggtcggggagattacggacgcgttgaagaaggtattcggcgagcacaaggccaacgaccgcatggtttccggagcctaccggcaggagttcggagagagtaaggagatcactagcgcgatcaagcgggtgcataaattcatggagagggaggggaggcgtccacggctgcttgttgccaagatgggtcaggacggccatgataggggagcaaaagtaattgccacaggctttgcggatcttggattcgacgtcgacatcggccccttgttccagacccctcgagaggttgcacagcaggccgtcgatgccgacgtgcacgcagtgggcatctctaccctggcagcgggacacaagacccttgtgcctgagctgatcaaggaattaaattccctcggccgccctgacatcctggtgatgtgcggcggggttatcccaccccaggactatgagtttctattcgaggttggtgtctccaatgtcttcggacctggtactcgcatacccaaggccgccgtccaagtcctagacgacattgaaaaatgtctggaaaaaaagcagcagagtgtg

SEQ ID NO: 16734 - DNA, 2250 bp, synthetic construct
  misc_feature 1..2250: note = source = /note="Description of Artificial Sequence: Synthetic coding sequence"
  source 1..2250: mol_type = other DNA
atgttgagagcaaaaaaccaactttttctcctcagcccccactatctccgccaggttaaggaatccagcggctcccgcctgatccagcagaggttgctccaccagcagcagccactgcatcctgagtgggctgctctcgccaagaagcaactcaagggcaagaaccctgaggatttgatctggcacaccccagagggtatttccattaagcctttgtacagcaaaagagacactatggatctcccagaagagctgcctggtgtgaagcctttcaccaggggaccctaccccactatgtacacatttaggccatggaccatccgtcaatacgctggcttctccactgtggaggagtccaacaagttttataaggataacatcaaggcaggccaacagggactttctgtggcctttgacttggccactcacaggggctacgatagcgacaaccccagggttaggggtgatgtcggcatggccggcgtcgcaatcgatacagttgaggacaccaagatcctcttcgatggcatcccccttgaaaagatgagcgtgtccatgacaatgaacggcgctgtgattcctgtgctcgcaaatttcattgtgacaggtgaagaacaaggagttcccaaggaaaagctgaccggcaccattcagaacgacatattgaaggagttcatggtgagaaacacctacatcttcccccctgagcctagtatgaaaatcattgctgatatcttcgaatacacagcaaaacacatgcctaagttcaactctatctcaatatccggttaccacatgcaggaggcaggagctgacgccattcttgagttggcttacacccttgctgatggcctggagtactctcgtaccggtctccaggccggattgactattgatgagttcgctcctagattgtccttcttctggggaatcggcatgaacttctacatggagatcgctaagatgcgcgctggaaggcgtctgtgggctcacctcattgaaaagatgttccaacctaaaaattcaaagagcctcctgctgcgcgcacattgccaaacatctggatggtcactgacagaacaggacccttacaacaacattgttagaaccgctatcgaggccatggcagccgtattcggtggaactcaaagcctccataccaactccttcgatgaggccctcggtttgccaaccgtgaagtctgctagaattgccagaaacacccagatcataatccaggaggaaagtggaattcccaaggtcgctgacccctggggcggaagttacatgatggagtgcctgacaaacgatgtgtacgacgctgccctgaagctcattaatgaaatagaggagatgggtggaatggctaaagctgtggccgagggaatcccaaagctccgtattgaggaatgcgctgctcgtcgccaggctcgcatcgattccggcagtgaagtcatagtcggtgtgaataaataccagcttgagaaggaggacgctgtggaggtgttggctattgacaacacaagcgtccgcaaccgccaaattgaaaagctcaagaagattaagagttctagagatcaagccctggccgaacgctgtctggccgccctgaccgaatgcgccgcctcaggtgacggaaacatccttgctttggccgtggatgcttcacgtgctagatgcacagtgggcgagatcactgatgccctcaaaaaggtgtttggcgagcacaaggcaaacgaccgtatggtgtctggagcttaccgtcaggagttcggcgagtcaaaggagatcacttccgctataaagcgcgtgcacaaatttatggagcgtgagggcagaagaccacgcctgctcgtggccaagatgggccaggacggccacgataggggtgctaaggttatcgccactggttttgccgatctcggattcgacgtagatatcggacctctcttccaaactcccagagaggtggcacaacaagccgtagatgctgacgttcacgcagttggaatctccacacttgccgctggacacaagactctggtccctgaactcattaaggagctcaacagtttgggacgtcccgacattctcgtgatgtgcggaggagtcatccctcctcaggactatgagtttctgtttgaggtcggagtaagcaatgtctttggacctggcacacgtattcccaaggccgccgttcaggtgctggatgatatcgagaagtgcctggaaaagaagcagcagtctgtg

SEQ ID NO: 16735 - DNA, 2250 bp, synthetic construct
  misc_feature 1..2250: note = source = /note="Description of Artificial Sequence: Synthetic coding sequence"
  source 1..2250: mol_type = other DNA
atgctcagggctaaaaatcagctatttctgctatctccccattatctgcggcaggtaaaggagtcctctggcagcaggctgattcaacagcgattgctccatcaacaacagccactccaccctgagtgggcagccctggcaaagaaacagttgaaaggcaagaatcccgaagacctaatctggcacacacctgaaggaatcagtatcaagcctctttacagcaagagggacaccatggatttgcccgaagagctgcctggcgtgaaacccttcactcgggggccttatcccacaatgtacactttcagaccttggaccataagacagtacgcaggcttctctaccgtcgaggagagtaacaagttttacaaggacaacattaaagccggacagcagggacttagcgtggcatttgatttggctacccatcggggatacgactctgataaccctcgggtgcggggtgatgtagggatggctggtgtggctatcgataccgtggaggataccaagatcctctttgatgggatccctctggaaaaaatgtctgtcagtatgaccatgaatggggcagtcattcccgtgttggccaattttatcgtgactggcgaagagcagggagtacctaaagagaagttgacagggaccatccaaaatgacatcttgaaagagtttatggtgagaaacacctacatctttccacccgagccatccatgaagattattgcggatatcttcgaatacaccgcgaaacacatgccgaagttcaatagtataagcataagcggataccatatgcaggaggctggtgccgatgcgatcctggagctggcttacactctcgctgatggcttggaatactcgcggactggactccaagctgggttgacaatagatgagttcgcccctcgcctgtcctttttctggggtatcggtatgaacttctacatggaaattgccaaaatgcgagccgggcgaagattgtgggcgcacctgatagagaagatgttccagccaaaaaatagcaagtcactgctgcttagggcacattgccagacctcggggtggtcactgacagaacaagacccttataacaatatcgtgcggacagcgatagaggccatggctgctgtctttgggggcactcagtctctacatacgaacagctttgatgaggctcttggcctgccgaccgtcaaaagtgccagaatcgctagaaacacccaaatcatcatccaggaagaatcagggattcccaaggttgctgacccatggggaggcagctacatgatggagtgccttaccaacgacgtctacgacgcagcactgaagctgattaacgagattgaagaaatgggaggaatggcgaaggcagtagccgaggggatccctaagctgcggattgaagaatgcgcagccagacgccaggcaagaatagactccggaagtgaagtaatcgtgggagtgaataagtaccaattagaaaaggaggacgccgtggaggtgctcgccatcgacaacacaagcgtccggaacaggcagatcgagaaattgaagaagatcaagagctcccgggatcaggccttagcggaacggtgcttggccgccttgacagagtgcgccgcaagtggggacggtaacattctggctctggccgttgatgcaagcagggctaggtgcacagttggggaaatcacggacgccttgaagaaggtgttcggcgagcataaggcaaatgaccgcatggtctctggagcatataggcaggaatttggagaatccaaggaaatcacatccgccatcaaaagagtgcataagtttatggaacgggagggtcgacgacctcggctattggttgcaaaaatgggacaggatggtcacgatcggggagccaaagtcatagccaccgggttcgctgatttagggtttgatgtcgacatcggccccctttttcagactcctcgcgaggtggcgcaacaggcagtggacgctgacgtgcacgctgtgggcatctccaccttggccgcaggacataaaacactcgtgccggagctcatcaaagaattgaatagcctcggtagaccagatatcttggtgatgtgtgggggggtgattccaccgcaggactatgaatttctcttcgaagttggggtgtcaaatgtgttcggaccgggaacacgcattcccaaagccgctgtccaagtgcttgacgatattgaaaagtgcttagaaaagaaacagcaatctgtg

SEQ ID NO: 16736 - DNA, 2250 bp, synthetic construct
  misc_feature 1..2250: note = source = /note="Description of Artificial Sequence: Synthetic coding sequence"
  source 1..2250: mol_type = other DNA
atgttgcgcgccaagaatcagttgttcctgctgtcgcctcattacctacgccaagtgaaagaatcctcaggttcgcgcctgatccagcaaagattgctccaccagcaacagcccctgcacccggagtgggccgcccttgctaagaagcaactgaagggaaagaacccggaggacctgatctggcacacgccggaaggcatctccattaaacctctgtattcgaagcgcgacactatggacctgcccgaagaattgccaggagttaagcctttcacccgcggcccgtaccccactatgtacacctttagaccctggaccatccgacagtatgcgggcttcagtacggttgaggagtcgaataagttttacaaggacaatattaaggcaggccagcagggattgtcggtcgcattcgacctcgccacacaccgcggttacgactcggacaatccacgcgtgaggggtgatgtgggcatggccggagtggccatcgatacagtggaggacaccaagatcctgttcgacggcatccccctcgaaaagatgagcgtgagcatgaccatgaacggagctgtcattccggtactggcgaacttcatcgtcaccggtgaggagcagggggtgcccaaagagaagctgacgggtaccatccagaatgacattttaaaggagttcatggtcaggaatacatacattttccccccggagccttcgatgaagatcattgcagacatcttcgaatatacggctaagcacatgcccaaattcaatagcattagcataagtggctatcatatgcaagaggcgggcgcggacgccatattggagttggcttatacattggccgacggactggagtacagtcgcaccgggttgcaagccggactgaccatagatgagttcgcccctcgcttgtcgtttttctggggtattggaatgaacttctatatggagatagccaaaatgcgcgccggccgccgattatgggcccatctaatcgaaaagatgttccagccgaagaactccaaaagcctactgctccgggcccactgccaaaccagcggttggagcttgacagagcaggatccctataataacattgtccgtacagccattgaagccatggcagctgtttttggcggcactcagagtctccacacaaattctttcgacgaggcgctggggttgccaaccgttaagtccgcaaggatcgccaggaatactcagatcattattcaggaggaatcgggcattccgaaagtggcagatccatggggcggatcgtacatgatggagtgtttgactaacgatgtgtatgatgccgccctcaagctgataaatgagatcgaggagatggggggaatggcaaaagccgttgccgagggtattccaaaactgagaatcgaagagtgcgcggctcgacgccaagcccggatcgacagcggttccgaggtgatcgtgggcgtaaataagtaccagcttgagaaagaggatgccgtcgaggtattggccatcgacaacacgtcggtacggaaccgtcaaatcgagaaacttaaaaagatcaaatcatcacgtgatcaagccctcgcggagcgctgcctggccgcacttactgagtgcgcggcgtcaggggacggcaatattttagcactggcggtcgatgccagtcgagctagatgcacagttggcgagattacggatgcgctgaagaaggtgtttggtgagcataaagctaatgatcgcatggtgagcggcgcttatcgccaggagttcggagaatccaaggagatcacgtccgccatcaagcgtgtgcataaatttatggaaagggagggacgccggccgcgattgctggtggccaagatgggtcaggatggccacgataggggtgccaaggttattgctaccggctttgccgatctgggcttcgacgtcgacataggaccactgttccagacccctcgggaagtggcccaacaggctgtggacgccgacgtgcatgcagtggggatttcgaccttggccgcaggacacaagaccctggtacccgagctgatcaaagagttgaacagtttgggaaggcccgatatattggttatgtgtggcggagtaatccccccccaggactatgagttcctttttgaggtaggagtttccaatgtcttcggcccaggcactcgcattcctaaggcagcagtgcaggtgcttgatgacatagagaagtgtctggaaaagaagcagcagtccgtt

SEQ ID NO: 16737 - DNA, 2250 bp, synthetic construct
  misc_feature 1..2250: note = source = /note="Description of Artificial Sequence: Synthetic coding sequence"
  source 1..2250: mol_type = other DNA
atgcttcgcgccaagaaccaactgtttcttctcagcccacattatctgcgccaagttaaggaatcatccggatcaaggcttatacaacagcgactgctccaccagcaacagccactccatccagagtgggccgcccttgctaagaagcagctcaagggtaagaaccctgaagatttgatctggcatacccctgaaggtatttctattaagccactgtactcgaagcgcgacactatggacctgcctgaagaactccctggggtgaaacccttcactagaggtccttaccccactatgtacacctttagaccgtggaccattagacagtacgcgggtttttccacggtggaagagtccaacaaattctacaaagacaacattaaggcaggacagcaaggcctgagcgtcgcctttgatcttgctactcatagaggatacgatagcgataatccaagggtgcggggcgacgtgggaatggctggagttgccatcgataccgtcgaggatactaagattctctttgatggaatcccacttgaaaagatgtcggtgtccatgaccatgaacggtgcggtgataccagtgctggcaaactttattgtgaccggcgaagaacagggtgtgccgaaggaaaaactcaccggtactattcagaacgacattttgaaagagtttatggtgcgaaatacgtacatcttcccacctgaaccttcgatgaaaatcatcgcagatatcttcgaatacactgccaagcatatgccgaagttcaattcaatctccatatctgggtaccatatgcaagaagcgggtgcagatgccatactcgaactggcctatacgctggcggatggactggaatacagccggaccggccttcaagcaggacttaccattgatgagttcgcacctcgactctcgttcttttggggaataggcatgaacttttacatggaaatcgcaaagatgagagccggcagacgcctgtgggcacatctgatagagaagatgtttcaaccgaagaattcaaaatcgctgttgctgagggcacactgtcagacctccggttggtcgctgactgaacaggatccatataacaacatcgtcaggactgccatcgaagcaatggcagccgtctttggtggaacccagagcctccacaccaattcgttcgatgaggccctcggcctgcctaccgtgaagagcgcaagaattgcacggaacactcagattatcattcaagaggagagcggaattcccaaagtggcagatccgtggggtggttcgtacatgatggagtgtcttaccaacgacgtctacgacgcagcacttaaactgataaatgagattgaagagatggggggcatggcgaaggccgtcgcagagggtattcccaaactcaggatagaagaatgcgcagcacgccgccaagcaagaattgactccggttcggaagtgattgtcggcgtgaacaaataccaacttgagaaagaggatgcagtggaggtgcttgcaattgacaacactagcgtgaggaataggcagatcgagaaactgaagaagattaagtccagccgtgatcaagccttggccgaaaggtgtcttgctgcgctgactgagtgtgccgctagcggtgacggaaatatcctggcgctcgccgtcgacgcctcgagggcgaggtgcactgtgggcgaaatcactgacgcactcaagaaggtgtttggcgagcataaggcaaacgacaggatggtgagcggtgcataccgacaagagtttggtgagtcgaaggaaattacttcagcgattaagcgggtgcacaaattcatggaaagagaaggccgtagacctaggctcctggtggcaaagatgggtcaggacggacatgataggggggcaaaggtcattgccactggatttgcagatctcggatttgatgtggatatcggtccactgtttcagacgccccgggaggtggcacagcaagcagtggacgccgacgtgcacgcagtgggtatttcaacgctggcagcaggacataagactctcgtgccggaactgattaaagaacttaatagcctcggacgccctgatattctggtcatgtgcgggggcgtgattccaccacaggattacgagttccttttcgaggtgggcgtgtcgaacgtgtttggtcccggtaccagaattcccaaggcagcagtccaagtcctggatgacattgagaagtgtctggagaagaaacaacaatcggtc

SEQ ID NO: 16738 - DNA, 2250 bp, synthetic construct
  misc_feature 1..2250: note = source = /note="Description of Artificial Sequence: Synthetic coding sequence"
  source 1..2250: mol_type = other DNA
atgctgcgcgccaagaatcagctgttcctgctttccccccactacctgaggcaggtgaaagaaagttcgggatcgagattgatccagcagcggctgctgcaccaacagcagccactgcacccggagtgggccgccctggcgaaaaaacagctcaaggggaaaaatccggaggacctgatctggcatactccggaagggatttcgatcaagccgctgtactctaaaagagataccatggacctgccggaggaactccctggagtgaagccgttcacccgggggccctatccgactatgtacaccttcagaccatggactattcggcagtacgccggattcagcactgtcgaagagtcgaataagttctacaaggataacatcaaggcgggccaacagggcctcagcgtggccttcgacctggccactcaccggggctacgactccgataacccgcgggtgcgcggagatgttggaatggccggagtggcaatcgataccgtggaggacactaagatcctcttcgacggtatccccctcgagaaaatgagcgtttcgatgaccatgaacggagccgtgatccctgtgctggcaaatttcattgtgaccggagaggagcagggagtcccgaaagaaaagctcaccgggaccatccaaaacgacatcctgaaagaattcatggtccgcaacacttacatcttcccaccggaaccgagcatgaagattatcgctgatatcttcgagtacaccgcaaagcacatgccaaaattcaattcgatcagcatctcgggataccacatgcaagaggccggtgccgacgcaatccttgaactcgcctacactctggctgatggactggagtattctcgcaccggattgcaggctggcctgaccattgatgaattcgcccctcggctgtcgttcttttggggaatcggtatgaacttctacatggaaatcgctaagatgcgcgccggccggagactctgggcacatctgatcgaaaagatgttccaacccaagaactcgaaatccctgcttcttcgcgcgcactgccagacctcaggatggtcactgactgagcaagatccgtacaacaacatcgtgcgcaccgccatcgaggcgatggccgcagtgttcggaggaacccagtctctgcacacgaactctttcgacgaagcgctcggcttgccaactgtcaagtcggcccgcattgcccgcaacacccagattatcattcaggaagagagcggtattccgaaggtggcggacccatggggcgggagctacatgatggaatgtctgactaatgatgtgtacgacgcggctctgaagctgatcaacgagatcgaagaaatggggggaatggccaaggccgtggctgaaggcatcccgaaacttcggatcgaagagtgcgcggcccgacggcaagcgagaatcgatagcggcagcgaggtcatcgttggagtgaacaaataccagctcgagaaagaagatgcagtcgaagtgctggctattgataatacttcagtgcgaaacaggcaaatcgaaaagctgaagaaaatcaagtcgtcgcgggaccaggcactggcggaaaggtgcctggccgccctgactgaatgcgccgcatcgggtgacggaaacatcctggcgttggccgtggacgcgtcgcgcgcacgctgcactgtgggagagattactgacgcgctgaagaaggtgtttggagaacataaggccaacgaccgtatggtgtccggggcctaccgccaagagttcggggagtcaaaggagatcacctccgctatcaagcgggtgcacaagtttatggagagagaaggacgcagaccgcgcctgctcgtcgcgaagatgggtcaagatggacacgatagaggcgcaaaggtgatcgcgactggattcgccgacttgggattcgacgttgacatcggtcctctgttccagacccctcgggaggtggcccaacaagccgtggatgctgatgtccacgcagtcggcattagcaccctggcagcaggacataagaccctggtgccggaattgatcaaagagttgaattccttgggcagacctgatatcctggtgatgtgcggaggcgtgatcccgccacaggattacgaattcctcttcgaagtgggggtgagcaacgtctttggacctggcactcgcatcccaaaagccgccgtccaggtgctggatgacattgagaagtgcctggaaaagaaacaacagtcggtc

SEQ ID NO: 16739 - DNA, 2250 bp, synthetic construct
  misc_feature 1..2250: note = source = /note="Description of Artificial Sequence: Synthetic coding sequence"
  source 1..2250: mol_type = other DNA
atgttgcgggccaagaaccagctgttcctcttgagcccccactacctgcgccaggttaaggagagcagcggatccagactgatccagcagcggctcctgcatcagcagcaacccttgcatcccgaatgggcagccctagcaaaaaagcagctcaagggcaagaacccagaagacctgatctggcatacgcccgagggtattagcataaaacccctctattcgaaacgggacaccatggacctcccggaggagttgcccggtgttaagccgttcactagaggcccgtatcccacgatgtacacgttccggccatggaccatccgtcaatacgccggtttcagcaccgtcgaggagagcaacaagttttataaggataacatcaaagccgggcagcaaggcctctcggttgccttcgacctagctacccaccgcggctacgattcggacaacccacgtgtccgtggtgacgtcggtatggccggggtggctatcgataccgttgaggacaccaaaatcttgtttgacggcatccctttggaaaagatgtccgtctccatgacaatgaatggtgccgtcatccccgttctggccaactttatcgtgaccggtgaagaacagggtgtgccgaaggagaaactcaccggtaccatccaaaatgacattctcaaagagttcatggtccgcaacacctacatcttcccccccgagccttccatgaaaatcatcgccgatatttttgagtatactgcaaagcacatgcctaagtttaacagtatctctatctcgggctatcacatgcaggaggccggcgccgacgctattctggagctcgcctataccctcgctgacggcctggaatattctcgcacgggactgcaggctggactgaccatcgacgagttcgcccctcggctcagtttcttctggggtattggcatgaatttctacatggagatcgctaagatgcgcgccggtcggcgcttgtgggctcatctgatcgagaagatgttccagccgaagaactccaagagtcttcttcttagggcccattgccagacctctggttggtccttgaccgagcaggatccttacaacaacattgtgcggaccgccatcgaagcgatggctgccgtgttcggcggtacccagtccttgcacacaaactccttcgatgaagccctgggcctgccgaccgtcaaaagtgcccggatcgccagaaacacgcagattatcattcaggaggaatcgggtatccccaaggttgcggatccttggggtggctcttatatgatggagtgcctgaccaacgatgtgtatgatgctgccctcaagttaatcaacgagatcgaggaaatgggaggtatggccaaggcggttgctgagggtattcccaagctgcgcatcgaagaatgtgccgcacggcgccaggctcgcatcgactcaggcagtgaggtgatagtgggagtgaacaagtaccagcttgaaaaggaggacgccgttgaggtgctcgccattgataacacctcggtccgtaaccgccagatcgagaagctgaagaagatcaagagttcgcgcgaccaagcgctggctgagcgctgtctcgctgctctgaccgagtgtgccgcgtctggcgacgggaatattctcgcattagccgttgatgcctcgcgggcacgttgcacagtgggggagatcaccgacgccttgaagaaggtgttcggcgagcacaaggccaacgaccgcatggtgtctggcgcttaccgccaggagtttggtgagagcaaggaaatcacttccgctattaaacgcgttcacaagttcatggagcgggaaggacgccgcccccgtctgttggtggcaaagatgggtcaggacggtcacgaccgtggtgcgaaagttatcgcaactggcttcgcggatttgggctttgacgtggacatcggcccgctttttcaaacgcctcgcgaggtggcccaacaggctgttgatgctgatgttcacgcggttggtatctccacactcgctgctgggcacaagactctcgtgcctgaactgattaaggagctcaacagccttggacgacccgacatactggtcatgtgcggcggtgtcattccgcctcaagattatgagttcctgttcgaggtcggtgtctccaacgtcttcggccccgggacacgtattcccaaagctgccgttcaggttctggacgatattgagaagtgcctggagaaaaaacagcaatctgtg

SEQ ID NO: 16740 - DNA, 2682 bp, synthetic construct
  misc_feature 1..2682: note = source = /note="Description of Artificial Sequence: Synthetic coding sequence"
  source 1..2682: mol_type = other DNA
atgattcttctcgcggtcctgtttttgtgctttattagctcatatagtgcttcagtcaaggggcacacaacagggctcagcctgaataacgatagactgtacaaactgacttactccacagaggtgctgctggatcgcggcaaggggaagcttcaggattctgtcggctaccggatatcatcaaatgtggatgtggccctgctgtggcgcaacccagacggggacgatgaccagttgattcagatcaccatgaaagacgtcaacgtagagaatgtaaatcagcaacgcggcgagaaatccatcttcaaggggaagtcccccagtaagataatgggcaaagagaatctggaggccttgcagagacctaccctgctgcacctgatccatggtaaagttaaagagttttacagttatcaaaacgaagccgtagcgatagaaaatatcaagagaggcctggccagtctcttccaaacccagctgtcaagtggaacgaccaacgaggtggacattagtggcaattgcaaggtaacataccaggcacaccaggacaaggtcataaagatcaaggccttagattcttgtaaaatagccagaagtggatttactacgccaaaccaggtgctcggcgtgtcttccaaggcgaccagcgttaccacctacaaaattgaggacagtttcgttatagccgtgctggcggaggagactcacaacttcggattgaacttcctccagacaatcaaggggaagattgtgagcaagcagaagttggagctgaaaactaccgaagctgggccacgcctgatgtcgggtaaacaagccgcagcaatcatcaaggccgtggatagtaagtacacagcaattcccatcgtcgggcaggtatttcagagtcactgtaaaggatgtccctcgctcagtgaactgtggcggtccacacggaaatacctacagccggacaatttgtctaaggccgaggccgtgcgtaactttttggcttttatacagcatcttcgcacagccaaaaaggaggagatcctgcagattctaaaaatggagaacaaggaggtcctcccacagctggtcgacgccgtgacaagcgcccagacctctgactctctcgaggcgattcttgactttctggacttcaaaagcgactcctctattatattgcaggaacggttcctgtacgcgtgcggcttcgcatctcaccccaacgaggagctactgagggccctgatctccaaatttaagggatccattgggtccagtgatattcgggagacagtcatgattatcactggcacgttggtgcggaagttgtgccagaatgagggctgtaagctgaaggcagtggttgaggcaaagaaactcatcctgggcgggttggagaaagccgaaaaaaaggaagatacacgcatgtacctactcgcccttaagaacgccctgctgccggaagggattccttctctattgaaatatgccgaggccggagagggtcccatttctcatttagctaccaccgctttgcagcgatatgatctgccctttattacggacgaggttaagaaaactctgaaccgcatttaccaccagaaccggaaagtccacgagaagactgtgcggactgcagcagccgccataattttgaacaataacccttcttatatggacgttaaaaatattctcttaagtatcggcgaattgccacaagagatgaacaagtatatgctagccatagtgcaggacattctgcgcttcgagatgcccgcgtcaaagatagttagaagagttctcaaagagatggtggcacataattacgataggttctcccgtagcgggagtagcagcgcatacactggctacatcgagcggagtcccagatccgcatccacgtactcacttgatatcctctacagcggctccgggatccttcgcaggtccaacctgaacatattccagtacataggaaaggccggcctgcacggctcacaggtggtgatagaagcccagggcctggaggcactcatcgccgctaccccggacgagggcgaagagaacttggacagctatgctggaatgagtgctatactgttcgacgtgcagctgcgcccagtaactttttttaacggctatagcgatctgatgagtaaaatgctttcagcctcgggcgatcccatctcagtcgtgaagggcctaatcctgctcattgaccattcccaggaactccagcttcaatctgggctcaaggctaacatagaggtgcagggaggtcttgctatcgacatcagcggcgctatggagttctctctatggtaccgggagtctaaaacccgagtgaaaaatcgagttaccgttgttataacgaccgacatcaccgtggacagctcatttgtgaaggcgggtttggaaacttctacggagactgaagccggtctggagttcatcagcacagtgcagttttcccagtatccttttctggtctgcatgcagatggataaggatgaggcgccgtttcggcagtttgaaaagaaatacgagcgactgtccaccgggcggggttatgtttcccagaagcgaaaggagtctgtgctcgccgggtgtgagtttcctcttcaccaggaaaattcggaaatgtgcaaggtggtgtttgcccctcagcccgatagtacctcatcaggctggttc

SEQ ID NO: 16741 - DNA, 2682 bp, synthetic construct
  misc_feature 1..2682: note = source = /note="Description of Artificial Sequence: Synthetic coding sequence"
  source 1..2682: mol_type = other DNA
atgatattattagcggtattatttctatgttttatatcgtcgtattcggcgtcggtaaaaggtcatacgacgggtttatcgctaaataatgatcgactatataaattaacgtattcgacggaagttctactagatcgtggtaaaggtaaattacaagattcggtaggttatcgtatatcgtcgaatgtagatgttgcgttattatggcgaaatccggatggtgatgatgatcaactaatacaaataacgatgaaagatgtaaatgtagaaaatgttaatcaacaacgaggtgaaaaatcgatatttaaaggtaaatcgccgtcgaaaataatgggtaaagaaaatttagaagcgttacaacgaccgacgttactacatctaatacatggtaaagttaaagaattttattcgtatcaaaatgaagcggttgcgatagaaaatataaaacgaggtttagcgtcgctatttcaaacgcaactatcgtcgggtacgacgaatgaagttgatatatcgggtaattgtaaagtaacgtatcaagcgcatcaagataaagttataaaaataaaagcgctagattcgtgtaaaatagcgcgttcgggttttacgacgccgaatcaagttttaggtgtttcgtcgaaagcgacgtcggtaacgacgtataaaatagaagattcgtttgtaatagcggtattagcggaagaaacgcataattttggtctaaattttttacaaacgataaaaggtaaaatagtatcgaaacaaaaactagaattaaaaacgacggaagcgggtccgcgtttaatgtcgggtaaacaagcggcggcgataataaaagcggttgattcgaaatatacggcgataccgatagtaggtcaagtatttcaatcgcattgtaaaggttgtccgtcgttatcggaactatggcgttcgacgcgaaaatatttacaaccggataatttatcgaaagcggaagcggtacgtaattttttagcgtttatacaacatctacgtacggcgaaaaaagaagaaatactacaaatattaaaaatggaaaataaagaagtactaccgcaattagtagatgcggtaacgtcggcgcaaacgtcggattcgttagaagcgatactagattttctagattttaaatcggattcgtcgataatattacaagaacgttttctatatgcgtgtggttttgcgtcgcatccgaatgaagaactattacgtgcgctaatatcgaaatttaaaggttcgataggttcgtcggatatacgagaaacggtaatgataataacgggtacgttagttcgtaaattatgtcaaaatgaaggttgtaaactaaaagcggtagtagaagcgaaaaaactaatattaggtggtttagaaaaagcggaaaaaaaagaagatacgcgaatgtatctattagcgttaaaaaatgcgttattaccggaaggtataccgtcgttactaaaatatgcggaagcgggtgaaggtccgatatcgcatttagcgacgacggcgttacaacgatatgatctaccgtttataacggatgaagtaaaaaaaacgctaaatcgaatatatcatcaaaatcgaaaagtacatgaaaaaacggtacgaacggcggcggcggcgataatattaaataataatccgtcgtatatggatgttaaaaatatattactatcgataggtgaactaccgcaagaaatgaataaatatatgttagcgatagtacaagatatactacgttttgaaatgccggcgtcgaaaatagtacgacgagttctaaaagaaatggtagcgcataattatgatcgtttttcgcgttcgggttcgtcgtcggcgtatacgggttatatagaacgatcgccgcgttcggcgtcgacgtattcgctagatatattatattcgggttcgggtatactacgtcgatcgaatctaaatatatttcaatatataggtaaagcgggtttacatggttcgcaagttgtaatagaagcgcaaggtttagaagcgttaatagcggcgacgccggatgaaggtgaagaaaatttagattcgtatgcgggtatgtcggcgatactatttgatgtacaactacgtccggtaacgttttttaatggttattcggatctaatgtcgaaaatgctatcggcgtcgggtgatccgatatcggtagtaaaaggtctaatattattaatagatcattcgcaagaattacaattacaatcgggtctaaaagcgaatatagaagtacaaggtggtctagcgatagatatatcgggtgcgatggaattttcgctatggtatcgtgaatcgaaaacgcgtgttaaaaatcgagtaacggtagtaataacgacggatataacggtagattcgtcgtttgtaaaagcgggtttagaaacgtcgacggaaacggaagcgggtctagaatttatatcgacggtacaattttcgcaatatccgtttctagtatgtatgcaaatggataaagatgaagcgccgtttcgtcaatttgaaaaaaaatatgaacgtttatcgacgggtcgtggttatgtatcgcaaaaacgaaaagaatcggttctagcgggttgtgaatttccgctacatcaagaaaattcggaaatgtgtaaagtagtttttgcgccgcaaccggattcgacgtcgtcgggttggttt

SEQ ID NO: 16742 - DNA, 2682 bp, synthetic construct
  misc_feature 1..2682: note = source = /note="Description of Artificial Sequence: Synthetic coding sequence"
  source 1..2682: mol_type = other DNA
atgattcttctggctgttctgttcctgtgttttatctcctcatactccgcatcggtgaagggacataccactggtctgtccctgaataacgatcggctctacaaactgacttactcaacggaggtgctgcttgatcgcggaaaaggtaaactccaggactccgttggctaccggatcagctcaaacgtggatgtggcactgctctggagaaatcctgacggtgacgatgatcaactgattcagatcactatgaaagatgtcaatgtggaaaacgtgaatcagcaaaggggagaaaagtcaatctttaaaggaaagtcaccttcgaagattatgggtaaagaaaaccttgaagcacttcaaagacccacgcttctgcatcttatacatggtaaagtgaaagagttctatagctaccaaaacgaggcagtggcaatcgaaaacataaaacggggactggcctcacttttccaaacgcaactctcttctggcactactaacgaggtggacattagcggtaactgtaaggtgacctaccaagcccatcaggataaggtcatcaagattaaagcccttgactcatgcaagatcgcacggtcaggcttcacgaccccaaaccaggtcctgggtgtcagcagcaaggccacctccgtgactacctacaagattgaagattcgtttgtgattgcagtgctggctgaagaaacccacaatttcgggcttaacttccttcaaaccatcaagggtaagattgtgtcgaagcaaaagctggaacttaagaccacggaagcagggccacgcctcatgtccggtaaacaagccgcggcaattatcaaggctgtggactcaaagtacactgctattcccattgttggccaggtgtttcagtcgcattgtaagggctgcccatcgctctccgaactgtggcgttcaactcggaagtacctccagcctgacaatcttagcaaggcagaagcagttaggaactttttggccttcatccagcatctccggaccgcaaagaaagaagagatacttcaaatcttgaaaatggaaaacaaagaagtgcttccgcaactggtggatgcggtgaccagcgcacaaacctcagattcgctggaggccattttggattttcttgacttcaaatctgattcctcaattatcctccaagaaagatttctttacgcatgtggctttgcatcgcaccccaacgaagagctcttgcgcgcgcttatcagcaagtttaaggggtccataggatcgagcgatattcgagagactgtcatgatcattactggtacccttgtgcgaaagttgtgtcagaacgaaggatgtaagctgaaggcagtcgtcgaggcaaaaaagctgatcctcggcggtcttgaaaaggctgaaaagaaagaggacacccggatgtacctcctggcactgaagaatgccctcctcccggaaggaattccatccctgctgaagtacgcagaagcaggagaaggtcccattagccacttggccactaccgctctgcagcgttacgacctgccattcatcactgatgaagtgaaaaagaccctgaacagaatataccatcagaacagaaaagtccacgaaaagactgtgcgcaccgcagctgccgcgataattctgaataacaacccaagctacatggacgtgaaaaacatcttgctgtccatcggtgagctgccacaggagatgaataagtacatgttggcaatcgtccaagatatactgcgattcgagatgccggcctcgaagattgtgcgacgggtgctcaaggagatggtggcacataactacgaccgattttcgcgcagcgggagctcatcggcctatactggatacattgaacggagccctcgctccgcctccacttattcgcttgatatcctttactcgggatccggaatacttcggcgatccaatctgaacattttccaatacataggaaaggcaggactgcacggatcgcaggtcgtgattgaagcacagggccttgaagccctcatcgctgcaactccagatgagggagaagaaaatcttgactcctatgccggtatgtcggcaatccttttcgatgtccagctgcggcctgtcacgtttttcaatggatactcggatctcatgtccaagatgctcagcgcatcgggtgatcctattagcgtcgtgaaaggtctgatcctgctcatagatcattcacaagaacttcaactccaaagcgggcttaaggcaaacattgaggtgcaaggaggactcgcgattgatatcagcggagcgatggagtttagcctgtggtaccgcgaatcgaaaactagagtgaaaaatcgtgtgactgtcgtgattacgactgacatcacggtcgattcgtcgtttgttaaggccgggctcgaaacctcaacggaaaccgaggccggacttgaattcatatcgactgtccagtttagccaatacccttttctggtgtgcatgcaaatggacaaagacgaggcaccatttaggcagtttgaaaagaagtacgaacggctgagcacgggtcgcggttacgtcagccaaaagaggaaggaatctgttctcgcgggttgtgaatttccccttcatcaagagaactctgaaatgtgcaaagtggtgtttgcaccacaacctgactccacttcctccggatggttc

SEQ ID NO: 16743 - DNA, 2682 bp, synthetic construct
  misc_feature 1..2682: note = source = /note="Description of Artificial Sequence: Synthetic coding sequence"
  source 1..2682: mol_type = other DNA
atgatcctactcgcagtgttgtttctctgtttcatcagcagttatagtgcctcggtgaagggtcataccactgggctctcactgaataatgaccgtctctataagctcacatactccaccgaagtcctcctggatagagggaaaggcaaactgcaggatagtgtgggctatcgaatcagttccaacgtggacgtggccttgttatggcggaaccccgacggcgatgatgaccagctgatccaaattactatgaaagacgtgaacgtagagaatgtgaaccagcagcgcggcgagaagagcatatttaagggcaagagcccaagtaaaatcatggggaaggagaacttggaggccctccagcgtcctactctgctccacctgattcacgggaaggttaaagagttttatagctaccagaatgaggccgttgccattgagaacattaaacgagggcttgcctctttgttccaaactcagttgtcctcagggacgaccaatgaggttgatatctctgggaactgcaaggttacatatcaggcccatcaagacaaagttatcaaaatcaaagccctggactcctgcaagatagctaggtccggttttactacacccaatcaggttctgggggtctcgagtaaagccacttctgtaactacatataaaattgaggacagtttcgttatcgctgtcctcgcagaggagacacacaacttcggtctcaatttcttacaaactatcaagggcaagatcgtgagcaagcaaaagttggaactcaagacaacagaagccgggcccaggcttatgtcaggtaaacaagcagctgcgattatcaaggccgtcgactcaaaatatactgccatacccatagttgggcaagtcttccagagtcattgcaaagggtgcccatctctgtctgagctctggcggtcaactagaaagtacctgcagccggacaacttgtcgaaggctgaggctgtcagaaactttctcgcctttatccagcatttgagaaccgctaaaaaggaggagatcttacagatcttgaaaatggaaaacaaggaagtacttcctcagcttgtggatgccgtcacttcagcccaaacttcagattcgctcgaagcaatcctcgacttcctggatttcaagagcgattcttccatcatcctgcaggagcggtttctgtacgcttgtgggtttgcatcccaccccaacgaggaattgctgagagccttgatatccaagttcaaaggctcaatcggatcctctgacataagggaaacagtaatgattatcacaggtacgcttgtgcggaagttgtgccagaatgagggctgtaagttaaaggctgtggttgaagcaaagaaactgatactgggcggactcgagaaggccgagaagaaagaagatacccggatgtatttgctggcccttaagaatgctttgctaccagagggcatcccctccttgctgaagtacgccgaggccggggagggccccatctcacacctggccactaccgcactgcagcggtacgacttaccttttatcaccgatgaggtcaagaagacattgaataggatctatcatcagaacaggaaagtccacgaaaaaaccgtgcgcaccgccgccgccgccattattttgaataataacccaagttacatggacgtcaagaacatcttgctgagcatcggtgaactcccccaggagatgaacaaatacatgctggcaatcgtgcaggatattttgcgattcgagatgccagcatcaaaaatcgtgcggagagtgttaaaggagatggtagcccataattacgacaggttctcgcgctcaggcagcagtagtgcatatactgggtatatcgagagatccccccgtagcgcaagtacttactcactggacatcctctatagtggctcgggaatattgcgacgttcaaatcttaacatttttcagtatatcggcaaagctggccttcacggctcacaggttgttatcgaagctcagggccttgaagcactaatagctgctactccggacgagggggaagagaatctggatagttacgccgggatgagcgctatcctctttgatgtacagctgcgccctgtgacattctttaatggttattctgatctcatgtcaaagatgttaagcgcgtctggggatcccatcagtgttgttaagggactcatactgctgattgaccacagtcaagaactccaactacagtccgggctgaaggccaacattgaggtccaagggggactggctattgatatcagcggcgcaatggagttctcgttatggtatcgggaatcaaagactcgggtaaagaatagggtcactgttgttattaccaccgacatcaccgtggattcaagctttgtgaaggcgggcctggaaacatccaccgaaactgaggccggattggagtttatttctacagtacagttttcacagtacccattcctggtgtgcatgcaaatggacaaagacgaagctccttttcgacaatttgagaagaaatacgagcgcttaagtactggccgaggctacgtgtcccagaagaggaaggaatccgtgctcgcgggctgtgaattcccactgcaccaagagaacagtgaaatgtgcaaggtggtgtttgcgccccagccggactcaacctctagcggttggttc

SEQ ID NO: 16744 - DNA, 2682 bp, synthetic construct
  misc_feature 1..2682: note = source = /note="Description of Artificial Sequence: Synthetic coding sequence"
  source 1..2682: mol_type = other DNA
atgattctgctggcagtgcttttcttgtgcttcatctcatcctactcggcgtccgtgaagggccacaccacgggactgtcgttgaataacgatagactgtataaacttacttatagcaccgaagtgctgcttgaccggggaaaaggaaagctccaggattccgtgggataccgcatttcctcgaacgtcgatgtggcgttgctgtggcgcaacccagacggcgacgacgatcaactgattcagatcaccatgaaggacgtcaacgtggaaaatgtgaaccagcagagaggcgaaaagtccatcttcaaggggaaatcaccgtcaaaaatcatgggtaaggagaaccttgaagcgctccaacggcctactcttctgcatctgattcatgggaaggtcaaggaattctactcataccagaacgaagctgtcgcaatcgagaacattaagaggggactggcttcactgtttcaaacgcagctcagcagcggcaccactaacgaagttgacatttctggaaattgcaaagttacctaccaggctcaccaagacaaagtgatcaagataaaggcgctggactcatgcaagatcgcacggagcggattcaccaccccgaaccaggtgctgggggtgtcaagcaaggcgacctcggtgacgacttacaaaattgaggattcgttcgtgatcgcggtgctcgccgaagaaactcataactttgggctgaatttcctccaaactatcaaaggcaagatcgtgtcgaagcaaaaactggaactgaaaaccacggaagccggtcctcggctgatgtccgggaagcaagcagcagccatcatcaaggcagtggatagcaaatacacggcaatccctattgtgggacaggtgtttcagtcccattgcaaaggatgcccgtcgctgagcgaactgtggagatccacccggaaatacctccagcctgacaacctgtccaaggcagaggccgtcaggaatttcctggccttcatccagcacttgcgcaccgcgaagaaggaggagatcctccaaatcctcaagatggagaacaaggaggtcctgccgcaactggtggatgctgtcacttcggcccagacctcggatagcctcgaagccatcttggatttcctcgacttcaaatcagactcctcgataatcctccaagagaggtttttgtacgcttgtggatttgcgtcccacccaaacgaggaactgctgcgcgccttgatttcgaagttcaaaggatcaatcggttcgagcgacatccgagaaactgtcatgatcattacgggaacccttgttagaaagttgtgccaaaacgagggttgtaaactcaaggctgtggttgaggccaaaaagctcatactgggaggtcttgagaaggctgaaaagaaggaagatactcgcatgtacctgctggcgctgaaaaatgcccttcttcccgagggaattccgtccctgctgaagtacgccgaagcgggagaaggcccaatctcccaccttgccactacggcgctgcagagatacgacctgcccttcatcaccgacgaagtgaaaaagaccctgaaccggatctaccatcagaatcggaaagtgcacgaaaaaactgtgcgcactgctgcggcagctatcatcctgaacaacaacccttcgtacatggacgtcaaaaacatcctgctttcgatcggcgagttgccgcaggagatgaataagtatatgctcgctatcgtgcaagatatcctccggtttgaaatgcctgcgtcgaagattgttagacgcgttttgaaggagatggtcgcccacaattacgatcgcttttcgcggtcgggatcctcgagcgcctacaccggatacatcgaacgatccccaagatccgccagcacctactcacttgacatcctctactccggctcaggaatcctccgccgctcgaaccttaacatcttccagtacatcggtaaggctggccttcacggatcacaggtggtgatcgaagcccagggactcgaagcactcatcgcagcaacccccgacgagggagaagaaaatctggattcgtacgctggtatgagcgccatcctgttcgacgtgcagctgcgtccggtgactttcttcaatgggtactctgatctgatgtcaaagatgctgtcggcgtcaggcgatccaatcagcgtggtgaaggggctgatcctgctgatcgaccatagccaagaactgcaactccagagcggcttgaaagccaacatcgaagtgcaggggggacttgcgatagacatctccggcgcaatggagttctctctctggtaccgcgaatcaaagacccgggtgaagaatcgggtcaccgtcgtgatcaccactgacatcaccgtggattcgtctttcgtgaaggcgggactggagactagcactgaaaccgaggctggactggagtttatctccaccgtccagttcagccagtacccattcctcgtgtgtatgcagatggataaggacgaggcaccatttcgccagttcgagaagaagtacgaaagactttcaaccggacgtgggtatgtttcacaaaaacggaaggaaagcgttctcgccggatgcgagttcccactgcaccaggaaaatagcgagatgtgcaaagtggtctttgcaccacaaccggactctacgtcgtcaggctggttc

SEQ ID NO: 16745 - DNA, 2682 bp, synthetic construct
  misc_feature 1..2682: note = source = /note="Description of Artificial Sequence: Synthetic coding sequence"
  source 1..2682: mol_type = other DNA
atgattctactggccgtgctgtttctctgctttatcagttcttatagcgccagcgtgaaggggcatacaaccggactgtcacttaataatgacagactttataaacttacgtacagtactgaggtacttctggatcggggaaaggggaagctacaggactccgttggatataggatttcctctaacgtggacgtcgctctgctctggcgcaatcccgacggcgacgacgaccagctgatacagatcacaatgaaggacgtgaatgtcgagaacgttaaccagcagcgaggggagaaaagcatctttaaaggtaaatcacccagtaagatcatgggcaaagagaaccttgaggccctgcagagaccgaccctgttgcacttaatccacggcaaggtaaaagaattttactcataccagaacgaggcagtcgccatcgagaacataaagcgcggcctcgcgtccctcttccagactcagctcagtagcggcactaccaacgaggttgacattagcggcaattgcaaggtgacataccaggcgcatcaggacaaggtgatcaagattaaggccctggactcttgtaagatcgcaaggagtggtttcactacgccaaatcaggtgctgggagtgagctctaaagccacctctgttacaacttataaaattgaggattcatttgtcatcgcagtgcttgcagaggaaactcacaatttcggtcttaactttctccaaacgattaaaggaaagattgtgtctaaacagaaattggaactgaagaccaccgaggccgggccaagattaatgtctggtaagcaagccgctgccattatcaaggccgtcgattcaaagtacaccgcgatccccattgtcggacaggttttccagtctcactgcaaaggatgtccgtcactgtccgaactctggcggtcgactcgaaagtacctacaacccgataacctcagtaaggccgaagctgttcgaaattttttggccttcatccaacacctgcggactgccaaaaaagaggagatcctgcagatcttaaagatggaaaacaaggaagtgctgccccaacttgtggacgccgtcacgtctgcacagacgtccgattccttagaggcaatccttgatttcttggatttcaagtcagactcaagcatcattcttcaggaacgtttcctatatgcttgcggcttcgcctctcaccctaacgaagagctcttgagagccctgatctcgaagtttaagggtagcattgggagctcagacatccgtgagacggttatgatcatcacaggtacactcgtccggaaactatgccagaacgaggggtgtaaactcaaggctgtagtcgaggctaagaaacttattctgggtggccttgagaaagcagagaagaaagaagatactcgcatgtacctgctggccttaaaaaatgccctgctgccggagggcatacctagtctgctgaaatatgccgaagccggggagggccccatctcacatctcgcaacgaccgccctgcagagatatgatctgccgtttattactgatgaggtgaagaaaaccctcaacaggatatatcatcaaaatagaaaagtacacgagaagactgttcgaaccgccgcagccgctattatattaaacaacaatccaagctatatggatgtgaagaacatcctgttatccatcggggagctgccacaagaaatgaacaaatacatgttagccatcgtacaagacatcttgaggttcgagatgcctgcttcaaaaatcgtgaggcgggtgctcaaagagatggtggcccacaactacgacaggttctccaggagtggcagcagctccgcctataccggctacatcgaaagatcgcctcgatctgcttccacatatagcttggacattctctattcaggaagtggtatactcagaagaagcaacttgaatatcttccagtacatagggaaagcaggcctgcacggctcccaggtggttattgaggctcaggggcttgaggctttaatcgccgccacccccgatgagggagaagagaatctggacagctacgctggcatgtcggctatcctctttgatgtgcaactgcgtcctgttacgttcttcaacgggtattccgatctcatgtcaaagatgctatccgccagtggagatcctatttctgtggtgaaagggcttatcttactcatagatcacagtcaggagttacagctgcagtcaggattgaaagctaatatcgaagtacagggcggcttggctatcgacatttcaggcgccatggagttctccctctggtaccgggagtccaaaacccgcgttaagaacagagtgaccgtggtgatcactacagatatcacagtcgactcctctttcgtgaaggcaggattggaaactagcacagaaacagaagccggcctggagttcatctcaacggttcaatttagccagtacccattcctggtgtgtatgcaaatggataaggatgaggctccctttagacagttcgaaaagaaatacgagcgcttgtccacgggcagaggatacgtgagtcagaaacggaaggaatcagtcctggccggttgtgagtttccactgcaccaggagaattctgagatgtgcaaggtggtgtttgccccgcagccagacagtacgtcctctggttggttt

SEQ ID NO: 16746 - DNA, 2682 bp, synthetic construct
  misc_feature 1..2682: note = source = /note="Description of Artificial Sequence: Synthetic coding sequence"
  source 1..2682: mol_type = other DNA
atgatcttgctcgcagtgctttttctctgcttcatttcctcctactcggcctctgtcaaaggacatactaccggtttgtcactgaacaatgatcgactgtacaaactgacgtactcaaccgaggtgcttcttgatcgcggcaagggaaagctccaagattcagtgggttacagaatcagctcaaacgtggacgtggcgctcctgtggcgaaacccagacggagatgacgaccaactgattcagataacgatgaaagatgttaacgtcgagaacgtgaaccaacagcgaggcgaaaaatccattttcaaaggaaaatcaccctctaaaatcatgggaaaggaaaaccttgaggccctccaaagaccaacccttctgcatttgattcacggcaaggttaaggagttttacagctaccagaacgaggctgtggcaattgaaaacataaagcgcggtcttgcatcactgttccaaactcaactttcctcggggactactaacgaagtcgatatttcaggtaactgcaaagtgacttatcaggcgcatcaagataaagtgattaagattaaggccctggactcatgcaagattgcgagatcgggctttacgacccctaaccaggtcctcggagtgtcgtccaaggcaacctccgtgaccacctacaagattgaagattcatttgtgatcgcagtgcttgccgaggagactcataactttggcctcaacttcctgcagactattaagggtaaaatcgtgtcgaaacaaaaactggaacttaagaccaccgaggcaggacccagactgatgtcgggtaagcaagccgcagccatcataaaagccgtggactcaaagtacaccgcaataccgatcgtcggacaagtgtttcagtcgcactgtaagggatgtccatcactttcggagctttggagaagcactcggaagtaccttcaacctgacaatctttcgaaggcagaagccgtgcgaaactttcttgcctttattcagcaccttagaaccgcaaagaaggaagaaatacttcagatcttgaagatggaaaacaaagaagtccttcctcagcttgtggatgccgtcacttccgcccagacctccgactcgcttgaggcaatactggattttctcgatttcaaaagcgactcctccattatactgcaggagcgcttcctttacgcatgtggcttcgcttcacatccaaacgaagagctgctgcgcgctctgatttccaagtttaagggttcaattggctcgtcagatattagagagactgtgatgatcattaccggtaccctggtgaggaaactgtgtcagaatgaaggatgtaaactgaaggcagtggtggaagcaaagaagctgattctgggaggtcttgaaaaggcggagaaaaaggaagataccagaatgtacctgcttgcacttaagaatgctctgcttcctgaaggaatcccatcccttctgaaatacgcagaggcaggcgagggacctatctcacatctggctactaccgcactgcagcgttacgacttgccctttatcactgacgaggtcaagaaaactcttaacagaatctaccaccaaaaccggaaagttcacgaaaagacggttagaacggcggcagcggcaattatcctgaacaacaacccttcttatatggatgtaaagaacatcctcctctcaattggagaacttccacaagagatgaacaaatacatgctggctatcgtgcaggacattctccggtttgaaatgccagcgtcgaagattgtccggcgtgtcctgaaggaaatggtcgcccacaactacgacaggttttcacgtagcggtagctctagcgcatacaccgggtatattgaacggtcgccacgttcggcctccacttacagcctcgatatactgtactccggttccggaatactgagaagatcgaacctgaacattttccaatacattggtaaggcaggtctgcatggatcccaagtggtgattgaagcacagggccttgaagctctcattgcagccaccccagacgaaggggaggaaaacctggattcgtacgcaggcatgtcagcaatattgtttgatgttcagctcagaccagtaacctttttcaacggatacagcgacttgatgtccaagatgctgtcggcatcgggggatcctatttcggtggtgaaaggcctcatacttttgatagatcattcgcaggaacttcagctgcagtcaggtctgaaagccaacattgaagttcaaggtggtcttgcaatcgatatttcgggggcaatggaattttccctttggtacagagagtcaaaaactagagtgaagaaccgggtcaccgtggtcatcactaccgatattacggtggattcctcgttcgtcaaggccggtctggaaacgagcaccgagactgaggcaggtcttgaattcatcagcactgtccaattctcgcaatatccttttctggtgtgtatgcaaatggataaggatgaagcacccttccggcaatttgaaaagaagtacgagaggctttccactgggagaggatacgtgagtcaaaagagaaaggagtccgtgctcgccggatgtgaatttcctctgcatcaagagaactcggaaatgtgtaaggtggtgttcgcacctcagccggatagcactagctccggttggttc

SEQ ID NO: 16747 - DNA, 2682 bp, synthetic construct
  misc_feature 1..2682: note = source = /note="Description of Artificial Sequence: Synthetic coding sequence"
  source 1..2682: mol_type = other DNA
atgattctgctcgctgtgctctttctgtgttttatctcctcctattcggccagcgtgaaaggtcataccacgggcctttcattgaacaatgatcggctgtacaagctcacttacagcaccgaggtcctcctggataggggcaagggtaagctgcaagactccgtcggatacaggatttcatccaatgtggacgtggccctgctctggcgtaaccccgatggagacgatgaccagttgattcagattactatgaaggatgtgaatgtcgaaaacgtgaaccagcaacgcggtgaaaagtccattttcaagggaaaatctcccagcaagataatgggcaaggaaaacctggaagccctgcaaaggccaactctgctgcatctcatccacggaaaggtgaaagagttttacagttaccagaacgaggccgtggcgattgaaaacataaagagaggtctggcgtctctgttccaaactcagctgtctagcggaaccaccaatgaagtggatatctcagggaattgtaaagttacctaccaggcacatcaagacaaagtgatcaaaatcaaggccctcgacagctgtaagatagcacgctcggggtttaccactccaaatcaagtgctgggagtctcaagcaaggcgacttcagtaactacttacaagatcgaggactcctttgtgatcgcagtccttgctgaagaaactcacaacttcggactcaacttccttcaaacgattaagggcaaaatagtgtcgaagcagaaactggaactgaaaaccaccgaagccgggccccgtctgatgtccggaaagcaagcagcagccatcataaaggcagtcgatagcaagtacaccgcaattcctatcgtcggacaagtctttcaatcgcattgcaagggctgcccatccctgagcgaactctggagaagcaccagaaagtacctgcagccagataacctttcaaaagcagaggccgtgcgaaactttctggcgtttattcaacatctgcgcaccgcgaagaaagaggaaatcctgcaaattctgaagatggagaacaaggaggttcttcctcagctcgtggacgcagtgacttctgcacagacctctgattcgttggaagcaattctcgacttccttgactttaagtcggattcatcgataatacttcaagagcgttttttgtatgcttgcggatttgcatcgcaccctaatgaggaattgctcagagcattgatctccaagtttaaggggtcgattggctcgtcagatatcagggaaactgtcatgattatcactggaacccttgtgcgcaagctctgccagaatgaaggttgtaaactgaaggcggtggtcgaagcaaagaaacttatcctcggtgggcttgaaaaggcagagaaaaaggaagatacccggatgtaccttttggctctcaaaaacgcactgttgccggagggaatcccctcgcttcttaagtacgcggaggcaggtgagggacccatttcgcacttggccacgacggccctccaaaggtacgatcttcctttcattaccgatgaagtcaaaaagacgcttaatagaatttaccatcagaatcgcaaggtccacgaaaagactgtgagaaccgcagcagcagctataatccttaacaacaatccgagctacatggacgtcaagaatatactgctttcaattggtgaactgccacaagaaatgaacaagtacatgctggccatcgtgcaggacatcctgcgcttcgaaatgccagctagcaaaatagtcagacgtgtgctcaaggagatggttgcacataactacgacaggttctcaagatcgggttcttcatcagcatacactgggtacatcgaacgcagccctcggagcgcatcgacttattcgcttgatatcttgtactccgggtccggcatcctgagacggagcaacctgaatatcttccagtacattggaaaggccggacttcatgggagccaggtggtgatagaggcacagggtcttgaggcactgattgcggccactcctgacgaaggtgaggaaaaccttgattcttacgcaggaatgtccgcgatcctgtttgatgtgcaattgcgcccagtgacctttttcaacgggtactccgatttgatgagcaaaatgctttcagcatcgggcgaccccatttcggtggtgaaaggcctgatcctgctgattgatcatagccaggaactccagttgcaatccgggcttaaggcaaacatagaagtccaaggcggcctggctatcgacatctccggagcgatggaattctccctttggtaccgggaatccaaaacccgcgtgaagaacagagtgactgtggttattactaccgatataaccgtcgattcatcatttgtaaaagctggtctggagacttctactgaaactgaggcggggctcgagttcatatcgacggtgcagttctcgcaatacccattcctggtctgtatgcaaatggataaagatgaagcgccctttagacaatttgaaaagaaatacgaacgcctttccaccggacgcggctatgtgtcgcaaaagaggaaggaatcagtgctggcgggatgcgaatttcctctccaccaggagaattcggagatgtgtaaggtggtttttgcacctcaaccagatagcacttcgtcaggatggttt

SEQ ID NO: 16748 - DNA, 2682 bp, synthetic construct
  misc_feature 1..2682: note = source = /note="Description of Artificial Sequence: Synthetic coding sequence"
  source 1..2682: mol_type = other DNA
atgattcttctggctgtcctgtttttgtgtttcatctcatcttacagcgccagcgtgaagggacacaccactggtttgtccctcaacaacgatcggctgtacaaactgacctactcgaccgaagtcctccttgatagggggaagggtaaattgcaagatagcgtaggatacagaatatcgagcaatgtggatgtagcgcttctctggcgtaatcctgatggggatgacgaccaactcatccagataactatgaaggacgtgaatgtggaaaatgtcaaccagcagcgaggagaaaagtctatcttcaaagggaaatcgccttccaagattatgggaaaggagaacctcgaagcactgcagcgacctactcttttgcatcttatccacggaaaggtgaaggagttttactcgtaccagaatgaagcggtcgcaatagaaaacataaaacgcggtctggctagcctgttccaaacccaactctcatcaggaactaccaacgaagtggacataagcgggaactgcaaggtaacttaccaagcacaccaggataaggtgattaagattaaggcgctcgattcatgtaagattgcacgcagcggattcaccactcccaatcaggtccttggtgtgtcctcgaaagctacctcagtgaccacttacaagattgaggattcgttcgtcattgctgtcctggcggaagaaacccacaattttggccttaacttccttcaaactatcaagggaaagattgtgtccaagcagaagttggaactgaaaactaccgaggcaggacccagactgatgtctggcaagcaagcggcagcaatcatcaaagccgtggactccaagtacaccgccatacctattgtgggccaagtgtttcagtcacattgtaagggatgtccttcgttgtcggagctttggcgatccactcgcaagtacctgcagccagataatctctccaaggccgaggcggtgcggaactttttggcattcatccaacatctgaggactgcaaagaaggaagagattcttcagatcctcaagatggaaaacaaggaagtgcttccccaactggtggatgccgtgacttccgcacagacttccgattccctggaggcgattcttgattttctggatttcaagtccgattcctcgattattctccaagaaagattcctgtacgcctgcggatttgcatcccatccaaatgaagaactcctcagggcgcttattagcaagtttaagggttcaattgggtcatcggacattcgggaaactgtcatgattatcactggcacgctggtgcgcaaactttgccaaaatgaaggatgtaagctgaaggcagttgttgaagcaaagaagctgattcttggcgggcttgaaaaagcagaaaagaaggaggacacgcgaatgtacctgcttgcgctgaagaacgcactgctgccagaagggatcccaagcctgcttaagtatgcggaagcgggagaaggaccaatcagtcatctggcaaccactgcactccagcgttacgaccttccctttatcacggacgaggtgaagaaaacccttaatcggatttaccaccaaaacagaaaagtgcacgaaaaaaccgtgcgcactgcagcagcagcaattatcctcaacaacaacccctcttacatggatgtgaagaatattctgctttcgatcggtgaacttcctcaagagatgaacaagtacatgcttgccattgtgcaggacatccttcgatttgagatgcctgcctcaaagatcgtcaggcgcgtgctgaaggagatggtcgcgcataactacgatcggttctccaggtccggatcatcctcagcctacaccggctacatagagaggagcccaagatcagcatcaacctactccctggacattctttactccgggagcggaattcttaggcggtcgaacctgaatatctttcaatacataggcaaggctggactccatgggtcacaagtggtcatcgaagcccaaggtcttgaagcattgattgcagctactcccgacgaaggagaagaaaaccttgactcgtacgctggaatgtcggcgatccttttcgatgtgcaactgcgacctgtgacctttttcaatggatacagcgatctcatgagcaagatgcttagcgcgtccggtgacccgatttcagttgtgaaaggtcttatactgctgattgatcatagccaggaacttcaactgcagtcaggcctgaaggcaaatatcgaggtgcaaggaggtctggcaattgatatatcaggcgcaatggagtttagcctctggtatcgcgaatccaaaacccgtgtgaaaaacagggtgactgtggtgattactacggatataaccgtggattcgtcatttgtgaaggctgggctggaaacttcgaccgaaacggaagcaggactggagttcatttcaactgtccaattttcacagtacccatttctggtgtgtatgcaaatggataaggatgaagccccttttcgtcaatttgaaaagaagtacgagcgactctcaaccggacggggatacgtctcgcaaaaacggaaggagtcggtgttggcaggttgtgaatttccacttcaccaagagaacagcgagatgtgcaaggtggtgtttgcacctcaacctgatagcacttcatcgggttggttc

SEQ ID NO: 16749 - DNA, 2682 bp, synthetic construct
  misc_feature 1..2682: note = source = /note="Description of Artificial Sequence: Synthetic coding sequence"
  source 1..2682: mol_type = other DNA
atgatccttctggcagtgctgttcctttgtttcatatcatcgtactcggcctccgtcaaggggcacactacgggccttagcctgaacaacgacaggctttacaagctgacttacagcactgaagtgctcctggatcggggaaaagggaagctgcaagattcggttggttaccgtatctcatcaaatgtggacgtcgcactgctgtggaggaatcctgatggggacgatgatcaactgatacagataaccatgaaagatgtgaacgtcgaaaacgttaatcagcagaggggggagaagagcatctttaaagggaagagcccgagcaagattatgggaaaggaaaatctggaagcactccagcggccaaccctgctgcatcttattcatgggaaagtcaaagaattctactcgtaccaaaatgaggcggtcgcgattgagaatatcaaacggggtttggcatccctgtttcagacccaactctcgtcggggacgactaacgaggtggacatctcaggtaattgcaaggtgacctatcaagcgcatcaggacaaggtgataaagattaaggcactggattcgtgtaagatcgcaagatcagggtttaccactcccaatcaagtgcttggtgtgtcgtccaaagcaacgtccgtcaccacgtacaagattgaagattcctttgtgattgcggtgcttgctgaggaaacccacaacttcggattgaacttccttcagactatcaaggggaaaatagtctcaaagcaaaaacttgaacttaagaccaccgaagcaggaccaaggttgatgtctggtaagcaggccgccgcgattatcaaggccgtggattcgaagtacactgctattccaattgtcggacaagtttttcaatcgcattgcaagggttgtccgagcctttcggaactttggagaagcactcgaaaatacctgcagcctgacaacctttcgaaagctgaagcagtgcgcaactttctggcatttatccaacatttgagaaccgccaagaaggaagaaattctgcagattctgaaaatggagaataaggaggtgctgccacagcttgtggatgcagtcacttccgcacaaactagcgactccctcgaagctatcctggactttcttgatttcaaatcggactcatccatcattctgcaagaaagattcctgtacgcatgtggcttcgcatcgcatccgaacgaagagttgctccgcgcactgatttcgaagtttaagggaagcattggatcgtcggatatcagagaaaccgtgatgatcataaccggtaccctcgtccggaagctctgccaaaatgagggatgtaaactgaaggcagtggtcgaagcaaagaaattgatactggggggactggagaaggcagaaaagaaggaagatactcgtatgtatttgctcgcactcaagaacgcacttctgccagagggcatcccttccttgctgaaatatgccgaggcgggtgaaggacctatatcacacctggcaactaccgcccttcaacgctacgacctcccatttatcaccgacgaggtgaagaaaacgctgaacagaatttaccaccaaaatagaaaggtgcatgaaaagactgttcgaaccgcagcagcagctattatcctgaacaacaacccttcatacatggatgtgaaaaacatcctgctctccatcggagaactccctcaagagatgaataagtacatgctggccatagtgcaggatatccttaggtttgagatgcccgcatcgaagattgtgaggcgagtgctgaaagaaatggtggctcataactacgaccgattcagccggagcgggtcgagcagcgcctacaccggatacattgaacgatcaccccggtcagcctccacctactcccttgacattctttactctggttcggggatcctccggcgcagcaaccttaacatatttcaatacataggcaaagcaggtctgcatggctcgcaagtcgtgattgaagcacagggactcgaggcacttattgcagccacccccgacgagggtgaggagaacctcgactcgtacgcaggaatgtctgcaattctttttgatgttcagctgcgcccggtgactttctttaacggttattccgatcttatgtcgaaaatgctttccgcgtccggagatccaatttcggtcgtcaaaggccttatcctgcttattgatcattcccaagagcttcaacttcaatcggggctcaaggctaacatcgaggtgcaaggtggactggcgatcgatatttctggtgcaatggagttttccctttggtaccgtgagagcaaaactcgagttaagaatagagtgactgtcgtcattactactgatataactgtggattcctcctttgtgaaagcaggccttgaaacgtcgactgaaaccgaagcgggacttgagttcatctcgaccgtgcagttctcccaatacccatttctggtgtgtatgcaaatggataaggatgaggcaccatttagacagtttgagaagaagtacgaaagactctcaactggacggggttacgtctcgcaaaagcggaaagagtctgtgttggctggctgcgaatttcccctccaccaagaaaattccgaaatgtgtaaggtcgtgttcgctccccagccagattcgacgtcgtccggatggttc

SEQ ID NO: 16750 - DNA, 2682 bp, synthetic construct
  misc_feature 1..2682: note = source = /note="Description of Artificial Sequence: Synthetic coding sequence"
  source 1..2682: mol_type = other DNA
atgatccttctggccgttctgttcttgtgctttattagcagttattccgcctccgtgaagggccacaccaccgggctttcgcttaacaatgatagactgtacaagctgacatattccactgaagtcctgctggaccgcggtaaaggcaagttacaagatagcgtaggataccggataagttcaaacgtggacgtggcactcctatggcgcaatccagatggcgacgacgatcaattgattcagatcaccatgaaggacgtgaatgttgagaatgttaaccagcagcgcggtgaaaaatctatattcaaggggaagagtccaagtaaaattatgggaaaggagaatctggaagctcttcagcggcccaccctgctccatttaattcatgggaaagtgaaagaattctattcatatcagaatgaggccgttgctatcgaaaacattaaaagggggctggcgtcgctcttccaaacacaactgtcatccggcacaaccaatgaggttgacattagcggcaactgtaaggtcacgtaccaggcacaccaagacaaggtcattaagatcaaagcattggacagctgtaagattgctaggtcaggatttactacgcctaatcaggtgctcggggttagtagcaaggctacatctgtcaccacatacaagattgaggactctttcgtgatcgctgttctcgcggaagagactcacaactttggtttgaactttttgcagaccatcaaggggaaaatcgtgtctaaacagaagctggagcttaagacaactgaagcgggaccacggcttatgagcggaaagcaagcagccgctattataaaggctgtagatagcaagtatactgcaattcccatcgtggggcaagtcttccagtcccattgtaagggctgtccatcccttagcgagctgtggcgctcaacacgcaagtatctccaacccgataacctttcgaaggcagaggcagtgaggaatttcttagcttttatccaacacctgagaacagccaagaaagaggaaatcctacaaattcttaagatggaaaataaagaggtcttaccccagctggttgatgccgtcacctcagctcaaacctccgattcgttagaggccatacttgatttcctggactttaaatctgattccagcataatcctgcaagagcgcttcttgtacgcgtgcggattcgccagtcatccgaatgaagagttgctgcgcgccttgatcagcaaatttaaaggctctattggctcctctgacattagagagacagtgatgattattacaggtaccctggttcgaaagctttgccagaacgaaggctgcaaactgaaagcagtcgtggaagccaagaagctaattcttgggggtctggaaaaagcagagaaaaaggaggatacacggatgtatctgctagcactcaaaaacgcactgctaccggaaggcatacctagcttgctcaagtatgccgaagccggcgagggccccatatcgcatctggccactactgcccttcagcgctacgatctcccatttatcacagacgaggtcaaaaagaccctcaacagaatctatcatcaaaatcggaaagtgcacgaaaagaccgtgcgcactgcagcggctgctataatcttgaataataacccaagttacatggatgttaaaaatattttactgtccatcggtgaattgcctcaagagatgaataaatacatgctggcgatcgtccaggatatccttagatttgagatgcccgcctccaaaatcgtccggagagttctcaaggaaatggtcgcccacaactacgacagattttctcgctctggctcatcaagtgcgtacacaggatacattgaacgcagtccgcgcagtgcttctacatactctcttgatatactgtattccggaagcggaatcctgcggagaagcaacctaaacatttttcagtatatcggcaaggctggcctacacggtagccaggtggtgattgaggcccagggccttgaggcactcattgccgcaacccccgatgaaggcgaggaaaatctggattcttatgccggcatgtctgcaatcttgttcgatgtgcagttgcggcctgtgacttttttcaatgggtatagtgacttgatgtccaaaatgctctccgcttcaggcgaccctataagcgtggtgaaggggctaatactgctgattgaccatagccaggagttgcagttgcaaagtgggctgaaggcaaacatcgaggttcaaggaggccttgccatcgacattagcggggcaatggagttcagtctttggtatagagaaagcaagacacgtgtgaaaaaccgagtcacggtagtgataaccacagatatcaccgttgacagtagttttgtgaaggctggattggaaacatcaaccgaaactgaagccggcctcgagtttataagcacagtccagtttagtcagtacccctttttagtgtgtatgcaaatggacaaagatgaggctccgttcagacagttcgagaaaaagtacgagcgactgtccacgggacgcggatacgtgtcccaaaagcgcaaagagagtgttctggccggctgcgagttcccactgcatcaggagaactcggagatgtgtaaggtagttttcgcaccccagcctgactccacatcgagcgggtggttt

SEQ ID NO: 16751 - DNA, 2682 bp, synthetic construct
  misc_feature 1..2682: note = source = /note="Description of Artificial Sequence: Synthetic coding sequence"
  source 1..2682: mol_type = other DNA
atgattcttcttgctgttctgtttctgtgttttatcagcagttattccgcctcagtgaaaggacacactaccggcttatccctgaataatgacagactgtacaaactcacctacagcaccgaagtgctcctcgaccgggggaagggaaagctccaggatagcgtcggctaccgcatttccagcaatgtcgacgtggccctgttatggcgaaacccggacggcgacgacgaccagttgatacagattactatgaaagacgtgaatgtcgagaacgtgaaccaacagaggggcgaaaagtccatcttcaaggggaagtctccttccaagatcatgggcaaagaaaatctggaagccctacagagacccaccttactacatttaattcatggtaaagtgaaagaattttatagctatcagaatgaggcggtcgcgatcgaaaacattaaaagaggtctggcttcgctcttccaaacccagctgagctccggtactactaatgaggtagatatttctgggaattgcaaggtaacatatcaagctcaccaggataaagtcatcaagattaaagctctcgattcctgcaagatcgccagatcagggtttaccacccctaaccaagtgctgggtgtgtcttctaaagcaacaagcgtaaccacctacaagattgaggattcttttgtgatagccgttctggccgaagaaacccacaacttcggcctcaacttcttgcaaacgattaaaggcaagattgtcagcaagcagaagctggagcttaagacgacagaggcgggcccccgtttaatgtctggcaagcaggccgctgcgattattaaggccgtggattccaagtacaccgccatacccattgttgggcaggtgttccagtcacactgtaagggatgtccatcactctcggaactgtggcggtcaacgagaaaatatctgcagcccgataacttgtccaaagccgaagctgtgagaaattttttggcctttatccagcacttgcgcactgcaaaaaaagaagagattctccagatattgaaaatggagaataaagaggtgctgccgcagcttgtggacgctgttacctcagctcagacaagcgacagcctggaagctattctggacttcttagatttcaagtcagattcctccatcattctgcaggaaagattcttgtatgcctgcggtttcgccagtcaccctaacgaagaactcctgcgtgccctgatctcaaagtttaaagggtctattgggtcttctgatatcagagagacagtcatgataattacaggcactcttgtgagaaagttatgccaaaatgagggctgcaaactaaaggccgtggttgaagcgaagaagctgattctgggaggtctggaaaaagcagagaagaaggaagacacccggatgtaccttcttgctttgaagaacgcacttctacccgaggggataccctccctgctcaagtacgcggaagccggggaaggtcccataagtcacctggccacaacagcccttcagagatacgacctcccattcatcactgacgaagtgaagaaaaccctcaatcggatttatcaccagaacaggaaggtgcacgaaaagacagtgcgtacagctgcggctgcaatcattcttaacaataacccaagctacatggatgtgaaaaatattctgctttccataggagagctgcctcaggagatgaacaagtatatgttggctatcgtacaggacattctgaggttcgagatgccagcctccaagatagtgcgacgagtattgaaggagatggtggcccacaactatgacagattctcacggtcagggagcagctcagcctatactgggtatatcgagcgctctccacggtcagcatcaacatattctctggacatactgtacagtggctccggcatcttaaggcggtccaacctaaatatctttcagtatattgggaaagccgggttacacggaagccaagtggtcattgaggcccaggggctggaggcactcatcgctgcaactcctgatgagggggaggaaaacctggatagctatgctggaatgtctgccatcctattcgacgttcagctgagaccagtgaccttttttaacggttatagcgacctgatgtcaaagatgctgtcagcctccggtgatcctatctctgtggttaaagggctgattctcctaatcgaccacagccaggaacttcagctgcagagtggccttaaagccaacattgaggtgcagggcgggcttgcaatagatatttctggagccatggagttttccctgtggtatagggagtccaaaacaagagtgaagaatagagtgacagttgtcataacaaccgacatcaccgtggactcttcctttgtgaaagccggtctcgagaccagcaccgagacggaagcaggcctggagtttataagcactgtccagttttcacagtatccgttcttagtttgcatgcaaatggataaggacgaagccccgttccggcagttcgagaagaagtacgaacgtctaagcacaggccggggatatgtttctcagaagcggaaggaatcagtgctggccggatgtgaattccctctccaccaggaaaatagcgagatgtgcaaggttgtctttgcccctcagcctgattctacatcgtccggttggttc

SEQ ID NO: 16752 - DNA, 2682 bp, synthetic construct
  misc_feature 1..2682: note = source = /note="Description of Artificial Sequence: Synthetic coding sequence"
  source 1..2682: mol_type = other DNA
atgattctcttagccgtcttgtttctgtgttttatatccagttacagcgcctccgtaaaagggcatacaaccggcttgagcttaaataacgatcgcctgtataagttaacctattcaactgaagtgcttttggacagaggaaaagggaagctgcaagatagtgtcggctatagaatctcttctaacgtcgatgtggccctgctctggaggaaccctgacggagacgatgaccagctcattcaaataacaatgaaagatgtgaacgttgagaacgtgaaccaacagagaggtgaaaaatccatcttcaaaggaaaaagccctagcaagattatggggaaagagaacttggaggccctgcaacggcctaccctattgcaccttatccacggcaaggtcaaagagttttacagttatcagaacgaggcggtagccatagaaaacattaagagggggttggcaagtttgtttcagactcagctctcatcaggaacaacaaatgaggtggacattagtggaaattgcaaggtgacttatcaagctcaccaggataaggtcatcaaaattaaagccttagactcctgcaagatcgcgcggtctggcttcactacccctaaccaagtcctgggggtctcctctaaagcgacctctgttacaacgtacaagatcgaggatagcttcgtcatcgctgtgctggctgaggagactcacaacttcggtctgaacttccttcagaccatcaaagggaaaatcgtctctaagcagaaattagagctgaagacaacagaagctggacctcgcttgatgtccgggaagcaggcggctgctatcatcaaggcggtggactcgaaatacacggccatacccatcgtcggccaagttttccagtctcattgtaaaggatgtcctagcctctctgagttatggaggagcactaggaagtacctacagcccgataatctgagcaaagccgaagccgtgagaaactttttggcattcattcagcacctgcgtaccgcaaagaaggaggaaatcttgcagatcctgaagatggaaaataaggaggtgttgccccagctggtggatgcggttacatctgcgcagacatccgactccctggaggccatcctggacttcctagacttcaagagcgatagctcaatcatcctgcaggagcggtttctctatgcatgtgggtttgcatctcacccaaacgaagagcttctgagggctctcatatccaagtttaagggcagcattgggagtagcgatattagggaaactgtcatgatcattactggtactctggttaggaaactgtgccaaaacgaggggtgtaagttgaaggccgttgtggaggctaagaagctgattttaggcggactagaaaaggctgaaaagaaggaggacactcgcatgtatctgttagcacttaaaaacgcactgttgccagaaggcatccccagtttgctgaagtacgccgaggccggggagggccctatttcccacctggccacaaccgcactgcagcgctacgaccttccgttcatcaccgatgaagtgaagaagactcttaacaggatttaccaccagaaccgtaaggttcatgaaaagactgtgcggacagccgccgccgcaatcatactgaataacaatccaagctatatggacgtcaagaacattctgctgagtatcggagagctgccacaagaaatgaacaaatacatgcttgccatcgtgcaggacatcctgagattcgagatgcccgcatccaagatcgtccgcagggtgttgaaagaaatggtcgctcacaactacgacagattcagtcgctctggatcttcctctgcgtacaccggctatatcgaaaggtcgccgcgcagcgcgtccacatattccctggatatcttatattctggttcaggtattcttcggcgatccaatctgaacatcttccagtatatcggcaaagctggactccacggcagccaggtggtgatcgaggcccaggggctcgaagctctaatcgccgctacacccgacgagggagaggagaacctggacagctacgcgggtatgtccgcaattctctttgacgtgcagttgcgacccgtcacctttttcaacgggtactcagacctgatgagtaagatgctgtcagctagtggcgatcctatttccgtcgtgaaagggctcatcttgttgatcgatcattcgcaggaactgcagttgcagtctggcctgaaggccaacatcgaagtgcagggcgggctggcaatcgatattagcggcgctatggagttttccttgtggtaccgcgagtccaagaccagggtcaagaacagagtaaccgtagtgattacaaccgatattacagtcgactccagtttcgtgaaggctggcctggagaccagcacagaaacagaagccggcttggaatttatatccacagtccaattttcccagtatcctttcctggtgtgtatgcaaatggataaggacgaagcaccgtttagacagttcgaaaaaaaatatgagcgtttgtctactgggcgtggttacgtgtcacagaagcgaaaggagtctgtgttggcaggatgtgaattcccgctgcaccaagaaaacagtgaaatgtgtaaagtcgttttcgctcctcagccagactccacttcctccggatggttc

SEQ ID NO: 16753 - DNA, 2682 bp, synthetic construct
  misc_feature 1..2682: note = source = /note="Description of Artificial Sequence: Synthetic coding sequence"
  source 1..2682: mol_type = other DNA
atgattctgctggccgtcctgttcctgtgctttatctctagctactctgccagcgttaagggccacacaactgggctatctttaaataatgatcgcctttacaagcttacttatagcacagaggtccttctggaccgaggtaaaggtaaattgcaagacagcgtgggctataggatcagctctaatgtggacgtcgccttgttatggagaaaccccgacggcgacgacgaccagctgattcagattacaatgaaagatgtcaacgtggagaacgtgaaccaacagagaggggaaaaatccattttcaagggcaaaagccctagcaaaatcatgggtaaagaaaatctagaagctcttcagcgacctacattgcttcatctcattcatggaaaagtgaaagagttctatagctaccagaatgaggccgttgctatcgaaaatatcaagcgaggtcttgccagtctgttccagactcagttgtcgagtgggacaacaaatgaagtcgacatttcagggaactgtaaggtcacctaccaggcccatcaagataaagttatcaagattaaggctctcgacagttgcaagatcgcaagatcaggtttcactaccccaaaccaagtcctgggcgtctctagtaaggccactagcgtaacaacttataagatagaagactctttcgtcatcgccgtgcttgcggaggagactcataattttggactcaattttttacagacaatcaagggaaagatcgtttcaaaacagaaactggagcttaagacgacggaagctggaccccgtttgatgtccggcaagcaggcggccgcaatcatcaaagccgtggatagcaagtacacagcaattccaatcgttggccaggttttccagagccactgtaaaggctgccccagcctttccgagttgtggcgttccacaagaaaatacctgcagcctgacaacttgtcaaaagccgaggccgtcaggaactttctcgcattcatacaacacttgcggacggcaaagaaggaggagattttgcagatattgaagatggagaacaaagaagtcctgccacagctggtcgacgctgtgacatcggcccaaacctctgattccctcgaagcaatactcgactttctggacttcaagagcgactctagcattatacttcaggaaagattcctgtatgcctgcggattcgcttcccatcctaatgaagagctgctacgggcactgatctctaaattcaagggctcaatcgggtctagcgacattagggagaccgtcatgatcataactggcacgttggtacggaaactgtgtcagaatgaggggtgtaagcttaaagctgtcgtcgaggcaaagaagctcatcctcggagggctcgaaaaagctgagaagaaggaggatacccggatgtaccttcttgccctgaagaacgccctgctacccgagggcatcccctcactgctcaaatacgccgaggctggtgagggacctatctcgcacttggcgactaccgctctgcagcggtacgatcttcctttcatcactgacgaagttaaaaagacactgaaccgaatctaccaccagaacaggaaagtacacgagaaaaccgtgcgcaccgccgcagctgccatcatcctcaacaataatccctcctatatggatgttaagaacattctgttgtctattggtgagctccctcaggaaatgaataaatacatgcttgccattgtgcaggacatcctgcgttttgagatgcccgcaagtaaaattgtcagaagggtcctgaaggagatggtcgcccacaactacgataggtttagcaggtcaggctccagctctgcctataccgggtacattgagcgttcccctaggagcgcctcaacttactcactcgatatcctttactctggcagcgggatactgagacgaagcaatctaaacatcttccagtatatcggcaaagcaggcctgcatggcagccaggttgtgatcgaagcgcagggactcgaagcgctcattgcagctacacccgatgagggcgaagaaaacttggattcgtacgctggcatgagcgccatcctcttcgacgtccagctcaggcctgtgacgttcttcaacgggtactctgatctcatgtcaaaaatgttgtccgcatcaggtgatccgattagcgtcgtcaaggggctcatcctattaatcgatcacagccaggaattgcagctgcagagcggcttgaaggccaacatcgaggtgcagggcggactcgctattgatattagcggagctatggaattctccctgtggtacagagagtcaaaaacgagagtcaagaatagagtgactgttgtgataactacagacatcactgtggactcatcgttcgtgaaagctggcctcgaaacgtccactgaaactgaggcaggcctagaatttatatccacagtccagtttagtcagtatccctttctggtgtgcatgcagatggataaagatgaagccccatttaggcagttcgaaaagaagtacgagcggctctccacagggcggggatacgtgtcccagaagcgcaaggagagcgtgctagccggctgcgagttccccctgcaccaggagaacagcgagatgtgcaaggtggtctttgcacctcaaccagattctacatctagtgggtggttt

SEQ ID NO: 16754 - DNA, 2682 bp, synthetic construct
  misc_feature 1..2682: note = source = /note="Description of Artificial Sequence: Synthetic coding sequence"
  source 1..2682: mol_type = other DNA
atgatcttattagcagtgctcttcttatgcttcatcagtagctacagcgcaagcgttaaaggacacactacaggactgagtttgaacaatgatcgcctttataagctgacgtatagtactgaagtcttactcgaccgaggcaaaggcaaactccaagatagcgttgggtaccggatctcctccaacgtggatgtggccttgctctggcgtaaccctgatggtgatgatgaccagcttatccagatcaccatgaaagacgttaatgttgagaacgttaatcagcaaagaggcgagaagtccattttcaagggtaaatcccccagcaagatcatgggcaaggagaacctggaagctctgcaaaggcccactctgcttcatttgatccacggaaaagttaaggaattttattcttaccaaaacgaggccgttgcgattgaaaacattaaacggggcctggcttctttattccagactcaactgagctccggtacaaccaatgaggtggatatttctggaaattgcaaggtcacgtaccaagcccatcaggacaaggtgatcaaaatcaaagccctcgatagctgtaagatcgcgagatccggcttcacaacgccaaaccaggtgttgggggtctccagtaaagcgacaagcgtgaccacttacaagatcgaagactcattcgtaatagctgtgctggccgaggagacccacaacttcggcctgaacttccttcagacgataaagggtaaaattgtcagcaagcagaaacttgagctgaagaccacggaggccggccctcggttaatgtccggaaaacaggccgctgcgatcatcaaagccgttgacagcaaatacaccgcgattcctatcgtgggacaggtgttccaaagccattgtaagggatgcccgagcctctcggaactttggcgaagcaccagaaagtacctgcagcctgacaacttgtccaaggccgaggcagtccgaaacttcttggcctttattcaacatttgcgcactgccaaaaaagaagagatcctccagatcctgaagatggagaacaaagaagttttacctcagttagtcgatgccgtcacatcagcccagacatcggactcactggaggctattctggactttctggactttaaatctgattcatcaattattctgcaagagcgttttctctacgcctgcggattcgcttcccaccccaatgaggaactgttgcgggccttaattagcaaattcaaaggttctattggctcaagcgacatcagggagacagttatgattattacaggtacactcgttcgaaagctgtgtcagaacgaggggtgtaagctgaaagcagttgtagaggctaaaaaactgatcctaggcggacttgagaaggctgaaaagaaagaggatacccgaatgtatctgctcgcccttaagaacgccctgctgcctgaagggattccatcccttcttaaatacgccgaggccggcgagggtcccatctctcacctggcaacaacggctctgcagagatacgacctgccattcattactgacgaagttaagaaaactctgaacaggatatatcatcaaaacaggaaggtccacgagaagaccgtccggacagccgccgctgcgataatactgaataacaacccctcatacatggatgtcaagaacatcctgctgtcgatcggcgaactgccgcaggagatgaataagtacatgctggctatagttcaggacatccttcggtttgagatgccagctagcaagatagtgcggcgagtgctgaaggaaatggtggcacataattacgaccgctttagtcgctcagggagctcgtctgcctacaccggatatatagagagatctcccaggagcgcatcaacgtatagccttgacatcctgtattctggcagcggcatcttacggcgctcaaacttgaatatatttcaatacatcggaaaggcaggcctccacggttctcaggtggtgatagaagcgcagggattagaggccctgatcgcagccaccccagatgagggagaggaaaacctggacagctatgctggcatgagtgctattcttttcgatgtgcagcttcgacccgttacattttttaacggttacagcgacctgatgagtaagatgctgagtgccagcggggatcccatctctgttgtgaagggccttattcttctcattgatcatagccaggaactgcaattgcagtcagggttgaaagctaacatagaagttcagggcgggcttgctatcgacataagtggcgcgatggagttcagcctttggtacagggagtccaagacccgggtgaaaaatcgggtcaccgtggtgattacaacagacataacagtggattctagcttcgtgaaggccggtttggagacttcaaccgaaaccgaggctggccttgagtttatctctacggtccagttctcacagtacccattcctcgtctgcatgcagatggacaaagacgaggccccatttcgccagtttgagaagaaatacgagcggctgtctacaggacgtggctacgtttctcagaagagaaaggagtcggtgctagccgggtgcgagtttcctctacatcaagagaattcggaaatgtgcaaggtagtatttgccccacagcccgactccacatcaagcggctggttt

SEQ ID NO: 16755 - DNA, 2682 bp, synthetic construct; identical to SEQ ID NO: 16743
  misc_feature 1..2682: note = source = /note="Description of Artificial Sequence: Synthetic coding sequence"
  source 1..2682: mol_type = other DNA

SEQ ID NO: 16756 - DNA, 2682 bp, synthetic construct
  misc_feature 1..2682: note = source = /note="Description of Artificial Sequence: Synthetic coding sequence"
  source 1..2682: mol_type = other DNA
atgatacttctggctgtactgtttctgtgtttcatatcctcctactctgccagcgtgaagggccataccacaggcctgtccctgaataacgacagattgtataagttgacctactccacagaggtcctgctggatagagggaaaggaaagctccaagattcagtcggctaccggattagctccaacgtggatgttgccctgctgtggaggaatcccgatggcgacgacgaccagctgattcaaattactatgaaagacgtaaacgtggagaacgtgaatcagcagcgaggtgaaaagagcatcttcaaaggtaaatctccctcaaaaatcatgggtaaggagaatctggaagccttgcaacgaccaactctacttcacctgattcacggcaaggtgaaggagttctatagctatcagaatgaggccgtggcgatagaaaatatcaagcgaggtctcgcctctctttttcagacgcagctcagtagtggaaccacgaatgaggtcgacatttccggaaattgcaaggtgacctatcaggcccaccaagataaagtgatcaagattaaagcgcttgattcttgtaaaatcgctcgtagtggctttaccacaccgaatcaggtgctgggggtaagctcaaaagctacctccgtaaccacctacaaaatagaggatagctttgtcatcgctgtactggcagaggaaacacataatttcggtctgaatttcctccagactatcaaggggaagatagtctccaagcagaagttggagcttaagaccacagaggccggccctcgactaatgagcggcaaacaggcagctgccatcatcaaggcggttgactctaaatacacggccatccctatagtgggccaggtcttccagagccattgcaagggctgcccatcattgtcagagctctggcggagcactcgtaagtatctccaacctgataatctttcaaaagcggaagcagtgaggaattttttggctttcatccagcatctccgcactgccaaaaaagaggagatattacagattctgaaaatggaaaacaaagaggtgctgccgcaactagtggacgccgtgaccagtgcccagacaagcgattctttggaggcgatcttggattttctggactttaagagcgactcatccatcatactgcaggagaggttcttgtatgcgtgcggattcgcttcgcatcctaatgaggagcttctccgcgccctcatttcaaagttcaaggggagcatcggatccagcgacatccgcgaaaccgtcatgatcattaccggtacactagtgcgtaaactttgtcagaacgaggggtgcaagttaaaagcagtggtggaagctaagaagttaattctgggcggactggagaaggccgaaaagaaggaggacacaagaatgtatctgctggctctgaaaaatgcattactccctgagggtatccccagtttgcttaagtatgccgaagccggtgagggccccatctctcatctggccaccaccgccttacagaggtacgatctgcccttcatcaccgatgaagtgaagaaaacattaaatagaatctatcaccagaacaggaaagtccacgaaaaaactgtgaggactgccgccgcggctataatactaaataacaatccatcgtacatggacgtgaaaaatatcttactgtcaatcggcgagctgccccaggagatgaacaaatatatgcttgccattgttcaggacatactccggtttgagatgcctgcgtcaaaaatcgtcaggcgcgttttgaaggagatggtggctcacaactacgaccgcttcagtcggtcaggctcatcctccgcctataccgggtacattgagaggtcccctcgctccgcgtctacttactcattggacattctatactcggggagtggcattcttcgtaggtccaacctgaacatttttcagtatataggaaaggccgggctccatgggtctcaggtggtgattgaagcacagggtctggaggccctgatcgccgccacacccgacgagggggaagaaaaccttgattcctacgctgggatgtctgccatactatttgacgttcagttgcgccctgtcaccttcttcaacggatacagcgacctgatgagcaagatgctgtctgcgtctggcgaccctatcagcgtggtgaaagggctcattctactgatcgatcattcgcaagagcttcagctgcagtctggactcaaggctaatatcgaagtgcagggggggttagccattgatatttcaggcgctatggagttcagtctttggtaccgcgaaagtaagaccagagtcaagaatagggttactgtggtgattaccacggacatcaccgtggattccagcttcgtcaaggctggactggagacatccactgaaaccgaggccggtttggagtttatatctacggtgcagtttagccagtacccatttctggtgtgcatgcaaatggataaagacgaggctccctttagacagtttgagaaaaaatacgaacggttgagtactggacgaggatacgttagccaaaagcggaaggaaagcgtgctggccggttgtgagttccctctgcaccaggaaaactcagaaatgtgcaaagtagtattcgctcctcagccagacagcacttcatccggatggttc

SEQ ID NO: 16757 - DNA, 2682 bp, synthetic construct
  misc_feature 1..2682: note = source = /note="Description of Artificial Sequence: Synthetic coding sequence"
  source 1..2682: mol_type = other DNA
atgattctgctcgcggtgctgtttctttgcttcatctcctcatacagcgcctcagtgaaaggacataccaccggactgtcactaaataatgatagactctacaagctgacatactcaacagaggtgctgctggatcggggcaaagggaaactgcaagactcagtcgggtatcgcatctcgagtaatgttgatgtggctcttctttggagaaatcccgatggcgatgacgatcaactgatacagattacaatgaaggacgtaaacgtggaaaacgtaaaccagcagcgcggggaaaaaagtatcttcaagggaaaaagcccttcaaaaatcatgggtaaggagaatcttgaggcattgcagcggcccaccctcctccacctaattcatggtaaggtgaaagaattctactcctatcagaacgaggccgtcgccatcgaaaacatcaagcgtggactggcctctctgtttcagactcagctctcgtccgggacaaccaatgaggtggacatttccggaaactgtaaagtgacttaccaggcccaccaggacaaagttataaagattaaggccctggattcttgtaagatcgcgagatcagggttcacgactcccaaccaggtgctcggcgtgtcttctaaagctacgagcgtgacgacatataaaattgaggatagctttgtgatcgcagtcttggcggaggaaacccacaattttggcctcaactttctgcagactatcaaagggaagatcgtcagcaagcagaagctcgaacttaagaccacagaggcaggccctaggcttatgtctggcaagcaggcagctgctattatcaaggctgtggactctaagtacacggccattcccatcgtcggacaagtattccagtcacactgcaaggggtgtcccagcctgtccgagctgtggagaagtacccgcaagtatttacaaccagataatctgagcaaagccgaagccgttcgaaattttctggcttttatacagcatctgcggactgctaagaaggaagaaatcctccaaatacttaagatggaaaataaggaggttctcccccagctggtcgacgctgtaacttcggcgcagacaagtgatagtctcgaggctatcctcgatttcctcgatttcaagtcagactcttccatcatccttcaagaaaggttcctgtacgcgtgcgggttcgcatctcatccaaacgaggagttgctccgggcacttattagcaagttcaagggtagcattggatcgtcagatattcgtgagactgtcatgatcattacaggcacacttgtgaggaagctgtgccagaatgaggggtgtaagctgaaggccgtggtagaagcgaagaagcttattctgggaggcctggaaaaagcggagaagaaggaggatacacgtatgtacctactggcgctcaagaacgcgcttctgccagagggaatcccttcactgctaaagtacgctgaggctggcgagggccccatttcccacttggccaccaccgctcttcagcggtacgatcttccattcattactgatgaggtgaaaaaaacccttaaccgcatctatcatcagaacagaaaggtccacgagaagacagtgcgcaccgcagccgctgccattatattaaacaacaaccctagctacatggacgtcaagaatatcctcctgagtattggagaactgccacaggaaatgaacaaatatatgctggctattgtgcaggacattctccgatttgaaatgccagcgtcgaaaatcgtccggagagtgctcaaggagatggtggcacacaactacgatcgtttttctcgttctgggagctcttccgcctataccggctacattgaaaggtcccctaggtcagcgtccacgtattctcttgacatattgtactctggcagtggcattcttcgcaggtctaacctcaatatttttcagtatataggtaaagccgggcttcatggatcccaggtggtgatcgaagcacaaggtctggaagcgctgattgcagcaactcccgatgagggagaggaaaatctggatagctacgctggcatgtccgccattttattcgatgtgcagctgcggcctgtgaccttctttaacggctactctgatctcatgagtaagatgctgtcagcgtctggcgaccctatcagcgtcgtcaagggactcatcctcctgatcgatcattctcaggagctgcagctgcagtccggcctgaaggccaatattgaggttcagggaggtctggccatcgatatctccggcgccatggaattcagcctgtggtatcgagagagcaagaccagggttaagaacagggtcaccgtggtaattaccaccgatattaccgtggactcctcctttgtcaaagcagggttggaaactagcacagagacggaggcagggcttgaatttatttcgaccgtacagttcagtcagtacccttttctggtgtgcatgcagatggataaagatgaggcccctttccgacagttcgaaaaaaagtacgaacggctttcaacgggtagaggttacgtgagccagaaaagaaaggaatccgtgctcgcggggtgtgagttccccctgcaccaggaaaacagcgaaatgtgcaaggtggtctttgctccccagcccgatagtactagttccgggtggttt

SEQ ID NO: 16758 - DNA, 2682 bp, synthetic construct
  misc_feature 1..2682: note = source = /note="Description of Artificial Sequence: Synthetic coding sequence"
  source 1..2682: mol_type = other DNA
atgattcttttagccgtgttgtttttgtgcttcataagctcatactccgcttctgttaaaggacacacgactggactatcattgaacaacgataggttgtataagttgacttattccaccgaagttcttcttgatagaggcaaagggaaacttcaagactcagtaggttatcggatctctagtaatgtggacgtagctctcctttggaggaatccggatggagatgacgatcaacttattcagataacgatgaaggacgttaatgtagagaacgtgaatcagcagcgtggtgagaagtcgattttcaaggggaagtcccctagtaagatcatgggtaaggagaatcttgaggcactccaaagacctactttacttcaccttatacacggaaaagtgaaagaattttattcgtatcagaacgaagctgtagccatcgagaatatcaagaggggactagctagcttatttcaaacccaattatctagtggtactacaaatgaagttgatatttccgggaattgcaaggttacgtaccaggcgcaccaagataaggttatcaagataaaggctcttgattcctgtaaaatcgctagatctggatttactacccccaatcaagtcctcggggtttcatcaaaggccaccagtgttactacgtataaaattgaggattcatttgtgatcgcagtcctcgcggaagaaacacacaactttggtttgaacttcttgcaaactatcaagggaaaaatcgtgagtaagcaaaagttggaactcaaaaccactgaggcaggtccacgtctcatgtctggcaagcaggctgcggctattattaaagctgtggattccaaatatacagcaatcccgatcgttggacaggtattccaatctcattgcaaggggtgcccgagcttgtccgaactttggcggtcaacacgtaagtatctgcaaccagataatctttccaaagccgaagcggtcagaaattttttggcatttattcagcaccttcgtactgctaagaaggaagagattctgcagatacttaaaatggagaacaaagaagttctgcctcagcttgtggacgctgtgacctccgcccaaactagtgatagccttgaggcgatactcgattttttggatttcaaatctgattcctcgattattctacaagagcggttcctttatgcttgcggatttgctagtcatccaaacgaagagttgctgagggctctaatttccaagttcaagggttctataggctccagcgatattagagagactgttatgattatcacgggcactttggtgcgtaaactttgccaaaacgagggatgtaaactaaaggcggtcgtggaggcaaagaagttgattctgggtggtcttgaaaaggccgagaagaaagaagatactcggatgtatctactggctctaaagaacgcgctgttgcccgaaggaattccaagtttgcttaagtatgcagaggcaggggagggtccaatttcccatcttgcaaccaccgcactccaacgctatgatcttcccttcatcacggatgaagtgaagaaaaccttgaatcgaatttatcatcagaaccgaaaggtccatgagaagactgttaggactgccgccgctgccattatcctgaacaataacccgagctatatggatgttaaaaacatccttttgtctataggggaactccctcaagaaatgaataaatacatgttggccattgtgcaagatattttgcgatttgaaatgccagcctcgaaaattgtgaggcgagttctcaaggagatggttgcacataattacgacagattttctcgaagcgggtcttccagtgcctatactggttatattgagaggagcccaaggtctgctagtacatactcattggatatcctctattcaggttcaggcattctgcgaagatcaaatcttaacatttttcaatacattggaaaggctggattgcatggatctcaagtagttatcgaggctcaggggttggaagctttaattgctgctactccagatgaaggggaggagaacctagattcctatgctggaatgagcgcaatactgttcgatgttcagctcaggccagttaccttctttaacggctactcagacctgatgtctaagatgttgtcagcttccggtgatcctataagtgttgtaaaaggcctgattcttttgattgatcattcacaggaattacaactgcaatcagggcttaaggctaacatcgaggttcaagggggacttgctatcgatatttcaggtgctatggagttctcgctctggtacagagaatcaaaaactcgcgtgaaaaacagggtgactgtggttatcacaacggatataaccgttgatagctcctttgttaaggccggactggaaacatctacagaaacagaggctggcttggaattcatctctacagttcaatttagtcagtacccttttttggtctgcatgcaaatggacaaggacgaggctccttttaggcaatttgagaaaaagtacgagagattatctaccggaaggggatacgttagtcagaagcgaaaggaaagtgttctcgctggatgtgaattccctctgcatcaagagaactctgagatgtgcaaggttgttttcgctccacagcctgatagtacctcatcgggctggttt

SEQ ID NO: 16759 - DNA, 2682 bp, synthetic construct
  misc_feature 1..2682: note = source = /note="Description of Artificial Sequence: Synthetic coding sequence"
  source 1..2682: mol_type = other DNA
atgattttattggctgtcctcttcctctgtttcatttcctcctactcggcatccgtgaagggacatacgacagggctttctctgaacaacgacaggttatacaaacttacttactccaccgaggtgctgttggaccgaggcaaagggaaacttcaggacagtgtgggatatagaatcagctcaaacgtcgacgttgctctcctatggagaaatcccgatggtgacgatgatcaacttatccaaataacgatgaaggatgtgaacgtggagaatgtgaatcagcaacgaggggagaagtctatctttaaggggaagtcaccatcaaaaataatggggaaagaaaatttggaagccctccagaggccaactcttctgcaccttatccatggaaaggtgaaggaattctacagctatcagaacgaagctgttgcaattgagaatattaagcgtggactggcttctctgtttcagacgcagctgtcgtctggtacaaccaatgaggtcgacatctcagggaactgcaaggtgacctaccaggctcaccaggataaggtaattaaaatcaaggctttggactcctgcaagatcgctagaagtggattcaccacacctaaccaagtgctcggcgtatcatctaaagctacaagcgtgacaacctataagatcgaagactccttcgtcattgctgtcctggctgaagaaacccacaacttcggactcaatttcttgcaaactatcaagggcaagatcgtgtccaaacagaagctcgagctcaagaccaccgaagccggtcctagactcatgtccggcaagcaggctgccgccataataaaagccgttgactcgaaatacactgccatccccattgtgggacaggtcttccaatctcactgcaaggggtgtccttcactgagcgagttgtggcgcagcacccgcaagtatctccagcccgataaccttagcaaagctgaagccgtgaggaattttcttgcttttatacagcacctccggaccgcaaaaaaggaagagattctgcagattctgaagatggagaacaaggaagtactcccacaactggtcgacgcggtgaccagtgcgcagactagtgactcacttgaggcaatcctagacttccttgatttcaagagcgactcttcaataatactgcaggagagattcctatacgcatgcggattcgccagtcacccgaatgaggagctactccgggcgcttatctccaagttcaaaggaagcatcggaagctcagatatcagagaaactgttatgatcatcacaggcactcttgtaagaaaactttgccagaacgaggggtgcaagctgaaagccgtggtggaggccaaaaaactcattttaggcggcctagaaaaagctgaaaagaaggaggacacccgaatgtacctgttggccttgaagaacgccttgctccccgaaggaatccctagccttctgaaatacgccgaagccggtgaaggtcccatttcgcatctcgcgactacagccctgcagagatatgatttgcctttcattacagatgaggttaagaagacattgaacaggatctatcaccagaaccgaaaagtgcatgaaaagaccgtgcggacagctgcagccgcgattatcttaaataacaatccctcttatatggatgtgaaaaatatcctcctctctataggcgagctgcctcaagaaatgaataaatacatgctagcgatcgtgcaggatattttgagattcgagatgcccgcaagtaagattgttcgtcgcgtgctgaaagagatggtcgctcacaattatgaccgcttttcgcggtccggcagctcctctgcctacacagggtatatagagaggagtcctaggtctgcttccacttactcactagacattctatactccggtagcgggattttgcgtaggtcaaacttgaatatttttcagtatatcggaaaggccgggctgcacgggagtcaagtcgtcattgaagcacaaggcctcgaggctctgatcgccgcaacccccgatgagggcgaagagaatctcgattcatatgcaggcatgagcgcgattctatttgatgttcaactgcgccccgtgacattttttaacggctacagcgatctaatgtctaagatgctgagtgcctcaggagatcctatctcagtggtaaaaggactgatcctacttatcgaccattcgcaggagttgcagctccagtcggggctaaaggctaacatcgaagtccaaggggggctggcaatagatatcagtggggctatggagttcagtctgtggtacagggaaagcaaaactcgggtgaagaacagggttacagtcgttataacgacggacattaccgtggattcgagcttcgtgaaagccggactggagacctccactgagacagaggcgggactggagtttatctcaaccgttcagttctcccagtacccgtttctggtttgtatgcaaatggacaaggatgaggcgcccttccggcagtttgaaaaaaagtatgaaagactctccaccggcaggggctacgtgagccaaaagcgtaaagagtctgtcctggcgggctgtgagttcccacttcatcaggaaaacagtgaaatgtgcaaggtggtcttcgccccccagcccgattccacctcctctggttggttc

SEQ ID NO: 16760 - DNA, 2682 bp, synthetic construct
  misc_feature 1..2682: note = source = /note="Description of Artificial Sequence: Synthetic coding sequence"
  source 1..2682: mol_type = other DNA
atgatcttgctcgcggtcctcttcctttgttttatctccagctactcggccagtgtgaaagggcataccaccggactctccctcaacaacgatcggctctacaagctgacctactccactgaagtgctgctggacagaggaaagggaaagttgcaggattccgtgggatacagaatatcgtcgaacgtggacgtggccctgctttggcgcaaccctgacggggacgacgaccagctgatccagatcaccatgaaagacgttaacgttgaaaacgtgaatcagcagcggggagagaagtccatcttcaagggtaaaagcccgtccaaaatcatgggaaaggaaaacctggaagctctgcaaagacctactctcttgcacctgatccatggcaaggtgaaggagttttactcgtaccagaatgaagcggtcgcgatcgaaaacatcaaaagaggactggcttcgcttttccagacccagctgtccagcggtaccaccaacgaggtcgacatctcggggaactgcaaggtgacctaccaggctcaccaggacaaggtgatcaaaatcaaggctctcgattcttgcaagatcgcgcggtcaggattcaccactcccaatcaggtgctgggcgtgagcagcaaagcgacctctgtgaccacttataagatcgaggacagctttgtgatcgcggtgctcgcagaggaaacccacaatttcgggctcaactttctgcagaccatcaagggaaaaatcgtgtccaaacaaaagctggagctcaaaaccaccgaggccggacctagattgatgtcaggcaagcaagcggccgccattatcaaagcagtcgactcgaagtacaccgctatcccgatcgtgggtcaagtgttccagtcacactgcaagggatgccctagcctgtcagagctgtggagatcaactagaaaatacctgcagccagacaacctgtcgaaggctgaggccgtgcggaacttcctggccttcatccagcacttgagaaccgccaagaaggaagagatcctgcagatcctgaagatggagaataaggaagtcctgccccagctcgttgatgctgtgacctccgcacagacctcggactcgctggaggcgatcctggacttcctggacttcaaatcagactccagcatcatcctccaagaacggtttctgtacgcatgtggttttgcatcccaccctaacgaggaactcctgagggcgcttatcagcaaattcaaaggatccatcggatcctcagacatccgcgagactgtgatgatcattacgggcactctggtgcggaaactctgtcaaaacgagggatgcaaactgaaagctgtcgtggaagcgaagaaacttatactggggggactggagaaggcagaaaagaaggaggacaccagaatgtacttgctcgcgctgaaaaatgcactgcttccggaaggtatcccaagcctgctgaagtacgccgaagccggagagggtcctattagccacctggcgactacggcgctccagaggtacgatctgcccttcatcaccgacgaggtgaaaaagaccctcaatagaatctatcatcagaaccggaaggtgcatgaaaagactgtccgcaccgccgccgctgcgatcatccttaacaataacccatcctacatggatgtgaagaatatcctgctctcgatcggggagctgccgcaagagatgaataagtatatgctggcaatcgtgcaggatatcctccgctttgagatgcctgcctccaagatcgtccggcgcgtgttgaaggaaatggtcgcccataactacgatcgcttctctcgctccggaagctcctcagcctacaccgggtacattgaacggtccccccggagcgcttccacctactccctggacatcctgtattccggatcgggtatcctgcgaagatcaaacctcaatatcttccagtacatcggaaaggccgggttgcacggctcccaagtggtgatcgaagcacaaggcctggaagccctcatcgcggcgaccccagacgagggagaagaaaacctggatagctacgctggcatgtcagccatcctcttcgacgtacagctgcggcctgtgactttcttcaacgggtactcagacctcatgtccaagatgctttctgcatccggagatcccatctccgtggtgaagggcctgatcctcctgatcgaccattcacaggagctccaactgcaatcgggacttaaagccaatatcgaagtgcaaggaggactggcgatcgacatctccggagcaatggagttcagcctgtggtacagagaatcgaaaactcgcgtgaagaatagggttaccgtcgtcatcaccaccgatattactgtggattcatcattcgtgaaagctggtctggaaaccagcactgagactgaggcggggctcgaattcatctcgaccgtgcagttttcacagtacccgttcctcgtctgtatgcaaatggataaggatgaagcaccattccgccaattcgagaagaagtacgaaagactgagcaccggacgcggttatgtcagccaaaaaaggaaggagtcggtgcttgcagggtgcgaattcccgcttcatcaggagaattcagaaatgtgcaaggtcgtgttcgccccgcagccggactcaacgtcatcgggatggttt

SEQ ID NO: 16761 - DNA, 2682 bp, synthetic construct
  misc_feature 1..2682: note = source = /note="Description of Artificial Sequence: Synthetic coding sequence"
  source 1..2682: mol_type = other DNA
atgatactcctcgctgtcttgttcctgtgcttcatctcctcttacagcgcgtccgttaagggccacacgaccggtctcagtttgaacaacgacaggctttacaagctgacctactccactgaagttctgctcgatcggggaaagggtaagttacaggactctgtcggttaccgtatctcgtccaatgttgacgtcgccctactttggcggaaccccgacggcgacgatgaccagctcattcagatcactatgaaggacgtgaatgttgagaacgttaaccagcagcgcggagagaagtccatttttaagggaaagtccccttccaagattatgggcaaggagaatttggaggctctgcagcggcctaccctcctgcatctgattcacggcaaggtgaaggagttctattcttaccaaaatgaagctgtggccatcgagaacatcaagagagggctggcctcgttgtttcaaacccagctctcttccggaaccacgaacgaggtggacatctccggcaattgtaaggttacctaccaggcccaccaagacaaagtcatcaagattaaggccctcgatagctgcaagatcgcccgctctggtttcaccaccccgaaccaagtcctcggagtgagcagtaaggccaccagtgttaccacgtataaaatcgaggacagtttcgtcatcgctgtcctcgccgaggaaacccataattttggcctgaacttcttgcaaacgatcaagggtaagatcgtttcgaagcaaaagttggagcttaagacaactgaggcgggtccgaggctgatgtcaggtaagcaggcagccgctatcatcaaggccgttgattccaagtacactgccatacctatcgtgggccaggtcttccaatcgcattgcaagggctgcccgtcactgtctgagttgtggcgctctactaggaagtacttgcaaccggacaacctttctaaggccgaggctgtccgcaacttcctcgccttcatccagcaccttcggacggcaaagaaggaggaaatcctgcagatcctaaagatggagaataaggaggttcttccccagcttgtcgacgctgtcacttccgcccagacttccgattcccttgaggcgatcctggacttcctcgacttcaagtctgattcctctataatcctgcaagagcgtttcctctacgcctgtggattcgcctcccatcccaacgaagagttgttgcgcgccctaatctcaaagttcaagggctccatcggtagctctgacatccgggaaacggtgatgatcattactggaacattggtacgaaagctttgccagaacgagggatgtaagctcaaggccgtcgtcgaagcaaagaagttgatcctcggtggtctcgagaaagccgagaaaaaggaggatacccgaatgtatctgttggcgctgaaaaatgccttattaccagagggtattccctcccttctgaaatacgctgaagcgggggagggtcccatttcccatctcgcgacaaccgctctgcagcggtacgatctccccttcattaccgacgaggtaaagaagaccttaaaccgcatctaccaccagaaccgaaaggtccatgaaaagaccgtccgtaccgcagcggcggccatcatcctcaacaacaaccctagctacatggacgtgaagaatatcttgctctccatcggtgagcttccacaggaaatgaacaagtacatgttggccatagtgcaagacattctgcgcttcgagatgcctgcctccaagattgttcgccgcgtgttaaaggaaatggttgctcacaactacgaccgcttctcccgttctggctcctcctccgcgtacaccggttacatcgaacgttccccgaggtccgccagcacttacagcttagatattctttattctggctccggtattcttcgacgttcgaatcttaacatcttccagtacatcgggaaagccggactgcacggctcccaggtggtcatcgaagcgcagggccttgaagctctgatcgctgctacgcccgacgaaggcgaggagaacttggactcgtacgccggtatgagcgccatcctcttcgatgtacagctacggcctgttacattcttcaacggctactccgacttgatgtccaagatgcttagtgctagcggcgaccctatctcggtggttaaaggactgatcttgctcattgatcattcccaggagttacagctccagtctggcctgaaagcaaatatcgaagttcagggtggcttggctatagatatcagcggggcgatggagttcagcctgtggtacagagagagcaagacgcgtgtcaagaaccgcgtcaccgtcgtcattaccaccgacatcacagtggactcgtcattcgtgaaagccggtcttgaaacgagcaccgagacggaagcgggtctggagttcatttcgaccgttcagttcagccagtatccatttttggtctgcatgcagatggacaaggatgaagctccattccggcaatttgagaagaagtatgagcggctgtctaccggtcgcggttacgtttcgcagaagcgcaaggagtcggtcttggcaggctgtgaatttccccttcatcaagagaactctgagatgtgtaaggtggtgttcgccccccagcccgactcgacctcttccggctggttc

SEQ ID NO: 16762 - DNA, 2682 bp, synthetic construct
  misc_feature 1..2682: note = source = /note="Description of Artificial Sequence: Synthetic coding sequence"
  source 1..2682: mol_type = other DNA
atgattctgctcgcggtgctgtttctgtgctttatcagctcatacagcgctagtgtcaagggccatactaccggactgtcactcaacaacgacagactgtacaagctgacctactccactgaagtgcttctcgatcgcggcaagggaaagctgcaggattcagtgggatacaggatctccagcaatgtggacgtggctctgctgtggagaaatcctgacggagacgacgatcaactcatccagatcacgatgaaggacgttaatgttgaaaatgtgaaccagcagaggggagaaaagtctatctttaagggaaagtccccatcgaaaatcatgggcaaagaaaacctggaggcgctgcaacggcccaccctcctgcacttgattcacggtaaagtgaaagaattctacagctaccagaacgaagctgtcgctatcgaaaacatcaagcgcggactggcgtccctgtttcagactcagttgtcctccggaactaccaatgaggtcgatatctcaggaaattgtaaagtcacttaccaggcccaccaggacaaggtgatcaaaatcaaggcccttgactcatgcaagattgctcggtccggatttactaccccgaaccaggtgctgggagtgagcagcaaagcgacctccgtgactacctacaaaatcgaggactcattcgtgatcgcagtattggctgaggagactcacaacttcggcctgaattttctgcagacgatcaagggcaagatcgtgtcgaagcagaagctggagctgaaaaccaccgaggccgggccccggctgatgtccggcaagcaggcggcggccattatcaaagcggtggactccaagtacaccgctattcccatcgtgggtcaggtgttccaaagtcactgcaagggatgtccatcgctctccgaactctggaggtcaacccggaagtacctccaaccggacaatctgtccaaggcggaagccgtgagaaactttctggccttcatccaacacctccgcaccgcaaagaaggaggagatccttcagatcctgaaaatggaaaacaaagaggtgctcccccagctcgtggatgccgtcacttcagcccaaactagcgattccctggaggcaatactcgactttctcgacttcaagtctgacagctctatcatcctccaggagcgcttcctgtacgcatgcggcttcgcgtcccatcccaatgaagaactccttagagccttgatctcgaagttcaagggatccatcggaagctcggatatccgggagacggtcatgatcattactggtaccctggtgcggaagttgtgccaaaacgaaggctgcaagttgaaggcagtggtcgaggcgaaaaaactgatcctgggcggccttgagaaggctgagaagaaagaagatactagaatgtaccttctggccctgaaaaatgcgttgctgccggagggcattccgtccctcctcaagtacgcagaagcgggggagggaccgatctcccacctggcaaccacggcgctgcaaaggtatgaccttccgtttatcaccgacgaagtgaaaaagactctcaaccggatttaccaccaaaaccggaaagtccacgagaaaaccgtccggaccgccgcagcggcaattatcctcaacaataacccgtcgtacatggacgtgaaaaacatcctcctgtccatcggagagctcccgcaagagatgaacaaatacatgctggctatcgttcaggacatactccgcttcgaaatgccggcgagcaaaattgtgagaagagtccttaaagaaatggtggctcacaactacgatcgcttttcccggtccggaagctcgtccgcatacacgggatacatcgagagaagcccacgctcggcctcaacgtactcgctggacatcctgtactcgggatcaggtatcttgcggaggagcaacctcaacattttccagtatatcggaaaagctgggctgcacggctcacaagtggttattgaagctcaaggactcgaagccctgatcgcagcgactccggatgaaggagaagagaatctggatagctatgcgggaatgtccgctatcctgttcgacgtgcagcttagacctgtgaccttcttcaacgggtactcggatctgatgtccaagatgttgtcggcctcgggggacccgatttcagtcgtcaagggcttgatccttctcatcgatcattcgcaggaactccagctgcaatcgggactgaaggctaacatcgaggtgcaagggggactcgcaatcgatatatcgggcgcgatggagttctccctttggtaccgggagagcaagacccgcgtgaaaaatcgggtcactgtggtcatcaccactgatatcactgtcgactcctcgttcgttaaggccggcctcgaaacctctaccgagactgaggccggactggagtttatcagcacggtgcagttctcacagtatccgttcctggtctgtatgcagatggacaaagacgaggctccattccggcagttcgagaagaaatacgagcgcctcagcactggacggggatacgtgtcacaaaagagaaaagagagtgtccttgcagggtgcgaattcccactccaccaagagaactcggagatgtgcaaggtggtgttcgcgccccagccagactcgacctcatcggggtggttc

SEQ ID NO: 16763 - DNA, 2682 bp, synthetic construct
  misc_feature 1..2682: note = source = /note="Description of Artificial Sequence: Synthetic coding sequence"
  source 1..2682: mol_type = other DNA
atgattctgctggccgtgctgttcctttgtttcatctccagctacagcgcatcagtgaagggtcacactaccggactttcgctgaacaatgatagactctacaagctgacctattccaccgaggtgcttctcgacaggggaaagggcaagctccaagactcggtcggttacagaatctcctcgaacgttgacgtggccctcctgtggcgcaatccggacggagacgacgatcagctcatccaaatcaccatgaaggacgtgaacgtcgagaacgtgaaccagcagcgcggcgaaaaatcgatcttcaaaggaaagtcaccctctaagattatgggaaaggaaaacctcgaagccctgcagcggcccaccctcctgcatctcatccacggaaaggtcaaagagttttacagctaccaaaatgaagcagtggcaattgaaaacatcaagcgaggacttgcatcgctcttccaaactcagctctcaagcggaaccaccaacgaggtggacatctccggcaactgcaaggtcacctaccaagctcaccaggacaaggtgatcaaaatcaaggccctggattcgtgcaagatcgctcggtccggcttcaccaccccgaatcaggtcctgggagtgtcgagcaaggcaacttcggtgactacttacaagatcgaggattcattcgtgatcgccgtattggctgaggaaacccacaatttcggtctgaacttcctccagactatcaagggaaagatcgtctccaagcagaagctggagctgaaaaccaccgaggcgggaccgcggctcatgagcggaaaacaagcggcagcgatcatcaaagccgtggattcgaagtacaccgcaattccgatcgtgggacaagttttccagtcgcattgcaagggttgtccgagcctctcggagctgtggcggtcaacgagaaagtacctgcagccggacaatctgtcgaaagccgaggctgtgcgcaatttccttgccttcatccagcatctccggactgccaagaaggaggaaatcctgcagatactgaagatggagaataaggaggtgctgccgcagctcgttgacgctgtcacctcagcccaaaccagcgactccctggaagctatcctggacttcctcgacttcaagtccgactcctccatcattctccaagaacggttcctttacgcctgcggtttcgcgagccatcctaatgaggagctgctgcgcgcactgatttccaagttcaagggctcgatcggctcgtcggatattagggaaacggtcatgattatcactggaactctggttaggaagctgtgccagaatgaaggatgtaagctgaaagctgtggtcgaagccaagaaactcattcttggcggactggaaaaagcagaaaagaaggaagatacccgcatgtatctgctggccctgaagaacgcactcctgccagaaggaatcccgtccctcctgaagtatgcggaggcgggagaaggacctatcagccacctggccaccaccgccctgcagcgctatgacctcccgtttatcacggatgaggtgaaaaagaccctcaaccgcatctaccatcaaaatcggaaggtgcatgaaaagacggtgcggactgccgcagcggccatcattctgaataacaacccatcgtacatggatgtgaagaacatcctcctgtcgattggggaactgccacaggaaatgaataagtacatgctggcgattgtgcaggatatcttgcggtttgagatgcctgcgtcaaagattgtgcgcagggtcctcaaggaaatggtggcacataactacgatcgtttctcacgcagcggttcctcgtccgcctacaccggctacatagagaggtcacctagatcggcctcaacctactccctggatatcctttactcaggatcaggaatcctccgaagatcgaatctcaatatctttcaatacatcggcaaggcggggcttcacggaagccaagtggtgatcgaagcccaggggctggaggccctgatcgctgctactccggacgaaggagaggaaaacttggactcatacgcaggcatgtccgcaattttgttcgacgttcaacttcgtccagtgactttcttcaacggctactcagacctgatgtcgaaaatgctctcggcatcaggggacccgatctcggtggtgaaggggctgattctcctgatcgatcactcccaagaactccagctgcagtccggcctgaaggcgaacatcgaggtgcagggaggactggcgatcgacatctcaggcgcaatggaattttcgctctggtacagagagtccaaaactagagtgaagaacagagtcacggtcgtcatcactaccgacatcaccgtggattcctccttcgtcaaggccggactggagacgtccaccgaaactgaggccggactcgagttcatctccactgtgcagttctcgcagtatccgttccttgtctgtatgcaaatggataaggacgaggcgccgtttcgccagttcgaaaagaaatatgagcgactgtctaccggccggggatacgtctcgcaaaagcgcaaggagagcgtgctggccgggtgcgagttcccgcttcaccaggaaaactccgagatgtgcaaggtggtgtttgcgccgcaaccagactctacttcgtctggatggttc

SEQ ID NO: 16764 - DNA, 2682 bp, synthetic construct
  misc_feature 1..2682: note = source = /note="Description of Artificial Sequence: Synthetic coding sequence"
  source 1..2682: mol_type = other DNA
atgatcctcctagctgtgttattcttgtgtttcatttcttcctacagtgcaagcgtgaaaggccataccaccgggctgtcattgaacaatgataggctgtacaagctgacttattcaacagaggtactgctggacagagggaagggcaaactccaggattcggttggctaccgcattagctcaaacgtggatgtcgccctgttatggaggaaccctgatggggatgacgatcagctgatacagatcacaatgaaggacgtgaatgtggagaatgttaaccaacagaggggcgaaaagtccatcttcaaaggcaagtcaccctctaagatcatgggaaaggagaaccttgaagctctgcagcgccccacactgttgcatctgattcacggcaaagtgaaggagttctatagttaccaaaacgaagccgttgccatcgagaacattaaaaggggacttgcctccctgtttcagacacagctaagctcaggaacgacgaatgaggtcgacatcagcggaaattgcaaagttacttatcaggcccatcaggacaaggtgattaaaatcaaagctttagattcatgtaaaatcgcacgaagcgggttcactacccctaaccaggtactcggtgtctctagcaaagctacttctgttacgacttataaaatcgaagatagtttcgttatcgccgtgctggccgaggagacccacaacttcgggttgaacttcctgcagaccattaagggcaagatagtgagtaaacaaaagctcgagcttaagaccaccgaggccgggcctcgtctaatgagtgggaagcaggctgctgcgatcatcaaggctgtggattcgaaatatacagctatcccgatcgtgggacaagtattccagtcacattgtaagggctgccctagtctcagtgagctctggcgttccactaggaagtacctccagccggataacctcagtaaggccgaagccgtgcggaatttcctggcctttattcaacacttgcggacagccaaaaaggaggaaatcttgcagattctgaagatggagaacaaagaggtcttgccacagcttgtggacgccgtaacatcggctcagactagtgactcccttgaggccatattggatttccttgacttcaagtccgatagttccattattctccaggagcgttttttgtatgcctgcggctttgcatcacatccaaatgaggagctgttgagagcactgatctctaaatttaagggttcgatcggctcatctgatattagggagactgtgatgatcattactggaacactggtgagaaaactgtgtcagaatgaaggctgtaagctgaaggcagttgtcgaagccaagaaactgatcctgggagggctggaaaaagctgaaaagaaggaagacacccggatgtatctgctcgctttgaaaaacgcacttctgccagaggggattccaagccttctcaaatacgcagaagcaggggagggccctattagccatctggcgactacagccctgcagcggtatgacctcccctttatcaccgacgaagtcaagaaaactcttaatcgcatttatcatcagaaccgaaaggtccacgaaaagacggtccgaacagccgccgcggccataatacttaacaataatcctagctacatggacgtaaagaatattcttctcagtataggggagttgcctcaagaaatgaacaaatacatgctcgctatagtgcaggacatcttgcgcttcgagatgccagccagcaagattgttagacgggtgctgaaagagatggtcgcgcataactacgacaggtttagcagatcagggagcagtagcgcttacaccggctatattgaacggtccccccgctccgcatctacttactcactggatatattgtacagtggttcggggattctaaggagatccaacttgaacatcttccagtacataggcaaggccggcttacacgggtcccaggtggtgattgaggcccagggcctggaggcactgatcgctgcaactccggacgagggtgaagaaaacctcgattcttacgccggcatgtccgctatactgttcgacgttcagttgcgccctgtgacattctttaatggatattctgatctcatgtcgaaaatgctttctgcctctggcgaccccatcagcgtagtgaagggactcatccttttgattgatcatagtcaggagctgcagctccagtcgggattaaaggcaaacatcgaggtgcaagggggcttagcaattgacatctccggggcgatggagtttagtctatggtacagagagagcaagacacgtgttaagaacagagtgacagttgtgattaccactgatatcacagtcgacagctctttcgtaaaggccggcctggagacatccactgagacggaggccggcctggaatttataagtactgtacagtttagccagtacccctttctcgtctgcatgcagatggataaggatgaagcaccttttcgacagtttgagaaaaagtatgaacgactttccactggacggggatatgttagccagaagagaaaggagtccgtgctcgccggttgtgaattcccactgcatcaggagaatagcgagatgtgcaaggtggtttttgcacctcaacccgatagcacctcatccggatggttc

SEQ ID NO: 16765 - DNA, 2682 bp, synthetic construct
  misc_feature 1..2682: note = source = /note="Description of Artificial Sequence: Synthetic coding sequence"
  source 1..2682: mol_type = other DNA
atgattctgctcgccgttttatttctgtgcttcattagctcatacagtgcaagcgttaaaggtcacacaacaggtctgagcctcaataatgatcgactctacaagctgacatactctacagaggtgcttctggacaggggtaaaggcaagctgcaggattccgtaggataccggattagctccaatgttgacgttgccttgttgtggcgaaaccccgacggtgacgacgatcagcttatacagataaccatgaaggacgtcaatgtcgagaacgtcaaccaacagcggggagaaaagtcgatatttaaaggaaagtcacccagcaagattatgggcaaagagaatttagaggctctacagaggccaaccctactccatcttattcacggcaaggtgaaggagttctattcctatcaaaacgaggcagttgcaatagagaatattaagagggggctggcgagcctcttccagacccagctgtcaagcgggactacaaatgaggtggatatctccggaaactgcaaggtcacataccaggcccaccaggataaggtgattaaaatcaaagcactcgatagttgtaagattgcccggtcaggctttactactcctaaccaggtactcggagtatcatctaaggctacatcagtaacgacctataaaatcgaggacagttttgtcatagccgttttggctgaggaaactcacaatttcgggctaaacttcctgcagaccatcaagggcaagattgtctctaaacagaagctagaactaaagactaccgaggcaggaccacgcctcatgtccggaaaacaggctgccgccatcataaaggccgtggattccaaatataccgcgatccctattgtggggcaggtgttccagtcccattgtaaagggtgcccctccttgtctgagctttggcgcagtaccaggaaatacctgcagcctgacaaccttagcaaggccgaggccgtgcggaatttcctagcttttatccagcacttacggactgccaagaaagaggaaatactgcagattctgaagatggagaataaagaggtcctcccacagctggtggatgcagtgacttctgctcagacatctgattcactggaggccatcctcgactttcttgactttaaaagtgatagctctattattctgcaagaaagatttctttatgcgtgcggcttcgcctcccatccaaacgaagagttactgcgagccctgatctcaaagttcaaaggctccatcggatcctctgacatccgcgaaaccgttatgatcatcaccggtactctggtgcgcaagttgtgtcagaatgaagggtgtaaactaaaagcagtcgttgaagctaagaagttgatcctgggcggactggagaaggcggaaaaaaaagaagatacgaggatgtatctgctggcactcaagaacgccctgcttcctgaggggattccttctctcctcaagtacgctgaagcaggcgagggcccaatctctcatctagcaacaaccgcattgcagagatatgatctgccatttattaccgacgaggtgaagaagaccctgaaccggatttatcaccaaaacaggaaagtgcacgaaaagaccgttagaacagccgctgccgccattattctgaacaacaacccctcctatatggatgtgaagaatatattgctctccatcggcgaactacctcaggagatgaacaaatacatgctggcaattgtacaggacatcctgagattcgagatgccggcatcaaaaatcgtgcggcgtgtcttgaaagagatggtcgcacacaactacgatcggttctcccgctcagggtcaagttccgcgtatacgggctacatagagcgaagtcctcgctccgcatcgacctattccttggatattttgtacagtgggagcggcatattgagacggagcaacctgaatattttccaatatatagggaaagcaggattgcacgggtcccaagtggtgatcgaagctcagggactggaggcactgatagctgctacacctgacgagggggaagagaaccttgacagctatgcggggatgtctgccattttatttgatgtgcagcttcgtccagttaccttctttaatggatattcagatttaatgagtaaaatgctctcagcatccggggatcccatttccgttgttaagggactgatcttgctaatagaccacagccaggaactgcagctccagtccggcctcaaagccaacatcgaagttcaggggggcctagccattgatatctccggcgctatggagttctctctgtggtaccgggagagtaagaccagagtaaagaaccgagtcacggtcgttatcacaacagacatcacagtagactcctcttttgttaaggccggcctcgagacatctacagagacagaagctggcctggagtttattagtaccgtgcagtttagtcaatatcctttcctggtgtgtatgcagatggacaaagacgaggccccttttcggcaattcgaaaaaaagtatgagagacttagcaccggacgaggatatgtctcccagaaaaggaaagaatccgtgctggccgggtgcgagttccctctgcaccaagagaactctgaaatgtgtaaggtggtcttcgcaccgcagccagactcaacttcctcaggctggttc

SEQ ID NO: 16766 - DNA, 2682 bp, synthetic construct
  misc_feature 1..2682: note = source = /note="Description of Artificial Sequence: Synthetic coding sequence"
  source 1..2682: mol_type = other DNA
atgatcctgctggccgtccttttcctgtgcttcattagcagctactcggccagcgtcaagggccacaccaccggactctcacttaacaacgacaggttgtacaagctgacctacagcaccgaggtgttgttggaccggggtaagggaaaactccaggacagcgtgggttaccggatctccagcaatgtggacgtggcgctcctgtggcggaatccagacggggacgatgatcagcttatccagattactatgaaagatgttaatgtggagaatgtgaaccagcagcgcggggaaaaaagcatcttcaagggaaaatctccatcgaaaatcatgggcaaggagaacctcgaagccctccaaaggccaactcttctgcatctcatccacggaaaagtgaaggagttctattcgtaccagaatgaggcagtggcgatcgaaaacatcaaacgtggactggcctcgctgttccaaacccagctgtcgtctggcacgaccaacgaagtcgatatttccgggaattgcaaggtgacgtaccaggctcatcaggacaaggtgatcaagataaaggctttggactcatgcaagatcgcacggtcggggtttacgactccaaaccaagttcttggcgtgtcgtccaaggcaacgtctgtcactacctacaagattgaggacagttttgtcatcgccgtgcttgcggaggagacgcacaatttcggactcaatttcctgcaaactattaagggaaagattgtgagtaagcagaagctggaattgaaaaccactgaggcagggcccagactcatgtcaggcaagcaagccgcagcaatcatcaaggccgtcgactccaagtatactgccatccccatcgtgggccaggtgttccagagccattgtaaagggtgcccttccctctccgaactgtggagatcgactcgcaaataccttcaaccggataacttgtccaaggctgaagctgtgcgcaacttcttggctttcatccagcacctgcgcactgcgaagaaggaggagatcctccaaattctcaagatggaaaacaaagaggtgttgccgcagctggtagacgccgtcacgtcagcccaaacctcggactcgctggaagcaatcctcgatttcctggacttcaaatccgacagttcgatcatcctgcaagaacggttcttgtatgcttgcggctttgcgtcccatccgaacgaagagctgctgagagccctgataagtaaattcaaaggatcaatcggatcatccgacatccgagaaaccgtcatgattatcactggaactcttgtgcgcaaactttgccaaaatgaggggtgtaagctcaaggcggtggtcgaagccaaaaaactgatcctgggtggcctggagaaggcggagaaaaaggaggatacgcgtatgtacctcctggccttgaagaacgcactcctgccggaaggaattccgtcgctcttgaagtacgctgaagcgggcgaaggaccgatcagccacttggccaccaccgctctccagcggtacgatctgccgtttatcaccgacgaagtgaaaaagacgcttaaccgaatctaccaccagaatcgcaaggtccacgagaaaaccgtgaggactgctgccgcggcaatcattctgaacaacaacccttcctacatggatgtgaagaacatcctcctttcgataggagagcttccccaggaaatgaacaagtacatgctcgcgatcgtccaagacatcctgagatttgaaatgccggcatccaaaatcgtgcggagagtgcttaaggaaatggtggcgcacaattacgatagattctcccgcagcggctcatcgtcagcatacactgggtacatcgaaagatccccacgctcagcaagtacctattcacttgacatcctgtattcgggatcaggtattctccggcggagcaatctcaacatcttccaatacatcggaaaggcgggactgcacggatcgcaggtggtgatcgaggctcagggtctggaggcactcatcgctgcgaccccggatgagggcgaggaaaacctggactcgtacgcgggaatgtcggccatccttttcgatgtgcagctccggccggtgactttctttaacgggtactcggacctgatgagcaagatgctgtcggcgtcgggtgacccaatctctgtggtcaagggactcatcctgcttattgaccattcgcaggaactgcaactgcagtcaggcctgaaagctaatatcgaggtccagggaggcctggccatcgatatctccggagcaatggaattctccctgtggtaccgcgaatctaagaccagggtcaagaacagggtgactgtagtgataaccaccgatatcactgttgattctagctttgttaaggccggacttgaaacctccaccgagactgaagcgggactcgaattcatctccactgttcagttctcacaatacccgttcctggtgtgtatgcagatggataaggacgaagcccctttccgccaattcgagaagaagtacgaacggctctccaccggacgcggatacgtgtcccaaaagagaaaagaatccgtcctggctggctgcgaattcccactgcatcaggagaactccgaaatgtgcaaggtggtctttgcgccgcaacctgactccacctcctcgggatggttt

SEQ ID NO: 16767 - DNA, 2682 bp, synthetic construct
  misc_feature 1..2682: note = source = /note="Description of Artificial Sequence: Synthetic coding sequence"
  source 1..2682: mol_type = other DNA
atgatccttctggctgtgttgtttttgtgcttcatcagcagctatagtgcatctgtgaagggtcacactacgggcctttcattgaacaacgaccgcctgtacaaactcacttactccacggaagtcctgctggaccgcggcaaaggaaagctgcaagattcagtgggttacagaatatccagcaacgtggacgtggcactcctgtggcgcaacccggacggtgacgacgaccaattaatacaaataaccatgaaggacgtcaacgtcgagaatgtgaatcagcagcgaggggagaaatcaatcttcaaaggcaaatccccctcaaaaattatggggaaagaaaatcttgaagccttgcagcgacccacactgttacacctgatccatgggaaggtgaaagaattttatagctaccagaatgaagctgtggctatagagaacatcaagcggggtctcgccagcctgttccagactcaactcagtagtgggaccacaaatgaagtagatatctcagggaattgcaaagttacctatcaggcccaccaagacaaggtcataaagattaaggcattggactcgtgcaagattgcccgatcagggttcacaactcctaaccaggtgctgggggtgtcgagtaaagcgacctccgtgacaacctacaaaatagaagatagcttcgtgatcgcagttcttgcagaggagacccacaacttcggtctgaatttcctgcagaccattaaggggaagattgtctctaagcagaagttggagctgaagacgactgaggctggtcctcgcctgatgagcggaaagcaggcagctgcgattataaaagcagtggactccaagtatacagccattccaattgtgggtcaggtttttcagtcccactgcaaggggtgtccaagtctgagcgagctttggcgaagcacacgtaagtacctccagcctgataacttgtctaaggcagaggctgtgcgcaacttcctggcgttcattcagcatctgcgcactgccaaaaaggaggagattttacaaatactaaagatggagaataaggaggtgctgccgcaacttgtcgacgcagtgacgagcgcccagactagcgattctttggaagcaatccttgacttccttgacttcaagtcggatagctcaattattctgcaggagagattcctatatgcctgtggctttgccagtcatccaaatgaagagctcctacgagcgctcatatctaagtttaaggggtccatcggaagcagtgatatccgtgaaactgtgatgatcattacaggcacgctggttcggaaactgtgccagaacgaggggtgtaaattgaaagccgtggtggaggctaagaagctcattctgggcggtcttgaaaaggcagagaagaaggaagacaccaggatgtacctgctggccctgaagaatgccctgttgccagagggcatcccaagcctgctgaagtacgcggaagctggtgagggtcccatttctcacctggcaactaccgctctccagcgatacgatttgccattcataaccgatgaggtcaagaaaaccctgaatagaatataccaccagaatcgtaaggtgcacgagaagacagtcagaacagctgcagctgctattattctaaataacaacccaagctacatggatgtcaaaaacattttgttaagtatcggggagctgcctcaggagatgaataagtatatgttggcaatcgtacaggacatcctcaggtttgaaatgcctgcttcgaaaattgtgagaagggtgcttaaggaaatggttgcgcataattacgaccgcttttctaggagcggctcaagcagtgcatacaccggatacatcgaaaggtctcccagatccgcctccacctactccttagatatcctgtatagcggctccggtatactgcggagatctaatcttaatattttccagtatattgggaaagcgggcctacacggatctcaagtcgtgattgaagcacaaggactggaggcattaatcgctgccactccagatgagggggaggaaaatctggatagttacgccgggatgtcagcaatactgttcgatgtgcaattacgtccagttaccttcttcaacggctactccgacctaatgtccaagatgttatccgcttcaggggacccaatcagcgtcgtcaagggtctgattctgttgattgatcattcacaggagctccaactgcagtccgggttgaaagcaaatatcgaagtacagggagggctagccattgatattagcggagctatggaattctctctgtggtaccgtgagtcgaagacacgcgtcaagaaccgcgtgacagtggtcataacgacggatattacagtggactcatctttcgtgaaggccggcctcgaaacaagcaccgaaaccgaagcaggtctggagttcatatctacggtacagtttagtcagtatccattcctggtttgtatgcagatggataaagacgaggccccattcaggcagttcgaaaagaagtacgaacggctcagtaccggtaggggttacgtgagtcaaaagcggaaggagtcagtactggccggatgcgagtttcctctgcatcaggaaaactccgagatgtgcaaggtcgtgttcgccccccagcctgattctacatcaagtggttggttt

SEQ ID NO: 16768 - DNA, 2682 bp, synthetic construct
  misc_feature 1..2682: note = source = /note="Description of Artificial Sequence: Synthetic coding sequence"
  source 1..2682: mol_type = other DNA
atgatcctgctggccgtcctgtttctgtgtttcatctcatcatactccgcgtctgtcaagggacatactaccggtctgtcactgaacaatgatagactgtacaagctcacttactcgacggaagtactcctcgacagggggaagggcaaactccaagattcggttggataccggatctcctcgaatgtggacgtggcgttgctgtggcggaacccagatggagatgacgaccagcttatccaaatcaccatgaaggatgtcaacgtcgaaaatgtgaatcagcaacgcggggaaaagtccattttcaaaggcaagtccccatcaaagatcatgggcaaggagaacctggaggctctgcagcgcccaaccctgctccacctgatccacggtaaggtcaaagagttctactcataccagaatgaggccgtggcgatcgagaacatcaagcggggcctcgcgagtctgttccagacccagttgtcctcggggactactaacgaagtcgacatcagcggaaactgcaaggttacctaccaagctcatcaagacaaggtgatcaagatcaaagcacttgactcctgcaaaatcgcccgctccggttttaccaccccgaaccaggtcttgggagtgtcatccaaagcgacctcggtgaccacgtacaagatcgaagattcgtttgtcatcgcggtgctggccgaagaaacccacaacttcggattgaatttcctgcagaccatcaagggaaagatcgtgtcgaagcaaaagttggaactcaaaaccactgaagccggaccgagactgatgtctggaaagcaggcggccgcgatcataaaggcagtcgactccaagtacactgcgatcccgattgtgggacaggtgttccagtcccactgcaaaggctgcccgagcctcagcgaactttggcggtccactagaaagtatctgcagcctgacaacctgtcaaaggctgaagctgttcgcaacttcctggccttcatccagcacctcaggactgccaagaaagaggaaattctgcaaatcctcaaaatggagaataaggaggtgctcccccagcttgtggacgcagtgactagcgcgcagacgtcggattccctggaggcaatcctggatttcctggactttaagtctgatagtagcatcatcctgcaagagcgattcctctacgcctgcggatttgcttcgcaccccaatgaagaactcttgcgcgccttgatctcaaagttcaagggatcgatcgggagctctgatatccgggaaactgtgatgatcattaccgggactctggtgcgtaaactctgtcagaacgagggttgcaagctgaaggcagtcgtggaagcaaagaagttgattctcgggggcctggagaaagccgagaaaaaagaggatacccgcatgtacctcctggcactgaagaacgccctgcttcctgaaggaatcccaagccttcttaagtacgcggaagccggagagggcccgataagccatctggcgactactgccttgcagcggtacgatcttcctttcattactgacgaggtgaagaaaacgctgaaccgcatttaccatcaaaatcgcaaagttcatgagaaaacggtgaggactgcagcggccgccattatcctgaacaacaacccgtcgtacatggatgtaaagaatatcctcctgagcatcggagaactgcctcaggagatgaacaagtacatgttggctatagtccaagacatcctgagattcgaaatgccggcctccaaaatcgtgcgacgggtgttgaaggagatggtagctcacaactatgatcgcttctcgcggtctgggagctctagcgcatacactggctacatcgaacggtcaccgagaagcgctagcacctactcattggacattttgtactccggttccggcattctgagaaggtcgaatctcaacattttccaatacattggcaaagcgggactccacggctcgcaagtggtgatcgaagcccaaggactggaagccctcatcgctgcaacgcctgacgagggggaggagaatctggattcgtacgcaggcatgtctgccatcctctttgacgtccaactgcgcccggtgaccttctttaacggatactcagaccttatgagcaagatgctgtccgcatccggtgacccgatttccgtggtgaagggattgatcctcctcatcgaccattcgcaggaacttcagctccagtctgggctgaaggccaatatcgaggtccagggtggcttggctatcgacatctcgggcgccatggaattcagcctgtggtaccgcgaaagcaagactcgggtgaagaatcgggtgaccgtggtgataaccacggacatcactgttgactcctcgttcgttaaggcgggactggagacttcgaccgagacggaagctggattggaattcatctcaactgtgcagttctcccagtacccgttcttggtctgtatgcagatggataaagacgaagccccattccgccagttcgagaagaagtatgaaaggctgtcgaccggacggggatacgtctcgcaaaaaagaaaggaatcggtcctggccgggtgcgagttcccattgcaccaagaaaacagtgaaatgtgcaaggtggtgtttgccccacagcccgactcgaccagctcgggatggttt

SEQ ID NO: 16769 - DNA, 2682 bp, synthetic construct
  misc_feature 1..2682: note = source = /note="Description of Artificial Sequence: Synthetic coding sequence"
  source 1..2682: mol_type = other DNA
atgatcctcctcgcggtcctcttcctttgcttcatctcctcttactcggccagcgtgaaggggcatactacgggactttcactcaacaacgatcgcctgtacaagctgacttattcgaccgaggtgctgctcgatcggggcaagggcaagctgcaggattcggtgggctacagaatttcgtcaaacgtcgatgtggcactcttgtggcgcaacccggacggagatgatgaccagttgatccaaatcactatgaaagatgtgaacgtggagaatgtgaatcagcagagaggagagaaatcgatattcaagggcaaatccccctcaaaaatcatgggaaaggaaaacttggaggccctgcaacggccaaccctccttcacctgatccacggaaaggtgaaggaattctatagctaccaaaacgaagccgtggccattgaaaacatcaagaggggtctggcgtcgctgttccagacccaactgtcatccgggaccactaatgaggtggacatctcgggcaactgcaaggtgacctaccaggcgcaccaggacaaggtgatcaagatcaaagccctggactcgtgtaagatcgccagaagcggattcactacccctaaccaggtgcttggagtctcctcgaaagctactagtgtcaccacttacaagatcgaggattcattcgtcatcgcggtgctcgctgaggaaacccacaattttggcctgaacttcctgcagaccatcaagggaaaaatcgtgtcgaaacagaagttggaactgaagaccactgaagctggccctcgactcatgtctggtaagcaggctgccgccatcatcaaggccgtggacagcaaatatactgccatccccatcgtggggcaggtgttccagagccactgcaagggttgcccgagcctgtcggagctgtggcgctcaacccggaagtacctccaacctgacaatctgtccaaggccgaggctgtcagaaatttcctggcgtttatacagcatctgaggactgctaagaaggaggagatcctccaaatcctcaagatggagaataaagaggtcctgccgcagttggtggacgcggtgacttcggctcaaacttcagactcgctcgaagcaattctggattttcttgactttaagtctgactcatcgatcattctgcaagaacggttcctgtacgcgtgcggctttgcgtcgcatccaaacgaagagctgctccgcgcccttatctcaaaattcaagggcagcatcgggtcgtcagatatccgggagactgtcatgatcataactgggactctggtgcgcaagctctgtcaaaatgaaggctgtaaattgaaggcggtggtggaggctaaaaagctcatcctgggaggactcgaaaaagctgagaagaaggaagatacgcggatgtacctccttgctctgaagaacgccctgctgcctgaagggatcccatcactgctcaagtacgccgaggcgggcgagggtccaattagccaccttgccactaccgcactgcagcggtacgacctcccgttcattactgatgaagtgaagaaaaccctgaaccggatctaccaccagaaccgcaaagtgcacgaaaagacggtgcgcactgcggctgcggccatcatcctgaacaacaatccgtcgtacatggatgtgaagaatatcctcctcagcatcggagaattgcctcaggaaatgaacaaatacatgctggcaatcgtgcaagacatcctccggttcgaaatgccggcgtccaaaatcgtgcggcgggtcttgaaggagatggtcgctcataactacgacagattctcgaggagcggttcatcatccgcgtacactggatacatcgaaaggagcccgcgaagcgcatcaacttactcactcgatatactttactcgggttcgggaatcctgaggcgttctaatctgaacatttttcaatacatcggtaaggctggcctgcacggctcgcaggtcgtcatcgaagctcagggactcgaagcactcatcgctgcgactccagatgaaggggaagaaaatctggactcgtacgcaggaatgtcggcgatcctctttgatgtgcagctgcggcctgtgaccttcttcaatggatactcggaccttatgtcgaagatgctcagcgcgtccggagatccaatttctgtcgtgaaggggctgatcctgctgatcgaccattcgcaggagttgcaactgcaatccggactcaaggccaacatcgaggtgcaagggggcctcgcgattgatatctccggcgccatggagttcagcctctggtaccgggaatcaaagactagagttaaaaacagagtcacggtggttatcaccactgacatcaccgtggactccagcttcgtcaaggccggtctggagacttccaccgaaactgaagcaggactcgaattcatctcaaccgtgcagttctctcaatacccgttcctcgtttgcatgcagatggacaaagacgaggcgccattccgccaatttgagaagaagtacgagaggctgtcgaccggtcggggatacgtcagccaaaaacgcaaggagtcagtgctcgccggctgcgagttcccgctgcatcaagagaactcggagatgtgtaaggtcgtgttcgccccacagcctgacagcacctcgtcggggtggttt

SEQ ID NO: 16770 - DNA, 2682 bp, synthetic construct
  misc_feature 1..2682: note = source = /note="Description of Artificial Sequence: Synthetic coding sequence"
  source 1..2682: mol_type = other DNA
atgatcttactggccgtgttattcctgtgcttcatctcatcctacagtgctagcgtgaagggtcacaccactggcctttccctcaataacgaccgactgtataaactcacctacagcaccgaagtgctattggaccgcggcaagggcaagctacaggacagcgtgggttacagaatctcttctaacgtagacgtcgcacttctgtggagaaatccagacggagatgacgaccagctgatccagataaccatgaaagacgtcaatgtggagaatgtgaatcagcaacgcggcgagaagtccatcttcaaggggaagtctcccagtaaaatcatggggaaggagaacctcgaggctctgcagagacctaccctgctccacctgattcatgggaaggtgaaggagttttatagctaccaaaatgaagccgtagctatagagaacattaagcgtggtcttgccagcctctttcagacacagctgtcctcaggaaccacgaatgaggtggacatttcaggcaactgcaaggtgacttaccaagctcaccaagacaaagtgataaaaatcaaagctttagacagctgtaagattgcccgcagcggatttactacccccaaccaggttttaggtgtttctagcaaggccacctcagtgaccacttacaaaattgaggactctttcgtgatcgctgtgctggctgaggagactcataacttcggactgaatttcctccagaccattaaggggaagattgtgagcaaacagaagttggagcttaaaacaaccgaggccggcccccgtttgatgtctggtaaacaagctgctgcgattatcaaagcggtcgactcgaagtacaccgccatacccattgtcggtcaggtgttccagagccactgcaagggctgcccatccctgtccgaactgtggcgttcgaccaggaaatacctccaaccagacaatttatcgaaggccgaggccgtacggaatttcctggcttttattcaacaccttcgtaccgccaaaaaagaggagatactgcagatcctgaaaatggaaaataaggaggtcttgcctcagctggtggatgccgtgacatccgcccaaacaagtgacagcctagaagccatcctggacttcctggatttcaagagcgacagcagcatcattcttcaggagagattcctttatgcctgcggctttgcatcccatccgaatgaggagctcctgcgagccctgatttctaagtttaagggttcaataggatcctctgatattagggagactgtgatgattataacaggaacgctcgtcaggaagctgtgtcagaacgagggatgcaaactcaaagcggtcgtggaggccaaaaaactcattctcggtggacttgagaaggctgagaaaaaagaagatacccgcatgtacctactggccttaaagaacgccctcctgccagaagggataccgtcattgctcaagtatgctgaagctggtgaaggccctatcagtcatcttgccaccaccgccttgcagcggtacgacctgcccttcattacagatgaggtgaaaaaaaccctcaaccgcatctaccaccagaataggaaggtgcacgaaaagacggtgcggactgccgctgcagcaatcatccttaacaataaccccagttatatggacgtaaagaatattctcctctcaattggcgaattaccgcaagagatgaataagtacatgttagcaatcgtgcaggatatcctgcggtttgaaatgcccgcatccaagatcgtgaggagggttctgaaggagatggtcgcgcacaactacgataggttcagcagaagcgggagctcttcggcctatactgggtacattgaaagatcaccgagaagtgcctctacctattcactggacattctgtatagcggctccgggattctgcggaggagcaacttgaacatcttccagtatattggaaaagccggtctacatgggtctcaggttgtgatcgaagcccaaggactcgaggccctgatcgctgccacgccagacgagggcgaagagaaccttgactcttatgcaggtatgtctgctatcctgtttgatgtgcaactgcgacccgtcaccttcttcaacggctacagcgacctcatgagcaagatgctgagcgcgtccggtgaccccatttcagtcgtgaaaggtctcatactacttatcgatcacagtcaggaactgcagctccaatccggattgaaagctaacattgaagtgcaggggggcctagcgatagatatcagcggggcgatggagttctccttgtggtaccgggagtcgaagacacgggtgaaaaatagggtgaccgtcgtgatcacaactgatataacagttgacagttccttcgtcaaagcgggcttggagacttccacagagaccgaagctggtctcgagttcattagcacagtccagttcagtcagtatccattcctagtctgcatgcagatggacaaagatgaggccccattccgtcagttcgagaagaaatacgaaagattaagcacagggcgtggctatgtgagccagaaaaggaaggaatcggtactcgccgggtgcgagtttccactccaccaagagaactcagagatgtgtaaggtggttttcgcccctcagcccgactcgacaagttccggctggttc

SEQ ID NO: 16771 - DNA, 2682 bp, synthetic construct
  misc_feature 1..2682: note = source = /note="Description of Artificial Sequence: Synthetic coding sequence"
  source 1..2682: mol_type = other DNA
atgatcctgctggctgttctgttcctgtgcttcatctcctcatactcggctagcgtaaagggacacactactgggctgtcacttaacaatgacagactgtataagctgacttacagcacggaagtgctgctcgatcggggaaaggggaaattgcaggattcggtcggataccggatctcttccaatgtggacgtcgcgctgctgtggcgaaacccggacggagatgatgaccagctcattcagataactatgaaggacgtgaacgtggaaaatgttaatcagcaacgcggcgaaaagtccatcttcaagggaaaatcgccatccaagatcatgggcaaagagaatctggaggcgcttcagcggccgaccctgctgcatctcatccatggtaaagtgaaggagttctactcttatcagaacgaagccgtggccatcgagaacattaagcgcgggctggcctcgctcttccagacccagctctcgtcgggcaccactaatgaagtcgacattagcggtaactgtaaggtgacttaccaggcacatcaagacaaggtcatcaaaatcaaggccttggatagctgtaagatcgcgcgctcaggattcacgaccccgaaccaagtactgggagtgagcagcaaggctacctccgtgactacctacaagatcgaagattcgttcgttatcgccgtcttggccgaagaaacccacaattttgggctgaatttcctccagaccatcaagggcaaaattgtctctaagcaaaagttggaactcaagaccacggaggccggaccacgcctgatgtcgggcaagcaagcagcagcaatcatcaaggccgtggattcgaagtacactgcaatcccgatcgtgggacaggtgttccagtcacactgcaagggctgcccgtcccttagcgagctctggagatccaccagaaagtatctgcagcccgataacctctcgaaagcagaagccgtgcgcaatttcctcgccttcatccagcacctgcgcaccgcaaagaaagaagagatcctgcaaattctgaaaatggaaaacaaggaggtgcttccccaactggtggacgctgtgactagcgcacagacctcggacagcctcgaagccatcctggacttcttggacttcaagagcgactcatccatcatcctgcaggaacggtttctgtacgcatgtggattcgcttcacatccgaacgaagagttgctgagagcgctgatttccaagtttaaaggatcgatcgggtcgagcgacatcagggaaaccgtcatgatcattaccgggactctcgtcagaaagctgtgccaaaacgagggctgcaaacttaaagctgtggtggaagctaagaaattgatcctgggcgggctcgagaaagctgagaagaaggaggacacgagaatgtacctcctggcccttaagaacgctttgctgccagagggcatcccatccctgctgaagtacgcagaggcaggagagggaccaatctcccacctggccactactgcgctgcaacggtacgaccttcccttcattactgatgaggtgaagaaaaccctcaacagaatctatcatcaaaacagaaaagtccacgaaaagactgtgcggaccgcggccgccgcaattatcctcaataacaatccttcctacatggacgtgaagaacatcctgctctccatcggagaactccctcaagagatgaacaagtacatgttggcgatcgtgcaggacatcctcaggtttgagatgccggcctccaagatcgtgcgccgcgtactgaaggaaatggtagcccataactacgatcgttttagtcgctccgggtcatcaagcgcctacactggatacattgagcgctcgccccgctcggcgagcacctactcgttggacatcttgtactcaggttcgggcatcctccggcggtccaacctgaacatcttccagtacatcggaaaagcaggactgcatgggagccaagttgtgatcgaagcccagggactggaagcgttgatagccgcgactcctgacgaaggagaggaaaacctcgattcctacgccggaatgtcggcgattctctttgacgttcaactgcgccctgtgacctttttcaatggctactcagatcttatgtcgaaaatgctgtcggctagcggcgatccaattagtgtcgtgaagggtcttatcctgctgatcgatcactcgcaggagcttcagcttcagtcaggactcaaagccaacattgaagtgcagggagggctcgccatcgacatctcgggagcgatggagttttcattgtggtaccgcgagtctaagacccgggtgaaaaacagggtgaccgtagtcatcaccactgatatcacggtcgactcctcgttcgtgaaggcgggactcgaaacctcgactgagactgaagctggactggaattcatatcgacggtgcaatttagccagtacccgtttctggtttgtatgcagatggacaaggacgaagccccgttccgacaattcgaaaagaagtacgagaggctcagcacgggtcggggatatgtgtcacagaaacggaaggaatccgttcttgccggctgcgagttccctctccaccaagaaaatagtgagatgtgtaaggtcgtgttcgcgccgcagccggattccaccagctccggttggttc

SEQ ID NO: 16772 - DNA, 2682 bp, synthetic construct
  misc_feature 1..2682: note = source = /note="Description of Artificial Sequence: Synthetic coding sequence"
  source 1..2682: mol_type = other DNA
atgatccttttggcagtgcttttcctttgcttcattagtagctactcagcatccgtgaaggggcatacgaccggactgtcactgaacaatgatagactgtacaaacttacgtactcgaccgaagtgcttctggatagaggtaagggaaagttgcaagatagcgtcggttacagaatcagcagcaacgtggatgtggcacttttgtggagaaaccctgacggtgatgacgaccaactgatacaaattactatgaaggatgtcaacgtggaaaatgtcaaccaacagaggggcgaaaagtccatctttaagggtaagtccccatcaaagattatgggaaaggaaaacctggaagcattgcagcggcctacgcttctgcatcttatacatgggaaggtcaaagagttctactcataccagaatgaggcagtcgccatcgaaaacattaagaggggactggcctctctgtttcagactcagcttagctccggaaccactaatgaggtggatatatccggcaactgtaaagtgacctaccaagcacaccaagacaaagtcatcaagatcaaagccctggactcctgtaagattgcaagatcgggattcaccaccccgaaccaggtgcttggtgtatcctctaaggcaacctcggtgacgacttacaagattgaagattcctttgtcattgcagtgcttgccgaggaaactcataactttggactcaattttctgcaaaccattaaggggaagatcgtctcgaaacagaagttggagctgaaaactaccgaggcaggtccacgtctcatgtccgggaagcaagcagcagcaatcatcaaagccgtggacagcaaatacaccgccattcctattgtgggtcaagtgtttcaatcgcattgtaaagggtgcccatccctcagcgagctctggagatccacccgcaagtacctgcagcccgataacctttcgaaagcagaggccgtgcggaattttctggcgttcattcagcatcttcgtactgcaaagaaggaagagatactgcagattctgaagatggaaaacaaagaagtgctgccgcaattggtggatgccgtgacgtctgcacagacctcagacagccttgaggcaatacttgactttttggacttcaagagcgacagctcgatcatccttcaggaacggtttctgtacgcctgtggttttgccagccatcctaacgaagagcttctgagagcacttatctcaaagtttaagggatcaattgggagctccgacatacgggaaactgtcatgataatcaccggaacccttgtccgaaaactctgccagaacgaggggtgcaaacttaaggctgtcgtcgaagcgaagaagctgatcctggggggtctggaaaaggccgagaagaaagaggacacccgcatgtaccttcttgccctgaaaaacgcacttctgcctgaagggattccatcgcttctcaagtacgcagaagcaggagagggcccgattagtcacctggcaaccactgcgctgcaacggtatgatctgcctttcattactgatgaggtcaaaaagaccttgaaccgcatataccaccagaacaggaaagtccacgagaaaacggtgaggaccgcagcggcggccattattctgaataacaaccctagctacatggacgtcaaaaacatcctgctttcaattggagaacttccccaagagatgaacaagtacatgctcgcgatcgttcaagatatacttcgatttgaaatgccagcatctaaaatcgtgagacgcgtgcttaaggaaatggtggcacataactacgataggttttctaggtccgggtcgtcgtcagcttacaccggttacattgaacggtcgcctcggtccgcctcgacttattcgctcgacattctgtacagtggaagcggtattcttcgccgctcaaacctgaacatttttcagtacattggtaaggctggtctgcacggatcccaagttgtgattgaagctcagggcctcgaagctctgatagccgcaaccccggatgagggcgaggaaaaccttgattcctacgccggtatgtccgcaatcctctttgatgttcaactgcgcccagtgactttcttcaatgggtattcagatcttatgtcgaagatgcttagcgcgagcggagatcctatctccgtggtgaagggacttattctgctcattgaccattcccaggaattgcagctgcagtccgggctgaaagccaatattgaggtgcagggcggacttgcaattgacattagcggagcaatggaattctcactttggtacagagagtcaaagactcgcgtgaagaacagagtgaccgtggtcatcactaccgacataaccgtggactcttcgtttgtcaaggctggcctcgaaacctccacggaaaccgaggcaggcctggagttcattagcactgtccaattctcacaatacccatttcttgtgtgtatgcagatggataaggatgaagccccatttcgtcaatttgagaagaagtacgaacggttgtccactggccgaggttacgtctcccagaagcgcaaagagagcgtccttgccggatgcgaatttcctctgcatcaggaaaacagcgagatgtgcaaggtcgtgtttgctcctcagcctgattctacctcatccggttggttt

SEQ ID NO: 16773 - DNA, 2682 bp, synthetic construct
  misc_feature 1..2682: note = source = /note="Description of Artificial Sequence: Synthetic coding sequence"
  source 1..2682: mol_type = other DNA
atgatcctgctcgcggtgctgttcctgtgctttatctcttcttactcggcatcagtgaagggacatactactggcctgtcgctgaataatgatcgtctgtataagttgacgtactccaccgaagtgcttcttgacagaggaaagggtaaactccaagatagtgtgggttaccgtatttcgtcgaacgtcgatgtcgcattgctttggaggaaccccgacggagatgatgatcaactgattcagatcacgatgaaggacgtaaacgtggaaaacgttaaccagcaacggggcgaaaagtccatattcaagggaaagagcccttcaaagatcatgggcaaagaaaacctggaagcactccagaggccgactttgcttcatcttattcacgggaaggtgaaggagttttacagctaccaaaatgaggccgttgcgattgaaaacataaaacgagggctggcaagcctgtttcagacgcagctttcatccgggaccaccaacgaagtggacatttccggcaactgcaaggtaacctaccaagcacatcaggacaaggtcataaagattaaagctctggattcatgtaagatcgcccgctcgggcttcaccaccccaaatcaagtgctcggagtcagctcgaaggcgacctccgtgactacctacaaaatcgaggactcctttgtcattgccgtcttggctgaagaaactcacaatttcggacttaactttctgcagactatcaaggggaaaattgtcagtaagcaaaagttggagcttaaaacgaccgaagcaggaccccggctgatgtccgggaagcaggcagcagccataatcaaagcagtggatagcaagtacactgccattcccatcgtgggtcaggtctttcagtctcactgtaaaggatgtccctctctgtcggaattgtggagatcaacgcggaaataccttcagcctgataatctcagtaaggcagaagcagtccgcaactttctcgcatttatccaacaccttagaaccgcaaagaaggaggaaattcttcaaattcttaagatggagaataaggaggtccttccacaactcgtggatgcagtgacctccgcacagaccagcgactctctggaagcaattcttgattttcttgactttaagtcggattcatcgattattctgcaagaaaggttcctctacgcctgcggttttgctagccatccgaacgaagagttgctgagagctctgatctcgaaattcaaagggtcgataggttcctccgatattcgggaaactgtgatgataatcactggcacgctggtgcgtaaactttgtcaaaatgaaggctgcaagctcaaggctgtggttgaggcgaagaaactgattcttggcggattggagaaggccgaaaagaaagaggacacgagaatgtacctgctcgcgctcaagaatgctcttctcccagaaggcattccatcccttttgaagtacgcagaggcaggagaagggccaattagccatctggcaaccactgcactccagcgctacgatctgccattcatcactgacgaggtcaagaaaaccctgaaccgaatttaccatcaaaatcggaaggtgcacgaaaagaccgtgcgtaccgccgccgctgccatcatattgaacaacaatccaagctacatggacgttaagaacattctgctttccatcggagaacttccgcaagaaatgaacaaatacatgttggcgatagtccaggatattctccgatttgagatgcctgcatctaagatagtgcggagagtgcttaaagaaatggtggcacataactatgataggttttcgagatccggttcatcatccgcatacactggatacatcgaacgctctcccaggtcggcttccacttactcgttggacatcttgtacagcggaagcggaattcttcggagatcgaacttgaacatttttcagtatattggtaaagccggactgcacggatcccaggtggtcattgaagcacaaggacttgaagcacttattgccgccactccggacgaaggtgaggagaatcttgattcgtacgcaggtatgtccgcgatcctgtttgacgtacaactccgaccagtcaccttctttaacgggtatagcgatctgatgtcgaaaatgctttcggcgtcaggtgatcccatctcggtggtcaagggccttatcctcctcatcgatcattcacaagagctgcaacttcagtcgggcctcaaggcgaatatagaagtccagggaggactggcaatagacatctcgggtgcaatggaattttcgctgtggtaccgcgagagcaagactagggtgaaaaaccgcgtgactgtggtgattactaccgatattacggtggacagttcattcgtgaaagcaggactggaaacttcgaccgaaaccgaggcaggtcttgagttcattagcactgtccaattttcgcaatacccttttctggtgtgtatgcaaatggataaggatgaggcgcctttccgacaatttgagaagaaatacgaaagactgtccactggtcgcggctacgtgagccagaagcggaaagagtcggtgctcgcaggttgtgaatttccactgcatcaagaaaatagcgagatgtgtaaggtggttttcgccccacagcctgattcgacctcatccggatggttc

SEQ ID NO: 16774 - DNA, 2682 bp, synthetic construct
  misc_feature 1..2682: note = source = /note="Description of Artificial Sequence: Synthetic coding sequence"
  source 1..2682: mol_type = other DNA
atgattctgcttgcggttctctttctgtgttttatatcctcctactccgcatctgtaaaaggacacaccactggcttgtcccttaataatgatcgactatataaattaacatattctacagaagttcttctggatcggggaaagggaaaactgcaagattcagtcgggtatcgtattagctctaatgttgatgtggcattgttgtggcgtaacccggatggagacgatgatcaactcattcagataactatgaaagatgtaaacgtcgagaatgtgaatcaacaacgaggcgaaaaatctatttttaaaggcaaaagtccatctaaaatcatgggcaaagagaacttggaagccttacagagacctacactgttgcatctcatacacggtaaagtcaaggagttctactcataccagaacgaggccgtagcgattgagaatattaaaagggggctggcttccctgttccagacgcaattgagttctggtacgacaaacgaagtagatatttccggtaattgtaaagtgacgtaccaggcgcatcaggataaagtcatcaaaatcaaggccctcgattcttgcaaaattgcgcgtagcggctttaccacacctaatcaggtgctcggagtttcgtcgaaagctacaagtgttacgacatataaaattgaagactcgttcgtaatcgccgtactcgcagaagaaacgcataattttgggctaaattttttacaaacgatcaaggggaagattgtaagcaagcaaaaattagaactgaaaacaaccgaggctggcccgagactcatgtcgggaaaacaagcggcggcaattatcaaggcagttgattctaaatatacggcgattcctattgtcgggcaagtcttccagagccactgtaagggttgcccttccctgtcagaattgtggcgctcaacgagaaaatatttgcagccggataatctgtctaaggcagaagcggtacgcaatttcttggcgtttattcaacacttgcgcactgcaaaaaaagaggagattttgcaaattcttaaaatggagaataaggaagttctgccacaactggtagatgcggtgacatcggcacagacgtcggattcattggaagctatccttgattttttggacttcaaatctgactcgtctatcatcttacaagagcgtttcctgtatgcatgcggcttcgcgagccatccaaacgaagaactgttacgtgcattaatttcaaaattcaaaggatcgattggatctagcgacatcagagagacggtgatgatcattactggcacccttgtcagaaagttgtgccaaaatgaaggttgtaaactgaaagcagtcgttgaagctaagaaactcatcttgggcggattagaaaaagccgagaagaaggaagatacacgtatgtatttactggctttaaaaaatgcgcttctgcctgaaggcattccttcattacttaagtatgcggaagctggcgagggaccgattagccacctcgcaacaacagccttgcagcgttacgaccttccattcattacggatgaagtcaaaaagacgctcaacagaatttaccatcaaaatcgcaaagtccatgaaaaaacagtgagaacggctgcggcagcaatcatcttgaataacaatccctcgtatatggacgtgaaaaacattcttttaagcattggcgaactgcctcaagagatgaataaatatatgctggcgatagtgcaagatattcttcgatttgaaatgccggcatctaaaattgttcgaagagtcctgaaggagatggtggcacataattatgacagattttctagaagtgggtcatccagcgcgtacacaggttatattgaacggagcccgagatcagcttcgacctattctctggacatactttatagcggatccggaattctgagaagatccaatcttaatatttttcaatacattggaaaggcaggcttgcacgggtcacaagttgtaattgaagcacagggacttgaagctcttatagccgcaacacctgatgaaggagaagaaaatctggattcttatgctgggatgtccgctatcctttttgatgtccagcttcgtccggttactttctttaatgggtattccgatttgatgagcaagatgctgagtgcgtccggagatccgatttcggtggttaagggcttgattcttctgattgaccacagccaagagctacagttgcaatccggtttgaaggccaatattgaagttcaaggcgggctggcgatcgatatctcaggtgccatggagttctcgttgtggtatcgagagagtaaaactcgtgtgaaaaatagggttacggtcgttatcacaacagatatcacggtagattcttcttttgttaaagcaggcctcgaaacatcaaccgaaacagaggccggactggaatttatctcaacagtgcagttttcacaatacccatttcttgtgtgcatgcagatggacaaggacgaggcgccgtttagacagtttgagaaaaaatacgaacgactgtctacgggaagaggatatgtaagccaaaaaagaaaagaaagcgtcttggccgggtgtgaattccctcttcaccaagaaaattctgagatgtgcaaagtggtttttgcaccacaaccggattcgacttcttcaggttggttt

SEQ ID NO: 16775 - DNA, 2682 bp, synthetic construct
  misc_feature 1..2682: note = source = /note="Description of Artificial Sequence: Synthetic coding sequence"
  source 1..2682: mol_type = other DNA
atgatacttctagccgtgcttttcctatgcttcatctcctcatacagcgcttcagtgaaaggccacacaacaggactctcattgaacaacgaccgcctgtacaagctgacgtattcgaccgaggtccttcttgatcgtgggaagggcaaactccaggactccgttggatatcgcatttccagtaacgtggatgtggcacttctgtggaggaacccagatggcgatgatgatcagttgatccagataacgatgaaggacgttaatgtcgaaaatgttaaccagcagaggggcgaaaagtcaatcttcaagggcaaaagcccttctaaaattatgggaaaagaaaatctggaggccctccagcgcccgacacttttgcatctgatccatggaaaagtgaaggaattctattcatatcaaaatgaggccgtagcgattgaaaacatcaagagagggctagctagcctcttccagacacagctgagcagcgggaccaccaacgaagtggatataagtggcaactgtaaggtgacctatcaggctcaccaggataaagtcataaaaatcaaggccttggattcttgtaagattgcacggagcgggttcaccactcccaatcaagtcctgggagtgtccagtaaagccactagcgttacgacttacaaaatagaggattcgttcgttatagcagtgctcgccgaggagactcataattttggcctaaacttcctccagactattaagggaaaaattgtgtccaagcagaaactggagttgaagaccactgaggctgggcccaggctgatgtccggcaagcaggctgccgctataattaaggccgtggactctaagtacaccgctatacccatcgtaggccaggtgttccagtcccactgtaaaggttgcccctctctgtccgaactttggagatctactaggaagtacctgcagcctgacaacctcagcaaggctgaggctgttcgaaatttcctggcattcatccagcacctgcggacagctaaaaaggaagaaatcctgcagatcctgaaaatggagaacaaggaggtcctcccccagctcgtggatgctgtgaccagtgctcagacaagcgattccctcgaggccattctggactttttggacttcaaatcagatagttccataatactccaggaacggtttctgtacgcttgcggctttgccagtcacccaaacgaggaacttctgcgcgccttaatctccaagttcaagggcagtataggcagcagcgatattcgagaaactgttatgattatcaccggaaccctcgtcagaaaactctgtcaaaacgagggatgcaaactgaaggcagtggttgaagcaaagaagctgatcctgggcggccttgaaaaggctgaaaagaaagaagatacaaggatgtacctactggcactgaaaaatgccctattgcccgaagggatcccctcactcttgaaatatgccgaagccggagaggggcctatctcgcacctcgccactaccgctctgcaacgatacgatctgccatttatcactgatgaggttaagaaaaccctgaatcggatataccaccagaatcggaaggtgcatgaaaagaccgtaagaactgcagcggctgccatcattctgaacaacaacccctcatacatggacgtcaagaacattctgctctcaataggcgaactacctcaagagatgaacaaatacatgcttgccattgtgcaagacattttgaggttcgaaatgcctgcgtctaagatcgtccgccgtgtcctgaaagagatggtggcccacaattatgaccggttttcacgctctgggtctagctcggcgtataccggatacatcgagagaagcccacgtagcgcctcgacctacagcctggacatcctgtacagcggtagcggaatcttgcgccgctctaatctcaatatctttcagtacatagggaaagcaggcctgcacggttcacaagtcgtaattgaggctcaggggctggaggctcttatcgccgccacccccgacgagggcgaggagaatctggattcttacgctggtatgagtgcgatcctcttcgacgttcagcttaggcccgtgacttttttcaatggatattcagatctgatgagcaaaatgcttagcgctagcggtgaccctatcagcgtagtgaaaggcctcatcctattgatcgaccactctcaagagctgcagttgcagagcgggctcaaggctaatatcgaagtgcagggcggactggccatcgatataagcggtgcgatggagttctcactgtggtatagggagtctaaaactcgcgtgaaaaacagggtaactgtggttattacgaccgatatcaccgtggattcctccttcgtgaaagcaggattggagacaagtaccgagaccgaagctggcctggagttcatcagtacagtgcagttttctcaatatccttttctggtgtgcatgcaaatggacaaagacgaggcaccctttaggcagtttgaaaaaaagtacgagaggctgtctacaggtcgcggatacgtgtctcagaagaggaaagagtccgtgctggctggctgtgagttccccttgcaccaggagaactctgaaatgtgcaaagtcgtttttgccccccaacccgactcaacatcctctggctggttc

SEQ ID NO: 16776 - DNA, 2682 bp, synthetic construct
  misc_feature 1..2682: note = source = /note="Description of Artificial Sequence: Synthetic coding sequence"
  source 1..2682: mol_type = other DNA
atgattcttcttgcagtgctctttctttgtttcatctcctcatactcagcgagcgtcaaaggtcacaccaccgggctcagcctgaacaacgatcgcctttacaaattgacctactcgactgaagtgctgctggatagaggtaagggaaaactccaggactccgtcggttacagaatctcgtccaatgtcgacgttgcgcttctttggcggaatccagatggagacgatgaccagctgatccagattaccatgaaggatgtgaatgtggaaaatgtgaaccaacagcggggcgaaaagtccattttcaaaggcaaaagcccttcgaagattatgggaaaggaaaaccttgaggcgctccaaagacctactttgcttcatttgatacatgggaaggtgaaggagttctattcctaccaaaacgaagcagtcgcaatcgaaaacataaaacggggactggcatccctgttccaaacccagctgtcgtccggaactactaacgaagtcgatatctcaggaaactgcaaggtcacttaccaagcccatcaagacaaggtcatcaaaatcaaggcactggattcctgtaagatcgccagatcgggattcactactcctaaccaggtgctgggagtctcgtcaaaggcaacttctgtgaccacgtacaagattgaggactcgtttgtgatcgcagtgcttgcggaggagactcacaactttggactgaatttcctgcaaaccatcaaaggtaagattgtgtcgaagcaaaagctggagctgaaaacgaccgaagcaggtcctcgccttatgtccggaaagcaagccgctgccattatcaaggctgtggattcaaagtacacggcgattcctattgtgggtcaagtgttccaatcgcattgtaaagggtgcccctccctttccgagctctggagatccacccggaaataccttcaacccgataatctgtcgaaagcagaagccgtccggaactttctggcattcatacagcatcttagaactgccaagaaggaagaaatacttcagattctcaagatggagaacaaagaggtcctccctcaactcgtggacgctgtgacctccgcacaaacctcggactcactcgaagcgatcctcgatttccttgatttcaagtcagattcaagcataattctccaggaacgttttctgtacgcatgtggatttgcatcacatcccaatgaagaactcctgcgggcacttatatcgaagttcaaaggaagcattggatcgtcagatattagagaaactgtgatgatcataacggggacgctggtgagaaagctctgccagaatgaaggatgcaagctcaaggcggtggtcgaagcaaagaaacttattctggggggtcttgagaaggccgagaaaaaggaagatacccggatgtacttgcttgccttgaagaacgccctccttcctgagggtatcccttcgttgctgaagtacgcagaagctggagagggtccaattagccatctcgcaaccactgcccttcaacggtacgacctcccttttatcaccgacgaggtgaagaaaaccctcaatcgtatttaccatcaaaaccgtaaggtgcatgaaaagaccgtcaggactgcggcagccgcaattatcttgaataacaaccccagctacatggacgtgaaaaacatccttctgtcaataggcgagctcccccaggaaatgaataagtacatgcttgccatagtgcaagatatccttcgctttgaaatgcctgcttccaagattgtgcggcgtgttctgaaggaaatggtcgctcacaattacgataggttctccagatcgggtagctcgtcagcatacaccgggtacattgaaaggtcgccgcgctcagcaagcacctactcactggatattctttactcgggatcggggattctgagacgatcgaatctcaatatctttcagtacatcggcaaggccggattgcacggatcgcaggtcgtgattgaagcacagggacttgaagcccttatagcagcaactcctgatgaaggagaggagaaccttgattcctacgcggggatgtcggctattctttttgatgtgcagcttcggccagtgacgttctttaatggatactccgacctgatgtcgaaaatgctgtcagcatcaggggaccccatatcggtggtgaagggcttgattctgctcattgaccactcgcaagagctccagctgcaatcggggctgaaggccaacattgaagtgcaaggaggattggcaattgatatcagcggagctatggaattttcgctgtggtaccgggaatccaagacccgggtcaagaaccgtgtgactgtcgtaatcaccactgatattactgtggacagttcatttgtcaaggcagggctcgaaacttccacggagactgaagccggacttgaattcatttcaactgtgcagttttcgcagtacccctttcttgtgtgtatgcaaatggacaaagatgaggcgccttttaggcagtttgaaaagaagtatgaaaggctttccactggtcgcggctacgtctcgcaaaagcggaaggagagcgtcctggccggatgtgagtttcctctccaccaggaaaattccgaaatgtgtaaggtggtgtttgcaccacaacccgactcgacctcaagcggatggttc

SEQ ID NO: 16777 - DNA, 2682 bp, synthetic construct
  misc_feature 1..2682: note = source = /note="Description of Artificial Sequence: Synthetic coding sequence"
  source 1..2682: mol_type = other DNA
atgattctcctggctgtgctgtttctgtgttttattagctcttatagcgccagtgtgaaagggcatacgaccggtctttccttaaacaatgaccgcctgtacaaattaacttattcaacagaagtactgctagatcgaggaaagggaaaattgcaggacagcgtgggctatagaataagctccaatgtggatgtagccctgctgtggagaaaccccgatggcgatgacgatcagttgatccaaataactatgaaagacgtcaacgtggagaacgtgaaccaacagcggggtgagaaatcaatcttcaagggcaagtcgccatcaaaaatcatgggcaaggaaaacctggaagccctgcaacgacccaccctgctccatctgatccacggcaaggtgaaagagttctatagctatcagaacgaagctgtggcaattgagaacatcaaaagggggctcgcctctctcttccagacacaactgtcatccggtaccacaaatgaagtggacatttctggaaattgcaaagtgacatatcaggcgcaccaagacaaagtgattaagattaaggcactcgattcttgcaaaatcgctagatccggctttactaccccgaatcaagtcctcggagtgagttccaaggccacctccgtcaccacatataaaattgaggattccttcgtgatagctgtgctagcagaggagacccacaatttcggcttaaatttcctgcagaccattaagggaaagatcgtttctaagcaaaaactggagttgaagaccactgaggctgggcctcgattgatgtccggaaagcaggcagcggccataattaaagccgttgattcgaaatacacagccattccgattgttggccaggtgttccagtctcactgcaagggctgcccttcactctccgaactctggaggtcaaccagaaagtacctccagcctgacaatctttctaaggcggaagctgtgagaaactttctggcttttatccaacatctgaggacagcaaagaaggaagagatcctgcagatacttaaaatggaaaataaagaggttttgcctcagctcgtcgatgcggtgacttcagcgcagaccagcgactctctcgaggcaatcctggacttcctcgattttaagtctgattcttctataatccttcaagagcgtttcttatacgcttgcggcttcgcgagtcacccaaatgaggagctattacgggccctgatttcaaagtttaaaggatctatcggcagttcagacatacgggagacagtgatgattataacaggaacccttgttcgcaagctttgtcagaatgagggttgtaagctaaaggcagtggtagaggctaagaagttgatcctgggaggactggaaaaagccgagaagaaggaggacacccggatgtatctcctagccctcaagaacgccctgttgccggagggtattccttcattgctcaagtatgctgaggctggcgaaggtccgatctcacatttggctaccacggctctgcaacgatatgacctaccttttataacagatgaagtcaaaaaaacactgaacagaatctaccaccagaatagaaaggttcacgaaaagacagtgaggaccgcagctgccgccatcattcttaataacaacccatcttatatggatgtgaagaatattctgctgtcaataggcgaattacctcaagagatgaataagtatatgctagcaatcgtccaagacattctgcgttttgagatgccagcatctaaaatcgtccgaagagttctgaaagagatggtagcgcataattatgaccgctttagccgatccggctcgagtagcgcatacaccggctatatagagcgaagtccccgtagtgcatcaacttactctctcgatattctctacagcggttcagggatactgaggaggtccaatctcaacatttttcaatacattggcaaggccgggctgcacgggagccaagtggtgatagaggcccagggcctcgaagcgctgatcgctgcaacgccagatgaaggagaagagaatttggattcttacgctgggatgtcggccatactgttcgatgttcaattgcgccccgttaccttcttcaacgggtacagcgatctgatgtctaagatgttatccgctagcggcgaccctatctcagtggtaaaaggcctgatactacttatcgatcattcgcaggagcttcagttgcagtcagggctgaaagctaatatagaagtacagggcgggttggccatcgatatttccggggcgatggagttcagtttatggtatcgggagtccaagacacgagtaaaaaacagagtgaccgtggtcatcactacagatattaccgttgattcttcgttcgtcaaggccggattggagactagcactgagactgaagccggactggaatttatcagtaccgttcagttttcccagtacccattcctcgtctgtatgcagatggacaaggatgaagcccccttccgacaatttgagaaaaaatacgagcgtttgtcgacgggccgcggttatgtttcccagaagcgcaaggaaagcgtactggctgggtgtgagttcccactccaccaggaaaacagcgaaatgtgtaaagtggtcttcgctccccagccggactctacttccagcgggtggttc

SEQ ID NO: 16778 - DNA, 2682 bp, synthetic construct
  misc_feature 1..2682: note = source = /note="Description of Artificial Sequence: Synthetic coding sequence"
  source 1..2682: mol_type = other DNA
atgatcctgcttgcagtgctgttcttgtgctttatctcctcctactccgcttcagtcaagggtcatacgacgggattgagcctgaataacgaccgcctgtacaagttgacctactcaactgaagtcctgctcgaccgcggaaaggggaagctgcaggattccgtcggatacaggatctcctccaatgtggatgtggctctgctgtggcggaacccagacggtgacgatgaccaactcattcagatcactatgaaagacgtcaatgtggagaacgtgaaccagcaacgcggagagaagtcgatcttcaagggaaagtcgccaagcaagatcatggggaaggaaaacttggaagcgctgcagcggcctaccctgctccatctgatccatggaaaagtcaaggaattctactcgtaccagaacgaagcagtggccatcgagaatatcaagcgcggattggcctcccttttccagacccagctgtcgtccgggaccactaacgaagtcgacattagcggcaattgtaaggtcacctatcaagcccaccaagacaaggtaatcaaaatcaaggccctcgacagctgcaagattgcccgctcaggatttaccactccaaaccaggtcctgggagtgtcatcaaaggctacctcggtgactacttacaagatcgaagattccttcgttatcgccgtcttggcagaggaaacgcataacttcggactgaacttcttgcagactatcaagggaaagatcgtgtcaaaacaaaagctggaacttaagaccaccgaagcggggccgcggctgatgtcgggaaaacaggctgccgccatcatcaaggccgtggactcaaaatacactgcaatcccgatcgtgggccaagttttccagtcgcattgtaagggctgcccttcactgtctgagctgtggcggagcaccagaaagtacctgcagcccgataatctgtccaaagccgaagcagtccggaatttcctggccttcatccagcacctccgcaccgcaaaaaaggaagagatcctgcaaatccttaagatggagaataaggaagtcctgccgcagctcgtggacgctgtcacgagcgcacagacttccgattcactcgaagccatcctcgatttcctcgacttcaaatcggactccagcattatcctgcaagagaggttcttgtacgcgtgcggtttcgcgtcccaccctaatgaagagcttctgcgcgccctcatctcaaagtttaaaggatcaatcggctccagcgacatcagagaaaccgttatgattatcactggaactctggtgcgcaagctctgccagaatgagggttgcaaactgaaggctgtcgtcgaagccaaaaagctgatcctgggtggtttggaaaaagccgagaagaaggaagatacccgtatgtacctcctcgccctcaagaacgcactgctgccggagggaattccaagcctcctcaaatacgccgaggctggcgagggaccgatctcgcatctggctactacggccctgcaacggtacgacctcccattcatcactgatgaagtgaagaaaacgttgaatcggatttaccaccaaaaccgcaaggtgcacgaaaaaaccgttcggaccgctgcggccgcaatcatcctcaacaacaatccctcgtacatggatgtgaagaacatactgctgagcatcggagaattgccgcaggagatgaacaagtacatgctggcaatcgtgcaagacattcttagattcgagatgccagcgtcgaagatcgtccggcgggtcctgaaagaaatggtggcccacaattatgaccggttttccaggagcgggagctcttcagcctacaccggatacatcgaaagatcacctcgctcagcatcgacttacagcctcgatatcctgtacagcggttccggaatcctccgccggagcaacctgaacatttttcagtacattggaaaggccggcctgcacggctcccaagtggtgatcgaggcccaaggtctggaggcgctgatcgcagccaccccggatgagggcgaagaaaacctggattcgtacgccggaatgtcggcgatccttttcgacgtgcaacttaggcccgtgactttcttcaacggatacagcgatttgatgtcgaaaatgctgtcggcgagcggtgatccaatctcggtggtgaaaggtttgattcttctgatcgatcattcgcaagaactgcagttgcaatctggattgaaagccaacatcgaggtacaaggtggtctggccatcgatatctcaggagcgatggagttctccctgtggtacagggagtcaaagacccgagtcaaaaacagagtgaccgtggtgatcactaccgacatcaccgtggattcgtcattcgtcaaagccgggctcgagacttcaacggaaaccgaagccgggctggaattcatctccactgtgcaattttcacagtacccatttctggtgtgcatgcaaatggacaaggatgaggccccgttccgccagttcgaaaagaagtacgaaagactgagcactggccgcggttacgtcagccagaaacgcaaggaatccgtgcttgccggctgcgagttccccctccatcaggaaaattcggaaatgtgcaaggtcgtgttcgccccgcagccggatagcacctcgagcggctggttc

SEQ ID NO: 16779 - DNA, 2682 bp, synthetic construct
  misc_feature 1..2682: note = source = /note="Description of Artificial Sequence: Synthetic coding sequence"
  source 1..2682: mol_type = other DNA
atgattctgctggccgttttgttcctctgtttcatcagtagctattctgcaagtgttaagggtcataccacagggctgtccctaaacaatgatcgactatacaagctgacatacagcacggaggtgcttctggaccgaggcaaagggaaactgcaggattctgtgggatatcggatctcaagcaatgtcgatgtggccttgttgtggcggaatcccgacggggacgatgaccagctgattcagataactatgaaggacgttaatgtggagaatgtgaaccaacagcgcggagagaaatctattttcaagggcaagtccccaagcaagatcatgggtaaggaaaacctggaagccctacagcgaccgacacttcttcacctcatccacggaaaggtgaaggagttctatagctaccaaaatgaagctgtggccatcgagaatatcaaaagaggcttggcttccttgtttcagacacagctctcctctggcaccaccaacgaagtggatatctccggaaattgtaaggtgacttaccaggcacaccaggacaaggttatcaagataaaagcactagacagctgcaagatcgctaggagcggattcaccactcccaaccaagtactaggggtatccagtaaagccacgtcagtcacgacctataagatagaggacagtttcgtcatcgccgttttggccgaggagacacacaattttggattgaacttccttcaaacgatcaagggcaaaattgtctccaaacaaaaactagagctgaagacgacagaggctggcccaagacttatgtccgggaaacaggctgctgctattatcaaagcggtggactccaaatatactgctatacctattgtgggccaggttttccagagccattgcaaaggctgtccctcactgtctgagctgtggaggagtactcgcaagtacttgcagcccgataacttaagcaaagccgaggccgttagaaacttcctggcatttatacaacatctcagaacagctaaaaaggaggaaatcttacagatccttaagatggagaacaaggaagtgcttccacagttggtggatgccgtgacctctgctcagacatctgacagcttagaagcaattcttgactttcttgatttcaaatcggactccagtataatcctgcaggaacgattcctgtatgcttgtggattcgcatctcatccaaacgaggaattgctgcgagccctgatttcgaaatttaaggggagtattggttcctcagatattagagagacagtcatgataatcacaggcaccctcgtaaggaaactatgtcaaaatgaagggtgcaaactgaaggcggtcgtggaagccaaaaagttaatcctaggaggcctggagaaagcagaaaagaaggaagatacccgcatgtatctgttagcgctgaaaaatgccttgctcccagagggcataccgtcactgctaaagtacgccgaagccggggaaggcccaatcagtcaccttgcgactacagcccttcagcgatacgacctcccctttatcaccgatgaagttaaaaagacactcaaccgtatctaccaccagaaccgcaaggtgcatgagaagacagtcaggaccgctgccgctgcgattattctgaataataaccccagttacatggatgtcaagaatatactcttatcaataggggaactacctcaggaaatgaataagtacatgctggccatcgtccaggatatactgagattcgagatgcccgcttccaagattgtgaggagggttctgaaggaaatggttgcgcacaattacgaccgcttttcccggagtggatcaagttctgcctatactggatacatcgagcgtagccctcggagcgccagcacctactctctggatatcctctacagcgggtcgggaatactcaggcgaagcaatctcaacattttccaatacatcgggaaggcaggcctgcacggctctcaggtcgttatcgaggcccaaggcctagaggctttgatcgccgcgacccccgatgagggcgaggaaaatctcgatagctatgctggaatgagcgctatcttatttgatgtccagctgaggccagtgaccttctttaatggctactcagaccttatgtccaagatgcttagcgcttcaggtgacccaatttcagttgttaaaggcctgatactactcatagaccactcccaggagttgcagctgcagtcggggctgaaggcgaatattgaggtgcagggcggtctggccattgatattagcggtgctatggagttttccctctggtaccgagagagtaaaacacgcgtgaagaaccgcgttacagtggttatcaccacggatatcaccgttgactcctcatttgttaaagcgggacttgagacctctacggaaaccgaggcaggcctggagttcatctcaaccgtacagttttcccaatatccatttctggtttgcatgcagatggacaaagacgaagcaccgttccgccagttcgaaaaaaagtatgagcggctgtctacaggcaggggctatgtgtcccagaaacgaaaagaaagtgtattagccgggtgcgaatttcctttgcatcaggagaattcagagatgtgcaaagtcgtgtttgccccgcaaccggactcaacctcctctggatggttc

SEQ ID NO: 16780 - DNA, 2682 bp, synthetic construct
  misc_feature 1..2682: note = source = /note="Description of Artificial Sequence: Synthetic coding sequence"
  source 1..2682: mol_type = other DNA
atgatcctactggccgtgctgtttctgtgttttatcagcagctacagcgcgagcgtaaaaggtcacaccacaggtcttagccttaataatgatagattgtacaagctcacttactccactgaggtgttgctggatagaggtaagggcaagttgcaggactccgtcggatatcggatatcatccaacgtggacgtggcccttctgtggaggaaccccgacggagatgacgatcagctaatacagattactatgaaggatgtcaacgtagaaaatgtaaaccagcaaaggggggaaaagtccatctttaaagggaagagcccttcaaaaatcatggggaaggagaatttagaagcactgcaaaggccaacactgttgcacctgattcacggaaaggtaaaggagttctatagctaccagaatgaggcggtggcaatcgaaaacatcaagagaggactagcaagtctattccagacccaactgtcttctgggaccacaaatgaagtagacatttcgggaaactgcaaagtcacgtaccaggcacatcaggataaagttatcaaaatcaaggccttggactcgtgcaagatcgccagaagcggttttactacgcctaatcaggtgctgggtgtaagttctaaggccacgagcgtcactacatataagattgaggattcatttgtgattgctgtactcgccgaagagactcacaacttcgggctcaactttctgcagacgattaaaggcaagattgtctccaaacagaagctggagctgaagaccacagaggcgggacccaggctgatgtccggcaagcaggctgctgcgattataaaagcagtcgatagtaaatacacagcaatccctatcgttgggcaggttttccagtcccactgtaagggatgcccttcactgagtgaattgtggagatcaaccagaaagtatcttcagccggacaatctgtctaaagccgaggctgtgcgcaactttctggcattcatacagcacttgagaacagcgaaaaaggaggagatactgcagatcctaaaaatggagaacaaggaggtcctaccccagctagtagacgccgtcacttccgcccagacgagcgactcactagaggccattctcgatttcctggatttcaagtccgactccagtataatcctgcaggagcggtttttatatgcatgtgggtttgcaagtcaccctaacgaagagctgctccgcgccctgatcagcaagttcaagggttcgataggttcctccgacattcgagaaactgtgatgataatcactggtacactggtacgaaagctgtgccagaacgaaggctgcaagctgaaagcagtagtggaagctaagaaacttattctgggtggtctggagaaagcagaaaagaaggaagacacccggatgtatttattggctttaaaaaacgcgttgttgcccgaaggcatccccagcttactaaagtatgccgaagccggggaggggcctatttcgcatcttgcaactacggcgttgcagagatatgacctgccctttattaccgacgaagttaagaagacgctgaacagaatctaccaccagaacagaaaggtccacgagaaaaccgtgaggaccgccgcagcagcgattatcctcaacaataaccccagctatatggatgttaagaacattttgttgtccattggggagcttccgcaggagatgaacaagtacatgctggcaattgtccaggatatcctcagatttgaaatgcccgccagtaagatcgtgcgcagagtgctgaaagagatggttgcccataactatgatagattttcccgctctggctcttcttcggcctacaccggctacatcgaacgtagtccaagatctgccagcacatacagcttggacatcctgtatagtgggtcagggatcctgcgccgttcaaacctcaatatcttccagtacataggaaaagccggtctgcacggaagtcaggtcgtgatcgaagcccagggactggaagccctgatagctgcaacccccgatgaaggtgaggaaaatcttgattcctacgccggcatgagtgccattctgttcgacgtgcagctgagacccgtcactttttttaatgggtatagcgacttaatgagcaaaatgctttctgcctccggggaccctatctcagtagtaaaaggtctgattctcctgattgaccattcccaagagctgcagctgcagtccggcctcaaggcaaacatagaggtgcagggcggcctggccatcgatatctccggagcaatggagttcagtctgtggtatcgcgaaagtaagacacgggtgaaaaaccgcgttacagttgtgattaccacggatattactgtagactcttcctttgtgaaagctggtctggaaaccagtaccgaaaccgaagcagggctggagtttatctctacggtgcaatttagccagtaccccttcctcgtttgtatgcagatggacaaggatgaggccccgttccggcagttcgaaaaaaagtacgaaaggctgtcaacgggccggggttacgttagccagaaaaggaaagagagtgtactcgcaggttgcgagttcccacttcatcaggagaattcggagatgtgtaaagttgtgttcgccccccagcctgactccacgtcctctggctggttc

SEQ ID NO: 16781 - DNA, 2682 bp, synthetic construct
  misc_feature 1..2682: note = source = /note="Description of Artificial Sequence: Synthetic coding sequence"
  source 1..2682: mol_type = other DNA
atgatcctactggccgtgctttttttatgtttcataagctcttactccgccagtgtgaaaggccacacaactggactaagcctcaacaatgaccgcctctataaactgacttactcaacggaggtgttgcttgataggggaaaggggaagcttcaggacagcgtgggttaccggatctcctctaatgtggatgtagccttgctgtggcgcaacccagacggggatgacgaccagctcatccagataaccatgaaggatgtcaacgtggagaacgtgaaccaacagcggggggagaaatcaatttttaagggtaaaagcccttcaaaaattatgggaaaagagaatcttgaggcactccagcggccaacgttattacatctgatacatggaaaggtaaaagagttctacagctaccagaatgaagcggtagctattgaaaatatcaagaggggactcgcatccctgttccagactcagctgtctagtggtactacaaacgaggtcgacataagtggaaattgcaaggtgacgtatcaggcacatcaggacaaggtgataaagattaaggcccttgacagttgtaagatcgccaggagtggcttcacaacgccgaatcaggtgcttggggtgtcctccaaggccacctccgtcacaacatataagattgaagattcctttgtcatagccgtgttagctgaggagacgcacaactttggcctgaactttttgcagaccatcaagggcaagatcgtatcaaaacaaaagcttgagttgaagacaaccgaggctgggccgcggttgatgtcaggaaaacaggctgccgcaataatcaaggcagtggactccaagtacacagcaattccaattgtggggcaggtttttcagtcccattgcaagggctgcccttccctgtcagagctgtggcgttcaacacggaaatatcttcagccagataatctatcaaaagctgaagcggtgcgcaacttccttgcttttatccagcatttgaggacggccaagaaagaagagattctccagatcttgaaaatggagaataaagaagttttacctcagctcgtcgacgcagtcaccagcgcacagacctcagactctctcgaggccattcttgattttctcgattttaagtctgatagcagcatcattctgcaagagaggttcctgtacgcatgtgggttcgcctctcacccaaatgaggagctgctgagggcactgattagtaagttcaaggggagtatcggctcgtcggacattcgggaaacagttatgatcataactgggacgctcgtaaggaaactatgccagaatgagggatgcaaactgaaggcggtggtcgaggcaaagaaactgattctcggtggccttgaaaaggccgaaaagaaggaggatacacgcatgtacctgttggcgctgaaaaatgctttgctcccagagggcatcccaagcctcctgaagtatgctgaagcaggtgaggggcccatcagccacttggctacgactgctcttcagcgctacgatttgccctttatcaccgacgaggtcaagaagaccctaaacagaatctatcatcagaacaggaaggtgcatgagaagaccgtcagaacagccgctgccgcgatcatcctcaacaacaaccctagctatatggacgtcaagaatattctcctgagcattggggagctgccccaagagatgaacaaatatatgctcgccatcgttcaggacattctgcgattcgagatgcccgcatcgaagatcgtgagaagggtcctgaaagagatggtggcacataactatgaccggttctccagatctggcagctcctcagcgtacacaggatatatagagcgtagcccgcgttctgcatcaacgtactctctggatatactttattccgggtctggcatcttgcgtcgttctaatcttaatatctttcagtacatcggaaaagcaggactccacggttcacaggtagtcatcgaggctcagggactcgaagctcttattgctgctacaccagacgagggggaggagaatttggatagctacgcagggatgtcagccatcctcttcgatgtgcaactcagaccggttaccttcttcaatggctactctgatctaatgagcaaaatgttatctgcatcaggcgaccctatttctgttgtaaagggactgatcctgctgatcgaccattcccaagagctgcagctgcagtctggactgaaagccaatatcgaggttcagggggggctggcaattgacattagtggagcaatggaattctcactctggtatcgggagagcaaaaccagagttaaaaatcgagtgacagttgtcattactaccgacataaccgtagactcttcctttgtgaaagccggactagagacttctacagagaccgaagccggactcgaatttatttcaacggtacagttttctcagtacccattcttggtgtgcatgcagatggataaagacgaggccccattccggcaattcgaaaaaaagtacgagcgcttgagcaccggccgcggctatgtatcccagaagaggaaagaatcggtactcgcaggatgtgagtttccattacaccaggagaactccgagatgtgtaaagtggtttttgccccccagccagacagcacatcgtccggctggttt

SEQ ID NO: 16782 - DNA, 2682 bp, synthetic construct
  misc_feature 1..2682: note = source = /note="Description of Artificial Sequence: Synthetic coding sequence"
  source 1..2682: mol_type = other DNA
atgattcttctggccgtgctttttctttgtttcatttcttcctactcggcatcagtgaagggccatacgaccggactgtcacttaacaatgatcgtctctacaaactcacctacagcaccgaagtgcttcttgatagaggtaaaggcaaactccaagactctgtcgggtaccgcatctcctcgaatgtggatgtggccctcctttggcgcaatccagacggtgatgacgaccagctgattcaaattacgatgaaagacgtcaatgtcgaaaacgttaatcaacaaagaggagaaaagtcgatcttcaagggtaagtccccttcgaagataatgggcaaggagaatcttgaagcactccagcggcctaccttgctgcacctgattcatggcaaagtgaaagaattctactcctaccagaacgaggctgtcgcgattgaaaacatcaagcggggactggcatcgctcttccaaacccagctttcatcgggaactaccaacgaggtcgatatctccggcaattgtaaagtgacctaccaagcacatcaggacaaggtcattaagataaaagcacttgattcctgtaagattgccagatccggatttactaccccaaaccaggttctcggtgtgtcatcaaaggcaacgtccgtcactacttataagatcgaagattcgttcgttatcgcagtccttgccgaagagactcacaatttcggtctgaatttccttcagactatcaagggaaagattgtcagcaagcaaaaacttgagctcaaaaccaccgaagcgggtccacgactgatgtcaggtaagcaagccgcggcgattatcaaagcagttgattcaaaatacactgccatccctatcgtgggtcaagtgtttcagtctcactgtaaaggatgcccatcgctttcggagctttggcggtcgacgcggaaatacctgcagcccgataacctgagcaaagctgaagccgtcagaaacttcctggcatttatccagcacctgaggaccgcaaagaaggaagaaatcttgcaaatcctgaagatggagaacaaagaagtgcttcctcagttggtggacgcagtgacttcagcccaaacctcggatagcctggaggctatcctggattttctggactttaagtccgactcgtccattattctgcaggaaagattcctttacgcctgtggttttgcatcgcatcccaacgaggaactcctcagggcccttattagcaagttcaaggggagcatagggtcgtcagatatacgtgaaacggtgatgattatcactggaaccctcgtgaggaagctgtgccaaaacgagggttgcaagctcaaggcagtggttgaggcgaaaaaactgatcctgggcggccttgaaaaagctgaaaagaaagaggacacccggatgtatttgctggcgcttaagaacgccctgctcccggaaggaataccttccttgcttaagtacgcagaagcgggtgaaggtcccatttcgcatcttgcaaccaccgcgcttcagcggtacgatcttccttttatcactgatgaagtgaaaaagacgcttaatcgcatttaccaccagaatcgcaaggtccatgaaaaaactgtgagaaccgccgcagcagccattattctgaacaacaacccttcatacatggatgtgaagaacatactgctgtccataggtgaactccctcaagaaatgaacaagtacatgcttgcaattgtgcaagacatcctgcggtttgagatgccggcctccaaaattgtgcgccgtgtactcaaggagatggtggcacacaactacgatagattctcgaggtccggtagctcatccgcgtacaccggatacattgaacgttcacctaggtcggcgtcaacctactcactggacatcctctattcaggatcggggatcctgcgacgttcgaatctcaacattttccagtacatcggcaaagcaggactgcatggttcacaggtggtcattgaagcgcaagggcttgaggccctgattgcagctactcctgatgaaggagaggaaaacctggattcgtacgctgggatgtccgcaatcctcttcgatgtccaactcagaccagtgacctttttcaacggatactccgatctgatgagcaaaatgctgtcggcgtccggagatcctatctcggtggtgaaagggttgattctgttgatcgatcattcccaagaacttcaactccaatctggtctgaaggctaacatcgaagtgcaaggtggtcttgcaattgatatcagcggggcaatggaattcagcctgtggtacagggaatcgaaaactagagtgaagaatagggtgactgtggtgatcactaccgatattacggtcgacagctcgttcgttaaagcaggcctggagacttcgactgagactgaggcaggtttggaattcatttccactgtgcaattttcccagtacccttttcttgtctgtatgcagatggataaagatgaagcgccgttcagacagtttgaaaagaagtacgagcggctcagcacgggtagggggtacgtctcgcaaaaaaggaaggaaagcgtgctcgccggctgtgaattccctcttcatcaagaaaactccgaaatgtgtaaggtggtctttgcaccgcagccggactcgacttcaagcggttggttc

SEQ ID NO: 16783 - DNA, 2682 bp, synthetic construct
  misc_feature 1..2682: note = source = /note="Description of Artificial Sequence: Synthetic coding sequence"
  source 1..2682: mol_type = other DNA
atgattctgctcgcggtgcttttcctctgtttcatctctagctacagtgccagtgttaaggggcacaccacagggctgtcgctgaacaatgatcggctctataaactgacatactccacagaggtcctgttagaccgcgggaaaggtaaactccaagacagcgtgggctatcggatatcatccaacgtcgatgtggccctgctctggagaaatccagacggggacgacgaccagctcatccagataaccatgaaagacgtgaatgtagagaatgtgaaccagcagaggggcgagaaatccatctttaagggaaagtctccctcaaagataatgggtaaggagaacctcgaggccctgcagagacccacgcttctacatctcattcatggtaaggtaaaagagttttattcctatcagaatgaggccgtggccattgagaacatcaagcggggactcgcctctctgtttcagactcagctgagttctgggactactaatgaggtagacatatcaggcaactgcaaagtcacgtatcaagcccaccaggataaagttattaagatcaaagcactggacagttgtaaaatcgcccgatctggattcaccacccctaaccaggtgctgggagttagctctaaggcgacctccgtgacaacctataagatcgaggactcattcgtcattgctgttttggctgaggaaacacacaacttcggtctgaatttcctacagactatcaaaggtaagattgtgtccaaacagaaattggagttgaagaccacagaggccgggcctagactcatgtcaggtaaacaggcagctgcgatcattaaagctgttgatagtaagtatactgccatcccaattgtaggtcaagttttccagtctcattgcaaaggctgcccaagcttatccgagctttggcgttccacacggaaatacctgcagccggacaacttgtcaaaggcagaagcagtgagaaatttcctagcttttattcagcaccttcgaaccgcaaaaaaggaggaaatcctgcagatccttaagatggagaacaaagaagtgctgccacagttagtggacgcagtcacctcggcccaaacgagcgactcgctggaagcaatactcgatttcctggatttcaagtcggacagcagcattattctgcaggagagatttttgtatgcctgcgggtttgccagtcatccgaatgaggagctccttagagccctcataagcaaattcaaaggttctatcggcagtagtgatattcgggagaccgtcatgattattaccggaacactggtacgaaagctctgccagaatgaaggatgcaagctgaaagctgtggttgaggccaagaaactgattcttggcggcctggaaaaagccgaaaagaaggaagacacgaggatgtatttgctcgcactgaaaaacgcactgttgccggagggcatcccatccttactgaaatatgcagaggcgggagaaggccccataagtcacctcgcaacaaccgccttacagaggtacgacttgccattcatcactgatgaggtaaagaagacactgaatcgcatctaccaccaaaaccgaaaagttcacgaaaaaactgtgcgcacggccgctgcagccataatacttaacaataacccctcctacatggacgtcaaaaacattctgctctctataggggagcttccccaggagatgaataaatatatgctagcgatcgtccaggatattctacgattcgaaatgccagcgtctaaaatcgtgcggagagtgctaaaagaaatggtggcccataactatgacagattttctcgaagtggcagctctagtgcctacaccgggtacatcgagcgaagcccaagaagtgcttcaacatatagtctggatattctctactccgggagtgggatccttagacgtagtaacctcaatatcttccagtacatagggaaagccggacttcacggatcacaggtggtgattgaagctcagggactggaggcattgatagcagccacaccggacgaaggagaagagaacctcgattcctacgccggcatgagcgcgattctgttcgatgttcaactgcgccccgtgacgtttttcaatgggtatagcgatcttatgtcaaagatgttgtccgcatcgggggaccccatctcggtggtaaagggactcatcctcctgattgaccactcccaggagctacagctgcaaagtggtctgaaagccaacattgaggtgcaaggaggcctggcgattgacatatcaggcgccatggaattctccctctggtaccgggagagtaagactcgtgtgaagaatagagttactgtggtcatcaccactgacatcactgtcgattcctccttcgttaaagcgggcctggagaccagtacagagaccgaggccggcctggagtttatctccactgtgcagttttctcaatacccttttcttgtttgtatgcagatggataaggatgaagccccctttagacagttcgaaaagaagtacgagcggctgagcaccggcagagggtacgtcagtcagaaacgaaaagagtctgttctggctggctgcgagtttcctctgcaccaggagaatagcgaaatgtgtaaggtagtcttcgctccacagccagactccacctcctccggctggttc

SEQ ID NO: 16784 - DNA, 2682 bp, synthetic construct
  misc_feature 1..2682: note = source = /note="Description of Artificial Sequence: Synthetic coding sequence"
  source 1..2682: mol_type = other DNA
atgatccttctggcggtgctgttcctctgtttcatctcttcgtacagcgcgagcgtgaaaggccacaccactggtctttcgctcaacaatgacaggctgtataagctcacctacagcaccgaagttttgctggaccgcggaaagggaaagctgcaagatagcgttggataccggatatcctccaacgtggacgtcgcactgctttggcgcaatccggacggcgacgacgatcaacttatccaaatcactatgaaggacgtcaatgtggagaatgtgaatcagcagcggggcgagaaaagcatcttcaaggggaagagcccttctaaaatcatgggaaaagaaaacttggaagccctgcagcggccgactctgctgcacctgatacatggaaaggtgaaagaattctactcctaccagaacgaagcagtggcgattgaaaacatcaagcgcgggctggcctcacttttccagacgcagttgtcgtccggcacgaccaatgaggtcgacatctcaggtaactgtaaagtgacctaccaagcccatcaagacaaggtgattaagatcaaggccctggattcatgcaaaatcgccagatccggattcaccactcccaaccaggtgctcggcgtctctagcaaagccacgagcgtcactacctataagatagaggatagctttgtgatcgctgtgctggcggaagagactcacaactttgggctcaactttctgcagaccatcaagggcaagatcgtgtcaaaacagaaacttgagctgaaaacgaccgaagctggtccgagactgatgtcagggaagcaagctgccgcgattatcaaggccgtcgattcaaaatacaccgccatcccaatagtggggcaggtgttccagagccactgtaaaggatgcccaagcctgtctgagctgtggcgttccacccgcaagtacctccagcccgacaatctgtccaaagccgaagccgtgcgcaactttctggcgttcatccagcatctccgcaccgccaagaaggaagaaatccttcaaatcttgaaaatggagaacaaggaggtgctgcctcagctggtcgatgcagtgactagcgcgcaaacctcggactcacttgaggccattcttgatttcctcgacttcaagtccgactcctcgatcatcctccaagagagattcctgtacgcctgtggttttgcctcgcatccgaacgaagaacttctgcgggccctcatctcaaagtttaagggatccatcggatctagcgatatccgcgagactgtgatgatcattacggggaccctcgtgcggaagctgtgccaaaacgagggatgcaaactgaaagcggtggtggaagcaaagaagctcatcctgggcggactggagaaagccgaaaagaaggaggatacgaggatgtacctcctggctctgaaaaatgcactgcttccagaggggatcccgtccctgttgaagtacgctgaagcgggggagggtccaatctcacatctggctaccactgcactgcaacggtacgatctgccgttcatcactgacgaagtgaaaaagaccttgaatcgaatctaccaccagaacagaaaggtgcacgaaaagaccgtcagaaccgctgccgcggccatcattctgaacaacaatccatcctacatggacgttaagaacatcctcctgagcatcggcgaattgccgcaggagatgaacaagtacatgctcgcgatcgtccaagatattctccggttcgagatgccggctagcaagatcgtccggagggtcttgaaggaaatggtcgcccacaactacgacaggttttcacggtcgggctcttcttcagcatacaccggctacatcgaacgctcgccgaggtcggcttcgacttattccctggatattctgtactcgggctccggaatccttcgcagatcgaacctgaatatctttcagtacatcggaaaggcgggcctccacgggagccaagtggtgatcgaggcacagggccttgaggctcttatcgcagccacccccgatgaaggagaagaaaatctcgactcgtacgcgggaatgtcggcgatcctgtttgacgtgcagttgcgcccggtgactttcttcaatggatacagcgacctgatgtcaaagatgctctcagcttccggagatccaatctcggtcgtgaaggggctcatcctcctcatcgatcattcgcaagaactgcaactgcagtcgggattgaaggcaaacatcgaggtgcagggcggcctcgctattgacatttccggagctatggaattctcattgtggtaccgcgaatccaagacgagagtgaagaatcgcgtcaccgttgtcatcacgacggatatcaccgtcgactcctctttcgtgaaagcgggactggaaacttcgaccgagactgaagcagggttggagttcatctcaactgtccagttcagccagtaccctttcctggtgtgcatgcaaatggataaggacgaggcaccgtttaggcaattcgaaaagaagtacgagcgactgtcaaccggaagaggatacgtgtcccaaaagcggaaggaaagcgttctggcgggatgcgaatttccgctgcaccaggagaactccgaaatgtgcaaggtggtgttcgccccacaaccggactccacctcctcgggttggttc

SEQ ID NO: 16785 - DNA, 2682 bp, synthetic construct
  misc_feature 1..2682: note = source = /note="Description of Artificial Sequence: Synthetic coding sequence"
  source 1..2682: mol_type = other DNA
atgatcctgcttgccgtgctgttcctttgtttcatctcgagttactcagcgagcgtgaagggtcacacgactggactgagcctgaataatgatcggctctacaagctcacctactccaccgaagtcctcttggataggggaaaaggaaagctgcaagactcggtgggataccggatctccagcaatgtggacgtggcgctcttgtggcgcaacccagacggagatgatgatcaactgattcagatcacgatgaaggatgtgaatgtggaaaacgtgaaccaacagcggggagaaaagtccatcttcaagggcaagtccccgtcaaagatcatgggtaaggaaaaccttgaagccctccaacggccgactctgctgcatcttattcatgggaaggtgaaggaattctactcctaccagaacgaggcagtcgccatcgaaaacatcaagagaggactggcatccctcttccaaactcaactctcctcaggaactaccaatgaagtggacatcagcggaaactgcaaagtgacgtaccaggcgcatcaggataaggtcatcaagatcaaggctcttgactcgtgcaaaatcgcacggtcggggtttacgactccgaaccaagtcctcggagtgtcctcgaaagcaaccagcgtcacgacttacaagattgaggactcgttcgtcatcgccgtgctggctgaggaaacccacaatttcgggttgaatttcctgcaaaccatcaagggtaaaatcgtgtcgaaacagaagctcgaactgaaaaccactgaagcagggccgaggcttatgagcggaaagcaggctgccgcaattatcaaagccgtggacagtaagtacactgccatcccaatcgtgggccaagtgttccagagccactgcaagggatgcccgtcactgagcgaactgtggcgctccactaggaagtacctgcagccggacaacttgtccaaagccgaagcggtgagaaacttcctcgcctttatccaacaccttcggactgcgaaaaaagaggaaatcctgcagattctcaaaatggaaaacaaagaagtgctgcctcagctggtggacgcggtgacttcggcacagacttcggatagcctggaagcgatcctggattttctggacttcaagtccgattcatcaatcatcctgcaagagagatttctgtatgcctgtggctttgcttcccatccgaacgaagaactcttgcgcgcactcatctcgaagtttaagggttcaatcggatcatcggacattcgcgaaaccgttatgattatcaccgggaccctggtgcgaaagctctgccaaaatgagggctgcaagctgaaggccgtggtggaggcgaaaaagctgatcctgggcggactcgagaaggccgagaagaaggaagatactaggatgtacctcttggctctgaagaacgccctgctcccggaaggaatcccatctctgctcaaatacgcagaagcaggagagggaccgatctcgcatctggccactaccgctttgcagagatacgacctgcctttcattactgacgaggttaaaaagaccttgaaccgcatttatcaccagaaccgcaaggtccacgagaaaaccgtgcgcaccgcagcagccgccatcatcctgaacaataacccttcgtacatggatgtcaagaacattttgctcagcatcggagagcttccccaggagatgaacaagtacatgctggccatcgtccaggatattctgcgcttcgaaatgccggcctccaaaatcgtgaggcgggtcctgaaggagatggtcgcccacaactacgaccgcttctcccgctccggatcctcctccgcgtacaccggctacatcgagcgaagcccacgctctgcgtcgacttacagcctggatatcctttactcggggtcgggaatcctcagaagatcaaatctcaatatcttccagtacatcggaaaggctggcctccacggttcacaggttgtgatagaggctcagggcctggaggcccttatcgccgcgacccccgatgagggagaggaaaatctggacagctacgctggcatgtcggctatcctgtttgacgtgcagctgcgtccagtgaccttcttcaacggatactcggacctcatgagcaagatgctcagcgcctcaggtgaccccatttctgtcgtgaaaggactgattctgctgatcgaccactcgcaagaactccagctgcagtcgggactcaaagcgaacatcgaggtgcaaggcggcctggcgatcgatatcagcggtgcgatggaattctcactctggtacagagagtcaaagacccgggttaagaatcgggtgactgtcgtgatcaccactgacatcaccgtcgactcctccttcgtgaaggccgggctggaaacctcaactgaaaccgaggcagggctggaattcatctcaaccgtccagttttcccagtatcctttcctggtctgtatgcagatggacaaggacgaagcgccctttcggcagttcgagaagaaatatgaaagattgtcgaccggccggggctacgtgagccaaaagcgcaaagagagcgtcttggccggatgcgagttccctctgcatcaggagaacagcgaaatgtgcaaggtggtattcgctccgcaaccagactcgacgtcgtccggctggttt

SEQ ID NO: 16786 - DNA, 2682 bp, synthetic construct
  misc_feature 1..2682: note = source = /note="Description of Artificial Sequence: Synthetic coding sequence"
  source 1..2682: mol_type = other DNA
atgatactgctggccgtcttatttctgtgttttatcagctcttactccgcatccgtgaaggggcacaccactgggctctcccttaacaacgaccgcctgtataaactgacatatagtaccgaagtgttacttgaccggggtaaggggaaactacaggacagtgtggggtaccggatatcctctaacgttgatgtggcactgctctggaggaacccagacggtgacgacgatcagctaattcagataaccatgaaggatgttaatgtggagaatgtcaatcaacagcgcggcgaaaaatcaattttcaaaggtaagtctccaagtaagataatggggaaggagaatctcgaagccctgcagcggccaacattactgcaccttatacatggcaaagtaaaagagttctatagttaccagaatgaggctgtggctattgaaaacataaaacggggcctggctagtctgttccaaacccagctgtcctcaggaaccaccaacgaagttgatatatccggcaattgtaaggtgacctatcaagcccaccaagataaggtcattaaaataaaagccctcgacagctgtaaaatcgctcgatctggatttacaaccccaaatcaggtgcttggggtgagtagcaaagctacttccgtgacaacatacaagattgaagatagcttcgtgatcgccgtgttggctgaggagactcacaatttcgggctgaacttcctgcagaccattaagggcaaaattgtgagcaaacagaagctcgaattaaagactactgaggcagggccaagactgatgtccggcaaacaggctgcagcaatcatcaaagctgtggactctaaatacaccgccataccaatcgtgggacaagtgtttcaatcccactgcaaaggctgtcccagtctgagcgagttatggcgttctacaaggaaatacctgcagccagataacctgagcaaagctgaggcagtgagaaattttctggcttttatccagcatttacgcactgccaaaaaagaagaaatactgcagatcttaaaaatggaaaataaggaggtgctgccacagctggttgacgccgtgaccagcgctcaaaccagtgactcactggaggcaatcttggattttctggatttcaagtcagatagcagtattatcttgcaggaacgctttttatacgcctgtggctttgcaagtcatcctaacgaagagctgttacgcgctctgatctccaaatttaaagggtccataggcagttccgatattcgggagacagtgatgattataaccggcactctggtgcgcaagctgtgccagaatgagggatgcaagttgaaggcagttgtggaagcaaagaagctgattctgggtggcttagaaaaagcagaaaagaaagaggatacccggatgtacctactggcactgaagaacgcactgctgccagagggaatccctagcctactcaagtacgcagaggccggagaagggcctatctcccaccttgcaaccaccgctctccagcgctacgatttaccatttatcactgatgaagttaaaaagacactgaatcggatataccaccagaaccgcaaggtgcacgagaaaactgtacgcacagcagctgctgctattattttaaataataatccatcctatatggacgtgaagaatatactgctcagtattggcgagctgcctcaggagatgaataaatatatgctggctatagtgcaggatatactgaggttcgaaatgccagcttctaagattgttcgaagggtgttaaaagaaatggtggcacataactacgaccggttctcccgctccggctcttcctctgcttacaccgggtatatcgagcgttccccccgctctgccagcacctacagtctggacatactgtactcagggagcggcatactcaggaggtctaatcttaatatttttcaatacattggcaaggccgggctgcacgggagccaggttgttattgaggcccagggattagaagccctgattgctgcaacccccgacgaaggagaagaaaatctggacagctacgcaggaatgagcgccatcttattcgacgtgcagctgaggcctgtgactttttttaatggctatagcgatctgatgtcaaaaatgctgagcgcaagcggcgacccaatcagtgttgttaaaggcctgatcctgctgatagatcacagtcaggagctgcagctgcagagcggcctaaaggctaacatcgaagtccagggcggtctggcaatagatataagcggcgccatggagttctccctgtggtaccgagaatcaaaaacacgcgtgaaaaatcgagttaccgtagtgatcacaactgatatcactgtggactctagcttcgtgaaggctgggctagagacatccaccgagacagaggctgggcttgagttcattagtaccgtgcaattctctcagtacccatttttggtgtgcatgcaaatggataaagatgaggcacctttcaggcaattcgagaagaagtacgagcgactgagtactgggaggggctacgtgtctcaaaagaggaaggagtccgtgctcgccggctgcgaattccccttgcaccaggaaaattcagaaatgtgcaaggttgtgtttgcccctcagcctgactccacttcctcagggtggttc

SEQ ID NO: 16787 - DNA, 2682 bp, synthetic construct
  misc_feature 1..2682: note = source = /note="Description of Artificial Sequence: Synthetic coding sequence"
  source 1..2682: mol_type = other DNA
atgatccttttggccgtgctgttcctctgttttatctcttcttactcagcatcagtgaaaggccatacgactggactctcactgaacaacgaccggctgtacaaactcacttactcgaccgaggtgttgctggaccgtggtaaaggaaagctgcaggactcggtcggatacagaatcagctcaaatgtggacgtcgcgctgctttggaggaacccagacggtgacgatgaccagcttattcaaattaccatgaaagatgttaacgtggaaaacgtcaatcaacaacgcggagagaaatctattttcaaaggtaaatccccgtcaaagattatgggaaaggaaaacctcgaagcccttcaacggcctactctcctgcacctgattcatggaaaggtgaaagaattctatagctaccaaaacgaagcagtggccatcgaaaacattaagcgtggactggcatccctttttcaaactcaactctccagcggaaccactaatgaagtggacatttcaggcaattgtaaagtgacttaccaggcacatcaagacaaagtgatcaagattaaggcactcgattcctgtaagatcgcacgatccgggttcacgaccccgaaccaagtcctcggagtgagctcgaaggcaacctcagtgactacttacaaaattgaggatagctttgttatcgcagttctcgccgaagaaactcacaattttgggctcaatttccttcaaacgataaaaggcaagattgtgtcgaaacagaagttggaacttaagaccactgaggcaggaccccgtcttatgtcgggaaagcaagcagctgcaattatcaaggctgtggacagcaagtataccgctattcctattgtcggccaggtgttccaatcccactgtaagggttgtccctcgctttccgaactctggagaagcactaggaagtaccttcagccagataacctgtctaaggcagaagcagtcagaaactttctggcattcattcaacatctgcgtaccgccaagaaggaagaaatcttgcaaatccttaagatggaaaacaaggaggtgcttccccaactggtggacgcagtcacttcggcccaaacttcggactccctggaagccattctcgattttctggatttcaaatccgattcgtcgattatcctccaggaaagatttctgtacgcgtgcggatttgcatctcatcctaatgaagaactgctccgcgcccttatatccaagtttaagggctcgattggttcgtccgacattcgtgaaaccgtaatgataatcacgggaaccctggtgagaaaactttgccaaaacgaaggctgcaagctgaaggcggtggtggaagcaaaaaagctgattctgggaggtcttgaaaaggccgagaaaaaagaagataccagaatgtaccttttggcactcaagaatgcactgcttccggagggcatcccttcacttctcaagtacgcagaggccggggaagggcctatttcccatcttgccaccactgctctgcaacggtatgaccttcctttcattactgatgaagtgaaaaagaccttgaaccgcatttaccatcaaaatagaaaagtgcatgaaaagaccgtgaggaccgcagcagcagcgattattctgaacaataatccaagctacatggatgtgaagaacattttgctgagcattggtgaacttccacaggaaatgaacaaatacatgcttgcaattgtgcaggatatactgagatttgaaatgcctgcatcaaaaatcgtgcggcgggtccttaaggaaatggtggcacataactacgacagattttcaagatccggttcgagctcagcatacactgggtacattgaaagaagcccacgctctgcctcaacctattcactggacattctctattcgggatccggtatcctgcgccgttcaaatctgaacatctttcagtatattggaaaggcaggtctgcatgggagccaagtcgtgattgaagcccagggccttgaggcgcttatcgccgccactcctgatgaaggagaagaaaacctggatagctacgccggtatgagcgccatcctctttgatgtgcagcttagaccagtgaccttcttcaacggctacagtgatctgatgtctaagatgctttccgcgagcggagatcccatttcagttgtcaaaggtttgattcttcttatcgatcattcgcaggagcttcaactgcagtccggtcttaaggctaatatcgaggtgcagggtggcttggcgatcgacatttcgggtgccatggaattttcgctgtggtacagggaaagcaagaccagagttaagaatcgggtgaccgttgtcattactacggatataactgtggattcctcgtttgtgaaagcaggactggaaacctcgaccgaaaccgaggcgggacttgaattcatttctactgtgcaattcagccagtacccatttctggtctgtatgcagatggacaaagatgaagctccttttcgccagttcgagaagaagtacgagcgcctgagcaccggacgcggatacgtgtcacaaaagagaaaggaatccgtcctggcaggatgtgagttccctctgcatcaagagaactcggaaatgtgcaaggttgtgtttgccccccagcccgactcgacttcgtcaggatggttc

SEQ ID NO: 16788 - DNA, 2682 bp, synthetic construct
  misc_feature 1..2682: note = source = /note="Description of Artificial Sequence: Synthetic coding sequence"
  source 1..2682: mol_type = other DNA
atgatcctcctggcggtgctctttctgtgcttcatttcctcctactcggcgtcggttaaggggcacactactgggctgagcctcaacaacgatagactctataagctcacttactcaactgaggttctgctggaccgcgggaaaggaaagctgcaggactccgttggatacagaatctcgtcgaacgtggatgtggcacttctgtggcgtaatccggatggtgacgacgaccaactgatccagatcacgatgaaggatgtgaatgtcgaaaatgtgaaccagcaacgcggagagaaatcgatcttcaaggggaagtcgccttccaaaatcatgggaaaagaaaaccttgaagcactgcagaggccaactctcctgcacctcatccacggaaaggtgaaagaattctattcgtaccagaatgaggcggtggcgatcgagaacatcaaacggggactggctagcctgttccagacccagctgtcatcaggcaccaccaatgaggtggacatctcagggaactgcaaggtgacttaccaggcccaccaagataaagtgatcaagatcaaggcgctcgattcgtgcaagattgcgagatctggattcacgacgcccaaccaggtccttggcgtttcctcaaaggccacctccgtgacgacttacaaaatcgaagatagcttcgtaattgctgttctggccgaagaaacccacaacttcggactgaacttccttcaaaccattaagggaaagatcgtgtcaaagcaaaagctcgagttgaaaaccaccgaagccggtcctcgtcttatgagcggaaagcaggccgccgcaatcatcaaggctgtggatagcaagtacactgccatcccgatcgtgggccaggttttccaaagccattgcaaggggtgcccgtcattgagcgagctctggcgctcgacccggaagtacctgcagccagataacctcagcaaagcagaagcggtccggaacttcctggcattcatacaacatctccgcactgccaagaaagaagaaattctgcagattttgaagatggagaacaaggaggtgcttcctcagctcgtggatgcggtgacctcggcccagacctcagactcattggaggcaatccttgactttttggatttcaagtcagactcgtccattatccttcaagagcggttcctgtacgcctgcggattcgcatcgcatccgaacgaagagcttctccgggcgctcatctcgaaattcaagggttcgattggttcctcggacatccgggagactgtcatgatcatcactggaactcttgtgcggaagctctgccagaatgaaggctgcaagctcaaggccgtagtcgaagcgaaaaaactgatcctcggaggactcgaaaaggccgaaaagaaagaggacactcggatgtacctgctggccctgaagaatgctctcctgccggagggaatcccatctctgctcaagtacgccgaggctggagagggacccatctcccatctggcaaccaccgctctgcagcggtacgatctgcccttcatcaccgatgaggtgaagaaaactttgaacagaatctaccatcagaaccggaaggtgcatgaaaagactgtgcgcacggctgccgcagccatcatcctgaacaacaatccgagctatatggacgtcaagaatatcttgttgtcaatcggcgaactcccgcaagagatgaacaagtacatgctggcgatcgtgcaagacatcctgaggtttgagatgccggcctccaaaatcgtccgtcgcgtactgaaggaaatggtcgcgcacaattacgaccgatttagccggtcaggctcaagctccgcctacaccggttacattgaacgctcgccgcgcagcgcctcaacctactcgctggacatcctctactcaggttccggaatactcagaagaagcaatctgaacatctttcaatacatcggcaaagccgggctgcacgggtcacaggtggtgattgaagctcagggcctggaggccctgatcgccgcgacgccagatgaaggagaagagaacctggactcctacgctgggatgtctgctatcctcttcgacgtgcagctgcgcccggtgaccttctttaacgggtactccgacctgatgagtaagatgctgtccgcaagcggcgatcctatttccgtggtgaaggggctgatcctgctgatcgaccactcgcaggaactgcagctgcaatcaggcctcaaggcgaatatcgaagtgcaaggggggctggcaatcgatatttctggcgcgatggaattcagcttgtggtaccgcgaatccaagaccagagtgaagaatcgggtgaccgtcgtgatcactacggacatcaccgtggactcgagcttcgtgaaggcagggctggagacttccactgagactgaggcgggactggagttcattagcaccgttcagttcagccagtacccattcctggtctgtatgcagatggataaggacgaagccccgttcagacaatttgagaagaagtacgaacgtctcagcactggaaggggctatgtcagccaaaagaggaaggaatccgtgctcgctggctgcgaatttccactgcaccaagaaaactccgagatgtgtaaggtcgtgttcgcacctcagccggacagcacgtcctcgggctggttt

SEQ ID NO: 16789 - DNA, 2682 bp, synthetic construct
  misc_feature 1..2682: note = source = /note="Description of Artificial Sequence: Synthetic coding sequence"
  source 1..2682: mol_type = other DNA
atgatcctcctggccgtactcttcctgtgtttcatctcgtcgtattcagcctccgtcaagggacatactaccggactctccctgaataacgacagactctataaacttacttacagcacggaggtcctcctcgacagaggaaagggcaaactgcaggattccgtgggatacagaatatcttccaatgtggacgtggccctgttgtggagaaatccggatggtgacgacgatcagttgatccagatcacgatgaaggacgtgaatgtcgagaacgtgaatcagcagcggggcgaaaagtccatctttaagggaaagtcaccctcgaagataatgggaaaagagaacctggaagccctgcagaggccaactctgctccacctgatccacggaaaggtgaaagagttctacagctaccagaacgaagcggtcgccattgagaatatcaagaggggactggcatcacttttccagacgcagttgtcgtcaggcaccactaacgaagtggacatctcaggcaactgcaaagtgacttatcaggctcaccaggacaaggtgatcaagatcaaggccctggactcttgcaagattgcaagatcgggattcactaccccgaatcaggtgctgggagtgtcaagcaaagcgactagcgtgactacgtacaagatagaggattcatttgtgatcgccgtgctcgctgaagaaacccataacttcggcctgaacttcctgcagaccatcaaagggaagattgtgtccaagcagaagctcgaactgaaaaccaccgaagcgggcccgcgcctcatgtcaggaaagcaagctgccgccatcattaaggctgtcgactcaaagtacactgcgatcccaattgtgggccaggtgttccagagccactgtaaggggtgcccgagcctctccgaactgtggcggtcgacccggaagtacctccaacccgacaatctttcgaaggctgaggctgtcaggaattttctggcattcattcaacacctcaggactgcgaagaaagaggaaatccttcaaatactcaagatggaaaacaaagaggtgctgcctcaacttgtcgatgcagtgactagcgcacagacctcagactcgctcgaggcgatccttgacttcttggactttaagtctgactcatcgatcatcctccaagaacgttttctttacgcctgcggattcgcaagccatccgaacgaggagctcctgagagctcttatcagcaaattcaagggatcaatcggctcctcagatatccgcgaaactgtgatgattatcactggaacccttgtacgcaagctctgccaaaacgaggggtgcaaattgaaggcagttgtggaagccaagaaactcatcttgggaggactcgaaaaggcagaaaagaaagaagatactcggatgtatctgcttgcattgaagaatgccctcctgccggagggaatcccaagtttgcttaagtacgcggaagccggtgaaggtcctatctcccacctggctaccacggctctccaacgatacgacctcccgttcatcaccgacgaggtgaaaaagaccctcaatcgcatctatcaccagaacagaaaagttcacgagaaaaccgtccgcaccgccgccgcggccattattctgaacaacaacccgagctacatggacgtgaagaacatcctcctgtccattggagagctgccacaggaaatgaataagtacatgctggccatcgtgcaagatatcctgcggtttgaaatgcctgcgtccaagattgtacgccgcgtcctgaaagagatggtcgctcataactacgaccgatttagccggtcgggtagctcctcggcgtacaccgggtatatcgaacgatccccgcgtagcgcatcgacttactccctcgacatcctttactccgggagcggtattctgcgtagatcaaacctgaacattttccaatacatcggcaaggcagggctgcatgggtcgcaagtcgtcatcgaagcgcaaggcttggaagcactgatcgctgccacgccagacgaaggtgaagaaaacttggattcttacgcaggaatgtcagcgatcctgttcgacgtccagctgaggccggtcacgttcttcaacggctacagcgacctgatgtcaaagatgttgagcgcctctggagatccaatctccgtggtgaaaggattgatcttgctgatcgatcattcacaggagctgcaactccagagcggcctcaaggccaatatcgaggttcagggaggactcgccatcgatatctcgggcgcaatggagttttctctctggtaccgcgagtcaaagactcgcgtcaaaaatcgcgtcactgtggttattaccaccgatatcaccgtggattcatcgtttgtgaaggcgggcctggagacttcgaccgaaaccgaggcgggtctggagttcattagcacggtccagttctcgcaataccctttcctggtgtgtatgcagatggacaaggacgaggcgccctttcggcaattcgaaaagaagtacgaacgcctgtcgaccggaagggggtacgtgtcccaaaagaggaaggaatcggtcctcgctggatgcgaattcccactgcaccaggaaaacagcgaaatgtgcaaagtggttttcgctccacagccggattccacttccagtggctggttc

SEQ ID NO: 16790 - DNA, 2682 bp, synthetic construct
  misc_feature 1..2682: note = source = /note="Description of Artificial Sequence: Synthetic coding sequence"
  source 1..2682: mol_type = other DNA
atgatactgcttgcagtgctgtttctgtgttttatcagttcttattccgcctcagtgaaggggcatacaaccggtctgtctttgaataatgatagattgtataagctcacatattccacggaggttcttctggatcgaggaaaaggcaagttacaggatagcgtaggttaccgaatcagttcaaatgtggacgtggctttgctttggaggaatcctgatggcgacgacgaccagctgattcaaataaccatgaaggatgtgaatgtggaaaacgtcaatcagcagcgcggggaaaaaagcattttcaaaggaaagtcccccagcaaaattatggggaaggaaaatctggaagctttacagcgtcccaccctgttgcacctgattcatggtaaggtgaaggagttttatagttatcagaacgaagcggtcgctatcgaaaacatcaagcggggcctggcctctctatttcagacacagctctcttctggtactacgaatgaggtggacatctcgggcaactgcaaggttacataccaagcccatcaggataaagtcattaagattaaagccctggattcctgtaagattgcgaggtctgggtttactaccccaaaccaggtgctgggcgtgtcatcaaaggcaaccagcgtgaccacttataagatcgaggacagctttgtgatagccgtgctggcggaggagacacacaattttggcctcaacttcctgcaaacgatcaagggaaaaattgtatcgaagcaaaaactggagctgaagacaacagaggccggtcctcgcctgatgagcggtaagcaagcagctgcaattattaaagctgtcgatagtaagtacaccgcgatccccattgtcggtcaggtgttccagtcacattgcaaggggtgtccctcactatcagagctatggcgctcgacacgtaagtacctgcaaccagacaatttgtctaaagccgaggccgtcagaaactttttggcatttatacagcatctgcggaccgccaagaaggaggagatcctgcagattctgaaaatggagaacaaggaggtcctgccacagttagtggacgcggtaaccagcgcccaaacatctgactctttggaggctattctggatttcttggattttaagagtgatagcagtatcattctccaggaacggtttctatatgcgtgcggcttcgcctctcatccaaacgaagaactgctccgagcactcatctcaaaattcaagggatctataggatcctctgacatcagagaaacagtcatgataatcacaggtacccttgtgagaaagctgtgtcagaatgaaggatgcaagctgaaggccgtggtggaggcgaagaaactaatcctcggtgggctggagaaagctgagaagaaggaggatacgcgcatgtacctactggccctcaagaatgccctcctccccgaaggtatacccagcctcctgaagtacgcagaggccggcgagggccctatatcgcaccttgccaccactgccttacagcgatacgatttgcctttcatcacagatgaggttaaaaagacactgaaccgcatatatcaccagaatagaaaggtgcatgagaaaaccgttcgcaccgcggcggcggccattatcctcaacaataatccttcatatatggatgttaaaaatattcttctgagtatcggcgagctgccacaagagatgaacaaatatatgctggccattgtgcaagatattctcagatttgagatgccagcgagtaagatagtgcgacgcgtgttgaaggagatggtcgctcataattacgatcggttcagccggagcggctctagctccgcttacacaggctacattgagcggtcacccaggtctgcctccacttattcactcgatattctctactcgggcagcggcattctccgaaggtcaaatctgaatattttccagtatatagggaaagccggactgcacggatcccaggtggtcatcgaagctcaggggttggaagcactaatagccgccacccctgacgagggcgaagagaatctggactcttacgcaggtatgagtgctatcttgtttgatgtgcaattgaggcctgtcactttcttcaatggctactcggatttgatgtcaaaaatgctgtctgcaagtggcgacccgatctcagtggtgaaagggctgattctgctcatagatcattcacaagagttgcagctgcaaagcggcttgaaggctaacatcgaggttcagggcgggctggcaatcgacattagtggtgctatggaattctctttgtggtatcgggagagtaaaacacgggtcaagaatagagtgactgttgtcatcaccacagatatcaccgtggattcttccttcgtcaaggccggactggaaacatccactgagactgaggccggtctggagttcatctcaaccgttcaattctcccaatatccttttctcgtgtgtatgcagatggacaaggacgaagctcctttcaggcaattcgagaagaagtacgaacgcctcagcacgggtagaggatacgtttcccagaagagaaaggagtctgtgctcgcagggtgtgagtttccattgcatcaggaaaactctgagatgtgcaaggtcgtttttgccccacaaccagattcaactagctccgggtggttt

SEQ ID NO: 16791 - DNA, 2682 bp, synthetic construct
  misc_feature 1..2682: note = source = /note="Description of Artificial Sequence: Synthetic coding sequence"
  source 1..2682: mol_type = other DNA
atgatcctgctggcagtcctgtttctttgtttcatatcttcctactccgctagcgttaagggacacacgactggcctgagcctcaataatgatagactgtacaaacttacttactcgactgaagtgctgttggacaggggaaagggaaaactgcaagatagcgtggggtacagaatttcgtcaaacgtggatgtcgccctgttgtggcgtaatccagatggtgatgacgatcaactgattcaaatcaccatgaaagacgttaacgtggaaaatgtgaatcaacagcggggggagaagtccatctttaagggcaagtcgccatcaaagatcatgggaaaagaaaacctcgaagcattgcaacgacctactctgttgcatctgatacatgggaaggtgaaggagttctactcctaccagaacgaagcggtcgcaattgagaacataaaacgaggtctggcatccctttttcagacccaattgtcgtcaggaactaccaatgaggtggacatatccggtaactgtaaagtgacttaccaggcccatcaagacaaggtgatcaagattaaggcgctggactcgtgtaagattgcacggtccggattcactacccctaatcaggttctgggggtgtcatcaaaggcaacctccgtcactacctacaagatcgaagattcgttcgtgattgccgtgctcgcggaggaaacccacaactttggactcaacttcctccagactataaagggaaagatcgtgagtaagcaaaagctggaactgaaaactacggaggcaggtccgcgtctgatgtccggcaagcaggctgccgcgataatcaaggcagtggactctaagtacacggccattcctattgtcggccaggtctttcaatcacattgcaaagggtgcccatccctttcggaactgtggcgctcgacgagaaagtatttgcaacctgacaatctgtcgaaggccgaagcagtgcggaactttctcgcattcattcagcacctgcgcaccgcaaagaaagaggagatcctccaaatccttaagatggaaaacaaagaagtgctgccccaactggtggatgcagtcaccagcgcacaaacctccgactcccttgaagcaattctggattttctggactttaagtcggactcctccatcatccttcaggaaagattcctgtacgcctgcggatttgcttcgcacccgaacgaagagctcttgagggcactgatttcgaagttcaagggttccattggttccagcgatattagggaaactgtcatgattatcaccggtaccttggtgcgtaagctctgtcagaacgaaggctgtaagctcaaagctgtcgtggaagcaaaaaagctgattctcggcggccttgaaaaggcagaaaagaaggaggacactaggatgtaccttcttgcccttaagaacgccctgcttcccgagggaatccctagcctgctcaaatacgcagaagcgggtgaagggccaatttcccatctggcaacgaccgcactccagagatatgacctgcctttcattaccgacgaagtgaagaaaactctgaacagaatttaccatcaaaaccgtaaggtgcatgaaaagaccgtgaggaccgcggctgccgccattattctgaacaacaacccatcctacatggatgtaaagaatattctgctctcgatcggagagctcccgcaagaaatgaacaagtacatgcttgcaattgtgcaagatattcttcgctttgagatgcccgcgagcaagatcgtgcggcgcgtgctgaaggagatggtggcacacaactatgacagatttagcagaagcggatcctcgtcggcctacaccggttacatcgaaaggtcacctagaagcgcctcaacctacagccttgatatcctctacagcgggtccggcatccttagaagatccaacttgaacattttccaatacattggtaaagcaggtctgcatggttctcaggtcgtaattgaagcacagggactggaagcacttatcgcagccactcctgacgaaggggaagagaacctggattcctacgccggcatgtcggccattctttttgatgttcagctccggccagtgaccttcttcaatggatactcggacttgatgtccaaaatgctgtcagcatcgggcgaccctatttcggttgtcaaaggtctgattctccttatagaccactcgcaagaacttcaactgcagtccggtcttaaagcgaacatagaagtgcaaggaggacttgccattgatatttccggtgcgatggaattctccctgtggtacagagagtccaagactagagtgaaaaatcgtgtcactgtcgtcatcacgacggatattactgtggactcctcgtttgtgaaggctggactcgaaacctctactgaaactgaggcgggcctcgagttcataagcaccgtccagttttcgcaatacccatttcttgtctgtatgcagatggataaggacgaggcaccatttagacagttcgaaaagaaatacgaacggctttcaactggtaggggctacgtgtcgcaaaagcgaaaggagtcggtgctggctggatgtgaatttcccctgcaccaggaaaatagcgaaatgtgcaaggtcgtgtttgccccacaaccagattctacgtcctcagggtggttc

SEQ ID NO: 16792 - DNA, 2682 bp, synthetic construct
  misc_feature 1..2682: note = source = /note="Description of Artificial Sequence: Synthetic coding sequence"
  source 1..2682: mol_type = other DNA
atgattcttctggcggtgcttttcttgtgcttcatctcaagctactcagcatctgtcaaaggtcacacaactggactgtctctcaacaacgaccggctgtacaaactgacctattccactgaagtgctcctggatcgcggaaagggaaagcttcaggattccgtgggatacagaatctcttccaacgtagatgtggccctcctgtggcgaaatcctgatggggatgatgaccagctcatccagatcaccatgaaagatgtcaacgtggagaacgtgaaccagcagcggggcgagaaatcaatcttcaagggaaagtcaccctctaaaataatggggaaggaaaatctggaggcccttcagcggcctacccttctgcatctgattcatggcaaagtgaaggaattttatagctaccagaatgaagccgtcgccattgaaaacatcaaacgcgggctggcttcccttttccagactcaactgtctagcggcaccacgaacgaggtcgacatatccggcaactgcaaagtcacttaccaggcacatcaggataaggtaataaaaatcaaggccctcgactcttgcaaaattgcgagatctggtttcaccactccaaaccaggttctcggcgtgtccagcaaagccactagcgtgaccacatacaaaatcgaagattccttcgtaatagctgtgctggcagaagagacccataatttcggactgaacttcctgcaaactatcaaagggaaaattgtaagcaagcaaaaattggaactcaagacaacagaagctggaccacgactgatgtcaggaaagcaagctgccgccatcattaaagccgtggactccaagtacactgccatcccaatagtcggccaggtcttccaatcccattgcaaaggttgccccagcctgtcagaactgtggagatccacaagaaaatatctccagccagataacttgtccaaagccgaggccgtgcgcaatttcctggctttcattcagcacctccgcactgccaaaaaagaggagatactgcagatcctgaagatggagaacaaagaggttctgccccaactggtggacgccgtgactagcgcccagacatccgacagcttggaggccattctggactttcttgactttaaatcagattcatctattatcctccaggaacggttcctgtatgcttgtgggttcgcgtctcatccaaatgaggaactgctgagggctctgatctcaaagttcaaagggagtatcggttcaagtgatatacgagagacagtaatgatcataactggtacacttgttcgaaagctgtgccagaatgagggctgtaaattgaaagccgtcgtggaggctaagaagctcattctgggcggattggagaaggctgagaagaaagaggatacaaggatgtatcttctcgcactgaagaacgctctcttgcccgagggaatcccatcactcctgaagtacgcggaagccggagagggacccatctcacatctcgctactaccgcgcttcaacggtacgacctgcccttcatcacggacgaggtgaagaagactctgaataggatctaccatcaaaaccgaaaagtgcatgagaaaaccgtgaggacggcagccgccgccatcatactgaacaacaacccgtcctacatggacgtcaaaaatattttgctgtctatcggggagctgccccaagaaatgaataaatacatgctcgctattgtacaggacattcttagatttgaaatgccagcgtccaagatagtccgaagggtgcttaaggaaatggtcgcccataactatgaccgattttccaggagcggctctagctccgcctacaccggctacattgagcgctctccacggtccgcatctacctattccctggacatcctttactctggtagtggaatcctgaggcgcagtaacctgaacattttccagtatattggtaaggccggactccacggcagccaggtcgtgattgaagctcagggcctggaggctctcattgcagccacccccgatgaaggtgaggaaaaccttgacagttacgcaggcatgtctgcgatcctgtttgacgtgcagctgcgccccgtaactttctttaatggatactccgacctgatgagcaaaatgttgtctgcatccggcgatcccattagcgtagtgaagggcttgattctcctgatcgaccacagccaagaattgcaactgcaatcaggcttgaaagccaacattgaagtgcagggaggcctggcaatcgacatatccggcgcaatggaattcagcctgtggtatcgggaaagcaagacccgcgttaaaaaccgcgtaaccgtcgtaattacaactgatatcacggtagacagctcatttgtcaaagcaggcctggaaactagtaccgaaaccgaggctgggctcgaattcatttctacagtccagttctctcagtacccattcctcgtttgtatgcagatggataaggatgaggcccctttccgacagtttgaaaagaagtacgagcggctgagtactggaagggggtacgtgagccagaagcgaaaggagagtgtgctcgcaggatgcgagttcccacttcatcaagaaaacagtgagatgtgtaaagttgttttcgccccccagccagacagtaccagctccgggtggttc

SEQ ID NO: 16793 - DNA, 2682 bp, synthetic construct
  misc_feature 1..2682: note = source = /note="Description of Artificial Sequence: Synthetic coding sequence"
  source 1..2682: mol_type = other DNA
atgatccttctggctgtgctattcctttgcttcatatcatcatattcagcctcagtcaaggggcacacaacaggactctcactcaacaatgatcggctctacaaactgacttattcaacagaagtgcttttagatagagggaaaggaaaactccaggatagtgtcggatatagaatatcctctaatgtcgatgtcgcgcttctctggcggaaccccgatggggatgatgatcaattaattcaaatcacaatgaaagatgtgaacgtagaaaacgttaaccagcagaggggagaaaagtcaattttcaaagggaaaagtccatccaagatcatgggaaaagagaacctggaggcgctccagcggccaactctcctccatctcatccatgggaaggttaaggaattctacagttatcagaacgaagcagtcgccatcgaaaatattaagcgggggctcgcttctctctttcagactcagctgtcctctgggactactaatgaagtagatatatccgggaactgcaaagtcacatatcaggctcaccaggataaagtgatcaaaattaaagcccttgactcatgtaagatagcccggagtggatttacaactcctaaccaggtcctcggggtttcttctaaggctacttccgtaacaacttacaaaatcgaagattcttttgtgatcgcagtgttagcagaagaaactcacaactttgggctaaacttcctccagacaataaaagggaaaatcgtgtccaaacagaaactggagctcaaaacaactgaagctggaccacggctcatgagtgggaaacaggcagctgctataataaaagcggttgattcaaaatacactgcaatcccaatcgtgggacaggttttccagtcacactgtaagggatgcccttccctgagtgaattatggagaagtacaagaaaatatctgcagcccgataacctttctaaagccgaggccgtgcgcaatttccttgcttttatccagcacctgcgaactgccaaaaaagaagaaatacttcagatactaaaaatggaaaataaggaagttcttccgcagcttgtagatgcagtgacatcagctcagacatctgattcattagaggctattctcgattttttagattttaaatccgattcgtccattatcctgcaggaacggtttttatatgcttgtgggtttgcatcccatccaaacgaagaattactacgggctctaatatccaaatttaaagggtctatcgggtcttctgatatccgggaaacagtcatgattatcacaggaacactcgtcaggaaactgtgtcagaatgaagggtgcaaattgaaagccgttgtcgaagcaaaaaaactcatactcggagggcttgaaaaggccgagaaaaaagaagacacaagaatgtatctcctggccctaaaaaatgctctcttgccagaagggattcctagtctgcttaaatatgctgaagcaggagaagggcctatttcccacctggcaactacagcactccagcggtacgatctcccatttataacagatgaagttaaaaaaacattaaaccgcatctaccaccaaaaccgtaaagtgcacgaaaagacagtgagaactgctgcagctgctataattctgaataacaatccttcctatatggatgtgaaaaatatcctgttaagtatcggggaattacctcaggaaatgaacaagtatatgctagctatagtacaggatatacttagatttgaaatgcctgccagtaaaattgtcaggcgggttttaaaagaaatggtggctcataattacgatcggttcagtcggtccgggtcatcatccgcctatacaggatatatcgagcggtcaccacgctccgcttccacttattccctagatattctatatagtggatccggaatcctccgccggtccaatttaaacatctttcagtatatcgggaaagcaggactgcacggatcccaggtggtaattgaagcccaagggctggaagccctaatagctgcaacacctgatgaaggggaagaaaacctggactcttacgctggaatgtcagctattctcttcgacgtgcagctgcggcccgtaactttttttaacgggtattccgatctgatgtcaaaaatgctttccgcttctggagatccaatctccgtggtcaagggacttatcctgctcatcgatcattcccaggaactgcagctccagtctggactgaaagctaacatcgaagtgcagggaggattagccatcgatatttctggggctatggaattttctctttggtaccgcgagagtaaaacacgagtaaaaaaccgtgtgactgtcgttattacaacagatatcactgttgattcctcctttgttaaagcagggctcgaaacttctactgaaacagaagcaggactcgagtttatttctacagtgcagttctcgcagtatccctttctcgtatgcatgcagatggataaagatgaagcccccttccggcagtttgaaaaaaagtacgaacgcttatcaactggacgcgggtatgtttctcagaaaaggaaagagtccgtcctggccggatgtgaatttcctctgcatcaggagaattccgaaatgtgtaaagttgtgttcgctcctcagcctgattccacttcttccggatggttc

SEQ ID NO: 16794 - DNA, 2682 bp, synthetic construct
  misc_feature 1..2682: note = source = /note="Description of Artificial Sequence: Synthetic coding sequence"
  source 1..2682: mol_type = other DNA
atgatcctcctcgcagtcctgtttctttgcttcatctcctcctacagcgcatctgtgaagggacacaccacaggcctatccctgaataatgatagactgtataagttaacctatagtaccgaggtcctgctggacaggggcaaaggaaagctgcaggactcagtggggtacagaatctctagtaacgtggatgtagcgctgctgtggcggaatcccgacggcgatgacgaccagctcattcaaattacaatgaaggacgtgaatgttgagaatgtgaatcagcagcgaggagagaagtccatctttaagggcaaatctccttccaagataatgggaaaggaaaacctggaggcattgcagagacctactctgcttcatttaatccacgggaaggttaaggagttctacagttaccagaacgaggcagttgcaatagaaaacattaaacggggactcgcatccctgtttcagacccaactaagctctggtacaacaaatgaggtagacatttctggtaactgcaaggttacatatcaggcacaccaggataaagtgattaagattaaagcacttgacagttgtaaaattgccagatccggctttacaactccgaaccaagtcctaggcgtcagctctaaggccacttctgtgaccacttataaaatcgaggattcgtttgtaatcgccgtgttggcagaagagactcataactttggtctgaattttctgcagactatcaaagggaaaattgttagtaagcagaaactagagctgaaaactaccgaggccggccctagattgatgagcggaaaacaggccgccgcgataataaaggctgttgattccaagtacactgccattccaatcgtaggacaggtgtttcagagccattgtaagggatgcccatcattaagcgagctctggcgttctactaggaaatatctgcagccggataacttgtctaaggctgaggcagtcaggaacttcctagcatttattcagcacctccgaacggctaagaaggaggaaatcctccagattctgaaaatggagaacaaagaagtcctgccccagctggtggacgcagtgaccagcgcccaaaccagtgatagtctggaggcaatcctcgattttctggattttaagtcagattcctcaataattcttcaggagcgctttctgtacgcgtgcggattcgcgtcacatcctaatgaggagctgctgcgcgctctcatcagtaagttcaagggctcaattggttcctccgacatccgggagacagtgatgataattacaggtactttagtgagaaagctgtgccagaacgaaggatgtaagctcaaagccgtagttgaggctaagaaattgatccttggggggctagagaaagcagagaaaaaggaggatacacgcatgtatttgcttgcccttaagaacgcactgttgcctgagggaattccttcactcctgaagtacgctgaggcaggcgaggggccaatatcccatttagctacgactgctttacagagatacgacctcccctttatcacagacgaggtgaaaaagacactgaatcggatttatcaccagaaccgcaaagtgcacgagaagactgtgcgaaccgcagccgcagctataatcctgaacaataatcccagctacatggatgtgaagaatatattgctgagtattggcgaactccctcaggaaatgaacaaatatatgctggcgatcgtccaggatatactcagattcgaaatgcccgccagtaaaatcgttaggcgcgtacttaaggaaatggttgcacacaattacgaccggttcagcaggagcggatcttcaagcgcttatactggctatatagagaggtcgccgagatccgcttctacctacagcctggacattctgtatagcggatccggcatcctcaggcgctccaacctgaatattttccagtacattgggaaggcgggcctccatggaagccaggtagtaatcgaagctcagggcctggaggcactgatcgcagccacgcccgacgagggagaagagaatttggacagctacgctggcatgtcggcaatcctgtttgacgtacagcttcgtccagtgactttctttaatggatactctgacctcatgtccaagatgctcagtgcctcaggagatccaatttccgtggtgaaagggctcattcttctgatcgaccatagccaggagctgcagctgcaaagcggacttaaggctaatattgaagtgcagggagggctggccatcgacatctccggcgccatggagttttcgctgtggtatcgggaaagtaaaacaagagtgaaaaaccgggtgactgtggtgataactaccgatatcacagttgactccagttttgtgaaagccggattggagacatccaccgagaccgaagccggtcttgagttcatcagtactgtgcaattctcccagtaccccttccttgtgtgtatgcagatggataaggacgaagcgcctttccgacaatttgaaaagaagtatgagcggctttccacaggacggggatacgtttctcagaaacgcaaagagtccgttctggctggctgtgagttccccctccaccaagagaattccgagatgtgtaaagtggtgttcgcaccgcagcctgattccacctcctcaggctggttc

SEQ ID NO: 16795 - DNA, 2682 bp, synthetic construct
  misc_feature 1..2682: note = source = /note="Description of Artificial Sequence: Synthetic coding sequence"
  source 1..2682: mol_type = other DNA
atgattctgctggccgtgttgtttctgtgttttatttcatcctactccgccagcgtgaagggacacaccacggggctgtctctcaataacgacaggctgtacaaactgacgtacagcactgaggtgctgctggaccgggggaagggtaaactgcaggatagtgttggctataggatttcctccaatgtggatgtggccttgttgtggagaaaccccgatggtgatgacgaccagctgatacagatcaccatgaaggacgtaaacgtggagaacgtgaatcagcagcggggggaaaagtccatctttaagggaaagagtcccagcaaaatcatgggcaaggaaaatcttgaggctctccagcggcccaccctgctgcatctgattcacgggaaagtgaaggaattttactcctaccagaacgaagctgtggccatcgaaaatatcaaacgggggctggcctccctgtttcaaactcaacttagctcaggaaccactaacgaggtcgacattagtggaaattgcaaggtgacttaccaggcacaccaggacaaggtgatcaagatcaaggcactcgactcttgcaagattgcacggtccggcttcaccactcccaatcaggtgctgggtgtctcttctaaggccacttccgtgacaacttacaagatcgaggactcctttgtaatcgccgtactggctgaggagacccacaatttcggactcaatttcctccagaccataaaggggaagattgtctctaagcagaaattggagctcaagaccacggaagctggccccaggctcatgtctggcaaacaggccgctgccattattaaagctgtggacagtaaatacacagctatcccgattgtgggccaggtgttccagagccattgtaaggggtgcccctcactgtctgagctttggcgctccaccagaaaatacctccagcctgataatctgtctaaagcggaggctgtgcgcaattttctggccttcatccagcatctgcgcacagccaaaaaagaggagatcctgcagatactcaagatggaaaacaaggaggtgttgccccagctggtcgacgctgtcacaagcgcacaaactagtgatagccttgaggcgatactggatttcctggactttaaaagcgactcctcaataatcctgcaggaacggtttctgtacgcgtgcggttttgctagtcacccaaacgaggagctcctgagggcgctgatttccaagtttaaggggtccatcggatccagcgacatcagggaaactgttatgattatcacgggtacgctcgtgcggaagttgtgccagaacgaaggctgcaagctgaaggccgtcgtggaagctaagaaactgatcctgggcggactggagaaggctgaaaagaaggaggatactcggatgtacctgctcgccttgaagaatgccttgctgccagagggtatcccgtccttgctcaagtatgccgaagcgggcgaaggtcccataagccatcttgctacaactgccctgcaaaggtatgatctcccgtttataacagatgaggtcaagaagaccctgaaccgcatttatcatcagaacagaaaagtgcatgagaagacagttcgcacagctgccgctgcgatcatcctcaacaataatccttcctatatggatgtaaagaatattctgctgagcatcggggagctcccgcaagagatgaataaatacatgttggctatcgtgcaggatatcttgagatttgagatgccagccagcaagatcgtaaggcgggttctgaaagagatggtggcgcacaattacgataggtttagtaggtctggcagttccagcgcctatactggttatatcgaaagatctccacgatccgcttcaacttatagcctggacatcctgtacagcgggagcggcatcctgcggagaagcaatttgaacatttttcaatatatcggaaaggcagggctgcatggatcacaggtggtgatcgaggcccaggggctcgaggcactgatcgcggccacacctgacgagggagaggagaacctcgattcctacgctggcatgtccgcgattcttttcgacgtgcagctgcgccccgtaaccttttttaatgggtactctgatctgatgagcaaaatgttgtcagcaagcggggacccaatatctgttgtcaagggactgattctgctgatcgatcacagtcaggaactgcagctgcagtccggtctgaaagctaacatcgaagtgcagggcggacttgcaattgacatttccggggccatggagttcagtctgtggtatcgcgagtcaaagacaagagttaaaaaccgcgtgacggttgtgatcacaaccgatattaccgttgactcatctttcgtaaaagctggtctggagacaagtactgagactgaagccggcctcgagttcatcagcacagtgcagttctctcagtatccattcctcgtgtgtatgcagatggataaggacgaagcccctttcagacagttcgagaagaaatacgaaaggctcagtacgggccgcgggtacgtgagtcaaaagagaaaggagagcgtgctggctggttgtgagttcccattgcaccaggagaatagcgagatgtgcaaggttgttttcgccccccagccagattctacctcctccggctggttt

SEQ ID NO: 16796 - DNA, 2682 bp, synthetic construct
  misc_feature 1..2682: note = source = /note="Description of Artificial Sequence: Synthetic coding sequence"
  source 1..2682: mol_type = other DNA
atgatactgcttgccgtgttgtttctgtgctttatctcgtcgtactcggcctcggtcaagggccacaccactggactgtctcttaacaacgatcggctttacaagctgacctacagcactgaagtgctgctcgatagggggaaaggtaaactgcaagattccgtgggctaccgcatatcctccaatgtggacgtcgcattgctgtggcggaacccagatggcgatgatgatcagctcattcagattacgatgaaggatgtcaacgtggaaaatgtgaatcaacagcgcggagagaagtccatctttaagggaaagtcaccatctaagataatgggaaaggagaacctggaggcgcttcaaagaccaactcttcttcatcttatccacggtaaggtgaaggaattctactcctaccaaaacgaagcagtggcgattgaaaacattaaacgcggccttgcgtctctgtttcaaacccagctttcctccggaacgactaacgaggtcgatattagcggtaactgcaaagtgacttaccaagcacaccaggataaggtgatcaaaatcaaggcactggactcatgcaagattgcacggtccggtttcactacgccaaatcaagtcttgggggtgtcgtcgaaagccacttcagtgaccacctataagatcgaggacagcttcgtcattgcggttcttgccgaggaaactcataactttgggctgaacttccttcagaccataaagggcaagatcgtgtcgaagcaaaagctggaactcaagaccacggaagccggacctcgcctgatgtccggtaagcaagcagcggcaatcataaaagcagtggactcgaaatacactgcaattcctatcgtgggacaggtctttcagtcgcactgtaagggctgtcctagcttgtccgagctttggaggtccactaggaagtacctgcagccagataatctgtccaaggccgaggcagtgaggaactttcttgcatttatccaacatcttcggactgctaaaaaggaagaaattctgcaaattcttaagatggagaataaggaagtgcttccgcagctggtcgatgccgtgacctccgcgcaaacttcggactctctcgaagcaatcctggatttcctggatttcaagtcggattcatcgataatcctccaggaacggtttctgtacgcctgtggattcgcatctcatccaaacgaggaacttctccgcgcactgatatccaagtttaaaggatcaattggttcatcggatattagggaaaccgtcatgatcattactggaaccctggtcagaaaactgtgtcagaatgagggttgcaagctcaaggcagtggtcgaagcaaagaagttgatccttggaggactcgaaaaagctgagaagaaggaagatacccggatgtacttgcttgcactgaagaacgcactgctgcctgaagggataccttccctgctgaagtacgctgaagcaggcgaaggacctatttcgcatcttgcgacgaccgcgcttcagcggtacgacctcccgttcattactgatgaagtcaagaaaactctcaaccggatctaccaccaaaaccgcaaagtgcatgaaaagacggtccgaacggctgctgcagcaatcattcttaacaataaccccagctacatggacgtaaagaacattctcctctcgatcggcgaacttcctcaagaaatgaataagtacatgctggccattgttcaggacatcctgcgattcgaaatgccggcctcgaagattgtgcggcgtgtcctgaaggaaatggtggcgcataactacgaccgattttcccggagcggaagttcgtcggcttacactggatacattgaaagatccccaagatcggcatcaacctactcgctggacattctgtatagcgggtcgggtattctcaggcgatctaacttgaacatttttcaatacatcggcaaagcaggcctgcatggatcccaggtggtgatagaagcccagggccttgaggctctcatagcagcaactcctgatgagggagaagaaaatcttgactcatatgcaggaatgtcagcaattctgtttgacgtgcaactgcgtcctgtcacgttctttaatggttactcagacctgatgagcaaaatgctgtctgcgtcgggtgaccctatttcagtggtgaaggggctcatcctgctgatcgatcattcgcaagaattgcaactgcagagcggtctgaaagcaaatatcgaagtgcaagggggactcgcaatcgatatttcgggggcaatggagttttcgctttggtaccgagaatcaaagaccagagtgaagaatcgggtcaccgtcgtgattactaccgatatcactgtcgactcctcattcgtgaaggctggactcgaaacctcgactgaaactgaggcgggacttgaattcattagcacggtgcaattcagccaatacccattcctggtgtgcatgcaaatggacaaagatgaggcaccatttagacaattcgagaagaagtacgaacgcctgtcaaccggacggggttacgtgtcgcagaagcgcaaggaatcagttctggctggttgtgaatttccactgcaccaggagaactcagaaatgtgtaaagtcgtgttcgcaccacagccggattcgacttcatcggggtggttt

SEQ ID NO: 16797 - DNA, 2682 bp, synthetic construct
  misc_feature 1..2682: note = source = /note="Description of Artificial Sequence: Synthetic coding sequence"
  source 1..2682: mol_type = other DNA
atgattctgctggccgtcctgtttctgtgtttcatctcgtcatattcggcctcggtgaagggacatacgaccggactcagccttaacaacgatagactctataagctgacctactcaacggaagtgctgctggataggggaaagggaaaacttcaagattcggttggataccgcatctcgtctaacgtggatgtggcgcttttgtggcgtaatccagatggagacgacgaccaactgatccagattaccatgaaagatgtgaacgtcgagaatgtcaatcaacagaggggagaaaagtcaatattcaaggggaagtcccccagcaagattatgggtaaggagaatcttgaagcacttcagaggcccacccttctgcacctgatacacgggaaagtcaaggagttttactcataccagaatgaagctgtggcgatagaaaacattaaacggggacttgcgtccctctttcaaactcaactgtcaagcgggactactaacgaagtggacatttcaggcaactgtaaagtgacttaccaggcccaccaagataaggtcattaagattaaggctcttgactcctgcaagattgcaagatccggatttaccacccccaaccaagtgcttggagtgagctcaaaagcaacctcagtgactacctacaaaatcgaagattcgttcgtgattgccgtccttgcagaagaaactcataacttcggtttgaatttcctccaaaccatcaaaggcaagatcgtgtccaagcaaaagctcgagctgaaaactactgaggcaggacctcgcctcatgtcaggcaaacaggcagcagccatcataaaagccgtggacagcaagtacaccgcaattcctatcgtgggacaggtctttcaatcgcactgtaagggctgtccttcgctgtcggaactgtggcgctcgacccgcaagtacctccagcctgataacctgtccaaggcagaagccgtgcggaactttctggcatttatccaacacctccggaccgcaaaaaaggaggagatactccagatactgaaaatggaaaacaaggaagtgctgcctcagctggtggatgcagtgacctccgcacagacctcggactcgcttgaagcaattctggactttctggactttaagagcgattcgagcattattcttcaggaaagatttctctacgcatgtggcttcgcatcgcaccctaacgaagaacttctgagggcacttattagcaagttcaagggatcaattggttcgtccgacattcgggaaactgtgatgataatcactggaaccctggtgcggaaactctgtcaaaatgagggatgcaagttgaaagcagtggtcgaagcaaagaagctgattctgggtggcctcgaaaaggcagagaaaaaagaggacacccgcatgtacctgttggctcttaagaatgcgcttctgcctgaaggtatcccctcactcctgaagtacgcagaggctggcgagggcccaatatcccacctcgcaactacggccctccagagatacgatctgccgttcattaccgatgaggtaaagaaaaccctgaaccgcatttaccaccaaaaccgcaaggtccatgaaaagactgtgcgtactgccgccgcagcaattatcttgaataacaatccatcgtacatggatgtgaagaacattcttttgagcataggagagctccctcaggaaatgaacaaatacatgttggcaatagtacaagatattcttagatttgaaatgccagcgtccaagattgtgaggagagtgcttaaagaaatggtggcgcacaactacgatcgctttagccggagcggatccagctccgcatataccggctacatcgaacggagcccaagatcggccagcacctactcgctggatatcctctacagcggctccggtatcttgaggcggtccaaccttaacatctttcaatacattggcaaagcgggacttcatgggtcccaggtcgtcattgaagcacaggggcttgaagcactcattgccgcaacccctgatgaaggtgaggaaaacctggacagctatgcaggaatgagcgccattctgtttgatgtgcagctgcgcccagtgacttttttcaatggctactcggatctgatgtcgaagatgctgagcgcatcaggagatcctataagcgtcgtgaaagggctcattctgctgatcgaccactctcaagagctccaactgcaatcaggattgaaggcgaacattgaagtccaagggggacttgcaatcgatatttcgggggccatggaattcagcctttggtaccgagaatccaagactagggtgaaaaatcgagtgactgtggtcatcaccaccgatattaccgtggattcgtccttcgtcaaagcagggcttgaaacgtcgactgaaaccgaagcaggtctggagttcatctccaccgtgcaattttcgcaatatccatttctggtgtgcatgcaaatggacaaggatgaggcaccttttcggcagtttgagaagaaatacgaacggctgtccacgggccgtggatacgtctcccagaagagaaaagaatccgtgctcgcaggatgtgaattccctctccaccaagaaaattcagaaatgtgcaaggtcgtgtttgcgcctcaacctgactcgactagctccggttggttc

SEQ ID NO: 16798 - DNA, 2682 bp, synthetic construct
  misc_feature 1..2682: note = source = /note="Description of Artificial Sequence: Synthetic coding sequence"
  source 1..2682: mol_type = other DNA
atgattctcctggcagtgctctttctctgtttcatctctagttactctgccagcgtaaaaggacacacaaccggtcttagcttgaacaatgaccgtctttataagctgacctacagtacagaagtcctcctcgaccgcggtaagggtaaactgcaggactccgttggctaccgtattagttccaacgtggacgttgcactcttgtggcgcaaccccgatggcgacgacgatcagctcatccagatcacaatgaaggatgtcaacgtggagaatgtgaaccagcagagaggagagaaatccatatttaagggcaaatccccctccaaaatcatgggaaaggagaatctggaagcactgcagcgtccaactctgctgcacttgatacatggaaaggtgaaagagttctacagctatcagaacgaggccgttgccatcgagaatatcaaaaggggcctggcctccctcttccagacccagctttcttctggaactactaacgaggtcgacatttctggaaactgtaaggtgacctatcaagcccaccaagataaggtgatcaaaatcaaagctctggactcttgtaagatcgctaggtccggattcacaactcctaaccaggttttgggagtttcttccaaggccacctctgtaactacttataagatcgaagactcctttgttatcgccgtcctggccgaagaaacacacaattttggtcttaattttctccagactatcaagggtaagatcgtaagtaagcaaaagctggagcttaaaacaactgaagccggtccacgtctcatgagcggcaaacaggccgccgccatcatcaaggctgtggattccaagtatacagccatccctatcgtcggccaggtctttcagtcacactgtaagggctgccctagtttgagcgaattgtggcgtagtacaaggaagtatcttcaaccagacaacctgtccaaggccgaagctgtacgtaacttcctggcttttatccaacatcttcgcaccgccaagaaagaggagattctccagattctgaagatggagaacaaagaagtcctgcctcagcttgttgatgcagttaccagtgctcagactagcgattcattggaggcaatcttggattttcttgacttcaaatctgattccagtatcatcttgcaggaacgtttcctgtacgcttgcggttttgcaagccatccaaacgaagaacttcttagggcattgatctcaaagttcaagggttctatcggctcctctgatattcgtgaaaccgtcatgattatcactggtactctggttcgtaagctttgtcagaatgaaggttgtaagctgaaggcagtggttgaagccaagaagctgatcctgggcggactggaaaaagcagagaagaaagaggacacacgtatgtacctgctggcattgaagaacgccctcctccccgaaggaatccccagcctcctcaagtacgcagaagctggagaaggcccaatcagtcaccttgctaccaccgccctgcaacgctatgatttgccatttatcaccgatgaagtcaagaagacattgaaccgcatctaccaccagaatagaaaagttcatgaaaagacagttaggactgcagctgctgccatcattcttaacaacaacccctcatacatggacgttaagaacatcctcctgagcattggtgaactgccccaagagatgaataaatacatgctcgccattgtccaggacatattgcgtttcgagatgcctgcaagcaagattgtgcgtcgtgttctgaaagagatggtagcccacaactacgatcgcttcagcaggtccggttcaagcagtgcttacactggctacattgaacgttccccccgtagcgcatctacctattccctggacatcctttactcaggttcaggtatacttcgtcgttccaaccttaacatttttcagtatatcggtaaggctggcctccacggcagtcaggtggtcatagaggctcagggtttggaagccctgatcgcagccactccagatgagggcgaggagaacttggactcctacgccggtatgagcgccatcctgttcgacgtgcaactcagaccagtcaccttcttcaacggatactcagacctcatgagcaagatgctgagtgccagcggtgatcccatctccgtagtcaagggcctgattttgttgatcgaccattcacaggagctccagcttcagtctggactgaaggctaatattgaggttcaaggaggtctcgctattgatatcagcggcgcaatggagttttctttgtggtacagggagtctaaaactcgtgtgaagaaccgcgtcacagttgttattacaactgacatcaccgtcgattcatcttttgtgaaggccggtctggagaccagcacagagactgaggccggtcttgagtttatctccactgtccagtttagccaataccccttcttggtctgtatgcagatggacaaggatgaagctcctttcaggcagttcgagaagaaatacgagaggttgtccaccggaaggggatacgtgtctcagaaaaggaaagaaagtgtccttgccggctgtgaatttcccctgcatcaggaaaattctgagatgtgcaaggtggtgtttgcccctcagcccgactccactagcagcggatggttc

SEQ ID NO: 16799 - DNA, 2682 bp, synthetic construct
  misc_feature 1..2682: note = source = /note="Description of Artificial Sequence: Synthetic coding sequence"
  source 1..2682: mol_type = other DNA
atgatactgcttgccgtgctttttctgtgcttcataagcagctactccgcctcagtcaagggacacacgactgggctgtcgcttaacaacgatcggctgtacaagctgacctactccaccgaagtgttgctcgaccgaggaaagggcaagctgcaagattcagtcggctacaggatttcgtccaacgtggacgtggctcttctttggagaaacccagacggcgatgatgaccagcttatacagatcaccatgaaggatgtcaacgtggaaaatgtcaatcagcagcggggagagaaatccatctttaagggtaagtcaccgagcaagatcatggggaaggagaacctcgaggcactgcaaagacctactctgctgcaccttatacacggtaaagtgaaggagttttactcgtaccaaaacgaggccgtggccattgagaacattaagaggggtctggcatcgctttttcagacccagctgtcgtccggaacgaccaacgaggtcgatatctcaggaaactgtaaggtgacctaccaagcgcatcaggataaggtgattaagattaaggcactggattcgtgtaagattgcgcgcagcggttttaccactccaaaccaagtgcttggagtgtcgtccaaggcaaccagcgttactacttacaagattgaggactcgtttgtgatcgcagtccttgcggaggagactcacaattttggattgaacttccttcagaccatcaaaggcaaaattgtctccaagcagaagctggagctgaaaacgacggaggcaggcccaagactcatgagcgggaagcaagcagccgcgattatcaaggcagtggattccaaatacacggcaattcctatcgtcggacaggtctttcagagccactgtaagggatgtccttcgctgtcggaactttggaggtcaacgcgaaagtacttgcagccggacaatctgtcaaaggcggaggcagtgagaaacttccttgcatttatccaacatcttagaaccgctaagaaagaagaaatacttcaaatcctgaaaatggagaacaaagaagtgctgccacaactggtggacgcagtgacttcggcgcagacttcggattctctcgaagcaattctggatttcctggacttcaagagcgactcgtcgattatccttcaggaacgctttctctacgcatgtggcttcgcatcgcatcccaatgaagagctcctgcgagcattgatatccaagttcaagggttccattggatcctccgatatccgggaaacggtgatgattatcactggcaccctggtcagaaagctctgccaaaacgaaggatgtaagctcaaggcggtggtcgaggcaaagaaacttatccttggcggactggagaaggcagagaaaaaagaagatacgagaatgtacctccttgcgcttaagaatgccctccttcctgaggggattccttccctcctgaagtacgccgaggcaggggaaggacccatctcacacctcgccacgaccgcacttcaacgatacgaccttccttttatcactgatgaggtgaaaaagactctgaaccggatttaccatcagaaccggaaggtgcacgaaaaaaccgtccggaccgcagccgcagccattattctcaacaacaacccctcctacatggatgtcaagaatattctcctttcaatcggtgaactccctcaagaaatgaataagtacatgctggcaatagtgcaggacattcttcgctttgaaatgcctgcatccaaaatcgtgcggagggtgttgaaggaaatggtggcccataactacgatcggttttcaagaagcggttcctcatcggcatatactggatacattgaacggtcccccaggtcggcctccacttacagcctggatattctttactcaggatcaggcatcctcagaagatcgaacctgaacatctttcaatacatcggaaaggcaggccttcatggtagccaggtcgtgattgaagcccagggtctggaagctcttattgccgcaactcctgatgaaggcgaagaaaaccttgattcatacgctggaatgagcgcgatcctgtttgatgttcaactcagacctgtgactttctttaacggatactccgacctgatgtcgaagatgctgtcggcatcgggagatcctatctctgtcgtgaagggactcatactgctcattgaccattctcaggagttgcaactgcaatccggactgaaagcaaacatagaagtgcaaggaggacttgcaattgatatttcgggtgccatggaattttcgctctggtaccgcgagtccaagactcgggtcaaaaacagagtcactgtggtgataaccactgacattaccgtggactcatcatttgtgaaagctgggctggaaacttcgactgaaactgaggccggcttggaattcatttccaccgtccagttctcacaatacccttttcttgtgtgtatgcagatggataaggatgaagcaccgttcagacaattcgagaaaaagtacgaaagactctccacgggcaggggttacgtgagccaaaagcggaaggaatcagtgctggcagggtgtgagtttccgcttcatcaagaaaattccgagatgtgtaaagtggtctttgcacctcagccagactcaacttcttcgggttggttt

SEQ ID NO: 16800 - DNA, 2682 bp, synthetic construct
  misc_feature 1..2682: note = source = /note="Description of Artificial Sequence: Synthetic coding sequence"
  source 1..2682: mol_type = other DNA
atgatactgctggcggttctgttcctgtgtttcattagcagctactccgccagcgtgaagggacatacaactggcctgtctctaaacaacgaccgcctctataaactgacctactcaacggaagtcttgctggacagaggaaagggtaagctccaagatagcgtaggctatcggatttcttcaaatgtcgatgtggccctgctgtggaggaacccagacggcgatgacgaccagttaatacagatcacaatgaaggacgtgaacgtagaaaatgtcaatcagcagagaggtgaaaaatcaatcttcaagggcaagagcccaagcaaaatcatgggaaaggaaaacctggaagccctgcaacgtcctactctgctgcacttgatccatggtaaagttaaggagttctattcttatcagaacgaagcagtcgcgattgagaatataaaaaggggactggcctccctgttccagacacaactgagtagcggaacgaccaacgaagtggatattagcggtaactgcaaagttacctaccaggcacatcaggataaggtgatcaagatcaaagctctggactcatgtaagatcgcgagaagcggcttcactacacctaaccaggtcctcggtgtgtccagcaaagccactagtgtcactacctacaagattgaagatagcttcgtgatcgccgtgctcgcggaggaaacgcacaatttcggcctaaatttcctgcagacgattaagggtaaaatcgtaagtaagcagaaactggaacttaagaccaccgaggccggcccgagattgatgagcgggaagcaggccgccgcaattatcaaagccgttgacagcaagtacactgcaatccccatcgttggacaggttttccagagtcactgtaagggatgcccttccctgagcgaactgtggcgatctacccggaagtatttgcagcccgacaacctttctaaggctgaggccgtgcgcaatttcctggcttttatccaacatctgcgtacagctaaaaaggaggaaatccttcagattttgaagatggaaaacaaggaagtgctgccgcagctggtggatgctgtcacatccgcacagacttcggattctctggaagccatcctggactttctggacttcaagtccgattcatcaatcattctccaggagaggttcctctatgcctgtggcttcgcctctcatccaaatgaagaactcctgagagcattgatcagcaaatttaaggggagtataggaagctcagacatccgggagacggtgatgattatcaccgggacgcttgtaagaaagttgtgccagaatgagggttgtaaactgaaagccgtggttgaggccaagaaattaatattagggggtttggagaaggcagagaaaaaagaggataccagaatgtacctcctggcgctcaagaatgctctactccctgagggtatcccatctctcctcaagtatgccgaggccggggaaggcccaatttcacatctggccacaacagcgctacagagatacgacctcccctttatcacagatgaggtgaaaaagacgcttaacaggatatatcaccagaaccgaaaggtacatgaaaagactgtgaggaccgcagcggctgctattatcttgaacaataacccttcatacatggatgtaaaaaacattcttctcagtattggagaactgccacaagagatgaataagtacatgctggctattgttcaggacatcctgcgtttcgaaatgccagctagcaaaatcgtcaggcgggtgttgaaggagatggtcgctcataattatgaccggttcagtaggtcaggctcgagcagcgcatatactgggtacatcgaacgctcccctcgatctgctagcacatactcgctggatatcctttactccggctctggaatcttgcggaggtccaacctgaacatctttcagtacattggaaaggcaggacttcatggtagccaggtggtcatagaagctcagggcctggaggctctaatcgcggctaccccagacgaaggtgaagagaatctggactcttacgcaggcatgtcagccatactgttcgacgtccaattacggccagtcaccttcttcaatggctattccgacctgatgtcgaaaatgctcagcgccagtggggatccaatctcagtcgttaagggactgatccttctgattgaccattcacaggagttgcagctgcagtccggcctgaaagcaaatattgaggtgcagggagggctagccattgacattagcggcgccatggagttcagtttatggtaccgtgaatctaagacccgggtgaaaaacagagtgacggtggtgatcacaaccgacattacagtggactcatcctttgtcaaagcaggactggagacatcaacagagaccgaggccggtctcgagtttatatctactgtccagttctcacagtacccattcctggtgtgcatgcagatggacaaagatgaagccccctttaggcagtttgagaagaagtacgagcgcctttcaaccgggaggggctacgtcagccagaagagaaaagagtcagtgcttgctggctgcgagtttcctcttcaccaagaaaactcagaaatgtgtaaagtggttttcgcaccccagccagatagtacatcttctggctggttc

SEQ ID NO: 16801 - DNA, 2682 bp, synthetic construct
  misc_feature 1..2682: note = source = /note="Description of Artificial Sequence: Synthetic coding sequence"
  source 1..2682: mol_type = other DNA
atgattttattagctgttttattcctttgtttcattagttcatattcagcatcagttaaaggacatactacaggacttagtttaaacaatgatcgtctttataaattgacctattcaactgaagttttattagatagaggaaagggaaaattacaagactctgttggttatcgtatctcatcaaatgtagatgtcgctcttttatggagaaatcctgatggagatgatgatcaattaattcaaattaccatgaaggatgttaacgttgaaaacgttaatcaacaaagaggagaaaaaagtatttttaaaggtaaaagtccatcaaaaataatgggtaaagagaatttagaagcacttcaaagaccaactttattacatcttatacatggaaaagttaaagaattctattcatatcaaaatgaagctgttgcaattgaaaatattaagagaggactagctagtttatttcaaactcaacttagttctggaacaactaatgaggttgacattagtggaaactgtaaggttacatatcaagctcatcaagataaggttattaaaattaaggcattagactcttgcaaaatagcaagatcaggttttacaacaccaaatcaagtacttggagtttcttcaaaggcaactagtgttactacttataaaattgaagattcttttgttattgctgttttggcagaggaaactcataatttcggattaaattttttacaaacaattaagggtaagattgtgtcaaaacaaaaattagaattaaaaactacagaagctggaccacgtcttatgtcaggaaaacaagctgcagcaatcattaaagctgttgattcaaaatatacagcaattccaatagtaggacaagtttttcaatctcattgtaagggttgtccatcactttctgaattatggaggtccacaaggaaatatttacaaccagataatttaagtaaagcagaagctgtacgtaattttcttgcatttatacaacatttgagaacagcaaaaaaagaagaaattttacaaatacttaaaatggaaaataaagaggttttaccacaattagttgatgcagttacctcagctcaaacttctgatagtcttgaagcaatattagattttttagatttcaagtctgattcatctataattctacaagaaagatttttatatgcatgtggatttgcatcccatccaaatgaagaattgttaagagctttaattagtaagtttaagggatctattggttcatcagatattagagaaactgttatgataattacaggaactcttgtaagaaaattatgtcaaaatgaaggatgtaaattaaaagctgtagttgaagctaaaaagttaatccttggtggattggaaaaagcagaaaagaaagaagatacaagaatgtatttattggcattaaaaaatgcattacttccagaaggaattccttctcttttaaaatatgcagaagctggagaaggaccaatttctcatctagctactaccgcattacaaagatatgatcttccatttataacggatgaagttaaaaaaactcttaatcgaatttatcatcaaaatcgtaaagtacatgaaaagacagttcgtacagcagccgcagcaattatccttaataataatccttcatatatggatgttaaaaatattttattatcaattggtgaattgccacaagaaatgaataagtatatgttggctattgtacaagacattttaagatttgaaatgcctgcaagtaaaattgttagaagagttttgaaagaaatggtagcacataactatgatagattttctcgttcagggtctagtagtgcctatacaggatatattgaaaggtcaccaagaagtgcatcaacttatagtcttgacattttatatagtggatcaggaatattaagacgttcaaatttaaatatttttcaatatattggaaaagctggacttcatggaagtcaagtggttattgaagctcaaggacttgaagcacttattgctgcaactcctgatgaaggagaagaaaaccttgattcatatgcaggaatgtctgctattctttttgatgttcaattacgtcctgtaacattctttaatggatattcagaccttatgtctaaaatgttatcagcatctggggacccaatctctgttgttaaaggattaattttacttattgatcatagtcaagaattgcaattacaatcaggacttaaagcaaatattgaagttcaaggaggacttgctattgacattagtggggctatggaattttcattatggtatagagaatcaaaaacaagagttaaaaatagagttactgttgttataactactgatattactgttgattcaagtttcgttaaggctggacttgaaactagtactgaaacagaagcaggattagaatttattagtacagttcaattttcacaatatccatttttagtttgtatgcaaatggataaagatgaagctccatttagacaatttgaaaaaaaatatgaaagattaagtactggtagaggatatgtatcacaaaaacgaaaagaatcagtacttgctggatgtgaatttccattacatcaagaaaattcagaaatgtgtaaagttgtgtttgctccacaaccagattcaacaagttcaggatggttc

SEQ ID NO: 16802 - DNA, 2682 bp, synthetic construct
  misc_feature 1..2682: note = source = /note="Description of Artificial Sequence: Synthetic coding sequence"
  source 1..2682: mol_type = other DNA
atgatcttgttggctgtgctgtttttgtgcttcatttcatcctattctgcaagtgtgaaaggccataccacgggacttagtttgaacaatgatcgcctgtacaagctcacgtattctaccgaagtgctactggaccgcggtaaaggtaagctgcaggacagcgtaggataccgcatcagctcaaatgtggatgtggcccttttgtggcgcaatcccgacggcgatgatgatcagctgatccaaataactatgaaggatgtaaatgtggagaacgtgaaccagcagcgcggcgagaagtctatctttaaaggaaagtccccgtctaagataatgggcaaggagaacctggaagccctgcagcgaccgacgctgctacacttaattcatggtaaggtcaaggaattctactcctatcaaaacgaggcagtagctatagagaacatcaagagagggctggcgagcctgtttcagacacaattgagctcgggtaccacaaacgaggttgatattagtggcaactgcaaagtaacgtatcaagctcaccaggataaggtgataaagatcaaggcgctcgattcttgtaagatagctcggtctggatttactactccgaaccaagtgcttggagtgagttctaaagcaacctcagtgactacgtataaaatcgaagacagtttcgtgatagccgtactggccgaggagacgcataactttggactgaattttctgcagaccattaagggcaagatcgtcagtaagcagaagctggagctcaagacaacggaggcaggaccgcgtttgatgtcgggtaagcaggccgccgccattatcaaagccgtcgactccaagtacaccgccatccccatcgtgggtcaggtttttcagtcgcactgtaagggttgcccatcattgtcggagctgtggcgctctacacggaaatacctgcagccggacaatctatcaaaggcagaggccgtccgtaactttctggcattcatccagcatctgagaaccgccaagaaggaagaaatcttacaaattctgaaaatggagaacaaggaggtcctcccccagctggtggatgcagtgacgtcggcgcagacttcagatagcctggaggcaatcctggacttcctagacttcaagtcggacagtagtataattttacaagagcggtttctgtacgcgtgtggcttcgcatcgcacccaaatgaagaacttctacgcgctttgatctccaagtttaagggtagcattggctcatctgatatccgcgagacggttatgattatcacgggaacgctggtgagaaagctgtgccagaatgagggatgcaaactgaaagctgtcgttgaggccaagaagctgatcctaggaggactggagaaagctgagaagaaagaagatacccgaatgtacctattggcgttgaagaatgccctgctgccggagggcattccgagcctgctgaagtatgccgaggcgggtgagggaccaattagccatctcgccacaacggcgctacagagatacgatctccccttcataacggacgaagtcaagaaaacgttgaaccgcatttatcatcagaatcgcaaggtccacgaaaagaccgtaaggacagcagccgctgcaatcatcttgaataataatccgagttatatggacgtcaaaaacatacttctctcaatcggcgagctgcctcaggagatgaataagtatatgctagcaatcgtccaagatatcctacgctttgaaatgcccgcctccaagatagtgcgtagggtgttgaaggagatggtggcacacaattatgatcgattctcacgctcgggctcgagcagcgcgtataccggctacattgaaagaagcccgcggagcgcctccacttactctttggatatcttgtattctggaagcggaatactgcgaagaagtaatttgaatatcttccagtatatcggcaaggctggcctgcatggttcccaggtggtcatagaggcccagggccttgaggctttaattgccgctacccctgacgaaggcgaggagaatttggactcctacgccgggatgagtgccatcctgtttgatgtgcagctgcgcccggtcacttttttcaacgggtactctgatttgatgtccaagatgctgagtgccagtggtgatccgatctctgtggtgaaaggcctgatcctcctgattgatcactcgcaggaactgcagctccagagtggcctcaaggcgaacatcgaggtgcagggaggtctggcaatagacatttcgggagcaatggaattttccctgtggtaccgtgagtcgaaaacgcgggtgaagaatcgcgtgacggtggttattacaactgacatcaccgttgattcttcgtttgtgaaggccggtctggagacctcgacggagactgaagcgggtcttgagttcatctcgactgtgcaattcagccagtaccccttcttggtgtgcatgcagatggataaggatgaggcccccttccgtcagtttgagaagaagtacgagagactgtccaccggcagggggtacgtttcccagaagagaaaggagtcggttctggccggatgcgagttcccgctgcaccaggaaaactccgagatgtgcaaggtcgtatttgcgccgcagccggactcgaccagcagcggatggttt

SEQ ID NO: 16803 - DNA, 2682 bp, synthetic construct
  misc_feature 1..2682: note = source = /note="Description of Artificial Sequence: Synthetic coding sequence"
  source 1..2682: mol_type = other DNA
atgattctgctggctgtcctgtttctctgctttatctcgtcgtactcagcgtcagtgaagggtcacaccaccggcctgtcactgaataatgacaggctctataagctgacttacagcaccgaagtcctgcttgaccgcggtaaaggaaaattgcaggactcagtgggctaccgcatttcgtcaaacgtagacgtggctctgctctggcgcaatcccgacggcgacgatgaccaactcatccagatcacgatgaaggatgtaaacgtggaaaatgtgaaccaacagcgcggagagaagtccatcttcaaagggaaatcgccttcaaagattatgggaaaggagaacctggaggccttgcagcggccgactcttctgcatctgatccatggcaaggtgaaggaattctactcgtaccagaacgaagccgtggccattgagaatatcaaacgcggactggcctcgctctttcagacccaattgtcctcagggaccactaacgaggttgatatcagcggaaattgcaaggtgacgtatcaggctcaccaagacaaggtgatcaagatcaaggccctggacagctgcaagattgcccggtcaggattcaccactccaaaccaggtgctgggggtgagttctaaggcaacctcagtcaccacctacaagatcgaagattccttcgtgatcgcagtcctggctgaagaaacccacaactttggacttaacttccttcagaccatcaagggcaagatcgtgagcaagcagaagctcgaactcaaaaccactgaggcaggaccaagacttatgtcgggcaagcaggccgcggcaatcatcaaggcggtcgatagtaagtacaccgctatccctatcgtcgggcaggttttccagtcacattgtaagggttgcccttccctgagcgaactgtggcggtccacccgcaagtacctgcaaccagataacctgagcaaagctgaggcggtccggaactttctcgccttcatccaacatctgcggactgccaaaaaggaggaaattctgcaaatcctgaaaatggagaacaaggaagtgctgccacagctggtggatgctgtaacttctgcccagacctccgactcactggaagcgatcctggacttcttggatttcaagagcgactcctccatcattctgcaagagcggttcctctacgcctgcggatttgcatcccatccgaatgaagaactcctccgtgcactgatctccaagttcaagggatccatcggatcgtccgacatccgggagactgtcatgatcatcaccggaaccctggtgagaaagttgtgtcaaaacgaaggatgcaagctcaaagcagtggtggaggccaaaaaacttatcctggggggtcttgaaaaagccgagaaaaaagaagatactaggatgtacctcctggcattgaagaatgcgctcctccctgagggtatcccgtcgctgcttaagtacgccgaggccggcgaaggtccgatcagtcacctggccactactgccctgcagaggtatgatctgccattcatcacggacgaagtgaagaaaacgctcaaccgcatctaccaccagaaccgtaaggtgcacgaaaagactgtgaggactgctgcagctgccatcatcctcaataacaacccctcgtacatggatgtaaagaatattctgctgtcaataggagaactcccgcaggaaatgaacaagtacatgctggccattgtgcaggacatcctgaggttcgagatgcctgcgtccaagattgtgagacgcgtgctgaaggaaatggtcgcgcacaactacgatcgcttctcgagatcgggaagctccagcgcatacactggatacatagaacggagcccgcgatcagcgtccacttactcgctggacatcctctacagcggttcgggcatcttgcgccgctcgaatctgaatatctttcaatacataggaaaggcgggactgcacgggtcgcaagtcgtgatcgaggcccagggactggaggccctgatcgcggcgactcccgatgaaggcgaagaaaacctcgactcctacgcgggaatgtccgccattcttttcgacgtccagctgcggccggtcaccttcttcaacggctacagcgacttgatgagtaaaatgctgagcgcctcaggcgaccccatttctgtggtgaagggactcattctccttattgatcatagccaagagctccaattgcaatcgggtttgaaagctaatatcgaagtgcagggagggctcgccatcgacatctccggggctatggaattctctctctggtaccgcgagagcaaaactagagtgaagaaccgggtgactgtggtcatcacgaccgacataactgtcgactcgtcattcgtgaaggcaggactggaaacctcgaccgagacggaagccggactcgagttcatcagcaccgtccagttctcacagtatccgttccttgtgtgtatgcaaatggacaaagatgaggcaccgttccggcagtttgagaagaagtacgaacgactgagtaccgggagaggctacgtgtcccaaaagcggaaggagtcggttcttgcgggctgcgagtttccgcttcaccaggagaactccgagatgtgcaaagtcgtgttcgcgccacagccggatagcacctcgtccggatggttt

SEQ ID NO: 16804 - DNA, 2682 bp, synthetic construct
  misc_feature 1..2682: note = source = /note="Description of Artificial Sequence: Synthetic coding sequence"
  source 1..2682: mol_type = other DNA
atgatactgctggccgtcttatttctctgtttcattagctcatacagtgcctcagtcaagggccacacaacggggctgtctctgaacaatgacagactctacaaactgacctattcgacagaggtcttgctcgatcgaggtaaaggtaaacttcaggattcggtggggtatagaatttcctccaacgtggacgtcgcactcttatggaggaatccagatggggacgacgatcaactgattcagatcaccatgaaggacgtcaacgtggagaatgtgaaccagcagagaggagaaaagagcatctttaagggaaagtcaccatcaaaaatcatgggaaaagagaaccttgaagcccttcagcgtccaacactgttgcatctcattcacggaaaggttaaagagttttacagttaccagaacgaggccgttgctatcgagaacattaagcgaggcctggcttccctgtttcaaacccagttgagtagcggaaccactaacgaagttgacatctccggcaattgcaaggttacttaccaggcccatcaggacaaagtcattaagatcaaagcactagatagctgcaaaattgctagatcaggctttaccacacctaatcaggtactcggtgtttcatctaaagccacttctgtgaccacctataaaatcgaggatagtttcgtgattgcagtgctggcggaagagacccacaacttcggcctcaattttctgcagacaattaagggcaaaatagtgagcaagcagaagctggagttgaagactactgaagcgggaccaaggctaatgtctggcaagcaggccgctgccatcattaaggccgtggattcaaagtatacagccattcctatcgtcggacaggtcttccaatcccattgcaaaggatgcccgtccctttcagaactgtggagatcaaccagaaaatacctccagccagacaatctttcaaaagccgaggccgtccgaaatttccttgcctttatacagcacctccgaacggcgaagaaggaagagatcctgcagattctgaagatggagaataaagaggtgttgcctcaactcgtagacgcggtcacctctgcccagacgtccgattccttggaagctatcctggatttcctggatttcaaatctgactcctctattattctgcaggaaagatttctttatgcctgtgggttcgctagccaccctaacgaagaactattgagagcccttatttctaagttcaagggcagtattgggtcctctgatatccgagaaaccgttatgatcattactggaacccttgttagaaagctgtgccaaaatgaaggctgcaaactgaaggcagtggtggaggccaaaaaactgatcctcggcggtctggaaaaggccgaaaagaaggaggatacccgtatgtacctattggcactgaagaacgccctgctgcccgaaggtatcccctccttgcttaaatatgccgaagcaggcgaagggcctatttcccacctagcgaccacagccttgcagaggtatgatctccccttcattaccgatgaagtgaaaaagactctgaaccgaatttatcaccaaaatcgaaaagttcatgaaaagacagtccgaaccgctgcagccgccatcattctgaataataatccgagctacatggacgtgaagaatattctgctgtccattggggaactgccacaagagatgaacaagtacatgcttgccatcgtccaggacatcctgcggttcgaaatgcccgcctcgaagatcgtcagaagggtattgaaggaaatggtagcacataactatgataggttttctcgaagcggcagttcctctgcatatactggatacattgaaagaagcccgcgttctgccagcacttacagcttagacatactttactccggctccgggatcctgagacgatcgaacctgaacattttccagtacatcggcaaggcaggcctgcatggcagccaggttgttatcgaagcccaggggctcgaagcccttattgccgccacacccgatgagggagaagagaatctggatagttacgccgggatgtccgcaatcctgtttgacgtgcagctccggcccgtgacattcttcaacggttatagtgacctgatgtccaagatgctttcagcatccggagaccccatatccgttgtgaagggcctaatcttgcttatcgaccactcacaggaacttcagctacagtctgggctgaaggcaaatatcgaagtgcagggaggactggcaattgatatttctggcgccatggagttttcattgtggtatcgagaaagcaagaccagggttaagaatagggtcacggtggtaattacaacagatatcactgtagattcttcttttgtaaaggcgggactcgagacatcgacggaaaccgaggccgggctggagtttatttccactgttcagttttctcagtaccctttccttgtgtgcatgcagatggacaaagacgaggccccttttagacagtttgaaaagaagtacgagcgtctgagcacagggcgaggatacgtgagccagaaaaggaaggagtcagtgctggctggttgtgaattccccttgcatcaggaaaattccgagatgtgtaaagtcgtattcgccccacagcctgactccactagctccggatggttc

SEQ ID NO: 16805 - DNA, 2682 bp, synthetic construct
  misc_feature 1..2682: note = source = /note="Description of Artificial Sequence: Synthetic coding sequence"
  source 1..2682: mol_type = other DNA
atgatcttgctcgccgtgctgtttctgtgtttcatttcaagctactcggcatcggtcaaaggacacactaccggtctttcgttgaacaacgaccggctgtacaagctgacctacagcactgaggtcctgctggaccgcggaaagggcaagctccaggactcagtgggatatagaatctccagcaatgttgatgtggccctgctgtggagaaatccggatggagatgacgatcaactcatccagattaccatgaaggacgtgaacgtggaaaacgtgaaccaacagagaggagagaagtcgatcttcaagggaaagtcgccatctaagatcatgggcaaagagaacctggaggcgctgcaaagaccaactttgctccatctgatccacggaaaggtgaaggaattctacagctaccaaaacgaagcggtggccattgagaacattaagcgcggcctcgcgtcgctgttccagacccaactctcctccggaaccaccaacgaggtggacatcagcggaaactgtaaggtcacttaccaggcgcaccaagataaggttatcaagattaaggcgctcgactcatgcaaaatcgctaggtccggtttcacgactccgaatcaggtcctcggggtcagctccaaggccacttcagtcactacctacaagatcgaggactccttcgtcattgccgtcctggcggaggaaacccacaacttcgggctgaatttcctgcaaaccattaaagggaaaatcgtctccaagcagaagctcgaactgaaaactacggaggccgggccgcgcctgatgtcaggcaaacaggctgccgccatcatcaaggcggtggattcaaagtatactgctatccctatcgtcggacaagtgttccaatcgcattgcaagggttgtccgtcgctgtccgagctgtggcgatcgacccggaagtacttgcaaccagacaacctctccaaggcagaggccgtgcgcaatttcctggcgttcatccagcacctccggactgctaagaaggaagagatcttgcagatcctcaaaatggaaaacaaagaagtgctgcctcagctggtggacgccgtgacctcggcccaaacttcggacagcctggaagccatcctggacttcctggacttcaagtccgacagcagcatcatcctccaggaaagatttctgtacgcctgcggattcgcgagccatccaaacgaagagttgctgcgcgctcttatctcaaagtttaagggatccatcggaagctcagacattcgagaaacggttatgatcatcaccggtaccctggtgcgcaaactttgccagaatgaaggctgtaagttgaaagccgtcgtggaagcaaagaagctcattttgggaggactcgaaaaggccgagaagaaggaagatacccggatgtacctgctggcgttgaagaacgccttgttgcctgaaggaatcccttccctgctgaaatacgcggaggctggagagggaccaatctcccacttggccaccactgcccttcaaaggtacgatctccctttcatcacggatgaggtgaagaaaaccctgaatcggatctatcaccaaaatcgcaaggtgcatgaaaagactgtgcggaccgccgccgctgcaatcattttgaacaacaatccgagctacatggacgtgaagaatatcctgctctccattggagaattgcctcaagagatgaacaaatacatgctggcgatcgtccaggatatcttgcgcttcgagatgcccgcgtctaagatcgttcggagagtgctgaaagaaatggtggcccacaattacgaccgcttctcccgcagcggttcgtcctcagcttacactggttacattgagcgctcaccgcggtccgcatcgacgtactcattggatatcctctactccggctcaggcatcctgaggagatccaacctcaacatcttccaatacataggtaaagcgggtctgcacggctcacaggtggtgatcgaggcgcaagggttggaggcattgattgcggccaccccggacgagggggaggagaacctggattcatacgcgggcatgtccgcaatcctgttcgatgtgcagttgcggccagtgacgttctttaacggatactcggatctgatgtcgaagatgctgtcagcttcgggagatcctatctcggtggtcaaaggcctcatcctgctcattgatcacagccaggaactgcaacttcagtcaggcctgaaagcaaacatcgaggtccaagggggcctcgccattgacatttccggagctatggaattctcgctctggtacagggaaagcaaaacccgcgtcaaaaacagggtgaccgtcgtcattactaccgacattactgtggatagcagctttgtgaaggcaggacttgaaacctcaactgagactgaggccggtcttgaattcatcagcactgtgcaattttcgcagtacccattcctggtgtgcatgcaaatggacaaggatgaggccccgttccggcagtttgagaagaaatatgaaaggttgtcaactggaaggggttacgtgtcccaaaaacggaaggaatcagtgctggcagggtgcgaattcccactgcaccaagagaactcagaaatgtgcaaagtcgtctttgctccacaaccggattcgacgtccagcggatggttc

SEQ ID NO: 16806 - DNA, 2682 bp, synthetic construct
  misc_feature 1..2682: note = source = /note="Description of Artificial Sequence: Synthetic coding sequence"
  source 1..2682: mol_type = other DNA
atgattctgctggcagtactctttctatgttttataagcagttactctgctagtgtcaaggggcatacgaccggactgagtctgaacaacgaccgactttacaaactgacatattcaaccgaagttctgctggacagagggaagggtaagcttcaggattctgtcggctaccggatctcctcgaatgtggacgtagcactgttatggcggaacccagatggcgacgatgaccagcttattcagataacaatgaaggatgtcaatgtagaaaatgtgaaccaacagcgaggcgaaaagtccatcttcaaaggaaagagcccctctaagatcatgggaaaagaaaatttggaggccctccaaaggccgaccctcctgcatctaatccacggaaaggtgaaggagttctactcatatcagaatgaggccgtggcaatcgagaacattaagaggggacttgctagtctgttccagacccaattgtcaagcggaactacgaacgaggtcgacataagtggaaattgcaaagtgacataccaggcccaccaagacaaggtgattaaaatcaaagcgctggacagctgcaagatcgcccgctctggattcacaaccccaaatcaggtactgggcgtcagcagcaaggccacgtccgtaaccacgtacaaaatcgaggattccttcgtcatagccgtgctcgctgaggaaacacacaattttgggctgaattttctgcagacgattaagggaaagattgtgtcaaagcaaaagctggagctaaagactactgaagccgggccccgactaatgtctggaaagcaggccgctgcaatcattaaagccgttgactccaagtatactgcgatccctatcgtgggccaggtattccagtcccactgtaaaggctgtccgtctctctccgaattatggaggagcactcgcaaatacctgcaacctgacaatctgtctaaagcagaggcagtgagaaacttccttgctttcatccagcatctgcgcaccgccaagaaagaggaaattttgcagatcctgaagatggaaaacaaggaggtgctgcctcagctggttgatgcagtcacttccgcacagacctctgactcactggaggcgattttggattttcttgactttaaatctgattccagtataatactgcaggagcgattcctatacgcctgtggatttgcctcccaccctaatgaagaacttctccgggcccttatttctaagtttaaaggttctatcgggtcatcggatataagagagaccgtgatgattataacggggacactcgtcaggaaactgtgccagaatgaaggctgcaaattgaaggccgttgtggaagctaagaaactgatcctggggggtctggaaaaggcggaaaaaaaagaggacacccgaatgtatctgcttgctctcaagaacgcactcctgccagagggtataccttcattgctcaagtacgctgaggccggtgagggcccgatttctcatctcgcgaccaccgccctacagcggtacgatttgcctttcattaccgatgaagttaaaaagactctgaatcgtatctatcatcagaatcgcaaagttcacgagaaaactgtaagaactgctgctgctgcaatcattcttaataataacccatcttatatggacgtgaagaacatactgctctcaattggcgagctgccacaagagatgaacaagtacatgctcgcaatcgtgcaggatattttgcggttcgagatgccagcatccaagatagtacggagagtattgaaagaaatggttgcgcataactacgaccggttcagtcgaagcggaagttctagcgcatacactggctacattgaacggtcacctcgaagcgcgtcgacctactcactggatatcctctattcggggagtggtattctaagaaggtcaaacctgaatatttttcagtacatcggcaaagcagggctgcatggtagccaggtagtgatcgaggcacagggtttggaggctctgatagcagcaacaccagatgaaggggaagagaatctggactcttacgccggcatgtcggctatactgtttgacgtgcagttgaggccagttacctttttcaacggatacagcgatcttatgagcaagatgctgtcagcgtccggagaccctatatccgttgttaagggcctcatacttctcatcgaccattcccaggagctacaacttcagagtgggctgaaagcaaatatcgaagtacaggggggcttggcgatagatatatctggggccatggaattctcgttgtggtaccgagagagcaaaactagagtgaagaatagagtaactgtggttattaccactgatataaccgtcgacagctctttcgtaaaagctgggcttgagacgtctaccgaaaccgaagccggactagagtttatatcaaccgtgcaattttcgcagtatcctttcttggtatgcatgcagatggataaagacgaagctccgtttcggcagtttgagaaaaagtacgagagactaagcactggacgcggttacgttagccagaagcgaaaagagagtgtgttggccggatgtgaattcccgctgcatcaggaaaatagtgagatgtgtaaagttgtgttcgctcctcagcctgactctacctctagtggatggttc

SEQ ID NO: 16807 - DNA, 2682 bp, synthetic construct
  misc_feature 1..2682: note = source = /note="Description of Artificial Sequence: Synthetic coding sequence"
  source 1..2682: mol_type = other DNA
atgattttgctggcagtattgttcctttgcttcatttcaagctacagcgcaagcgttaaggggcacactacagggctctccttgaataacgatagattgtacaaactgacatattccactgaagtactgctggatagagggaagggaaagttgcaagactcagtgggatatagaatctcgagtaatgtggatgttgccttactgtggcgcaatccggacggagacgatgaccagctgatccaaatcacgatgaaggacgtcaacgtcgaaaacgtcaaccaacagcggggagagaaaagcatcttcaagggaaagagccctagcaagataatgggaaaagaaaacctggaggctctccaaaggcctacccttctccatctgatccacgggaaagtgaaagagttttactcctatcagaacgaggctgttgctattgagaacatcaaacgcggacttgcctcgctcttccagacccagctgagcagtggaaccactaatgaggtggatatctctgggaactgtaaagtgacttaccaggcacatcaagataaagtgatcaaaatcaaagcacttgactcatgcaaaattgcacgatccgggttcaccacccccaatcaggttctgggcgtgagttctaaggccaccagcgtaaccacttacaagatcgaggactcattcgttatagcggtactcgcggaagaaactcacaattttgggctcaactttctccagacaatcaagggtaagatcgtctcgaaacaaaagcttgaattgaagaccaccgaggccgggcccagactgatgagcggtaaacaagccgccgctattattaaggctgtggacagcaaatatacagcaatcccaatcgttggacaggtgttccagagccactgcaagggctgcccatccctgtctgaactttggcgttcaactcggaaataccttcagcccgacaacctgtctaaagccgaggccgtcaggaactttctggcctttatccagcacctgcgcacagccaagaaggaagaaatactccagatccttaaaatggaaaataaggaggtgttgcctcaactggtcgacgccgtgacttcagctcagacatccgactcactggaagccattctggattttttggatttcaaaagcgatagcagtatcatacttcaggaacgctttctttacgcttgcggattcgcgagtcatccgaacgaagaactgcttagagctctcatctcaaagtttaagggatccataggcagcagcgacataagggaaaccgtaatgatcatcaccgggactctggtcaggaaactctgccaaaatgaaggctgcaaactcaaagccgtcgtggaagctaagaagctcatcctgggcggcctcgagaaagcagaaaaaaaggaggatacaagaatgtacctgcttgcactcaaaaatgcactgctccctgaggggattcctagcctccttaagtacgctgaggcaggagagggcccaattagccacctagccactactgccctgcagcgatatgatctgccttttataaccgatgaagtgaagaaaacccttaaccgaatttaccatcagaacagaaaagtgcacgagaagaccgtgagaaccgctgccgcagccatcatcctgaacaataacccgtcgtacatggatgtgaaaaacatcctgctcagtatcggggaactcccacaagagatgaacaaatatatgttagccatcgtccaagatatccttcgcttcgaaatgccagcttcgaagatcgttcgccgagtgcttaaagaaatggtcgcccacaattacgatcgcttttccaggagcggcagctcatcagcttacactggctatattgaacgttcgcctagatcagcaagcacgtacagtcttgatatcctgtattctggcagtggtatacttagaaggagcaacctgaacatctttcagtatataggcaaggcagggctgcatggatcccaggtggttatcgaggcccagggactcgaggcactgattgctgctaccccagatgagggggaagagaacctggactcttatgctggcatgtcagcgatcctgttcgatgttcagctcagacccgttacattctttaacggatatagcgatctgatgagtaagatgctgagcgcctccggggatcctatctcggtcgtcaagggattgattcttctcatcgaccattcacaagaattgcagttgcagtccggcctgaaggcaaacatcgaggtccagggcggacttgccatagacataagcggcgctatggagttttcactgtggtaccgcgagagcaagaccagggtgaaaaacagagtcaccgttgtgatcaccactgatatcacagtggactctagctttgtcaaggcaggattggagacctcgacagagaccgaagcagggctcgagtttatttccactgtccagttttcccagtatccattcctcgtgtgcatgcagatggacaaagatgaagccccgtttaggcaatttgagaagaaatacgagaggctgtcaacaggaaggggctatgtgagccaaaaacggaaggaaagtgtcctggccggctgcgagtttccacttcatcaggaaaactccgagatgtgcaaagtggtattcgctcctcagcccgacagcacttcctcaggatggttc

SEQ ID NO: 16808 - DNA, 2682 bp, synthetic construct
  misc_feature 1..2682: note = source = /note="Description of Artificial Sequence: Synthetic coding sequence"
  source 1..2682: mol_type = other DNA
atgattctgctggccgtgcttttcctctgttttatcagctcgtattcggctagcgtgaagggacataccaccggcctgtccctcaacaatgatcggctgtacaagctgacttacagcaccgaggttctgctggaccgcggaaaaggcaagctgcaagattcggtgggctacagaatctcgtccaatgtagatgtcgcgttgctctggaggaacccggatggagacgacgaccagctcattcaaatcactatgaaagatgtcaatgtagaaaacgtcaaccagcagcgcggtgaaaagtccatctttaagggaaagtctccatcgaagattatggggaaggagaacctggaagccctgcagcgcccgactctccttcacctgatccatggaaaggtgaaggaattctattcataccagaatgaagccgtggccatcgaaaacatcaaacggggtctggcctcgttgttccagactcaactctcatcggggactaccaacgaggtcgatatctccggaaattgtaaagtgacctaccaggctcatcaggacaaagtgatcaaaatcaaggcattggactcgtgcaagatcgcccgcagtggttttaccaccccgaatcaggtgttgggagtctcaagcaaggccactagcgtgaccacctacaagatcgaggactcatttgtgattgccgtgctggccgaggaaactcacaattttggactgaacttcctgcagactatcaagggtaagatcgtgtcaaagcaaaaacttgagttgaaaaccacggaggcggggccaagactgatgtcgggaaagcaggcggcggccatcatcaaagcggtggactccaagtacactgcgatccccatcgtgggccaagtgttccagtcgcattgcaagggatgcccgagcctgtcggagctgtggcgtagtaccaggaagtacctgcagcctgacaacctctccaaagcagaggccgtgagaaatttcctcgctttcatccaacacttgaggacggccaagaaggaagagattctccagatcctgaaaatggagaacaaagaagtgctccctcagctggtggacgcggtgacttccgcgcagacgagcgactcacttgaagccatcctcgatttcctcgacttcaaatcagacagctcgattatcctgcaggagcgattcctctacgcgtgcggattcgcgtcgcacccaaacgaagagctgctgagggctcttatctccaaattcaagggcagcatcggttccagcgatatccgcgaaacggtcatgatcatcacggggacgctcgtgcggaagctgtgccagaatgagggctgcaagctgaaagcagtggtcgaggcaaagaaattgatcttgggcggactggaaaaggcggaaaagaaggaggacaccaggatgtacctgcttgccctgaagaatgcgctccttccagaaggaattccaagcctgttgaagtacgctgaagctggcgaggggcctatctcgcatctcgcaaccactgcccttcaaagatacgatctgccgttcatcactgatgaagtgaaaaagaccttgaacagaatctaccaccaaaaccggaaggtgcatgaaaaaactgtgagaactgccgcagcagcaataatcctcaacaacaatccgtcctacatggatgtaaagaacatacttttgtcaatcggagagctccctcaagagatgaacaagtatatgcttgcgatcgtacaagatatactccgcttcgaaatgcccgcctcgaagattgtccgcagagtattgaaagagatggtcgcacacaattatgacagatttagccgctcggggtcctcatcagcctacaccgggtacatcgaacggtccccacgctcagcatccacttactcgttggacatcctgtactccgggtccggcattctgagacggagcaacctgaacatcttccagtacattggcaaggcgggtctgcacggatcccaggtcgtgatcgaagcacaagggctggaagcgctcatcgcggctaccccagatgaaggagaagagaacctcgactcgtacgcgggcatgagcgcaatcctgttcgacgtccagctgcgccccgtgactttcttcaatggttactcagacctgatgtcgaagatgctgagcgcctcaggagatccgatctctgtggttaaggggctgatccttctcatcgaccactcccaggaactccagctccagtcaggactcaaagccaacattgaggtccaaggaggtctggctatagacatttccggagccatggaattctcactttggtacagggaaagcaagacccgcgtgaagaacagagtcactgtggtgattaccactgatatcaccgtcgacagcagctttgtcaaggctggactcgaaacctccaccgaaaccgaggccggactggagttcatctctactgttcagttcagccaatacccgttcctggtgtgcatgcagatggataaggacgaagccccctttcggcaattcgagaagaagtatgagcggctctccaccgggcggggatacgtgtcccaaaaacggaaagaatcagtgctcgctggatgcgagtttcctttgcaccaggaaaattcagaaatgtgtaaggttgtctttgccccgcaaccggattcgaccagctcaggatggttt

SEQ ID NO: 16809 - DNA, 2682 bp, synthetic construct
  misc_feature 1..2682: note = source = /note="Description of Artificial Sequence: Synthetic coding sequence"
  source 1..2682: mol_type = other DNA
atgatactcctggcagtcctgtttctgtgtttcatctcctcttactctgcatctgtaaagggacacaccactggcctgagcctgaataacgatcggctctataagttaacatactccacagaagtgttgctcgacagaggaaagggcaagctgcaggacagcgtcggttatcgcatctctagcaacgtggacgtggccttgctctggcgaaatcccgacggcgatgacgatcagctcatacaaatcacaatgaaggacgtgaacgttgagaatgtgaatcagcagagaggggaaaagtccattttcaaagggaagtccccctccaagattatgggaaaagagaatcttgaggctctgcagaggcccaccctccttcatttaatacatgggaaggtgaaggagttttactcctatcagaacgaggccgtggcaatcgagaacatcaaaaggggactagcctccctatttcagacccagctgtccagtggcactaccaacgaggtggacatcagtgggaattgtaaggtcacatatcaggcacaccaagacaaggtgatcaagatcaaagccctggattcttgcaagatcgcccggagtggcttcaccacgcctaaccaggtgctgggagtctcttccaaggccacttcggtgaccacttacaaaatcgaagatagcttcgtcatcgctgtgctggcagaggagacccacaatttcggtttgaatttcctccaaacaataaaaggaaaaattgtgtcaaaacagaagctggagttgaagacgaccgaggcgggccccagactcatgagcggaaagcaggccgccgcgatcatcaaagccgtggacagtaagtataccgccatccccatcgtcgggcaggtgtttcagtctcattgcaagggctgcccctcactttccgaactgtggcgctctacaagaaaataccttcagcctgacaacctgtcgaaggccgaggcggttcgcaacttcttggctttcatacagcatctgcggacggccaagaaggaagaaatcttacagatccttaagatggagaacaaggaagtgttgcctcagcttgttgatgcggtgactagtgcccagacatccgattcgctcgaagccatattggatttcctcgatttcaagtcagactcctccattattctgcaggaaaggttcctttatgcgtgcgggtttgcgtcccacccaaacgaggagctcctgcgtgctctgatctcaaaatttaaaggctccattggatcatccgacatccgcgagaccgttatgattataacagggacactagtgaggaagctatgccagaatgaaggctgcaaactgaaggctgtggtagaggctaagaaactgatacttggagggctggaaaaggcggagaagaaggaggacacgagaatgtatcttctggctctgaagaacgctttgctacctgaagggattccaagcctgctcaaatatgccgaggcaggcgaagggcccatcagtcacctcgccacaactgccctccaaagatacgatctcccattcatcacggatgaggtaaagaaaaccttgaatcggatctaccatcagaaccggaaggttcacgaaaagactgtgcggacggccgctgccgcaataattctgaataataacccctcctacatggatgttaagaacatacttctgtcaatcggtgagttaccccaggaaatgaataaatacatgctcgccattgtccaggacatattgaggtttgagatgccagcgtcaaagattgtgaggagggtgctcaaagagatggtagctcataactacgacagattttctagatctggcagttctagcgcttacaccgggtacattgagcggagtccacgatccgcctctacatacagtctcgatatcctgtacagcgggtcaggtatcctgaggcggagcaacctgaatattttccagtatatcgggaaggcagggctccatgggagtcaagtggtcatcgaagcccaggggctggaggccctaatcgccgccacccccgacgagggtgaagagaacctcgacagctacgcaggcatgtcggctatccttttcgatgtgcaactgcgacctgtcacttttttcaatggttactctgacctcatgtctaagatgctgtcggccagcggtgatcccataagtgtcgttaagggccttatattgctaatcgaccattcccaggagcttcagctgcagagcggcctgaaagccaacatcgaggttcagggcggactagctatcgacatttcaggcgccatggaattcagcctgtggtacagagaatccaagacacgcgtgaaaaatcgcgtcaccgtggttatcaccaccgatattacagtggattcctcattcgtgaaggctgggctcgagacctccacagagacggaggctggtcttgaatttatcagtacagtccagttcagtcagtatccattcttagtttgcatgcagatggacaaagatgaggccccttttagacagtttgaaaagaagtatgagcgcctgtctactggcaggggctacgtatcgcaaaagcgcaaggaaagcgtgctggcaggctgcgaatttccactgcaccaagaaaactcagaaatgtgcaaagttgttttcgctcctcagccggacagcacctccagtggctggttt

SEQ ID NO: 16810 - DNA, 2682 bp, synthetic construct
  misc_feature 1..2682: note = source = /note="Description of Artificial Sequence: Synthetic coding sequence"
  source 1..2682: mol_type = other DNA
atgattctgctcgcagtactcttcctgtgctttatcagctcctattccgcatccgttaaagggcacaccaccggattatcactgaataatgaccggctttacaagctaacttatagcacagaggtcctgttggacagaggcaaggggaagttgcaagattccgtgggctaccggatctcctcaaacgtggacgtcgctctgctctggcgcaatccagacggagatgacgatcagcttatccagataactatgaaagacgtgaacgtggaaaatgtaaaccaacagcgaggtgagaagtctattttcaaggggaagagcccatctaagattatggggaaggagaacctcgaggctttacagaggcccacgctgctgcatctgatccatggcaaagtgaaggagttctactcctatcaaaacgaggctgtcgccattgaaaatataaaacgggggctagcatctttattccagacccagctgagcagtggtactaccaacgaagtggacatttctggtaattgcaaagtgacttaccaggcacaccaggacaaagtaataaagattaaggcgttggattcttgtaagatcgccagatccgggttcacaactccaaaccaggtgttgggagtgtcatcgaaggcaactagcgtaaccacttacaagatagaagactcctttgtgattgctgtgttggcagaggagacccacaatttcgggctaaatttcctgcagacgatcaagggcaagatcgtatcgaagcagaaactggagttgaaaacaaccgaggctgggcccaggctcatgtccgggaagcaagctgctgctatcattaaagccgtagatagcaagtataccgcaatcccaattgtgggccaggtttttcagtcacattgcaagggctgtccgagcctttctgagctatggcgttcaacacgcaagtacctgcagcccgataatctgtctaaggcggaggctgtacggaatttcctagccttcatccaacacctgcggactgccaaaaaggaggagatcctacaaattctgaagatggaaaacaaggaggtccttccccagttggtggatgcagtgacctccgcccaaacctcagacagccttgaggccattctagattttctcgatttcaaaagcgactcctcaatcattctgcaggagcggtttctgtatgcctgtgggttcgctagccacccgaatgaagagctgctgcgggcgttgattagtaagttcaaagggtctattggctcatcagacattcgggagacagtaatgatcatcaccggcaccctcgtccggaaactctgtcaaaatgagggctgcaagctgaaggcagtggtcgaagctaagaagctcatcttgggcggcttggagaaagcggagaaaaaagaagataccaggatgtacctgctcgctcttaagaatgccctcctcccggagggaataccatccctgctaaagtatgccgaagccggcgagggcccaatatctcatctggctaccacagccttgcagcggtacgatctgcccttcattactgatgaagtgaaaaagactttaaataggatctatcatcagaatcggaaagtgcatgagaagacagtgaggacagccgcagctgcaattattttaaataacaacccttcctatatggacgtgaaaaatatccttctgagtattggggagctacctcaggagatgaacaaatacatgctcgcaatagtgcaggacattttgcgtttcgagatgccggcctccaaaattgtgagacgcgtcctgaaagagatggtcgcacacaactatgatcgcttctcgaggagcggctcatccagtgcctataccgggtacattgagcgctcgccaaggagcgcatccacctacagcttagatatcctgtatagtggcagcggcatcctgcgcagaagtaaccttaacatcttccagtacataggcaaagccggacttcatggcagtcaagtggtgatcgaggcccaaggtttggaagctttgatcgctgcaactccagacgaaggagaggagaacctggatagttatgctggaatgagtgccatactgtttgacgtgcagctcagacccgtaacattttttaatgggtacagtgacctcatgtctaagatgctaagtgcttcaggcgacccaatctcggtcgtgaaaggccttatcttgttaatcgatcattcccaggagctccagctacaatcgggcctcaaggcaaatattgaagttcagggcgggctggcaatcgatatctctggagccatggagttttcattatggtatcgagaatccaagacacgggtcaagaaccgtgtcactgttgttatcactactgatattactgtcgattcatcattcgttaaggcgggcctggagacttctaccgagaccgaggcaggcctggagtttatttctaccgttcagttttctcagtatccctttctcgtatgtatgcagatggacaaggacgaggccccttttcgtcaatttgaaaagaaatacgagcgactttcgactggccgtggttacgtcagccaaaagagaaaggagtccgtgctggctggctgcgagttccctctccatcaggaaaacagtgagatgtgtaaagtcgtgttcgctcctcagcccgatagcacgtcttctggatggttt

SEQ ID NO: 16811 - DNA, 2682 bp, synthetic construct
  misc_feature 1..2682: note = source = /note="Description of Artificial Sequence: Synthetic coding sequence"
  source 1..2682: mol_type = other DNA
atgatcctcctcgcggtgctgtttctgtgctttatctcgtcatacagtgcttcagtgaaaggacacaccacgggactctccctcaataacgatagactttacaaactcacctactcaactgaggtcctgttggacagaggaaagggcaagctgcaggatagcgtcggataccgcatctcgtcaaatgtggacgtggcccttctgtggcggaatcctgacggagacgacgatcagctgattcaaatcactatgaaagacgtcaatgtggaaaatgttaatcagcagaggggtgaaaaaagcatcttcaagggaaaatcgccatctaagatcatggggaaagaaaacctggaagcattgcaacgcccaaccctcctgcatctgatccatggaaaagtgaaggaattctactcgtaccagaacgaagcagtggccattgagaacatcaagcgcggactggcttccctgttccagactcaactttcctccggaactaccaacgaagtcgatatctccggaaactgcaaggtgacctaccaggcacaccaggacaaggtgatcaagatcaaagccctggactcgtgtaagatcgcccggtcgggctttacgactccgaaccaagtgctgggcgtgtcgtctaaggcgacttccgtgactacctacaagatcgaggactctttcgtgatcgcggtccttgcagaagaaacccacaacttcggactcaatttccttcagaccatcaaaggaaagattgtgtccaaacaaaaacttgagctgaaaactactgaagctggcccgcgcctgatgagcggaaaacaagcggcagccatcatcaaggccgtggattccaagtataccgcaattccaatcgtgggacaggtgttccagtcacactgtaagggttgcccgtccttgtcggagctctggagatccacccgcaagtacctgcaaccggacaacctctcgaaggcagaggcggttagaaacttcctggccttcattcagcacctgcgtactgctaaaaaggaggagatcttgcagatcttgaaaatggagaacaaagaagtgcttccacagttggtggacgccgtcacttcggcccagacctccgacagccttgaggctatcctggattttctggactttaagtcggattccagcattatcttgcaagaacggttcctgtatgcctgcggattcgccagccatcccaacgaagagttgttgagagccctcatctccaaattcaagggaagtataggttcgtccgacatccgggaaaccgtgatgataatcaccgggacccttgtccggaaactgtgccagaacgaaggctgcaagctcaaagcagtggtcgaggcaaagaaattgatcctcggcgggctggaaaaggcggaaaagaaggaggacaccagaatgtacctcctggcactgaagaatgcgctgctgccggagggaatcccgtccctgttgaaatacgcggaagccggggagggacctatctcccatctggctactaccgccttgcagagatacgacctgccgttcatcaccgacgaggtcaaaaagactctgaaccggatctaccatcaaaaccgcaaggttcatgaaaagactgtgcggactgccgcggcggcgatcatccttaacaataacccctcgtacatggatgtgaagaatattctgctgtcaatcggcgagttgccgcaggaaatgaacaagtatatgctggctatcgtgcaggacattctcagattcgaaatgccggcatcaaagatcgtgcgaagagtcctgaaagaaatggtcgctcacaactacgaccggttctcgagatcagggtccagctcagcatacaccgggtacatcgagcggtcgcctcgctccgcgtcaacctactccctggatatcttgtactcgggctcagggatcctgcggagatcgaacttgaacatcttccaatacattggaaaggccggcctgcacggatctcaggtggtgatcgaggcccagggtctggaggccctgatcgccgccaccccggatgaaggagaggagaacctcgatagctacgcgggaatgtccgcaatccttttcgatgttcagcttcgcccagtgactttcttcaatggatattcggacctgatgagcaagatgcttagcgcttcgggcgatcctatcagcgtggtgaagggactgatccttcttattgaccactctcaagaacttcagctccagtcaggactcaaggcgaacatcgaagtgcagggcggactcgcaatcgatatctcgggtgctatggaattctccctgtggtaccgcgaaagcaagactcgggtgaaaaacagggtcaccgtcgtgatcaccactgatatcaccgtggacagttctttcgtcaaggccggcctcgaaacctcaactgaaaccgaagcaggtctggagttcatctcaacggtgcagttctcgcaatatcccttcctcgtgtgcatgcagatggacaaagacgaggcccctttcagacagttcgagaaaaagtatgaaaggttgtcaactggacgcggatacgtctcccagaagcggaaggagtcggtgctggccggctgcgaatttccacttcaccaagagaactcggagatgtgtaaggttgttttcgcgccgcagccagactccacctcatctggatggttt

SEQ ID NO: 16812 - DNA, 2682 bp, synthetic construct
  misc_feature 1..2682: note = source = /note="Description of Artificial Sequence: Synthetic coding sequence"
  source 1..2682: mol_type = other DNA
atgattctgctggccgtgctgttcctttgcttcataagctcatactcggcctcagtgaaaggtcatactaccggactgtcgctgaataatgaccgactgtacaaactgacttactcgactgaagtcctgctggaccgggggaaagggaaacttcaagactccgttggatacagaatttcgtcaaatgtggatgtggcactgctgtggcgcaaccctgatggagatgatgatcagctcattcaaatcacgatgaaagacgtgaacgtggaaaatgtgaatcagcaaaggggagaaaagtctatctttaagggaaagtcgccttcgaagatcatggggaaagagaaccttgaggctctccaaagacccaccctgcttcatctgatccatggcaaagtgaaggaattctatagctaccaaaatgaggctgtcgcaattgaaaacataaaacgcggtctggcctccctgtttcagacccagctctcatccgggaccaccaacgaggtggacataagcggaaattgtaaggtcacctaccaggcccatcaagataaggtgattaagatcaaggcactcgactcgtgtaagatcgcacgcagcggtttcactaccccaaaccaagtgctgggcgtgtcctccaaggccacgtccgtgaccacgtacaagattgaggactcgttcgtcattgcagtgctggctgaagaaactcacaatttcggactgaacttcctgcaaacgattaagggaaagatcgtcagcaaacaaaagctggaactgaaaaccactgaagcaggaccacgactgatgtccggaaagcaagctgcagcgatcattaaggcagtcgactccaagtacacggcgattccgattgttggacaagtctttcagtcccactgtaaggggtgtccaagcctgtcggaactctggagatcaactcgaaagtacctccaaccagacaacctgtcaaaggcagaagccgtgcgtaacttcttggcctttattcaacaccttcggaccgccaagaaggaggaaatcctgcagattttgaaaatggaaaacaaggaagtgcttccgcagctcgtggacgcggtgacttcagcacagacctcagattctctggaggcgattctcgatttccttgatttcaaatcggattcctccattatactgcaggaacggtttctctacgcttgcggattcgcctctcatcccaacgaggaattgctccgggcacttatctccaagttcaagggttcgatcggatcgtccgatatcagagaaaccgtgatgatcattactggtacgctcgtgcgtaaactttgtcagaacgagggctgtaaactgaaggccgtggtggaagcgaaaaagctgatccttggcggactggagaaggccgagaaaaaggaagataccagaatgtacctgcttgcgctcaaaaacgcactgctcccggaaggaatcccatcgctgctgaagtacgccgaggcaggtgagggacctatttcccacctggcaaccaccgccttgcagcgatatgatcttccttttatcactgacgaggtgaagaaaaccctgaatcggatctaccatcaaaaccggaaagtccatgagaaaaccgtgagaactgctgcggcggcaatcattctgaacaataacccatcatacatggatgtgaagaacattttgcttagcattggcgaactgcctcaggagatgaacaagtacatgcttgcaatagtgcaggatatcctcagatttgagatgccagcatccaaaattgtgcgccgtgtccttaaagaaatggtggctcacaattatgataggtttagccggtcaggcagcagctcggcatacactggctacatcgagagatcgccacggagcgcatccacttacagccttgatatcctgtacagcggttccgggatacttcggagaagcaatctgaacatatttcagtacatcggaaaagctgggctgcatggaagccaagttgtcatcgaagcccaaggcttggaagcacttatcgccgcaactcctgatgagggagaagaaaatcttgactcctacgcaggcatgtcggcaatcctgtttgacgtccaacttcggcctgtgactttctttaacggatactccgacttgatgtcaaaaatgctgtccgccagcggggatccaatttccgttgtcaaggggctgattctgcttatcgaccattcgcaagaactccagctccagtccgggctgaaggccaacattgaagtccaaggtggacttgccatcgacatctcgggcgcaatggaattctcactttggtaccgcgaatccaagacccgagtcaaaaaccgcgtcacggtggtgattactaccgacattaccgtcgatagctcctttgtcaaggcaggactcgaaaccagcaccgagactgaagcaggtcttgagtttatctcgaccgtgcaattctcccagtacccatttcttgtttgtatgcagatggacaaggatgaagctccctttcgccaattcgagaagaagtacgagcggttgtcaaccggacgcggatacgtctcccagaagagaaaggagagcgtgctggcaggttgcgagtttcccctccatcaagaaaattcggaaatgtgcaaagtggtgtttgcccctcaaccagacagcacgtcatccggttggttt

SEQ ID NO: 16813 - DNA, 2682 bp, synthetic construct
  misc_feature 1..2682: note = source = /note="Description of Artificial Sequence: Synthetic coding sequence"
  source 1..2682: mol_type = other DNA
atgattctccttgcagtgctttttctgtgtttcatttcctcatactccgcgagcgtcaagggccatactactggactgtcgctgaataacgatcgcctgtacaaactgacgtacagcaccgaagtgcttctggataggggaaaaggaaagttgcaggactcggtgggttatagaatatccagcaacgtggacgtggcactgctttggagaaatccagacggtgatgatgatcagctgattcagattactatgaaggatgtcaacgtggaaaatgtgaatcaacagcgcggcgaaaaatcaatctttaaaggcaagagcccgtcgaagattatgggtaaggaaaatcttgaagccctgcaaagacccactttgctccatctgatccatggcaaagttaaggagttttactcataccagaatgaagcagtggcaattgaaaacattaaacgggggcttgcatccctttttcagactcaactgtcgtccggaaccactaacgaggtcgatatttcaggtaactgcaaggtgacctaccaggcccatcaggataaagtcataaagataaaagcactggattcatgcaagatcgcacgcagcggcttcacgacgccaaaccaggtgcttggagtctcatcgaaggccacctccgtaaccacctacaagattgaggactcctttgtcatcgccgtgcttgccgaagaaacccacaattttggtctgaactttcttcagaccattaagggaaagattgtgagcaaacagaaactcgaattgaaaacgactgaggccggacccagactcatgtctggtaagcaagccgccgctatcattaaggccgtcgattcgaagtacaccgcaatccctatcgttggacaggtttttcaatctcattgtaaagggtgtcccagcctttcagaactctggcgatcaacccgtaagtacttgcagccggataacctgtcaaaggcggaggctgtgcgcaacttccttgctttcatccaacacctcagaaccgcaaaaaaggaagagattctgcagattttgaagatggaaaacaaggaggtgctgccacaactcgtggatgctgtcacttcggcacaaacctcggactctctcgaggcaatcctggacttcctggacttcaaatcggacagttctatcattcttcaagaacgttttctctatgcttgtggctttgcctcgcatcctaacgaggagctcctgcgggcacttattagtaagtttaagggaagcattggctcctccgatatcagggaaactgtcatgatcataactggtaccctggtgagaaagctgtgccagaatgagggatgtaagctcaaggcagtggtcgaagcaaagaaactgatcctgggaggattggaaaaagccgagaagaaagaggacaccaggatgtacctgctggcactgaagaacgcactgctgccagagggtattccttcgttgctgaagtacgcggaagcgggagaaggacctattagccatctcgccaccaccgcgcttcaaagatacgatctgccattcattactgacgaagttaagaaaacccttaatagaatctaccatcagaaccgtaaggtgcacgagaaaacggtcaggaccgcagccgcagctataatcctgaacaacaacccaagttacatggacgtcaagaacatattgctgtcaattggggaactgccgcaagagatgaacaaatacatgctggcaatagtgcaagatatacttagattcgaaatgcctgcttcaaagatcgtgcgtcgtgtgttgaaggaaatggtcgcacacaactacgacagattctcgaggtcgggctcctctagtgcgtatactgggtacatcgaacgctcccctcggagcgcatccacttactctcttgatatcctgtactcgggcagcggaattctccgccggtccaaccttaacatctttcaatacatcggcaaggctggtctgcacggttcgcaagtcgtcatcgaagcgcagggtcttgaagcacttatcgcagccacccccgatgaaggcgaagaaaatcttgattcatacgcaggaatgtccgcaatactgttcgacgtgcagctccgccctgtcacttttttcaatggctattccgatcttatgtctaagatgcttagcgcatccggcgatcctatatccgtggtcaagggtcttatccttctcatcgatcattcccaagaacttcaactgcagtccgggctgaaggcaaacatcgaagtgcagggcggacttgcgatagatatttcgggggctatggagttttccctttggtaccgggagtccaagacccgagtgaagaatagggtcaccgtcgtgataactactgatattactgtcgactcgtcgtttgtgaaggccggacttgaaacttcaaccgagactgaagccggactcgaattcatctcgaccgtgcaattctcgcaatatccttttctcgtctgtatgcaaatggacaaggacgaggcaccctttcggcaatttgaaaagaaatacgaacggctttcgaccgggcggggttatgtgtcacagaagcgcaaggagtcagtcctcgcagggtgtgagttcccactccaccaagaaaattcagagatgtgcaaagtggtatttgcgcctcaacccgactctacttcttcgggatggttt

SEQ ID NO: 16814 - DNA, 2682 bp, synthetic construct
  misc_feature 1..2682: note = source = /note="Description of Artificial Sequence: Synthetic coding sequence"
  source 1..2682: mol_type = other DNA
atgatcctgctagcagttttatttctgtgcttcatctcatcttacagcgccagcgttaagggtcacaccactggtctgtccctgaataatgacaggctttataagctgacttacagcacggaggtcctgcttgacaggggtaaagggaaactgcaggattctgtgggctatcggatctcttctaacgtggatgtagccctgttgtggcggaatcctgatggcgacgacgaccagctgattcagattacaatgaaagatgttaatgtggagaacgtcaatcagcaaaggggcgagaagagcatttttaagggcaaaagcccaagcaaaatcatgggcaaagaaaacttggaagccctgcagcgccctaccctgctgcacctgattcacggtaaagtgaaggagttctacagctaccagaacgaagccgtcgcgatcgaaaacatcaaacgaggtctcgcatctctttttcaaacccaactgtccagcggtacgaccaacgaggtcgatatttcgggtaattgtaaagtcacctaccaagcacaccaagataaggtgattaagatcaaggcgctggatagctgtaaaatcgcgagaagcggttttacgacaccgaaccaggtcctgggcgtgagctccaaagcgacctcagttaccacgtataaaatcgaagactcatttgtcattgccgttttagcagaagagacgcacaactttggtctgaactttctccagacaatcaagggcaagattgtttcaaaacagaaactggagctgaagaccactgaggctggtcctcgtctgatgtccggcaaacaggcagcagccataataaaggcagtggatagcaaatacaccgcaattcccatcgtgggtcaggtgtttcaaagccattgtaagggctgtccaagcctgagcgaattgtggaggagcactagaaaataccttcaacctgacaacctgagcaaggctgaggcggtgaggaacttcctggccttcattcagcatttgcgtacagccaagaaggaagagatcttgcagattctgaaaatggagaataaagaagtcctgccccagctggtggatgcagtaaccagcgcacaaaccagcgacagcctggaggctatcctggacttccttgatttcaagtcagatagcagcataattctgcaggagcgcttcctgtacgcctgcggctttgcctcccatccaaacgaagaactgctgcgtgccctgatatctaagtttaagggaagtatcggcagcagtgatattcgcgagactgttatgatcattacgggaacgctggttcgcaagctttgtcagaatgagggctgtaaactcaaggcggtcgttgaagctaagaaattaatcctgggcgggttggagaaagcagaaaagaaggaggatacccgcatgtacttgctggctctgaagaacgcactgctcccggaaggaatacccagcttgctgaagtatgccgaggcgggagagggcccaatcagtcatctggccaccaccgctttgcaacgctatgacctgccgttcatcactgacgaggtgaagaaaacactgaacagaatataccatcaaaaccgaaaagtgcacgagaaaactgttcgcacagccgcggcagcaattatcctgaataacaacccgtcctacatggacgtgaaaaatatcctgctgagcataggcgagcttccacaggagatgaacaaatacatgttggctatcgtccaagacattctgcgctttgagatgccagcctctaaaatcgtgcgcagggtgctgaaggaaatggtggcacataactatgaccgcttttcccggagcggctctagcagcgcgtatacaggttatattgaacgctcacctagatccgctagcacctattctctggacatcctgtactccgggagtggaatcttacgccgtagcaacctcaacattttccagtacatcggcaaagcggggctgcatggctcccaggttgttattgaggcgcaaggcctcgaagcgctgatcgcggcgacccctgatgaaggtgaggaaaatctcgactcctatgcggggatgagcgcaatcctgtttgacgtgcaacttcgtcccgttacttttttcaacggctacagcgatttgatgagcaaaatgctctctgcgtctggcgatccgattagcgtggttaagggattgatcctactgatcgaccattcacaggaactgcaactacagtctggcctgaaagcgaacattgaggttcagggtgggctggcgattgacattagcggcgctatggagttttcgctctggtatcgcgagtccaagacaagggtgaaaaaccgcgtcaccgttgttattactacagatatcaccgtggactcttcgttcgttaaagccggcctggaaacctctactgagactgaggcagggctggagtttatttccactgtgcagttttctcaatacccattcctcgtttgcatgcagatggataaggatgaggcgccatttcgtcaattcgaaaagaaatacgagcgtctgagcacaggtcggggctacgtgagtcaaaagagaaaggagagcgttctggcgggatgcgagttccctcttcatcaagaaaattcagaaatgtgtaaagtcgtcttcgccccacaaccagactctaccagttcgggctggttt

SEQ ID NO: 16815 - DNA, 2682 bp, synthetic construct
  misc_feature 1..2682: note = source = /note="Description of Artificial Sequence: Synthetic coding sequence"
  source 1..2682: mol_type = other DNA
atgattttgctcgcggttttgtttctttgctttattagttcgtatagtgcctctgttaagggtcacactacaggtctctcgctcaataatgatcgactatacaaacttacatattctactgaagtgttgttggacagaggaaagggaaaactccaagactcggttggttatagaatcagttccaatgttgatgtagctcttctatggaggaatcccgatggtgacgatgaccagcttattcaaattacaatgaaagacgtgaacgttgaaaatgtcaaccaacaacgtggtgaaaaatcgatattcaaagggaaatcaccatcaaagattatgggaaaagagaatcttgaagctcttcaaagaccaactttgctgcacctcatacatggaaaggtcaaagagttttactcctaccaaaacgaagcagttgccattgagaacattaaacggggattagcgtccctattccaaactcagttatcttctggcactacaaatgaagttgatatatcaggaaattgtaaagtaacataccaggcccaccaagacaaggttatcaagataaaggccttggattcgtgtaaaatcgcacgatcgggatttactactcctaatcaggtccttggtgtttcatcaaaggccacttccgtcacaacatataagattgaagatagcttcgtcatcgcggtactagccgaagagacacacaacttcggacttaatttcctccaaacaataaagggcaaaattgtcagtaaacaaaaattggaactcaaaaccacggaagctggtccccgcttgatgtctggaaaacaagcagcggctattatcaaagcagtggactccaagtatacagcaattcctatcgtcggtcaagtatttcagagtcattgtaaaggatgcccaagtttatctgaactctggcgtagcacgagaaaatacctacagccagataatctttctaaagcagaagctgttcgaaattttcttgcttttatccaacatttacgaactgctaaaaaagaagaaattctgcaaatccttaaaatggaaaataaagaagttctcccacagctcgtagatgctgttactagcgcacaaacatccgattcactggaagctattttggattttctcgatttcaagtccgactcgagtattattctgcaggaaaggtttctatatgcttgcggttttgcgtctcacccaaatgaggaactcttacgtgcactaatttctaagtttaaaggatccatcggttcttctgatatcagagaaacagtcatgattataaccggcacgttggtgagaaaattgtgtcaaaacgagggatgtaaacttaaagcagtcgtcgaggctaagaagctaattctcggaggacttgaaaaagcagaaaagaaggaggacacacgaatgtacctcttagcattgaaaaatgctcttcttcctgaaggaatcccttctcttctgaaatatgctgaggcaggagagggcccgatcagtcatttggctaccacagcactacaacgttatgacctgccatttattaccgatgaagtaaagaagactttgaacagaatctatcatcagaaccgtaaggtgcacgaaaagacagtgagaactgcagccgccgctatcatcttgaataataatccatcatatatggatgtgaaaaatatactcttaagtataggtgaattacctcaggagatgaataagtatatgttggcaatagtgcaagatattcttcgattcgaaatgcctgcatctaagatcgtgcgaagggtccttaaggaaatggttgctcataattacgatcgtttctctagatcaggaagctctagtgcatacacgggctacatagagagatcacctcgttctgcaagtacatactcattggatatcctttactcgggaagtggaattttaagaagatccaacctcaatatttttcaatacatcggtaaagctggattgcatggatcccaggttgtgattgaggcgcaaggattggaagcacttatcgccgccacgccggatgaaggcgaggagaacctcgactcttatgctggaatgagcgccatcttgttcgatgtgcaactacgaccagttactttcttcaatggttatagtgatttaatgtcgaagatgcttagcgcctcaggagatccaatctcagttgttaaggggttaatacttttaattgatcattcacaggaactccaattgcaatccggacttaaagcaaatattgaagttcaaggaggactagcaatagatatctcgggggccatggaattcagcttgtggtacagagagtctaagactagagtcaaaaacagagttaccgtcgtcatcactaccgacatcacagtggatagttcatttgtgaaggcgggacttgagacgagcactgaaacagaggctggacttgaatttatcagtactgttcagtttagccagtacccttttttggtatgcatgcaaatggacaaggatgaagcgcccttccggcaatttgaaaagaagtatgagaggctttccacagggagaggatacgtatcccaaaagagaaaagaatcggttctggcgggatgtgaattccctctgcatcaagagaatagtgaaatgtgcaaagtggtttttgctccacagcctgattccacgagctctggatggttt

SEQ ID NO: 16816 - DNA, 2682 bp, synthetic construct
  misc_feature 1..2682: note = source = /note="Description of Artificial Sequence: Synthetic coding sequence"
  source 1..2682: mol_type = other DNA
atgatcctacttgcagtgctgttcctgtgcttcatttcctcttatagtgccagcgtgaaagggcacacaactggtctctcgctgaacaacgaccgattgtacaagctgacatacagcactgaagtgctgctcgatcgtggaaaaggcaagctccaagactctgtgggatacagaatctcctccaatgtggacgtcgctctgctctggagaaatccagacggcgatgacgaccagctgatccagatcacaatgaaagacgtaaacgtggagaatgttaatcagcagcgaggagaaaaatctatattcaagggtaagagcccctcaaagataatggggaaggagaacctagaagccttacagaggccaacgttactccacctcatacacggtaaagtgaaggaattctactcctaccagaatgaagccgtagccattgaaaatattaagcggggcttagcttccctgttccaaacccagctgtcatcaggtaccacgaatgaagtggacatctctggaaattgcaaagtgacttaccaagcacatcaagacaaggtcatcaagataaaggccttagatagttgtaagattgcgcgatccggctttacaacgcctaatcaggtgctgggagtctcttctaaagcaacaagcgtcaccacttataagatcgaggattcctttgttatcgcagtccttgcagaagaaacacacaatttcgggctaaatttcctgcagacgatcaagggtaaaattgtaagcaagcaaaaacttgagctgaaaaccactgaggctggaccaagactgatgagcggcaagcaggcagctgctattattaaagcagtggattcaaaatatacagcgatccccattgttggccaggtgtttcaatcccactgtaagggctgccctagtctgtctgagctttggagatctactaggaagtatttacagcctgacaatctgtctaaggccgaggctgtgaggaacttccttgccttcatacagcatttgcggacagctaagaaggaggagatcttgcagatccttaagatggaaaacaaggaggtgctgccgcagctggtagatgcagtgacctctgcacagacatccgacagcctggaagcgatcttggactttctggacttcaagtcagattcttccattatcctgcaggaacgattcctttatgcctgtggtttcgctagccaccccaatgaagaactcctgagagccctgattagtaagtttaagggaagcataggatctagcgacattagagaaacagtgatgattatcacagggaccttggtgcgaaaattgtgtcagaatgagggctgtaaactcaaggcagtggtagaagcgaaaaagttgatcctgggggggctcgaaaaggccgagaaaaaagaagacacccggatgtatctacttgcccttaaaaatgccctcctcccggagggcattcctagcctacttaagtatgcagaggccggcgaaggtccaatttctcacctggccacaacagctctgcagagatatgatcttccattcattaccgatgaagtcaaaaaaaccctgaatagaatatatcatcagaaccgtaaagtgcacgaaaaaacagtaagaaccgcagccgctgccattatcctgaacaataacccgagctacatggacgttaagaatattcttctatcgatcggagagttaccacaggaaatgaacaaatacatgctagccatcgtgcaggatatcctgaggttcgaaatgccagcctctaagatagtgaggagggtgctaaaagaaatggtggcccacaattacgatcgattcagtagatcagggtcctcctcagcctatacgggctacatcgaaagatctccgcgatccgcaagcacatactctttggacatcctgtatagtggatccgggatccttaggaggagcaaccttaacatctttcagtacatcggcaaagccgggctgcatggaagccaggtagtgattgaagctcagggcctggaagcgctgatcgctgccactcccgacgagggcgaggaaaacctggatagctacgccggaatgagtgcaatactgttcgacgtgcagttaagacccgtaaccttttttaacggctattccgatcttatgtcgaaaatgctgtctgccagcggggacccaatttcagtcgtgaaaggacttatcctcctgatcgaccactctcaggagctgcagttgcagagtggtcttaaggccaacattgaagtgcagggaggcttagctattgacatttccggggccatggaattcagcctctggtaccgggagtccaagactagggtaaagaacagggtgaccgtcgtcatcacgactgatataacagtggatagttccttcgtaaaagcaggcctggagacatctacggaaactgaggccggtttggagtttatctctactgtgcagttttcgcagtatccttttctggtctgtatgcagatggacaaggatgaggctccattccgacagtttgaaaagaaatacgaaagactcagtaccggaaggggatatgtcagccagaagcgcaaagagtctgtgttggctgggtgcgagttccccctgcaccaggaaaactcagagatgtgcaaggtggtttttgcccctcagccggattccactagtagtggatggttt

SEQ ID NO: 16817 - DNA, 2682 bp, synthetic construct
  misc_feature 1..2682: note = source = /note="Description of Artificial Sequence: Synthetic coding sequence"
  source 1..2682: mol_type = other DNA
atgatcttgctcgccgttctattcttgtgctttatctcaagctactctgcgtccgtgaagggccacactaccgggctatctttgaacaacgatcggttgtataagttgacctacagcaccgaagttctcttggatcgtgggaagggtaaattgcaggatagtgtgggttataggatctcaagcaacgttgatgttgcattgctgtggcggaaccctgatggcgatgatgaccaattgatccaaatcaccatgaaggacgtaaacgttgagaatgttaaccaacagcgcggcgagaaaagcatcttcaagggaaagtccccctcgaaaatcatggggaaagaaaacttagaggccttgcagcgtcctacccttttgcatttgatacacggcaaggtcaaggagttttacagctatcaaaatgaggcagtggctattgagaatatcaagaggggtctggcgagcttattccaaacccagctttcatcgggaactacgaacgaagtggacatatccgggaactgtaaagtcacataccaggcccatcaagataaagtaatcaaaattaaagctctggacagctgtaaaatcgccagaagcggattcaccacccctaaccaggtgttaggagtcagttcgaaggcaacgagcgtgacgacatataagatcgaggacagcttcgttattgctgtcctcgcagaagaaacccataacttcggtctcaacttcttgcaaacgataaagggcaagatcgtttccaaacagaaactcgagctgaagacgacggaagcgggcccccgccttatgtcaggtaaacaggcggctgcgatcataaaagcggttgattcgaagtacaccgccatccccatcgttgggcaggtgttccaatcacattgtaagggctgtccctccctgtcggaactttggcgaagcaccagaaagtatttgcaacccgataatttgtcaaaggcagaggctgtacgaaatttcctggccttcattcagcacttgcgtactgctaagaaggaagagatcctccagatattgaagatggaaaacaaagaggttttgccgcaacttgttgatgctgtgacatcagcccagacatcggattcccttgaggctatactcgatttcctggacttcaagtctgactcttctattatcttgcaagagcgctttctttatgcctgcggcttcgcttcccatcctaacgaggaactgctcagggctcttatctccaagttcaagggcagcatcggaagtagcgacataagggagactgttatgatcattactggtactctggtccgcaaactctgtcagaacgagggctgcaagcttaaagcggtagtggaagcgaagaaacttatcctgggaggtttggaaaaagctgaaaaaaaggaggatacgcgtatgtatctccttgcgctcaagaacgcgctccttcccgagggtattccctcgctgttgaagtatgctgaggcgggtgagggccccatttcacatttggctacaacagccctccaacggtatgatcttcccttcattacagacgaagtcaaaaaaacgctcaatcgaatttaccatcaaaacagaaaagtccatgaaaagacggtgcgcactgctgccgcagcaatcatcttgaacaacaatccaagctatatggatgtcaaaaacattcttctctcgatcggagagctgcctcaggagatgaataaatatatgttggcaatcgtgcaggatattctgcgctttgagatgcccgcttccaagattgtgagacgggttcttaaggaaatggtcgcgcataactatgaccggttctctagatctggttccagcagtgcgtacacaggctacattgaacggagccctagaagtgcttcgacctactcactggacatcctgtactcgggtagtggaattctgcgccgcagcaacctcaacatttttcagtacattgggaaggccggccttcacgggtctcaggtcgttatcgaagcacaggggctcgaagcactcatcgcggccactcctgacgaaggcgaagagaatctagattcatatgcggggatgtctgccattcttttcgatgttcagctccgccctgtcacctttttcaacgggtacagcgatctgatgtctaaaatgttgtcagccagcggtgaccccatcagtgttgtaaaaggactcatccttttgatcgatcatagccaggagcttcaactgcaatcaggacttaaggccaacattgaggtgcagggaggcttggcaatagacatttccggcgccatggagttctctctgtggtatcgagagtcaaagacgcgtgtcaaaaaccgagtcacagttgtaatcactaccgatattacggtggatagcagcttcgttaaggcgggtctcgagacatccaccgaaacagaagcaggcttggaattcatctcgacagtgcagtttagccagtatccttttctggtctgtatgcagatggataaagatgaggccccattccgccagttcgagaagaagtatgaacgattgtctacaggcaggggctatgtcagccaaaagaggaaggagtctgtgctcgctggttgtgaattccctttgcaccaggagaactcggagatgtgcaaggttgtcttcgccccccagcctgacagtacaagctcggggtggttc

SEQ ID NO: 16818 - DNA, 2682 bp, synthetic construct
  misc_feature 1..2682: note = source = /note="Description of Artificial Sequence: Synthetic coding sequence"
  source 1..2682: mol_type = other DNA
atgattctccttgcagtgctgttcctctgcttcataagttcatactcggcaagcgtgaagggacatactactggactttcactcaataacgatcggctttacaagttgacttactccacggaggtgcttctggatagaggtaaaggcaaactgcaggactccgttggatacagaatctccagcaatgtcgatgttgcccttctgtggcgaaaccctgatggtgacgacgaccagctcatacagatcactatgaaggatgtcaacgtggaaaacgtgaaccaacagagaggggaaaagagtattttcaagggaaaatcccccagcaaaatcatgggaaaggaaaacctggaagcgctgcagcgtcccactcttctccatctgattcatggaaaggttaaggagttctattcttaccagaacgaagcagtggcgatcgaaaacataaaacgcgggctggcttcgctgtttcagacccagttgtcctccggtaccactaatgaggtggatatttcaggcaactgcaaggtcacctaccaggctcatcaggataaggtgatcaagattaaagccctcgattcttgcaaaatcgcaaggtccggcttcaccaccccaaaccaggtcctgggtgtgtcatcgaaagccacttcggtcaccacctacaagattgaggacagcttcgttatagccgttctggcagaagagactcataacttcggacttaacttcctccaaaccatcaaaggtaaaatcgtctctaagcaaaagctcgaactgaaaacgactgaagcaggaccaagacttatgtcgggcaagcaggccgcagcgattatcaaggcggtggattcgaagtacactgcaatccccatagtgggtcaggtgtttcaatcgcactgtaagggatgcccttccctgtccgagctgtggagatccacccggaagtacctccaaccggacaatctgtccaaagcagaagcagtgcgcaattttctggcttttatccaacatcttcgaactgcgaaaaaagaggaaatccttcaaatccttaagatggagaacaaggaagtgcttcctcagctggtggacgcagtcacgtcagcacagacttcagatagccttgaagccattctggatttcttggatttcaaatctgattcctccatcatattgcaagaaagatttctgtacgcctgtggttttgcctcccatcccaatgaggaactgctgcgtgcactgatatcgaaattcaagggatcgattggttcgtcagacatacgtgaaactgtgatgattatcaccggcactcttgtccgcaagctctgtcaaaatgaaggttgcaagttgaaggcggtggtcgaagcgaagaagctcattcttggtggactcgaaaaggccgaaaagaaggaggacaccaggatgtaccttcttgcccttaagaatgcccttctcccggaaggcataccgtcccttctcaagtacgccgaggcaggggagggtcccatttcccatctcgccaccaccgcactccaaaggtatgatctccccttcatcacggatgaggtcaagaaaacccttaaccgcatctaccatcaaaacagaaaagtgcatgagaaaacggtacgaaccgccgcagccgcaattatccttaacaacaacccttcatacatggacgtgaagaatatccttctgtcaattggagaactgcctcaggagatgaataagtatatgttggctattgtgcaggatatcttgcgcttcgaaatgccagcctccaagatagtcagacgtgtgcttaaagaaatggtggcccacaactacgaccgctttagccgatctggaagctcaagcgcatacaccgggtacatcgaaagatcgccccgaagcgcatcaacttattcgctggatatcctgtactcaggatccggaatcctccgtcggagcaacctgaacatttttcagtacattggaaaggcaggactgcacggatcacaagtggttatcgaggcacaggggcttgaagcactcattgcagcaactccagatgagggtgaagaaaatcttgattcatacgccgggatgtcagcgattctgttcgacgtgcaacttcgcccagtgaccttctttaacggatactccgatcttatgtcgaagatgctgtccgcatccggagatccaatctccgtggtgaagggactgattctcctcattgaccattcgcaagaactgcagcttcaatcaggactgaaggcgaatattgaggttcaaggaggcctcgccattgatatcagcggcgcaatggagttttcactgtggtaccgcgagtccaagactcgggtgaagaatcgcgtgaccgttgtgattactactgatattaccgtcgactcgtcctttgtgaaggcgggtcttgaaaccagcaccgaaactgaagcaggtcttgaattcattagcactgtgcaattttcgcagtacccattcctggtttgtatgcaaatggacaaagatgaagcaccattccgtcaattcgagaagaagtacgaacgattgtcgaccggaaggggttacgtctcgcaaaagcgtaaagagtcggtgctggccggttgtgagttccctctgcatcaagaaaatagcgagatgtgcaaggtggtgtttgcccctcaacctgattcgacttcctcggggtggttt

SEQ ID NO: 16819 - DNA, 2682 bp, synthetic construct
  misc_feature 1..2682: note = source = /note="Description of Artificial Sequence: Synthetic coding sequence"
  source 1..2682: mol_type = other DNA
atgatcttgctcgccgtgctcttcctgtgcttcatctccagctacagtgcctctgttaaaggtcacaccacaggactgtccctgaataacgatcggttgtacaagctgacctattctacagaggtgttgcttgaccgggggaaggggaagctccaggatagcgtggggtatcgaatctccagcaacgtcgacgtggccctgctgtggcgaaacccagacggagacgatgaccaactgatccagatcaccatgaaggacgttaacgttgaaaatgttaaccagcagaggggtgagaagtctattttcaagggtaagtcaccgtccaagatcatgggcaaggagaacttggaagcactgcagcggccaacactgctgcatctgatccacggaaaagttaaggaattctacagctaccaaaacgaagctgtggccattgagaatatcaagcggggactggccagtctgtttcagacccagttgagctctggtaccaccaatgaagtggatatctctggcaattgcaaggtgacctaccaggcccatcaggataaggtgatcaagatcaaggccctggactcctgcaaaattgctagatctggtttcaccacgccgaaccaggtacttggcgtgagcagtaaggccacttctgtgaccacctataagatcgaggatagtttcgtgattgcggtccttgccgaggaaacccacaattttggactcaattttctgcaaaccataaagggaaaaatcgtgtccaagcagaaactggaacttaagactacagaggccgggccccggctgatgagtggaaaacaggctgccgccattatcaaggcagtagactcaaagtacaccgccatccccatcgtgggtcaggtctttcagagtcattgcaaaggttgcccttcactcagcgagctctggagaagcacaaggaaatacttgcaaccagacaatctgagcaaggccgaggccgtgagaaactttctggccttcattcagcacctgagaacagctaagaaggaggaaatcctgcaaattctgaagatggagaataaggaagtcctgccccagctggttgatgccgtgacctctgcgcagaccagcgactccctcgaggccatcctcgactttctggattttaagtcagattctagcatcatcctccaggaaagattcctctatgcctgtgggttcgcgtctcatcctaatgaagagctgctgcgggcgcttatcagcaaattcaaaggcagtatcggcagctccgacatcagggagactgtgatgatcattacaggtacactggtaagaaaactgtgtcagaacgaaggttgcaagcttaaagccgtcgtggaggcaaagaagctgatcctgggggggcttgagaaagctgagaaaaaagaggatactcgcatgtacttgctggcattgaagaatgcccttctccccgaaggaattccatcactgctgaagtatgcggaggcgggggaaggtccaattagccatctcgccactaccgcgctgcaacggtatgatcttcccttcataactgacgaggtaaagaaaacactgaaccggatttaccaccagaaccggaaggtccacgagaagacagtcagaaccgcagccgcagccatcatacttaacaacaatccgagttatatggatgtcaaaaatatcttgctctctattggtgaactgccgcaggagatgaacaagtatatgttggcgatcgtgcaggacatactgcggttcgagatgcccgctagcaagatagtacgacgcgtgctgaaagagatggttgctcataattatgaccggttttctaggtctgggtcatctagcgcctacacagggtatattgaaagatccccgcgatctgcgagcacttatagtctggacattctgtactcagggtccggaatcctgagacgatctaacctgaacatctttcaatatataggtaaggcagggctgcacgggagtcaagtcgtcatcgaagcgcaagggctggaggcattgatcgctgcaacgcccgacgagggggaagagaacttggattcatacgccggaatgtccgccatcctgtttgatgtgcagctccgacctgttacttttttcaatggctacagcgacctgatgtcaaagatgctcagcgcctccggtgaccccattagcgtggtgaagggactcattctgcttattgatcattcccaagaactgcagctccagtctgggttgaaagctaacatagaggttcagggcggactggcgatagacatcagcggagccatggaattttccctgtggtacagagagtccaaaacacgcgtcaaaaatcgggtgactgtcgtgattaccaccgatatcaccgttgattcctcattcgtgaaagcaggcctggagacctccactgagacggaagcgggactcgaatttataagtacggtccagttcagccagtatccatttctggtgtgtatgcaaatggataaggacgaggcaccctttaggcagttcgagaagaagtacgaacggctttccacagggcgcgggtacgtgtcccagaagcgcaaggagagtgttctcgctgggtgcgagtttccattgcatcaagaaaactcagagatgtgtaaagttgtattcgccccacagcccgactccacctcctccggatggttt

SEQ ID NO: 16820 - DNA, 2682 bp, synthetic construct
  misc_feature 1..2682: note = source = /note="Description of Artificial Sequence: Synthetic coding sequence"
  source 1..2682: mol_type = other DNA
atgatcctgctcgccgtgctctttctctgtttcatctcgtcctactccgcctcggtgaagggccacaccaccggactctccctcaacaacgaccgcctgtacaaactcacttattcgaccgaggtgttgcttgatcgtggtaaggggaaacttcaggactcggtggggtatcggatctcgtccaatgtggacgttgcgctgctgtggcgcaacccggatggagatgacgaccagctcatccagatcactatgaaggatgtcaatgtggaaaacgtgaaccagcaacgaggcgagaagtcgattttcaaaggaaagtccccgagcaaaatcatgggaaaggagaatctcgaagcactgcagcggccaaccttgctgcatctgattcatgggaaagtgaaagagttctacagctaccaaaacgaggccgtggcgatcgagaatatcaagcggggactcgcctccctttttcagacccagctgtccagtggcaccaccaacgaggtcgacatctcaggcaattgcaaggtgacttatcaggcccatcaagataaagtgattaagattaaagccctggactcctgcaaaatcgccaggtcgggtttcactactccgaaccaggtgttgggagtgtcgagcaaggctacttcagtgaccacgtacaaaatcgaggactccttcgtcatcgcagtgctggccgaagaaacgcacaacttcggactgaacttcctgcagaccatcaagggaaagattgtgtccaagcaaaaactcgaactcaagactactgaagctggcccaagactgatgtcgggaaagcaggccgccgcaatcattaaggctgtggattccaagtacaccgcgattccgatcgtggggcaggttttccagagccactgtaaagggtgcccctcgctgtcggagctctggagatcgacccgcaagtacctgcagccggataacctctcgaaggctgaagccgtgagaaactttctggctttcatccaacacttgaggactgccaagaaggaggagatcctgcagattcttaagatggaaaacaaggaggtccttccacagctggtggacgctgtgacctccgcgcaaacttcggacagcctcgaggccatcctggacttcctcgatttcaagtccgattcgagcataatcctccaagagcgattcctttacgcctgcggcttcgcgtcccacccgaatgaggaattgctgagggcgctcatcagcaagttcaaaggatccatcggatcctcagacatcagggaaactgtcatgatcatcaccggcaccctggtgcgaaagctgtgccaaaacgaaggctgtaaacttaaagctgtggtcgaagcgaagaagctgatcctcggagggttggaaaaggccgaaaagaaagaggacacgcgcatgtacctgctggccttgaagaatgcgctgctccctgaaggaatcccttcgctgctcaagtacgcggaagcgggcgagggaccaatctcccatctggccaccaccgctctgcaaagatacgatctgccatttatcacggatgaggtcaaaaagaccctcaaccgcatctaccaccagaaccgcaaggtgcacgaaaaaaccgtgcgcaccgctgccgcagcgatcatcctcaataacaacccgtcatacatggatgtgaaaaacatcctcttgagcatcggagaactgccgcaagagatgaacaaatacatgcttgcaatcgttcaagatatactgcgatttgagatgccggcgtcaaagatcgtgcggagagtgttgaaagaaatggtcgcacataactatgataggttctcgcggtcaggatcgtcaagcgcgtacactggatacatcgaacggagcccccggtccgccagcacttattccctggatatcctgtactccggttcaggcattctccgacgctccaaccttaacatcttccagtacattggcaaggcgggactgcatggctcgcaggtcgtgattgaagcccaaggactcgaggccctgatcgcggctacgccggatgaaggtgaagaaaacttggattcctacgcgggtatgagcgcgatcctcttcgatgtccagctcaggccagtgaccttcttcaacggatacagcgacctgatgtcaaagatgctgagcgcctccggagatccaatcagcgtggtgaaagggctcatcctcctgatagaccactcacaagagctgcaacttcaatcggggctgaaagcgaatatcgaggtgcaaggaggcctggcgattgacatctcaggggccatggaattcagcctctggtacagggagagcaagactcgcgtaaagaaccgggtcactgtcgtgatcaccaccgacatcaccgtggattcatcgttcgtcaaggccggactggaaacttcaactgaaaccgaggctggcctggagtttatctcgacggttcaattttcgcaatacccgttcctggtttgcatgcagatggacaaggacgaggctccgttccgccaatttgaaaagaagtacgaacgcctgtcaaccggacggggatacgtgtcccagaaaagaaaggaatcggtgctggcgggatgcgaattcccgctccatcaggagaactccgaaatgtgcaaggtggtgttcgctccccagccggatagcacgagctcgggctggttc

SEQ ID NO: 16821 - DNA, 2682 bp, synthetic construct
  misc_feature 1..2682: note = source = /note="Description of Artificial Sequence: Synthetic coding sequence"
  source 1..2682: mol_type = other DNA
atgatactcttagccgtgctcttcctgtgcttcatctcgagctacagcgcttcggtgaaaggtcataccacaggcctgagcctcaacaacgacagattgtacaagctgacatattcaacagaagtcctgcttgatagagggaaaggaaagcttcaagattcagtggggtatcgaatatcgagcaacgtggatgtcgcgctgctgtggcggaacccagacggcgacgatgatcaactcatccaaatcaccatgaaagatgtgaatgtcgagaacgtcaaccaacagcgaggagaaaaatctatattcaagggaaagtcccccagcaagataatgggcaaagagaaccttgaggccctgcagagacccactttgctgcaccttattcatggaaaagtgaaagagttctactcttaccagaacgaagcagtggctatcgagaacataaagcgcgggttggcttccctgttccaaacccaactctcctcaggcaccactaacgaggtggatatttctggcaactgtaaagtaacctatcaagcccatcaggacaaggtaatcaaaataaaagcactggactcgtgtaagattgcaaggtcgggctttaccacacccaaccaggtgctgggagttagcagcaaggccacctctgtgacaacatacaaaatcgaggatagttttgtgatcgcagtactggctgaagagactcacaactttggactgaatttcttgcaaacaatcaaaggaaagatagtcagcaagcagaagctcgaacttaaaaccaccgaagctggcccacgcttaatgtcaggaaagcaagccgctgctataatcaaagcagtcgatagcaagtacacagcaattccaatcgttggccaggtatttcaaagtcactgtaagggctgtccatcacttagtgagctttggagaagcacgcggaaatacttgcagcccgataacctgagcaaagctgaagctgtgcgcaacttcctcgcgtttattcagcacctgcggaccgccaaaaaggaagaaatccttcaaattctgaagatggaaaataaggaagttttgccacagctggtcgatgcagtgacctcagctcaaaccagcgactcgctggaggctatactagactttctggactttaaatcagactccagcatcatactgcaggaaagatttctttacgcatgcggattcgctagccaccccaacgaagagctgcttagggccttaatttcaaagttcaaaggatctattgggtcctcagatataagagagacagttatgattataactggcacactggtgaggaaactgtgtcagaatgaggggtgcaaacttaaagctgtggtagaagctaagaaacttatcctgggagggctggagaaagcagaaaagaaggaggacaccaggatgtatctgctggcattaaagaacgcgctcctgcccgaaggcatcccttcgctcctgaaatacgccgaagctggagaagggcccatctcccatttggccacaaccgcattgcagcgctacgatctgccatttattaccgacgaagtgaaaaaaacgttgaacagaatctaccatcagaaccgcaaagtgcacgagaaaactgtccggacggctgccgcagccataattctgaacaacaacccctcctacatggacgttaaaaacatcttgctctcgatcggagagctgccacaggagatgaacaagtacatgctggctattgtgcaagacatcctccggttcgaaatgcctgcaagcaaaattgtgcgccgggtactcaaggagatggttgcacacaactacgatcgatttagccgcagcggcagtagcagcgcctatacgggctacattgaaaggtctccgagatcagcatctacttatagcctggatatactgtactccggctcgggaatcctcaggaggagcaacctgaacatcttccaatacataggtaaggctggactgcatggcagtcaggtcgtgatcgaagctcaaggtctggaagctctcattgctgccactccagacgagggtgaagaaaacctggattcttatgcaggcatgagtgccatcctctttgacgtccaactgaggcccgtcacatttttcaatggttactctgatctgatgagtaaaatgctttccgcttcaggtgaccctatatcggtcgttaagggcctcatcctcctcatcgaccactcacaggaattgcagcttcaatccggactgaaggcaaatattgaagtgcaaggaggcctggcaatcgacatcagcggcgctatggagttttctctgtggtatcgggaatcaaagaccagggttaagaaccgggtgacggtggtaattaccaccgacatcacagtggatagcagctttgtaaaagctggattagaaacgagcactgagacagaagcaggacttgaattcatcagtacagtgcagttttctcaatatcccttcctggtgtgcatgcaaatggacaaggatgaagcgccattcaggcaattcgagaaaaagtacgagaggctcagcacaggacgcgggtacgtaagccagaagagaaaagaaagtgttctggctgggtgcgagtttccacttcatcaggagaactcagagatgtgtaaggttgtttttgccccccagcccgacagcacatcctccggctggttc

SEQ ID NO: 16822 - DNA, 2682 bp, synthetic construct
  misc_feature 1..2682: note = source = /note="Description of Artificial Sequence: Synthetic coding sequence"
  source 1..2682: mol_type = other DNA
atgattcttctggcagttttgttcctgtgtttcatctcctcttactctgcttcagtgaagggtcataccaccggcttgagccttaataacgacagactctacaagctgacatattccaccgaggtgctcttggaccgcggaaaaggtaagttgcaggatagcgtaggctatagaatcagctcaaacgtagatgtggctctcctgtggaggaatcccgacggagatgacgatcaacttattcagatcaccatgaaggacgtcaacgtcgagaacgtgaatcaacaaagaggcgagaaatctatcttcaagggtaaatcacctagtaagattatgggtaaggaaaacttggaggccctgcagaggccgaccctgctgcatcttattcatggaaaggtgaaggagttctactcctaccaaaatgaggccgtagcaatcgagaatatcaagaggggtctggcctctctcttccagacccagctgtcaagtggaactactaatgaggtggacatcagcggaaactgcaaagttacctaccaggcccatcaagacaaggtcattaaaattaaggccttggactcctgcaaaatcgctagatcaggttttacaactcctaaccaggtgctgggcgtcagtagcaaagctacaagcgtgactacatacaaaatcgaggatagcttcgtgatagccgttctggccgaggagactcacaatttcggattgaacttccttcagaccattaagggcaagatcgtaagcaagcagaagctggagctgaagaccactgaagccggcccaaggctgatgtctggcaagcaggctgctgccattattaaggctgtcgactcaaaatataccgcgattccaattgtgggccaggttttccagagccattgcaagggatgcccgtccttgagcgagctctggaggagcactagaaagtaccttcaaccagacaacctgtctaaagctgaggcggttaggaactttctggctttcatccagcatctcaggactgccaagaaggaagagatcctgcagatcctcaagatggaaaacaaagaggtgttgcctcagctcgtcgacgcagttaccagcgcccagacttctgactctctcgaggctattctcgatttcctcgacttcaaatctgatagtagtataatcttgcaggaaaggttcttgtacgcctgcggattcgcttctcaccctaacgaagaactgctccgcgcactcatcagtaaattcaaaggttccattggctcaagtgacatcagagagacagtcatgatcattacgggaacgctggtgaggaaactctgccagaatgaaggttgcaagctgaaggcagtcgtggaggcgaagaagctgatcctgggtggtctggaaaaggcggaaaagaaggaggataccaggatgtatttgctggcgctgaagaacgcattgttgccagaaggtatcccaagcctgctcaagtacgcggaggccggagagggccctatttctcaccttgcgaccaccgcgctccagcgctatgatttgccattcatcaccgacgaggttaagaagacactgaatagaatctaccaccaaaacagaaaggtccacgaaaagactgtgcgcacagccgccgcagctattatcttgaataacaaccctagctacatggatgtgaaaaatatcctcctctccatcggtgaattgccccaggagatgaataaatacatgctggcaattgtgcaggatattcttaggttcgagatgcctgcttctaagatcgtacgcagggtccttaaggaaatggtggcccacaactacgatagattctcaagatcaggaagttcatccgcgtacaccggttacattgagcgctctccaagaagtgcaagcacatatagcctggacatactttacagcggctccggaattctgagaaggtctaaccttaacatatttcagtacattggcaaggctggcctgcacggcagccaggttgtgatcgaagcgcagggactggaagccttgatcgcagctactcccgacgagggagaagagaaccttgactcctacgccggtatgtccgccatcctgtttgacgttcagctcagacctgtcaccttctttaacggttattccgacctgatgagcaaaatgctgagcgcctcaggtgatccgatcagtgtggttaagggtctgattctgctgatcgatcactcacaggagctccagctgcaatccggtctcaaggcaaatatcgaagttcagggcggcttggccatagatatctcaggcgctatggagttttctctctggtaccgcgaatccaagactagggtgaagaacagggtcaccgtggtgatcaccacagacatcacggtggattcctcattcgtaaaagctggactggagacctcaacagagaccgaggccggcctggaattcatttccactgtgcagttcagccaatacccattcctggtatgtatgcagatggacaaggatgaggcacctttccgccaatttgagaagaaatacgagcgcctgtcaactggacgcggatatgtttcacagaaaagaaaggaaagtgtgctggcaggatgtgaattccccctccatcaggagaactccgagatgtgcaaggtggtgttcgcacctcaacctgacagcacctcctccggctggttt

SEQ ID NO: 16823 - DNA, 2682 bp, synthetic construct
  misc_feature 1..2682: note = source = /note="Description of Artificial Sequence: Synthetic coding sequence"
  source 1..2682: mol_type = other DNA
atgatattgctggcagtgctttttctctgcttcatatcctcttattccgcatcagtgaagggccacactacggggttgtccttgaacaacgacaggctgtacaagcttacatattccactgaggtacttctggatagaggtaagggcaagctacaagacagtgtagggtatcgcatcagttcgaatgtggatgtagccctgctgtggcggaacccggatggggatgatgaccagttgatccagatcacaatgaaagatgttaacgttgaaaatgtgaatcagcagaggggtgaaaaatcaatttttaagggcaagtctccctccaagatcatgggcaaagagaacctggaggcgttgcaaaggcctactctcctgcacttaatccacggaaaggtcaaggagttctactcttatcagaacgaggcagtggcaattgagaacattaaaagaggcctagcatctttatttcagacccagctctcaagcggcactaccaatgaggtggatattagcgggaactgcaaggtgacttaccaggcacatcaggacaaggttataaaaattaaagcactggatagctgtaagatcgccaggtctggcttcaccacccccaatcaggttctcggcgtgtccagcaaagcgacttctgttactacatacaaaatcgaggacagcttcgtcatcgcggtactggctgaggaaacccataacttcggcctaaattttctccaaaccatcaaggggaagattgtgagcaaacagaagcttgagttgaagaccactgaggcgggaccccggctgatgagtgggaaacaggcagctgccataatcaaagctgtggactccaagtataccgccatccccatcgtcggtcaggtctttcaatctcactgcaaaggatgcccctccctgtcggaattgtggcgctccacaagaaaatacttgcagcccgataacctatctaaagcggaggccgtgaggaattttttagccttcattcagcacttgagaacggctaagaaagaggagatattgcagatcctaaagatggagaataaagaggtcctgcctcagttggtcgacgccgttactagcgcccagacctcagactccctcgaggcaatcctagatttcctcgatttcaagagcgactccagcatcatcttacaggagcgatttctgtacgcttgcggctttgcttctcaccccaatgaggagctgcttagagccttaatttcaaagtttaaaggctcaatcggctcatcagacattcgcgaaaccgtcatgatcattaccgggaccctggtccgtaagctttgtcagaacgaaggctgcaagcttaaggctgtggtggaagctaaaaaactgatcctgggggggctcgagaaagccgagaaaaaggaggatacacgcatgtacctgttggccctcaaaaacgccctgcttcctgaagggattccaagcctcctcaagtacgccgaagcaggcgagggccccatctcacatctggcgacaaccgctctgcaacgctacgacctaccctttatcactgacgaggtcaaaaaaactttgaatagaatctatcatcaaaatagaaaagtccacgaaaagactgtgcggaccgccgccgcagccattatactgaataacaatccttcttatatggacgtgaagaatatcctgctgtccataggtgagctgcctcaggagatgaataagtacatgctggcaattgtgcaagatattctgaggttcgagatgcctgcgagcaaaattgtgaggcgggtgctgaaagagatggtcgcgcacaattatgataggttctcacgttccgggagcagctccgcctacaccggatacatcgagaggagtccacgaagcgcctctacctattcgttggatatcctttatagtgggtcagggatcctaaggcggagtaacctgaatatcttccagtatatcggaaaggcaggtctccatggttcccaagttgtcatcgaggctcagggcctagaggcacttatcgcggcgaccccggatgagggcgaggaaaacctcgactcttatgctgggatgtccgcaattctgtttgatgtacaacttagaccagtcacatttttcaatggctactcagacctgatgtctaagatgctctctgcgagcggcgaccccattagtgtcgtgaaagggcttattttgttgatcgatcatagccaagagctgcagttgcagagtggcctcaaggcaaatatcgaggtgcagggcgggctggccatcgacattagcggcgcgatggagttcagcctctggtaccgggaatccaagaccagagtaaaaaatcgagttacagtggtcatcacgaccgacattactgtggacagtagttttgtgaaagccgggcttgagacctctacagaaaccgaggcgggcctcgagtttattagcaccgtgcagttcagccagtaccctttcctggtgtgcatgcagatggacaaggacgaggccccatttagacaattcgagaagaaatatgagagactgtccacaggtcgaggctatgtgtcacagaagagaaaggagtccgtcctcgctgggtgtgaatttccccttcatcaggagaactccgaaatgtgcaaagtggtttttgcaccacagccggattctacttcctctggttggttt

SEQ ID NO: 16824 - DNA, 2682 bp, synthetic construct
  misc_feature 1..2682: note = source = /note="Description of Artificial Sequence: Synthetic coding sequence"
  source 1..2682: mol_type = other DNA
atgatcttgctcgcagtgctctttctgtgttttatttcatcctattcagcatctgttaaagggcataccaccgggttaagcctcaacaacgacaggctttataaactgacttattccactgaagtgcttctggatcgcggcaaaggtaaactgcaggattccgttggctaccgcataagctcaaacgtcgacgttgcactcctgtggcgcaatcccgacggggacgatgatcagctgattcagattaccatgaaagacgtcaatgtggagaacgtgaatcaacagcggggcgaaaagagtatcttcaaaggtaagtccccatcaaaaatcatggggaaggagaatcttgaggctctacagcggccaacactccttcacctcattcacgggaaggtaaaggagttttattcctaccagaacgaggcggtggctatagagaacattaaacgaggcctagcttccctgtttcagacacagctgtccagcggaactaccaacgaagttgacatctccggcaattgcaaggtaacctatcaagctcaccaagataaggttattaaaatcaaggctttggatagctgcaaaatagctcgtagtggctttacgacgcccaaccaggtgctgggtgtgtcctcaaaggcaacatctgttactacatataaaattgaagactcatttgtaattgccgtactagctgaagagacacataacttcggattaaattttctccaaactataaagggaaagatcgtgtccaaacagaagctggagctgaaaaccaccgaggctggtcccagacttatgtctggaaaacaggcggctgccatcatcaaagccgtcgactcaaaatatactgcaattccaatcgttggccaggtatttcagtctcactgcaaaggatgcccctcactgtcggagctgtggcgcagcactcgcaaatatttgcagccggataacttgagtaaagcagaggccgtgcgtaatttcttggctttcatccaacacctgaggaccgctaaaaaggaggagatcctccagatcctgaaaatggagaacaaggaagtgcttccccagttagtcgacgcggtgacttctgctcagacgtcggacagtttggaggccatcctggactttctggatttcaaatccgattccagcatcattctgcaggaacgttttttgtatgcctgcgggtttgcctcgcacccgaacgaggaacttttacgggcccttattagcaagtttaaaggaagtatcgggagctccgatattcgcgagactgtgatgattatcacaggtacactggtacgcaagctgtgtcagaatgaaggatgcaagcttaaggccgtagtggaggcaaaaaagctgattctgggaggactggagaaggccgaaaaaaaagaagacacacgcatgtacttactggctcttaagaacgctctcttacccgaaggtatcccctcgctcctcaagtatgccgaggcaggcgagggccctattagccatctggcaacaactgccttacagcgctatgacctgccatttattactgatgaagtgaaaaagactctgaacaggatttatcaccagaatcgcaaagtgcacgagaagactgttcgcacagcagccgccgcgattattctgaacaacaacccgtcctacatggatgtgaaaaatatactgctatccatcggcgaactgccacaggagatgaacaagtatatgctggctatcgtgcaagacatcctccggttcgaaatgcccgccagtaaaatcgtgcggagggttctgaaggaaatggtggcgcataattacgaccgcttcagccgcagcggtagcagtagtgcctacactggatacatcgagaggtcaccccggtccgcaagtacttacagcctggacatactgtattcgggctcgggtattctgcggagaagcaaccttaacatttttcagtatataggcaaagccggtctgcacgggagccaggtggtgattgaagcacagggtctcgaagcgttaattgcggcaactccggatgagggagaggaaaacctagattcttacgcggggatgtccgccattctcttcgatgtgcagctcaggccagtgactttcttcaatggctactctgatttgatgtcgaaaatgcttagcgcaagcggcgatcccatctccgtggtgaaggggctgatccttctcattgatcattcacaggagctgcagctccagtcaggcctaaaggcgaatattgaagtccaggggggccttgcgattgacatttcaggggccatggaattctctctctggtatcgggaatccaagacacgcgtaaaaaacagggtgacagtcgtgattacaaccgacatcaccgtggatagcagctttgttaaggcgggcctggagacgtcgacggaaaccgaggccggccttgaattcatttcaactgtacagttttcccagtacccttttctggtttgtatgcagatggacaaggacgaggctccatttagacaatttgaaaagaagtacgagaggctctctacaggacgcggctatgtgagccagaaacgcaaagagtccgtactggctggatgcgaattccccttgcaccaggaaaacagcgagatgtgcaaggttgtattcgccccgcagcccgattccacgtcttcagggtggttt

SEQ ID NO: 16825 - DNA, 2682 bp, synthetic construct
  misc_feature 1..2682: note = source = /note="Description of Artificial Sequence: Synthetic coding sequence"
  source 1..2682: mol_type = other DNA
atgatcctcctcgcggtgttgttcctctgtttcatcagctcttattcggcatctgtcaagggacacactaccggactctcattgaacaacgaccggctgtacaaactgacttactccacggaagtgctgctggacagaggaaaggggaagctgcaagactccgtgggctaccggatttcctccaatgtcgacgtggcgcttctgtggagaaatcccgacggggacgacgaccaacttattcagatcactatgaaggatgtcaacgtggaaaacgtgaaccaacagcgcggcgaaaagtccatcttcaagggtaagtcgccgagcaagatcatgggaaaggagaacctcgaagcgctgcaacggccgactttgctgcatctcatccatgggaaggtgaaggaattctactcgtaccagaacgaggcggtggccatagagaacatcaagagagggctggcgagcctgttccagacccagctgagctccggtactacgaacgaggtggacatctcaggcaactgcaaagtgacttaccaggctcatcaagacaaagtcatcaagatcaaggccctggattcttgcaagatcgctaggagcggatttactaccccgaatcaagtgctcggcgtgagctcaaaagctacctccgtgaccacctacaagatcgaggactcatttgttattgccgtactggccgaggagactcacaatttcggactgaactttttgcagactatcaaaggcaagatagtgtcgaaacaaaagctcgagctgaaaaccaccgaggcaggccccaggttgatgtcgggaaagcaagccgccgccatcatcaaagcagtggactccaaatacactgcgatcccgatcgtggggcaggtgtttcagtcccactgtaaaggctgcccgtcgctgtcagagctctggcgctcaactaggaagtacctccagccagacaacctcagtaaggccgaggccgtccggaatttccttgcgtttatacagcacctcagaacggcgaaaaaagaggaaatcttgcaaatcctcaaaatggaaaacaaagaagttctgccgcagctcgtggacgccgtgacgtcggctcagacctcggacagccttgaagcaatcctcgacttcctggatttcaagtcggactcctccatcatcctgcaggaaaggttcctgtacgcctgcggtttcgcatcgcacccaaatgaggaacttctccgtgcgctgatcagcaagttcaagggctcgatcggctcgtccgacattagagaaactgtcatgatcatcaccggaaccttggtccgcaaactctgccagaacgaaggctgtaagctgaaggcagtcgtcgaggctaagaagctgattctcggaggcctggagaaggcagagaagaaggaagatactcgcatgtatctgttggcgctgaagaatgccctgcttccagaaggaatcccctcattgctgaaatatgcggaagctggggaaggtccaatctcccacctggccaccaccgcccttcagcggtacgatctcccgtttatcaccgatgaggtgaagaaaacccttaatcggatttaccatcagaatcgcaaggttcacgaaaaaaccgttcgcactgcggccgcggcaatcatcttgaacaataatccttcatacatggatgtgaagaacattctcctttccatcggcgagctgccacaggagatgaacaagtacatgttggcaatcgtgcaagacattctcagattcgaaatgccggcatccaagatcgtgcgcagagtgctgaaggagatggtggctcacaattatgatcggttctcacggtccggaagctcttccgcctacaccggatacatcgaacggtcgccaagaagcgcttcaacctactccttggatattctgtactcgggatccggaatccttcggagatccaatttgaacatcttccagtacataggaaaggcaggactgcatgggtcccaggtcgttattgaggctcagggattggaagccctcatcgccgccaccccagacgagggcgaggagaatctcgattcctatgccggaatgtccgctattctgttcgacgtgcaactccgccccgtgaccttctttaacggatatagcgatttgatgagcaaaatgctctccgcctctggagatcctatctcggtggtcaaggggcttatcctgctgatcgaccattcccaggagctccaactccagagcgggcttaaggcaaatatcgaagtccaaggcggcctggccattgatatctccggagctatggaattttcgctctggtaccgcgagtcaaagaccagggtcaaaaaccgggtcactgtggttatcactacggatatcacggttgactcctccttcgtcaaagctggactggagacgtctactgaaaccgaagccggcctggagttcatctcgaccgtccagttctcacagtacccattcttggtgtgcatgcaaatggataaagatgaagccccgttccggcaatttgaaaagaagtacgaacggctgagcaccggccgcggatacgtgtcacagaagcggaaggaatcggtgctcgcaggctgtgagttccctctccaccaggaaaattcagagatgtgcaaggtcgtgttcgcgccgcagccggactcgacctcttcaggttggttt

SEQ ID NO: 16826 - DNA, 2682 bp, synthetic construct
  misc_feature 1..2682: note = source = /note="Description of Artificial Sequence: Synthetic coding sequence"
  source 1..2682: mol_type = other DNA
atgatcttgctggctgtcctgtttctttgctttatcagttcctattccgcttctgtgaaaggacacacaactggactaagtctcaataatgacagactgtataaactgacttatagtactgaagttcttctggatcggggaaagggaaagctccaggattcagtagggtataggatcagttccaatgtggatgtagctctactttggagaaatcctgatggagatgatgatcagttaattcagattacaatgaaagatgtaaacgtcgaaaacgtgaatcaacagcggggggaaaaatctatctttaaaggaaaaagtccatcaaaaataatgggaaaagaaaatttagaggcgctccagcggccaacactactccatctgatccatgggaaagtaaaagaattttattcttaccagaacgaggcagtggctatcgaaaatattaaaagaggacttgcatctctcttccagacacagctctcttctggaacaactaacgaagtcgacatatctggaaattgtaaagtgacatatcaggcccaccaggataaagtgataaaaataaaagcacttgatagttgtaaaatagcacggtccggatttactactccaaaccaggtgttgggagtttcctctaaggccacaagtgtcactacttacaaaatcgaagattcctttgtgatcgccgtgctggcggaagaaactcataacttcggactgaactttctccagacaatcaaagggaaaatcgttagtaaacagaaactcgagctcaaaactactgaagctggaccaagactgatgtccggaaaacaggcggctgctatcatcaaagctgtagatagtaaatatacagcgattcctatcgtagggcaggtgttccaatctcattgtaaagggtgtccatctctttccgagctttggcggtccactcgcaaatatctacagcctgataacctctccaaagccgaagctgtgagaaactttctcgcctttatccagcacttacggacagctaagaaagaagaaattttacagatcctgaaaatggaaaacaaagaagtgttaccacagctggtggatgccgtgacgtccgcacagacatcggatagtttagaagctatcctggactttttagactttaaaagtgattcctccattattctacaggaacggttcttatatgcctgtggattcgcttcacatccaaatgaagaacttctgagggcactcataagtaaatttaaagggtccatcgggtcttcagatataagggaaacagttatgataattactgggactctggtgcggaaattgtgccagaatgaggggtgtaagctgaaagcagtcgtggaagctaaaaaactaatcctggggggactggaaaaagccgaaaagaaagaagatactcggatgtatctacttgctctcaagaacgcactcctgccagagggaatcccatcactcttaaagtacgccgaagcaggggaaggaccaatctcacaccttgcaacaacagcccttcagagatatgatctgcctttcattacagacgaagttaaaaaaacactcaatcggatctatcatcagaacaggaaagtacatgaaaaaactgtgcggacagccgcagccgccataatattaaacaataacccttcttacatggatgtgaagaatatcctgttatcaataggggaactccctcaggaaatgaataaatatatgttggcgattgtgcaggatattcttcggttcgagatgccagcctctaaaattgtcaggcgggtgctcaaagaaatggtagcccacaattatgatagattctctcgatctgggtcctcgtccgcctatacaggatacatagaacgcagtcctcggtcagcttctacatattccctcgacatactctattccggatccgggatactgagacggtctaatctaaacatctttcaatatatagggaaagcagggcttcacgggtcacaagtcgtgatagaggcccaaggattggaagctctaatcgcagcaacacccgatgagggagaggaaaacctcgatagttacgccggaatgtctgctatacttttcgatgtccagctaagacccgtgacttttttcaacgggtattctgatctcatgagtaaaatgctaagtgcttcaggggatccaatatccgtggtaaaaggactgattctactgatcgaccattcccaagagctgcagctgcaatctggactcaaagcaaacatcgaagtgcagggagggctcgcaatcgatatcagtggggcaatggaattttcactctggtatcgcgagtccaaaactcgggtgaaaaacagagttacagtcgtaattactactgatatcacagtggattcttcgttcgtgaaagctgggctggaaacttcgacagaaacagaagccggactcgaattcatatccacagtacagttttcccagtaccctttcttagtgtgtatgcagatggataaagatgaagctcccttccgccagtttgagaaaaagtatgaaaggctttccacagggcgcgggtatgtgtcacagaaacgtaaagagtctgttctcgcagggtgcgagtttcccctgcaccaggaaaattcagaaatgtgtaaagtcgtctttgcgccacagcccgattctacatccagtgggtggttc

SEQ ID NO: 16827 - DNA, 2682 bp, synthetic construct
  misc_feature 1..2682: note = source = /note="Description of Artificial Sequence: Synthetic coding sequence"
  source 1..2682: mol_type = other DNA
atgattctgctggcagtgttgttcttgtgctttattagttcttattccgcctctgtgaaaggccacaccaccgggctgagcctgaacaacgacagactctacaagctaacatattcaactgaggtcctgctggaccggggaaaggggaaactacaggacagcgtgggataccgaataagcagtaatgtagacgtcgcattactgtggcgcaatccagacggagacgacgaccagcttatccagattaccatgaaggatgtaaatgtcgaaaatgtgaatcagcagaggggcgaaaagtctatcttcaaagggaaatctcccagcaaaatcatgggtaaggaaaatctggaagcgctccagagacctacccttctgcacctgatccacggtaaggtcaaggagttttactcataccagaacgaagcggtcgccatcgagaatattaaacgaggtctggcttcactattccaaactcagttgagttccggaacaaccaacgaagtggacatcagtgggaactgcaaagtcacgtaccaggcccaccaagacaaggtgatcaagataaaagctctggacagttgcaaaattgccagaagcggatttaccactccaaatcaggtcttgggcgtaagtagcaaagcgacctccgtaaccacctataagatcgaagattcctttgttatcgccgtgttggctgaggagacccacaactttggactgaatttccttcagacaatcaagggcaaaattgtatccaagcagaagctggagttaaaaactaccgaggccggaccccgccttatgtccggcaaacaagccgctgccatcataaaggccgtggattccaaatacacagcaatccctattgttggtcaagtgttccaaagtcattgcaagggttgtccatccctgtccgagctatggcgcagtacaagaaagtatctgcagccagacaatctctcgaaagccgaagccgtgagaaatttcttggcgttcatccagcatcttagaacagccaagaaggaagaaattctccagatcttaaagatggaaaacaaagaggtgctgcctcagctggttgatgccgtgacttctgcacagacatctgacagcctggaggcaattttggatttcctggacttcaagtctgactcatcgatcatcttacaggagcgatttttatacgcctgcggattcgcttcccatcctaacgaagagctccttcgggcattaataagcaagtttaaggggagcattggttcatcagacatccgtgaaacggtgatgattatcaccgggacactcgtccgaaagctatgccaaaatgagggttgtaaattgaaagccgtggtggaagcaaaaaagctcattctgggcggcctcgagaaggcagagaagaaggaagatacccgaatgtacctgctggccctgaagaatgccctactgcctgaagggatcccatctctccttaagtacgccgaggccggggaaggaccaattagtcatttggctacaacagctctgcagagatatgatcttccatttataacagatgaagtgaaaaagaccctcaaccgaatctatcaccagaacaggaaggtgcacgagaagacagtgaggacagccgcagccgcgattattctgaataacaacccaagctatatggatgttaaaaatattctgctgtccatcggagagctccctcaggagatgaacaaatacatgctagcaatagttcaggatatcctgcgcttcgaaatgcctgcatctaaaatcgttaggagggtgcttaaggagatggtcgcccacaactacgatagattcagcagatctggctccagctccgcctataccggctacattgaaaggtcccctaggtcagcatccacatacagcttagacatcctctacagcgggtcgggcattttgaggagaagcaacctcaacattttccagtatataggaaaggccgggctacacggcagtcaggtcgtaattgaagcacagggattggaggccctgattgcggctactccggacgagggcgaagagaatttggactcttatgccggtatgtctgccatccttttcgatgtgcagctacgacctgtaaccttcttcaatggctattccgacctcatgagtaagatgttgagcgccagcggcgatcctatatcagtggtgaaaggcctaatactcctcattgatcactcccaggagttgcagctccagagcggcttaaaggccaatatcgaggtccaggggggcttggccatcgacatatccggggccatggaatttagcttgtggtatagggaatccaagacacgggttaaaaacagggtcactgtggtcatcacaacggacattaccgtggattcttctttcgtcaaagccgggctggagaccagcaccgaaaccgaggcggggttggaattcatttctactgtccagtttagtcagtatccatttctggtttgcatgcagatggacaaggacgaggcgcctttccgccagtttgagaagaaatatgaaagattgtccacagggaggggatatgtaagtcagaaacgaaaagagtcggtgctcgctggctgtgaattccctctccaccaggagaactccgagatgtgtaaagtggttttcgcaccacagcctgacagcacttcttctgggtggttc

SEQ ID NO: 16828 - DNA, 2682 bp, synthetic construct
  misc_feature 1..2682: note = source = /note="Description of Artificial Sequence: Synthetic coding sequence"
  source 1..2682: mol_type = other DNA
atgattctacttgcagttctgttcctctgtttcattagctcatattctgcgagcgtgaaaggacacacaaccggtctgtccttgaacaatgatcgcctctataagctcacctacagcactgaggttctgctagataggggcaagggcaagctacaggactcagtggggtacaggatctccagcaatgtcgatgtcgcgcttttgtggaggaacccggatggagacgatgatcaactcattcagattaccatgaaggacgtcaatgtggagaatgtaaaccagcagagaggggaaaaaagcatctttaaagggaagagcccgagcaagatcatgggcaaggagaacctagaagcgttgcagaggcctaccctgctccaccttatacacggcaaggttaaggaattttacagttaccaaaatgaagcagttgcgatagaaaacatcaaacgaggcttggccagtttgttccagacgcagttatcgtcgggcacgacaaatgaggtggatatcagcggtaactgcaaagtcacttatcaagcccatcaggataaggtgattaagattaaggctcttgactcttgcaagatagctcggagtggctttaccacacctaaccaagtgctgggcgtgtcaagtaaggccacttctgtgactacctataaaattgaggacagttttgtcattgcggtgctggctgaagagactcacaattttgggttaaattttcttcaaactatcaaaggcaagatagtgtctaaacaaaaactggagctgaagaccacagaggcagggccgcgcctgatgtccggtaaacaggccgccgccatcatcaaggccgtggactctaaatacacagccattcctatcgtgggtcaggtttttcaatcacactgcaaaggctgccctagcttgagtgaactgtggagaagcacaagaaaatacctgcagccagacaacttgagcaaggcagaggcggtacgaaactttttggcattcattcagcacttgcgcactgccaaaaaagaggaaattctgcaaatcctgaagatggagaataaagaggttctgccccagctggtggatgctgtaacttcagcccagacatccgattcccttgaggccatactggatttcctagattttaaaagtgactcctccataattcttcaggagcgcttcctgtatgcttgtggcttcgccagtcaccccaacgaagaactgctacgcgctctgatctcaaagtttaagggctctatcggctcatcagacattagggaaaccgttatgataatcaccggaactcttgtgaggaaactctgccagaacgaagggtgtaagctgaaagcagttgtagaagccaaaaagctcatcctgggcggtctggagaaggccgaaaaaaaggaggacactcggatgtatttgttagccctgaagaacgcgttacttcccgaaggcataccgtcccttctgaagtatgccgaagccggcgaaggacccatctcgcatttagcgaccacggccctccagagatacgatcttccctttatcacggatgaagtgaagaaaacactaaataggatttatcaccagaaccgcaaggtgcacgagaaaacggtacgaacagccgctgcagcaatcattctcaataataatccttcatacatggacgtaaagaacatcttgttatccattggagagctgccccaggagatgaacaagtacatgctggccatcgtacaggatatcttacgcttcgaaatgccggcgagcaagatcgtgcgcagggtactgaaagaaatggtggcccacaactatgatcgttttagtcgcagcgggagtagctcagcctacaccggctacatagagcgttctccacgcagtgcctcaacttactccctggacattttgtattctggttctgggattctgcgtaggtcaaatctgaacatcttccagtacatagggaaggccggattacacgggtcacaagttgtaattgaggcgcaaggtctggaggcgttaattgccgcaacgcccgatgagggtgaagagaatctcgactcctacgcaggaatgtcagccatcctgtttgatgtgcaacttcggcccgtgaccttttttaacggttacagcgacttaatgagcaaaatgttgtcagcatctggagacccaatctcagttgttaagggtctgatcctgctcatagatcacagccaggagttgcaacttcagagtggtctgaaagcgaatattgaggtgcagggtggcctggccattgacatttccggcgctatggaattctcactgtggtaccgggagtcaaagacgagggtcaagaatcgagtgacggtggttattacaaccgatattacagttgactcctcattcgtgaaagccggtttagaaacttccacagagactgaagcgggcctggaattcatcagcaccgtgcaattcagccagtaccctttcctggtttgtatgcagatggacaaagatgaggccccattccgccagttcgagaaaaaatatgagcgactcagcacggggcgggggtatgtgtcacagaagcgaaaagaatcagtcctggccggatgcgaattcccactgcaccaggaaaactctgagatgtgcaaggttgttttcgccccccagccagacagcacaagctctgggtggttt

SEQ ID NO: 16829 - DNA, 2682 bp, synthetic construct
  misc_feature 1..2682: note = source = /note="Description of Artificial Sequence: Synthetic coding sequence"
  source 1..2682: mol_type = other DNA
atgatactcctggcggtattgtttctctgcttcatcagcagttattccgcctctgtgaagggacatacgacaggcctctccctcaataatgatcgactgtacaagttgacctacagcaccgaggtgttattggaccgcggcaaagggaaattgcaggattccgtgggttatagaatctcaagtaatgtcgatgttgccctgttgtggcgcaacccagacggcgatgatgaccagttaatccaaattactatgaaagatgtgaatgtagagaatgttaaccagcaaaggggggagaagtctatctttaaaggcaagtccccatccaaaatcatgggcaaagaaaacctagaagccctgcaacgtccaaccttgttgcatttaattcacggtaaagtcaaagagttttattcttatcagaacgaagcggttgccatagagaatatcaagaggggcctggcgtcccttttccagacacaactctcgtctggtacgaccaatgaagtggacatctccgggaactgcaaagtgacgtatcaggctcatcaggataaggtgattaaaattaaagccttggacagttgcaagatcgccagaagcgggttcacaacaccaaaccaagtcctgggtgtgtcctccaaagcaacatcggttactacctacaagattgaggatagtttcgtcattgccgtcctagccgaggaaacccacaattttggcctgaatttcctgcagactattaaaggaaaaattgtgtcaaagcagaagctcgagctaaagactaccgaagcgggaccgcgactgatgtcagggaaacaggctgctgctatcatcaaagccgtggattccaagtacacagccatccccatagtcggacaggtgtttcagtcccactgcaagggttgccccagtcttagcgagctgtggcgctccacaaggaaatacctgcaaccagataacctgagcaaggccgaagccgttaggaattttttggcctttatacagcatcttcgcaccgcaaagaaggaggagatcctccaaatcttaaagatggaaaacaaggaggtgctgccgcaattggttgacgccgtgacctctgcccagactagcgacagcctggaagctatccttgacttcttagacttcaagtcggactcttccatcatccttcaggagagattcctgtatgcctgcggattcgcgtcccaccctaatgaagagctactgcgggctctcatctcgaagttcaagggtagtatcggctccagtgacatccgagagactgttatgatcattacagggactctcgtgcggaaactttgccaaaacgagggctgcaaattgaaggccgtggttgaggcaaagaaacttatattagggggccttgaaaaggcagaaaagaaagaagacactaggatgtacctgctggcactgaaaaacgccttgctgccagaagggattcctagtctgctgaagtatgccgaggctggtgaggggcctatctcccaccttgcaacaaccgcactccagaggtatgacctgccgttcattaccgacgaggtcaaaaagacccttaatagaatttaccatcagaaccggaaggtccacgagaaaactgtccgaacagctgctgcagccataattctaaacaataacccatcgtacatggacgtgaaaaacattttactgagcatcggagagttacctcaggaaatgaacaagtatatgctggccattgtgcaggatatcctgaggtttgagatgcccgctagcaagatcgttagacgagtgctgaaggagatggtggcacataactacgatcgcttctctcggtccgggagctcatctgcgtacactggctatattgaacgctcaccaagatctgcctccacttactcgctagatatcttgtattccgggtccggaattctgagaaggagcaatttgaacattttccagtacattggcaaggcaggactacatgggagccaggtcgtcatcgaggctcagggcctggaagctctgatcgcagccacccctgatgaaggtgaggagaatttggatagttatgcaggtatgtctgcaattctcttcgatgtgcagctgcggccggttacgttttttaatgggtattcagacctcatgagtaagatgttgtcagcctcaggggaccccatttcagtggtgaaaggtctcattctgcttattgaccattctcaggaattacagttgcagagcggcctgaaggcaaacattgaagtgcaggggggcctggctattgacattagtggagctatggagttcagcctttggtatagggagagtaaaacacgggtgaagaatagagtgacagtggtaattaccactgatatcacggtagattcttctttcgtcaaggctggactggagacaagcaccgagactgaggccggtctcgaatttatttcaaccgtgcaatttagccagtatcccttcctggtatgtatgcaaatggacaaggatgaagcccctttccgtcagtttgaaaaaaagtatgagcgcctgtcaacagggagaggctatgtaagtcagaagcggaaggagtcagtgttggcgggttgtgaattcccgttgcaccaggaaaacagcgaaatgtgcaaggtagtttttgcaccccagcccgactccactagctccgggtggttc

SEQ ID NO: 16830 - DNA, 2682 bp, synthetic construct
  misc_feature 1..2682: note = source = /note="Description of Artificial Sequence: Synthetic coding sequence"
  source 1..2682: mol_type = other DNA
atgatcctgctggccgtgttgtttctctgcttcatttcgagctactccgccagcgtgaagggccacaccacaggtctgagtcttaataacgaccggctttacaagctcacatactcgacggaagtacttctggataggggaaagggcaagctgcaggacagcgtaggttaccgcatctccagtaacgtggatgtggccttgttgtggcgcaacccagacggcgacgacgaccagttgatccagataaccatgaaggatgtgaacgttgagaacgtgaaccagcagagaggagaaaagagcatcttcaaaggaaagagcccgtccaagataatgggcaaggaaaacttagaggcccttcagcggcccacactgctacaccttatccacggaaaagtgaaggaattttactcttaccagaatgaagccgtggccatcgagaatattaaacgcggcctggccagcctttttcaaacacagttgtcgagcggaaccaccaacgaggtggatattagcggcaattgcaaggtcacgtatcaggcccatcaggacaaggtgataaagattaaggcactagactcctgcaagatagccagatccggcttcacaacccctaatcaagtcttgggcgtatcgtcgaaagcaacctcagtgacgacatacaaaatcgaagattccttcgtcattgccgtgctcgcggaagagacacataacttcggattgaacttcctgcagacgattaagggtaagatcgtgagcaagcagaagctggagctgaagactacagaagccggcccgcgactcatgtccggaaagcaggcagcggccattataaaagccgtggattccaagtacacggctatcccaattgtaggccaggtgttccaaagccactgtaagggctgcccctcactgagcgaactgtggcggagcactaggaagtaccttcaaccggacaacttgagcaaagccgaggctgtccgcaattttctggctttcatccagcatttgcgtactgccaagaaagaggagatcctgcagatcttaaaaatggagaacaaggaggttctaccacaacttgtggatgccgtgacatccgcccaaacctccgacagccttgaggcaatcctggatttcctggactttaagtccgactcgagtattatactccaggagcgctttctgtacgcttgcggcttcgcgtcccatccgaatgaggaactgctacgggccctcatcagtaagttcaagggcagcattggcagctcggatatacgtgagaccgtgatgatcattaccggcaccttggttcgcaagctctgtcagaacgaaggctgtaaactgaaggctgtcgtagaagcgaagaaactgatactgggcggcctcgagaaggctgagaagaaagaagatacccgtatgtacctgttggctttgaagaacgccctgctgccggagggaatcccctcactgcttaagtatgccgaggcaggcgaaggcccaatctcgcatcttgccaccacggcgctgcaacggtacgatttgccttttattacagacgaggtaaagaagacgttgaaccggatctaccaccagaaccgtaaagtacatgagaagactgtacgcactgccgccgcagccatcattttgaataacaatcccagctacatggacgtcaagaatatcctattgagcataggagagttgccgcaagaaatgaataagtacatgttagccatcgtgcaagatatcctgcgatttgagatgcccgcgagtaagatcgttcgtcgtgtgttgaaggagatggtggcccacaattacgataggttcagccgcagtggttcgtcttcggcctacaccggttacatcgaacgctcgccccgcagtgcctcgacttactccctggatattctctatagcggaagcgggattctgcggaggtctaacctgaacatcttccagtacatcggtaaggccggactgcacggatcccaggtggtgattgaggcccaagggttggaggctctcattgcggctactccggacgaaggcgaggagaatttggattcgtacgctggtatgagtgccatactgttcgatgtgcagttgcgaccggttactttcttcaacggctatagcgatctgatgtcgaagatgctgagcgcgagcggcgatccgatttcggtagtcaagggcctgatactgctgatagaccatagccaggagttacagctgcaaagtggactaaaggctaatatcgaagtccagggcggcctggccattgatataagtggagccatggagttcagtctgtggtaccgcgaaagcaagactagggtcaaaaaccgtgtaaccgtagtgattactaccgatattactgtggactccagcttcgtgaaagctggcctggagacctctacggagaccgaggcaggattggagttcattagcaccgtccagttttcccagtacccgttccttgtctgcatgcagatggataaggacgaagcaccgttccggcaatttgagaagaagtatgagcgtctcagcaccggtcgcggctacgtttcccagaaacgcaaggagtcggtcctagccggctgtgagttcccactccaccaggagaattccgagatgtgcaaagtggtctttgcaccgcagccggactcgacaagtagtggctggttt

SEQ ID NO: 16831 - DNA, 2682 bp, synthetic construct
  misc_feature 1..2682: note = source = /note="Description of Artificial Sequence: Synthetic coding sequence"
  source 1..2682: mol_type = other DNA
atgatattgctcgcagtcctcttcctctgcttcatttccagttatagcgcttctgttaaaggacatacaacaggactctccttgaataatgatagactgtataagctgacctattccactgaagtcctgttggaccgcggaaagggcaaacttcaggattccgtgggctaccgcatcagctctaatgttgatgttgcactactgtggcgaaaccccgacggagatgacgaccagcttatccagatcactatgaaggatgttaacgtcgagaacgtcaatcagcaaagaggcgagaaaagcatatttaaggggaagtccccttcgaagattatgggaaaagagaacctggaggccctgcaacgtccaactctgcttcacctcatacacgggaaagtgaaagaattctacagctatcaaaacgaggccgtggccattgagaatataaaacgggggctggcctctttgtttcaaacacagctgagctctggaacaacaaatgaggtcgacatctcaggtaattgcaaagtcacgtaccaagcacaccaggataaagttataaagattaaggcactggatagctgtaaaatagcccgctccggcttcacgaccccaaaccaggtgctgggggtatccagcaaagctacatccgtgaccacctataagatcgaggatagcttcgtaattgctgtgctggccgaggaaacccataactttgggctgaactttctgcagactatcaagggaaaaatcgtctcaaagcaaaagttggagttaaaaactactgaggctggtcctaggctcatgtcaggtaaacaggcagccgcgataatcaaagctgtagattctaagtatacagccatacccatcgtgggacaggtgttccagtcccattgcaaaggatgcccatcactgagcgaactgtggcgcagcacacgcaaataccttcaacccgataatctgagcaaggctgaagctgtgcgcaattttttagcctttatccaacatttgcgtaccgccaagaaggaggaaattctgcaaatactgaagatggagaacaaggaagtgctgcctcagctagtggacgccgtgacatccgcacagacatccgactcgctggaggctattttggacttcctggatttcaaaagcgactcatccattatcctacaagaaaggttcctatatgcttgtgggttcgccagccatccaaatgaagaactcctcagagctttaatatcgaagtttaaaggctccataggcagcagcgatatccgggagaccgttatgatcataacaggtacgctggttaggaagttgtgccagaatgagggctgcaaactgaaagctgtggttgaggccaaaaaactgatcctaggcgggctggaaaaggctgagaaaaaggaggacacacgcatgtatctgttagccctcaaaaacgctctccttcccgaggggattcccagcctccttaaatatgcagaagccggcgaggggccaatttctcacctggccactaccgcattgcaaaggtacgacctcccctttataaccgatgaggtgaaaaagacgctaaaccgcatttatcatcagaatcgaaaagtgcacgagaagacagtcaggactgccgctgccgccattattctaaacaacaacccctcctatatggacgtaaagaatattttattatccattggcgaactgccgcaggaaatgaataaatacatgcttgcaatagtgcaggatatactcaggttcgagatgccagcctccaagattgtaagaagggttttgaaagagatggtagcccacaactatgaccggtttagtcggtccgggtcttcgtccgcttacactggctacatagaaaggtctcctcgctcagcgagtacatattccctggatatcctctatagtggttctggaatccttaggcggtctaacttgaacatctttcaatacatcggcaaggcggggcttcacggtagtcaggttgtcatcgaagcccaggggctagaagcactcattgcagcaaccccagatgaaggagaagagaatcttgattcatacgccggaatgagcgctatcctgttcgacgtccagttgcgtcctgtgaccttctttaacggctactctgatctgatgtctaagatgctgagtgcttctggcgatcccatttctgttgtcaagggattgatcctgctgatcgatcattcacaagagctccagcttcagtcaggccttaaagcgaatatcgaggttcaggggggtctggcgatcgatatcagtggcgctatggagttctccctgtggtacagggagtctaaaactagggttaagaaccgggtgacggtggtcattaccacagacattacagtggactcgtcttttgttaaggcagggctcgagacaagcactgaaaccgaggccggtctggaatttattagtaccgtgcagttcagtcagtaccctttcctggtgtgcatgcagatggataaagatgaggctccctttaggcagtttgaaaaaaagtatgagcgcctgtctaccgggcgggggtatgtgtcccagaaacgtaaagaatctgtgctggccgggtgtgaattccctcttcatcaggaaaattccgagatgtgtaaggtggtgttcgctccccagccagactccactagcagcgggtggttc

SEQ ID NO: 16832 - DNA, 2682 bp, synthetic construct
  misc_feature 1..2682: note = source = /note="Description of Artificial Sequence: Synthetic coding sequence"
  source 1..2682: mol_type = other DNA
atgatcctgttggctgtgcttttcctgtgcttcataagttcatattccgccagtgtcaagggccatactaccggccttagccttaataatgaccgcttgtataaactgacctattccaccgaggtcctgcttgatagggggaagggaaagctgcaggactctgtcggttaccgcattagcagtaacgtggacgtggcactgctgtggagaaatcccgatggggatgacgatcagcttatacaaatcaccatgaaggatgttaacgtggaaaacgtcaatcagcagcggggcgaaaagtccatatttaaaggcaaatcccccagcaaaattatgggcaaggaaaatctggaggcactccagaggccgacattgttgcacctgatccacggaaaggtcaaagagttttactcctaccagaacgaggcggtggctatcgaaaacatcaagaggggcctggcctcactgtttcagacacagctcagctctgggaccactaacgaggtagatatttctgggaactgtaaagtcacatatcaagctcatcaggacaaagtgatcaagattaaagctctcgattcatgcaagatagccagatctggatttactactcctaatcaggtcctgggggtatccagcaaggcgacaagcgtaacgacctacaaaatagaagatagcttcgtaattgcagtactcgcggaggagacacataactttggattgaactttctgcagaccatcaaaggtaagatcgtgtccaagcagaagctggaactgaaaaccacggaagcagggcctcgcctcatgagcggcaaacaagcggccgctattatcaaggccgtggacagcaagtacacggctatacccatcgtgggtcaggtattccagtctcactgtaaggggtgcccctccctgtccgagctgtggaggtccactaggaaatacctgcagccagacaatctgagcaaagcagaggcagtcagaaacttccttgcattcattcagcatttgaggaccgccaagaaggaggaaatactgcaaatcctcaagatggaaaacaaggaggttctcccccagttggtggatgccgtgacatccgcccaaacctctgatagcttggaggcaatccttgactttctggattttaaatccgactcttctatcatcctccaagaacggttcctgtacgcctgtggatttgcgtcccatcccaacgaagagctgctgcgggctctgatcagtaagtttaaaggcagcatcgggtcatccgatatcagggaaacagtaatgatcattaccggcacgctcgtgagaaaactctgtcaaaatgagggatgcaagctgaaggccgtcgtcgaagcgaaaaagctcatcctgggagggctcgaaaaggctgaaaaaaaagaggacacgcgaatgtacctccttgctctgaaaaatgcgcttctgcctgaaggcattccgtcacttttgaaatatgccgaggctggggaagggccaatttcacacctcgcgacaacagccctgcagcgctacgacctgccattcattactgatgaggtgaagaagacattgaatagaatataccaccagaacagaaaggtacacgagaagacagtccgaaccgccgctgccgctattatcctgaacaataacccctcctatatggacgtgaaaaacattcttctgtccattggggagttgcctcaggagatgaacaagtacatgctggctattgtccaggatatactgcggtttgagatgccagcctcaaagatcgtacggcgggtcctcaaggagatggtcgctcataactacgacaggttcagccgctccggttcatcatcagcctatacaggctatatcgagcggtcacccagatccgcaagtacttatagcttggatatactgtattccggaagtggaatcttgaggaggtctaacctgaatatctttcagtatatcggcaaggccgggttgcatggctctcaggtcgtgatcgaggcccaggggctcgaggccctcattgccgccacccccgatgagggtgaagaaaacttggactcatacgccgggatgtccgctatcctgtttgacgttcaattgaggcccgtcacgttctttaatggttacagcgatctgatgagcaaaatgctttcagcctctggagatccaatcagtgtggtcaagggtttgatcctgcttatagatcattctcaagagctccagctgcaaagcggactgaaggcaaacattgaggtacaaggcggactggcgattgatataagtggggccatggaattttcactgtggtacagagaaagcaaaacacgcgtaaagaaccgcgtgaccgtggtcatcacgacagacatcactgtggatagcagcttcgtgaaggcgggtcttgagacatctactgagaccgaggctggcctggagtttatcagtactgtgcagttctcacaataccccttcctggtctgtatgcaaatggacaaggatgaagcaccctttagacagttcgagaagaagtatgagcgactctctactggccgcggctacgtgtctcagaaacgaaaagagagcgtcttggccggctgtgagttccctctgcaccaggaaaattccgagatgtgcaaagtcgtcttcgcacctcaacccgatagtacgtcctctgggtggttt

SEQ ID NO: 16833 - DNA, 2682 bp, synthetic construct
  misc_feature 1..2682: note = source = /note="Description of Artificial Sequence: Synthetic coding sequence"
  source 1..2682: mol_type = other DNA
atgatactgttggcggtcctgttcctctgcttcatcagtagttactcggcttccgtgaagggacacactaccggcctgtcactcaacaatgatagactgtataagttgacttactccactgaggtgcttcttgatcgcggcaagggtaaactgcaggattctgttggctatcgaatttcatccaatgtcgacgtggccttgttatggcggaacccggacggggacgatgaccagttgatccagattactatgaaggacgtgaatgtcgaaaacgtcaaccagcagcgtggtgagaagtcgatattcaagggcaagtcaccttccaagatcatgggcaaagagaaccttgaggcccttcagcgcccaaccttgctccatttgatccatggcaaggtgaaggagttctactcttaccagaacgaggcggtcgcaattgagaatatcaaaaggggtcttgcatctctgttccaaacccagctgtctagtggcaccacaaacgaagtggacatttccggcaactgcaaggtaacttaccaagctcatcaagacaaggttataaagatcaaggcactggactcgtgcaagattgcccgtagtggctttaccacacccaaccaggtcctcggcgtgagctccaaagcgacctcggttacgacctataagattgaggatagcttcgtgatcgccgtcctggctgaggagacccacaacttcgggctgaatttcctgcagacgatcaaggggaagatcgtgagcaagcaaaagctcgagttgaagaccaccgaggcgggcccccgcctgatgtccggtaagcaggccgccgccattatcaaagccgttgactccaagtatacggccatcccgatcgttggtcaggtgttccagtctcactgcaaaggttgtccctctttgagcgagttgtggcgttccaccagaaagtacttgcaaccagacaacctctctaaggctgaggccgtccgcaattttcttgcgtttatccagcatctgcgtactgcaaagaaggaggagatccttcagatactgaagatggagaacaaggaggtgctacctcagctggttgatgccgtcaccagcgctcagacttcagattccttggaggctatcctggatttcctcgattttaagagtgactcctcgataatcttgcaggaacgcttcttgtacgcctgtggattcgcgagtcaccctaatgaggaacttctccgcgccctgatttcgaagtttaagggcagcataggcagttccgacatccgcgagaccgtcatgattattacaggaaccctggtacgtaagttgtgccaaaacgagggttgtaagcttaaggctgtcgtagaggccaagaagttgattctcggtgggctggagaaggcggagaagaaagaagacactcgtatgtatctcctcgcccttaagaacgccctgctgcctgaaggtatcccctctctcctgaaatacgccgaggctggcgaaggccctatcagtcacttggctacgacggcactccagagatacgacctgcccttcatcaccgacgaggtgaagaagacccttaaccgtatttaccatcagaatcgcaaggtgcacgagaaaactgtgaggactgcggccgcagccataatcctcaacaacaatccctcttacatggatgtgaagaacatccttttgtcgatcggggagctacctcaggagatgaacaagtacatgctcgccatcgtgcaggatatcctccgcttcgaaatgcccgcctctaagatcgtcagacgcgtcttgaaggagatggtcgcacataactacgatcgtttcagcaggtctggttcatcgtccgcttatacggggtatattgaacgtagtccccgtagtgcctccacctactctcttgacatcctctactccggaagtggtatcctgcgccgttcgaaccttaacatctttcaatacatcgggaaggccggcctccacggttcgcaagttgtgatcgaagctcagggtcttgaggccctgatcgccgctacccccgacgagggggaggagaaccttgatagctacgccggaatgtcggcgatcctcttcgatgtgcaactgcggccagtgaccttcttcaacggctactcggacttgatgtctaagatgctctccgcgtccggggatcccatctctgtggtgaaggggctcatactgctgattgatcactctcaggagctgcaactgcagagcggcctcaaggccaacattgaagtccaggggggtctcgctatcgacatttctggggctatggagttcagcttgtggtaccgtgagtcgaagacaagagttaagaatcgcgtcacagtggttatcacaactgacatcaccgtcgacagctccttcgtgaaggcgggattagagacctctactgagaccgaggcaggcctggaatttatttccaccgtccagttctcccagtaccccttcctcgtctgcatgcagatggacaaggacgaagctcctttccgccagttcgagaagaaatatgaacgcctctccaccggacgcggatacgtctcccagaagcgaaaggagtctgtgctcgcaggctgcgagttcccgctgcatcaagagaactccgagatgtgcaaggtggtcttcgctccccaacccgattctacctctagtggatggttc

SEQ ID NO: 16834 - DNA, 2682 bp, synthetic construct
  misc_feature 1..2682: note = source = /note="Description of Artificial Sequence: Synthetic coding sequence"
  source 1..2682: mol_type = other DNA
atgatactcctggccgtcttgttcctatgcttcatttcttcatactccgcaagtgttaagggacatactaccggactctctcttaacaacgacaggctttacaagctcacatactccaccgaggtgcttttggacaggggcaaggggaaactgcaggactccgttggctaccgtatctccagtaacgtggatgtggcgttactgtggagaaatcccgatggagacgacgaccagctcatccagatcaccatgaaggatgtgaacgtggagaacgtcaaccagcagcgaggggagaagagtatcttcaaaggtaaatccccaagcaaaatcatgggaaaggaaaacctggaggcacttcagcgccccacactcttgcacctcatacacggcaaagtgaaggaattctactcctaccagaatgaagcagttgcaattgaaaatattaagagaggcttagccagcctgtttcaaacccaactgtctagcggcacaacaaacgaggtcgacatctccgggaactgcaaggtcacctatcaggcccaccaggataaggtgatcaagatcaaagctctggatagttgcaagatcgccagatctggtttcacaacacccaatcaggtcctgggggtgtcgagcaaagctacatcagtcaccacttacaaaatcgaagatagcttcgtgatcgccgttctggctgaggagacccacaattttggactgaactttctgcaaaccatcaaaggaaaaattgtctccaaacaaaaactggagttgaaaacgacagaagccggcccccgtcttatgagtggcaagcaagctgctgcgatcattaaagccgtggatagcaagtacactgccataccaatcgtcggtcaggttttccaatcacactgcaaaggttgcccctccctcagcgagctgtggaggtctacacgcaagtacctgcagcctgacaacctttctaaagcagaggctgtccgcaattttctcgcatttatccagcacttgaggaccgcgaagaaagaggaaattctgcagatcctgaagatggagaacaaagaggtgctgccccagctggtagacgcggtcacctcagcacagaccagcgattcgctggaagctattctggattttctcgattttaaatccgattctagcataatcttacaggaacggttcctgtacgcctgtggctttgccagccacccaaatgaagaactgcttcgggccctgataagtaaattcaagggaagtattggtagtagcgacattcgggagacagtcatgatcatcacaggcactcttgtccgcaaactgtgtcagaatgagggctgcaagctgaaggccgtggtggaggccaaaaaactgatactggggggccttgagaaggctgagaagaaagaggatacccgtatgtacctattggccctgaagaatgccctactcccagagggcattcctagccttctcaagtatgctgaggctggggaaggaccgatcagccatcttgctacaacagccctccagcgatacgatctgcccttcatcactgacgaggtcaagaagactctaaatcggatttaccaccagaaccggaaagttcatgaaaaaacagtgcgtactgccgccgccgccatcatcttgaataataaccccagctacatggatgtcaagaatattttgctatcaatcggcgagctgcctcaagagatgaacaaatacatgcttgcaatagtccaggatatcctgaggtttgagatgcctgcctcgaagatcgtgcggcgtgttctcaaagagatggtcgcccataattacgaccgctttagtcgatccggctcctcctccgcatatacggggtatatcgagagatcgccccgctcggcatcaacttactcccttgatatactatatagcgggtctggcatcttgcgtagatctaacctgaatatctttcaatatattggaaaggctgggcttcacggatcccaggtcgttatcgaagcgcagggcctggaagcactcatcgcagcgactcctgacgaaggagaggagaatttggacagttacgctgggatgtccgctatcctcttcgatgtgcagctgcggccagtgactttctttaacggctacagcgatctgatgagcaaaatgctatcagccagtggcgacccaatttcggtggttaagggtctgatactgctcatcgaccacagccaggagttgcagctgcagtctggcctgaaggccaatattgaagtacagggcggattggccattgacatcagtggcgccatggaattttccctttggtatcgcgagtccaagactagagtcaagaaccgagtcactgtggtgatcactaccgatattacagtggattccagtttcgtgaaagcaggactggaaacgagtacagaaaccgaggccggcctcgagtttatcagtacggtgcagttctcacagtacccttttttggtgtgcatgcagatggacaaagatgaggctcccttccgacagtttgagaagaaatatgagcgtttaagcactggaagaggatacgtatcgcagaaaagaaaagagtccgtgctggcaggctgtgaattccctctacaccaggaaaactccgaaatgtgtaaagtcgtcttcgccccacagcccgactccactagttctgggtggttt

SEQ ID NO: 16835 - DNA, 2682 bp, synthetic construct
  misc_feature 1..2682: note = source = /note="Description of Artificial Sequence: Synthetic coding sequence"
  source 1..2682: mol_type = other DNA
atgattcttctggctgtcttgttcctatgttttatctccagctactcagcttccgtcaaggggcatactaccgggctctccctcaataatgatagactgtacaagctcacctatagcaccgaggtgctactggacaggggcaaggggaagttgcaggattcagtgggatataggatctcctccaacgtggacgttgctctgctctggagaaatcccgatggggacgatgaccaacttatccaaatcactatgaaggacgtgaacgtggaaaacgttaatcagcagcggggggaaaagtccatttttaaaggcaagagtccgtcaaaaattatgggcaaggaaaatttggaagcactgcagcgccctaccctgctgcacctaatccacggaaaggtgaaggagttctacagctaccagaatgaggcggtggctattgaaaacattaagcggggactcgcctcccttttccagactcagctgtcctccggaaccacgaacgaggtggatataagtggcaactgtaaagtgacttaccaagcacaccaagacaaggttataaagatcaaagcgctggattcatgcaaaatcgctaggagcgggtttacgacgcccaatcaggtgctcggggtgtccagcaaagcaacaagcgtaacaacatacaaaatagaggattccttcgttatagctgtgctggcagaagaaacccataacttcggcctaaacttcctacaaacaattaagggcaagatcgtttctaagcagaagcttgagctgaagaccaccgaggccggacctagactgatgtccggaaagcaagctgctgcgattattaaggctgtggattctaagtacacagccatccccattgtgggccaggtgtttcagtcccattgtaaaggatgtccttctctttcagagctttggaggtctacacgaaaatatctgcagccagacaatttgtcgaaagccgaggccgtgagaaacttcctggcgttcatccagcacttgagaactgctaaaaaggaggaaattctgcagatcctcaagatggagaataaagaggtgttgcctcaacttgtcgatgcggtgacatcagcccagacttccgactcactggaagctattctggatttcctagacttcaagtccgattccagcatcattttgcaagagcggtttctctacgcctgcgggtttgcaagccatccaaacgaggagttgctgcgagcactgatctcgaagttcaagggcagtatcggctcaagcgatattcgggagacggtgatgattatcacaggaactctggtgcgtaaactgtgtcagaatgaggggtgcaagttgaaagccgtggttgaagcgaaaaagctgatcctcggcggactggaaaaggccgaaaagaaggaggacacgaggatgtacctcctagccttgaagaatgcactgttgcccgaaggaatcccaagtctcctaaagtacgctgaggcgggcgagggtccgatcagccatctggcaacgacagcactgcagcgttacgatttaccattcattacagacgaagtgaagaagacccttaacaggatttatcatcagaataggaaggttcacgaaaagacagtgcgcacagcggcagcagctattatcctgaataataacccaagctatatggatgttaaaaatattctgctgtctattggggaactacctcaagagatgaataagtatatgctcgctatcgtccaggacattctgcgttttgaaatgccggcctcgaaaatcgtacgaagggtgttaaaggaaatggtggctcataactatgacagattctccagatcgggttcctcttccgcctatactggatatatcgaaagatcccctcggtccgccagcacttactctctagatatcctctactctggctccggcatcctccgccggtcaaaccttaacatcttccagtacatcggcaaggcgggcttgcacggctctcaggtcgtaattgaggcccaggggctggaagctctgattgcggccacgccagacgagggagaggaaaacctcgactcctacgccggcatgagcgcaattctgttcgacgtacagctgcgccccgtgaccttctttaatggatactcagatcttatgtctaaaatgttgagcgcctctggggatccaatctctgtcgtcaagggcttgattctcctgatcgatcacagtcaagagctgcagcttcagagcggcctgaaagccaatatcgaggtgcagggcggactggccattgatatctcgggagctatggaatttagcctgtggtaccgagagtccaaaacgagggttaaaaacagagtgacagtggttatcaccactgatattactgtggatagttcattcgtgaaggctggactggagacgagcaccgaaaccgaggccggccttgaatttataagcaccgtccagttttctcagtacccattcttggtatgtatgcagatggacaaggatgaagccccattcaggcagttcgagaagaaatatgagcgactctctactgggcggggttacgtcagtcagaaacgcaaggagagcgtgcttgcaggatgtgaatttcctcttcaccaggagaactctgagatgtgcaaggtggtctttgcaccacagccggatagtacgagctcaggatggttc

SEQ ID NO: 16836 - DNA, 2682 bp, synthetic construct
  misc_feature 1..2682: note = source = /note="Description of Artificial Sequence: Synthetic coding sequence"
  source 1..2682: mol_type = other DNA
atgatcctgctcgctgttctgttcctgtgcttcattagctcatactcggcaagcgtcaagggacacacaacagggctgagtttgaacaatgatcggttgtacaagctcacatactccaccgaggtacttctggatcgaggcaaggggaaactccaagattcagttggttatcggatatcctcgaacgtggatgtggctcttctgtggcgcaacccagacggtgatgatgaccaattgatccagatcaccatgaaggacgttaatgtcgaaaacgttaaccagcaaagaggcgagaagtctatattcaagggtaagagcccctctaaaatcatgggcaaggaaaacctcgaggcattgcagcgacccaccctcttgcacttaatacatggaaaagtcaaggagttttatagctaccagaacgaggcagtggcaatcgagaatatcaaaagaggactagcttcgctgtttcagacccaactttccagcggtaccacgaatgaagtcgatatcagtgggaactgtaaggttacgtatcaagcgcaccaggataaggttataaaaatcaaagcgctggattcatgcaagattgcaagatcgggcttcacaacaccaaaccaggttctcggtgtttctagcaaggccacgagcgttactacatacaagatcgaggactcgttcgtaatagccgttctcgcagaggagacgcataacttcggacttaacttcctgcagactatcaagggaaagattgtgagtaagcaaaaacttgagttgaagacgactgaagccggcccgcgcttaatgagtggtaagcaagctgcagcgattataaaggcagtggactccaagtacaccgccattcctatcgtgggacaggtcttccagtctcattgtaaagggtgcccttctctctctgagctgtggcgaagcacacgaaagtacttgcagccagataatctctcgaaggctgaggcagtccgaaatttcttagcattcatccagcatttgcgcacagcgaaaaaagaggaaattctgcagattttgaaaatggagaacaaagaagttcttccgcagcttgtggacgcggtcacctcggctcaaacctccgacagtctggaagccatccttgattttctagactttaagagcgattctagcatcatcctgcaggaacgctttctgtatgcttgcggcttcgcgtcccatccgaacgaggagcttttgagagcccttatcagtaagttcaaaggttccataggatcatcagacatccgagagactgtcatgattatcaccggcacccttgtacggaagctgtgtcaaaacgagggatgcaagctcaaggccgtcgttgaggccaagaaacttatcctcggaggtctcgagaaagccgagaaaaaggaagatactcgtatgtatctacttgccctcaaaaacgctcttcttcctgaaggcataccttctctgcttaagtacgctgaggcgggggagggtcctatcagccatcttgctactacagccttgcagcgatacgatctccccttcatcacggatgaggtcaaaaaaacactgaatcggatttaccaccagaaccgcaaggtccacgagaagaccgtccgtacagcagccgcggcaatcatcttgaacaataacccatcttacatggacgtcaagaatatccttttatctatcggtgagctcccgcaggagatgaacaaatacatgctcgcaatcgtgcaggatattttgcgttttgaaatgcctgcatcaaagatagtccgccgcgttttgaaggagatggttgcacataattacgatcgattttcgaggtccggtagcagctctgcctataccggctacattgaacgaagtcctcggtctgctagcacttactccttagacatcctctacagcggttcaggcatcttaaggaggtcgaatcttaatatattccagtacataggtaaggctggcctccatgggtctcaggtcgtaatcgaagcgcaaggcctcgaagccctgattgctgctaccccagacgaaggggaagagaacctcgattcttatgctggcatgtctgctattctcttcgatgttcagctgcgacctgtgacctttttcaatggttattcggatctgatgtctaagatgctctctgcctccggcgatccgatttcagttgtaaaaggtctgattcttctaatcgatcattcccaagaattacaactgcagagtggcctcaaggcaaacatcgaggtacagggcggccttgcaatcgatatcagcggcgctatggagttctctctctggtatcgtgaatcaaagacccgagttaagaacagagttactgttgtcatcaccaccgacattactgttgactcgtcctttgttaaggcgggtttggagacctctactgaaacagaagcgggcctcgaattcatatcgacagtccagttctctcaatacccatttctcgtctgtatgcaaatggataaagatgaggctcctttccgccaatttgaaaaaaagtacgaacgcttgagcaccgggcgcgggtacgtttcacagaagcgcaaggagagcgtgctcgccggttgtgaattcccattacaccaggagaactcggagatgtgcaaggtcgtgttcgccccgcaaccggactcaacctctagtggttggttt

SEQ ID NO: 16837 - DNA, 2682 bp, synthetic construct
  misc_feature 1..2682: note = source = /note="Description of Artificial Sequence: Synthetic coding sequence"
  source 1..2682: mol_type = other DNA
atgatcttgttggcggttctgttcttgtgcttcatcagttcatactcagcctcggtcaaaggtcataccacaggtcttagcctaaacaatgaccgcctgtataaactaacctacagtaccgaggtactattggacaggggtaaaggcaagcttcaagatagtgtggggtatcggatttcaagtaatgtcgacgttgccctgctgtggcggaatcctgacggcgacgacgaccagctcatccagatcaccatgaaggacgtgaatgtggagaatgtgaatcagcaaagaggcgagaaatccatcttcaaaggcaagtcaccttcaaagatcatgggcaaggagaacctggaagctctgcagagaccaacgctactgcatctgatacacgggaaggtcaaggagttctactcttaccagaatgaggcagtggctattgagaatattaaaagaggactcgccagcctctttcaaacacagctctcatctggaaccactaacgaagtggacatatctggtaactgtaaagtcacatatcaggctcatcaggataaggtaatcaaaatcaaggcattggactcttgtaagatcgctcgctcgggatttactacccccaatcaagtcctcggcgtgtctagcaaggccacgagcgttacaacttataaaatcgaagattccttcgtgatcgctgttctggctgaggaaacacataattttggtctcaattttctgcagactattaaaggcaaaattgtgtctaaacagaaactggagttgaaaacaacagaagccggtccccgtttgatgtccggcaaacaggcagcggcaataataaaagccgtcgactcgaagtacacagccattcctattgtgggccaagttttccagtcacactgtaaaggctgtccctctttatctgagctgtggagaagcaccagaaaatacctacagcccgataatctgtcaaaggcggaggcagtaaggaacttcctcgcatttatccagcaccttcgcacagcgaagaaggaggaaatccttcagatcctgaagatggaaaacaaggaagtgcttcctcaattagtcgatgccgtgacgagcgcacaaacctctgactcgctggaggctatcctggactttctcgacttcaaatcagattcttctattatcctgcaggagaggtttttatacgcctgcgggttcgcatcacaccccaatgaggaactccttcgagccctcatcagcaaattcaagggttctatcggcagctctgacatccgcgagaccgtcatgatcattacgggaacgctggtgcgcaagctgtgccagaatgaaggatgcaaactgaaggccgttgtagaggccaagaagcttatcctggggggccttgagaaagccgagaaaaaagaagacacacgcatgtacttgctggcccttaaaaatgctcttctgccagaaggtatcccctctttgcttaagtacgcagaggctggcgagggccctataagccaccttgctacgacagcgcttcagaggtacgacctccctttcataactgatgaagtcaagaagaccctcaatcgcatatatcaccagaatcgaaaggtgcatgagaaaaccgtaaggaccgcagcggctgcaataatcctaaataacaaccctagttatatggacgtcaaaaatatactgctgagcattggcgaacttcctcaggagatgaataaatatatgttggccatagtacaggatattttacgctttgaaatgcccgcttccaagatcgtgcggcgcgtgcttaaagaaatggtggctcataactacgaccgctttagtagatccggctccagtagtgcctataccggttatatagagcgttccccccgaagtgcttccacctattctctcgacattttatacagcggttcaggcatccttaggcggagtaacttgaacatattccagtacatcgggaaggcaggcttgcacggatcgcaggttgttattgaagcacaaggcctggaggccttgattgcggccacccccgatgagggggaggagaatctggacagctacgctggaatgagcgctatcctgtttgatgtccaactcaggcccgtcaccttcttcaatggatattcagacctaatgagtaaaatgctctccgcatcaggcgacccaatcagtgtcgtgaaaggacttatcctgctcatcgaccatagccaggagctccagctgcaaagtggcctgaaagcaaatatcgaggtgcagggaggcctggccattgacatcagcggtgcaatggaatttagcctatggtaccgggagtccaaaactagggttaaaaacagagtcactgtagtaatcaccaccgatatcacagttgattcatccttcgtgaaagccggcctcgagacctccactgagacggaagctggtcttgagttcatctcaacagtgcaattttcccaatacccgtttttagtgtgtatgcagatggataaagatgaggctccttttcgccaattcgagaagaagtatgaaagactgtctaccggtagagggtatgtgtcgcaaaagagaaaagaaagtgtcctagctgggtgtgagtttccactacatcaggaaaacagcgaaatgtgtaaggtggtttttgcgccccaaccagatagcacgagttcaggatggttt

SEQ ID NO: 16838 - DNA, 2682 bp, synthetic construct
  misc_feature 1..2682: note = source = /note="Description of Artificial Sequence: Synthetic coding sequence"
  source 1..2682: mol_type = other DNA
atgattctgctggccgtcctcttcctgtgcttcattagcagttattcagcctcagtgaaagggcataccacaggcctctcattgaacaacgaccggctatacaaacttacatactctacagaggtactgctcgacagggggaagggaaagctgcaggactcggtgggataccgtatttcctccaatgtggatgtcgccctactgtggaggaatcccgacggagacgatgatcagttaatccaaataacgatgaaggatgtgaacgtagaaaatgtgaaccagcagcgcggcgaaaagtctatcttcaaaggaaagtcaccatctaagataatgggaaaggagaatttggaagcactgcagaggccgaccctcctgcaccttattcacggtaaggtcaaagaattctattcttaccagaacgaagcggtcgcaatcgagaatattaaaagaggactggctagcttatttcagacacagctttcctctggcaccactaacgaagtagacatatctggaaattgtaaagtgacataccaagcgcatcaggataaggttatcaaaattaaagccctcgattcgtgtaagatcgctagatctggcttcacaacccctaaccaggtattgggagtaagctcgaaggctacctcagtcaccacatacaaaattgaagacagtttcgtcatagcagtcctcgcagaggaaacacacaactttggactgaacttcctacagacgattaaggggaaaatcgtctccaaacaaaagctggaacttaagactaccgaggccggcccacgactgatgtctgggaagcaggctgcagctataattaaagccgttgatagcaagtacacggccatccctatcgtgggtcaggtgtttcagtcccactgcaaggggtgtccttctctgtctgagctatggcgatctacacgcaaatatctgcagccggataatttaagtaaggccgaggctgtcaggaactttctggcattcatccagcatcttcgtactgcaaagaaggaagagatacttcagatcttgaagatggaaaacaaagaagtgctccctcagctcgtggacgcagtgacttctgcccagactagtgactccctcgaggccatcctcgatttcttagactttaaaagcgattcaagtataattctccaagaaagatttctgtacgcttgtgggttcgcctcccacccaaacgaggaactgttgcgagcattaattagtaagttcaaggggagcattgggagctccgacattcgcgagaccgtcatgataatcactggtacactggtgcgtaaactctgccaaaatgaaggatgcaaattgaaggctgtcgtcgaagcgaagaagctgatactgggcggcttggagaaagccgagaagaaagaagatactcgtatgtatctactcgctctcaagaatgcactgctgcctgagggaatcccatctttgctgaaatatgctgaagccggagaggggcccattagtcacttggccacgactgctctccagcgttatgaccttccgttcataactgatgaagtgaaaaaaacgctgaatcgaatctaccaccagaatagaaaggtacacgaaaagactgtaagaacagcagccgcagctataatcctgaacaataatcctagttacatggatgtgaaaaacatactcttgagtatcggcgagctgccccaggagatgaacaagtacatgcttgcgattgtacaggacatcctccggtttgagatgcccgctagtaagattgttagacgtgtactgaaggagatggtggcacacaactacgatagattctcccggagtggttcttcatcggcctacactggctatatcgaacgttctcctagatccgccagcacctactccctcgatatcttgtattctgggtccgggatccttcgcagatccaatctcaatatattccagtatatcggtaaagcgggcctgcatggaagccaagtggtgatagaggctcaggggcttgaggcactcattgccgcaactcccgacgagggggaggagaacctcgactcttacgccggcatgtcggccatcttatttgacgtacaactgaggcccgtcacttttttcaacggatactctgacctcatgtctaaaatgttatccgcttccggagacccaattagcgtggtgaagggtctgatactactaattgatcatagccaagagcttcaattacagagcggcctcaaggcaaatattgaggtgcaagggggcctggccatcgatatatctggggccatggagttctctctgtggtacagggaaagcaaaacaagagtgaagaacagggtgaccgtcgtaatcaccacggacattaccgttgattcctcgttcgtcaaggctggcctcgagacctccacagaaacagaagccggtttggagttcatttcaacagtccagttttcacagtatcccttccttgtgtgcatgcagatggacaaggatgaagcacccttcaggcaatttgaaaagaagtatgagcgtttgtcaaccggtaggggatacgtgtcgcagaagcgcaaggaatcggtgctggccggctgcgagtttccacttcaccaggaaaacagcgaaatgtgcaaggtggtgttcgccccacagccagactcaacatcctccggttggttt

SEQ ID NO: 16839 - DNA, 2682 bp, synthetic construct
  misc_feature 1..2682: note = source = /note="Description of Artificial Sequence: Synthetic coding sequence"
  source 1..2682: mol_type = other DNA
atgattctccttgccgtgctgttcctgtgcttcatttcctcatattccgctagtgtgaaaggtcataccacgggcctttccctgaataatgacaggctgtacaagctgacatacagcacagaggtactactggaccggggaaagggaaaactacaagatagcgttggctatcggatttcgtcaaatgtggatgtcgctttactttggaggaaccccgacggcgatgatgaccagctaatccagatcacaatgaaggacgtgaacgtggaaaacgtgaatcagcagcgaggagagaagtccattttcaaaggaaaaagcccatcaaagattatgggaaaggagaatttggaggctctgcagcgacccaccctgcttcacctgatccacggtaaggtaaaggaattctacagttatcagaatgaggccgtggccatcgaaaatatcaagcgagggctcgcctcgctcttccaaacgcagctcagtagtggtactaccaacgaggtggacatttccgggaactgcaaagtgacataccaggcacaccaggataaagtcattaagataaaagcattggattcttgcaaaatcgcacggagtgggtttactacccctaatcaggttttaggagtaagctctaaggctacgtctgtcaccacttacaagattgaggatagcttcgtcatagccgtgctggccgaagagacacacaacttcgggctgaacttcctgcagacgattaagggtaagattgtgagcaaacagaagctcgagttgaagaccacagaagcagggcccagactgatgtccggaaaacaagcggccgccataatcaaagctgtggacagtaagtacactgccatccctatcgttgggcaggtatttcagtcacattgtaagggttgcccctccctgtccgagttgtggaggagcacgcggaagtatcttcagccagacaatctgagcaaagctgaagctgtcaggaactttcttgccttcatacagcatttgcggacggcgaaaaaagaggagatactgcagatcctgaagatggagaacaaggaagtcctgccacagctcgtggatgctgtgaccagcgctcagacctctgactctttagaggcgatactggatttcctggacttcaaatctgacagctcgataatcttacaggagcggtttctctacgcgtgcggattcgcatcgcaccctaatgaagagctgttaagagcactgattagtaagtttaagggcagtatcggcagcagcgatatcagagagacagtgatgataatcaccgggaccttggtccgaaaattatgtcagaacgaagggtgtaagttgaaggctgtcgttgaggccaaaaagctcatcctggggggtctggagaaggctgaaaaaaaagaggatactcggatgtacctgctcgccctgaagaacgctcttctacccgaggggataccgtctctcctgaagtatgcggaggccggggagggtcccatcagtcatctagcgaccactgctttacagagatatgacttgccctttataactgacgaggtaaagaaaactctaaatcgaatttaccaccagaaccggaaagttcacgaaaagactgttaggacagcggcagctgcaatcatcctgaataacaaccccagctatatggatgtgaagaacatcctgttgtctattggcgagctgccacaggagatgaacaagtatatgctggcaatagtgcaggacattttacgcttcgagatgccagcaagtaagatagtgcgtagagtgctgaaagaaatggttgcccacaattatgacaggttctctcggtccggtagctcttcagcgtacaccggctacattgagcgctcaccgaggtcagccagcacatattctcttgatatcctgtattccggctccgggatcctcagacgatccaacctgaatatcttccagtatataggtaaggccggactacacggcagccaggtcgtcatcgaggcacagggacttgaggctttaatcgcagccacccctgacgagggggaagagaatttggactcttatgccggaatgtcagccatactttttgatgtgcagttgaggccagtaaccttctttaatggctattccgacttgatgagcaagatgttatctgcctccggggatcccatttccgtcgtcaagggactgattctgctaattgaccattcccaggagctccagttgcagtccgggctcaaggctaatatcgaggtgcagggaggtctggctatagatatctccggagccatggaattctccctctggtatcgagagtccaagactagagtcaaaaaccgcgtaactgtggtcatcactaccgacattacggtggattctagtttcgtgaaagccggcctggagacttcaaccgagactgaagctggtctggaatttattagcactgtccagttctctcagtatcccttcctcgtttgtatgcagatggacaaggatgaagctccttttcgccagttcgagaagaaatacgaacggttgtccaccggcaggggctatgtgtcccaaaagaggaaggagtcagtactggccgggtgtgaattcccgctgcaccaagaaaactcagaaatgtgcaaggtggtgttcgctccacagcccgactccactagctcaggctggttt

SEQ ID NO: 16840 - DNA, 2682 bp, synthetic construct
  misc_feature 1..2682: note = source = /note="Description of Artificial Sequence: Synthetic coding sequence"
  source 1..2682: mol_type = other DNA
atgatcctgctggctgtgctcttcctgtgttttatctccagctactcagcatctgttaaggggcatacgaccgggctatccctgaataacgaccgattgtataagctcacgtacagtactgaggtactccttgacagagggaagggtaaactgcaggacagcgtcggctaccgaatttcatccaatgtggatgtagccctgctgtggagaaaccctgatggggatgatgatcaactcattcaaataactatgaaggatgttaacgtagagaatgtgaaccagcagcgaggggaaaagagtatctttaagggcaagtccccatctaagatcatggggaaagaaaacttggaggcgctgcagcgacctaccctgttacatctcatccacgggaaggttaaagagttctactcgtaccagaatgaggccgtcgcgatcgagaacatcaaacgtgggcttgcttcgctgttccagacccagcttagcagcggcacaaccaacgaagttgatatcagtggaaattgtaaagttacctaccaggcccatcaggacaaagtcattaaaatcaaggccctggacagctgtaagatcgcccgttcaggtttcacaacccccaatcaggtgctgggggtgtcttcgaaagccaccagcgtaacaacctataaaattgaagattcgttcgttatcgccgtactggccgaggaaacccacaactttgggctgaacttcctacagactatcaagggaaaaatcgtttctaaacagaagcttgagcttaagactaccgaagctggcccccgactgatgtcgggtaagcaggctgcggccatcattaaggcagtggattcaaagtacactgccattccgattgttggacaagttttccagtcgcattgcaagggttgtcctagcctcagtgaactgtggcgatccacccggaagtacttgcaaccagacaatctgagcaaggccgaggccgttcgtaacttcctagcgtttattcagcatctgaggacagcaaagaaggaggagattctgcaaattctgaagatggaaaataaagaggtgctccctcaattggtggatgccgtgacatctgcccagacaagcgatagtctggaggctatcctcgacttcctggatttcaagtcagattcctctatcatacttcaggagaggttcctttacgcctgcggctttgcctcgcatccaaatgaggagctgttaagagccctgatctcgaagtttaaggggagcattggcagctcggatattagggagaccgtaatgataatcacgggcactctcgttagaaagctatgtcagaatgaaggttgcaaactgaaagccgtggttgaggctaaaaaacttattctggggggtctggagaaggcagaaaagaaggaagacacacgaatgtatcttctagcacttaaaaatgccctactaccagagggcatcccgtctttattgaaatacgcagaggcaggagaaggccctatctcccatctcgctactaccgccctgcaacggtatgacctcccttttattaccgacgaagtgaagaagactcttaaccgaatttatcaccaaaaccgcaaagtccacgagaagacggttcgaaccgcagctgccgccataatactgaataacaacccaagttatatggatgtgaagaatattcttttgagtatcggcgaactcccacaggaaatgaacaaatacatgctggcaatcgtccaggacatcctgagatttgaaatgcccgcaagcaagatagttaggagggtgctgaaagagatggtagcccacaattatgacagattttctaggtcagggagctcatcagcctacaccggctatattgaaagatctccccgatcggcctctacctattccctggacatcctgtactcgggaagcggcattctaagaaggtcgaacctgaatatcttccaatacatcggcaaagcaggtctgcatggttcacaagtggtcatagaggcacagggtctcgaggctctgattgccgctacccccgacgaaggggaagagaacttggatagctatgcaggaatgtccgccatcctgtttgacgtgcaactgcggcctgttacgttctttaacggctattccgacctcatgagtaaaatgctttctgcctcgggtgatcctatcagcgtagttaaaggactgatactacttatcgatcactcacaggaactccaattgcagtcagggttgaaggccaacattgaggtgcagggcggcctggccatcgacattagtggagctatggagttttccctgtggtacagggaatcaaagacaagggtgaagaacagagtgacagtggtgatcaccacagatatcaccgtagacagcagttttgttaaagccggcctggaaacatctaccgaaaccgaagccgggctggagtttattagcaccgtacaattctctcagtatccatttctcgtgtgcatgcaaatggataaggacgaagcgccctttagacagtttgagaaaaagtacgaaaggttgtctacaggaaggggctacgtgtctcaaaaaaggaaagaaagcgtgcttgccggatgcgagttcccactgcaccaggaaaactccgaaatgtgtaaagtggtgtttgccccacaacccgattcaacatcgtctggctggttt

SEQ ID NO: 16841 - DNA, 2682 bp, synthetic construct
  misc_feature 1..2682: note = source = /note="Description of Artificial Sequence: Synthetic coding sequence"
  source 1..2682: mol_type = other DNA
atgatccttctggctgtgctgttcctgtgtttcatcagctcctactccgcctccgtgaagggtcacactacaggcctgtcccttaataatgacagactatataagttgacttactcaaccgaggtattgcttgataggggcaagggaaaactgcaggactcagtcggctacagaattagctcaaacgttgacgtggccctgctctggagaaatcccgacggtgatgatgatcagttaatccagattaccatgaaggacgtaaacgtcgaaaacgtaaaccagcagcgcggagagaaatcaattttcaaaggaaaaagcccaagtaagattatgggtaaggagaaccttgaagccctgcagagacccacgctgcttcatctgattcacggtaaggtcaaagagttctattcctatcagaatgaagctgtggccatcgaaaacatcaagcgcgggctggcctccctctttcaaactcagctctcatccgggaccaccaacgaggtcgacattagcgggaattgtaaagtcacgtatcaggcccaccaggacaaagttatcaaaataaaagcactggatagttgcaagatcgctcgctctggctttacgacgcccaatcaggtactgggcgtctcatccaaggccacctccgtgaccacgtacaaaattgaggattcttttgtaatagctgtcctggccgaggaaacacacaatttcggcctaaatttccttcagaccattaaagggaaaattgtgtccaaacaaaagctagagctcaaaaccaccgaggcgggaccccggttgatgtcgggcaagcaggccgctgcgattatcaaggccgtcgactcgaagtataccgcaatccccatcgtgggtcaggtatttcagagtcattgcaagggatgcccaagcctgtctgagctctggagaagcacaagaaaatacttgcagcccgacaatctgagcaaagccgaggcggtgcggaactttctggcattcatacagcacctcagaacagcaaaaaaggaagagatcttacagatactgaagatggagaacaaagaggtcttaccacaattagtggacgcagtaacttcagctcagacaagcgattccctggaagccatcttggactttctggatttcaagagcgacagcagcataatcctgcaggagcgtttcctctatgcctgcgggttcgcttcgcaccctaacgaggaactgctccgggcattgatctctaaatttaaaggatctattggttctagcgacatccgggaaacagtcatgattattacaggcaccctcgtgagaaagctgtgccagaatgaaggttgtaagctgaaagctgtggtggaggccaaaaagctcatacttggcggactcgaaaaagcagagaagaaggaagatacccgcatgtatctccttgccttgaagaacgccctgttgcccgaggggattccctctctcctaaagtacgccgaagcaggcgaagggccaatcagccatctcgcaaccaccgctctgcagcgttatgacctgccattcatcactgatgaagtgaaaaagaccctgaacaggatctaccatcagaatcgtaaggtccatgagaaaacggtccgcactgccgcagctgctatcatcctaaataacaacccctcgtacatggacgtaaagaatatcttgctctcgatcggtgagctgccgcaggagatgaacaagtacatgctggcgatcgtgcaggatatactgcggttcgagatgcccgccagtaagattgtgagacgtgtgctgaaggagatggtggcccacaattacgatcgcttctcacgctcagggtctagctcagcgtacaccgggtacattgagagaagccccagaagcgcctcaacctactccctggatatattatactccggctcaggtatcctgcggaggtctaatctaaacatttttcagtacatcggcaaggctggcttgcacggctcacaagtagtaatagaggctcagggtttggaggccctgattgccgccacaccggacgagggggaagaaaatctggactcttacgccggcatgtctgccattctcttcgatgtgcaattgaggcccgtcacttttttcaacggttactccgatcttatgagcaagatgctttcagctagcggggaccctatctctgtagtgaaggggctgatcctcctgatagaccatagtcaggagctgcagctgcagagtgggctaaaggcaaacatagaggttcagggtggactggccattgacatctccggcgctatggaattttcgctgtggtacagagagagtaagacccgagtaaaaaatcgggtaactgtagtaattaccaccgatatcactgtggactcaagtttcgttaaggcagggctggagacatctacagagacagaggccgggctggagtttatctcaacggtccagtttagtcagtatccattcctggtctgcatgcagatggataaagacgaggctcctttccggcagtttgaaaagaagtacgagcgactcagtaccggcaggggctatgtgtctcaaaaacgcaaagaatcagtccttgcagggtgcgagttccctctccaccaagagaacagcgaaatgtgtaaggtggtattcgctcctcagcccgactccacgtcttcaggctggttc

SEQ ID NO: 16842 - DNA, 2682 bp, synthetic construct
  misc_feature 1..2682: note = source = /note="Description of Artificial Sequence: Synthetic coding sequence"
  source 1..2682: mol_type = other DNA
atgatcctgctggctgtgcttttcctgtgcttcatctcaagctactctgctagcgttaaagggcacacgactggcttgtccctgaataatgatcgcctctacaagcttacctatagcactgaggtcttactggaccgagggaaaggcaagctgcaggatagcgtcgggtacaggatttccagtaacgttgatgttgctctgctttggaggaatcccgatggtgacgatgatcagctgatccaaatcaccatgaaggacgtgaatgtggagaacgtgaaccagcagcgaggcgaaaagagtatcttcaaagggaaatctccctccaagattatgggaaaggagaacttggaggctctacaaaggccgacactgctgcaccttattcatgggaaagtcaaggaattttacagttaccagaatgaggccgtggcgattgaaaatatcaaaagaggcctggccagcctgttccagacccagcttagctccggcacaaccaacgaggttgatatttctggcaattgtaaagtcacataccaggcccaccaagacaaggtaatcaagattaaggctctggattcatgtaaaattgccagatcgggattcacaacccccaaccaggttttaggagtctcgtccaaagccacgtctgtgacgacctacaaaatagaggactctttcgtaattgccgtgttggccgaagaaacgcacaacttcggactgaatttcctgcagaccattaaaggcaaaatcgtgtcgaagcagaaactggagctcaagactaccgaggctgggccccgactgatgagcggtaagcaggcggccgccataataaaggccgtggacagcaagtacactgcgattccgatcgttggacaagtgttccagagccactgtaaggggtgccctagcctgagtgaactctggcggtcaactcggaagtaccttcaaccagacaatctgagtaaagcagaggccgtccgcaactttctggcctttattcagcatcttcggacagccaagaaggaagaaatcttacagattctaaagatggagaataaagaagtgctaccgcagttggtcgacgcagtgaccagcgcccaaacctctgattctctcgaggcaatcctcgatttcctggactttaaatccgattctagtataatactccaggagcgttttctttacgcctgcggcttcgcatcacaccctaacgaggaactgcttcgggcattaatctcaaaatttaaaggcagcattgggagttccgacattcgggagaccgtgatgattatcaccgggaccttagttcgcaagctatgccaaaacgaagggtgcaaacttaaagctgtagtggaagcgaagaagctaatcctaggcggcctcgaaaaggctgagaagaaagaagataccagaatgtatctgctggccctgaaaaacgctctgcttccagagggtattccatctttactgaaatatgccgaagctggagaagggcctataagccatttggcgacgaccgctctccagagatacgacctcccctttatcaccgatgaagtgaagaagacactgaatcgcatatatcaccaaaatcgcaaggtccacgagaagacggttagaaccgctgcggccgccatcatattgaacaacaaccctagctacatggacgtcaaaaatatccttctatctataggagagttgccacaggagatgaataaatatatgttagccattgtgcaggacatactacgattcgaaatgcctgcatcaaaaattgtgcgcagagtgctgaaggaaatggtagcccacaattatgataggttctccagatctggttccagctcagcctatactgggtatattgagagaagccccaggagtgcgagcacctacagccttgacatcttatacagtggatcaggtattcttagacgatccaacctgaatatcttccagtatatagggaaggccgggctgcacggctcccaagtagtcatcgaagcccaaggcctagaagcccttatagcagctactccagacgaaggggaagagaatctcgattcttatgctggaatgagcgctatactgtttgacgttcagctcagacctgttaccttctttaatggatatagcgatctcatgagtaagatgctttccgcatcgggggatccaatcagcgtagtcaagggccttatactcctaatcgatcactcccaggagctccagcttcaatcgggtctgaaggctaatatcgaggtgcagggaggtttggcgatagacatctcaggggccatggagttctccctctggtatcgggagtccaaaacaagggtgaagaacagggtgaccgtggttatcaccaccgatatcacagtggatagcagtttcgttaaggcgggcttggagacatcaaccgaaacagaagccggcttggagtttatttctacagtccaattttctcagtacccttttctggtttgcatgcagatggataaggacgaagctccctttcgccagtttgagaaaaaatatgagagactgtcgactggcagagggtacgtgtcgcagaagcggaaagagagcgttctggccggctgcgagttccctctgcatcaggagaattcagagatgtgcaaggttgtgtttgcgccacagcctgatagcacctcttcaggttggttc

SEQ ID NO: 16843 - DNA, 2682 bp, synthetic construct
  misc_feature 1..2682: note = source = /note="Description of Artificial Sequence: Synthetic coding sequence"
  source 1..2682: mol_type = other DNA
atgattttactggcggtgctctttctgtgctttatctcttcctactcagcctcggtcaagggccataccaccggactctcgttgaacaacgataggttgtacaagctgacatactccacagaggtactcctggacagaggcaaaggaaaactgcaagactcggtggggtacagaattagctccaatgttgatgtggctctgctgtggcgaaacccagatggcgacgatgatcagttgatccagataaccatgaaagacgtcaacgttgagaacgtcaaccagcagaggggcgagaagagtatctttaagggaaagtcacctagcaaaatcatgggcaaggagaatctggaagctctgcaacgcccaaccctgttacatttgattcatggcaaggtaaaagaattctacagctaccagaacgaagcagtcgccattgaaaacattaaacgtggcctggctagcttgttccagacccaactgtcaagtggcactactaacgaggtggatatatcaggcaactgcaaggtgacctatcaggcgcaccaggacaaagtcattaagatcaaagcactggacagttgcaaaatcgccaggagtggttttactacccccaaccaagtccttggagtttcttctaaagcaacttcagttaccacgtataagattgaagactccttcgttatcgccgttcttgctgaagaaactcacaattttggactgaacttcctgcaaactatcaagggtaagattgtgtcgaagcagaaactggagctgaagacaaccgaagccggcccccggctgatgtctgggaagcaggcagcggcgatcatcaaggctgtggattctaagtacactgcaatccctatcgtgggccaggttttccaatctcattgcaaaggatgcccttccctgagcgaactgtggcgcagcacacgaaagtaccttcaacccgacaacctgtctaaagcagaagccgtccgcaacttcctcgcattcatacagcacctgaggaccgccaagaaggaggagattctccagattttgaagatggagaacaaagaggtcctccctcagctcgtcgatgctgtgactagcgcgcaaactagtgacagtttagaggccatcctggactttctcgattttaagtctgatagctcaatcatcctgcaagagaggtttctttacgcttgcgggttcgcaagccatcctaacgaggaactcctccgggctctgatctccaagttcaagggatcaattggatcgtctgatatccgagagacagtgatgattataacagggacactggtaaggaagctgtgccagaacgaagggtgcaaactgaaagcagtggtagaagcgaagaaactgattttgggcggactcgagaaagctgagaagaaagaggacacaagaatgtacctgcttgctttaaagaacgcacttctcccggagggcataccttcattactgaagtatgcggaggcaggagagggccccatcagccaccttgcaactaccgctctccagcggtatgatctgcctttcattaccgacgaggtgaagaaaaccctgaataggatctatcatcagaaccgcaaggtccatgaaaagacagtaagaaccgctgcagctgcaattatcctgaacaacaacccatcttacatggacgtgaaaaatatcctcctttctatcggggaactgcctcaggagatgaataaatatatgctggcgatcgtgcaagatattctccgtttcgagatgcctgcttcaaaaatcgtcaggagggtgcttaaagagatggtggcccataactacgacaggttctctcggtctggatctagttcagcctacaccgggtacatcgagagatcaccccggtctgcctctacatacagcctggacatcctttactctggtagcggaattctgcgcaggagcaacctcaacattttccagtacattgggaaggctggactgcacggctctcaagtcgtcatcgaggcacagggcttggaagctctgatcgctgccacccctgatgagggggaagaaaaccttgatagctacgccggaatgtctgcgattctgtttgatgtccagctccgccccgtgacgttctttaacggatattcagatctgatgtctaaaatgctgtccgccagcggagatccaattagcgtagtgaaaggcctgatcctgctgatcgatcactctcaggaactgcaacttcagtctggactgaaggccaatatagaagtccagggcggcctggccattgacattagtggagctatggagtttagcctgtggtatcgagagagtaaaacaagggttaagaacagggtcaccgtggtgataaccactgatattaccgttgattcatcgttcgtgaaagccggacttgagaccagtacagaaactgaagcgggactggaattcatctcaacagtgcagttctcacagtacccatttttggtatgcatgcagatggacaaagatgaggcccctttcagacagtttgaaaaaaaatacgaaagactgagcaccgggcgagggtacgtgagccaaaagcggaaagagtccgtcctcgcaggctgcgaattcccccttcatcaggaaaatagcgagatgtgcaaagtggtcttcgcacctcaacccgattctacatccagtggttggttc

SEQ ID NO: 16844 - DNA, 2682 bp, synthetic construct
  misc_feature 1..2682: note = source = /note="Description of Artificial Sequence: Synthetic coding sequence"
  source 1..2682: mol_type = other DNA
atgatcctactggccgtgctgttcctatgcttcatctcatcatattcagctagcgtgaagggtcataccaccggcctttcactgaacaatgaccgtctttataagttgacttactccactgaggttctcctcgatcgcgggaagggcaaactgcaggattccgtgggctatagaatatcaagtaatgttgatgttgcactcctttggagaaacccagatggagatgacgatcagctgatccagattacaatgaaggacgttaacgtagagaatgtgaatcagcagcgcggagagaaaagcatttttaagggaaagtccccgtctaagataatgggcaaggagaacttggaagcgctgcagcgccctaccctgttacacctaattcacggtaaggtaaaggagttttatagctatcaaaacgaagcggtagccatcgagaatatcaaaagaggtctcgcttccctgttccagacccagctgtcctcagggactactaacgaagtcgacattagcggcaattgcaaagtgacttaccaggcccatcaggacaaagttattaagatcaaggctctcgatagttgcaagattgcgcggtcgggattcacgacacccaaccaggtgctaggagtctcttctaaagccacttctgtgacaacctacaaaatcgaggatagttttgtgatcgcagttctcgcagaggaaacacacaacttcggcctcaactttttgcagacgatcaagggaaagatcgtttcgaaacagaagctggagctgaagacaaccgaagccggtccccggctgatgtccggcaaacaggccgcagccatcataaaagctgttgactcaaagtataccgcgattccaatagtaggccaagtattccagagtcattgcaagggctgccccagcctttctgagttgtggcggtctactcgcaagtacctccagcccgacaatctgagcaaggccgaagccgtaagaaacttcctggccttcatccagcacctgcggactgccaagaaggaggagatactccagattttgaagatggaaaacaaagaggtgcttcctcagcttgtcgacgccgtgactagcgcccaaacatcagactccttggaggcaatactggacttcttagacttcaaatcagactcctcgattattttacaagagaggttcctctacgcgtgtggctttgcctcgcatcccaacgaggagttactccgtgctttgatctcgaaattcaaggggagtattggatcaagtgatattcgagagaccgtgatgattatcaccggtacactcgtaaggaaactgtgccagaatgaggggtgcaaacttaaagcggtggtggaggcaaagaaactgattctcggcggactggagaaagctgaaaagaaggaggacacacggatgtatcttctggccctcaaaaacgcactcctcccagaggggataccctctctcttaaagtacgcggaagctggcgagggcccaatctcacatctcgcaaccactgccctccagcggtacgacctgccttttataactgacgaagtgaaaaaaacattgaatcgcatctaccaccagaaccggaaggtgcatgagaagaccgttagaaccgcggcagctgccattattttgaacaacaacccctcttacatggacgtcaaaaacatcctcctatccattggagaacttcctcaggagatgaacaagtacatgttggctatcgtccaggacattctgcggtttgagatgcccgcttccaaaattgtgaggagagttctgaaggagatggtagctcacaattacgatcgattctcacgttcaggctcgagttctgcctacacgggctacatcgaacggagtccccgaagtgcctcaacctattctctggatattctgtattcagggtctggaattctgaggagaagcaacttgaacatctttcaatacattgggaaagcaggcctccatggttcacaggtggtaattgaggctcagggcctggaggcgcttattgcggcgactccagacgagggcgaggaaaatctggactcctatgctggtatgagcgctattctgtttgatgtgcagctacgccccgttacatttttcaatggatatagcgacctcatgtccaagatgctgtccgcctccggcgacccaattagtgtcgttaaggggctgattctcttgattgaccatagtcaagaattgcagctacaatctggcctgaaggcgaacatcgaagtacaaggcggactggcaatcgacatctcgggcgccatggagttttccctgtggtaccgcgaaagcaagacgcgagtgaagaatagagtgaccgtcgtgatcacaactgacattactgttgacagctcctttgtaaaggcgggtctggaaaccagtactgagaccgaggccggcctggaatttatttccacagtacagttctcgcagtacccattcctggtgtgcatgcagatggacaaagacgaggcgccattccgccaattcgagaagaagtatgagaggcttagcactggtcggggatatgtgtcacagaagcggaaggagagtgtactggctggctgcgaattcccactgcaccaggaaaactctgaaatgtgtaaggttgtattcgcaccccagcctgattccaccagcagtggctggttc

SEQ ID NO: 16845 - DNA, 2682 bp, synthetic construct
  misc_feature 1..2682: note = source = /note="Description of Artificial Sequence: Synthetic coding sequence"
  source 1..2682: mol_type = other DNA
atgatactgttagcagtgttatttctttgcttcatatcatcatattccgcaagtgttaagggacacacgaccggattatctctcaacaacgaccggttgtacaagctgacatactcaacagaagtcctgctggacaggggcaaaggaaagctgcaagattcggtcggctaccgcatcagcagcaatgtagatgtggccctcctctggagaaaccccgatggggacgacgaccagctcatacagattactatgaaagatgtgaatgtagaaaacgtgaaccagcaacgcggggagaaaagtattttcaagggcaagagtccaagtaagataatgggcaaggagaacctggaggctctacagcgtcctaccctgctccacctcattcatggaaaggtaaaagagttttacagctaccagaatgaggcagtagccatagagaatatcaagagaggtcttgcttctctattccagacccagctcagtagcggcacgaccaatgaagtagatatttccggaaactgtaaagtgacctaccaggctcatcaggacaaagtaattaagatcaaggctctcgactcctgtaagatcgctaggtctggttttacgacacccaatcaagttctaggtgtcagcagtaaggctacatctgttaccacatacaagattgaggattccttcgtgatagccgtcctggcagaagaaacgcacaatttcggcttgaactttctgcagacaattaaggggaaaatcgtgtccaaacagaaactcgagctgaagaccacagaagctgggcctcgcttgatgtccggaaagcaggcggctgcaattataaaggcggtagactccaaatacaccgctataccgatagtgggccaggtgttccaaagccactgcaagggttgccccagcctgagtgagctctggaggagcacccgaaaatatctgcagccggacaacctctctaaagctgaggccgttaggaattttctcgccttcatccaacatctccgaacagcaaaaaaggaagaaattttgcagatccttaagatggaaaataaagaagtgctgccacaactcgtcgacgccgtaactagtgcacaaacctccgactcactggaggcaatcctggacttcctggacttcaagtctgactcctccatcatcctgcaggagcggttcctttatgcctgtggatttgccagccaccccaacgaagaactgctgcgagcgttaatcagcaaattcaaaggttccatcggcagctccgatattcgggaaaccgtgatgattatcactgggaccctcgtcagaaagctttgccagaacgaagggtgtaaattgaaggctgttgtcgaagcaaaaaagctgatccttgggggactcgagaaggcagagaagaaagaggatactcgaatgtaccttctcgctctcaaaaacgcccttcttccggaaggtatcccttcattgttgaagtatgccgaagcaggggagggcccaatttctcatctcgccactaccgcgctgcaacgatacgatctcccattcatcacagatgaggtgaagaagacactgaataggatctaccatcagaatcgtaaagtgcatgagaagactgtgcgcaccgcggccgccgccataatccttaacaataaccctagttacatggatgtgaagaacatcttgctctccatcggcgaactgccccaggaaatgaacaagtatatgctggccatcgtgcaggatattctaaggtttgagatgcctgcctcaaagatcgtgcgaagggtgttgaaggagatggtggcccataactatgaccgattctccaggagtggcagctcctccgcatacaccggttacatcgaacgcagtcctcgatctgctagtacgtactcccttgacattttatattccgggtcagggatcttgaggaggtccaacctgaacatcttccagtatatcggcaaggcaggactccacggatctcaggtggtgattgaggcccaaggccttgaggccctgatagcagccacaccagatgagggggaggagaacctggatagttacgccggcatgagcgccatcctattcgacgttcaactacgaccggtaaccttcttcaatgggtattctgatctgatgtcaaaaatgttgtccgcctctggcgatccgatcagtgttgtcaaaggtttgatacttctgattgatcattcccaggagctgcagttgcagtctgggctgaaagcgaatattgaggtacaggggggattggctattgatatatccggagctatggagttttccctctggtatcgggaaagtaagaccagagttaagaatcgcgtgaccgtcgtgattactaccgacataacagtagattcttcttttgtcaaggccgggttggaaactagtaccgaaacagaagcagggttagagttcattagcaccgttcagttttctcagtacccttttttggtgtgtatgcagatggataaggacgaggcgccttttagacagttcgagaaaaaatacgaacggcttagcactggcagaggttacgtgtcccaaaagagaaaggaaagtgtcctagccggctgtgagtttcccctgcaccaggagaacagtgaaatgtgcaaggtcgtcttcgcgccccagcccgactccacatccagtggctggttt

SEQ ID NO: 16846 - DNA, 2682 bp, synthetic construct
  misc_feature 1..2682: note = source = /note="Description of Artificial Sequence: Synthetic coding sequence"
  source 1..2682: mol_type = other DNA
atgatcctcttagcagtgctgtttctgtgcttcatctcgtcctactcagcaagcgttaaggggcacaccaccggcttgagcctgaataatgacagactttacaaactcacatattctaccgaagtccttctcgacaggggaaaaggcaagttacaggatagcgttggctaccgtatatctagtaatgtggatgtggctctcctatggaggaaccccgacggagacgacgaccagctgatccaaataacgatgaaagacgtcaacgttgagaacgtaaaccaacagaggggagaaaaatccatttttaagggtaagagccccagtaagatcatgggaaaagaaaatctggaggcattgcaaagacctaccctgctacacctgatacacggtaaagtcaaagaattttacagctaccagaacgaggctgtggcaattgaaaatattaagcgtgggctcgcctccttgtttcagactcagctttcctctggaactacgaacgaagtagatatatcagggaactgcaaagttacatatcaggcccaccaggacaaggtcatcaaaatcaaggctttggactcttgtaagatagcgcgttcgggcttcacaacaccaaatcaggtgctaggtgtctcctccaaggccacatccgttaccacgtataagattgaggattcctttgtcatagccgtactggctgaagaaacccataacttcggcttaaattttctacaaacgatcaagggaaaaatcgtgtctaagcagaaacttgaactcaagactaccgaggcaggaccacgcctgatgagtggcaaacaagcggcagctataattaaagcagtcgattcgaagtatacagcaatccccatcgtaggccaggtgttccagtctcattgcaaaggctgtcccagcctgtctgaactgtggagatctacccggaaatatcttcagcctgacaacctatccaaggcggaggcagtaagaaacttcctggcttttatccaacacctgaggacagcaaagaaagaggagattctgcagatcctaaaaatggagaataaggaagtgctgccacagctggtggacgctgtgacaagtgctcagacctccgatagcttggaggcgattttggattttctggatttcaaaagcgattcttctataatactgcaggagcgctttctgtacgcctgtggcttcgccagccatcccaacgaagaactcctcagagcgctgatttccaaatttaagggatctattggctcatccgatatcagagagacagtaatgattataacgggtaccctggttcggaaactttgtcagaacgagggctgtaaactcaaagcggtcgtggaagctaagaaactgattctcggcggcctggaaaaggccgaaaagaaggaagacactcgcatgtatctgctggcactgaaaaatgcgctcctgccggaagggattccctctctcttgaaatacgcggaagcaggcgaaggcccaatcagccacctagccacgactgccttacagagatacgacttgccatttattacggacgaggtgaagaaaacgttaaatcgcatctatcaccagaacaggaaagttcacgaaaagaccgtgcgtaccgctgcagcggcgattatattgaataataacccgtcttatatggacgttaagaacatcctgttaagcatcggagagttgccccaggagatgaacaaatatatgttagcaatagtgcaggatatccttcggttcgaaatgccagcctctaagatcgtgagacgggtcctcaaggagatggtggcccataattacgaccgattctccagatctggtagttcttcggcatacaccggatatatcgaacgctcccctaggagcgcaagcacctactctttagatatcctctactcggggagcggaattctgcgccgcagcaacctcaatatctttcagtatataggcaaagctggtttacacgggtctcaggtcgtgatagaggcacaggggctggaagcgctgattgcagccacaccagacgagggcgaggaaaacctggatagttacgcgggcatgagcgccattctgttcgatgtgcagctgcgccctgtaacgttcttcaatgggtacagcgacctgatgagcaaaatgctgagcgcatccggcgacccaatctctgttgtcaaagggctgatcctactgattgatcacagccaggaactacagttgcagtctggcctcaaagctaacattgaggtccagggaggactcgctatcgacatttccggcgcaatggagttctcgctatggtatagggagtctaagacaagggtgaaaaatcgtgtcaccgtcgtgattactacagatatcacggttgactcctcttttgtgaaagctgggcttgaaaccagtaccgagaccgaagctggcctggagtttatctccactgtacaatttagccagtacccgttcttggtctgcatgcagatggataaggacgaggccccttttaggcaatttgagaaaaagtacgagagactctctacaggacgcgggtacgtgtcacagaagcgcaaggagtccgtgctggccggctgcgaatttccactgcatcaagagaattcggaaatgtgcaaggtggtcttcgccccacagccagactccacaagtagtggctggttc

SEQ ID NO: 16847 - DNA, 2682 bp, synthetic construct
  misc_feature 1..2682: note = source = /note="Description of Artificial Sequence: Synthetic coding sequence"
  source 1..2682: mol_type = other DNA
atgatccttttggccgtgctctttctctgcttcatcagcagctactccgctagcgtgaaaggccacactactggtctgtccctgaacaacgaccggctgtataagctgacatattccaccgaagtgctgctggacaggggcaagggaaagctgcaggattccgtggggtatcgtatatctagcaatgtggatgtggccctgctgtggagaaaccctgacggcgatgatgaccagctcatacaaatcactatgaaagacgtgaatgtcgagaatgtgaaccagcagagaggggaaaagagtattttcaagggtaaaagcccatccaagattatgggcaaggagaatctggaggccctgcagcggcccactttactgcacctaattcacggcaaggtgaaggagttctacagttaccagaatgaagccgtggccatagagaatattaaacgcggactggccagcctttttcagactcagctgtctagcggaaccactaacgaagttgacatatctggcaattgtaaggttacataccaggcacaccaggacaaggtgatcaagattaaagcactggacagttgcaagattgcccgatcaggctttaccacccccaaccaggtattaggggtgtcctctaaggccacatccgtgaccacctacaaaatagaggatagcttcgtgatcgcagttctggctgaggaaactcacaactttggcctgaatttcctgcagacaataaaaggtaaaatcgtatcaaaacagaagctcgagctgaagaccactgaggctggtcctcgtttaatgagcgggaaacaggccgccgccattattaaggctgtggactctaaatacacagccatacccattgtgggacaggttttccagagtcactgtaagggctgtccaagtcttagcgagctgtggaggtctactaggaaatatctgcaacccgataacctatcaaaagccgaggcagtgcgtaacttcttagcattcatccaacatctaaggaccgccaaaaaagaggagatcctccagattctaaagatggaaaataaagaagtactgccccagctagtggatgccgtgacctctgctcagacctccgattccttggaagccattcttgactttctggactttaaatcagactcaagcataatactgcaagaacgatttttatatgcatgtggcttcgcatctcatcctaacgaagagcttttacgggctctcatttctaagttcaagggcagtataggaagtagcgacatcagagaaactgtcatgatcattaccggcaccctggtgcgtaagctgtgtcagaatgagggctgtaagctgaaagcagtcgtggaggcaaagaaactgatcctgggcgggcttgagaaggctgaaaaaaaggaggacacccggatgtacttattagccctgaaaaatgccctactgccagagggaatcccaagcctgctaaaatacgccgaggcaggggaaggtcctataagtcatcttgccacaactgcactgcagcgttatgacctgccattcatcaccgacgaagtgaagaagactctgaataggatataccaccagaatcggaaagtgcacgagaaaaccgttcgcaccgcagctgctgctatcatcctcaataataatccttcttacatggatgtgaaaaatatacttctgagcataggtgagctgccccaggagatgaacaagtatatgctcgccatcgtacaagatattctccggtttgagatgccagcttctaagatagtgagaagagttttgaaagaaatggtcgcccataattacgaccggttctctagatcagggtcttctagcgcctataccggctacatagagaggagcccacggtctgcttctacctactcactcgacatcctatactccggaagtggcattttacggcgcagcaacttaaacattttccagtatataggaaaggccggcctacatggcagccaggtcgtgattgaagctcagggcctcgaggccctcattgctgctaccccggacgaaggagaggagaacctggattcctatgcaggaatgagcgcaatcctgtttgacgtgcagctgcggccagtcacattcttcaatggatattccgatctgatgagtaagatgctgagtgcttctggagatcctatttccgtggtgaagggcctcatcctcctcattgatcacagtcaagagttacagctgcagagtggattaaaagctaacatcgaagtccagggcggccttgccatagatatctctggtgcaatggagttctctctatggtatcgcgaaagtaagacacgggtcaaaaatcgggtcaccgttgtgataaccactgatatcactgtggacagctcctttgttaaagcaggcttagaaacttccactgagaccgaagccgggctagaatttataagtactgttcagttctcccaatacccatttctggtctgcatgcagatggataaagatgaggcccccttccggcaattcgagaagaagtacgagcgtttgagcaccggccgcggctatgtctctcaaaaaaggaaggaatccgtgctcgctggttgtgaatttccactgcaccaggaaaatagcgagatgtgcaaggtggtgttcgcaccccagccagacagtactagttctggatggttt

SEQ ID NO: 16848 - DNA, 2682 bp, synthetic construct
  misc_feature 1..2682: note = source = /note="Description of Artificial Sequence: Synthetic coding sequence"
  source 1..2682: mol_type = other DNA
atgatcctgctcgcagtcctcttcctctgtttcatcagttcctatagtgcctctgtaaagggacacactacaggactctccctcaataatgatcggttatacaaactgacatattcaactgaggttctcctcgatcgcgggaaagggaaattgcaggatagtgtggggtaccgaatttcttctaacgtagatgtggcattgctttggcggaatcctgacggggatgatgatcagcttatccagatcactatgaaagatgtcaatgttgagaatgtgaatcagcagcgaggagaaaaatctatatttaaagggaagagtccatcaaagatcatgggaaaagaaaaccttgaagctcttcagcggcctactttactgcatctgatacacggaaaagtgaaggaattctacagttatcagaacgaggccgtggccatcgaaaacattaaaaggggactagcctctctcttccagacacagttatcctctgggactactaacgaagtggatatatcagggaactgtaaagtgacttatcaagcccaccaggataaagttattaagatcaaagccttagattcgtgcaaaatcgcacgctctgggtttacaacaccaaatcaggtactgggggtaagttctaaagcaacatctgtgacaacgtataaaatcgaagattcttttgttatagctgtattagctgaagaaactcacaatttcgggctcaatttcctccagacaatcaaaggaaaaattgtttctaaacagaaactcgaactaaaaactacagaggccggaccccgattgatgagtgggaagcaagccgctgctattattaaagccgtggatagtaaatatacagctataccaatagtagggcaggttttccaatcccactgtaaagggtgtccatctctctctgagctttggaggtctactagaaaatatctgcagcccgataacctgtccaaagccgaagctgtgagaaattttctcgccttcatacagcacctgagaacagctaaaaaagaagaaatactccagatcctcaaaatggaaaacaaggaagtactcccacagctggtagatgccgttacatcagcccagactagtgattccctcgaagcgatactcgatttcctcgatttcaaatccgattcaagtatcatactgcaggagcggttcctctacgcatgcgggtttgcatcccaccccaacgaagaattgctacgagctctcatctcaaaattcaaagggtctatcggatccagtgatatacgcgaaactgtgatgatcataacagggactttagtgcggaaactctgtcaaaatgaaggatgtaaactgaaggccgtcgtggaagccaaaaagctaattctcggggggttggagaaagccgaaaaaaaagaagatactcggatgtatctacttgccctaaagaacgctctcctcccagaagggatcccaagtctgctgaaatacgccgaagcaggagaagggccaatcagtcatctggctactacagcattgcagaggtatgatctcccctttattactgatgaggtgaagaaaactcttaaccggatataccaccaaaaccgcaaagtgcacgaaaagacagtgagaacagcagccgccgctatcatcctcaataataatcccagttatatggatgtcaaaaatatacttttgagtatcggggaactgccccaggaaatgaacaaatacatgttagcgatcgtccaggatatccttcggttcgaaatgcccgcatcaaaaatagtgagaagagttctaaaagaaatggttgcacataactatgatcgattttcccggtctgggtcttcatctgcctatactgggtacattgaacgctcaccaagatcggccagtacttactctcttgacatcctctattctgggagtggaatactcaggaggtctaacctgaatatctttcagtatatagggaaggccggactgcacggatcccaggtggtcatcgaagctcaggggcttgaagccctcatagccgcaactccagacgaaggagaagaaaatctagactcatacgctgggatgagtgctatcctctttgatgttcagctccgccctgtaacttttttcaatggatattcggatctaatgtccaagatgctctcagcatcaggagatcccatcagtgtcgtgaaagggcttatcctgctgattgaccacagtcaggaactgcagctccagtctggacttaaagctaatattgaagttcaggggggattggcaattgacatatcaggggccatggaattcagtttgtggtaccgggagtctaaaactagggtaaaaaatcgggtgacagtcgtcatcacaacagatatcactgtggattcatctttcgtgaaagctggactcgaaacttccactgaaacagaagccggactcgaattcatatccactgtacagttttcacagtatcccttccttgtgtgtatgcagatggataaagatgaagcccctttccggcagtttgaaaagaaatacgaaaggttatctacagggcggggatacgttagtcagaaacgcaaagaatcagtactcgccgggtgtgagttccccctccaccaggaaaacagtgaaatgtgcaaggtagtctttgccccccagcccgattcgacaagttctgggtggttc

SEQ ID NO: 16849 - DNA, 2682 bp, synthetic construct
  misc_feature 1..2682: note = source = /note="Description of Artificial Sequence: Synthetic coding sequence"
  source 1..2682: mol_type = other DNA
atgatactcctggcggttcttttcctgtgcttcatctcatcttactccgccagcgtcaaaggccacacgactggattaagtcttaataatgacagactctataagctcacctattcaactgaggtcctgctggacagaggtaagggcaaactgcaggattccgtgggctataggatcagctctaacgtcgatgtggctcttctgtggcgtaacccagatggcgatgacgaccagctaatccagatcaccatgaaagatgtcaatgtcgagaacgtcaatcagcagcgcggggaaaagagtatctttaagggaaaatcgcccagcaaaatcatggggaaagagaatcttgaggccctgcagagacctaccttgctgcatcttatccatggaaaagtgaaggagttttacagttatcagaacgaggccgtcgcaattgagaacataaaacgtgggctcgcatctctatttcagacgcaactaagtagcgggaccacgaacgaagtcgacataagcgggaactgcaaggtaacatatcaggcacaccaagataaagtcataaagatcaaagccttggattcatgcaaaattgcccgctccggctttactacccctaaccaggtgctgggggtgagctcaaaagcaacctctgtgactacatacaagattgaggactctttcgtgattgcagtcttggcagaggaaacacacaactttggactcaactttctccagactattaagggcaaaatcgtgagtaagcaaaagctggagctcaagactaccgaggccggcccgcgcctgatgagcggaaagcaggctgctgctatcatcaaagccgttgacagtaagtatactgcaatccctatagtggggcaggtgtttcagtcgcactgcaaaggctgcccgtcactgtcagaattatggcgatcaacacggaagtatctccagccggataatttgtcaaaggctgaagctgtgcgtaattttctcgcgttcatccagcacctgcgaaccgcaaagaaagaggagattctgcagatcttaaagatggagaacaaagaagtgttgcctcagctcgtcgacgccgtgactagtgcacagacttcagacagcctggaagcgatcctagatttcctcgattttaagagcgactcctctattattctacaggaacgatttctgtacgcttgcggctttgcctcccaccccaatgaagaactgctgcgcgctctcatatccaaattcaaaggatccattggctcatctgatattcgagagactgtgatgattatcacgggaaccctcgtgcgcaaattatgccagaacgaaggatgcaaactgaaggctgtcgtggaggccaaaaagttgattctcggcggactggagaaggccgaaaagaaagaggacaccagaatgtatctgctggctttaaaaaatgcactgttaccagaaggaattccgtcgctgctgaagtatgctgaagccggagaaggccccatcagtcacctggccacaactgctctccagcggtatgatctcccatttatcaccgacgaggtgaaaaagacattaaaccgtatctatcaccaaaacaggaaagtccacgagaaaaccgtgagaactgctgcagctgctatcattctgaacaacaacccttcttacatggacgtgaagaacattttgctcagcatcggggagctgccccaggaaatgaataagtatatgctggccatcgtacaggacatactaaggttcgaaatgccagctagcaagatcgtacgtagggtgctaaaggaaatggtagctcataattatgatcggttctccaggagtggttcgagctctgcatatactggttacatagaaaggagccctagaagcgccagcacctactcacttgatatcctgtatagtggttctggcatccttaggagatctaatttaaacattttccaatatattggtaaagctggcttgcatgggtctcaggtggtgatcgaagcacagggactcgaagctctcatagcagctacaccagacgagggagaggagaatctggattcgtacgcggggatgtcagctattttgttcgatgtccagctcaggccagtcacctttttcaacggttattccgaccttatgtcgaagatgttgagtgctagcggcgacccaatttctgttgtcaaaggactgatactgttaatagatcacagccaggagttgcaactccagtctgggctcaaggctaacatcgaagtccagggaggtctggccatcgatatatctggggccatggaattctcactgtggtatcgtgagagcaagacgcgggtgaaaaatcgggtcaccgtggtgatcactacagatataactgtcgactccagcttcgtgaaggctggactcgagacttccaccgagactgaggccgggctggaatttatctctactgttcagttctcccagtatccatttttggtatgtatgcagatggacaaggacgaggccccattccgccagttcgaaaagaagtacgaacgcctttctactggaagggggtatgtctcccagaaacgaaaggaaagcgtgctcgctgggtgtgaatttcctctgcaccaggagaattccgagatgtgtaaggtagtgtttgctcctcagcccgattcaacctcatcaggctggttc

SEQ ID NO: 16850 - DNA, 2682 bp, synthetic construct
  misc_feature 1..2682: note = source = /note="Description of Artificial Sequence: Synthetic coding sequence"
  source 1..2682: mol_type = other DNA
atgatcctgcttgccgtgctattcctctgtttcatttcatcctatagtgccagcgtcaagggtcataccaccggactgtctctcaacaacgatcgattatacaaactcacatacagcactgaggtgttgttggacagaggcaagggcaagcttcaggatagtgtgggctatcgtatctctagcaatgtggatgtagccctcctatggcgtaaccccgatggcgatgacgatcagctgattcagatcacgatgaaagatgtaaacgtggagaatgtaaatcagcagcggggtgagaaatcaatatttaaaggcaaatccccatctaaaattatgggtaaggagaatctagaagcactgcagaggcctactctgttacacctgattcatggaaaagtgaaagaattctacagctatcagaacgaagctgtagctatagagaacatcaaaagggggctggcctctctgttccagacccagctaagctcaggcactacaaacgaggtcgacatcagtgggaactgcaaagtgacctaccaggcccaccaggacaaggtgattaaaatcaaggcacttgactcttgtaagatcgcaaggtctggcttcaccactcctaatcaggtcctgggcgtctctagtaaggccaccagcgtcacaacatacaaaatcgaggactcttttgtgatcgccgtgttggcagaggaaacacataactttggtctcaattttttgcagacaattaagggcaagattgtcagcaagcaaaaactggagctcaagaccaccgaggccggaccacggctgatgtctgggaagcaggcggctgctattatcaaagctgtggattccaagtacaccgccattccgatcgtgggccaggtcttccagtctcattgtaagggctgtcctagcctgtccgaactgtggcgttcgaccagaaagtacctgcaaccggataacttaagcaaggcagaagcagttagaaattttcttgcatttattcagcacctgagaacggccaaaaaagaggaaatcttgcagattcttaaaatggagaataaagaagtactcccccaactagtcgatgccgtgactagcgctcaaaccagtgacagtctggaagcaatcctcgactttctggacttcaaatctgacagtagcatcatcctccaggagcgcttcctttacgcttgtgggttcgcctcccatcccaatgaagaactcctgcgggcgcttatcagcaaattcaaggggtctatcggctcctccgacattcgggagactgtgatgattataaccggcactcttgtgcgaaaactgtgccagaacgaggggtgcaagcttaaggccgtcgtggaggcaaaaaagcttatcctcggcgggctagaaaaggcagagaaaaaagaagatacccgtatgtatctcctagctctcaaaaatgctctgctgccagagggcatacccagcctgcttaagtatgctgaagccggagaagggcccatcagccatctcgccacgacggcgctccaacggtatgacctgccattcatcaccgatgaagtcaagaagacactgaaccggatctatcaccagaatcgcaaggtgcatgagaagacagtgcgaacggccgctgccgcgattatcttaaacaataaccccagctatatggacgttaagaacatactgctgtctatcggggaacttccccaggagatgaataagtatatgctggccatcgttcaggatattctccgctttgagatgccagctagtaaaatcgtgaggcgggtgctgaaagagatggtggcacacaactacgatcgattctcccgtagcggctcttcttctgcgtataccggttacattgagcgctcaccacggtcagctagcacttactcgctcgacatcctgtattcaggtagtggaatactgcgacgctccaacctcaacatttttcagtacatcgggaaggcaggcctgcacgggtcccaagtggtgattgaagcacagggactcgaggcactgatcgccgcgactccagatgaaggtgaggaaaacctagactcctacgcaggcatgagtgcaattctcttcgatgtccaactgaggcctgtcacgttcttcaacggttattctgacctgatgtcgaaaatgttgtccgcgtccggcgacccaatttctgtggtcaagggcctcatccttctgatcgaccactctcaggagctgcagctgcagagcggcctgaaggcgaatatcgaggtgcaggggggactagccattgacatcagcggcgccatggagttttcactatggtaccgagaatcaaagacaagagtcaaaaatcgggttacggtggtgatcacaacggatattacagtggactcgtcttttgtaaaagccggcctggaaacaagtaccgagacagaagctggcctggagtttatcagcactgtgcagttctcacagtacccctttctggtttgtatgcagatggacaaggatgaagccccttttcgccagttcgagaaaaaatacgaaagattgtctaccggccgcggatatgtcagccagaaacgcaaggagtcagtactggcgggctgtgagtttcccctccatcaagagaacagtgagatgtgcaaggtcgttttcgcacctcagccggactccacatcttccggctggttc

SEQ ID NO: 16851 - DNA, 2682 bp, synthetic construct
  misc_feature 1..2682: note = source = /note="Description of Artificial Sequence: Synthetic coding sequence"
  source 1..2682: mol_type = other DNA
atgatactcctggccgtcttgttcctctgcttcatcagttcttattctgcctcagttaagggtcacacaacaggcctctcacttaacaacgacagactgtacaagctgacttatagcaccgaggtgttgctcgacagaggcaaaggtaaactgcaggactctgtcggatacaggatcagtagtaacgtcgacgtggctctgctctggaggaaccctgatggtgacgacgaccagcttattcagatcactatgaaggatgtcaacgtcgagaacgtaaaccagcagcgcggtgagaaaagcatctttaagggaaaatctcctagtaaaataatgggtaaggagaatctggaggcactgcagagacctaccttgctccacttgatccatggtaaggtaaaagaattctactcctaccagaacgaagccgtagctattgaaaatatcaagaggggactcgcctccctgttccaaacccagctcagttctggaaccactaacgaggtagacatctcaggcaattgtaaggtgacataccaagctcaccaggataaggtgatcaaaatcaaggcactggatagctgtaaaattgctaggtccggcttcactactcctaatcaggtattgggagtttccagcaaggccacctcagtgactacttacaagattgaagactcttttgttatcgctgttcttgctgaggagacccataacttcggactgaacttccttcaaactatcaagggtaaaatcgtgtcaaagcaaaagctggagcttaagacaaccgaggctggacctcgcctcatgagtggtaagcaggctgcagcgatcatcaaggccgtggacagcaagtatacagctattccaatagtcggtcaagttttccagtcccattgtaagggttgcccaagcctgtctgagctgtggagatcaacaagaaagtacttgcagcccgacaacctttccaaggccgaagccgtgaggaatttccttgctttcatccagcacttgcgcaccgccaaaaaggaggaaatcctccaaatcttgaagatggagaacaaggaggtcctgccgcagttggtggatgcagtgacctctgcccagacgtctgattccttggaagctattcttgactttttggacttcaagagcgatagtagtattatcctgcaggagcgcttcctgtacgcctgcggtttcgcctcacatcctaacgaggaattgttgagagcccttatcagtaagttcaagggttcaattggctccagcgacatccgcgaaaccgtgatgatcatcacaggtacattggtgcgcaaactctgtcagaacgaaggatgcaagttgaaggcagtcgtcgaggcaaagaaactgatcttgggaggccttgaaaaggccgaaaaaaaggaagacaccaggatgtaccttttggccctgaaaaacgccctcctgcctgaaggaatccctagtctgcttaagtatgcggaagctggcgaaggccctatctctcatctggcaaccaccgctttgcagagatatgacctgccatttatcaccgatgaagtcaagaagacgctgaatcgcatataccaccaaaatagaaaagtgcacgaaaagacagtgcgcacagctgctgcggctattatcctcaacaataacccttcctacatggacgtaaagaacatcctgctcagcatcggcgagctgccacaagagatgaacaagtatatgcttgcaattgtgcaggacattctgaggttcgagatgccagcctccaagatcgtgagaagagtgctcaaggagatggtcgcgcacaactatgacaggttttcaaggtctggttcatcttcagcctacaccggttatatcgagaggtcccccagatcagcatcaacttacagcttggacattctgtactccggttctggtatcctgcgccgctcaaacctgaacatctttcagtacatcggcaaagcaggcctgcacggttcacaagtggtgattgaggcacagggcctggaggcgctgatcgcagctacccctgatgagggtgaagaaaacctcgatagctacgccggaatgtccgccatcctgtttgatgttcagctgcgcccggtgacattcttcaatggatacagcgacctgatgtctaagatgctctccgctagtggagaccctatcagcgtggtgaaaggactgatcctcttgattgatcactctcaggaactgcagctccaatcaggccttaaggcgaatatcgaggtccagggcggtttggcaatcgatatcagtggagctatggaattcagcctgtggtacagggagtccaagacccgcgtcaaaaacagggttaccgtcgtgattacgacagacatcacagtcgactccagcttcgtaaaagcaggcctcgaaactagtaccgaaacagaagctggcctggaatttatttcaacagttcagttcagccaatacccgtttctcgtatgtatgcagatggataaggacgaagcaccattccgccaatttgagaaaaaatacgagaggttgagtacgggacgcggttacgtctcccaaaaaagaaaagagtccgttctggccggatgtgagtttccattgcatcaggagaactcagaaatgtgcaaagtggtgtttgccccgcagcctgacagtaccagttctggctggttc

SEQ ID NO: 16852 - DNA, 2682 bp, synthetic construct
  misc_feature 1..2682: note = source = /note="Description of Artificial Sequence: Synthetic coding sequence"
  source 1..2682: mol_type = other DNA
atgatcctgctggctgttctctttttgtgctttatatcatcgtactccgcttccgttaaggggcataccacaggtctgtccctgaataacgaccggctgtataagttgacttatagtacggaagtcctgttggatcgcggcaagggcaagctgcaagattccgttgggtacaggattagcagtaacgtcgacgtggctctcttgtggaggaacccagatggggacgatgaccaactgatccagattactatgaaagatgtcaatgtagagaacgtcaaccagcagcgaggggaaaaatcaattttcaaagggaaaagcccaagtaaaatcatgggcaaggagaatcttgaagctctgcagcggcccacattgctgcatctgatccatgggaaggtgaaagaattttacagctaccagaacgaggccgtggccatcgagaacattaaacgtggcttagcctcactcttccaaacgcagctgtcaagtggtacaacaaatgaagtcgacatctccggaaactgtaaggtgacttaccaagcccaccaggacaaggtaattaaaatcaaagcactcgattcttgtaagatcgcgcgtagcggattcaccacccccaatcaggttcttggagtgtcttccaaggcaacatctgtgaccacatacaaaatcgaagactcatttgtgattgccgttctggccgaagaaactcataacttcgggctcaactttctccagactatcaaaggcaaaattgtgagtaagcagaaattggagctgaaaaccaccgaagccggccccaggctgatgagcggtaaacaggctgctgccatcattaaagccgtggactccaagtataccgctattcccatagtaggtcaagtgttccagagccactgtaaaggctgcccaagcctcagcgagctgtggcgatctacccgcaagtatctccagccagacaacttaagcaaggctgaggcggtcagaaactttctggcctttatacaacacctgaggacagccaaaaaggaggaaattttgcagatcctgaagatggagaataaagaagtactccctcagctggttgacgctgtgacatccgctcagacctctgattccctcgaggctatactggattttctagatttcaaaagcgattcgtccattattttacaggagagattcctgtatgcctgcggctttgccagtcacccaaatgaggagctcctgcgggcgttgatttccaaatttaagggctccattgggtcctcggacatccgggagaccgtgatgattataaccggcactctggtccgcaagctgtgtcaaaatgagggttgtaaacttaaggcagtagtggaggctaaaaaactgatactcggtggcctggaaaaggcggaaaagaaggaagatactcggatgtacctgcttgccttgaagaatgccctcctgcctgagggcattccctcactgttgaaatacgctgaagcaggggagggcccaatcagtcatctagctaccaccgctttacagcgctacgacctgccattcattacagatgaggtgaaaaaaaccctcaatagaatctatcatcagaaccggaaagttcatgagaaaaccgttagaaccgcagccgccgctataattcttaacaataatccctcatatatggacgtcaaaaatattctcctctccataggtgagctgccacaggagatgaacaaatatatgctcgccatcgtccaagatatcctgaggtttgaaatgccagcatccaaaattgtccgcagagtacttaaggagatggtggcacataactatgacaggttcagcaggtcaggctcaagttcagcctacactggatacatagaaaggagcccccgcagcgcctctacttactcgctggatattctatacagtggaagtggcatcctcagaaggtctaacttgaacatttttcagtacattgggaaagccggactccacggatcgcaggtggttatcgaggcacaaggcctggaagcattaattgccgccactccagacgagggggaagagaacttagactcctatgccggtatgagtgcgatcctctttgacgtgcagttgaggcccgttaccttctttaatgggtacagcgacctcatgagcaaaatgttatctgcctctggggatcctatctctgtggttaagggtttgatcctcctgatcgaccatagccaggaactccagttgcagagtgggctgaaggctaatatcgaggtgcagggtgggttagccatcgatattagcggcgctatggagtttagcctctggtaccgtgaatcaaaaactagggtgaaaaaccgggtgaccgtagtcataactacagatattactgtggacagctctttcgtgaaagcaggcctggaaacctctacagagacagaagcaggactggaattcatctcaacagtgcagttctctcagtacccttttcttgtctgtatgcaaatggacaaggatgaggccccctttcgccagtttgaaaaaaaatacgagcggctgtccactggcagaggatatgtatcccagaaacggaaagaatccgtgctggccggctgcgagttccccctgcaccaagaaaacagcgagatgtgcaaagtagtgtttgcaccccagcccgattctacgtcgagtggctggttt

SEQ ID NO: 16853 - DNA, 2682 bp, synthetic construct
  misc_feature 1..2682: note = source = /note="Description of Artificial Sequence: Synthetic coding sequence"
  source 1..2682: mol_type = other DNA
atgattctgctcgcggttctcttcctgtgttttatctcatcctacagcgctagcgtaaagggccacactacgggtttatctctgaataacgatcggttgtataagctgacgtactcaacagaggttctactagaccgaggcaaaggcaagctccaggatagtgtgggctataggatcagttccaatgtcgatgtggccttactgtggaggaatccggacggggacgacgatcagttgatccagatcaccatgaaggatgtcaacgttgaaaacgtaaaccagcagagaggcgagaagtccatctttaagggaaagtctccctctaagatcatgggaaaggaaaacctggaggcgttacagaggccaactttgctgcaccttatccatgggaaggttaaagagttttactcttaccaaaacgaggccgtagcaatcgagaacataaaaagaggcctcgccagcctgtttcagacccagctcagctcaggtacgactaacgaggtagacatttccgggaattgtaaagttacctatcaggctcatcaggataaggtgataaagatcaaggcactagactcatgtaagatcgcacggtcaggctttacaacccctaatcaagtcctgggagtgagttcaaaggcaactagtgtgacaacgtacaagatcgaggacagctttgtaatcgcggtcctggcggaggagacccataattttggattgaatttcttacagaccataaagggaaagatagtgagcaaacagaaattggagttaaaaactacggaggccgggcctcggttgatgtcgggaaagcaggccgccgcaatcattaaggccgttgacagtaaatatactgccatccctatagtgggccaggtattccagtcgcactgcaagggttgcccctctctcagtgagctctggcgctccacccgcaagtatctgcagcccgataacttgtcgaaggcagaagccgttaggaactttcttgcatttatccaacacttacgaactgcgaagaaggaagaaattcttcagatcctcaaaatggagaataaagaggtgttgccacagttggtggacgctgtaacatcagcacagaccagcgattccctcgaggcaatcctggacttccttgactttaaaagtgattcgagcattattctgcaggaacgttttttgtatgcatgtggttttgcttctcacccaaatgaggagcttcttcgggcactgataagcaaatttaaaggatcaattggatctagcgatatcagagagactgttatgatcatcaccgggaccctcgtacgaaaattgtgccagaacgaaggctgtaaactcaaggccgtagtggaagccaagaaactgatcctcggcggtcttgagaaagctgaaaaaaaggaagacaccaggatgtatctgcttgccctgaaaaacgcattgctgccagaaggaatccctagcctcctgaagtacgccgaggcaggggagggccctattagccatctcgctactactgccctgcagcgctacgatctaccatttataaccgatgaagttaagaaaaccctgaatcggatctaccaccaaaataggaaggtgcatgagaagacggtgcgaacagccgcagccgccatcattttgaataataatccttcttacatggacgtgaagaatatccttctctctatcggcgagctcccacaggagatgaataaatatatgctggcaatcgtgcaggacatacttcgttttgaaatgccagccagtaaaatcgtccgtagagtgttgaaggaaatggtcgcacacaattacgatagattctcacgttctgggtcctcgtccgcttacacgggctacattgaaagatctccacgctctgcttccacatattctctggatatcttgtactctgggagcggtatcctgcggagatcaaatcttaatatcttccaatatatcggcaaggccgggctgcacggctctcaggtggtcatcgaggctcaggggcttgaggccctaatcgctgccacacccgacgaaggcgaggaaaacctagattcctatgcggggatgagcgcaattctgttcgacgtgcagcttcggccagtgactttcttcaacggctactctgatctgatgagtaagatgctatctgctagcggtgaccccataagcgttgtaaaaggcctcatccttctgattgaccattcccaggagctgcaattgcagagcgggttgaaggccaacattgaggttcagggcggcctggctatcgatatctcaggtgccatggagttctcactatggtaccgggagtctaaaacccgggtgaaaaacagggtgacggtggtaatcacaaccgacatcaccgtggacagtagtttcgtcaaggccgggttggagacttctaccgaaaccgaggcaggacttgaattcatctcaaccgtgcagtttagccagtaccctttcctcgtctgtatgcagatggacaaggacgaggctcctttccgacagttcgagaaaaagtatgaaaggctgagcaccggcagggggtacgtctcccagaagcgcaaggaatcagtccttgctggctgtgagttcccccttcaccaggagaacagtgagatgtgtaaggtggtgttcgccccccagccagacagcacctcatctggctggttt

SEQ ID NO: 16854 - DNA, 2682 bp, synthetic construct
  misc_feature 1..2682: note = source = /note="Description of Artificial Sequence: Synthetic coding sequence"
  source 1..2682: mol_type = other DNA
atgattctgttggctgtcctgtttctttgtttcatcagttcctattccgcctcagttaagggccacaccaccggccttagcctgaacaacgatcggctttacaagctgacatactctactgaagtcttgcttgataggggcaaaggaaagttgcaggattccgtagggtatcggatctcttccaatgtagacgttgccctgttgtggcggaaccccgacggcgacgacgatcagctcattcagatcactatgaaggatgtcaatgttgaaaacgtcaatcagcaaaggggagagaaaagtatctttaagggcaagtcaccttccaagatcatggggaaggagaatctcgaagcgctccagaggccaacgctgctgcatctgatccacggaaaggtgaaagagttttacagctaccagaacgaagcagtcgccattgagaacatcaaacggggactggccagtttgttccagactcagctctcttccggtacaaccaatgaggttgacatttctggcaactgcaaggtgacttatcaggcccaccaggataaagttatcaagatcaaggccctggactcctgcaaaatcgctcgctcagggttcacgacacccaaccaggtgctcggggtgagctccaaggcaacctcagtaaccacctacaagatagaagactcctttgttatcgctgtcctggccgaggagactcacaatttcggtcttaatttcctgcagaccatcaagggcaagatagtgagcaaacagaaactggaactgaagactaccgaggcaggtcctcgccttatgagcgggaagcaggcggccgctatcattaaggccgttgactctaagtacaccgccatccccatagtgggccaggtcttccagtcccattgtaaggggtgcccctctcttagcgagctctggagatccacgcggaaatatttgcagccagataacttgagtaaagccgaggctgtgagaaactttttggcgtttatccagcatctcaggacagccaagaaggaagaaatactccagatccttaaaatggagaataaggaggtgcttccccagctcgtcgacgctgtcaccagcgctcagacatccgattcccttgaggcaatactggatttccttgacttcaagtcagatagcagcattatcctgcaggaacgcttcctgtatgcatgcgggtttgcttcccacccaaacgaggagctgctgagagccctgatctctaaattcaagggaagtatcggctcttctgacatcagggagacagtgatgattatcactggaaccctggtgcggaagctgtgtcagaacgagggttgtaagctgaaagctgttgtcgaggccaagaagctgatactcggtgggttggagaaggccgagaagaaagaggatactcggatgtaccttctcgccctcaaaaacgcactcctgcctgagggcatcccctcactcctcaaatacgctgaggccggcgaggggccgatcagtcatctcgccaccacggctttgcagcggtacgatctcccctttatcactgacgaggttaaaaaaaccctcaatagaatctatcaccagaaccggaaagtgcatgaaaagaccgtgagaactgctgccgcggctataatcctcaacaacaatcctagttacatggatgtcaaaaacattctgctgtctattggagaactgccacaggagatgaataagtatatgctggctatcgtgcaagatattctcaggtttgagatgccagcttccaaaattgtgagaagggtactgaaggagatggtcgcacataactacgaccggttctctagatccggaagttccagtgcttatacagggtatattgaacgatctccacgctccgctagtacatattctctggacatcctgtattccggatctggaattctccggcggtccaacctgaatatattccagtacatcggaaaagcaggtctccatggctcccaggtcgtgatagaggcccagggtctggaggcactgattgcagctaccccagatgagggcgaggagaacttggacagttatgccggtatgtcagccattctcttcgacgtgcagcttcggccggtgacattcttcaacggctacagcgacttgatgagcaaaatgctctcagcgtccggcgatcctatatccgtcgtgaaaggcttgattctcctgatcgatcatagtcaggaactgcagctgcagtcaggccttaaagctaacattgaggtacagggcggtctggcaatcgatatttctggagctatggaattcagtctgtggtaccgggaaagtaagactagagtgaagaacagggtgaccgtggttataacaactgatatcactgtcgacagctctttcgtgaaagctggcctggaaacgagcaccgagacagaggcaggtctcgagtttatcagcaccgtgcagttctctcagtacccgtttttggtctgtatgcagatggataaagacgaagcccccttccgccagttcgaaaagaagtacgagcggctcagcaccggacgggggtatgtctctcagaagagaaaggagtctgtccttgcaggctgtgaattcccgctgcatcaggagaattcagaaatgtgtaaagttgtgttcgcgcctcagcctgactctacctccagtggctggttc

SEQ ID NO: 16855 - DNA, 2682 bp, synthetic construct
  misc_feature 1..2682: note = source = /note="Description of Artificial Sequence: Synthetic coding sequence"
  source 1..2682: mol_type = other DNA
atgattctactcgcggttctgttcctgtgctttatctccagttatagcgcgtcggtgaagggacatacaactggtctgagcctcaacaatgatcggctgtacaaactgacctatagcactgaagtccttcttgatcgcggcaaaggtaaattgcaagattccgtcggctaccgaatcagctctaacgtggatgtcgccctgctgtggcggaaccctgacggagacgacgaccagttgattcagatcaccatgaaggacgtgaacgtggagaacgtgaatcaacaacgcggggaaaaaagcatcttcaaggggaaaagccctagcaaaataatgggcaaggaaaacctggaggccctgcagagacctactctgctgcatttgattcacggaaaagtgaaggaattctactcttatcaaaatgaggccgtcgcaatcgaaaacataaagcgaggtctggcgagccttttccagacccagctgagttctggcactaccaacgaagttgacattagcggtaattgcaaggtcacgtatcaagcacaccaggataaagttatcaagatcaaagctctggacagctgtaagatcgctaggagcggattcaccaccccgaaccaggtcctgggcgtttctagcaaggcaacctctgtgacgacctataagattgaagacagcttcgtgattgcggtgctggcggaggaaactcataacttcggtctgaacttcctgcaaactattaagggcaagatcgtgagcaaacagaagctggaattaaaaactaccgaggcgggtccacgcttgatgagcggaaagcaagccgcagctatcatcaaggcggtggactcaaagtataccgctattcccatcgttggccaggttttccagagccactgcaagggctgtccaagcctgagtgagctgtggcgatcaactcgaaagtacctgcagccagacaatttgagtaaggccgaagcggtgcgcaattttctggctttcattcagcacctgcgcacagcaaaaaaggaggagatcctacaaatcctgaagatggagaataaggaggtcctgcctcaactcgtcgatgcggttacctctgcgcaaacgagcgacagcttggaggcaatcctggattttctggatttcaagagcgattcctcgattattctccaggagagatttctgtacgcctgcggttttgcttctcatccgaatgaggaattgctgcgcgcactgattagcaaatttaagggtagtataggctccagcgatattcgagaaacggttatgattatcactggcaccctggttcggaaattgtgtcagaatgaaggctgcaagctgaaagccgtggtggaggcgaagaaactcattcttggtggtctggaaaaggccgaaaagaaagaagacaccagaatgtacctgttggcccttaagaatgcgctgctccctgaaggcatcccgagcctgctgaaatacgcagaagcgggagaaggcccgattagccacttggccacgacggcactacagcgctacgatctgccattcattactgatgaggtaaagaaaactctgaatcgcatttaccatcagaaccgcaaggtgcacgaaaagacggtgcgcaccgcagctgcagccattatcttgaataacaatccttcttacatggacgtcaaaaacatcctcctgtctattggcgagctgccacaggaaatgaataaatacatgcttgcgatcgtgcaggacattctgcgcttcgaaatgccggccagcaagattgtgcgccgtgtgctgaaagaaatggttgcgcacaattatgatcggttttctcgatccggaagcagcagcgcttacacaggctacatcgaacgctctccacgcagcgcaagcacctattccctcgacattctctattctggtagcggcatcctgcgtcgctccaatctgaatattttccagtatatcggaaaggccggcctgcatggcagccaggtcgttatcgaggctcagggcctggaggcattgatcgccgctaccccagatgaaggagaggaaaatctggatagctacgcgggtatgtctgccatactgtttgacgtccagctacgcccggtgacttttttcaatggctattctgacctgatgagcaagatgctgtccgctagcggcgacccaattagcgtggttaagggccttatactgctgatcgaccactctcaagagctacagcttcagagcggacttaaagccaatattgaggtccaagggggactcgcgatcgacatcagcggtgctatggaattcagcctctggtaccgcgaaagcaagactcgcgtgaagaaccgcgtgacagtggtaattaccacggacattaccgtggactcctcctttgtcaaagcgggactggaaacctccaccgagaccgaagctggcttggagttcattagcacagtacagttttcacagtatccgttcctggtttgtatgcaaatggataaagatgaggccccttttcgccagttcgaaaagaagtacgaacgtctttccacgggtcgaggttatgtgagccagaaacgcaaagaatcagttttggcaggttgcgaattcccactgcaccaagagaactcagaaatgtgtaaggtggtcttcgctccacaaccagacagtaccagttctggatggttc

SEQ ID NO: 16856 - DNA, 2682 bp, synthetic construct; identical to SEQ ID NO: 16838
  misc_feature 1..2682: note = source = /note="Description of Artificial Sequence: Synthetic coding sequence"
  source 1..2682: mol_type = other DNA

SEQ ID NO: 16857 - DNA, 2682 bp, synthetic construct
  misc_feature 1..2682: note = source = /note="Description of Artificial Sequence: Synthetic coding sequence"
  source 1..2682: mol_type = other DNA
atgattcttctggcggtactctttttgtgcttcatcagctcctactctgcaagcgtgaaagggcacacaaccgggctaagcctcaacaacgatagattgtacaaacttacatactcaacagaagtgttattagaccgaggaaagggcaaactgcaggattcagtgggataccgcatctcatcaaacgtggatgtcgccctcctgtggcggaatcccgacggagatgatgatcagctaattcaaataaccatgaaggatgtcaacgtagaaaatgtgaaccagcaaagaggcgagaaatctatcttcaaaggcaaatctccaagtaagataatgggaaaggaaaacctggaggcattgcagcgaccgaccctgctccacctgatacatggcaaagtcaaagagttctactcttaccagaacgaagcagtggctatagagaacattaagagaggcctcgccagtctctttcagacccagctgagctccggcaccaccaacgaagtagacatttctggcaactgcaaggtgacataccaggcccatcaggacaaggtgattaaaatcaaggccctggactcttgtaagatagcacgatcagggttcactaccccgaaccaagtgctaggtgtttccagtaaggccacctccgtgaccacatataagattgaagactcttttgtgatagctgtactggcggaggagacacacaattttggactaaattttttgcagaccatcaaaggcaagattgtttccaagcaaaaactggagctcaaaacaaccgaggccggcccgcggttgatgagtggaaaacaagccgccgccattattaaagcggtggactcaaaatacactgcaattccaatcgtgggccaggtttttcagagccactgcaaagggtgcccgagtctcagtgaactgtggcgcagcacacggaagtaccttcagcccgataacctgagtaaagccgaagcagtgcggaactttctggcgttcattcaacacctaagaacagccaagaaggaggagattctccagatactgaaaatggagaacaaggaagtactgccacagctggttgacgctgtcacgtcagctcaaacatccgacagcttggaggcgattttagattttctggatttcaaaagtgactcttccattattcttcaggaaagatttttatatgcatgcggctttgcctctcatccaaacgaagaactgctaagggcgctgatcagtaagttcaaggggagcattggcagctcggatatcagagaaaccgtaatgattattaccggaaccttggtgaggaagctgtgtcaaaacgaaggatgcaagttaaaggcagtagtggaagccaagaaacttatccttgggggcctagagaaggcggaaaaaaaggaggacacacgcatgtatctgctcgcgctcaagaacgccctgctgccggaggggatcccgtctttgttgaagtacgcggaggctggcgagggacccatttcccacctggcaactaccgctttgcagcggtacgacctcccctttattactgacgaggtaaagaaaacgttgaataggatctaccatcaaaaccgtaaggttcacgaaaagactgtgaggactgctgccgccgctataatactcaataataatcctagctatatggatgtgaaaaacatcctgctaagtataggcgagctgcctcaggaaatgaacaaatacatgctcgctatcgtgcaggatatactaaggtttgaaatgcctgcctctaagatcgtgaggcgggttcttaaggaaatggtggcacacaattacgatagattttctcgaagtggatcgagctccgcttacaccgggtatattgagagatcgccacgctcagcttctacctacagtcttgatattctctatagcgggagcgggatacttcgtaggtcaaatctgaatatctttcagtatatcgggaaagccgggttgcacggttcccaagtggttatcgaagcccaaggattggaagcccttattgcagcaactcccgacgagggcgaggagaatttagattcatatgctggcatgtcggcaattctttttgacgtgcagctccgcccagttacatttttcaacggttactccgacctgatgtccaaaatgttaagcgccagcggagaccccatcagtgtggtgaaggggctgatcctgttgatcgatcattcccaggaactacagttgcagtccggacttaaggccaatatcgaggtgcaggggggcttagctattgacatctccggagccatggaattttctttgtggtatagagagagtaaaactagagtcaaaaatagagtcactgtggtgataaccaccgacataaccgtggactcgagtttcgtcaaggcaggactagagacgtcgaccgaaactgaagctgggttagagtttatcagcacagtacagttcagccagtacccatttctggtgtgcatgcaaatggataaggacgaggcgcctttcaggcagttcgagaagaaatacgaacggcttagcaccggacgcggttatgtgagccagaaacggaaagaaagcgttttagccgggtgtgagttccccctccaccaggaaaactcagagatgtgcaaggtggtgtttgctccccagccagactcgaccagtagcgggtggttt

SEQ ID NO: 16858 - DNA, 2682 bp, synthetic construct
  misc_feature 1..2682: note = source = /note="Description of Artificial Sequence: Synthetic coding sequence"
  source 1..2682: mol_type = other DNA
atgattcttcttgcggtactgtttctgtgcttcattagctcctatagcgcttctgtcaagggccatactacaggtctaagcctcaacaacgatcggctgtataaactcacttattctacagaggttctgctcgaccggggaaaggggaaacttcaggactcagtgggttacaggatttcatctaatgtcgatgtcgcccttctctggcgaaacccagatggggacgacgaccagctcattcagattaccatgaaggatgtgaacgttgagaatgttaaccagcagcgaggggagaagagcattttcaaaggcaagagtccgagtaagatcatggggaaggaaaatctggaggccctgcagcggcccactctcctgcacctaatccacggcaaggtgaaggaattttattcttaccaaaatgaagctgttgccatcgaaaatattaagagaggactcgcttctctgtttcagacccaactctcatctggtaccactaatgaggttgacatatcaggaaattgtaaggtcacttaccaggcccatcaagataaagtaataaagattaaggcgttggacagttgtaagatcgctcggagtggcttcaccactcctaaccaggtgctcggcgtcagctcaaaagctacgagcgtaactacctacaagatcgaggatagtttcgtcattgccgtactggcagaggaaacccataattttggccttaatttcttgcaaacaattaagggaaaaatcgtgtcaaaacaaaagctcgaactgaagactacggaggcaggtccccgattgatgagcggcaagcaggccgctgctatcataaaagccgtcgacagcaaatacacagccatacccatcgtgggccaagtctttcagtcacactgtaaaggctgcccttctttgagcgaactctggcgttccacccgaaagtatctacagcccgataacctgagtaaggccgaagcggtgaggaacttcctggcatttatccaacaccttcgcacggcaaagaaagaagagatccttcaaattttgaagatggagaataaagaggtgctccctcagttagtggacgctgtgacaagtgcacaaacgtccgattcccttgaggccattttggatttcctggactttaaatccgatagctccataatcctccaggaacggttcctgtacgcttgcggtttcgctagtcaccctaatgaagagctcctaagggcattaatcagtaaattcaaagggagcatcggctccagcgacatcagggagacggtcatgataatcactgggaccttagttcgaaaattgtgtcaaaacgaagggtgcaagttgaaggccgtggtggaggccaagaagctgatcctgggaggactagagaaggctgagaagaaagaggataccaggatgtatctgttggccctcaaaaatgccctgctgccggaaggcataccttccctactcaagtatgccgaggctggagagggccctataagccacttggcgaccactgccctacaacgatacgatctccccttcataaccgatgaagtcaagaagactctcaatcgtatttatcatcaaaaccggaaagtgcacgagaaaacggttagaacggcagccgctgcaatcatactcaacaacaacccttcctatatggacgtcaaaaacatattgctgtctatcggggagctccctcaagagatgaataagtacatgttagccattgtgcaagacattctgagattcgaaatgcctgcaagtaaaatagtgaggcgcgttctgaaggagatggtggcccacaactacgaccgctttagtagatccggttcatcttcggcatacaccggctatattgagcgcagcccccgaagtgcttcgacatatagtctggacatcctgtacagcggctctggcattttgaggagatcaaatctgaatatttttcagtatatcggaaaggcaggccttcatggatcccaggtggtgattgaggcgcaaggactagaggccctaatcgccgcaactcctgatgaaggggaagaaaacctggacagctacgctggcatgtctgcaattctgttcgatgttcagctacgcccagtaacctttttcaacggctactcagacctaatgagtaagatgttgagtgcctctggcgaccccatcagcgttgtgaaagggctcatcctgctgatagaccatagccaagagctccagctccagtcaggattgaaggccaatatagaggttcagggggggctagctattgacattagtggcgcaatggaattctccctttggtaccgcgaatctaagactagagtgaagaacagagtaaccgtggtgataaccactgatatcaccgtggattcatcattcgttaaggcgggactggagaccagcacagagacggaggccggactggagttcatttccactgtgcagttcagccagtatccattccttgtctgcatgcagatggataaagacgaggcgccattcagacagtttgaaaagaagtacgagagacttagcacagggaggggttacgtaagccaaaaaagaaaggaatctgtgctggccggctgcgaatttcccctccaccaagaaaatagtgagatgtgcaaagtggtgtttgctcctcagcctgactctacttcaagcggctggttc

SEQ ID NO: 16859 - DNA, 2682 bp, synthetic construct
  misc_feature 1..2682: note = source = /note="Description of Artificial Sequence: Synthetic coding sequence"
  source 1..2682: mol_type = other DNA
atgattctcctggctgtgttattcctgtgctttatttcatcttatagtgctagtgtgaagggacatactactgggctttccctcaacaacgatcggctctacaaactcacatactcaactgaggtgcttctagaccggggaaaagggaaactacaggacagtgtcgggtatcgcatctcatctaatgtggatgttgcactgctttggaggaacccagatggagatgacgatcagctcatccagataacaatgaaagatgtgaatgtggaaaacgttaaccagcagcggggggaaaaatcaatattcaaagggaaatctcctagtaagataatggggaaagaaaatctggaagccctacagaggcccactttgctacatctcatacacgggaaagtgaaagagttctattcttatcagaacgaagctgtggccatcgaaaatataaaacggggactcgcctctctgttccagacacagctttcttctgggacaactaatgaagtcgatatctcaggaaactgtaaagtgacatatcaggctcatcaggataaagttatcaaaataaaagccctcgattcttgcaaaatagcaagatccgggttcacgacacctaatcaagtgctaggggtatcttcaaaagctacttccgttacaacttataaaattgaggattcctttgtcatcgcggtcctcgctgaggaaacacataatttcggactcaactttttacagactatcaaagggaaaatcgtgtctaaacagaagttagaacttaaaacaacagaggcagggccaaggctcatgagtggaaaacaggcagctgctattatcaaagctgtggatagtaagtatactgctatcccaatcgtggggcaggtgtttcaatctcattgtaaggggtgtcccagtctcagtgaactgtggcggagtactagaaagtatcttcagccagataacctgtccaaagccgaagccgttagaaattttcttgcttttatccagcatttacgcacagccaaaaaggaagaaatcctgcaaatacttaaaatggaaaacaaagaagtgctccctcagttagtcgatgctgtcacatccgctcagacttccgattctctcgaggctatactcgattttctggattttaaatctgatagttccatcatcctgcaagaacgtttcctctatgcttgcgggtttgcttcacatcctaatgaggaactccttcgcgccctaataagtaaatttaagggatccatcgggtcttcggatatccgggaaacagttatgataattacagggactctcgtgcgaaagctttgccagaatgaaggatgtaaactcaaagcagtggttgaggctaaaaaactgattctgggggggctagaaaaggcagagaaaaaagaagacacacgcatgtatctcctcgctcttaaaaacgcacttctgcctgaaggaattccctcgctcttgaagtacgcagaggctggagaagggcctatatcgcaccttgctactacagctttacagcggtacgacctcccttttatcactgatgaagtaaaaaaaacactgaaccggatttaccaccagaacagaaaagtgcatgagaaaacagtgagaacagctgccgctgccataatactaaacaataatcccagttacatggatgtaaaaaacatcctgttaagtatcggggaactgccccaggaaatgaataagtatatgctagccattgtgcaggatatactcaggttcgaaatgccagctagtaaaattgtgaggcgagtgctaaaagagatggtggcacataattatgataggttttctcgctcaggatcctcttccgcatatacaggatacattgagcgttctcccagatcggcttcgacttacagtttggacatcctgtattccgggtccggaatccttaggcggagtaatctcaacatcttccagtacataggaaaggccggactacacgggtctcaggtggtgatagaagcccaaggactagaagcacttatagccgctacacctgatgaaggggaagaaaacctggattcctatgcaggaatgagtgccatactgtttgatgtacagttaagacctgttacatttttcaatgggtactcagacctcatgtccaaaatgctgagtgcctcaggagatcccataagtgtcgtgaaaggacttatactcctgatagatcatagtcaggaattacagctccagagtggactcaaagccaatattgaagtccagggagggcttgccattgatatctctggggcaatggaattctcactctggtatcgggaatctaagactcgtgtaaaaaacagggtgactgtggttattacaactgatatcacagtggatagttcttttgtgaaagccgggctcgaaacttccactgagactgaagccggactagaatttatctctacggtgcagttttcccagtacccctttctggtctgcatgcagatggataaggatgaagccccttttagacagtttgaaaagaaatacgagcggttgtcaactggacggggatacgtatctcagaaacggaaagaatccgttctcgcaggatgcgaattcccacttcaccaggagaattctgaaatgtgtaaagtggtttttgctccacaacctgattctacttcctccgggtggttt

SEQ ID NO: 16860 - DNA, 2682 bp, synthetic construct
  misc_feature 1..2682: note = source = /note="Description of Artificial Sequence: Synthetic coding sequence"
  source 1..2682: mol_type = other DNA
atgattcttctggcagttctgtttttatgctttatcagcagttatagcgcatccgtgaaaggacacacaaccggcctgtccctcaacaacgacagattgtataaacttacctattcaaccgaagtgcttcttgacaggggcaagggcaaattgcaggactccgtgggctacaggatttctagcaacgtggacgtggctcttctatggaggaatcctgatggagacgatgaccagctgattcagatcaccatgaaagacgtgaacgtcgaaaacgtcaaccagcaaaggggggagaagagtatcttcaaaggcaaaagcccttctaagatcatgggaaaggaaaacttggaagcgttgcaaaggcctaccctgctgcacctgatccatggaaaagtcaaagagttctacagctatcaaaacgaggccgtggcgattgagaatataaagcgcgggctggcctcgctcttccagacccagctgtcttcagggacaacaaacgaagtggatattagcggaaactgtaaggtcacctatcaagctcaccaggacaaggtgatcaagatcaaagctctggattcgtgcaaaatcgcaagatctggattcaccacccctaatcaggtgctgggcgttagtagcaaagccacaagcgttacgacctacaaaatcgaagacagctttgtgatcgctgtccttgctgaggaaactcacaattttggcttgaacttccttcagacaatcaaaggaaagatcgttagcaaacaaaagctcgaattaaagaccaccgaggccggacctaggctgatgagtggcaaacaggccgcggctataataaaggctgtggatagtaaatacacagctatccctattgtcggccaggtttttcagtcacactgcaagggatgtccttctctgtctgaactgtggagatcaacaagaaagtatctgcagcctgataacttgtccaaggctgaagctgtccgcaatttcctggcattcatccaacacctaagaactgccaagaaagaagagatactccagatcctcaagatggaaaacaaggaggtgctaccgcaacttgtggatgctgtgacaagcgcacaaacgtcagacagccttgaagcaatcctggatttcctcgacttcaaatctgatagctccataatcctgcaagaaagatttttatatgcctgtggcttcgcttcccatcctaacgaagaactcctgagagccctcatatctaagttcaaggggtctatcggaagctcagacatcagagaaaccgttatgatcatcactggaacactggtcagaaaattatgccaaaacgagggatgcaagctgaaagccgtggttgaggccaaaaaactgatcctcggcggcctcgaaaaggctgagaagaaagaagataccaggatgtacttgttggctttgaaaaatgctcttctgcctgaaggcatcccttccctgcttaagtacgccgaggctggcgagggacctatctcccacttggctaccactgcgttgcagcgctatgacctgccttttatcaccgacgaggtcaagaagacactcaatcgcatttatcatcaaaataggaaggtgcacgagaagacagtgcgtacggctgcagctgctatcatactgaataataacccgagctacatggacgtcaagaacattctgctcagtatcggcgagctgccacaggagatgaacaagtacatgcttgccatcgtccaggacatcctgagattcgaaatgcccgctagcaaaattgtcaggcgtgtgctcaaggaaatggtggctcacaattacgataggttctcccgcagtggcagctcatctgcttacactggatacattgaaagatctcctagatctgcatccacatacagtctcgacatcttgtacagtggcagcgggatacttcggagatcaaatctgaacatctttcaatacattgggaaggccggactgcacggcagccaggttgtgatcgaggcccaaggactggaagcacttattgcggccacacccgacgagggggaagagaacctcgattcttacgctggcatgtctgctatcctgttcgatgtccaactccgaccagtcacatttttcaacgggtatagtgatcttatgagcaaaatgctcagtgccagcggggatcctataagcgtggtaaaaggcctgatccttctgattgatcacagccaagaacttcaattgcagtccgggttaaaagctaatatcgaggtccagggcggcttggcaatcgatataagcggggccatggagttcagcctctggtaccgcgagtctaaaaccagggtgaagaatagagtcactgttgttatcaccaccgatattactgtagacagcagcttcgtgaaggcagggcttgaaacgagcactgagaccgaggctggattggaattcataagcacagttcagttctcacaatatcccttccttgtttgcatgcaaatggacaaagatgaggctccttttcgccaatttgagaaaaaatacgaacggcttagtaccggccgcggatacgtgagccaaaaacgcaaagaaagtgttctggccggatgtgagtttccactccaccaggaaaactctgagatgtgtaaagtcgtattcgctccacagccagatagcactagcagtggctggttt

SEQ ID NO: 16861 - DNA, 2682 bp, synthetic construct
  misc_feature 1..2682: note = source = /note="Description of Artificial Sequence: Synthetic coding sequence"
  source 1..2682: mol_type = other DNA
atgattctgctcgcggttctcttcttgtgctttatatcaagctatagcgcttcggtgaagggacacaccacgggtctgagcctgaataatgaccgactatacaaactgacgtattcaacagaggttctgctggatcgcgggaagggcaaactacaagatagcgttggctatcgcattagcagcaacgtggatgttgcattactgtggaggaaccccgatggggacgacgaccagctcattcaaattaccatgaaagacgttaatgtagaaaatgtaaatcaacaacgcggtgaaaagtccatctttaagggtaaatcgccatctaagataatggggaaagaaaatttggaggccctacagcggccaactctgctgcatttaatacacggaaaggtgaaagaattttatagctaccaaaacgaagctgtggctattgagaacatcaagcgcgggttggcttccctgtttcagacccagttgtcgagtggaactactaatgaggttgacatttctgggaattgcaaggtcacctatcaggcgcaccaggacaaagttatcaagattaaagctctcgatagttgtaagattgcccgatccggattcaccacgccgaatcaggtcctgggtgtgtctagcaaagctacaagtgtcacaacttacaaaatagaggattcctttgtgatcgcagttctggcagaggagacccacaactttggcctaaacttcctgcagacaattaaaggcaaaatcgtgtctaagcagaagctggagctgaagactaccgaggctggcccacggttgatgagcggcaagcaagccgctgccatcataaaagcagtggattcgaaatacacggccattccgatcgtgggacaggtgttccagtcccattgtaaaggttgtcccagcctatcagaactctggcggtctacacgtaaatacctccagcctgataatttgtccaaggctgaggcagtccgaaacttccttgctttcatccaacacttgaggactgccaagaaagaggaaattctgcagatcctgaaaatggaaaacaaggaagtccttccacaactcgttgacgcggtgacgtctgcccagacatcagatagccttgaggccatactggactttttggacttcaagagcgactcaagtatcatcctgcaggaaagattcctgtatgcttgcggttttgctagccatcccaatgaggagctcctacgggctctgatctctaagttcaagggctctattgggagctctgatataagggagaccgtaatgatcattactggtacactggttagaaagctgtgtcagaatgagggctgtaagctaaaagccgtggtcgaggcaaaaaagctgatactcggcggcctggagaaggccgaaaaaaaagaggacaccaggatgtacctgctggccctgaaaaacgctttgctgcccgagggaatacccagccttttaaaatacgcagaggcgggagagggcccaatctcccacttggctactaccgcgttgcagaggtacgacctgccatttatcaccgacgaggtcaaaaagacccttaaccgcatataccaccagaatcgaaaagtgcatgaaaaaactgtgcggacagccgctgctgcaatcatcctcaacaataacccgagctatatggatgtgaagaacatcctcctatctatcggcgaactgccgcaggaaatgaataagtatatgcttgccattgtgcaggacatcctgcgatttgagatgccagcctccaaaattgtgaggcgagtgctgaaagagatggttgctcacaactatgatcgcttttctagaagtggatcatcctcagcatacacagggtatattgagcggtcaccccgctcagcatccacctatagcctcgacatactctacagtggctctggcatcttgaggcgtagcaacctcaatattttccaatatattggaaaagcgggactgcacggcagtcaggtagtcatcgaagcacaggggctggaggcacttattgccgcaacccctgacgaaggagaggaaaatctggactcttacgcaggcatgtcggcgattctcttcgatgttcagctccgtccagttactttcttcaatggttatagcgatcttatgagtaaaatgctctccgcatcgggagaccctattagtgtagtgaaaggactcatcctactcatcgaccactcccaggagctgcaactgcagtcagggctgaaagctaacattgaggtccaggggggactggctatagatattagtggcgctatggagttcagcctctggtaccgcgagagtaagactagagtcaaaaatcgggtcacagtagtgatcacaactgatattaccgtcgacagttccttcgtgaaggcgggcctggagacatctacagaaactgaagccggcttagaattcatcagcacagttcagttcagccagtacccctttttggtttgtatgcaaatggacaaggacgaggccccatttcgccaatttgaaaaaaaatatgagagactctcaactggaagaggctatgtgagccagaagaggaaggaatccgtcctggccggttgcgaatttccattacaccaagaaaattctgagatgtgcaaggtcgtcttcgctcctcagcctgacagcacttcaagcgggtggttc

SEQ ID NO: 16862 - DNA, 2682 bp, synthetic construct
  misc_feature 1..2682: note = source = /note="Description of Artificial Sequence: Synthetic coding sequence"
  source 1..2682: mol_type = other DNA
atgatcctgctggctgtattgttcctttgtttcatttcttcatactcagcatctgtaaaaggtcacacaaccggcctgtccctcaacaacgaccgtttgtacaagctgacatactctactgaagtactccttgaccgcggcaagggtaagctccaagattcagtgggctatagaatatcctctaacgtcgacgtcgccctcctctggaggaacccagacggtgatgacgatcagttgattcaaatcaccatgaaggacgtcaatgttgagaacgtaaaccaacaaaggggtgaaaaatccatcttcaaaggcaaaagtccttcaaaaatcatgggcaaagagaacctcgaggccctgcaaaggcccaccctgctgcatctgatccatggaaaggtgaaggaattctacagttaccagaacgaggccgttgccattgagaatattaagagaggactcgcaagcctctttcaaactcaacttagtagcggcactaccaacgaagtggatatttctggaaactgcaaggtgacctaccaagcacatcaagataaggtcatcaagatcaaagctctggattcttgcaaaatcgccaggagcggattcaccacccccaatcaagtcttgggtgtaagctccaaggctacaagcgtcacaacatataagattgaggactctttcgtgatcgccgtgctcgccgaggagacacacaacttcggactgaatttcctgcagacaatcaagggtaagattgtctctaagcaaaagctcgagctgaagaccaccgaggctggcccacgcctcatgtctggcaagcaggcagcagctatcattaaggctgtggactctaagtatactgccatcccaatcgtgggccaagtttttcaatcccactgtaaaggatgcccctcactctccgaattgtggcgctccactcgtaaatacctccaaccagataacctttccaaggctgaagctgtccgcaactttttggccttcattcagcacttgaggactgccaagaaggaggagatcctccaaatattgaagatggaaaacaaggaggtcctgccacagcttgtcgacgctgttacctccgctcaaacttctgactctttggaagcaatacttgacttcttggattttaaatccgacagttccattatactgcaagagagattcctgtatgcctgcggtttcgcttcccacccaaacgaggagctgctgcgtgccctgatttctaagttcaaaggtagtataggatctagcgacatcagagaaaccgtgatgataatcacaggaacacttgtaaggaagctttgccagaacgaaggttgcaagctgaaggctgtggtagaggctaagaagctgattctgggtggtcttgagaaggctgagaagaaagaggatactcgcatgtacttgctggcattgaagaacgctcttctgcctgagggaattccctcattgctgaaatatgctgaagctggagagggtcccattagccatttggccactactgcccttcagagatacgacctcccatttataacagatgaagtaaaaaagacattgaacaggatctaccaccagaaccgcaaggtacacgaaaagacagtgcgcacagccgctgcagctatcatactcaacaacaacccctcatacatggatgtcaagaacattttgctctctattggagagctgccccaggagatgaacaaatatatgctggctatcgtgcaagacatcctccgctttgaaatgcctgctagtaagatcgtacgcagggttcttaaagagatggttgcccataactacgaccgtttctcccgttctggcagctcaagtgcctacactggctacattgagcgcagccctaggtccgccagcacttactccctggacatattgtactccggcagtggaatccttcgccgtagtaatctcaacatatttcaatacataggcaaggccggcctgcacggctcccaagtcgtcatcgaggcccagggacttgaggctcttatagcagccacaccagacgagggtgaagagaacctggactcatatgccggtatgtctgctattctcttcgacgttcagctgagaccagtcaccttctttaatggctattccgatcttatgagcaaaatgttgtcagctagtggtgacccaatatccgtggttaagggcttgatcctccttattgatcactcccaggagcttcagctgcaatcaggcctgaaggcaaatatagaagtccagggcggcttggcaatcgatatcagtggtgccatggagttttccctctggtatcgcgagtctaagaccagagtaaaaaaccgcgtgaccgtggttataactactgatatcaccgttgactcttctttcgtgaaagcaggcttggaaacatctacagaaaccgaggctggcctcgagttcatttccactgttcagtttagtcaatacccctttctcgtatgcatgcagatggacaaggacgaggctccttttcgtcaattcgagaagaagtatgaaagattgtccacaggacgtggctacgtctctcagaagaggaaggagtcagtcctggcaggttgcgaattccctttgcaccaggagaattccgaaatgtgtaaagtagtgttcgctccacagcctgattctactagctcaggatggttc

SEQ ID NO: 16863 - DNA, 2682 bp, synthetic construct
  misc_feature 1..2682: note = source = /note="Description of Artificial Sequence: Synthetic coding sequence"
  source 1..2682: mol_type = other DNA
atgatactgctcgctgtgctgttcctctgctttattagtagttattcagccagcgtgaagggtcacacgaccggtctgagcctgaacaatgatcggctttacaagctcacctactctacagaagtacttctggaccgaggtaaggggaagcttcaagattcggtggggtaccgaatttcgtcaaacgtagacgtggctctcttgtggcggaacccggatggagacgacgaccaactgatccaaataactatgaaagatgtgaacgtcgagaatgtaaaccagcaaaggggcgagaaatcaattttcaaaggcaagtctcccagcaagattatgggaaaggagaatcttgaagctctccaacggcccactttgctgcacctaatccatgggaaagtgaaggaattctactcttaccagaatgaagccgttgcaatcgaaaatattaaacggggcctagcttccctgtttcaaacccagctcagttcaggcaccacaaatgaagtagatatttccgggaattgcaaggtgacctatcaggcacaccaggataaagtcatcaaaataaaggctttggactcctgtaagatcgcacgctcaggcttcacgactcccaaccaggtgcttggtgtcagcagcaaagcgaccagtgtgactacctataagattgaagactccttcgtcatcgcagtgttggccgaggaaacacataacttcgggttgaactttcttcagaccataaagggaaaaatcgtcagcaaacaaaaattagagctcaaaaccaccgaagctggcccaaggctcatgagcggtaaacaagcggcagctatcataaaagccgtggattcaaaatacacagctatccccatcgtggggcaggtgttccagagtcactgcaaaggatgtccctctctgagcgaactgtggaggtctacgcggaagtacctccagccagacaatctctccaaggctgaagccgtccgtaactttttggcctttatacagcacctacgaacggccaaaaaggaggaaattttgcagatcctgaaaatggagaataaagaggtgctgccgcagctagtggacgccgttacgtcagcccagactagtgattctctggaggctatcttggactttctcgacttcaaatccgatagcagcataatccttcaggagcgtttcctttatgcatgcggcttcgcatctcaccctaatgaagaactgttacgcgccctcatcagtaagttcaaaggttcaattggctcctctgacataagggagaccgtgatgatcataactggaacactcgtgcggaagttgtgccaaaacgagggctgcaagctgaaggccgtagtggaagctaagaagctgattttaggcggcctcgaaaaggccgaaaagaaagaagatactcgaatgtatttactggcactgaaaaacgctctgttgcccgagggcattccatctctgcttaaatacgcagaagccggagagggacctatctctcatctcgccactacagctctccagaggtacgatctcccatttattaccgacgaggtgaaaaagaccttaaacagaatctatcaccagaatcgcaaagttcacgaaaagacagtgagaaccgccgctgccgcgattatcctgaataataacccctcttacatggacgttaagaacattctgcttagcattggtgagctgccacaggagatgaacaagtacatgctggccatcgtgcaggacatcctcaggttcgagatgccggcgtcgaagatagtgagacgtgtgctgaaggagatggtggcgcacaactacgaccggttctcacgctcaggctctagctccgcatacaccggatatatcgagagatcacccaggagcgccagtacatactcactggatatattgtactctggaagcggtatccttcggcgcagcaatctcaacatctttcaatacattggcaaggccggactgcacggctctcaggtagtaatagaggcgcagggcttggaagcgctgattgctgcaacccccgatgagggggaggagaatctggattcctacgctggcatgtctgccattctgtttgatgtgcagctcagaccagtgacatttttcaatggctactccgatcttatgtctaagatgctgagcgcatctggtgatcctatcagcgtggtgaagggactgatactcctgatcgaccactctcaggagcttcagttgcagtcaggcctcaaggcaaacatcgaagtacagggcgggcttgcaatcgacatcagcggtgccatggagttctccctctggtaccgtgaatctaagacacgcgttaagaatcgcgtgacagtggttattacaacagacattaccgttgacagctcctttgtgaaggcaggcttggagacatccaccgaaacagaggcggggctggagtttatatctactgtccagttctcccagtatccgttccttgtatgtatgcaaatggataaagacgaggccccctttcggcagtttgagaagaagtacgaaaggctttctactggtagagggtacgtatcccaaaagagaaaggagagtgtgctggctgggtgcgagttccctttacaccaggagaacagcgagatgtgtaaggtggtgtttgccccacagccagattccactagttctggatggttt

SEQ ID NO: 16864 - DNA, 2682 bp, synthetic construct
  misc_feature 1..2682: note = source = /note="Description of Artificial Sequence: Synthetic coding sequence"
  source 1..2682: mol_type = other DNA
atgatcctgctggcggtgctgtttctgtgctttatctcatcatactccgcgtcggtcaagggtcatactacgggattgtcgctgaacaatgaccgactctacaagctgacctattcgacggaagttttgctggatcgcgggaagggaaaactgcaagactccgtgggataccgcatttcctccaatgtcgacgtggccctcttgtggcggaatcctgatggagatgacgaccagctcatccagatcaccatgaaggacgtgaacgtggaaaacgtgaatcaacagcggggcgagaagtcgatcttcaaggggaagtcccctagcaaaatcatggggaaggagaacctggaggccctgcaacggccgacgcttctgcatctgatccacggaaaggtaaaagagttttactcgtatcagaatgaggccgtcgcgattgagaatatcaagcgcggacttgcatcactgttccagacccagctgtcgtccggtactaccaacgaggtcgacatctcaggcaattgcaaggtgacctaccaagcccaccaggacaaagttatcaagatcaaggccctcgactcctgcaaaatcgcgaggtctggattcaccacccctaaccaagtgttgggggtgtcgtccaaggcgactagcgtgactacttacaaaatcgaggactcctttgtgattgccgtgctggcggaagaaactcataactttggtttgaacttcctgcaaaccatcaagggaaagattgtctccaagcagaagctggaactcaaaactaccgaagctggaccgcgccttatgtcaggtaagcaggcagccgccattatcaaagctgtggactcgaagtacactgccatcccgatcgtcggtcaggtgttccagtcgcactgcaagggctgcccatccctgtccgaactctggaggtcgacccggaagtacctccagcctgataatctctcgaaggccgaagcggtgagaaacttccttgcgtttatccagcacctgagaaccgcaaagaaagaagagatcctgcagatcctgaagatggagaataaagaagtcctgccacagcttgtcgacgccgtgaccagcgctcagactagcgacagtctcgaagctatattggacttcctggatttcaaatcagatagcagcatcatccttcaggaaaggttcctgtacgcctgtggcttcgcctcacacccaaacgaagaactgcttcgcgccctgatctccaagttcaagggaagcatcggaagctcagacattcgggagactgtgatgataattactggcaccctggttcgcaagctgtgccaaaacgaagggtgtaagctgaaggcagtggtggaagccaagaagctgatcctgggcggcctcgagaaagccgaaaagaaggaagatactcgcatgtacctcctggctctgaagaacgccctgctcccggaaggaatcccgtcattgcttaaatacgccgaagcaggagaaggaccgatctcgcacctcgctaccaccgctctgcaaaggtacgacttgccctttatcactgatgaggtcaaaaagaccctcaaccggatctatcatcagaacagaaaagtccacgaaaagactgtgcgcactgctgcggccgcgatcatcctgaataacaacccgagctacatggacgtgaagaacatcctgctgtcaatcggagagcttccacaagaaatgaacaagtacatgctggcaatcgtccaggacattctcaggtttgagatgccggccagcaagatcgtgcggcgggtgctgaaggagatggtggcccacaactacgaccgattttcaagaagcggatcgtcgtcggcgtacacggggtacatcgagagatcgccgcgctctgcgagcacgtactccctggatatcctctactcgggtagcggcatcctcagaagatccaacctcaacatctttcaatacatcggaaaggcaggcttgcatggatcgcaagtggtcattgaggcgcaagggctcgaggcactcatcgcagcgaccccagatgaaggagaggagaatctcgactcttacgcaggcatgagcgcaatcctgttcgatgtccaactccggcccgtcactttcttcaatggatactccgatctcatgtcgaagatgttgtctgccagcggagatcccatcagcgtggtgaaaggactgattctgctgatcgaccattcacaggaactccagctgcagtcaggcctcaaggctaacattgaagtgcagggaggactggccatcgacatcagcggtgcaatggagttctccctttggtaccgtgaaagcaaaacccgcgtcaagaaccgcgtgaccgtggttattaccaccgatatcactgtcgactcgtcattcgtcaaggcggggctggaaacttcaactgaaaccgaggctggattggaattcatctccaccgtgcagttctcccaataccctttcctggtgtgcatgcagatggacaaagatgaggctccattcagacagttcgaaaagaaatacgaacggctgtcgactggccggggctacgtgtcccagaaacgcaaagagagtgtcctcgccggctgtgaattcccgctccaccaagagaattccgagatgtgcaaggtggtgttcgcaccacaaccggattcaacgtcgagcggatggttc

SEQ ID NO: 16865 - DNA, 2682 bp, synthetic construct
  misc_feature 1..2682: note = source = /note="Description of Artificial Sequence: Synthetic coding sequence"
  source 1..2682: mol_type = other DNA
atgatactcctggctgtgctctttctctgcttcataagcagttatagcgcgagcgtgaagggccacacaaccggcctctccctgaataacgaccgcctctacaagctgacgtattctactgaagtcctcctggaccggggtaaaggcaagttgcaggacagcgtaggataccgaataagtagcaacgtggacgttgctctcctctggaggaatccagatggcgacgacgatcagttgattcagatcaccatgaaagatgtaaatgtggaaaatgtgaaccagcagcgaggagaaaaatctatttttaagggcaagtccccttctaagattatgggtaaagaaaatctggaggcactgcaaaggccaacactgctacacttaattcatggcaaggtaaaggagttttactcttatcagaatgaagccgttgcgatagagaacatcaagaggggcctggcgtccctgtttcaaacacagttgtcttctggcactacaaatgaggtggatatatcaggaaattgcaaggttacatatcaggcccaccaggataaggttattaagattaaggcattagatagctgcaagatagcaaggtctgggttcacaacaccaaaccaggttcttggggtctcttcaaaagctaccagtgttaccacatataagatagaagattcatttgtgatcgcagttttggccgaggagacccacaacttcggcctgaattttctacagactatcaaaggtaagattgttagcaagcaaaaacttgagctcaaaacaaccgaggctgggcctagactaatgtccgggaaacaggcagctgctatcataaaggccgtggatagcaagtacactgcaatccctattgtagggcaggtatttcagagtcattgcaagggatgccctagcctgtccgagctctggcgatctacccggaaatatttgcagcccgacaacctgagcaaagcagaggctgttcgaaactttcttgcttttatacaacacctgcggactgcgaagaaggaggagattctgcagatccttaagatggaaaacaaggaggtgcttccccagctggtggacgcagtgacatcagcccaaaccagtgactcactcgaggcaatactggacttcctggattttaaatccgacagctctataatcttacaggagaggtttctgtatgcttgcggctttgcaagccaccccaatgaggaactgttacgcgccttaatttctaagtttaagggatcaatcggatcgtcggatataagggagactgttatgattattaccggcaccctggttaggaagctgtgtcagaatgaaggatgcaagctgaaggcggtggttgaggcgaaaaagctaatcctgggggggctggagaaagccgagaagaaagaggatacacgaatgtatcttcttgctctgaagaacgcgctgctgccagaaggcattccaagcctactgaagtatgcggaggctggagagggcccgatctctcacctagccacaacagccctgcagagatacgacctgccttttattacagatgaggtgaagaagaccctcaatcgtatataccaccagaatcgcaaggttcacgaaaaaaccgtgagaaccgctgccgcagctatcatcttgaataacaacccatcttatatggatgtcaagaatattctgctttccatcggagagctgccccaggaaatgaacaagtatatgctcgcaatcgttcaggacatccttcgcttcgaaatgcctgcatcaaaaattgttcgcagggtgctgaaggagatggttgctcacaactatgatcgctttagcagatcaggtagctcatcagcctacactggctatatagagcggtcccctcggtccgctagtacttacagcctagacattctctattccggttccggtatccttcggcggtcaaacttgaacatctttcagtatatcggcaaggccgggctgcatgggagtcaggtggtgattgaggcacagggcctggaagcattgattgccgccactcctgatgaaggcgaagagaacctcgacagctatgctggcatgtctgctattcttttcgacgtccaactgcggccagtaacatttttcaatggctacagtgacttgatgtctaagatgctatccgcgagtggcgaccctattagtgtcgtgaagggactaatcctgctgattgatcatagccaggaactgcagctccagtccggactgaaggctaatatcgaagtgcagggtggtctggcaatagatatttcgggagctatggagttcagcctttggtaccgggagtctaagacacgcgtcaagaaccgcgtgactgtggtgatcacaactgatatcacagtcgacagctcttttgtgaaagctgggctcgaaacatccacagagactgaggcagggttggaatttatttccacagtccaattttcccagtacccatttcttgtgtgtatgcagatggataaagatgaggctcccttccgtcagtttgaaaagaagtacgaacgactcagcaccgggcgcggttacgtgagccagaaacgcaaggaatcagtcctggctgggtgcgagtttccactgcaccaggaaaactctgagatgtgcaaggttgtgtttgccccacaacccgattccacaagtagcgggtggttt

SEQ ID NO: 16866 - DNA, 2682 bp, synthetic construct
  misc_feature 1..2682: note = source = /note="Description of Artificial Sequence: Synthetic coding sequence"
  source 1..2682: mol_type = other DNA
atgattttgcttgccgttctgttcctgtgttttatcagctcttactctgcgagtgtcaagggccacacgactggtttgtctctgaacaacgatcgcctgtacaagttgacttattccacggaggtgcttctcgaccgcggtaaaggtaaactgcaggatagcgtgggctatcgcatttcttccaacgtcgatgttgctctcctctggcgcaaccctgatggagacgacgaccaactcatccaaattactatgaaggatgttaatgtggagaacgtgaatcagcagagaggtgagaagtccatttttaaagggaagagccccagcaaaatcatgggtaaggaaaatctcgaagctcttcaaaggcccacattgctgcaccttattcacggtaaggtgaaagaattctattcttaccaaaatgaggcagttgctatcgagaacatcaagagaggactggcatcactcttccagacacaactgagctctggtacgacaaatgaagttgatatttcaggcaactgtaaggttacctaccaggcccatcaggacaaagttatcaagatcaaagcacttgacagctgcaagatcgcccgctccgggtttactacacctaaccaggtcctcggtgtctcatccaaagcaaccagcgtgacaacctataaaatcgaggattcattcgtgatcgctgtgctggccgaagagacgcacaattttggactgaactttctccagacaattaaaggaaaaatcgtgagcaagcaaaagttggaattgaagacaaccgaagcaggaccgcggctcatgtcaggtaagcaggccgccgccataattaaagcagtggatagtaaatacacagccatccccatcgttggacaggtctttcagtcacactgcaaaggctgtcccagtctttccgaactgtggcgctccacccgaaagtatctgcagcctgacaacctctcaaaagcggaagcagtgcggaatttcctggccttcattcagcacctccgcacggccaagaaggaggagatcctccagattctcaagatggagaacaaagaggtgttgccccaactggtcgacgctgtcacttctgcacaaacatctgattctctggaggcaatattggactttctggatttcaaaagtgacagttcaataattctgcaagagcgattcctctatgcctgcggttttgccagtcatcctaatgaagagcttcttcgggcactgataagcaagtttaagggtagcatcggctccagtgacatccgagaaactgtcatgatcattacgggtactctggtaaggaaattgtgccagaatgaagggtgcaaactgaaagccgttgtggaagccaaaaaactgatcttgggcggtctcgagaaggcagagaagaaagaagacaccagaatgtatctgttggcgctcaaaaacgcactgcttcctgaagggattcccagcctcctgaaatatgctgaggccggcgaggggccaatctcccaccttgctacaaccgccctccaaaggtacgacctgccatttatcactgatgaagtgaagaaaactctcaatcgaatctatcatcagaacagaaaggtccatgagaaaaccgttaggacagcggcggccgcaatcattttgaacaataatcctagttacatggatgtcaaaaacatactgctttcaatcggcgagctcccccaggagatgaacaagtacatgttggccattgtgcaggatatcctccgcttcgagatgcccgcctctaagatcgttcggagggtgttgaaagagatggtggcacataactatgatcgctttagccgaagtggttcatctagtgcatacactggctatattgagcgatctccgcggagtgcctctacctactccctggatatcctgtatagcggcagcggtattctccggcggtcaaatttgaacattttccagtatataggcaaggccggtttgcacggttcccaggtcgtgattgaagcacagggccttgaagccttgattgcagcgacccctgacgaaggcgaagagaacctggactcatacgccggaatgagtgccatcctcttcgatgtgcaactccgcccggtgactttcttcaatggctatagcgatctgatgtctaagatgctgtctgccagcggagaccccatatctgttgtgaaagggctgatcctgctgatcgatcatagccaggaacttcagctccaaagcggtctgaaggccaatattgaggtgcaggggggcctcgccatagatatatccggtgcgatggaattctccctgtggtacagagagtcaaaaacaagggtaaaaaaccgagtgaccgttgttattaccaccgacatcaccgtcgactccagcttcgtgaaggccgggctggagacatccactgagactgaagctggacttgagtttatttctactgtgcaattttcccaatacccatttctcgtgtgcatgcagatggataaggatgaggccccattcaggcagttcgaaaagaagtacgagcgactgtcaacaggtcgcggttatgtgtcccagaagaggaaagagagtgtcctcgcgggctgcgaattccccctccatcaggagaacagtgaaatgtgcaaagtggtatttgccccacagccagacagcacatcctctgggtggttc

SEQ ID NO: 16867 - DNA, 2682 bp, synthetic construct
  misc_feature 1..2682: note = source = /note="Description of Artificial Sequence: Synthetic coding sequence"
  source 1..2682: mol_type = other DNA
atgattcttttagccgtcctattcctctgttttatttcgtcctattccgcatcggtcaagggacatactactggtctctcactgaataatgatcgtctgtacaaactgacctattcgacagaagtgttgctagatcggggaaaaggaaaacttcaagattctgttggctaccgtataagttcaaatgtggatgttgctctcctttggagaaatcccgacggtgacgacgatcaactgattcaaattactatgaaagatgttaacgttgagaatgttaatcagcagagaggtgaaaagagtatatttaaaggaaaatcgccaagcaagattatgggaaaagaaaacttagaagcgctgcaaaggcctacgctactccatctaatccatggaaaggttaaagagttctatagctaccaaaacgaagcggtcgcgattgaaaacataaaaagaggattggcatctctctttcagacacagctctcgtccggaacaactaatgaagttgacatcagtggaaactgcaaagtcacatatcaagctcaccaggataaggtaattaaaatcaaagctcttgatagttgcaaaatcgcccgctctggtttcaccacacccaatcaggttctaggagtttcctcgaaagccacgtctgtaacaacatacaagattgaagattcattcgtaattgcagttctagcggaagaaacacataacttcggattgaattttttgcaaacaataaaaggaaaaattgtcagcaaacaaaaattggagctcaaaacaaccgaagcgggtccaaggctgatgagcggcaaacaggcagcggctataattaaagcagttgattcaaaatacaccgctattccaattgttggacaagtttttcagtctcactgtaaaggatgtccttccctatccgaattgtggcgatctacacggaagtatctccagccagataacttgtccaaagcagaggcagttagaaattttctggcattcatccaacacttacgcacagcaaagaaagaggagattttgcaaattctaaagatggagaataaggaagttcttccacagttggtcgatgctgttacatcggcgcaaacctcagattccctcgaagctattttagattttcttgactttaagtcggatagttctataatactccaagagcgtttcctttacgcatgtggttttgctagtcacccgaatgaagaactgcttagagcacttatttcaaagtttaagggatctataggatcgagtgacatccgtgagaccgtcatgatcattacaggaacgctcgttagaaaattgtgtcagaatgagggatgtaagctcaaggccgttgtggaagctaaaaaactaattttaggaggacttgaaaaggcagagaaaaaggaggacacaagaatgtatctgctggcattgaagaatgcgctgttgccagaagggattccaagcttactaaagtacgcggaagcaggtgaagggccaatttcacatcttgccactactgcgcttcagcgctatgacttaccgttcataaccgatgaggtcaaaaaaacacttaatcggatttatcaccaaaatcgcaaggtgcatgaaaaaactgtccggacggctgctgccgccattatattgaataacaatccaagctatatggacgttaaaaacatcttgttgtctattggagagctacctcaggaaatgaataaatacatgctagccattgttcaagatattcttcgttttgagatgcctgcgagtaaaattgttagaagagtcttaaaagaaatggtcgcacataattacgatagattctcgcgatcgggatcttcttcagcgtatactgggtatattgaacgttcaccgcgttcggcttccacttattccttggacattctgtattctggatcaggaatccttcgcagatcaaaccttaacatatttcaatatattggaaaggctggattgcatgggtcccaggtggtcatagaggctcagggactagaagcacttattgctgctaccccagatgaaggagaggaaaatctcgattcatatgctggaatgtcagcaatcctgtttgacgtgcagctcagaccggttactttcttcaatggatacagtgaccttatgtctaaaatgctctcagcctcaggggatccaattagtgttgttaagggattgattcttctgatcgaccactctcaagaacttcagctccaatcgggattgaaggctaatattgaggttcaaggagggctggcgatcgatatcagtggagcaatggaattttcgctgtggtatcgtgagagtaagacaagagtaaagaatcgggttaccgttgttattactaccgacattacagttgattcgagtttcgtcaaggcgggattggaaactagtaccgaaactgaggcaggacttgaattcattagcactgttcagttttctcagtacccatttctcgtatgcatgcagatggataaggatgaagcaccattccgccaattcgagaagaaatacgagaggcttagtacaggacgaggatacgtgtcacagaaacgaaaggagtcggtcttggctggatgcgaatttccactacaccaggaaaactccgaaatgtgtaaagtagtctttgctccacaaccagactcaacatcatcgggatggttc

SEQ ID NO: 16868 - DNA, 2682 bp, synthetic construct
  misc_feature 1..2682: note = source = /note="Description of Artificial Sequence: Synthetic coding sequence"
  source 1..2682: mol_type = other DNA
atgattttacttgcagttttatttttatgttttattagttcatattccgcctctgtaaaaggtcatactactggattatcattaaataatgatcgactttataaattgacttattctacagaagttttattagatcgtggtaaaggaaaacttcaagattctgtagggtatagaatttcaagtaacgtagatgttgctttactctggagaaatccagatggagatgatgaccaacttatacaaattacaatgaaagacgttaatgttgaaaatgtaaatcaacaaaggggtgaaaaatcaatatttaaaggtaaatctccaagtaaaattatgggaaaggaaaacttagaagctttgcaaaggcctactctattacacttaattcacggaaaggttaaagaattttattcataccaaaacgaagcagttgctatcgagaatattaaaagaggattagcttctctttttcagactcaactttcttctggtactactaatgaggttgatatctcaggaaattgtaaggtaacataccaagcacatcaagataaagtaattaaaattaaagctttagactcatgtaaaatagccagaagtggttttactacaccaaatcaagtattaggagtctcttcaaaagcaacaagtgttacaacttataaaattgaagattcatttgtaatagctgttttagctgaagaaacacataattttggactaaattttttacagactattaaaggaaaaattgtttccaaacaaaaattagaattaaaaacaactgaagcaggaccaagacttatgagtggtaagcaagctgctgcaattattaaagccgtagattcaaaatatacagcaataccaattgttggacaagtatttcaatctcattgtaaaggatgtccttcattatctgaactttggagatctacaagaaagtatttacagccagataatcttagtaaggcagaagcagtaagaaattttcttgcttttattcaacatcttcgtactgcaaaaaaagaagaaattttacaaattcttaaaatggaaaataaagaggtattaccacaattagttgatgctgtaacctcagctcaaacatcagacagtttagaagctattttagatttcttagactttaaaagtgattcatctataattttacaagaacgatttctttatgcttgtggatttgcatcacatccaaatgaagaattactccgtgctttaatttcaaagtttaagggtagtattggtagttctgatattagagaaactgttatgataattactggaacattagtaagaaagttatgtcaaaatgaaggttgtaagttaaaagcagttgttgaagcaaaaaaattaattttaggaggattagaaaaagctgaaaaaaaagaagacactaggatgtatttgcttgcacttaaaaatgctcttcttcctgaagggattccaagcttacttaaatatgcagaagctggagaaggaccaatatcacatttagcaactacagcacttcagagatatgatttaccatttattacagatgaagtgaaaaagactttgaatagaatttatcatcaaaataggaaagttcatgaaaaaacagttagaactgcagcagcagcaattattttaaataataatccaagttatatggatgttaaaaatattttattatctattggagaattaccacaagaaatgaataagtatatgcttgctattgttcaagatattcttagattcgaaatgcctgcatcaaaaattgtaagacgagtcttaaaagaaatggttgctcataattatgatagattttcaagatcaggttcttcctcagcatatacgggatatattgaaagaagtccacgttctgcatcaacttattctttagatatactttattctggaagtggaattttaagacgtagtaatcttaatatatttcaatatattggaaaagcaggacttcatggttcacaagttgttattgaagctcaaggtttagaggctcttattgctgcaacaccagatgaaggagaagaaaatcttgattcatatgctggtatgtcagcaattttatttgatgtacaattaagaccagttactttttttaatggatatagtgatttaatgtcaaaaatgttatcggcatcaggtgatccaattagtgtagttaagggattaattttattaattgatcactcacaagaacttcaacttcaatctggactcaaagctaatattgaggttcaaggaggtctagcaatagatatttcaggtgctatggaattttcattatggtatagagaaagtaaaacaagagttaagaatagagttacagttgttataactacagacattactgttgactcatcatttgttaaagcaggtcttgaaacatcaacagaaacagaagcaggattagaattcatatcaactgttcaatttagtcaatatccattccttgtttgtatgcaaatggacaaagatgaagctccatttagacaatttgaaaagaagtatgaaagattatccactggaagaggttatgtttcacaaaaaagaaaagaatccgttttggcaggatgtgaattcccacttcatcaagaaaattccgaaatgtgtaaagtggtttttgcaccacaaccagattcaactagttctggatggttt

SEQ ID NO: 16869 - DNA, 2682 bp, synthetic construct
  misc_feature 1..2682: note = source = /note="Description of Artificial Sequence: Synthetic coding sequence"
  source 1..2682: mol_type = other DNA
atgattttactagcggtgcttttcctgtgttttattagttcctatagcgcctctgtcaagggccacactacaggtttaagcctgaataatgatcggctctacaagctgacttactccacggaagttttgctcgatcgagggaaggggaaactccaggactccgtgggttatcgtattagctcaaacgtggacgtagctctgttatggcgcaaccctgacggcgatgatgaccagttgatacagattactatgaaagacgtgaatgtggagaatgtcaaccagcagcgtggagagaaatccattttcaaggggaagagtccgagcaaaattatgggaaaggaaaacctggaggcgcttcagagacctacgctgcttcatttgattcatggaaaggtgaaggaattctacagttatcagaacgaggctgtggccatagaaaatattaagcggggactcgctagcttgtttcagacccaactcagttctgggaccacgaacgaggtggacatttccggaaactgcaaggtaacttaccaggcccaccaagacaaggtaattaaaataaaggcattagactcctgtaaaattgctcggagtggattcaccacaccaaatcaggtcttaggcgtctctagcaaagccaccagcgtaactacttacaagatagaggactcattcgtgattgcagtgctggccgaagagacccacaacttcgggttgaattttctgcaaactatcaagggcaagatagtgagtaagcagaagctagaactgaagaccaccgaggccggaccccgcttaatgtcagggaaacaggccgcagccataatcaaggccgtggactcaaagtacaccgcaatccccatcgtcggacaagtgtttcaatcccattgcaaaggctgtccgtcactgagtgagctctggcggtctaccagaaagtacttgcagccagataacctttccaaagctgaagcagttcgaaacttcctggctttcatccagcacctcaggactgcgaagaaggaggaaatcctacaaatcctgaaaatggagaacaaggaggtattaccccaactggtggatgctgttacatcagcccagacctccgactcgctggaggctatccttgatttcctcgacttcaagtccgattcaagtataatcctccaggagcggttcctctacgcctgtggtttcgccagccatcctaacgaagagctgctcagggcgttgatctctaaatttaaggggagtatcgggtcttcagatattcgcgagacagtcatgattattacagggacacttgttagaaaactctgtcaaaacgagggatgcaaactgaaagctgttgtagaagccaagaaactgatcctcggcggattggagaaagctgaaaagaaagaagatacccggatgtacctgttggccttgaagaatgcactgcttcccgaggggatcccctctttattgaaatatgcagaagccggagaggggcctatctcccacttggctaccactgcactacaacgctacgacctgcccttcattacggacgaggtgaagaaaacactgaataggatttaccatcagaaccgtaaggtgcacgagaagactgttaggaccgccgctgcagctattattttgaacaataacccatcttacatggacgtgaaaaacattctgctgagtatcggcgagttacctcaagagatgaacaaatatatgctcgcaattgtccaggatatattacggtttgaaatgcccgcgagtaaaatcgtgaggcgggtgctgaaagaaatggtcgcgcacaactacgaccgatttagccggtcaggatcttccagcgcatatacaggctatatcgagagatcaccccgatctgcttccacttacagcctcgacatcttgtattctggcagtgggattctacggagaagcaacctcaatatatttcagtacatcgggaaagccggcttacacggatcccaggttgtcatcgaagcccagggcttggaggccctaatcgcagccacgccggacgaaggcgaagagaacttggatagttacgcgggcatgagtgcaatcctgttcgacgtccaactgagacccgttaccttctttaacgggtattccgacctcatgagtaagatgctgtcagcatcaggcgacccaatatcggtggtaaagggcctcattttgttgattgaccacagccaggagctgcaacttcaatccggcttaaaagctaatatagaagttcagggaggactggcgatcgacatttcgggcgccatggaattttcattatggtatcgggagagcaagacgcgtgtgaagaacagagtgaccgtcgtgattactaccgacattaccgtggacagctctttcgtcaaggcaggccttgaaacaagtacagagacagaggctggattggagttcattagcacagtccagttcagccagtacccgtttctggtttgtatgcagatggacaaggacgaagcgcccttccgacagttcgaaaagaaatacgagcgccttagcacgggtcgcggatacgtatcccagaaacgtaaagagtctgtgttggccgggtgtgaatttcccttgcaccaagagaattctgagatgtgtaaagtggttttcgccccacagcccgatagcacaagcagcggatggttt

SEQ ID NO: 16870 - DNA, 2682 bp, synthetic construct
  misc_feature 1..2682: note = source = /note="Description of Artificial Sequence: Synthetic coding sequence"
  source 1..2682: mol_type = other DNA
atgatcctgttggcagtcctatttctttgcttcatctctagttattcggcatccgttaaaggacatactaccggcctgagtctgaataatgacagactgtacaaattaacatatagtacggaggtgctgctggaccgtgggaagggaaagctgcaggactccgtgggatacagaattagttcaaacgtggacgtggctcttttatggaggaatcctgacggggacgatgatcaattgatccaaattacaatgaaggacgttaatgtcgagaacgtaaatcagcagcgcggagaaaagtccatcttcaaggggaagtcaccgtccaaaataatggggaaggagaacctggaggcattgcagcgccctactcttctgcacctaatacatggaaaggtcaaagaattttacagctaccagaacgaggctgtagccattgaaaatataaaacggggcctggcatcattattccagacccagctgtcttctggcaccaccaatgaggtggatatctcaggtaattgcaaggtgacttaccaagctcatcaggacaaagtcattaagattaaagctctcgacagttgcaagatcgcgcgctccggattcactacccctaatcaggtcttaggggtctcctcaaaggctacatcagtaaccacatacaagattgaagactcttttgtcatcgcagttctcgcagaggaaacacataactttggcctaaatttcttacagaccataaaaggtaagatagtctcaaagcagaagcttgagctaaaaacgacagaggcgggcccgcggctgatgtctggaaagcaggccgccgcgattattaaggctgtcgacagcaaatatacggcaatccctatagtcggccaagtgttccaatcccactgtaaaggatgtccgtccctgtccgaactttggcggtcgactaggaaatacctgcagcccgataatctgtccaaagctgaggctgtgagaaactttcttgcgtttatacaacacctccgcaccgccaagaaggaagagatcctccagatacttaagatggaaaacaaggaggttctcccccagctcgtggatgctgtaacatccgctcagacgtcagatagcctcgaagcaatactcgattttctcgacttcaagagtgattctagcataatcttgcaggagcggtttttgtatgcctgtggtttcgccagccatcctaacgaggagctgctgagggcccttatatcaaaattcaaggggtctataggcagtagtgatattagagaaacggtgatgatcattacagggaccctcgttagaaagctgtgccagaacgaagggtgtaaactcaaagccgtcgtggaggcgaaaaagctcattctcggcggtttggaaaaggcggaaaaaaaagaagacacacgtatgtacctgctggctttgaaaaacgctcttcttcctgaagggatccccagcctgctgaagtatgcggaagccggcgaaggcccaattagccacctagctactactgctcttcagagatacgatcttccatttataactgacgaagtgaaaaaaacgctgaacaggatatatcatcagaataggaaggtgcatgagaagacagtgcgtaccgcggccgccgccattattctgaataataatccttcttacatggacgtgaaaaatattctgctttcaatcggagagctgcctcaggaaatgaataagtatatgctggcaattgtgcaggatatactgaggtttgaaatgcctgcatcaaagatagttcgtcgggtgctcaaggaaatggtggctcacaattacgaccgcttctcccgctcaggatctagcagtgcatatacgggctacattgagcgatccccccgctcagcctccacatattccctagacattctatatagtggatcgggcatactgcgacggagcaacttgaatatctttcagtacatcggaaaggcagggttgcacggctcacaggtggtaattgaggcccaggggctggaagccctcattgctgctaccccagacgaaggggaggagaatttagactcctatgctgggatgagtgctattttgtttgatgttcaactgcggccagttaccttttttaacgggtactctgacctgatgtcaaagatgctgtccgcatccggcgatcctatcagtgttgtgaagggcttgattctactgatcgatcatagccaggagctccagctccagagcggtctaaaagcgaacattgaagtgcaggggggactagccattgatatttctggggccatggagttctcattgtggtacagggaatctaagacccgtgtgaagaaccgcgtgacggtcgtcatcacaaccgatatcactgtggattcgagctttgtcaaggccggcctcgaaaccagcaccgaaacagaagcaggactggaatttatctccacagtgcaattttcacagtaccccttcctcgtgtgcatgcagatggataaggacgaggcgcccttcaggcagttcgagaaaaaatatgaaagactctcaacagggagagggtacgtgtcacagaagcggaaggagagcgtgttagccgggtgcgagtttccattgcaccaggagaatagcgagatgtgcaaagtcgtgttcgcaccgcagcctgactcgacctcctctgggtggttc

SEQ ID NO: 16871 - DNA, 2682 bp, synthetic construct
  misc_feature 1..2682: note = source = /note="Description of Artificial Sequence: Synthetic coding sequence"
  source 1..2682: mol_type = other DNA
atgattctgctagcagtccttttcttgtgttttatctcttcatacagcgccagtgtgaaaggacataccactggcctctcactgaacaacgaccggctttataaactcacatattcaactgaggtgctgctcgaccgaggcaagggcaagttacaggacagcgttggataccggatttcaagcaatgtagatgtggctctgttgtggaggaaccccgacggggacgacgatcagctgattcagattaccatgaaggacgtgaacgtcgaaaatgttaatcagcagcggggcgagaaaagtattttcaaaggcaaatcaccatcaaagataatgggcaaggaaaatctggaggctctgcagaggccaactctgttgcacctcatccacggaaaggtcaaggaattttattcctatcagaatgaggccgttgcaattgagaatattaaaaggggactggcttctctgttccagacacagttgtcatccgggaccaccaatgaggttgacatctccgggaattgtaaggtcacctatcaggcacaccaggacaaagtgattaagatcaaggcgcttgactcttgtaaaatcgccaggtccggtttcactacaccaaatcaggttcttggcgtatcaagtaaagcgacctcggtgactacttacaagatcgaggattcattcgtgattgcagtacttgctgaagagactcataactttggactcaacttcttgcagactattaaaggcaagattgtgtctaagcagaaactggagctgaagactaccgaggccgggccgaggctcatgtctgggaagcaggctgctgctattattaaggctgtggactccaaatataccgccatccccatcgtggggcaggtgtttcaatctcactgcaaggggtgcccttctctgtctgaactttggagatcgacaaggaaatacctgcaaccagataatctttctaaggcagaagctgtgcgcaatttcttagccttcatccagcatctgcggacggctaaaaaagaggagatactccagatactcaagatggagaacaaggaagttctaccacagcttgtagacgctgtaacctccgctcaaacttccgatagcctagaggccattctggactttctggacttcaaatctgattcctcaataatattacaggaacgctttctctatgcatgcggatttgcttcccaccccaacgaggagctgctgcgtgctctcatttctaaattcaaaggatcgattgggagctctgatattcgggagactgtaatgatcataaccggtacccttgtcaggaagctctgccagaatgagggttgcaagctgaaggccgtcgtggaggctaaaaagttgatactaggagggcttgagaaggccgaaaaaaaagaggacacccggatgtatctgctcgcactgaaaaacgccttacttcccgagggaattccatctctactcaaatacgctgaggcaggggagggcccaatcagccatctggcaaccacggcactgcaaagatacgatctccctttcattaccgatgaagttaaaaagactcttaacagaatctatcatcagaatcggaaggtacacgaaaagactgtgagaacagccgcggcagccattatcttgaacaacaacccaagctacatggacgttaaaaacatactgcttagcatcggtgagttgccccaggagatgaacaagtacatgcttgctattgtccaggatattttgcggtttgaaatgcccgctagcaaaattgtgcgcagagtcttgaaggagatggttgcacacaattacgatagattcagcagatctgggagctcctcagcctacaccggttatatcgaaaggtcccctagatctgcttctacttactctctagatatcctgtattccggctctgggattctccgacggtccaacctaaatattttccagtacattggcaaagcggggctgcacggttctcaggttgtgatcgaagcgcaaggcctcgaagccctgattgcagccactcccgacgagggagaagaaaatctggactcatatgcagggatgtcggcaatcctcttcgacgttcagctgcggcccgtgacattttttaacggttactccgacttgatgtccaagatgctgtctgcctcgggagaccccatttccgtggtgaaggggttgattctgctaattgatcatagccaagaacttcagttgcagtcaggactgaaagccaacattgaggtgcagggcggccttgccatcgacatctcaggcgccatggagttttcgttgtggtaccgtgaatccaaaacccgagtgaagaatcgggtaacggtagtaataactacggatattaccgttgatagctcttttgttaaagccggcctggaaacatcaaccgagaccgaggccggcttggagttcatttctaccgtccagttttcgcagtacccatttctggtctgtatgcagatggacaaagatgaggcgccattccgtcagttcgaaaaaaagtatgagcggcttagtactggcaggggctacgtgtctcaaaaaagaaaggagtctgttctggctggatgtgagtttcccctgcatcaggagaatagcgagatgtgcaaggtcgtctttgctccgcaaccagactcaactagctctgggtggttc

SEQ ID NO: 16872 - DNA, 2682 bp, synthetic construct
  misc_feature 1..2682: note = source = /note="Description of Artificial Sequence: Synthetic coding sequence"
  source 1..2682: mol_type = other DNA
atgatcctcctggcagtcctttttctgtgcttcatttcgtcctatagtgccagtgtcaaggggcataccacaggcctctcactgaacaacgacagactgtataagttgacctacagcactgaggtgctcctagatagagggaaaggcaagcttcaggacagcgtgggatatcgaatttcctctaatgtagatgtggcccttttgtggaggaacccagacggcgatgatgatcagctcattcaaattacgatgaaagacgtcaacgtggagaatgtcaaccagcaacgtggggagaagagcattttcaaaggtaagtctccctcgaaaatcatgggaaaagaaaatttggaggcgctgcagagacctacgctgttacacctgatccacgggaaagtaaaggaattttatagttaccagaatgaagctgttgccatcgagaacataaagcggggcctcgcttcgctattccaaactcagctgtcttcaggtaccaccaacgaggtcgacatatcaggaaactgtaaggtaacttatcaagcccatcaggacaaagtgattaagatcaaagcactcgacagttgcaaaattgctcggtcagggttcaccacccctaatcaggtgctgggcgtcagttccaaagccacatccgtgaccacttacaaaatcgaagactccttcgtcatcgccgtgttagctgaggagacccacaactttgggctcaatttcctgcagaccattaaaggaaagattgtgtcaaagcagaagttggagctcaagacaacagaggccggccctaggcttatgtccgggaaacaggccgccgcaatcattaaggccgttgactcaaaatacacggccattcccattgttgggcaggtattccagtctcactgcaaggggtgtccgagccttagcgagctgtggagaagcacccggaagtatctgcagccagataatctctcaaaggcggaggctgtccggaactttttggcatttatacagcatctgaggacggccaaaaaagaggagatcctgcagatcctgaaaatggagaacaaggaggtgttacctcagctggtcgacgccgtaaccagcgctcagacctccgattccctagaggccatcctggattttctcgatttcaaaagcgacagcagcataattttgcaggaacgctttctatacgcctgcgggttcgccagccaccctaatgaggaactgctgagagctctgatatccaaattcaagggatcaatcggctcctccgatatccgggagactgtgatgatcatcacaggaacgttggtcagaaagttgtgccaaaacgagggctgtaagctgaaggcagtggtggaagcgaaaaaactgatcctgggcggcctggagaaggcagaaaaaaaggaagatacacgcatgtatctgctcgccctcaaaaatgctttgttgcccgaaggcatcccctcactcttgaaatatgccgaggcgggagagggccccatctcgcacttggccaccaccgccctgcagaggtatgacctgccttttatcaccgatgaggtcaaaaaaactcttaacaggatttatcatcagaaccgcaaggttcatgagaagacggtccgcactgcagccgctgcaatcattctgaataacaatccgagttatatggatgttaagaatattctcctgtcgatcggggagttaccgcaagagatgaacaaatatatgctggctattgtacaagatatcctgcggttcgagatgcccgcatcaaaaatcgttcgtcgagttctgaaggagatggtcgctcacaattacgataggttctcacggagcggcagcagcagcgcttacaccggctatatagagcgatccccacggagcgctagcacatattccctggatatcctgtattctgggtctgggatcctgagaaggagtaatcttaatatcttccagtacatcggaaaagccggcctgcacggctcccaggttgttattgaagcacagggactggaggcactgattgccgctaccccggatgagggcgaagagaatttggactcatacgccggcatgtctgctattctcttcgacgtccagctgcggccagttacattcttcaatgggtactcagatctaatgagcaagatgttgagtgcttccggagacccgatctctgttgtaaaggggttgatcctcctgattgaccattcgcaggagttgcaacttcagtcaggcctgaaggctaatatcgaggtgcagggaggcctagctattgatatctcaggagcgatggaattcagcctatggtaccgggagagtaagacgagagtcaagaacagggtgactgtggttattacaacagatataacggtggatagttcttttgtaaaggccggactggaaacctctactgagacagaggccgggcttgagtttatttccaccgtgcagttctctcaataccctttccttgtttgcatgcagatggataaagacgaagccccttttcggcaattcgagaaaaaatacgagcggctgtcgactgggcggggttacgtgagtcagaagcggaaggagagcgtgctggctgggtgtgaatttccactgcaccaagaaaacagcgagatgtgtaaagtggttttcgccccccaacctgatagcacctcaagtggctggttt

SEQ ID NO: 16873 - DNA, 2682 bp, synthetic construct
  misc_feature 1..2682: note = source = /note="Description of Artificial Sequence: Synthetic coding sequence"
  source 1..2682: mol_type = other DNA
atgatcttactggctgtcttatttctttgttttataagctcgtattctgcatctgtgaagggccatactaccggcttgtctctgaacaatgataggctatacaagttgacttactcaacggaagtgcttctggatcggggcaagggcaaactgcaggattctgtggggtatagaatttcttctaatgtggatgtggctctgctgtggcgaaaccccgatggcgacgacgaccaattaattcaaatcactatgaaagacgtaaacgtcgaaaacgtcaaccaacagaggggagagaaatctattttcaaagggaagtccccaagcaagattatgggaaaagaaaatctcgaggcactccagaggccgacccttctccacctcatccacggcaaagtaaaggaattttattcttatcagaacgaagccgtggccattgaaaacattaaaaggggtctggcaagtctcttccagacacagctgagctccggcacgaccaatgaggtcgatatttccggaaactgtaaagtgacatatcaggcgcaccaggataaggtcattaagatcaaagccttggactcttgtaaaatagccaggtccggctttaccacacccaatcaggtgctgggcgtgagcagtaaggcgacctccgtaaccacctacaagatcgaggactccttcgtaattgcagtgctggcggaggagactcacaattttggtttaaactttctgcaaacgattaaaggaaagatcgtttctaaacagaagctggagctgaaaactactgaggctgggcctagattaatgagcggcaaacaggccgctgctatcatcaaggccgttgattctaagtataccgctatacccatcgtgggccaggtttttcagtcacactgcaagggctgcccttccctgtcggagctgtggcggagtactcgtaaatatctgcagcctgacaatctgtcaaaagctgaggcggtacgcaattttcttgcctttattcagcatctccgtacggccaagaaagaggagatactccagatcctgaaaatggaaaataaggaggtcctgcctcagttagtcgatgctgttacatcagcacaaacatcagactcgctcgaagcaatcttagatttccttgattttaaaagcgacagctccattattctccaggaaagatttctctatgcgtgtggtttcgcatcacaccccaatgaggaattacttcgggccctgatctcaaagtttaagggctccatcggatcgtccgatatccgggaaacggtgatgatcatcacaggcaccctggttcgtaaactgtgtcagaacgaaggatgtaaactgaaggcagtggtcgaggccaaaaagctgatcctcggggggctggagaaagccgagaagaaagaggacaccagaatgtaccttttggccctcaaaaacgcactactgcccgagggaatcccttccctgctcaagtacgcggaagccggtgagggccctatctcacatctggcaacaacggccctccagaggtacgacctgcctttcattacggatgaggtcaagaagacacttaaccgtatctaccatcaaaaccgcaaagttcatgagaagactgtacgaactgccgccgctgcaattatccttaacaacaacccgtcctatatggatgttaagaatatcctcttgtctatcggtgaactgccgcaagagatgaacaagtacatgctcgctatcgtgcaggacatcctgcggtttgaaatgcccgcctccaaaatcgttcgcagagtgcttaaggaaatggtggcgcacaattacgataggttctctcggagcggcagcagcagcgcttataccggatacatcgaacgttctccacgcagtgcgtcaacatattctttagacattctgtattccgggagtggcatcctccgccgaagcaatctgaacatctttcagtatattgggaaggcaggactgcatggctctcaggttgtcatcgaagcgcaagggttggaggcgctaatcgccgcaacgcccgacgagggtgaagaaaacctcgattcatacgccgggatgtccgccattctttttgacgtgcaactgagacctgtcacattctttaatggctactctgacctaatgtctaaaatgctgagcgccagcggggaccctatatctgtagtcaaggggctgatcctgttaattgaccactcccaggaattacagttacaatctggactaaaagccaatattgaggttcagggcggactcgctatcgacattagtggggccatggaattcagcctatggtatcgcgagagcaaaacacgcgtcaaaaaccgcgtgaccgtcgtgatcactaccgacatcaccgtcgattcaagcttcgtcaaggcgggtctggagacctcaacagagacagaagccggactcgagttcatctccacagtgcagttcagccagtatccctttttggtgtgtatgcaaatggacaaagatgaggcaccattcaggcagttcgaaaaaaaatatgagaggctttctaccgggagaggctacgtttcacagaaacgaaaggagtccgtcttggcagggtgtgagtttccgttgcatcaggagaacagtgaaatgtgcaaggtggtcttcgctccacaacccgatagcactagtagtgggtggttt

SEQ ID NO: 16874 - DNA, 2682 bp, synthetic construct
  misc_feature 1..2682: note = source = /note="Description of Artificial Sequence: Synthetic coding sequence"
  source 1..2682: mol_type = other DNA
atgattctattggcagttttgtttttatgctttatctcgagctattccgctagtgtcaagggtcacacaacgggtctttcgttaaataacgatcgcctctataagctgacttattcgactgaggttctgctagatagaggtaagggcaaactgcaggattcagtgggataccgcatatctagtaatgtcgatgttgcgttgctgtggagaaatccggacggagatgacgaccaattgatccaaatcactatgaaggatgttaatgttgaaaatgttaatcagcagagaggcgaaaaatcaatttttaaaggaaaaagcccctcgaagataatgggtaaagagaatctagaagccctccaacgtccaacgttgttacatcttatacacggaaaggtaaaggaattttatagctaccagaacgaggctgtggcaatcgagaacataaaacggggcttagcttcactgtttcaaacccaattatcaagtggtactacaaatgaagtggatatctctggcaactgcaaggtcacgtaccaagctcatcaggataaagttatcaaaattaaggcacttgattcatgtaagattgccagatcagggttcactactcctaatcaggttcttggagtgtcctccaaggcaacaagcgttacaacatataagatagaagatagttttgtgatcgcagtgctggctgaggagactcataattttggactaaatttcttgcagacgattaaagggaagattgtttccaaacagaaacttgaactcaaaactacggaagccggtccaaggctcatgagcggtaagcaagctgctgcaatcataaaagccgtcgatagtaagtacacagccatcccgatcgtaggtcaagtttttcagagccactgtaaaggatgcccttcactctctgagctttggaggtctaccagaaagtacctccagcctgacaacctttctaaggccgaggctgttcgtaacttcttggcgttcatccagcacttgaggactgctaagaaagaagaaattttgcaaatattgaagatggaaaataaggaagtgttgcctcagctggtagatgcggtcacgtccgcgcagacatcagactcacttgaggcaattcttgatttcttggattttaaatctgacagctccattattcttcaggagcgtttcttatacgcttgtggttttgctagccacccgaatgaggaactgcttagggccctgatctcaaagttcaagggttctataggctcctctgatataagagaaactgtaatgattataaccgggaccttggttagaaaattgtgtcaaaatgaaggttgcaaattgaaggctgttgttgaggctaagaagctcattctcggcggacttgaaaaagcagagaagaaggaggatacccgaatgtatcttctcgcactcaaaaacgcattacttccagagggaataccttcgttgctcaaatatgcagaagctggtgaggggccaatatcacatcttgctactaccgctctgcaaaggtacgatctgcccttcatcaccgacgaggttaaaaaaactcttaaccgtatttatcatcagaatcggaaggttcatgaaaagacagtgaggactgctgccgctgctatcattttgaataataatccatcatatatggatgtgaagaacatcttgttgtccattggtgagctgcctcaagaaatgaataagtacatgcttgcaattgttcaagatattcttcgtttcgagatgccagctagcaagatagtcagaagggtgctaaaagaaatggttgctcacaactatgacaggtttagccggtcaggatcttcctcggcttatacgggatatatcgaacgaagccctaggtcagcctctacatactctcttgatatcctgtactccgggtctggcattttgcggaggagtaacttgaacatcttccaatatattggtaaagccggactgcatgggtctcaggtggttattgaagctcaaggcctcgaggccttgatagcagccactcccgacgagggcgaggaaaaccttgacagttatgccggtatgtcagccattttgttcgatgtacagctaagaccagttacattctttaatggatattccgacttaatgtctaaaatgttaagcgccagtggagatcctattagcgtagttaagggtttaattcttcttattgatcactcacaggaacttcaattgcaaagcggtctgaaggctaacattgaagtgcagggagggttggcgattgacatttcaggtgcaatggaattctctttgtggtaccgcgagagtaagacaagggttaagaatcgggttaccgtggttataaccacagacattaccgttgactcttcttttgtcaaggctggactcgagactagtaccgagaccgaagctggcttagaatttatcagtaccgtccaattcagccaatatccattcttagtctgtatgcagatggataaggatgaagccccattccgtcaatttgaaaagaagtatgagcgtctctccacaggtcgagggtacgtgtctcagaaacggaaagaaagcgtgctcgctggatgcgaattcccgctccatcaagagaattccgaaatgtgtaaggttgtttttgcgccccagccggattcgacttcgtccggttggttt

SEQ ID NO: 16875 - DNA, 2682 bp, synthetic construct
  misc_feature 1..2682: note = source = /note="Description of Artificial Sequence: Synthetic coding sequence"
  source 1..2682: mol_type = other DNA
atgattctgcttgcagtgctgtttctgtgcttcattagctcatattccgcctcagtgaaagggcacactacaggacttagcctgaataacgatcgcttgtataagctgacctattctacagaagttctcctcgacagggggaagggcaagttgcaggatagtgttgggtataggatttcatcaaacgtggacgttgcactgctctggcggaacccagacggcgatgacgaccagctcattcagataaccatgaaggacgtcaacgtcgagaatgtgaaccagcaacggggcgaaaagtcaattttcaagggaaagtctcccagcaagattatgggtaaggagaatcttgaggccctgcagcgccccaccttattacacctgattcacggtaaagtgaaagaattctattcgtatcagaacgaagccgttgccattgaaaatataaaacgcggcctggccagcctcttccagacccagctttcttccggcacaactaatgaggtggatatctcaggtaattgcaaggtgacgtatcaagctcaccaggataaggtgattaaaatcaaggcactcgatagctgcaaaattgccaggtcgggctttacaacccccaatcaggtgctaggagtaagctccaaggcaacctctgtgactacatataagatagaagattcatttgttattgcggttcttgccgaagaaacacacaatttcggcctaaattttctgcagaccatcaagggcaagattgtgagcaagcagaagctcgaactgaagactacggaagctggcccacgtctgatgtctggcaagcaagcagcagcaatcatcaaagctgtggacagcaagtacaccgcgatacctatagttggccaggtctttcagtctcactgtaagggttgtccctccctatccgagttatggcggtctacacggaagtacctacaacctgataatctgtctaaagccgaagcggttcgcaactttctcgcctttattcagcatttaaggactgcaaagaaggaggagatactgcagatccttaagatggaaaataaagaagtgctgccacagctcgtggacgccgtcaccagcgctcagacgtctgactcgctcgaggccatcctggattttctggattttaagagcgactccagtatcatcctgcaggagcgctttttatatgcttgcggattcgcctcccatccaaatgaagaactgctcagagcgctgatctcaaaattcaagggcagtatcggctcgtccgatatacgagaaaccgtgatgatcatcacaggaactctcgtgcgcaagctttgtcaaaacgagggttgtaaattgaaggcagtcgtggaggctaagaagttgattctggggggactagaaaaggcggagaagaaggaggatacccgcatgtacctccttgctctgaagaatgccctcctgcctgaggggattccttctttgctcaagtacgcagaggccggcgaggggccaatctctcacctggctactacagccctgcaacgctacgatctccccttcatcactgacgaagtaaagaagactctgaaccggatctatcatcagaacagaaaggtgcatgaaaagacggttcggactgctgctgcggcaattattttgaacaacaatcccagctatatggatgtgaagaacatccttctcagtatcggcgaactccctcaggaaatgaacaagtacatgcttgccatcgtccaagatatccttagatttgaaatgcccgcttctaagatcgtacggcgcgtgctgaaggaaatggtcgcgcacaattacgatagattctcacgctctggcagtagttctgcctacactggatatatagagcgctcacctcgctccgcttctacatacagtctcgacattctatacagcggaagcgggattcttcggaggtctaacctcaacatattccagtatatcggtaaggctggtctgcatggctctcaggtagtgattgaagctcagggcctcgaagccttgatcgctgcaacacccgacgagggagaagagaatctggacagttatgcaggcatgtccgctatcttgttcgacgtgcagctgcgtcccgttacgttctttaatggctattctgatctgatgtctaagatgctcagcgccagcggcgacccgatctcggtagtgaagggtttaatattgctgattgatcacagccaggagctccagctgcaaagcggactgaaggccaatattgaggttcaggggggattggccatagacatcagcggggcaatggagttcagcctgtggtatagggaatcaaagacgagagtgaaaaaccgagtgacggttgtcataaccacggacattaccgttgattcaagctttgtcaaagccggtcttgagacatcaacagagacggaggcaggactggaattcatctctaccgtacaatttagtcagtatcctttcctggtgtgcatgcagatggataaggacgaggcaccctttcggcaattcgaaaaaaaatacgagcggctaagcactggccgtgggtacgtttcccagaagaggaaggagtcggtacttgcaggatgcgagtttccccttcaccaggagaattctgaaatgtgcaaagtggttttcgcacctcagcctgattctacgagcagcggctggttt

SEQ ID NO: 16876 - DNA, 2682 bp, synthetic construct
  misc_feature 1..2682: note = source = /note="Description of Artificial Sequence: Synthetic coding sequence"
  source 1..2682: mol_type = other DNA
atgatattactagcggtactatttttatgttttatatcgtcgtattcggcgtcggtaaaaggtcatacgacgggtttatcgttaaataatgatcgactatataaattaacgtattcgacggaagtattattagatcgaggtaaaggtaaactacaagattcggttggttatcgtatatcgtcgaatgttgatgttgcgttattatggcgaaatccggatggtgatgatgatcaattaatacaaataacgatgaaagatgttaatgtagaaaatgttaatcaacaacgtggtgaaaaatcgatatttaaaggtaaatcgccgtcgaaaataatgggtaaagaaaatttagaagcgttacaacgtccgacgttactacatctaatacatggtaaagtaaaagaattttattcgtatcaaaatgaagcggtagcgatagaaaatataaaacgaggtctagcgtcgctatttcaaacgcaattatcgtcgggtacgacgaatgaagttgatatatcgggtaattgtaaagttacgtatcaagcgcatcaagataaagtaataaaaataaaagcgttagattcgtgtaaaatagcgcgttcgggttttacgacgccgaatcaagttctaggtgtatcgtcgaaagcgacgtcggtaacgacgtataaaatagaagattcgtttgtaatagcggttctagcggaagaaacgcataattttggtctaaattttctacaaacgataaaaggtaaaatagtatcgaaacaaaaattagaattaaaaacgacggaagcgggtccgcgattaatgtcgggtaaacaagcggcggcgataataaaagcggtagattcgaaatatacggcgataccgatagtaggtcaagtttttcaatcgcattgtaaaggttgtccgtcgctatcggaactatggcgatcgacgcgaaaatatctacaaccggataatctatcgaaagcggaagcggttcgaaattttttagcgtttatacaacatctacgtacggcgaaaaaagaagaaatattacaaatactaaaaatggaaaataaagaagttctaccgcaactagttgatgcggttacgtcggcgcaaacgtcggattcgttagaagcgatactagattttctagattttaaatcggattcgtcgataatattacaagaacgttttttatatgcgtgtggttttgcgtcgcatccgaatgaagaattactacgtgcgttaatatcgaaatttaaaggttcgataggttcgtcggatatacgtgaaacggtaatgataataacgggtacgctagtacgaaaactatgtcaaaatgaaggttgtaaactaaaagcggttgttgaagcgaaaaaattaatattaggtggtctagaaaaagcggaaaaaaaagaagatacgcgaatgtatctactagcgctaaaaaatgcgctactaccggaaggtataccgtcgctattaaaatatgcggaagcgggtgaaggtccgatatcgcatctagcgacgacggcgctacaacgatatgatttaccgtttataacggatgaagtaaaaaaaacgttaaatcgaatatatcatcaaaatcgtaaagttcatgaaaaaacggttcgtacggcggcggcggcgataatattaaataataatccgtcgtatatggatgttaaaaatatactattatcgataggtgaactaccgcaagaaatgaataaatatatgttagcgatagtacaagatatactacgatttgaaatgccggcgtcgaaaatagtacgacgagtattaaaagaaatggtagcgcataattatgatcgattttcgcgttcgggttcgtcgtcggcgtatacgggttatatagaacgatcgccgcgttcggcgtcgacgtattcgctagatatactatattcgggttcgggtatattacgtcgttcgaatttaaatatatttcaatatataggtaaagcgggtttacatggttcgcaagtagttatagaagcgcaaggtttagaagcgctaatagcggcgacgccggatgaaggtgaagaaaatttagattcgtatgcgggtatgtcggcgatactatttgatgtacaattacgaccggttacgttttttaatggttattcggatttaatgtcgaaaatgctatcggcgtcgggtgatccgatatcggtagttaaaggtctaatattactaatagatcattcgcaagaattacaattacaatcgggtttaaaagcgaatatagaagtacaaggtggtctagcgatagatatatcgggtgcgatggaattttcgctatggtatcgtgaatcgaaaacgcgtgtaaaaaatcgtgtaacggttgtaataacgacggatataacggtagattcgtcgtttgttaaagcgggtctagaaacgtcgacggaaacggaagcgggtctagaatttatatcgacggtacaattttcgcaatatccgtttttagtatgtatgcaaatggataaagatgaagcgccgtttcgtcaatttgaaaaaaaatatgaacgtctatcgacgggtcgtggttatgtatcgcaaaaacgaaaagaatcggttttagcgggttgtgaatttccgttacatcaagaaaattcggaaatgtgtaaagtagtatttgcgccgcaaccggattcgacgtcgtcgggttggttt

SEQ ID NO: 16877 - DNA, 2682 bp, synthetic construct
  misc_feature 1..2682: note = source = /note="Description of Artificial Sequence: Synthetic coding sequence"
  source 1..2682: mol_type = other DNA
atgatcttacttgcagttctttttttgtgcttcattagctcatactcagcatccgtgaagggacacacgaccggattgagcttaaacaatgacagactgtacaagttaacatattcaaccgaggtactgctggatcgcggcaagggaaaactccaagattcagtcggataccgcataagttctaatgtggacgttgcactcctatggaggaatcctgatggcgacgatgatcaacttatccagataaccatgaaagacgtcaatgtggaaaacgtaaatcagcaacgcggcgaaaagagcatctttaagggtaagtctcctagcaaaatcatgggcaaagaaaatttagaagcgcttcagcgcccgacgttgttgcatctgattcatggaaaagtaaaggaattttattcgtaccaaaacgaagctgtagccattgagaacattaaacggggattagcgtcacttttccaaacacaattatcatccgggactactaacgaagttgatatctccggtaactgcaaggttacgtaccaggcccaccaagataaagtgattaagattaaagctctcgacagctgtaagattgcaagatctggctttacgacgccaaaccaggtattaggcgtttcatcgaaagcgacttctgttactacgtacaaaatagaggatagttttgtgatagccgtgttagcggaagaaacacataatttcggattaaactttcttcagactattaagggcaaaatcgtaagcaaacaaaagcttgagcttaaaacgacagaagcaggtcctcggctcatgtcaggcaaacaggcggctgcgattattaaagctgttgacagcaaatatacagccattcctattgttgggcaagtctttcagtctcattgtaaaggttgcccgagtctgtctgaattgtggcgctctacgcgcaagtatctgcagcctgataatctctccaaagctgaggcggtccggaactttcttgcttttatccagcatttacgaacggcaaaaaaagaagagatccttcaaattttaaagatggagaacaaagaagtcttaccgcaacttgttgacgctgttacgtccgcgcaaacttctgactcgcttgaagcgatactggattttcttgacttcaaatcagacagctccataatccttcaagaacgttttctgtacgcgtgtgggttcgctagtcatccaaatgaagaactcttacgtgctctgatttcaaaatttaaagggtcaatcggaagttctgacatccgggaaaccgtaatgattattacaggcacattggttcgtaaattgtgtcagaatgagggttgcaaattaaaggcagttgtcgaagcaaaaaagctgatattgggaggcctggaaaaggccgaaaaaaaagaagatacaagaatgtacttactagcattgaaaaatgcgcttcttccggaaggcattcctagcctcttaaagtatgcagaggcaggagaaggtcctatctcccatttggctactactgcgttacaacgctacgatttaccattcattaccgatgaggtgaaaaaaaccttaaatcggatttatcaccaaaatcgaaaagtacatgaaaaaacagttagaacagcggcggcggccataatccttaataacaacccatcatatatggatgttaaaaatatcctgttatctattggagagttaccgcaggaaatgaataaatatatgttggcaatcgtgcaggacattctcagattcgaaatgccggcatcaaaaattgtgagacgtgttctgaaagagatggtggcgcataattacgataggtttagccgttcgggctcaagttcagcatatactggttatattgaacgttccccaaggtctgcgagcacatattccctcgacattctgtacagcggatcaggtatcctacgaagatctaatttaaatatctttcagtatattggcaaagcaggactgcatggctcacaggttgtcatcgaggcccaaggcttagaggcgttgatcgctgctacaccggacgagggagaagagaatcttgattcgtacgctggaatgtctgcgatactgtttgacgtgcaactccggccggtaaccttctttaatggttattccgatttaatgtctaagatgctttcggcctccggggacccgatctccgtggtaaagggcctgattcttcttatcgaccatagccaggaacttcaattacagtctggacttaaagctaatatagaagtacaggggggcttggccattgacatctccggagcaatggaatttagtttatggtacagagaatcgaaaacacgggttaaaaacagggttacagtggttattacgactgacattacagttgattcctcctttgtaaaagcgggcctggaaacatcaacggaaactgaagcgggattagaatttatctcgacggttcagtttagtcagtatccatttttggtgtgcatgcagatggataaggacgaggccccgtttagacagtttgaaaaaaaatacgaacgattaagcaccgggaggggttacgtgtcacagaagcggaaagagtcagtccttgcaggctgtgagtttccgttacatcaggaaaactccgagatgtgtaaagtagtctttgcgcctcaacctgactcgacgagctcgggatggttc

SEQ ID NO: 16878 - DNA, 2682 bp, synthetic construct
  misc_feature 1..2682: note = source = /note="Description of Artificial Sequence: Synthetic coding sequence"
  source 1..2682: mol_type = other DNA
atgattcttctggcagtgctttttctgtgttttatttccagctacagcgcctctgttaaggggcatacaaccgggctgtctcttaataacgaccgattgtataagctcacctactcaacggaggtcctactggacaggggcaagggcaaactgcaagactctgtggggtatcgcatctcaagcaacgtggacgtcgccctgctgtggagaaaccccgatggtgatgatgatcagttaatccagatcacgatgaaggacgtgaacgtggagaacgtgaatcagcagcgtggagagaaatccatcttcaagggaaagagcccgtcaaagatcatgggcaaggaaaatttagaagccttgcagaggcccacccttctgcacctgatccacggcaaggttaaggagttttattcttaccaaaatgaggcagtggcaatcgaaaatatcaagcggggactggcctcactctttcagactcaactgtctagtggcaccactaacgaggtcgacatcagtggaaactgcaaagtgacttaccaggcccaccaggataaagtcatcaagattaaggccctagacagctgcaagatagctcggtctgggtttacaacgccaaaccaggtcctcggcgtgtcctcaaaagccaccagtgtgactacctataagatagaggattcctttgtgatcgccgtactggcggaggagacacacaattttgggcttaactttctgcagactattaagggcaaaatagtgagtaagcagaagctggagctgaagaccaccgaggccggtccccggctcatgtccggtaagcaggcagctgccatcattaaagcggtggatagcaagtatacagcaatccccatcgtcgggcaggtgttccagtcacactgtaagggctgtccgtccttgagcgaactttggcgcagcactaggaagtacctccagccggacaatctgagtaaagccgaggcggtgcggaatttcctggctttcatacagcatctgaggaccgctaaaaaagaggagatccttcaaatcctcaagatggagaataaagaggtactgccccaactcgtggatgccgtgacgtccgcgcagaccagcgacagcctggaggcaatactggacttcttagattttaaatctgacagctccatcattttgcaggaacgcttcctgtacgcttgcgggtttgcctctcatcccaacgaggaactactgcgcgccctgatctcgaagtttaagggatccattgggtccagcgatattcgagagacggtcatgatcatcactggcaccctcgtccggaaactgtgtcagaatgaaggatgtaaattaaaggcagtggtggaggctaaaaagctgatccttggcggcctggagaaggcagaaaagaaggaggacacacgtatgtatctattggcactcaaaaacgcactgctgccagaggggattcctagcctcctgaaatatgccgaagccggggaggggcctatttctcatctggccactaccgccctccagaggtatgatttaccatttatcaccgacgaagttaagaagacgctgaaccggatttaccaccagaataggaaagtccatgaaaaaacggttaggacagccgccgcggccatcatcctgaacaataacccttcgtacatggacgtcaagaatatcctgctttccatcggcgagctgcctcaggagatgaacaaatatatgctggcaattgtccaagacattctccggtttgagatgccagcatcaaagattgtccggcgcgtgctgaaggagatggtcgcccataattacgatcgtttctctagatctggatcttcaagcgcatataccggatatatcgagcggtctccacgatctgcgtcgacctactcgctggacatcctgtacagcgggtcgggaattttgaggagatcaaatctgaacattttccaatacatcggaaaggcaggcttgcatggaagccaggtagtgatcgaagcacagggattggaagccttaatcgccgctacgccagatgaaggagaagagaatctggactcttatgctggtatgtctgcaatactattcgacgtacagctgcgacctgtaactttttttaacggatacagtgacttaatgtcgaaaatgctctctgcttcaggtgatccaataagtgttgttaagggcctcattctcctgattgaccactctcaggagctgcaactccagagcggcctgaaggcaaacattgaagtgcagggaggtctcgctatagatatctccggggcgatggaattttctctgtggtatcgagagtctaaaacgagagtcaagaatcgcgtgacagtcgtgataaccaccgacatcactgtcgacagttcatttgtaaaggccggcctggagaccagcacagaaacagaagccggacttgagtttattagcaccgtccagttctcacagtacccgtttctagtatgtatgcagatggacaaggacgaagccccatttcgacagttcgaaaaaaaatacgagaggctctctaccggccgtggttatgtaagtcagaagcggaaagagagtgtgctggccggttgtgaattccctctgcatcaggagaacagtgaaatgtgcaaggttgtgtttgcgcctcagccagactctacgtcttccggctggttc

SEQ ID NO: 16879 - DNA, 3768 bp, synthetic construct
  misc_feature 1..3768: note = source = /note="Description of Artificial Sequence: Synthetic coding sequence"
  source 1..3768: mol_type = other DNA
atgctgttcaagcttctccagcggcagacgtacacttgcctgtctcatcgttacgggctctacgtttgtttcctaggagtggtcgtgaccattgtgagcgcttttcagtttggtgaagttgtgctggagtggagccgggatcaataccatgttctcttcgactcatatcgagataatatcgccgggaagtctttccagaatcgtttgtgtctgcctatgcctatcgacgtcgtttacacgtgggtgaacggcaccgatctagagttgttgaaagagttgcaacaggttagggaacagatggaagaggagcaaaaagcgatgcgggagatcctgggaaagaatacgactgagcctacgaagaagagcgaaaagcagcttgagtgtctgctcacccattgcattaaggtaccaatgctggtgctggacccagccctccccgctaacatcactctcaaggacctaccaagcttatatccctcttttcattccgcgtccgatatcttcaatgtggcgaagcccaagaatccctctaccaacgtctcagttgttgtctttgacagcactaaggacgtggaagacgctcactcaggtctactgaagggaaatagtagacaaacggtatggaggggatatctgaccactgataaagaggttccaggacttgtgttaatgcaggacctggcattcctgtctggattccctcctacctttaaggagactaatcagctcaagaccaaactacctgagaacctgtcgtcaaaagtgaagttgctgcaactgtatagcgaggcttccgtcgccctcctgaagcttaataaccctaaggactttcaggagctgaacaaacaaacaaagaaaaacatgaccattgacgggaaagagctgactatatctccagcctacctgctttgggatctttccgctatctctcagagtaaacaggatgaagacatcagtgcatcccgattcgaggataacgaagagcttcgctatagcctccgctctatagagaggcatgctccgtgggtaagaaacatattcatcgtgaccaacggacagatccctagttggttgaatctcgacaatccacgcgtgacaattgtcacgcatcaggatgttttccggaatttatcacacctgcctacgtttagcagccccgccatcgaatcacacattcacagaatagagggactttcacaaaaattcatctacttgaatgatgatgtgatgttcgggaaggacgtgtggcccgacgatttttactcccactccaaaggccagaaggtgtacctgacctggcctgtgccaaactgcgccgagggttgtcctggatcatggatcaaagacggatactgcgacaaggcatgtaacaacagcgcctgtgattgggacgggggcgactgctccgggaattcaggcggttcacgatatattgctggtggaggaggcacaggctccatcggagtcgggcaaccctggcagttcggaggcgggattaacagcgtttcgtattgcaatcaaggctgcgccaattcatggcttgcagacaagttctgcgaccaggcttgtaatgtgctgtcttgtggcttcgacgctggcgattgtggtcaggatcatttccacgagctgtacaaagtgatcttgttacccaatcagacacactatattattccgaagggggagtgtctaccctatttttcatttgctgaagttgctaagaggggagtcgagggagcctattccgataaccccataataaggcatgcaagcatcgctaataagtggaaaactatccatttgattatgcatagcggaatgaatgctaccacaatacattttaaccttacttttcagaatactaatgacgaagagttcaaaatgcagattactgtcgaggtcgacacccgggagggacctaaactcaattccaccgcgcaaaagggctatgagaacctggtgtcacctatcacgctcttgcccgaggcagagattctattcgaggacatccccaaggagaaaagatttccaaagttcaagcgccacgacgttaatagcaccaggcgagctcaggaggaggtgaaaattcctctggtgaatatttccctcctgccaaaagacgcacagttgtccctgaacacattggacctccagctagagcacggcgatattaccctcaagggttacaacctgtcaaaaagtgcactactgagaagctttctcatgaattcccagcacgcaaaaataaagaaccaggctattatcactgatgaaaccaatgactccttggtcgcccctcaggaaaagcaagtccacaaatccattctgcccaatagtttaggcgtgagtgagcgcctgcaacgcttgaccttccccgccgtgtccgtgaaagttaacggccacgatcaggggcaaaacccacctctggatctagaaacaactgctagattccgcgtagagacccatacacagaaaaccatcgggggcaatgtaactaaagagaaacctccttcgctcattgtgcccctcgagtcccaaatgaccaaggagaaaaagatcacgggaaaagaaaaagaaaactcacgcatggaagagaacgcagagaatcatatcggtgtgaccgaggtgctgttaggacgcaaattgcagcactatacggactcatacctgggctttctaccttgggagaaaaaaaaatactttcaggatctgctggacgaagaggaaagccttaaaacccagctggcctacttcacggattccaaaaacaccggtaggcagctcaaagacaccttcgccgactctctcagatacgttaataaaatcctgaactctaagtttggttttacttcccgaaaagtgcccgcacatatgcctcacatgatcgatcggattgtgatgcaagagttgcaggacatgtttcccgaggagttcgataaaacttcattccataaggttcgccactccgaggatatgcagttcgcctttagctacttctactatctgatgagcgccgtgcaacccctgaatatctcccaggtgttcgatgaggtagataccgaccagagcggagtcctctctgaccgagaaataagaacgttggccacaaggattcacgaactccccctgagtctgcaggaccttacaggcctagagcacatgctgatcaactgctcaaagatgctgccggccgatattacccaattgaataatatacctcccacccaggagtcatactacgatccaaatttgccccctgtaaccaagagcctggtgacaaattgcaagccggtcaccgataaaatccacaaagcctataaggataagaacaagtataggtttgagatcatgggcgaggaggaaattgccttcaaaatgatacgaactaacgtctcccacgtcgtaggtcaattagatgacattcgtaagaatccccgcaagtttgtctgcctcaacgacaatattgatcataatcataaagacgcccaaaccgtaaaagcagtgctgagggacttctatgagtctatgttccccatccccagccagtttgagctgccacgggagtatcgcaaccgatttctacatatgcatgagctgcaagaatggcgggcctacagggacaaattaaagttttggacacactgtgtccttgccaccctgatcatgttcaccatcttctcatttttcgccgaacagctcattgcgctgaaacgtaagattttccccaggagacggatccataaggaagccagtcctaacaggataagggtc

SEQ ID NO: 16880 - DNA, 3768 bp, synthetic construct
  misc_feature 1..3768: note = source = /note="Description of Artificial Sequence: Synthetic coding sequence"
  source 1..3768: mol_type = other DNA
atgctcttcaagctgctccagaggcagacatacacctgtttgagccatagatacggtctctacgtgtgctttctgggagtggtggttaccatcgtcagcgctttccagttcggggaggtcgtacttgagtggtccagggatcagtaccatgtgctttttgattcctatagggacaacattgctgggaagagtttccagaacagactgtgtctgcccatgcccatcgacgtggtctatacatgggtcaacggtacggacttggagcttctgaaagaactgcagcaggtaagggagcagatggaagaggagcaaaaggccatgagagagattctggggaagaatacgactgagcctaccaaaaaatcagagaagcagctggagtgtctcctcacccattgcattaaggtgccaatgttggtactggatccagctctccccgctaacattactctgaaggaccttccgtctctctatccgtcttttcatagcgcgtccgacatttttaacgtggctaagcccaagaaccctagtacgaatgtttctgtcgtggtgttcgatagtacaaaagatgtcgaggacgcgcatagcggacttctgaaaggcaacagtagacaaaccgtatggagggggtatctgaccacagataaggaagtgcccggtctcgtgctcatgcaggaccttgccttcttgtctggctttcctccgacttttaaggaaaccaatcagctcaaaaccaaactgccggaaaacctcagtagcaaggtgaagctgctccagttgtactcagaagcgtcagtggcattgttgaaactcaataatcctaaggacttccaggagctcaacaagcagacaaagaagaatatgaccatcgatggcaaggagcttacaatcagccccgcctatctgctgtgggacctgtctgcaatcagtcaatccaaacaggacgaggacatcagcgcgtcccggtttgaagacaacgaagagctgagatatagtctcagaagtattgagaggcacgccccgtgggttcggaatatctttatagtgacaaatgggcagatcccgagctggctgaacctggataatccaagagtgactatcgtgactcaccaggatgtcttccgcaacctctcacacctgcctactttctccagccctgccatagaaagccacatccatagaattgaaggcctgtcacagaagtttatctatctgaacgatgacgtcatgttcgggaaggacgtctggccagacgacttctacagccacagcaagggccagaaagtctacctgacctggcccgtacccaattgtgccgagggatgccccggatcatggattaaggatggttattgcgacaaagcgtgtaataacagcgcctgtgactgggacggtggcgattgcagtggtaactctggaggatctaggtacattgccgggggaggaggaaccgggagcatcggcgtcgggcagccctggcagtttggcgggggtatcaactccgtttcttactgcaatcaggggtgcgccaattcttggctggccgacaaattttgtgaccaggcctgtaacgtgttgagttgtgggtttgatgcaggcgactgtggtcaagatcatttccacgagctctataaggttatcctcctgcccaaccagacccactatataatccccaagggggagtgcctgccatatttctctttcgctgaggtagccaaacgaggggttgagggtgcatacagcgataaccctattatacgacacgcctctatcgctaacaaatggaagactatccatttgatcatgcactccggaatgaatgcgaccactatccactttaacctgacctttcagaatactaatgacgaggagttcaagatgcagatcactgtagaggtggacacacgcgaggggcccaaactgaacagtactgctcaaaagggctacgaaaatcttgtgtctcccattacactgctccccgaggctgagatcctctttgaagatatccctaaagagaagcggttccctaagtttaaacggcacgacgtgaactccacccgaagggcccaagaagaagtaaagattccattggtaaacatcagcctgctgcctaaagatgcacagctgagcctcaacaccctggatctgcagttggagcacggcgacatcacactcaagggatataatctgagcaagagcgcactgctcagatcctttttgatgaattcacagcatgcaaagattaaaaatcaggcaatcatcactgacgagacgaatgactccctcgtggcccctcaggaaaagcaggtgcacaagtccattctgccaaacagcctgggtgtttccgagcgacttcagcgcctgaccttcccagctgtgtctgtgaaggtgaacggacatgatcaggggcaaaatcctcctctggacttggagactacagctcgcttccgggtggagacccatacccagaagaccattggaggtaatgttactaaagagaagcccccctctcttattgtacctctcgaatctcagatgacaaaggagaaaaagatcaccgggaaggagaaggaaaacagccgaatggaagagaacgccgaaaaccatattggagtgacagaagttctgctgggaaggaagctgcagcattacaccgattcctacctggggtttcttccctgggagaagaagaagtacttccaggacttgcttgacgaagaagagtccttgaagacccagcttgcttacttcaccgacagtaagaataccggcaggcagctcaaagacacctttgctgactccttgcgctacgtgaacaagatcctgaacagtaagtttggcttcacatccagaaaggttcccgctcatatgccccatatgatcgatagaatcgtcatgcaggagctccaagacatgttcccggaagagttcgacaagacatcctttcacaaagtgcggcacagcgaagatatgcagtttgcgttcagctatttctactacctgatgagcgccgtgcaacccctgaacatatcccaagtgttcgatgaagttgacacggaccaatccggagttctgtccgaccgcgagatcaggacacttgcaactaggattcacgagctgcctctcagcctgcaggacttgaccggcctggagcatatgctgattaattgttccaagatgctgccagcagatatcactcagcttaataatatcccaccaacacaggagtcctactacgatcctaacctgccccccgtcacgaagagtttggtgacaaactgtaagcccgtaacagacaaaatccataaggcgtataaggataagaataaataccgctttgagatcatgggggaggaggaaatcgcgttcaagatgatacggaccaatgtctcacacgtggtgggtcagctcgacgatatcaggaaaaaccccaggaagtttgtgtgtctcaatgataatatcgaccataaccacaaggatgcacaaactgtgaaggcagtgctccgcgacttctacgagagtatgtttcccattccatcacaattcgaactgccacgggagtaccggaacagatttctccatatgcacgagctgcaagagtggagggcatatagagacaagcttaagttctggacacactgtgtcctcgcgaccctcataatgtttactatctttagcttcttcgctgagcagctcatcgcactcaagcgaaagatatttccccggagacgaatccacaaggaggctagtcctaatagaataagagtg

SEQ ID NO: 16881 - DNA, 3768 bp, synthetic construct
  misc_feature 1..3768: note = source = /note="Description of Artificial Sequence: Synthetic coding sequence"
  source 1..3768: mol_type = other DNA
atgttattcaaactactgcagaggcagacctacacctgcttgtcccacagatatggcttgtatgtttgcttcctaggggtcgtggtgacaatcgtgagcgcctttcagtttggcgaggtggtcctggagtggtcccgtgatcagtaccacgtccttttcgacagttatcgtgacaatattgctggcaaatctttccagaatcgattatgtttaccgatgcctatcgatgtggtgtatacctgggtaaacggtacggacttggaactgttgaaggaactccagcaagtgcgcgaacaaatggaggaggagcagaaggccatgagggagatactgggcaaaaacacaactgaacccacaaagaagagcgaaaagcagttggaatgcctccttacacactgcatcaaggttccaatgctcgtccttgatcctgcccttccagcgaatataaccttgaaagacctgccttctctttaccctagcttccactctgcatctgacattttcaacgtggctaagcccaaaaacccttccacaaatgtttccgtcgtggtgttcgactctacgaaagacgtcgaggacgctcacagtggcctcttgaagggaaactccagacagactgtgtggaggggctacctcactactgataaagaggttcccggtctcgtgttgatgcaggacttggcctttcttagtgggttcccgcccactttcaaagagactaaccagcttaagactaagctgcctgaaaacttgtcaagcaaggtgaaactcctccagctttacagcgaggcgtccgtggccttacttaagttgaataaccctaaggattttcaggaactgaataagcaaactaagaaaaacatgacgatcgacgggaaagagttaactatatcccccgcttatctcctttgggatctgtctgctatcagtcagtccaaacaggatgaagatatttctgcaagtaggttcgaggataatgaggagttacgctattcattgaggagtattgagcgccatgccccttgggtgaggaacatcttcatcgtaaccaatggacagatcccttcatggctgaacttggataatccccgcgtgacaatcgtgacacaccaggacgtattcaggaatctgtctcatctgccaaccttctcgagcccagcgattgagagtcacatccaccgtatcgagggactgtctcagaagtttatttatctcaacgacgatgtgatgttcggcaaggatgtgtggccggatgacttttacagccatagtaagggccagaaagtgtacctgacatggccagttccaaattgcgctgagggatgcccaggaagttggatcaaagacggctattgtgacaaggcctgtaacaatagtgcatgtgactgggacggaggggactgttccgggaacagcggcggatcaagatacattgccggcggcggcggaaccggctctattggtgtgggccagccctggcagttcggtgggggtatcaacagtgtgtcctattgtaaccagggctgtgcaaatagctggctcgccgacaagttctgcgaccaggcctgcaatgtattgtcctgcggatttgatgcaggtgattgtggccaggaccacttccacgaactgtacaaagtgatcttactcccaaatcagacccattacataattccaaagggagaatgcctaccctacttctccttcgctgaagtcgctaagagaggcgttgaaggcgcatattcagacaaccctataattcgccacgcatccattgcaaacaaatggaagactatccaccttattatgcatagtggaatgaacgccactactatacatttcaatctgacgtttcagaataccaacgacgaggagttcaagatgcagataacagtcgaggttgatactcgcgagggtcccaaacttaattctactgcccaaaagggttacgaaaatcttgtctctcctatcaccctgctgcccgaagctgaaatcttgtttgaggacataccaaaggagaaaaggttccctaaattcaaaagacacgacgtgaacagcacccgccgagctcaggaggaggtcaaaattccactggtaaatatttcgctgcttccaaaggatgcgcagctctcactcaacactcttgacctgcagcttgagcacggagatatcacactgaagggctacaatctttctaaatcagctctgcttaggtcctttctcatgaattcccagcacgccaagattaagaaccaggcaattataaccgacgaaacaaatgactccctggtcgcaccacaggagaaacaagtgcataaaagcatcttgcctaactccttgggtgtgtcggagcggcttcaaaggcttaccttccctgcggtgagtgtgaaggtgaatggacacgatcaggggcaaaacccaccgttggatctggaaaccaccgctaggtttagagtagagacccatactcagaagacaatcggcggaaacgtgaccaaggaaaagccaccttctctgatcgtgccgctggagtcacagatgaccaaggaaaaaaagattacaggcaaagagaaggagaactcccggatggaagaaaacgcagaaaatcacatcggcgtgacggaggtgctgctcggtcggaagctgcagcactacactgattcctacctgggctttctgccttgggaaaagaagaaatatttccaggaccttctggatgaggaggagtcgctgaagacccagctggcatacttcacggattccaagaacacagggcggcagctcaaggataccttcgccgattcacttagatacgtgaataagatccttaatagtaagttcgggtttacttccagaaaggtgcccgctcacatgccccacatgattgaccgaatcgtgatgcaggagcttcaggatatgttccccgaggagtttgataaaacatcgtttcacaaggtgcgacactcagaggatatgcagttcgctttttcttatttctactatctgatgtccgccgtgcagccactcaatattagccaagtttttgacgaggtcgatacagaccaaagtggcgtgctcagtgacagagaaatcaggacactcgctaccagaatccatgagctgccgttaagtttgcaggatttaacaggactggagcatatgctaataaattgttctaaaatgctgcccgccgacatcacccagttaaacaatatacccccaactcaggaatcctactacgatcctaacctgcccccagtcactaagagcctcgtcactaattgtaagccggtgacagataagatccacaaggcctacaaagacaaaaacaagtacagatttgagataatgggagaagaagagatcgcttttaaaatgatcagaactaacgtgtcgcacgtggtgggtcagctcgatgatatcaggaagaatccccggaaatttgtgtgtttaaatgacaacatcgaccataatcacaaagacgcccagacagtcaaagccgtgctgagagatttttatgagagcatgtttcccattccaagtcagtttgagctgcctcgtgagtacaggaacagatttcttcacatgcacgagctccaggaatggcgagcatatcgtgataagttaaagttttggacacactgcgtactggctacactgattatgttcaccattttctcctttttcgcagagcagttaatcgctctgaagcgtaaaatattccctcggcgccggatacacaaggaggcctcccccaatcggatccgtgta

SEQ ID NO: 16882 - DNA, 3768 bp, synthetic construct
  misc_feature 1..3768: note = source = /note="Description of Artificial Sequence: Synthetic coding sequence"
  source 1..3768: mol_type = other DNA
atgttatttaagcttttacaaagacaaacatatacttgtcttagtcatagatatggactttatgtttgttttttaggtgttgttgtgacaattgtaagtgcttttcaatttggtgaagttgttttagaatggtcaagagaccaatatcatgtattattcgactcttacagagataatattgcaggaaaatcatttcaaaatagattatgccttccaatgccaattgatgtagtatatacttgggttaatggtacagatttggaacttcttaaagaattacaacaagttcgagaacaaatggaagaagaacaaaaagcaatgagagaaattttaggaaaaaatacaactgagccaactaaaaaatcagaaaaacaattagaatgtcttcttacacattgtattaaagttccaatgttagtactagatccagctttaccagctaatattactttaaaagatttgccttctttgtatccttcatttcatagtgctagtgatatttttaatgttgctaagccaaaaaatccatcaacaaatgtatcagtagttgtttttgacagtactaaggatgtcgaagacgctcactctggattactaaaaggaaattcccgacaaacagtttggcgtggttatttaactacagataaagaggtaccaggattagttttaatgcaagatttagcttttttatcgggattcccaccaacttttaaggaaactaatcaacttaagactaagcttcctgaaaatttatcatctaaagttaaattattacaattgtatagtgaagctagtgttgcattacttaagttgaataatccaaaggattttcaagaacttaataaacaaactaaaaaaaatatgactattgacggaaaagaattaacaatttcacctgcatatcttttatgggacctttctgcaatttcacaatctaaacaagatgaagatatttctgcttcaagatttgaagataatgaagaattaagatattcattaagaagtattgaaagacatgctccttgggtgagaaatattttcatcgtaactaatggacaaattccatcatggttaaatttagataatccacgtgttacaatagttactcatcaagatgtttttagaaacttaagtcatttaccaacattttctagtccagctattgaatctcatattcatagaattgaaggattatcacaaaaatttatttatcttaatgacgacgtaatgttcggtaaagatgtttggccagatgatttctattctcattcaaaaggacaaaaagtttatcttacttggccagttcctaattgtgctgaaggttgtccaggttcttggattaaagatggatattgtgataaagcttgtaataatagtgcttgtgattgggatggaggagattgttctggaaacagtggaggatcaagatatatagcaggaggaggaggaaccggatctattggggttggacaaccatggcaatttggaggaggaattaatagtgttagttactgtaatcaaggatgtgcaaattcttggttagctgataaattttgtgatcaagcatgtaatgttctctcatgtggatttgatgcaggagattgtggacaagaccattttcatgaattatataaagttattttacttccaaatcaaacacattatataattcctaaaggtgaatgtttaccttattttagttttgcagaagttgcaaaacgtggtgttgaaggagcttatagtgataatccaattatacgacatgcttcaatagctaataagtggaaaacaattcatttaattatgcattctggaatgaatgctaccacaatccactttaatttaacatttcaaaatactaatgatgaagaatttaaaatgcaaataacagttgaagttgatactagagaaggtccaaagcttaatagtactgcacaaaaaggatacgagaatttagtttctccaataactttattaccagaagcagagattttatttgaagatattcctaaagaaaaaagatttccaaagttcaagagacatgatgttaatagtacacgtagagcccaagaagaagttaaaattccattagtaaatatttcacttttaccaaaagatgcacaattatctctaaatacattagatcttcaattagaacatggagatattactttaaaaggttataatttgtcaaaatctgcacttcttaggtcttttcttatgaatagtcagcatgctaaaataaagaatcaagcaattattacagatgaaacaaatgactctcttgtagctcctcaagaaaaacaagtacataaatctattttacctaattctcttggagtttcagaaagacttcaaagacttacatttccagcagtttcagttaaagttaatggacatgatcaagggcaaaatccacctcttgatttagaaacaactgcaagatttagagttgaaacgcatacacaaaaaacaatagggggaaatgttactaaggaaaaacctccaagtcttattgttcctttagaatcacaaatgacaaaagaaaaaaaaattactggtaaagaaaaagaaaactcaagaatggaagaaaatgcagaaaaccatattggagtaacagaagttttattaggacgtaaattacaacattacacagattcttatcttggttttttaccatgggaaaagaaaaaatattttcaagacttattagatgaagaagaatcattaaagacacaacttgcttattttactgattctaaaaatacaggacgtcagttaaaagatacatttgcagatagtttgagatatgttaataaaattttaaattccaagttcggttttacaagtagaaaagtaccagcacatatgccacatatgattgacagaatagttatgcaagaattgcaagacatgtttccagaagaatttgataagacttcatttcataaagttagacatagtgaagatatgcaatttgctttttcatatttctattatcttatgagtgctgttcaaccacttaatatttctcaagttttcgatgaagttgatactgatcaatcaggagttttatctgatagagagattcgtacattagcaacaagaattcatgaattaccactttcattacaagatcttactggattagaacatatgttaattaattgttctaaaatgttacctgcagatattacacaattaaataatattcctccaactcaagaatcatattatgatccaaatttgcctccagtgactaaatcacttgttactaattgtaaacctgtaactgataaaattcataaagcatataaagataaaaataaataccgattcgaaattatgggagaggaagaaattgcattcaaaatgataagaacaaatgtaagtcatgttgttggacaacttgatgacattagaaaaaatcctagaaaattcgtgtgtttaaatgataatattgatcataaccataaagatgctcaaacagttaaagcagttttaagagatttttatgaaagtatgtttcctattccatcacaatttgaacttccacgtgaatataggaataggtttttacatatgcatgaacttcaagaatggagagcttatcgtgataaattaaaattctggacacattgtgttttagctactcttattatgtttacgatattctcattttttgctgaacaacttattgcacttaaacgtaaaatttttcctcgaagaagaatccataaagaagcttcaccaaatagaattcgagtt

SEQ ID NO: 16883 - DNA, 3768 bp, synthetic construct
  misc_feature 1..3768: note = source = /note="Description of Artificial Sequence: Synthetic coding sequence"
  source 1..3768: mol_type = other DNA
atgctgtttaagctgttacagcgtcagacgtacacttgcctgtcacacaggtacggtctgtacgtgtgttttctgggcgtcgtagtgaccatcgtgtctgctttccagttcggcgaggttgtcctggagtggagccgcgaccagtatcacgtactcttcgacagttaccgcgacaatatcgccgggaagtccttccagaatcggctgtgtctacccatgccaatagatgtggtctacacatgggtaaacggcacagacctggaactgctcaaggaactccaacaggtgagagaacagatggaggaagagcagaaggccatgcgcgagattctgggcaaaaatactacagagcccaccaaaaaatcagaaaaacaactcgaatgtttactgacacactgtataaaggtacctatgcttgtcctggacccagccctgcctgcaaacatcacattgaaggatctgcccagtttatacccaagtttccactccgccagcgatattttcaacgtggcaaagccaaagaacccctctacgaatgtttcggtcgtggtgtttgacagcaccaaggatgtagaagacgcacacagtggcctacttaaaggaaacagccgccagacagtgtggcgcggttatctgactacagacaaggaggtgccaggcctggtcttgatgcaggacctggcgttcctatccggtttcccgccaacatttaaagagaccaatcaactgaagaccaaacttcctgaaaatctaagcagcaaggtgaagttgctgcagctttactccgaagcgtccgtcgctttgctcaagctgaataacccaaaagattttcaggagctgaacaagcaaaccaaaaaaaacatgaccatagatggaaaggagctgactatttctccagcgtacttattatgggacctgagcgccatcagtcaatcaaagcaggatgaggatatcagcgcatctcggtttgaggacaatgaagaattacgatatagcctgcgttccatcgaacgccatgctccttgggttcgaaatatcttcatcgtaactaacgggcagataccatcatggctgaatctcgataacccccgcgtgactatcgtgacgcatcaagacgtgttcagaaacctgtcacacctgcccaccttttcatcgcctgccatcgagagccacatccaccgcattgagggattgagtcagaaatttatttacttgaacgacgacgtaatgttcggcaaagatgtgtggccagatgacttttacagccattccaaaggccagaaagtctacttgacttggccagtgccaaattgtgcggaaggttgcccaggcagctggataaaggacggatattgcgacaaggcctgcaataactcagcctgcgattgggacggcggggactgttcaggaaactccggaggctcccgctacatcgcgggcgggggtggcacgggctcaatcggagtggggcagccgtggcaattcgggggtgggattaattctgtgagctattgtaatcagggctgcgcaaacagttggctggcagataagttttgtgaccaagcatgtaatgtgctgtcctgcggatttgacgccggcgattgcgggcaggaccacttccacgaattatacaaagttattctcttgccaaatcagactcattacattatcccgaagggtgaatgcctcccatactttagcttcgctgaggtcgcaaagcggggtgtggagggtgcatacagcgataatccgatcatcagacacgctagtatcgccaataagtggaagactatccacctcattatgcactcaggcatgaacgcaaccacaatccactttaacctgaccttccagaacaccaatgacgaggagttcaagatgcagatcacggtggaggtggacactcgggaaggccctaagcttaattcaaccgctcagaaagggtacgagaatctggtatcaccgattaccctgctccctgaagccgagattctgtttgaggatatccccaaggagaagcgtttccctaaattcaaaagacacgatgtgaactccactcgcagagcacaggaagaggtgaaaattccgctggtcaacatttcactcctcccaaaggacgctcagctttctctgaacacccttgatctccaacttgagcatggagatattacactcaaagggtacaacctgagcaaatcggcactgttgcgctcctttctgatgaacagtcagcatgccaagattaagaaccaggccatcattactgatgaaaccaacgatagcctcgttgctcctcaggagaaacaggtccacaaaagtatactgcccaattctttgggtgtcagcgagagattgcagcggttgacctttccagcagtatccgtcaaagtaaacgggcacgatcagggccagaatcccccactggacctggagactaccgccaggttcagagtggagacccacactcagaaaaccatcggaggaaacgtgacaaaggaaaagcctccaagtcttatagtgccactggagagtcagatgactaaagaaaaaaaaattacaggcaaggagaaagaaaatagtcgcatggaggaaaacgccgagaatcacattggcgtcacagaggtgctgctgggccgcaaactgcagcactacacagattcatatctaggtttccttccatgggagaagaagaagtactttcaggacttattggacgaagaggaatcgctgaaaactcagctggcgtatttcactgacagcaagaatacgggtcggcagttaaaagatacttttgctgacagcctgcgttacgtaaataaaatccttaacagcaaattcggatttacatctcgcaaggttccagcacacatgccacatatgattgaccggatagtgatgcaggaactgcaggatatgttcccggaggagtttgacaagacttcatttcataaggtccggcacagcgaagatatgcaatttgcttttagctatttctattacctgatgagcgcagtccagcccttaaatattagccaagtctttgacgaggtggacactgatcaatccggcgtactctccgatcgggagataaggaccttggccactagaatccacgaattgcctcttagtctgcaggaccttaccgggttagagcacatgcttataaactgctccaagatgttgcctgccgacatcacccagctgaataatatcccccctactcaggaatcatactacgaccccaacttgccgcccgtcactaagagcctggtgacaaattgcaagccggtgactgacaaaatccataaggcttataaagataaaaataagtatcgctttgaaattatgggggaggaggaaattgcgtttaagatgatcaggaccaacgtaagtcatgttgtggggcagctagacgacatcaggaaaaacccgcgaaagttcgtgtgcctcaatgacaacattgaccacaaccataaggatgcccagactgtgaaggcggtcctgcgtgatttttatgagtctatgtttcctataccatcacagttcgaactgccacgggagtatcgcaaccggtttctgcatatgcatgagcttcaggagtggagggcttatcgagacaaactgaaattttggacacactgcgtgctcgctacgctgatcatgtttacgatctttagctttttcgccgaacagctaatcgccctcaagcggaagattttcccgcgccggcgaatacataaggaagcttccccaaaccgtattcgtgtg

SEQ ID NO: 16884 - DNA, 3768 bp, synthetic construct
  misc_feature 1..3768: note = source = /note="Description of Artificial Sequence: Synthetic coding sequence"
  source 1..3768: mol_type = other DNA
atgcttttcaagctcctccagcgacaaacgtatacttgtctgtcgcataggtacggactctacgtgtgttttctgggggtggtggtgaccatagtgtcagcctttcaatttggtgaagtcgtgctggaatggtcgcgcgatcagtatcacgtgctttttgattcttaccgggacaatatcgcaggtaaatccttccagaatagactttgcctgccaatgcctattgatgtcgtctacacctgggtgaacggaaccgatctggaactgctgaaagaactccaacaagtgcgagaacaaatggaggaagagcagaaagcgatgagagagattttgggtaagaataccactgaacccaccaaaaagagcgaaaagcaacttgaatgcctgctgactcattgcataaaggtgcctatgctggtgctcgatccagctcttcctgctaacataactctgaaggatctcccctcgctgtatccctccttccattcggcaagcgacatcttcaacgttgcgaagcccaagaacccttcgaccaacgtgtcggtggtggtgttcgacagcaccaaagacgtcgaagatgcacattcggggctgttgaagggcaactcaagacaaactgtgtggaggggatacttgactacggataaagaggtgcctgggctggtgctgatgcaggatctggcattcctgtcaggctttccgccaacctttaaggaaaccaatcagctcaagaccaaactcccagagaatctctccagcaaggtgaaactgctgcagttgtactcggaggcgtccgtcgcacttcttaagctgaataacccaaaggacttccaagaacttaacaaacaaaccaagaaaaacatgactattgatggcaaagaactgacgatcagccctgcgtacctgctgtgggacctttcagcaatctcacagtcgaagcaggatgaggatattagcgcgtcacgctttgaagataacgaagaacttaggtacagcttgcgcagcattgaaagacacgctccgtgggtccgcaacattttcatcgtgactaatggacaaatcccaagctggctgaacctggacaacccacgggtcacgattgtcacccatcaagacgtctttcggaacctgtcccaccttccaacctttagctcgccagcaatcgaatcccatatccacagaatcgagggactcagccaaaagttcatctacctgaatgatgatgtcatgtttggtaaggatgtgtggcccgatgacttttactctcatagcaaaggtcaaaaggtgtaccttacttggccagtcccaaactgcgctgaaggctgcccaggatcgtggattaaggacggctattgtgataaggcctgtaacaattcggcgtgtgattgggatggaggtgattgttcaggcaacagcggcggttcccgctacatcgcaggagggggtgggaccggaagcatcggggtgggtcagccatggcagttcggaggagggattaacagcgtgtcttactgtaaccagggttgcgcgaactcttggctggcggataagttctgcgaccaggcatgtaacgtcctgtcgtgtggatttgacgcaggggattgcggacaggaccacttccatgagctctacaaggtgattctccttcctaaccagacccattacattataccaaaaggagaatgccttccgtacttttcatttgctgaagtcgccaagagaggtgtggaaggtgcatattccgacaacccgattatacgtcacgcgtccatagccaataagtggaaaacgatacatctgattatgcactcgggaatgaacgcaaccaccattcatttcaatctgacttttcaaaacactaatgatgaggagttcaaaatgcaaatcactgtcgaggtggataccagagaaggcccaaagttgaactcaaccgcacaaaagggatacgaaaacctggtgagcccaatcaccttgcttcctgaagcagaaattctcttcgaagatattcctaaggagaagagatttcctaagtttaagagacatgacgtcaactcgaccagaagagcccaagaggaagtgaaaattcctttggtgaacatttccctccttccgaaggatgctcaacttagcctcaacacccttgatcttcaacttgaacatggtgatattacccttaagggatacaacctgtcgaagagcgcacttctgcgctcgttcttgatgaacagccaacatgcaaagatcaaaaatcaagcaatcattactgatgagacgaacgattccctggtggcgcctcaagaaaagcaggtgcacaaatccattctcccaaactccctgggcgtgtcagagcgacttcaaagactcacgtttcctgcagtgtccgtgaaagtgaacggacatgaccaaggacagaatcccccactcgatctggaaactaccgcgagattccgggtggaaactcacactcagaaaaccatcggcggtaacgtcactaaagaaaaaccgccatcgctgattgtccccctggaatcgcagatgaccaaggaaaagaaaatcactggaaaggagaaggaaaactcacgcatggaggaaaacgctgaaaaccatattggcgtgactgaagtgctgctgggccgcaaactgcagcattacactgatagctaccttggatttctgccttgggagaagaagaagtactttcaggatctccttgatgaagaggaatcgctcaagacgcagctcgcttactttaccgactcaaaaaacaccggccgacagctgaaggacaccttcgcagatagccttcggtacgtgaataagattctgaattcgaagtttggatttaccagccgcaaggtcccagcacatatgccccacatgattgaccggattgtgatgcaggaactgcaagacatgtttccagaagaatttgataagacctcattccacaaggtccggcattcagaggacatgcaatttgcattttcgtacttctactacctgatgtcggcggtgcagcctttgaatatctcgcaggtgttcgatgaggtggacaccgatcaatcaggcgtcctgtcggatagagaaattcgcactctggcaactaggattcatgagctgcctctgtcattgcaagatcttaccggactcgaacacatgttgatcaattgctccaagatgttgcctgcagatattacccaactcaacaatatcccacctacccaggagtcatactacgaccccaatctccctccagtgaccaagtcgcttgtcactaactgcaagccggtgaccgacaaaattcacaaagcatacaaggataagaataagtaccgcttcgagattatgggtgaagaagagattgcatttaagatgatcaggactaacgtcagccatgtggtgggacaacttgacgacataagaaagaaccctcgcaagttcgtctgccttaacgataacattgatcataaccataaagacgcacagactgtcaaggcggtgctccgcgacttttacgagagcatgttccctattccttctcaatttgaactgccaagagaataccggaaccggtttctccatatgcatgagcttcaagaatggagagcataccgagataaactcaaattctggacccattgtgtccttgcaaccctgatcatgtttactattttctcattcttcgccgaacaactgattgcgcttaaacggaagattttcccacgcagacgaatccacaaggaggcctcccccaaccgtattagggtg

SEQ ID NO: 16885 - DNA, 3768 bp, synthetic construct
  misc_feature 1..3768: note = source = /note="Description of Artificial Sequence: Synthetic coding sequence"
  source 1..3768: mol_type = other DNA
atgctgtttaaacttctgcaaaggcaaacttacacctgtctttcccatcgctacggtctttacgtgtgttttctgggggtggttgtcaccattgtctcggcatttcagttcggagaagtcgtgctggagtggtcgagagatcagtaccacgtgctttttgatagctaccgcgataacatagcaggaaaatcttttcaaaaccgtttgtgtctgcctatgcctattgatgtcgtgtacacctgggtgaacggaacggatcttgagctgctgaaggaactgcagcaggtgcgagagcaaatggaggaagagcaaaaggcaatgagggaaatactgggtaagaacaccactgagccaaccaagaagtccgagaagcagctcgagtgtctgctgacgcactgcataaaagtccccatgctcgtgctggacccagcactgccagcgaatatcaccctgaaggacctgccttcgctttacccgtctttccactcggcaagcgacattttcaatgtggcaaagcctaagaacccgagcactaacgtgagtgtcgtcgtctttgactcgacgaaggatgtggaggatgcccattccggtctgcttaagggcaacagccggcaaactgtgtggcgtggctacctcacgactgataaggaagtgcctggactggtgttgatgcaggatctggcatttctgtcaggattcccacctacttttaaggaaactaaccagctgaaaactaagctcccagagaacctcagctcaaaggtgaagctccttcaactttacagtgaagcgtcggtggcactgctgaagctgaacaaccctaaagattttcaagagcttaacaagcaaaccaagaaaaacatgaccattgatggtaaagaactgaccatatcacctgcttacttgctttgggatctgtccgcaataagccaatcaaagcaagacgaagatatctcagcatcgagatttgaggataacgaagaactccgatactcactgcgctctatagaaaggcatgccccttgggtcagaaacatattcattgttaccaatggacaaattccttcatggctcaacctggacaacccacgagtcactatcgtgactcatcaagatgtctttcgcaatttgtcccacttgccaactttctcgtcgccagccatagaaagccatattcatcgaattgaagggctgtcacagaaattcatatacctgaacgatgatgtgatgttcgggaaagatgtgtggccagacgacttttactcacactcgaagggccaaaaggtgtatctgacttggcctgtgcctaactgtgcagaaggttgtcccggctcgtggattaaggatggttactgtgataaggcctgtaacaattcagcatgtgattgggatggaggcgactgcagcgggaactccggtggatcgcggtacatcgcaggagggggtggtactggatcaatcggtgtcggtcaaccatggcaattcggcggaggcattaactcagtgtcgtactgtaaccagggatgtgccaactcctggctggcagataagttttgtgatcaagcatgtaatgtgctttcgtgtggatttgatgcaggagactgtggtcaagaccactttcatgaactgtacaaagtgatactgctgcctaaccagacccattacattatccccaagggtgagtgtctcccatacttttccttcgcggaagtggcaaaaaggggagtggaaggtgcttattccgacaatccgatcattagacatgcgtccatagcgaataagtggaaaactatccatcttatcatgcatagcggaatgaatgccaccaccattcatttcaatctcacctttcaaaacaccaacgacgaagagttcaagatgcagattaccgtggaagtggatactagagaagggcctaagctcaactccaccgcacagaaggggtacgaaaacctggtgagcccaattactttgctgccagaagcagaaattctctttgaagatatcccgaaagaaaagcgcttccctaagttcaagcggcatgacgtcaactccacccgacgcgcacaggaagaagtgaagataccccttgtgaacatatcactgttgccaaaagatgcacagctttcacttaacacccttgatctgcaacttgaacatggtgatatcacgctgaaaggctacaacctgtcgaagtccgcacttcttagatcgtttcttatgaattcgcaacatgccaagattaagaatcaggcaatcattactgacgagactaacgacagcctggtcgctcctcaagagaagcaagtgcacaaatccattctgcccaactccctgggagtcagcgaacggttgcagagactgacctttccagcggtcagtgtgaaggtgaacggccatgatcaggggcaaaatcctccactggatctggaaaccactgcgagatttagagtggaaactcacactcagaaaaccatcggaggcaatgttaccaaggagaagccaccatctcttattgtgccccttgaatcccaaatgactaaagagaaaaagatcaccggtaaggaaaaagagaacagcagaatggaagaaaacgcggaaaatcatatcggcgtcacggaggtgctccttggtaggaagctccaacattacactgattcgtatcttggattccttccatgggagaaaaagaagtattttcaagatcttctcgatgaggaagaatcgctcaagacgcagttggcatacttcaccgactcgaagaacaccggcagacaactgaaggatacttttgccgactccctcaggtacgtgaataagatcttgaattcgaagtttggatttacctcaagaaaggtgccggctcatatgccacatatgattgatagaatcgtcatgcaggaactgcaagatatgtttcccgaggaatttgataagacttcattccataaagtcagacacagcgaagatatgcagttcgcattttcatacttttactacctcatgtcagcagtgcaaccactgaatatcagtcaagtctttgacgaagtcgacaccgaccaatcgggagtgctcagcgaccgggaaattcgtaccctggccactcgcattcacgaactgccactttcgttgcaagatttgactggcctggagcacatgctgattaactgctcgaaaatgcttccagccgatattacccaactgaataacattccaccaacccaggagtcttactacgacccaaacctgccgcctgtgacgaagtccctcgtcaccaactgcaagccggtgactgataagatccataaggcctacaaggataagaacaagtacagattcgagattatgggtgaagaagaaattgctttcaaaatgatccggaccaacgtctcgcatgtggtcggacagctggatgatatacgaaagaacccccgcaagtttgtgtgcctgaatgacaacatcgaccataaccacaaggatgcacagactgtgaaagcagtcctgcgagacttttacgaatccatgtttcctattccttcgcagtttgaacttcctcgggaataccgcaaccgctttctgcatatgcacgaacttcaagaatggcgcgcctacagagacaagttgaaattctggacccactgcgtgcttgcgacccttatcatgtttaccatcttctccttttttgcagagcagctgatcgcactcaagcgtaagatatttcctcggcgacgcatccacaaggaggcatcaccgaacagaatccgcgtc

SEQ ID NO: 16886 - DNA, 3768 bp, synthetic construct
  misc_feature 1..3768: note = source = /note="Description of Artificial Sequence: Synthetic coding sequence"
  source 1..3768: mol_type = other DNA
atgcttttcaagttgcttcagagacaaacctacacctgcctgtcgcatcggtatggattgtacgtgtgttttctcggggtcgtcgtgaccattgtctctgcttttcagtttggtgaggtggtgctggagtggtcccgagatcaataccatgtgctttttgattcctatagagacaacatcgcaggcaagagttttcaaaaccgtctttgcttgcctatgcccatagatgtggtgtacacttgggtgaacggtactgaccttgaactgcttaaggagctccaacaggtccgggagcagatggaagaggagcagaaggcgatgagagaaattcttggtaagaatactaccgaacctactaagaagtcggaaaagcaactcgagtgtctccttacccattgtatcaaggttccaatgttggtgcttgaccctgccctcccagcgaatatcaccctgaaagatttgccatcgctgtacccctcgtttcatagcgcatcggacattttcaacgtggcaaaaccaaagaacccttcgactaacgtgtccgtggtggtatttgactcgaccaaagacgtcgaggacgcacactccggacttctcaagggtaactccagacagaccgtgtggagaggatatctgacgaccgataaagaagtcccaggcttggtactcatgcaggatcttgctttcctgagcggcttcccacctacttttaaggaaactaatcagctgaaaactaagttgcctgaaaacctcagctcaaaggtgaaacttctgcaactgtactccgaagcgtcagtcgcactcctcaagctgaacaacccaaaggattttcaagaactgaataaacaaaccaagaagaatatgaccatagatggtaaagagcttaccatctcacctgcttacctgctgtgggatctgtctgctatctcacaatcgaaacaggatgaagatatttcggcatcaagattcgaagataacgaagaactccgatacagccttaggtcaatagaaagacatgcaccctgggtcaggaacatctttattgtgaccaacggccagataccttcatggcttaatctggataatccgagagttactattgtcacccaccaggatgtctttcgcaacctgagccatctgccgaccttcagctccccagccatagaaagccacatccatcgaatcgagggactcagccaaaagttcatatacctcaatgatgatgtgatgtttggcaaggacgtctggcctgacgacttttactcgcattctaaagggcaaaaagtgtacttgacttggcccgtgcccaactgcgcagagggatgccctgggagttggattaaggatggatactgtgacaaagcatgtaacaactcagcatgtgattgggatggaggagattgttcgggaaactccgggggttcccggtacattgctgggggaggcggaaccggttcgatcggagtgggacaaccctggcaattcggaggcggaattaactccgtctcatactgtaaccagggttgtgcaaattcgtggctggctgacaagttctgtgatcaggcctgtaacgtgctgtcttgtgggtttgacgcaggcgattgcggccaggatcattttcacgaactgtacaaggttatactccttccaaaccaaactcattacattattcccaagggggaatgccttccttacttctcatttgctgaggttgcaaagcgcggcgttgaaggggcatactcagataatcccattatacggcatgcgtcgatagcaaacaaatggaaaaccatccatcttatcatgcatagcggaatgaatgccactacgattcatttcaatctgacttttcaaaacactaacgacgaagagttcaaaatgcagatcacggtggaggtggatacccgagaagggcccaaactgaattccactgcacaaaagggctatgaaaatcttgtgagccctattaccctcttgcccgaggccgaaattctgtttgaggacatcccaaaagaaaagcgcttcccaaaattcaagcgccatgatgtaaattcgaccagacgggcacaggaagaggtcaagatacctctggtgaacatcagcctgcttcctaaagatgcccagctctccctcaacacgctggacctgcagctggaacacggagatatcactcttaagggttacaacctttcaaagtcggccctgcttagatcgttcctcatgaactcacagcatgccaagattaagaaccaagccattatcaccgatgaaaccaatgacagcctcgtggcgccccaggagaagcaagtccacaaatcgattcttccaaactccttgggagtgtctgaaaggcttcagcggctcactttccctgccgtgagtgtgaaggtgaacggtcatgaccagggccagaaccctccactggatctggaaactaccgcccgattcagggtggagactcatactcaaaagactataggtggtaacgtgaccaaggagaagcctccatcccttattgtccctctggaatcccagatgacgaaagaaaagaagatcactggaaaagagaaggaaaactcgcgcatggaggaaaatgcagagaaccacattggagtgactgaggtgttgttgggcagaaaactgcaacactacacggattcctacttgggatttttgccttgggagaagaagaagtactttcaggacctcctcgatgaggaagagagccttaagacccagctggcgtactttactgactccaagaataccggaaggcaactgaaggatacctttgcagactcgctgagatacgtgaataagatccttaatagtaagttcgggtttactagccgtaaggtgccagcgcacatgccacacatgattgatcgaattgtcatgcaagagcttcaagatatgtttccagaagaattcgacaaaacgtcgtttcataaggtcaggcatagcgaagatatgcaatttgcattttcctacttttactaccttatgagcgcggtgcaacctctcaacattagtcaggtgtttgatgaagtcgacaccgaccagtcgggtgtcctctctgatagggaaataagaaccctggccacgcgaatccacgaacttcctctgtcgctgcaagatctgaccggcctcgaacatatgctcatcaattgctccaagatgcttcctgcagacatcacgcaactgaacaacatccccccgactcaagaatcatactacgatccaaatcttccccctgtcaccaagtcactggtgaccaactgcaagcctgttaccgataagattcacaaagcgtacaaggacaaaaacaaataccggttcgagattatgggagaagaggaaattgcctttaagatgatccggactaatgtgtcccatgtggtgggccaattggacgacatccggaagaatcccagaaagtttgtttgtcttaacgataacattgatcataaccacaaggacgcacagaccgtgaaagccgtcttgcgcgacttctatgaatcgatgttcccaatcccttcgcaatttgagcttccaagagaataccgcaaccggtttctgcacatgcacgaacttcaagaatggcgagcatacagagataagctcaagttctggacgcactgtgttctggcaactctgatcatgtttactatcttttcctttttcgccgaacaactgattgcacttaagaggaagatctttccacgtcggcgtattcataaggaagctagcccgaatcggatacgcgtg

SEQ ID NO: 16887 - DNA, 3768 bp, synthetic construct
  misc_feature 1..3768: note = source = /note="Description of Artificial Sequence: Synthetic coding sequence"
  source 1..3768: mol_type = other DNA
atgctcttcaaactgctgcagcggcagacgtacacatgtctgtcccaccgatatggtctgtacgtgtgctttctgggagtggttgtcacaattgtgtctgccttccagttcggggaagtcgtgctggaatggtcccgggatcagtaccatgtgctctttgactcttaccgggacaatatcgcagggaagtccttccaaaacaggctctgcctgcctatgcccatcgatgtcgtttacacctgggtgaacggcaccgacctggagctcctgaaagaattgcagcaggtgagggaacaaatggaggaagagcagaaggcgatgagagagattctggggaagaacaccacagaaccaacaaaaaagtccgaaaaacagctggaatgtcttctcacccactgcataaaagtcccaatgctcgtcctggaccccgcgctgccagccaacatcacgctcaaggatttgccctctctgtacccctccttccattccgcaagcgacatctttaacgtggctaaaccaaagaatccctccactaacgtgagtgtggttgtcttcgactctacaaaggatgttgaggacgcccactctggcctccttaaaggcaattcgcgccagaccgtgtggaggggataccttaccaccgataaggaggtcccggggctcgtgctaatgcaggatctggcatttctgtcaggattccctcctacattcaaggagacgaaccagctgaaaacgaagctgccggagaatctgtcctctaaggttaaattgctccaactttactctgaagccagcgtggctctgttgaagctcaataaccccaaggacttccaggaactcaacaagcaaaccaagaagaacatgactatcgatggcaaggagctgacaatcagcccagcttatcttctgtgggaccttagcgccattagccagtccaaacaggacgaagatatttcagcgtcccggtttgaggataacgaagagctccggtacagcctacggagcatcgagagacatgccccatgggtgaggaacatcttcatcgtaaccaacggccagattccctcctggttgaatttagataatcccagggtcacgatagtcacccaccaggatgtgttccgaaatctgagtcacctccctacttttagttcccctgctatcgaaagccacatccaccggattgaaggtctatctcaaaagttcatatacctaaatgatgacgtcatgtttggtaaagacgtgtggcccgacgatttctactctcacagtaaaggccaaaaagtctacttaacctggcccgttcctaactgcgccgaaggctgcccagggagctggatcaaggatggctactgcgataaggcctgcaataacagtgcctgcgattgggacggcggggactgtagtggaaactctggtgggtcccgctacatcgcagggggtggcggcactgggagcatcggagttgggcaaccatggcagttcggcggcggaataaacagtgtctcgtattgcaaccaagggtgcgccaatagttggctggcagataagttttgtgatcaggcgtgcaatgtcttaagctgcgggttcgatgccggggactgcgggcaggaccacttccatgaactgtataaggtcatcttgctgcctaatcagacgcactacataatcccaaaaggggaatgtctgccttacttttccttcgcggaggtagcaaaacgtggagtggaaggcgcatacagcgataaccctatcatccgccacgccagtattgcaaataagtggaagaccatccacctcataatgcatagtgggatgaacgcaaccacaatccacttcaacctgaccttccagaacaccaacgacgaggaattcaagatgcagatcactgtggaagtcgatacacgcgagggacccaaactcaactccactgcccagaagggttacgaaaacctggtatctcctataactttgctgccagaagccgagattttgttcgaggacatccccaaggaaaagaggtttcccaagtttaaacgtcacgatgtgaatagcacgagaagggcccaggaggaggtgaagattcccttggtcaacatttcacttttacctaaagatgcgcagctgagcctcaacacattggaccttcaactcgaacatggggacattactctgaagggctacaatctttccaagagcgccctactgcgcagctttctgatgaatagccagcatgcgaagatcaagaatcaagccataatcacagatgaaaccaacgactccctagtcgctcctcaggaaaagcaggtgcataagagtatattgccaaatagcctcggagtgagtgagaggcttcagaggttaaccttccccgccgtgtctgttaaggtcaacggtcatgatcaggggcagaatccaccactggacctggagactacagcgaggtttcgcgttgagactcacacccagaagaccatcgggggaaatgtgactaaagagaagcctccctccctgatcgtcccccttgagagccagatgacgaaagagaaaaaaatcactgggaaggagaaagaaaacagtcggatggaggagaatgcagagaaccacattggcgtgaccgaggtgctgctgggccggaagctgcagcactataccgactcttacttggggtttctcccatgggaaaagaagaaatacttccaggatcttctggacgaggaagaatcattgaagacccaacttgcatactttactgattctaaaaacacagggcgacagttgaaggacacttttgctgacagtctgcgctatgtcaacaagatactgaactcaaagtttggcttcaccagccggaaggtgcccgcccatatgcctcacatgatcgacaggatcgtgatgcaggaactacaagatatgtttccagaggagttcgacaagaccagctttcacaaggtccggcacagcgaggatatgcaattcgcattctcttacttttattatttaatgagtgctgtccagcccctcaatatcagccaagtcttcgacgaggtcgataccgatcaatctggcgttttgtcggatcgggaaattagaactctcgcgacaagaatccatgagctaccactgagtttacaggatttaactggactagagcatatgctcatcaattgcagtaagatgctccccgcagatattacccaactcaataacatccctcctacacaggagtcctactatgatcctaacttgccgcctgtcacaaagagcctggtgaccaactgtaaacccgtgacggataagatccacaaagcctacaaggataagaataagtatcgctttgaaattatgggcgaggaggaaatagccttcaagatgattcggactaatgtcagccatgtggtcggccagctggacgacataaggaaaaatccccgcaaatttgtgtgcctcaatgataatatcgaccacaatcacaaagacgcccagactgtgaaagcagtcctgagagatttctatgagtccatgtttcccatcccatcccagtttgaactgcctagggaatataggaacagattcctccatatgcacgaattgcaggagtggagagcttatagggataagctcaaattttggactcactgcgtcctagctaccctgatcatgtttacgatcttctccttcttcgcagaacaactgatcgcactcaaaagaaagatttttccgaggaggagaatacacaaggaggcctcccccaatcgcattcgggtg

SEQ ID NO: 16888 - DNA, 3768 bp, synthetic construct
  misc_feature 1..3768: note = source = /note="Description of Artificial Sequence: Synthetic coding sequence"
  source 1..3768: mol_type = other DNA
atgctgttcaagctgcttcagcggcagacctacacctgcctttcgcatcgctacgggctctacgtgtgctttctgggagtcgtcgtcactatcgtttccgcgttccaatttggcgaagtcgtgctggagtggtcccgggatcagtaccacgttctcttcgactcgtatagagacaacatcgccggaaagtcatttcagaaccgcttgtgccttcccatgcctatcgatgtcgtgtacacctgggtgaacggaactgatctggaactgctcaaggaactgcaacaggtgcgcgagcagatggaagaggagcaaaaggctatgcgcgaaatcctcggcaagaatacgaccgaacccaccaagaaatccgaaaagcaacttgaatgcctcctgacccattgcatcaaagtcccgatgctggtgctggaccctgcactgccagccaatatcaccctcaaagatctgccatcgctgtacccgtccttccacagcgcctcggatatcttcaacgtggcgaagccgaagaacccgagcactaacgtttcagttgtcgttttcgatagtactaaagacgtggaggacgctcactctggactgctcaagggcaattcaagacagaccgtgtggagaggatacctcaccaccgacaaggaagtccctggcctggtgctcatgcaggacctcgccttcttgtcgggattccctcccacgttcaaagaaaccaatcagctgaaaactaagttgccggaaaatctgtcctcgaaggtcaagctgttgcagctttacagcgaagcgtccgtggcgctcctgaagctgaataaccctaaggattttcaggagctcaacaagcagaccaaaaagaacatgaccattgacggaaaagagctgactatctcccccgcatacctgctctgggacctctcagcaatctcgcaatcaaagcaagacgaagatatcagcgcctcgcgctttgaggacaatgaggagctgagatactccctccggagcatcgaacgccatgccccatgggtgaggaacatcttcatcgtgactaatggacagattccgagctggcttaatcttgataatccgcgcgttacgatcgtgactcatcaggatgtctttcgcaatctgtcccacctgccgaccttctcgtccccggctatcgagtcccatatccaccgaatcgagggcctgtcacaaaagttcatctacctgaatgatgatgtgatgtttggtaaggacgtgtggccggatgatttctactctcactcaaagggccagaaggtgtacctgacctggccagtgccgaactgcgccgagggatgcccgggtagctggatcaaggacggatactgcgataaggcgtgcaacaattcggcctgcgactgggacggaggggactgctccgggaattcaggtggttcccggtacatagctggaggtggcgggaccggatcaatcggggtcggccagccttggcaatttgggggtggcattaactcggtgtcatactgtaaccagggctgtgccaatagctggttggctgacaagttttgcgaccaagcatgcaacgtgctcagctgcggattcgacgcgggagactgcggacaggaccactttcacgagctgtacaaagtgatcctgcttccgaaccaaacgcactacatcatcccaaagggagaatgcctgccgtacttctcattcgccgaagtggcaaagcggggggtcgagggcgcctacagcgacaatccgattatccgccatgcctcaatcgctaacaaatggaaaaccatccatctgattatgcatagcgggatgaatgcaactaccatccactttaacctgacgttccaaaataccaatgacgaggaattcaaaatgcagatcactgtcgaggtggacacgcgggaaggacctaagctgaattccaccgctcagaaggggtacgaaaaccttgtctcgccaatcaccctgctcccggaggcagagattctgttcgaagatattccgaaggaaaaaaggttcccgaaattcaagcggcacgatgtcaattcaactagaagagcacaagaggaagtcaaaatcccattggtcaacatctcgctgctcccaaaagacgcacagctgtcgctgaacactctggatcttcagctcgagcatggagacatcaccttgaagggatacaacctgtcgaaatcggctctgctgagatctttcctgatgaattcccaacacgcgaaaatcaagaaccaggcaatcattactgacgaaaccaacgactcgcttgttgccccgcaagaaaagcaagtgcacaagtccatcttgccgaactcgctcggcgtctcggagcgcctgcaacggctgactttcccggccgtgtccgtgaaggtgaacggacatgaccaggggcagaatccgcctctggacctcgagactaccgcccgcttccgcgtggagactcacactcaaaagaccatcggtggaaacgtgaccaaggagaaacctccttcgctcatcgtgcccctcgaaagccaaatgactaaggagaagaagataactggaaaggagaaagaaaattctcggatggaggaaaacgcggaaaaccatatcggagtgacggaagtgctgctcggaagaaagctgcagcactacactgactcgtacctgggattcctgccgtgggagaaaaagaagtactttcaggacctcctcgatgaagaagaatcgctcaagactcaactggcatactttaccgactcaaaaaacactggccgccagcttaaagacactttcgcggactccctgcggtacgtgaacaaaatcctcaactcaaagttcggcttcacctccaggaaagtgccggcacacatgcctcacatgatcgaccgcatcgtgatgcaggaactccaagatatgttcccggaagagtttgataagacttcgttccataaggtgcgccattcggaggatatgcaattcgctttctcgtacttctactacttgatgtctgccgtgcagccgctcaatatctcccaggtgtttgatgaagtggatactgatcagtcgggcgtgttgtcggaccgggaaatccggactctggccaccagaatccacgagctgccgctgtcgttgcaggacctcacggggctggaacacatgttgatcaactgctcaaagatgctgccagccgacatcacccaactgaacaatatccccccgacccaagaatcgtactacgaccctaacttgccaccggtgaccaagtcccttgtgactaattgcaaaccggtgactgacaagatccacaaggcctacaaggacaagaacaagtaccgcttcgagatcatgggggaagaggagatcgcgtttaagatgattcggaccaacgtctcacatgtggtgggacagctcgacgatatcaggaagaatccacgcaaatttgtgtgcctgaacgacaacatcgaccacaaccataaggatgcccagaccgtgaaggccgtcttgcgggacttttatgaatcgatgttcccgattccctcgcaattcgaactccccagggaataccgaaataggttcttgcatatgcatgagctgcaagaatggagggcctaccgtgacaaactgaaattctggactcactgcgtgctggcaaccctgatcatgttcaccatctttagctttttcgcagagcaactgatcgcgctcaagcgcaagatcttcccgcggcgtcgcatccacaaggaagctagccccaatcgcattcgcgtc

SEQ ID NO: 16889 - DNA, 3768 bp, synthetic construct
  misc_feature 1..3768: note = source = /note="Description of Artificial Sequence: Synthetic coding sequence"
  source 1..3768: mol_type = other DNA
atgttgttcaagctgctccagcgccaaacctacacttgcctctcccatcggtacggactctacgtgtgtttcctcggggtggtggtgactatcgtgtcggctttccaattcggggaggtcgtgctggaatggtcgcgggaccagtaccatgtgctctttgactcgtaccgcgacaacatcgccggaaagtcattccagaatcggctctgcctgccgatgccgatcgacgtggtctacacttgggtgaacgggaccgatctggagttgctgaaggagctgcagcaagtgcgcgaacagatggaagaagagcagaaggccatgcgggaaatcctgggtaaaaacacgaccgaaccgaccaaaaagagcgaaaaacaattggagtgcctgctgactcactgtatcaaagtgcctatgctggtgctggacccggcgctgccagctaacatcactctcaaagatctcccctcactgtatccttcgttccattcagcgtcagacatctttaatgtggcgaaaccaaagaacccatccacgaacgtctccgttgtcgtgttcgactccaccaaagatgtcgaagatgctcattccggactcctgaagggaaactcgcgccagacggtttggagaggatacctgaccactgacaaagaggtcccgggtctggtgttgatgcaagaccttgccttcctgtccggatttccaccaactttcaaggaaaccaatcagcttaagaccaagctgcccgaaaatctgtcaagcaaggtgaaactcctgcagctttactcagaagcgtcggtcgcgctgctgaagttgaacaacccgaaggatttccaggaactgaacaaacagacgaagaaaaacatgactatcgatggaaaggaactgaccatttccccggcgtacctgctctgggatctgtcagcgatctcacagagcaagcaggacgaggacattagcgcctcgagatttgaagataacgaggaactgcgctactcgttgcggtccatcgaacggcatgccccttgggtgcgcaacatcttcatcgtgactaatgggcaaatcccgtcgtggcttaatctggacaatcctcgggtgaccatcgtgactcaccaggacgtctttaggaatctgagccacctccctaccttctcctcgccagctattgaaagccatatccaccggatcgaaggactctcgcagaagttcatttacttgaatgacgacgtcatgttcggaaaggatgtctggccggacgatttctactcccactcgaaaggacagaaggtgtacctcacctggcctgtgccgaactgcgccgagggctgtcctggatcatggatcaaggacggttactgtgacaaagcctgcaacaactcggcctgtgattgggacggtggagactgctccggcaactcgggtggatcccggtacatcgcgggaggcggagggaccgggagcatcggggtcggacagccgtggcagttcgggggcggcatcaactcggtgtcgtactgcaaccaaggctgcgctaacagctggctggcagacaaattctgcgaccaagcatgcaatgtgctgtcctgcggcttcgatgccggagattgcggccaagaccatttccatgaactctacaaggtgatcctgttgccgaaccagactcattacatcatcccgaagggggaatgtctgccatacttctctttcgcggaagtcgcaaagcgcggggtggaaggagcgtactccgacaacccaatcatccgccatgccagcattgccaataagtggaaaaccattcacctcattatgcattcgggaatgaatgcgactaccatccacttcaacctgacttttcagaacaccaacgatgaagaattcaagatgcagatcactgtggaagtggacaccagagaaggtccgaaactgaactcgaccgctcagaaggggtacgagaacttggtaagccctatcacgttgctcccagaagccgaaatcctgtttgaggatatcccgaaagagaagcggttcccgaaattcaaacggcatgatgtcaactcaactcggagagcacaagaagaagtcaagatcccactggtcaatatctcactgctgccgaaggacgcgcagctctcgctgaacactctcgacctccaactcgagcacggagatatcaccctcaagggatacaacttgtcgaagtcggccttgctcagatcgttcttgatgaattcgcagcacgccaagatcaagaaccaagcaatcatcaccgatgaaaccaacgactcgctggtcgcgcctcaggagaagcaggttcataagtcgatcctgcctaacagcctgggtgtctccgaaaggctgcagaggctgacttttccagcagttagcgtgaaggtgaacggacacgaccagggacaaaaccctcctctcgatttggaaactactgccagattccgcgtagaaacccatactcaaaagaccatcggcggaaatgtgactaaagaaaaacccccatcactcatcgtgcccctcgaatcgcagatgactaaggaaaagaagatcactgggaaggagaaagagaattcacgcatggaggagaatgcagagaaccacatcggcgtgactgaggtgttgctgggacggaagctccagcattacaccgactcgtacctcgggttcctcccatgggaaaagaagaagtacttccaggatctgctggatgaagaggaatcgctgaaaacccaactggcctacttcaccgacagcaagaatacgggccggcagctgaaggacaccttcgccgactccctccgttacgtcaacaagatcctgaattcgaagtttgggttcacttcacgcaaggtccctgctcatatgccgcacatgatcgacaggatcgtcatgcaagagcttcaggacatgtttccagaagagttcgataagacttcgttccacaaagtgagacactcagaggatatgcagtttgccttctcgtacttctactacctgatgtctgcagttcagcctctgaatatctcacaggtgttcgacgaagtcgacaccgatcagtcaggagtcctgtcggaccgggagatcagaacgctggcgaccaggatccatgagctgccactgagtctccaggacctgaccggcctggaacacatgctgattaactgcagcaaaatgcttccagccgacataactcaactgaacaacatcccgccgacgcaggagtcatactacgatccgaatcttccgccggtgactaagtcgcttgtgaccaattgcaagcctgtcactgacaaaattcacaaagcctacaaggacaagaataagtatcggttcgaaatcatgggcgaagaggagatcgcgttcaagatgatcaggaccaacgtgtcgcacgtggtggggcagctcgatgatatccggaagaatcctcgcaaatttgtgtgtctgaacgacaacattgaccacaatcataaagacgcccagaccgtgaaggctgtgctgagagacttctacgagtcgatgtttcctatccctagccagttcgagctgccgcgggaataccgaaaccgcttcctgcacatgcatgaactccaggagtggagagcgtaccgggacaaactgaagttctggactcactgcgtgttggccactctcatcatgtttaccattttctcgttcttcgccgagcagcttatcgctctcaaacgcaagattttcccacggcgcaggatccacaaggaggcatccccgaaccgtatcagggtg

SEQ ID NO: 16890 - DNA, 3768 bp, synthetic construct
  misc_feature 1..3768: note = source = /note="Description of Artificial Sequence: Synthetic coding sequence"
  source 1..3768: mol_type = other DNA
atgctgttcaagttactgcagaggcagacgtacacctgcctgagccacaggtacggcttatacgtttgcttcctgggtgtggtcgttactatcgtgtctgcctttcagttcggcgaagtcgttcttgaatggtcaagagatcaataccatgtcctgttcgatagttacagggacaacatagccggtaaatccttccagaatcgcctgtgcctgcctatgccaattgatgttgtgtatacttgggtcaacgggactgacctggaactcttaaaggaacttcaacaagtgcgcgaacaaatggaagaagaacagaaagcaatgcgcgaaattcttggcaagaatactacagaacctactaagaagagcgaaaagcaacttgagtgcctgttaacccattgtattaaggttccgatgctggtcctggaccctgcgctccctgcaaacataaccctgaaggatttgcctagcctgtatccaagcttccacagcgcgagcgatatttttaacgttgccaaaccaaagaacccatcaacgaatgttagcgtcgtcgtttttgattcaacgaaggacgtcgaggacgcccactcaggactgctgaagggcaatagccgccaaactgtctggcgtggctatcttacgaccgacaaggaggtaccgggtttggttcttatgcaggatctggcttttctgtctgggttcccacctaccttcaaggaaactaatcagctgaagactaagctgcctgaaaacctgtctagtaaagtcaagctgctgcagctctatagcgaggcttctgtcgccctgttgaaactgaataatccaaaagattttcaagagttgaataagcaaacgaagaagaacatgacaattgacggcaaggagctgaccataagcccggcctatctcttgtgggatctgtccgctatcagtcaatcaaagcaagacgaagatatcagcgccagtcgctttgaggataacgaagaactccgctacagcctgcgcagcatcgagcgccatgctccgtgggtgagaaacatctttatcgtcaccaacggccaaattccttcctggctgaacctggacaatcctcgcgttactatcgtgacccaccaggatgtttttcgtaatctgtcgcatctgcctactttttcgagccccgccattgaatctcatatccaccgcatcgagggtttaagccagaaatttatctatctgaacgacgatgtgatgttcggcaaagacgtgtggccagacgatttctacagtcacagcaaagggcagaaggtttacctgacctggcctgttccgaactgcgccgaaggttgcccgggtagctggatcaaggatggatactgcgataaggcctgcaacaatagcgcctgcgactgggacggaggtgactgttctggaaacagcggcggttcccgctatatcgcaggcggcggcggcacaggaagcatcggcgtgggccaaccttggcagtttggtgggggtataaattccgtttcttattgtaaccaggggtgcgcaaactcttggctggcagacaaattttgtgatcaggcctgcaatgttctcagctgtggcttcgacgcgggggactgtggccaagatcattttcatgagctatacaaagttattctgttgcccaatcaaacccactacatcatccctaaaggcgaatgcttaccttactttagttttgctgaggtcgcaaaacgaggtgtcgagggcgcgtattcggacaaccctattattagacatgccagcatagccaataaatggaaaacgatccatctgatcatgcatagcggtatgaacgcgacgaccatccacttcaatctaacctttcaaaacaccaatgacgaagaattcaagatgcagattacagttgaggtcgatacccgggaaggtccgaagctcaatagcaccgcgcaaaaaggctacgagaatctggtctcaccgattacgctgctgccagaagccgaaattctctttgaagatatcccaaaggagaaacggttcccgaagttcaaaaggcacgacgtcaacagcacccgccgcgcccaggaagaagttaaaatcccgctggtgaacatatctttgctgcctaaagatgcgcagcttagcctgaacactcttgacttacaactcgagcacggagacattacgctcaaaggctacaatttaagcaagtctgcgttgctgcgcagctttctgatgaacagccagcacgcgaaaatcaagaaccaagcgatcataaccgatgaaaccaacgattcccttgttgcacctcaggagaagcaggtgcacaagagcatcctgcctaactctctgggcgtctccgagcgtctgcagcgcctgacatttccagcggtttccgtcaaagttaacggtcacgatcagggccagaatccacccctggatctggagaccaccgctcgctttcgagttgagactcatacccaaaagaccattggaggcaacgtgacaaaggagaagcctccgagtttaatcgtccctctggaaagccagatgactaaggagaagaagatcactggcaaagaaaaggaaaatagcagaatggaggaaaatgccgagaaccacatcggcgttacggaagttctgttgggtcgcaagctgcagcactatacagattcctatctgggcttccttccatgggaaaaaaagaaatacttccaagatctgctggacgaggaagaatcgctgaaaacacagctggcatacttcaccgatagtaagaatacgggccgccagctcaaggataccttcgccgatagccttcggtatgttaacaaaatcttgaacagcaaatttggctttaccagccgtaaagtccctgcacatatgccacacatgatcgatcggatcgtcatgcaggaactgcaggacatgtttccagaagaattcgacaaaaccagcttccataaggttcgccactccgaagatatgcagttcgctttcagctacttttactacctgatgtcagcagttcagccactcaatatctcgcaggtgtttgatgaagtggacacagaccagagcggtgtgctgtccgaccgagaaattagaaccctggcaacccgtatccatgagttgcctctgagccttcaggacctgacaggtctggagcacatgttgatcaactgcagcaagatgctgcctgcagacattacccagctgaacaatatcccgcctacacaggaatcctactacgatccgaatctgccgcctgttaccaagagcctggtcactaactgtaagcccgtgacggataaaatccacaaggcttacaaggacaaaaacaagtatcgttttgaaatcatgggagaagaggagatcgcgttcaagatgattcgcactaacgtcagccatgtggtgggtcagctcgacgacattcgcaagaatccgcggaaatttgtttgtctgaatgacaatattgaccataaccataaagacgcccagaccgtgaaagcagttctgcgcgatttctacgagagcatgttcccgatcccttcccagtttgagctgccgcgcgaatatcgcaatcgcttcctgcatatgcacgagctgcaggaatggcgagcgtaccgagataagctgaagttctggacccattgtgtgttggccacgctgatcatgtttacgatcttctccttcttcgccgaacaattgatcgctctgaagagaaagattttcccgcgccgtcgtatccacaaggaggcgtctcctaatcgcattagagtg

SEQ ID NO: 16891 - DNA, 3768 bp, synthetic construct
  misc_feature 1..3768: note = source = /note="Description of Artificial Sequence: Synthetic coding sequence"
  source 1..3768: mol_type = other DNA
atgctgttcaagctcctgcagcgccagacgtatacctgcctgtcacacagatatgggctttacgtgtgtttcctcggagttgtcgtgaccatcgtctctgccttccagtttggggaggttgtgttggagtggagcagggaccaataccacgtcctgtttgacagttatagggataacatcgccgggaagtcgttccagaaccgactgtgtctcccgatgcctattgacgtcgtgtatacttgggtgaatggcaccgacttagagttgctcaaggagttacaacaagttcgtgaacagatggaagaggagcagaaagccatgagggaaatccttggcaagaatacaacggagcctactaaaaagagtgagaagcagctggaatgtctactaacacactgcattaaggtgccgatgctggtgctagacccagcattgcccgccaatataactctgaaagatctgccgtccctttatccaagtttccattctgcatctgacatattcaacgttgcaaaaccgaagaatccctccaccaatgtgtccgtagtggtcttcgacagcaccaaagacgtcgaggatgcacacagtggacttctcaagggcaacagccgccagaccgtgtggcggggctacctgactacggataaagaggtacctgggttagttcttatgcaggacctggcttttctgagtggatttcctcctacctttaaggagacaaatcagctcaagaccaagctgcccgaaaacttgagctcgaaggtcaagttgctgcaactgtactccgaggccagtgttgccctgctgaagctcaacaatcccaaggatttccaagaactgaacaagcagacaaaaaaaaacatgacgatagacggaaaggaactcaccattagcccagcctatcttctgtgggatctgtctgctatatcccaatccaaacaggatgaggacatcagtgcctccagattcgaggataacgaggaactgcggtacagcctgaggtctatcgaaaggcatgccccatgggttcgcaatatcttcatagtcactaatggccagatacctagctggctcaaccttgataaccctcgcgtgactatcgtgacccaccaggatgttttcaggaacctttctcacttgcccacattctcatcacctgcaatagagtcgcacattcacaggatcgaaggtctgagccagaaattcatctatctcaatgacgacgtgatgtttggtaaggatgtgtggccagacgacttttatagccacagcaaaggacagaaggtgtacctgacctggcctgtgcccaattgtgcagagggttgccctgggagctggataaaggatggttattgtgataaagcgtgcaacaattcagcatgcgattgggatgggggtgattgttctggtaactctggaggcagccgttacatcgcgggggggggaggcactggatctattggggtcggtcagccttggcagtttgggggcggaattaacagtgtgtcctattgtaatcaaggctgtgcaaactcctggctggccgacaaattctgtgatcaagcatgcaacgtgctctcttgcggctttgacgccggtgactgcgggcaagatcactttcacgaactgtacaaggtgattctgctgcctaatcagacccattacatcattcccaagggcgagtgccttccttacttttccttcgcagaagtcgccaaaaggggcgtggaaggcgcctattcagacaatcccatcataaggcatgcctcaatagccaacaaatggaagacgatacatctgattatgcacagtgggatgaacgccaccacaatccatttcaaccttacatttcagaacaccaatgacgaggaatttaaaatgcaaataactgtcgaggtcgacacaagagaaggaccgaaacttaattcaactgctcagaagggatatgagaatcttgtaagtccaatcactctgttaccggaggcagagatcctgttcgaggacataccaaaggagaagcgctttcccaaattcaaacgccatgatgttaatagcacacgccgagcacaagaggaagttaagatccctctggtgaacatcagtctgttacctaaagatgcccagctgtcattgaataccttggacctgcaactagaacatggcgacattaccctgaaaggatataatctctcgaaaagcgcactgcttcggtctttcttgatgaatagccagcacgcaaaaatcaagaaccaggcgatcattacggatgaaaccaatgactccctggtagctcctcaagagaagcaggttcataagtcgatcctaccgaacagcctgggcgtgtcagaacggctccaaagactcacctttccggcagtcagcgtgaaggtgaacggccatgaccagggccaaaacccccctctcgacctggagacaaccgccaggtttcgggtggagacccacacacagaaaacgattggaggcaacgttaccaaagagaagccaccatcactgattgtaccattggaatcgcagatgactaaagaaaaaaagatcacgggcaaggagaaggagaacagtaggatggaagagaacgcagagaatcacattggagtgacagaggttctcctggggcgcaagttgcagcactacactgactcttatctcgggtttctgccttgggagaagaagaagtactttcaggatctgttggacgaggaggaaagtctgaagactcagctggcctactttacggactcaaagaacaccgggaggcagcttaaggatacctttgctgatagccttcggtacgtaaataagattctgaattccaagtttggcttcacatcaagaaaggtgcctgcccacatgcctcatatgattgatcgcatcgtcatgcaggagttacaggatatgtttcccgaagagtttgacaagacatccttccacaaggtccgacatagcgaggacatgcagttcgccttttcttatttctattatctcatgagtgccgtccagcccctgaatatctcccaagtctttgatgaagtcgacactgatcagtctggggtcctgagcgatcgagagatacgcaccttggccacccgtatccacgagctgccgctatctcttcaagacctaaccgggctggagcacatgctgatcaactgttcgaaaatgctccccgcagatataactcagttgaataacatccctcccactcaggaatcttactatgacccgaatctcccgccagtgacaaagagtctggtaaccaactgcaaacccgtaactgataaaattcacaaggcctacaaggataaaaataagtaccgatttgagattatgggggaagaagaaattgcatttaaaatgatcaggacgaatgtatctcatgttgtcgggcaactcgacgacattcgaaagaacccccggaaatttgtatgcctgaatgacaatattgaccataaccacaaagacgcacaaaccgtcaaggccgtgctgcgggatttttacgagtctatgtttcccattccaagtcaattcgaactgcctcgtgaatacaggaacaggtttttgcatatgcatgaactacaggagtggcgggcctatagggataagcttaagttttggacccactgcgtcttagccacactgatcatgttcaccatatttagcttctttgcagagcagctaattgcactgaaacggaagattttccctcgacggcggattcacaaagaagcctcccctaacagaatccgcgtt

SEQ ID NO: 16892 - DNA, 3768 bp, synthetic construct
  misc_feature 1..3768: note = source = /note="Description of Artificial Sequence: Synthetic coding sequence"
  source 1..3768: mol_type = other DNA
atgctctttaagctgctgcagaggcagacatatacttgcctctcacacagatatggtttgtacgtatgcttcttgggcgtggtagttaccatcgtgtcagctttccagttcggggaggtggttctggaatggagcagagatcaataccatgtgctgtttgattcctaccgcgacaatattgccggaaaaagcttccagaatagactgtgtctgccaatgcccatcgatgttgtttatacttgggttaatggaacagatttggaactccttaaggaacttcagcaggtacgagaacagatggaggaggagcagaaggcaatgcgcgagatcctgggtaagaacactaccgagcctactaagaagagtgagaaacaactcgaatgccttctcactcattgtattaaggtacccatgctggtgctggatccagcattgcccgcgaacatcaccctgaaagatctcccttctttgtaccctagcttccatagcgcctctgatatcttcaacgttgcaaagccaaagaatccctcaaccaacgtttcagtggtagttttcgacagtactaaggacgtagaggatgcccactcaggcttgctcaagggaaactccagacaaaccgtttggcggggttatctgacaactgataaagaggtgccggggctggtgctcatgcaagacctggcttttctgtcagggttcccaccaacttttaaggaaaccaaccagcttaagactaaactccccgagaacctgtcttctaaggtgaaactcttgcagctttactcagaagctagcgtagcacttttgaagcttaataaccccaaagacttccaggaactgaacaaacagacaaagaaaaatatgacaatcgacggcaaggaactgactataagtccagcctatcttctctgggatcttagcgctatatctcagagcaagcaagatgaggacatctctgcgtcaaggtttgaggacaacgaggaacttaggtattctctcaggagtattgagcggcacgccccttgggtgcgcaacatcttcatcgtgaccaacggccagataccttcctggctgaaccttgataatcctagagttacgattgtgactcaccaagatgtgtttcggaatctgagtcatcttcctaccttctctagccctgccattgaatcccatatccatcgcattgagggactgtcccaaaagtttatctaccttaacgacgatgtaatgttcggtaaggatgtctggccggatgacttctactctcatagcaagggacagaaagtgtatctgacatggccggtaccaaactgcgctgaggggtgccctggctcctggattaaggacggctattgtgataaagcatgcaacaattctgcttgtgactgggacgggggggattgttcaggtaacagcggtggcagtaggtacattgctggcggtgggggtaccggctccatcggagtcgggcagccatggcaattcggggggggaattaattcagtgagttactgcaaccagggttgtgctaacagctggctggccgataagttttgtgatcaagcctgtaatgtccttagctgtggatttgacgccggcgattgtgggcaggaccattttcacgaactgtataaagtgatcctgctccccaatcagacgcattatatcatccctaaaggggagtgtctgccttatttcagtttcgctgaggtggctaagaggggggtcgagggagcctattcagataatcctatcattcggcatgcatcaatcgcaaacaagtggaaaacaatacacttgattatgcattctggaatgaatgcgaccaccattcatttcaacctgacttttcagaacactaacgacgaggagttcaagatgcagattaccgtagaggttgacacacgcgaaggccctaaattgaactccaccgcacagaaaggctatgaaaatctggtatcacctattacgcttctgccagaggctgaaattctgttcgaagacatccccaaagagaaacgctttccgaagtttaagcggcatgacgtgaatagtacaagaagggctcaggaggaggtgaagatccctctggttaatatctctcttctcccaaaggacgcgcagctgtccttgaacacccttgatctgcaactggagcacggggatatcaccttgaagggatacaaccttagtaaatcagcgctgctgagaagcttcctcatgaatagccaacatgccaaaatcaagaaccaggccattatcactgacgagacaaacgatagccttgtggctccacaagaaaaacaggttcacaaatctatactgcccaacagtctgggagttagcgagaggttgcaaaggctgacgtttccagccgtgtcagtgaaggtcaacggccacgaccagggccagaatccaccacttgatctggaaaccaccgccaggtttcgcgtggaaacccacactcagaagactattggcggaaacgtgacgaaagagaagcctccctccctgatcgtccctctggagtcacaaatgaccaaggagaagaaaattaccggaaaggaaaaggagaactcaagaatggaagaaaatgcggagaaccatataggtgtgaccgaggtgcttctgggccgaaagctccagcattataccgattcctatctggggttcctcccgtgggagaaaaaaaagtactttcaggacctgcttgatgaggaagagagcctcaagacacagctggcttactttacggattctaaaaatactggtagacagctgaaggacaccttcgccgactcattgcgatacgtaaataagatcctgaatagcaagttcggttttacctctcggaaagtaccagcccacatgccacacatgatcgaccgaattgttatgcaagaactgcaagacatgttccccgaggaatttgacaaaaccagcttccacaaggtgcggcactctgaggacatgcagtttgctttttcctatttttattacttgatgagcgcagtacagcccctgaatatcagccaagtcttcgatgaggtggacaccgatcagtccggcgtgctgtctgacagggaaatccggacccttgcaacacgaattcacgaactcccgctgtctctgcaggatctgacaggcttggaacatatgctgatcaactgttccaagatgctccccgccgacataacacaactgaataatatccctcccacacaagaatcttactacgatcctaacctgccacctgtgaccaagagtctggttaccaattgcaagccagtcactgataagatacacaaggcatataaggacaagaataaatacaggttcgaaattatgggagaggaggaaatagcgtttaagatgatacggaccaacgttagccacgtcgtcggccagcttgacgacataagaaagaacccaagaaaatttgtgtgcctcaacgacaatatagaccacaaccataaagatgcccaaactgtgaaggcagtgcttcgcgacttctacgagagcatgtttcccattccgtcacagtttgagctccctcgggagtacaggaataggtttctccatatgcacgagttgcaagagtggcgggcatatagagacaagctgaagttctggactcactgtgtcctggccacgctgattatgtttaccattttcagcttttttgctgagcagctcatcgcactcaagagaaaaatctttccacggcgacgaatccacaaggaggcctcccccaaccggataagggtg

SEQ ID NO: 16893 - DNA, 3768 bp, synthetic construct
  misc_feature 1..3768: note = source = /note="Description of Artificial Sequence: Synthetic coding sequence"
  source 1..3768: mol_type = other DNA
atgctgtttaaattacttcagaggcaaacgtacacctgcctatcacaccgatacggcctgtacgtctgcttcttgggcgtggtagtcaccattgtgagtgcatttcagtttggtgaggttgttcttgagtggtcacgagaccagtaccatgtactgttcgactcttatagggacaacatagcgggaaagagctttcagaacaggctctgcctccccatgcctatagatgtcgtatatacatgggtcaatggtacagatttagagcttttgaaggaactccagcaagtgcgtgagcaaatggaagaagaacaaaaggcaatgcgtgagattcttgggaaaaacacaacagagcccactaagaagagcgaaaagcagctcgagtgcctgctgactcattgtatcaaggtgcccatgctcgtgctggatccagcactgccagccaacataactctgaaggacctgccctccctttacccctctttccattctgcttcagatattttcaacgtggccaagcccaagaacccaagcactaacgttagtgttgtcgtatttgattcaacaaaagacgtcgaggatgcccattctggtctcctgaaaggaaactcacgacaaaccgtctggcgaggatacctgacgacagacaaggaggtgcccggactggttctcatgcaggaccttgcattcctgtctgggtttcccccgacatttaaagaaaccaaccaactcaagactaaactcccggaaaacctatcctcgaaggtgaagttgctccaactgtattcagaagcctcggtggcactgttgaagcttaataatccaaaggactttcaggagctgaacaagcagaccaaaaaaaacatgacaatcgacgggaaggaacttacgattagtcctgcttacttactgtgggacttaagcgccatctctcaatccaagcaggatgaggacatctccgcctctcgcttcgaggataacgaagaacttcggtattcactccggtcgatcgagaggcatgccccttgggttagaaacattttcattgtgacaaatggacaaattccctcatggctgaacctggacaacccccgggttactattgtgacacaccaagacgtgtttcgcaacctgagtcacttgccgactttcagcagtccggctatagagtcccacatccatcgcattgagggccttagtcaaaagttcatttatttgaacgacgatgtgatgtttggcaaggatgtatggccggacgacttttactctcacagcaagggacagaaagtgtatcttacttggcctgtcccaaactgtgcagaaggctgccccggctcatggataaaggacggttactgtgacaaggcatgtaataactcagcttgcgattgggacggcggcgactgttctggaaactctggcggttctaggtatatcgccggtggcggcgggaccgggagtatcggagttggacagccctggcagttcggtggcggcattaattctgtgtcctactgcaaccagggctgcgctaactcttggctggcagataaattctgtgatcaagcttgcaatgtccttagttgcggttttgatgctggggactgtggccaagatcattttcatgagctctataaagttatcctcctgcccaatcagacccactacataattcctaaaggggaatgtctcccatacttcagcttcgccgaggtagcgaagagaggagttgaaggcgcctactctgacaatcctatcattcgccatgcctccattgcaaacaagtggaaaactatacacctgatcatgcacagtgggatgaatgccacaacaattcacttcaacctcacctttcagaacaccaacgatgaggagtttaaaatgcagattacagtggaggtggacaccagagaggggcctaaactgaactctactgcacagaagggctatgagaacctagtatccccaatcacactgctacccgaggccgaaattctgtttgaggatatccccaaagaaaagcgattccccaagttcaaaagacacgatgtcaattctactcgcagggcacaggaggaagttaagattcccttagtcaacatcagcctgctgcccaaggacgctcaactgagtctgaatacacttgacctccagctggaacatggcgacattaccctgaaaggatataaccttagcaaaagtgcactactgcgctcttttttaatgaactcccagcatgccaagattaagaatcaggctataattaccgatgagacaaacgacagcctggtggccccacaagaaaagcaggtccacaaatcaattctgcccaattctcttggcgtatccgagcgtctccagcggctgacctttcctgccgtctctgtgaaagtgaacggccatgaccagggccagaacccaccccttgacctggaaacaaccgcgcgtttcagggttgagacgcacacccagaagacaatcgggggtaatgttaccaaggagaagcctcccagcctcatagtcccactcgagtcacagatgactaaggagaagaaaatcaccggcaaagaaaaggaaaactctcgaatggaggagaatgccgaaaatcacattggggttactgaggtgctccttgggcggaagctgcagcactacaccgacagctacttaggcttcctgccttgggagaaaaagaaatacttccaggacctgttggacgaggaggaaagtctgaaaacacagctggcgtatttcacggattctaagaataccggcaggcagctaaaggacacctttgccgattccctgcgctatgtcaacaaaatcctgaatagtaagttcgggtttacaagtcggaaagttcctgcccacatgccacatatgatcgaccggattgttatgcaagaactgcaagacatgttccctgaagagttcgacaagacttccttccataaggtcaggcacagtgaagacatgcagtttgcattcagttacttctattacttgatgtctgccgtgcagcccctgaacatttcacaggtgttcgatgaggtggatacagaccagtctggggttctgagtgatcgggaaatccgcaccctagccacacgtatacacgagctgccattgtccttgcaggatcttactggacttgaacatatgctgattaactgttccaagatgctgcccgctgatataactcagctcaataacatcccaccaacacaggagtcatattacgacccgaaccttcccccagtgactaagtccttggttacaaactgtaagcccgtgactgataagatccataaagcttacaaagataagaacaagtaccgcttcgaaattatgggcgaggaggaaattgcctttaaaatgatccggacaaacgtgtctcacgtagttggacagctagacgatattcgcaagaatccaagaaagtttgtctgcctcaacgacaatatagaccacaaccacaaggatgctcaaacggtaaaagcggtgcttcgtgacttttatgagtcaatgttcccaatcccatcacagttcgagctaccgagggaatacagaaacaggtttctacacatgcacgaactacaagagtggagggcatatagagataagttgaagttctggacccattgtgtactcgccacactaattatgttcaccatctttagcttttttgcggagcagctgattgctctgaagcgcaaaattttccccagaagaaggatacacaaagaggcaagtcccaatagaattagggtt

SEQ ID NO: 16894 - DNA, 3768 bp, synthetic construct
  misc_feature 1..3768: note = source = /note="Description of Artificial Sequence: Synthetic coding sequence"
  source 1..3768: mol_type = other DNA
atgctctttaagctgctccaaagacagacctacacgtgtctttcccatcggtacggtctgtacgtgtgctttcttggtgtggtcgtgaccattgtgtcggcatttcaattcggcgaggtcgtgttggagtggtcccgtgatcagtaccatgtgctgtttgattcctacagagacaatatagcaggtaagagctttcaaaacaggttgtgccttccgatgcctatcgacgtggtctacacctgggttaatggtaccgacctggagcttctgaaggagctgcagcaggttcgggaacaaatggaagaagaacaaaaagcaatgcgcgaaattcttggtaaaaacaccaccgaacctacgaagaagtcggaaaagcaactggaatgtctgctgacccattgtatcaaagttcctatgctggtcctggacccagcactccccgccaatatcactcttaaggatcttcctagcctgtacccctcgtttcattccgcgtcagacatcttcaatgtcgcaaagccaaaaaacccctcgaccaatgtctcggtagtggtgtttgattcaaccaaggatgtggaagatgcacattccggtcttttgaaggggaattccagacaaactgtgtggcgaggataccttaccaccgataaagaagtccctggcttggtgctgatgcaagatctggcgtttctgtcgggctttccacctacctttaaagaaactaatcaactcaagactaagttgcctgaaaaccttagcagcaaggtcaaacttctccagctttacagcgaagcaagcgtggcactcctgaagctcaacaaccctaaagattttcaggagctgaacaaacaaacgaaaaagaatatgaccattgacggtaaagagcttactattagccctgcatacctcctgtgggacctctccgccatcagccaatcaaaacaggatgaggatatcagcgcatcccgttttgaagataacgaggaattgcggtattcgcttagatctatagagcgccacgccccttgggtgagaaatatcttcattgtgaccaacggtcaaattccatcgtggctgaacttggataatccacgcgtgactatcgtgacccatcaagatgtgtttagaaacctttcgcaccttccaaccttttcatcaccggcaatcgaaagccacattcatcgaattgaagggctttcccagaagttcatctacctgaacgatgatgtgatgttcggaaaagatgtgtggcctgacgacttttactcgcattccaaaggacagaaggtttaccttacctggcctgtccctaactgcgccgagggttgtcctggatcatggatcaaggatggttactgtgacaaagcctgcaacaattcagcctgcgattgggatgggggagattgtagcggaaattccggaggctcacggtacattgccggcggaggggggaccggaagcattggcgtcggacagccttggcaatttggcggaggtatcaattctgtgtcgtactgcaaccagggctgcgcaaattcctggctggcagataagttctgtgatcaggcgtgtaatgtgctctcgtgtggattcgatgccggcgattgtgggcaggaccattttcacgaactgtacaaggtgattctgctgccgaaccagacccattacatcatcccaaagggggagtgtttgccttacttctcatttgctgaagtcgcaaagcggggtgtggaaggtgcatacagcgataaccccataatacgccatgcatcgattgcaaacaagtggaaaaccattcatcttatcatgcattccggcatgaatgcaacgaccatacactttaatctcacctttcagaacacgaacgatgaggaattcaagatgcagattactgtggaggttgatactagagaggggcccaaactcaactctaccgcccagaagggctacgagaatctggtgtcccccatcacccttctgccagaggctgagattttgttcgaggacatccccaaagaaaagcggtttccaaagtttaaacgccatgatgtcaactcgactagaagggcacaggaggaggtgaagatccctctcgtgaacatttcactgctgccgaaggatgcacagctctcccttaacactctggaccttcagctggaacatggcgatattaccctgaagggctacaatctctcgaaatcggcccttcttaggtcattccttatgaattcccagcatgcaaagattaagaatcaagccatcattacggatgagactaacgactcccttgtggcaccacaggagaaacaagtgcataaatctattctgcctaactctcttggggtgtcggaacggctgcagaggctgacttttcctgcggtgagcgtgaaagtgaacggtcatgatcaaggtcagaatccacctctggacctggagactaccgcacggtttcgagtggaaacccatactcaaaagactattggaggtaacgtgactaaggagaaaccgccatcgttgattgtgcctctggagtcccaaatgactaaagagaaaaagatcaccggaaaggaaaaagagaactcgagaatggaagaaaacgctgagaatcatattggcgtgacggaggtgcttctcggaagaaagctgcagcattacaccgactcctaccttggattcctcccttgggagaagaagaagtacttccaagatctcctggacgaagaagaatcgctgaaaacccaactggcatacttcaccgatagcaaaaacactggcagacaacttaaggatacctttgccgattcgctcagatatgtgaataagatactgaactcaaagttcggatttacgagccggaaagtccccgcacacatgcctcacatgattgaccgcattgtcatgcaggaacttcaagacatgtttcctgaggaattcgataagacttcctttcataaggtgagacactccgaggatatgcagttcgctttttcgtacttttactaccttatgtcagcagtgcagcccctgaacatttcccaagtgttcgatgaggtcgacacggatcagtccggtgtgctgtccgatcgcgaaatccgcacccttgcgaccagaattcacgaacttcctctgagccttcaagatttgacggggttggagcacatgctgatcaattgtagcaaaatgcttcctgcggatatcactcagctgaataacatccctcccacgcaagaatcatactacgatccaaatctgccacctgtcaccaagtcactggtgactaactgcaaacctgtgactgataagattcacaaggcatacaaggataagaataagtacagatttgagatcatgggcgaagaagaaattgcatttaagatgatccgaactaatgtctcgcatgtcgtgggacaacttgatgacattaggaagaacccacgcaagttcgtgtgtcttaacgataacatcgaccataatcacaaggatgcccagaccgtgaaggctgttcttagggacttttacgaatccatgtttccaattccatcccagtttgagctccctcgggaatataggaatagatttctccacatgcacgagcttcaagaatggcgcgcctacagagataagttgaagttctggactcattgtgtgcttgcaaccctgatcatgtttacgattttctcatttttcgcggagcaactcattgcgctgaaacgtaagatttttcctaggagacgaatacataaggaagcatcccctaacagaattagagtg

SEQ ID NO: 16895 - DNA, 3768 bp, synthetic construct
  misc_feature 1..3768: note = source = /note="Description of Artificial Sequence: Synthetic coding sequence"
  source 1..3768: mol_type = other DNA
atgctgttcaagttactgcagagacaaacttatacatgcctgtcacatagatacggcctgtacgtgtgctttctgggagtggtagtgactatagtgtccgccttccagttcggtgaggtggtgctagaatggtctagggaccagtaccatgtgttattcgactcataccgcgataacattgcagggaaatcctttcagaaccgcctgtgtctcccaatgcccattgatgtcgtgtacacctgggtcaatggcaccgatctggagctactgaaggagctgcagcaggtgcgggaacagatggaagaggagcagaaggccatgagggaaatattaggcaagaacactacagagccgacaaagaaatcagagaagcagctggagtgcctgctgacccactgcatcaaggtgcccatgctcgttctggaccccgcattaccagcaaatatcaccctgaaagacctaccatcattatacccctccttccactccgctagtgatatttttaatgtggccaagcccaaaaacccttcaacaaatgtgtccgtcgtggttttcgactcaacaaaggatgtggaggatgcccacagtggtctgcttaaaggaaattcccgacaaactgtttggcggggatatctgaccacagacaaagaggttccagggctcgtcctgatgcaggatttggccttcctatctggcttcccacctacattcaaagagactaatcagctgaaaactaagctccctgaaaacctgtcaagtaaagttaaactactacagctgtattctgaggcttctgtggcactgttgaagctgaacaatccaaaggactttcaggagctgaataaacagaccaagaagaatatgactatcgatggcaaggaactgaccatttcacccgcttacttactttgggatctgtccgccatatctcagtccaaacaggacgaagacatcagcgcttcaagatttgaggacaatgaggagttgcggtactccctgaggagcattgagaggcatgctccatgggtccggaatatatttatagttaccaatggtcagatccccagctggctgaacttagacaatcctcgcgttaccatcgttacacatcaggatgtcttcagaaatctgagccatctgcccaccttctcatctccagctatcgaatcccatattcaccgcatcgaaggactgtcccagaagtttatttacttgaatgacgatgtcatgttcggtaaggatgtctggccagatgatttctactcacactcaaaaggccaaaaggtgtatctgacatggcccgtcccaaattgtgctgaaggttgccccggttcctggatcaaagacggctactgcgataaagcctgcaacaatagcgcttgtgattgggacggcggggactgcagtggcaactccggcggctcccgatatattgctgggggagggggcactggcagcatcggcgtggggcaaccatggcagttcggcggcggcattaattccgtgagctattgcaatcagggatgcgcaaactcctggcttgccgacaagttctgtgatcaggcctgtaatgtgctgagttgtggctttgatgctggcgactgtggccaggatcatttccacgagctgtacaaggtgatcctgcttccaaaccagacacattacatcatccccaaaggagagtgtctgccttacttcagttttgccgaggtggccaaacgaggagtggaaggcgcatacagcgataatcccataataagacacgcatctatcgccaataaatggaagactatacatctaatcatgcattctggaatgaatgcaactactatccatttcaatctgacattccagaacaccaatgacgaggagtttaagatgcagatcacagtggaagtggatacccgggagggacctaagttgaactcaacagcccagaaagggtacgaaaatttggtgtcaccaattacactactaccagaagccgagatcctgtttgaagatatcccgaaggaaaagaggttcccaaagttcaagcggcatgatgtaaacagtacacgccgggctcaagaggaggttaagataccattggtaaacatctctctactgccaaaagatgctcaactcagcctcaacaccttagatctgcagctggagcacggcgatattaccctgaagggctacaatctgtcaaagagcgcactgctaagaagctttctgatgaactctcagcacgcaaaaattaagaaccaggccatcataaccgatgagaccaacgatagtctagtcgcccctcaggagaagcaggtacataagagcatactgcccaacagcctgggcgtgagtgagagattgcagagactcacattccccgccgtgtcagtgaaggtgaacgggcatgatcagggccagaacccccctctggatcttgagactactgctaggtttcgggtggaaacccatactcagaaaacaattgggggtaatgttaccaaggagaaaccacctagcctaatcgtgcccctggaatctcagatgacaaaggaaaaaaaaataaccggtaaagaaaaggagaacagtaggatggaggagaacgctgaaaatcatataggggtgaccgaggttctgctggggcggaaacttcagcactacaccgatagttacttgggtttcctgccatgggaaaaaaaaaagtattttcaggatctgcttgatgaagaggagtccctcaagacacaactggcatattttaccgactccaagaacactggtcgacaattgaaggacacattcgcagactctctgcgctacgtgaataagatcttgaatagtaagtttggattcacttcaagaaaagtgcctgcccatatgccccatatgatcgatcgaattgtgatgcaggagttacaagatatgtttcccgaggaatttgacaaaacatctttccacaaagttcgccattctgaagacatgcagttcgctttcagctacttttactacttaatgagcgcagtccaacctctgaatatctctcaggtgttcgatgaagtggataccgaccagtctggtgttctaagcgatcgggagataaggacactggccactcggatacatgaactccccctgagcctgcaagacctcactggccttgaacacatgctgattaattgctctaagatgctgcctgcagatattacccagttaaataatatacctcctacccaggagtcctactatgatccaaatcttccacccgttactaaaagcctggttaccaattgcaaaccagtgaccgacaaaatccacaaggcttacaaagataaaaataagtaccgcttcgagataatgggcgaggaagaaatcgccttcaaaatgatccgcaccaacgtgtctcacgtcgtgggacaactggacgacataaggaaaaacccacgcaagtttgtgtgtttaaatgacaatatcgaccacaatcataaggatgcccagacagtcaaggccgtgttacgcgacttttatgagtccatgttccctatccccagccagtttgagctgcctagagagtacaggaacagatttctgcatatgcacgaactgcaagagtggcgggcctaccgggacaagctgaagttttggacccactgcgtgctggctactctgataatgtttacaatattctccttttttgccgaacagctaatagccctaaaacgcaagatttttcctcgaaggcggatccacaaggaggcctctccaaacaggattagggtg

SEQ ID NO: 16896 - DNA, 3768 bp, synthetic construct
  misc_feature 1..3768: note = source = /note="Description of Artificial Sequence: Synthetic coding sequence"
  source 1..3768: mol_type = other DNA
atgctgtttaaactccttcagaggcagacctacacttgcctcagccacaggtacggcctgtatgtctgttttttgggcgtcgtggtgacaattgtctcagcctttcagtttggcgaggtagtcctcgaatggagtcgcgaccagtaccacgtcctcttcgactcttatagagacaacattgccggaaaatcatttcagaaccggctgtgtctgccaatgcccatagatgtagtatacacatgggtgaacgggaccgacttggaactacttaaagagctgcagcaagttagagagcagatggaagaagagcagaaggcaatgagggagatcctgggtaagaacaccactgagcctacgaagaaatccgagaagcagctcgaatgtttgctaacacactgcatcaaagtccctatgctggtgctggaccctgcgctgcccgccaacattactttgaaggatcttcccagcctgtacccatcattccactccgcaagcgatattttcaatgtcgccaagccaaagaatccatctacaaatgtgtctgtggtcgtctttgactccacaaaggacgtggaagacgctcattctgggctgctgaaggggaactcccgtcagaccgtgtggaggggttacctgacaactgacaaagaggttcctggactggtgctgatgcaagacctagcattcctctcgggattcccgcctacattcaaggagacgaaccaactgaaaacaaagctgccagagaatctgagttctaaggtgaagcttcttcagctttacagcgaggccagcgttgcactcctgaagctcaataacccaaaagatttccaagagttgaacaaacagactaaaaagaatatgacgatcgatggaaaggaattaacaattagtccagcttaccttttgtgggacctctctgccatctcacagtccaagcaagatgaggacatatccgcctcacgatttgaagacaatgaagagctgcgatattcacttaggagcatcgagagacacgctccatgggtgagaaatatctttatagttactaacgggcagatcccttcctggttaaacctcgataatcctagagtgacaattgtaacacaccaagatgtattccgcaatctctctcacttgcctacattctcgagcccagctatagagtcccatatccatcgtattgagggtctgtcccagaagtttatttatcttaacgacgatgtgatgtttggtaaggatgtgtggcctgatgacttctactctcatagtaaaggccagaaggtgtacttgacctggcccgtgcccaactgcgcggagggctgcccaggctcttggatcaaagatggctactgcgacaaagcttgcaacaactcggcgtgcgattgggatggaggtgattgttcggggaacagtggcggttcccgttacatcgctggaggggggggtaccggctctatcggggtaggccaaccctggcagttcggaggcgggatcaactccgtaagctattgtaatcaaggctgtgccaactcctggctggcggacaagttttgtgaccaggcatgtaacgtgctatcttgtggcttcgatgctggagattgcggccaagaccattttcacgagctgtacaaagtgatcctactgccgaaccagacccactacatcatccctaaaggggagtgtctgccatatttcagctttgccgaggtagccaagcgcggtgtggaaggtgcctattcagacaaccctataattcggcacgcaagtatcgcaaataaatggaagaccattcacttaatcatgcattcaggcatgaacgccacgacaatccatttcaatcttacttttcaaaacacaaacgatgaggagtttaagatgcaaataaccgtcgaagtggacaccagagaggggcccaaacttaacagcaccgctcagaaaggctacgagaacctggtgagtcctattactctgcttccagaggcggagatcttgttcgaagatatccccaaggagaagaggtttcccaagttcaagagacatgatgtgaatagtacccggcgggctcaggaagaagttaagatacccctcgtgaacatatccctgctccccaaggacgctcagttgagcctgaacacgctggacctgcagctcgagcacggcgacattaccctgaaaggatacaaccttagtaaaagtgcactgcttaggagctttctcatgaacagtcaacatgcaaaaattaaaaaccaggcgataatcacggatgaaaccaatgactctttggtggctccccaggaaaagcaggtccacaaatccattctccctaactccctcggcgtgtctgagcgcctgcaacgtctaacattccctgcggtgtcagtgaaagtgaatggccatgatcagggacagaaccctccactggatctcgagacaacagcccgatttcgggtggagacacatacccagaagacaatcgggggaaatgtgacaaaagagaagcccccaagcctcatcgtgccactcgagagccagatgacgaaagagaagaagattactggcaaagaaaaggagaatagtcggatggaggaaaacgcagaaaaccacattggggtcacggaggtcctcctaggaagaaaactccaacactatacagactcatacctgggatttttgccatgggagaaaaagaagtactttcaggatttgttggatgaagaggaaagcctaaagacgcagttggcttactttaccgactccaagaatactggtcgtcaacttaaggatacatttgctgactcgttgcgatacgttaataagatattgaacagcaagtttgggtttacatcaagaaaagtgcctgcgcatatgcctcatatgatagataggatagtgatgcaagagctgcaggacatgttccctgaggagttcgacaaaaccagcttccataaggtacggcacagtgaggacatgcagtttgcttttagctacttttattatcttatgagtgccgtgcagccgctgaacatcagtcaggtgttcgatgaggtcgatactgaccaatccggcgtactttcagatcgcgaaattcgtacgctggccactcggatccatgagctaccgttgtcactgcaggacctcaccggcctagagcacatgcttatcaactgctccaagatgctgcccgccgatatcactcagctgaataacatccctccaacccaggagtcctattatgaccccaacttgccacctgtaaccaaatccctagtgaccaactgcaaacctgtgactgataaaatccacaaagcatataaggacaaaaataagtacagattcgagatcatgggcgaggaagagatagcctttaaaatgatacggactaacgtatcccatgtcgtggggcagctggacgatattcgaaaaaatcccaggaaattcgtgtgcctcaatgacaatattgatcacaaccacaaagacgcacagacagtgaaggcagttctaagagatttttatgagtccatgttccctattccttcgcaatttgaactgccccgcgagtataggaaccgcttcttgcatatgcatgaacttcaggaatggcgggcctatagagacaaactaaaattttggacgcattgcgtactggcaacccttattatgtttacaatcttttcgttttttgccgagcagctgatcgccctgaaacgaaagatcttcccgcgcaggaggatccacaaggaggcttcacccaaccggattagagtc

SEQ ID NO: 16897 - DNA, 3768 bp, synthetic construct
  misc_feature 1..3768: note = source = /note="Description of Artificial Sequence: Synthetic coding sequence"
  source 1..3768: mol_type = other DNA
atgctctttaagctgctccagcggcagacgtacacctgcttatctcatagatatggcctctacgtttgtttcctgggagtggtggttacaatcgtgagcgcattccagttcggcgaggtggtgctcgagtggagcagggatcagtaccacgtgttgttcgacagctaccgggacaacatcgcgggcaaatcgttccagaaccgactgtgcctacccatgcccatcgacgttgtctacacctgggttaatggcacagatcttgaactgctgaaggagttgcagcaggtaagggagcagatggaggaggagcagaaggccatgagagagattctgggtaagaacaccactgagccgactaagaaatcagaaaagcagctggaatgcctgcttacccattgtataaaagtaccaatgctggtactggatccagccttgcctgctaacatcactctgaaggatctgccctccttgtatccttcgttccatagcgccagtgatatcttcaacgttgcaaaacccaaaaatccttccactaacgtcagcgtcgtggttttcgatagtactaaggatgtggaggatgcccactccggactcctgaagggaaattcccgccagaccgtgtggcgtggataccttacaactgacaaagaggtccctggcttagtcctgatgcaggacctcgcgttcctgagcggctttcctccgaccttcaaagaaacaaaccagttgaagacaaaactacccgagaacttatctagcaaagtgaagctgttgcagttgtacagcgaagctagtgtggccctattgaagctgaacaatccaaaagatttccaggagttgaacaagcagaccaagaaaaacatgaccatcgacggtaaggaactcaccatatctcctgcgtatctcttgtgggacctatctgctatctcacagagtaagcaggatgaggacattagtgccagcagattcgaggataacgaggagttgagatactcgctgcggtctatcgagaggcatgcaccctgggtgagaaacatttttatcgtgacaaacggacagataccaagttggcttaacctagataatccccgggtcacaattgttacccatcaagatgtgtttcgtaacctcagccacctgcccacattttctagtccagcaattgaatcccacattcataggatcgagggactgtcccaaaaatttatctacttgaatgacgacgtaatgtttgggaaagacgtctggcctgacgacttctatagtcatagcaagggccaaaaggtctacctgacttggccggtcccaaactgtgccgagggatgccccgggtcgtggattaaggacggatattgtgacaaggcctgcaacaattccgcctgtgactgggatggaggggactgttccggcaattctggtgggagcaggtacatagccggcggaggaggaactgggtccatcggagtcggtcagccttggcagttcggaggaggaatcaactccgtgagctactgtaaccaaggatgcgcgaacagctggctcgcggacaaattctgtgaccaggcctgtaatgtgctgtcatgcggatttgatgccggggactgtggccaggatcactttcatgaactctacaaggtgatactgctccctaatcagacacactacataatcccaaagggcgagtgtcttccctatttttccttcgccgaggtggccaaacggggagttgaaggggcgtattctgataaccctatcattcgtcatgcctccattgctaacaagtggaagactattcacctgatcatgcattcaggtatgaacgccacaactatccatttcaatctcacctttcagaacaccaacgacgaagaatttaagatgcagattaccgtagaggttgacactcgagagggcccgaaactgaacagcaccgctcaaaaaggctatgagaatctggtctcccctatcactctgctgcccgaggccgaaatcctgttcgaggatatcccgaaagaaaagcgatttccaaaattcaagagacatgacgtgaactccactcgccgggcccaagaggaggtgaaaataccccttgtgaatataagtcttctaccaaaagatgctcagctatcactgaacacactcgatctgcagctggaacacggtgatattacccttaagggctacaacctctctaagagcgcactactgcgctcattcctaatgaactctcagcacgccaagattaagaatcaggcaatcatcaccgacgaaactaatgacagccttgtcgccccgcaggagaaacaggtgcacaagtctattctcccaaactctctcggggtcagtgaacgtctgcagagactgactttccccgctgtctcagtcaaagtaaacgggcacgaccagggacaaaacccacccctggatttggaaacgacggcccggtttagagtggagacgcacactcaaaagaccataggcggtaacgtgaccaaggaaaaacctcctagccttattgtgcctctcgagagccagatgacaaaggaaaaaaaaattaccggcaaagaaaaggaaaattcacggatggaagagaatgccgagaatcacatcggcgtgacagaggtgctgctcggccgcaaattacagcactataccgattcttatttgggtttcctgccatgggagaagaaaaaatatttccaagacctcttagacgaggaagagtcactgaaaacacagctggcatacttcaccgatagtaaaaacaccggtaggcagttgaaagacacattcgccgatagtcttcggtatgtgaataaaattctcaactctaaattcgggttcaccagcaggaaggtgcccgcccatatgcctcacatgattgaccggattgtgatgcaggagttacaggatatgttccccgaagaattcgacaagactagcttccataaagtgcgccatagtgaagacatgcaatttgcatttagttatttttattacctgatgagcgccgtccagcccctcaacatttcacaggttttcgacgaggtggatactgatcaaagcggcgtgctctctgatcgggaaattagaacattggccacaagaattcatgaactgcccctctctctgcaggacctcaccgggctggagcacatgctaataaattgttccaagatgctgccagcagatataacccagctgaataatattccacccacacaggagtcgtattacgacccgaacctcccgcctgtgaccaagtccctggtcacgaattgtaaaccggtcaccgataagatacacaaagcctataaggataagaacaagtatcggtttgagatcatgggggaagaagaaattgctttcaaaatgatacgtacaaatgtgagccacgtggttggccagcttgatgacatccgcaagaacccacggaaatttgtctgtctgaacgacaacatcgatcacaatcataaggacgctcaaacggttaaagccgtcctaagagacttctatgagagcatgtttccaattccttctcagttcgaactccctagggagtaccgcaaccggttcctgcacatgcatgagctacaggagtggcgggcctaccgggataagctgaaattctggacccactgtgtcctggcgactcttatcatgttcactatcttctccttcttcgccgaacagctgatcgctctgaagcggaaaatattcccccggcggaggattcacaaggaagctagtcccaaccgcattagggtc

SEQ ID NO: 16898 - DNA, 3768 bp, synthetic construct
  misc_feature 1..3768: note = source = /note="Description of Artificial Sequence: Synthetic coding sequence"
  source 1..3768: mol_type = other DNA
atgttgtttaagcttttgcagaggcagacatatacctgcctgtctcacagatatggcctgtatgtgtgttttctgggagtagtagtaacaattgtgtctgcttttcaatttggcgaagtcgtgctcgagtggtcgagggatcaataccatgttttgtttgattcatatagggataacatcgctggaaaatcctttcaaaataggctgtgcctgcccatgccaatcgatgttgtgtacacttgggtcaatggaacagacctcgaactcctgaaggagctccaacaggttagggagcagatggaggaggagcaaaaagccatgcgcgagattctgggaaagaacacaaccgagccgaccaagaaaagcgagaagcagctcgaatgcctccttacccattgtattaaggtgccgatgctggtgctcgatcctgctctgccagctaacatcaccctgaaggacctcccctctctctatccctcgttccacagcgccagtgacattttcaacgtggctaagcctaagaacccaagcactaatgtttctgtcgtcgtgtttgatagcaccaaggacgtggaagacgctcatagtggactgttaaaaggcaatagccgccagaccgtttggcgcggctatctgaccaccgacaaggaggtgccaggcctggtcttgatgcaagatctcgccttcctgagcggcttccctccaacatttaaagaaacaaaccaactgaagactaagctccctgaaaacttgagcagcaaggtgaagctgctgcagttgtatagcgaggctagcgtggctctgctgaaacttaataatccaaaagatttccaggaactgaacaagcagaccaagaaaaacatgaccatcgacgggaaggaactgacaatcagtcctgcctatctactttgggatctgtctgcaatctctcagtctaaacaggacgaggatatcagcgcaagcagatttgaggataacgaggagcttcggtacagtctcagatcaatcgagaggcacgccccttgggtgaggaacatctttatcgtgacaaatggccaaatcccttcttggctgaatctggacaatccccgggtgaccatcgtcacacatcaggacgtgtttcgcaacctgtcccacttaccgacattcagcagcccagcgattgagtcgcacatccaccgaattgaaggactctctcagaagttcatatacctcaatgatgacgtaatgtttgggaaagacgtctggcccgacgatttctatagccatagcaagggccagaaggtgtatctgacctggcctgtgcctaattgtgccgagggctgcccaggatcatggattaaagacggttactgcgacaaagcttgcaacaattcagcttgcgattgggacgggggcgattgttctggaaactcaggtggaagccgctatatagccggcggcggaggaaccggttcaattggggtaggccagccctggcaattcggcggcggaatcaattcagtgtcctattgtaaccagggttgcgcaaactcttggttggcagacaaattttgtgatcaggcctgcaatgtgctcagctgcggatttgacgctggcgactgtggccaggatcattttcacgagctgtacaaggtcattttactgcctaatcaaacacactatattatcccgaagggggaatgcctgccttacttctccttcgcggaagtggccaagaggggtgtggaaggtgcttactccgacaacccaatcataaggcacgcctctatcgctaacaaatggaaaacaatccacctgataatgcactcagggatgaacgcaacgaccattcattttaacctgactttccagaataccaacgatgaagaattcaagatgcagatcaccgtggaagtcgatactcgtgagggccccaagttgaactctacagcccagaagggatacgagaatctggtgtctccaatcacactgctgcctgaggcagagatactttttgaagacatcccaaaagagaagagatttcctaagttcaaacgccacgatgtgaatagcactagacgggcacaggaggaagttaaaattcctcttgtgaacatcagtttactgcctaaggacgcacagctgtcgctaaacaccctggatttgcagctggagcacggcgacattacattaaagggctacaatctgagcaagtccgcattgcttaggtctttcctgatgaattcccagcacgcaaagattaaaaaccaagctattataacagacgaaaccaacgacagcctcgtggcccctcaggaaaaacaagttcacaagtctatcctgcctaactcactaggcgtgagcgaacggttgcagaggcttacatttccagctgtatctgtcaaagtcaacggacatgaccaaggacagaatccacctctggatctggagaccacggctagattccgcgtcgaaacacatacccaaaaaaccataggcggcaacgtcaccaaagagaaaccaccctcactgatcgtcccattagaatcacagatgaccaaggaaaagaagattaccggtaaagagaaggaaaatagcagaatggaagaaaacgctgaaaaccatattggggtgacagaagtacttctcggaagaaagctacaacactatacagatagctatctcgggtttctaccttgggagaagaagaagtacttccaagatctgttggatgaggaagagtcactgaagactcagctcgcttattttacagattcaaaaaacaccggtcggcagttaaaggacactttcgcagattctcttcgctatgtgaacaagatcttgaacagcaaatttggcttcacatcccgcaaagtgcctgctcacatgccacacatgatcgacagaatcgtcatgcaagagttgcaggacatgttcccagaggagtttgataagacctcgttccacaaagtcaggcatagtgaggatatgcaatttgcattctcatacttttattatctcatgagcgccgtgcagcccctgaacatcagtcaggtgtttgatgaggtcgacacggaccagagtggggttctctctgaccgggaaatccggacattagcgaccaggatccatgagctgccactgtcgctacaggacctgaccggcctggagcacatgcttatcaactgctctaagatgctgcccgccgacatcacccaactgaacaatataccacctacccaagagtcatactacgacccgaatctacctccagtaactaagagtctcgttaccaactgcaagcctgttaccgataaaattcataaagcatataaggataaaaacaaatataggtttgagataatgggcgaagaggagattgcttttaaaatgattaggacaaacgtgagccatgtggttggacagcttgacgatatcagaaaaaacccacgaaagtttgtgtgcctaaatgataacatcgatcacaatcacaaagacgcacaaaccgttaaggccgtgttgagggatttctacgaaagcatgttccctatccctagtcaattcgaactcccaagagaatatcgcaaccgttttttacatatgcacgagcttcaagaatggagggcttatcgggataagctaaaattttggacccactgtgtcctcgctaccctgatcatgttcacaattttcagcttttttgctgaacaactcatcgcactcaaaagaaagatcttcccaaggaggcggatccacaaggaggcgagcccgaacagaatacgcgtc

SEQ ID NO: 16899 - DNA, 3768 bp, synthetic construct
  misc_feature 1..3768: note = source = /note="Description of Artificial Sequence: Synthetic coding sequence"
  source 1..3768: mol_type = other DNA
atgttgttcaaattgctgcagcgacagacttatacatgtctatctcaccgatacggcctgtatgtttgtttcctgggcgttgtggtgactatcgtgtcagcctttcagtttggtgaggtggtccttgaatggtcacgagatcagtaccacgttctctttgacagctatcgagacaatatagcgggaaagtcatttcagaacagactctgtctgcccatgcccatcgacgtggtttacacttgggttaacggaaccgatcttgaacttttgaaggagcttcagcaagttagagagcaaatggaggaagagcagaaggcaatgagagagatcctaggtaaaaatacaacagaaccgacaaaaaagtcagagaaacaacttgaatgcctgcttacacactgtattaaagtgccaatgctggtgttggatcctgcattgccagccaatatcaccttaaaagacctgcccagcctgtacccatctttccactctgcttcagacatatttaacgtggccaaaccaaagaacccgtccactaacgtgtcagtggtggtgttcgactccactaaagacgtcgaagacgcccattccggcctgctcaagggtaactcacgacagacagtctggcgggggtatctgaccaccgacaaagaggtccccggcctggttctgatgcaggacctcgcatttttgtcgggatttccgcccaccttcaaagagaccaatcagctgaaaaccaaactgccagaaaacctatcgagcaaagtgaaattgctgcagctatactccgaggcaagcgttgccctactgaagctcaacaaccctaaggactttcaggaattaaacaaacaaacaaaaaaaaacatgaccatcgacggaaaagaactcacgatttctcctgcctacctgctgtgggacctctcggccatcagtcagtctaagcaagacgaagatatctccgctagcagattcgaagacaacgaagaacttaggtattcactgcgaagtatagagcgacacgcaccatgggtgcgaaatatcttcattgtaaccaacgggcagataccttcatggcttaacctggataaccctagagtgaccattgtaactcaccaggacgtgttcaggaacctgtctcacctccccacattcagcagtcctgccatcgagtcgcacattcacagaattgaagggctgagccagaagtttatctatcttaacgatgacgtcatgttcgggaaagacgtgtggcctgatgacttttactcccacagcaagggccagaaggtgtacctaacgtggcccgtgcccaattgtgctgaagggtgtccagggtcttggataaaggacggctactgcgacaaagcctgcaataacagtgcatgtgactgggatggcggagattgcagtggaaattctggcggaagcagatacatcgccggcggggggggcaccggatctatcggcgttggtcagccctggcaattcgggggcggcatcaattctgtgagctactgcaatcagggatgcgccaactcatggctggctgataagttctgcgaccaagcctgtaatgtcctgtcatgcggttttgatgctggcgattgtggacaggatcattttcatgagctgtacaaagtgatactgcttcctaaccaaacccactatatcatccctaaaggggaatgtctcccatatttttcttttgccgaagtcgctaagagaggtgtggagggggcctactccgataatcctataattcgacatgcatctatagctaacaaatggaagacgattcatctcattatgcatagtggcatgaatgctaccacaatccatttcaacctaacctttcagaacacaaacgacgaggagtttaaaatgcagattactgtcgaagttgatacccgggaaggccctaaactcaattcgaccgcccaaaagggctatgaaaatctcgtctctcccatcacactgctgccggaagccgagatcctgttcgaagatataccgaaggagaaacgatttccaaaattcaagaggcacgatgttaactccacgagaagagctcaggaagaagtgaaaatcccactggttaacatttcgctgctgccgaaagacgcgcagctgagcctcaacacactggacctgcagctggagcacggcgatataacattgaaaggttataacctatctaagagtgcattactgcggtcatttctgatgaacagccaacacgcaaagataaagaatcaggcaattatcactgatgagaccaacgatagcctggttgcccctcaagagaaacaggtgcataaaagtatactgccaaactctttgggcgtgtcagaacgactgcagaggctgacctttcccgctgtgtccgttaaagtgaacgggcatgaccagggccaaaatccgccactggacctcgaaacaaccgcgcgttttcgggtggagacccatactcagaaaacaatcggtggcaacgtgacaaaagagaaacctcctagcctcatcgtccctctcgaaagtcagatgaccaaggaaaagaagatcacaggcaaggaaaaggagaattctcggatggaagaaaatgctgagaatcatatcggcgtcaccgaggtgctgctgggacgtaaactgcaacactacacagattcctatctgggattcctgccctgggaaaagaaaaagtactttcaggacttactcgacgaagaggaaagcctaaagacgcagctcgcatacttcaccgatagcaagaataccggcaggcaattaaaggacacattcgccgattcattgcgatatgtcaacaagattttgaactccaagttcggattcacaagtcgcaaggtcccggctcacatgcctcacatgatagaccggatcgtgatgcaagagctgcaggatatgttccccgaagagttcgataagacttcatttcacaaagtgagacacagcgaggacatgcagttcgcgttctcctacttttactacctcatgtctgctgtgcagcctttgaatattagccaagtgttcgatgaggtcgacaccgatcagtctggcgtgctatcagacagggaaatcaggactctggccactcgaatacatgagcttcccctgtcactccaggacttgacaggactagaacacatgctgatcaattgtagtaagatgctgccagcggacatcacgcaacttaacaatattcctcccacacaagaaagctactatgaccccaatctcccacctgtaacaaaaagcctggtgaccaactgcaagcctgtgacggacaaaatccacaaggcctacaaagataagaacaaataccgatttgagatcatgggtgaggaggaaatcgcttttaaaatgattaggactaacgtttcccatgtagtcggtcagcttgacgatatcagaaagaacccgcgaaaattcgtttgccttaatgacaacatcgatcacaatcataaggacgcacagacagttaaagctgtcctgcgagacttttatgagtctatgtttcccatcccatcccaatttgaactcccaagggaatatcgaaaccgttttctgcacatgcatgaacttcaggagtggcgagcctaccgcgataagcttaagttttggacgcattgtgtcctcgcgactctaatcatgttcaccatcttcagcttttttgccgaacagctgatagcactgaagcgtaaaatctttccaagacgacggattcacaaagaagcgagtccgaatcgcatcagagta

SEQ ID NO: 16900 - DNA, 3768 bp, synthetic construct
  misc_feature 1..3768: note = source = /note="Description of Artificial Sequence: Synthetic coding sequence"
  source 1..3768: mol_type = other DNA
atgcttttcaaattgttgcagaggcagacttatacatgtctctcccaccggtacgggctctatgtatgtttcttgggagtggtggtcactatagtgagtgctttccaattcggagaggtggtattggaatggtctcgagatcagtatcacgtgctttttgattcttaccgggacaatatcgcagggaagtcctttcagaaccggctgtgcctgccaatgcctatcgatgtggtttatacatgggtcaatgggactgacctcgaattgctcaaagaactccagcaggtcagggagcagatggaagaggagcagaaagctatgcgagagatactgggaaaaaacactactgagcccactaaaaaaagtgaaaaacaacttgaatgccttttaacacattgtatcaaagtgcctatgcttgtattagatcccgctttaccagcgaatatcacactgaaggacctaccttctctgtatcccagttttcactcggcttcggatatatttaatgttgcaaagccaaagaatccttcgacaaacgtgagtgtggtcgtttttgatagtactaaagatgtcgaggatgcacattctggactcctgaaaggaaactcaagacagactgtctggcgggggtacctgactactgataaggaagtcccaggattggtcctcatgcaggatctcgcatttttatcagggtttccaccaacattcaaagagacaaatcagctaaaaacgaaacttcctgaaaacctgtcctccaaagtgaaactgctccagctctattccgaggcttcagtcgctttactaaaacttaacaacccaaaagatttccaggaactcaacaagcagacaaaaaagaatatgacaatagatggaaaagaactcacaatttctcctgcatatcttctgtgggatctaagtgccatctcccagtccaaacaggatgaagatatctctgcctctaggttcgaggataacgaagaacttcggtattcactacggtcaatagaaaggcatgccccatgggtgcgcaatatcttcatcgtaacaaatggacagataccctcatggttgaatctggataatcctagggtcactatagtgactcatcaagacgtgttccggaaccttagtcatctgcctactttttcgagtccagccatagagtcacatatacaccgcatagagggactctcccagaaatttatttatcttaacgatgatgtgatgttcggaaaggatgtgtggcctgatgatttctatagtcattcaaaaggacaaaaagtgtacctgacgtggccagttcccaattgtgccgaaggatgtcctggaagttggataaaagatggatattgcgataaagcatgtaataacagtgcctgcgattgggatgggggagactgttcaggaaactccggaggatcacgctatatcgctgggggggggggaacaggatccataggagttggacagccctggcagttcgggggagggataaactctgttagttattgcaatcaaggatgtgctaactcttggctcgctgataaattctgtgatcaggcctgtaatgtcctctcctgtggatttgatgccggagattgcgggcaggatcattttcatgagctgtataaagtgattctcctcccaaatcagacacactatatcatacccaagggggaatgcctgccatacttctccttcgctgaggtcgccaaacgaggagtggaaggagcctatagtgataaccctataatacgccacgcctccatagccaacaaatggaaaactatccaccttatcatgcactccggaatgaacgccactacaatccattttaatttaacttttcagaacacaaacgatgaagaattcaaaatgcagattacagtagaagttgatacaagagaggggcccaaactaaactcaacagcacaaaaaggatatgagaacttggtttctcccattacattattgcctgaggccgagatcctgttcgaagatatacccaaagagaaaaggttccccaaattcaagcgacacgacgtcaactcaacacgacgggcacaggaagaagttaaaatacccctggtcaacatctctctccttccaaaggatgctcagttatcattaaacactctcgatcttcagctggaacatggagatatcactctcaaaggatataatctgtcaaaaagtgcattactgagatcttttctaatgaattcacagcacgccaagattaaaaaccaggcaatcataactgatgaaactaatgatagtctggtggccccccaagaaaaacaggtccataaatccatacttcccaacagtctcggggtatctgaacggctacagcgactaacattcccagccgtatcagttaaagttaatggacacgaccaggggcagaaccctccactggatctggaaactacagcccggtttcgcgtcgaaacacacacacagaaaacaatagggggaaacgtgacaaaagagaaacctccttccctcatagtccccttagagtcccagatgactaaggagaaaaaaattactggaaaagaaaaagagaactccagaatggaagaaaatgccgaaaatcacatcggagttactgaagtgctgctcgggcgcaaattgcagcattacactgattcctatctgggattcctgccttgggagaaaaaaaaatacttccaggatctcttagatgaggaagaatctttaaaaacacagttggcatactttacggattctaaaaacacaggaaggcagcttaaagatacttttgcagattcattaaggtacgtaaacaaaatacttaactcaaaatttgggttcacttctcgcaaagtcccagcccacatgccccatatgatcgatcgaattgtgatgcaggaactccaggatatgttccccgaagagttcgataagacttcgttccacaaagtgcgccattctgaagatatgcagttcgcattttcctatttctattatttaatgagtgcagtccagcccttaaacatatctcaagtgttcgatgaagtcgatactgaccagtctggggtgctttctgatcgagagatccgcacacttgctactcggatccatgaactgcccctatccctgcaggatctaactggactagaacatatgcttattaattgctctaaaatgttgcccgccgatataacacagcttaataatatacccccaacacaggaatcttattatgatcccaacctcccaccagtgacaaaaagtctcgtgacgaattgtaagccagttacagataagatccataaagcatataaagacaaaaataaatatagatttgagatcatgggggaagaagagatagcattcaaaatgatccgaacaaatgtgagtcacgtggttgggcagctcgacgatatcagaaagaaccccagaaaattcgtctgtctaaacgataacatagaccacaatcataaagatgctcagacagtcaaagcggtgctccgcgatttctatgaatcgatgttccctatcccctctcagtttgagctgccccgggaatatcggaacagatttctgcacatgcatgaactgcaggagtggcgcgcatacagagataagctcaaattttggactcattgtgtgctggcaactctgataatgttcacgatattttccttctttgctgagcagctgatagccctgaagcgaaagatctttcctcggcggcggatccataaggaagcaagtccaaatagaattagggtg

SEQ ID NO: 16901 - DNA, 3768 bp, synthetic construct
  misc_feature 1..3768: note = source = /note="Description of Artificial Sequence: Synthetic coding sequence"
  source 1..3768: mol_type = other DNA
atgcttttcaagttgctgcagcggcagacatacacttgtctgtcgcatagatacgggttgtatgtgtgcttcctcggagttgtcgttaccattgtatccgcctttcagtttggcgaagtagtgctggagtggtctagggaccagtaccacgttctcttcgactcatatcgtgacaacatagctgggaaatcttttcagaaccgactgtgtctccctatgcctattgacgtggtttacacttgggtaaacggtactgatctggagctgctgaaggaattgcagcaggttcgggagcagatggaggaggagcagaaggccatgagggagattctgggtaagaatacgaccgagcccacaaaaaaaagcgagaagcagctggaatgccttctaacccattgtataaaggtgcctatgctggtactggatcccgcgctgcctgcgaatattaccctgaaggatctcccgtccctgtatccctctttccactccgcatcagatattttcaacgtggccaagccgaaaaatccaagcactaacgttagcgttgtcgttttcgacagcaccaaagatgtggaagatgcacactccggcctgttgaaaggaaacagtcgccagactgtgtggaggggctacttaactacagataaagaagtacccggactggtcctgatgcaagacttagccttcctgtccggcttccctcctaccttcaaggaaacaaaccagctcaagaccaagctgccagagaacttgagcagcaaggttaagctcctgcagctctacagcgaggctagtgtggctttgttgaaactgaataacccaaaggattttcaggaactcaataagcagaccaaaaagaacatgacaatcgacggtaaggaactgactataagcccagcttatctcctctgggatctgtccgccatctcacagagcaaacaagatgaagacatcagtgccagcagatttgaagacaatgaggaattgcgatacagtttaaggtccatagagcgccacgctccatgggtgaggaatatatttattgtgacaaatggccagattccgtcatggctcaacttggataaccccagagtcacaatcgtcacacatcaggacgttttccgcaacctcagccacctgccaacattctcgtcccctgctatcgagtcgcacatccatagaatcgagggcctcagccagaaatttatctatcttaatgatgacgtgatgtttgggaaagatgtatggcccgatgatttctactctcacagtaaggggcagaaggtgtatctcacctggcctgtacctaattgcgccgaggggtgtcccggctcttggataaaggacggatactgtgataaggcatgcaacaacagtgcatgcgattgggatgggggcgactgtagtggaaactccgggggtagcagatacattgccggcggcggcgggacgggcagcatcggcgtgggacagccttggcagttcggaggcgggatcaacagcgtgagctattgcaaccagggatgtgccaattcttggctggctgataagttctgcgatcaagcctgtaatgtgctctcctgcggctttgatgcgggtgactgcggccaggaccacttccacgagttatataaagtcatcctccttcctaaccagacccactacatcatcccaaaaggcgaatgtcttccttatttttcttttgccgaagtagccaagagaggggtggaaggcgcctatagtgacaacccgatcatccggcacgcatctatcgcaaacaaatggaagaccatccacctgatcatgcactccggcatgaacgccaccaccattcactttaacttgacattccagaacactaatgacgaagagttcaagatgcagatcaccgtggaggtggacacccgtgagggacctaaactaaactcaacggctcagaagggctatgaaaatctggtgagccctatcaccctgctgcccgaagccgagatcctgttcgaggacatacctaaggaaaaaaggttccctaagtttaaaagacatgatgtgaacagcacaagaagagcccaagaagaggtaaagatccccctcgtcaacatcagtctgttgcccaaagacgcgcagctatcactcaacaccctagacctgcaacttgagcacggtgatattacactcaagggttacaatctctctaaaagtgctcttcttcgttcatttttgatgaacagccagcatgctaagataaaaaaccaggccattatcacagatgaaacaaatgattcattggttgctccccaggagaaacaagttcacaaatccatcctgccaaatagtcttggggtttccgagaggttgcagaggcttacatttcccgccgtgagtgtgaaagttaacggtcacgaccagggacagaatcctccactggacctggagacaactgcaagattcagagtcgagactcatacccaaaagacgattggtggaaacgtgacaaaggaaaagccccctagcctcatcgtgccactagaatcacagatgactaaggagaaaaaaatcaccggaaaggaaaaggagaatagccggatggaagagaatgcggaaaaccatatcggcgtaacagaagtcctgctggggcgaaagctacagcattacaccgactcttacctcgggttcctaccatgggaaaagaaaaaatattttcaggatttgctggacgaggaagagtctctgaaaacccagctagcatactttaccgattccaaaaacactgggcgccagctaaaagacacatttgcggacagcctcaggtacgtcaacaagattctcaatagcaaattcggcttcacttctcggaaggtcccagctcatatgcctcacatgatcgacaggattgttatgcaagaactacaggacatgtttcctgaggaattcgataaaacctcttttcacaaggttcgacacagtgaggacatgcagttcgccttttcgtatttttactacctaatgtcagcggtgcaacccctgaatattagccaggtttttgacgaagtggatacagaccagagtggagttttaagcgatcgcgagattaggaccctggcaaccagaatacacgaactgcccctctctctacaggacctgacagggctggaacacatgctgattaactgttctaagatgcttccggccgacataacccagctgaacaacattccacccacacaggaatcctattatgatcctaatctgccccctgtgacaaaaagtttggtgaccaactgcaagcccgtgaccgacaagatccacaaagcctataaagataagaacaagtaccggtttgaaatcatgggagaagaggagatcgccttcaaaatgatccgcacaaatgtcagccacgttgtcgggcagctggacgatattcgcaagaacccccgaaaattcgtgtgcttgaacgataacattgatcacaatcacaaagacgcacagactgtcaaagctgtgctgcgcgacttttatgagtcaatgttccctataccgagccagttcgagctgcctcgcgagtacagaaaccggtttctgcacatgcatgaactccaggagtggcgcgcttaccgtgataagttaaagttctggacccattgtgtcctggccactttgatcatgtttacgatcttcagttttttcgctgagcagctcatagccttaaagcgaaaaatctttcccaggagacgcattcacaaggaggcctcccctaatcgcattcgtgtc

SEQ ID NO: 16902 - DNA, 3768 bp, synthetic construct
  misc_feature 1..3768: note = source = /note="Description of Artificial Sequence: Synthetic coding sequence"
  source 1..3768: mol_type = other DNA
atgctgtttaagctcctgcagcggcagacctacacctgcctgagccaccgctacggactttacgtgtgtttcctcggagtcgtggtgaccatcgtcagcgccttccaattcggcgaggtggtgctggagtggtcgcgtgaccagtaccacgtgctcttcgacagctacagggacaacatcgccggaaagagctttcaaaataggctgtgtctgccgatgcccatcgatgtggtgtacacctgggtgaacggaactgatctggagctcctgaaggagctgcaacaagtccgcgaacaaatggaggaggagcagaaggcgatgcgggaaatcctgggaaaaaacactaccgaaccgactaagaagtcagagaaacagctggaatgcctgctgactcactgcattaaggtcccgatgctggtgctggacccagcgctcccggccaatatcaccctgaaggatctgccatcactgtacccctccttccactcggccagcgacatcttcaacgtggccaagccgaagaatcctagcaccaacgtctcggtggtggtctttgactcgaccaaagatgtggaggacgctcactccggactcctgaaaggcaactcgcggcagaccgtttggcggggctatctcactaccgacaaggaagtcccaggactcgtgctgatgcaagatctggcgttcctctccggtttcccacctacgtttaaggagactaatcagttgaaaactaaactgccagagaatctgtcctcgaaggttaaactcctgcagctgtactctgaggcctcggtggccttgcttaagctgaataaccccaaggacttccaggaactcaataagcaaactaaaaagaacatgaccatcgatggaaaagaactgacgatctctccagcgtatctgctgtgggacctctcggctatctcacaatcgaaacaagacgaggacatttcagcgtcacgattcgaggataacgaagaacttcgttactctctgcgctccattgagcgtcacgccccgtgggtccggaacatctttatcgtgaccaatggacagatccctagctggctgaacctggacaaccctcgcgtcactatcgtgacccaccaggacgtctttcggaacctgagccacctgccgactttctcctccccggccatcgagagccatatccatcgcatcgaaggactgtctcaaaagttcatttaccttaatgacgacgttatgtttggaaaggacgtgtggcctgacgatttctacagccactcgaaaggacaaaaggtgtacctgacctggcccgtgccaaattgcgccgaggggtgtccgggttcatggatcaaagacggatactgcgataaggcctgcaataactcggcatgtgattgggacggaggagactgttccgggaactcggggggttcgagatacatcgccggaggcggaggaaccggctcgataggagtgggccaaccgtggcagttcgggggaggcatcaactcggtgagctactgcaaccaaggctgcgcgaactcgtggctggcagacaagttttgcgatcaggcctgcaacgtgctgtcgtgcggattcgacgcaggtgattgcggtcaggatcatttccacgaactctacaaggtgatcctcctgcctaaccagacccactatatcattcctaaaggagaatgcttgccttacttctcgtttgcggaagtcgctaaacgcggtgtcgagggagcgtactccgacaacccgatcatccggcacgcgtcaatcgcaaacaagtggaaaactattcacctgatcatgcactccgggatgaatgccaccaccatccacttcaatctgacgtttcagaatactaacgacgaggagttcaaaatgcagatcaccgtggaggtggacactcgcgagggaccaaaactcaattctactgcccagaagggatacgaaaacctcgtctccccgatcaccctcctcccagaggcggagattctcttcgaggacatcccaaaggaaaagcgcttcccgaagtttaaacgccacgatgtgaattcaaccagaagagcacaggaagaagtgaagatccctctcgtgaacatctcgcttctgcctaaggatgcgcagctttccctcaacactttggacctccagctggaacatggtgacataactctgaaaggctacaatctctcgaagtcggcgctgctgagatctttcctcatgaactcccagcacgcgaagatcaagaaccaggcgatcattactgacgaaaccaatgatagcctggtggcgcctcaggaaaaacaagtgcacaaaagcattctccccaatagcctcggagtgtccgagaggctccagcggcttaccttccctgccgtttcagtcaaggtcaacggacatgaccaaggtcaaaatccgcctttggacctggaaacgaccgccagatttcgcgtggagactcatacccagaaaactatcgggggcaatgtgacgaaagaaaagccaccaagtctgatcgtgccactcgaatcgcaaatgaccaaagagaagaagatcacggggaaggaaaaggagaactcccggatggaagaaaacgcagaaaatcatatcggagtgactgaagtcctgcttggaagaaaactgcagcattacaccgatagctacctcggctttctgccctgggagaagaagaagtactttcaggatctcctcgatgaagaggaatcactgaaaacgcagctggcgtacttcaccgacagcaaaaacaccggacgccaactgaaagacacctttgccgattctctgcggtacgtgaacaaaatcttgaactccaagtttggattcacttcgagaaaggtgccggcgcacatgccccacatgatcgaccgcatcgtcatgcaggagttgcaggacatgtttccggaagagttcgacaagacttcattccataaggtgagacacagcgaagatatgcaattcgcattcagctatttctactacctgatgagcgcggtccagccgctgaatatctcacaggtctttgacgaagtcgatacggatcaatcaggagtcctttcggaccgcgaaatacgcactctcgcaactcgcatccatgaactgccactgtcgctgcaggacctgactggactcgagcacatgctgattaactgcagcaagatgctgccagccgacattacccagctgaataacattccgccaactcaggagtcatactacgacccaaacctgccgccagtcactaagtccctggtgaccaattgcaagccggtgaccgataagatccacaaggcatataaggataagaacaagtaccggtttgaaatcatgggagaggaggaaatcgcattcaaaatgattcggacgaatgtgtcacacgtcgtgggccagctggatgatatccgaaagaatccacgtaagttcgtgtgtttgaatgataacatcgatcataaccacaaggacgcgcaaactgtgaaggcagtgctgagagatttctatgaatcgatgttcccgataccttcccaattcgaactcccaagagaataccggaacaggttcctgcatatgcacgaactccaagagtggcgcgcctaccgcgacaagctgaagttctggacccattgcgtgttggcaactctcatcatgttcaccatcttttcgttctttgccgaacagctgatcgcgctcaagagaaagatcttcccacgccgccgcatccataaggaagcctcgccaaatcgcatccgggtc

SEQ ID NO: 16903 - DNA, 3768 bp, synthetic construct
  misc_feature 1..3768: note = source = /note="Description of Artificial Sequence: Synthetic coding sequence"
  source 1..3768: mol_type = other DNA
atgctgttcaagctgctgcagagacagacgtacacttgcctgtcgcatcggtacgggctgtacgtctgctttctcggagtggtggtgactatcgtgtcggcctttcaattcggggaggtcgtgctggaatggagccgggaccaataccacgtgctcttcgattcgtatcgcgataacattgctggaaagtcgtttcagaaccgactgtgcttgccaatgccgatcgacgtggtctacacctgggtgaatgggaccgatctggaattgctgaaagagctccagcaagtgagagagcagatggaagaggaacagaaggcaatgcgagaaattctcggtaagaacactaccgaacccaccaaaaagtccgagaagcagctggagtgcctgctcactcactgcatcaaggtgccaatgctggtgctcgacccggccctcccggccaacatcactctcaaagacctcccctcactgtacccctcctttcactcagcctcagatatctttaacgtagccaaacctaaaaacccgagcacgaacgtctcggtcgtcgtctttgattcaaccaaggatgttgaggacgctcatagcggacttctgaaggggaactcgcggcagaccgtctggagaggatacctgaccactgacaaggaagtccccggacttgtgctgatgcaagatctggccttcctgtccggatttccgccaacttttaaggaaaccaaccagctgaaaaccaagctcccagagaacctgtcatccaaggtcaagctgttgcagctctactccgaggcatctgtcgcgctgctgaagctcaacaaccccaaggacttccaggagctcaacaaacagactaagaagaatatgacgatcgatggaaaagaattgactattagcccggcctatctgctgtgggacctttctgcaatttcgcaatcgaaacaagacgaagatatctcggcctcacgcttcgaggacaatgaagagctgcgctactcgctgcgcagcattgaacgccacgccccatgggtgcgcaacattttcatcgtcaccaacggacagatcccatcgtggctgaatctcgacaacccgcgcgtcaccatcgtcactcaccaggacgtgttccggaaccttagccatctgccgacttttagctcgcccgccatcgagagccacatccatcgcatcgagggactgtcacaaaagttcatctacctgaacgatgacgtgatgttcggcaaagacgtgtggccggacgacttctacagtcactccaagggccaaaaggtgtatctcacttggcccgtgcctaattgtgccgaaggatgtccgggatcatggattaaagatggctactgcgataaggcatgtaacaattcggcttgcgattgggatggcggggactgttcggggaattcgggaggaagcagatacattgctggaggaggcggcactggctcgatcggagtggggcagccatggcagttcggcggaggaataaacagcgtctcctactgcaatcaaggatgcgcgaacagttggctcgcggacaagttttgtgaccaggcctgcaacgtgctgtcctgcggattcgacgcaggagactgtggtcaggatcacttccatgaattgtacaaggtgatcttgctgccaaatcaaacccattacatcatcccaaagggagaatgcctgccctacttttccttcgccgaggtggcaaagagaggcgtcgagggagcgtactcagacaacccgattatccggcacgcatccattgcaaacaagtggaaaactatccacctgatcatgcattcgggaatgaatgcgaccaccatccactttaacctgaccttccagaacactaacgacgaagagtttaagatgcagattacggttgaggtcgacacccgcgaaggaccgaaattgaattcgactgcgcagaagggatacgagaacctggtgtccccaatcactctgctgccagaggcggaaatactgttcgaagatatcccgaaggagaagcgttttccgaaattcaagcggcatgacgtgaattcgacccggagggcgcaagaagaggtcaagatcccgctggtgaacatttcccttctgccaaaagacgcccagctctcactgaatacgctcgatctccagcttgagcacggggatattacccttaaaggctacaacttgtccaaaagcgccctgctgcggtcatttcttatgaattcacaacatgcgaaaatcaagaaccaagccattatcaccgacgaaaccaatgactccttggtggcaccacaggagaagcaggtgcacaagtcaattttgccgaattcattgggagtgtccgagcggctgcagcggctgaccttcccagctgtgtccgtgaaggtgaatggccacgaccagggccagaacccgcctctcgacttggagactactgctagattccgggtagaaacccacacccaaaaaactattggcggaaacgtaactaaggagaagcctccgagcctgattgtgcctctcgaatcgcagatgaccaaggagaaaaagataactggaaaagagaaggaaaactcgcgaatggaggaaaatgccgagaaccatatcggagtgaccgaagtgttgctggggcgcaaacttcaacattataccgattcatacctgggttttctgccgtgggaaaagaagaaatacttccaagacctgctggacgaagaggaatcgcttaagacccaacttgcttacttcactgacagcaagaatactggaaggcagctcaaagacacgttcgctgattccctgcggtacgtgaataagatcctcaactcaaagttcgggttcaccagtcgcaaggtcccggcgcacatgcctcatatgatcgacagaattgtgatgcaggaactgcaggacatgttccctgaagaatttgacaagactagctttcacaaagtgcgccatagcgaagatatgcagttcgcattctcatacttttactacctcatgtccgcggtgcagccgctcaacatctctcaagtctttgatgaagtcgataccgatcagtccggcgtgctctcggaccgcgagatcagaactctcgcgacccgcattcacgagctgccgctctccctgcaggacctgactggtctggagcatatgcttatcaactgctccaaaatgctcccggctgacatcacccagctgaataacatcccgccgacccaggagtcgtactatgaccccaatctcccaccggtcaccaagtcactcgtgactaactgcaagcccgtgactgacaagatccacaaggcctacaaggataagaacaagtacagatttgagatcatgggagaggaagaaatcgcgtttaagatgatccgtactaacgtatcacacgtggtgggacagctcgacgatatccggaaaaacccgaggaaattcgtctgcctgaacgacaacatcgatcataaccataaggacgctcagaccgttaaggccgtcctgagagacttttatgagagcatgttcccaatcccttcgcaattcgagctgccgcgggagtaccggaaccggtttctgcatatgcacgaacttcaagaatggcgggcctaccgggataaactgaagttctggactcactgcgtcctggcaaccctcatcatgttcactatcttttccttcttcgccgagcagctgattgcactgaagagaaagatcttcccgcgccgcagaatccacaaagaagcctccccgaacagaatccgggtg

SEQ ID NO: 16904 - DNA, 3768 bp, synthetic construct
  misc_feature 1..3768: note = source = /note="Description of Artificial Sequence: Synthetic coding sequence"
  source 1..3768: mol_type = other DNA
atgctgttcaaacttctgcaaaggcaaacctacacctgtctttcccacagatacggcctttatgtgtgctttctcggggtggtcgtgactattgtttcggcatttcagtttggagaggtggtgctggagtggtcgcgcgatcagtaccatgtgctgttcgactcctatagggataacattgcaggcaaatccttccagaatcgcctgtgccttccaatgccaatagatgtggtgtacacctgggtgaatggtactgacctcgaactgctgaaggaacttcagcaagtgcgcgaacaaatggaagaggaacaaaaggctatgagggaaattcttggcaaaaacacgactgaaccgaccaaaaagtcggaaaagcaactcgagtgtctcctgacccattgcattaaggtgcctatgttggtgctcgaccctgcccttcccgcaaacatcacccttaaagatctgccctccctctaccctagcttccattccgctagcgatatctttaacgtcgcaaaaccaaagaacccatccaccaacgtgagcgtggtcgtgttcgattcaaccaaggatgtggaagatgcccattcgggactgctgaaaggaaacagccgccaaaccgtgtggcgaggttacctcactactgacaaggaagtgcccgggttggtgcttatgcaggacctggctttcctgtcaggcttcccgccgacctttaaggaaactaaccagttgaaaactaagctgcctgagaacctttcctcgaaggtcaaactgctgcaactgtactcggaagcatccgtggcacttctgaaacttaacaacccaaaggatttccaagagttgaacaaacaaaccaagaaaaacatgaccattgatgggaaggaacttactatttcgcccgcctacctcctttgggatctgtcggcaatttcgcaatccaagcaagatgaggatatatcagctagtcgtttcgaggataacgaagaacttaggtattcactcagaagcatcgaacgtcacgcaccgtgggtgcggaatatctttatagtcacgaatggacaaattcctagctggctcaaccttgacaaccctagagtgacgattgtgacgcatcaagacgtctttcgcaatctttcgcacctgccaaccttttcctcaccagcaattgaatctcatattcaccgcatcgagggactgtcgcagaagttcatttacctgaacgatgacgtgatgttcggtaaggatgtgtggccggatgatttctactcccattcaaaggggcagaaggtgtatttgacctggccagttcccaactgcgcagaaggttgccctggatcgtggatcaaggatggatactgcgacaaggcatgtaacaacagcgcctgtgattgggatggtggtgattgcagcggaaactccggaggaagcaggtatatcgccggtggtggaggcaccggttccataggggtgggccaaccatggcagtttgggggaggcataaactcggtgtcgtactgtaaccaaggttgcgcgaactcatggctcgcagataagttttgtgaccaagcatgtaatgtgttgtcatgtgggtttgacgccggcgattgcggtcaagaccattttcatgaactttacaaggtgattcttctgcccaatcaaacccattacattatccctaagggagagtgtttgccttacttctcgtttgcggaggtggcaaagcggggtgtggaaggtgcctactcggacaaccctatcattcggcatgccagcatcgccaacaagtggaaaacgatacatctgatcatgcactccggaatgaacgcaactaccatccactttaatctcactttccagaacactaatgatgaagaattcaagatgcaaataaccgtcgaagttgataccagggagggtccaaagctcaattcgactgcacagaaaggatacgaaaatctcgtgtccccaataacccttcttccagaagccgagatactgttcgaggatattcctaaagaaaagcgattccccaaattcaagcggcatgatgtgaactcgactcgcagggcacaagaagaagtcaagattccactcgtgaacatctcgcttctgcccaaggatgcacagttgtcacttaacacccttgacctgcagctggaacatggcgatattaccctgaaaggttacaatcttagcaagtcggcgctgctgaggtcatttctgatgaattcccaacatgcgaagatcaaaaatcaagcaatcattaccgatgaaactaacgattccctcgtggctcctcaggagaagcaggttcataagtcaatccttccaaattcgctgggcgtctccgagagacttcagcggcttaccttccctgctgtgtccgtgaaggtgaacggtcacgatcagggtcagaatcctccactggatcttgaaaccacggcacgttttagagtcgaaacccatactcaaaagacgatcggaggaaacgtgacgaaggagaagcctccatcgctgattgtcccacttgaatcccagatgactaaggagaagaagatcaccggtaaggaaaaagagaactcccgtatggaagagaatgcagaaaaccacatcggcgtcactgaagttctcctgggaagaaagctccagcattacaccgactcctatctcggctttctcccatgggaaaagaagaaatactttcaggacctgctggacgaagaagaatcgttgaaaactcagttggcttacttcaccgattctaagaataccggcagacagcttaaggacacgtttgctgactcgttgcgatacgtgaacaagattcttaactccaagtttggtttcacctcccggaaggtccctgctcatatgcctcatatgatcgatcggattgtgatgcaggagcttcaagatatgtttcctgaagagtttgacaagacttcgtttcacaaagtgagacatagcgaagatatgcagtttgcatttagctacttctactacctgatgagcgccgtgcaaccactgaacatttcccaggtgttcgatgaggtggatactgaccagtccggtgtcctgtccgatagagagattcggacccttgctactcgaattcatgaactccccctctcccttcaagacctcaccgggcttgaacatatgctgataaactgctccaaaatgttgcctgccgatattactcaacttaacaacatcccacctacccaagagtcgtactatgacccaaatctgcccccggtgaccaagtcgttggtcaccaattgcaagcctgtgaccgacaagattcataaagcctacaaagataagaacaagtacaggttcgagattatgggagaagaagaaatcgcttttaagatgatcagaaccaacgtgtcccacgtggttggacagctcgatgatatacgcaagaacccaagaaagtttgtctgcctgaacgataacatcgaccataatcataaagacgcgcaaactgtcaaggcagtcttgcgtgacttttacgaatcgatgtttcctattccctcgcaatttgagctccccagagagtatcgcaatagattcctgcatatgcatgagcttcaggagtggcgggcataccgggacaaactcaagttttggacccattgtgtgctcgccaccctgatcatgttcaccattttctcgttcttcgcagaacaacttatagcacttaagagaaagatcttcccaaggcgcagaatccacaaggaggcatcacctaacagaatccgggtg

SEQ ID NO: 16905 - DNA, 3768 bp, synthetic construct
  misc_feature 1..3768: note = source = /note="Description of Artificial Sequence: Synthetic coding sequence"
  source 1..3768: mol_type = other DNA
atgttattcaaactgctgcagcgacaaacttacacatgcttgtctcaccgctatggcttgtatgtatgttttctaggggtcgtggtaaccatcgtcagcgcatttcagtttggggaagttgttctggagtggagtcgggaccagtaccatgtgctgttcgactcctatcgcgataatatcgccggtaaatcttttcagaacagactttgtttgccgatgcctattgacgtcgtgtatacatgggtgaacggaacagatctggagctgctcaaagagttgcaacaggtaagggaacagatggaggaagagcaaaaggccatgagagaaattttaggcaaaaacactaccgagccaacaaagaaaagtgaaaaacaactcgagtgcctccttacacactgtattaaagtgccaatgctagttctggaccctgccttacccgcaaacattaccctgaaagacctgccctctctgtaccccagcttccatagcgcctcagatattttcaacgtagccaagccaaaaaatccttccaccaacgtttccgtggtggtgttcgactctactaaagatgtggaagacgcacactctggtctattaaaagggaacagcagacagactgtgtggagaggctacctgaccaccgataaggaggtcccgggtctagtcctgatgcaggacttggcctttctttctggctttccacctacattcaaagaaaccaatcagctgaagaccaagctgccagagaatctctcctcaaaagtgaagctcctgcaactctattccgaagcaagcgtggcactcctgaagctgaataatcctaaagattttcaggaacttaacaagcagactaagaaaaatatgaccatcgatggcaaagaactgactatctctccagcctatctgctttgggatctgtcagcgataagtcagtctaagcaagacgaagacatctcagcttcacgcttcgaggataacgaagagttacgttattctctgcggtcaattgagaggcacgctccatgggttcggaatatttttatcgtgaccaacgggcagatcccttcatggttaaacttggacaaccctcgcgtgacgatcgtaacgcaccaagatgtgttccgcaacttgtctcacttgccaacgttcagcagccctgcaatcgagtcgcatatccatcgtattgaaggactgagccagaagtttatatacctgaatgacgacgtgatgtttggcaaagatgtgtggccggatgatttctactctcactccaagggtcaaaaggtttacctgacctggcccgtgcccaactgcgccgagggatgcccaggctcgtggataaaagatggatactgcgataaagcttgtaataactccgcgtgtgattgggacggcggcgactgctctggaaactcgggagggtcgcgatacatcgctggaggaggcggcaccggctccattggggtcggacagccgtggcagttcggcggaggtataaattctgtatcttattgcaaccaggggtgcgccaattcctggctggccgataaattctgcgaccaggcatgtaacgtgctgagctgtggcttcgacgctggggactgtggccaagaccatttccacgagttgtacaaggtaatattactgccaaaccagactcactatataattcctaaaggcgagtgtctaccttattttagcttcgctgaagtcgcaaaaaggggggttgagggagcatactcggacaatccaatcattcggcatgcctcaatcgctaacaagtggaaaactattcaccttattatgcattccggtatgaacgccacgactatccactttaatctgacattccaaaacaccaatgacgaagagtttaagatgcagatcaccgtcgaggtagatacccgcgagggacctaaactgaactccactgcacagaagggttatgaaaaccttgtatcacccattactcttctgccggaagccgaaattttattcgaagatataccaaaggaaaagaggttcccaaaattcaagcgccatgacgtgaactcgacccgtagagcccaggaagaagtgaaaattcccctcgtcaatataagccttttacccaaagacgcgcagttgagtctgaataccttagacctgcagctcgagcatggggatattactcttaagggctataacctgagtaaatccgccctgcttagatcattcctaatgaactcccaacatgccaagattaaaaaccaggctataatcaccgatgagacaaatgactctctggtggcaccacaggagaagcaagtgcataagtccattctcccaaacagcctcggggtgagcgagcggcttcaacgcctgaccttcccagcagtctctgtcaaggtaaacggacacgatcagggccagaaccccccactggacttggaaacaaccgcccgttttcgggtagaaacacacactcaaaagactatcggtggcaacgtgactaaggagaaaccccctagtttgatcgtcccactagaatctcagatgacaaaggagaagaagatcacaggcaaagagaaagagaactcacgaatggaggagaacgccgagaatcatatcggtgtgacggaagttctcctgggccgtaaactgcagcactatactgactcatacctcggttttttaccttgggagaaaaagaagtatttccaagatctgctcgatgaggaggaatcacttaaaactcaactcgcatacttcaccgatagcaagaacacagggcggcagttaaaggatacctttgcagactcactgcggtatgtgaataagatcctaaactctaaatttggattcaccagccgtaaggtaccagcccacatgccccacatgatagatagaattgttatgcaggagctacaggatatgtttcccgaagaatttgataagaccagtttccacaaggtgcgccactctgaggatatgcagttcgccttctcttacttttactacctgatgtccgccgtgcagcctctgaacatctcacaggtgttcgacgaggtagacacagaccaaagcggcgtcttgagcgaccgcgaaatcagaaccctcgcaaccaggattcatgagcttccgctctctctgcaggatctcacgggactcgagcacatgctgattaactgttctaaaatgctccctgccgacatcactcagctaaacaacatccctcccacgcaggaatcttactatgacccgaacctccccccagtgacgaagagcttggttacaaattgcaagccggttaccgacaagatacacaaagcgtataaggataagaataagtacagatttgagatcatgggggaagaggaaatcgccttcaagatgatccgcacaaacgtttctcacgttgttggtcagctcgacgacattcggaagaatccacgcaagttcgtatgccttaatgacaacatcgaccacaatcacaaggatgcacagactgtgaaggccgtgttgcgagacttttatgagagcatgtttccgataccttctcagttcgaattgcccagagaataccggaatcgcttcttgcacatgcatgaactgcaagagtggcgcgcttaccgcgataagctgaaattttggactcactgtgtgctcgccacactgataatgtttaccattttctccttcttcgctgagcagctcattgctctgaagaggaaaatctttccgcgacggcgtatacataaagaggcctctcctaacagaatccgtgtt

SEQ ID NO: 16906 - DNA, 3768 bp, synthetic construct
  misc_feature 1..3768: note = source = /note="Description of Artificial Sequence: Synthetic coding sequence"
  source 1..3768: mol_type = other DNA
atgctctttaagctgttgcagcgccagacctacacttgtctttcgcatcgttacgggctctacgtgtgctttctgggggtggtggtgactattgtgtcagcctttcaatttggggaagtggtgctggaatggtccagagatcaataccatgtgctgtttgattcataccgagataacattgcaggtaaatcgtttcagaacaggctctgcctgcccatgccaattgatgtagtctacacttgggtgaatggtaccgacctggaactgctgaaggagctccaacaggtgagagaacagatggaagaggaacagaaggccatgagagaaattctcggaaagaataccactgagcctactaagaagagcgagaagcaacttgagtgtctccttacccactgcatcaaggtgccaatgcttgtgctggatcctgcacttccagccaacattacccttaaggatttgccttccctttacccgagcttccattccgcatcggacattttcaacgtggcaaagcctaagaacccttccaccaacgtttcggtggtggtgtttgactcgaccaaggatgtcgaggatgcgcacagcggacttctcaagggtaacagcagacaaactgtgtggcgcggctatctgaccactgataaggaagttccagggctggtcttgatgcaagatttggcgtttctgagcggatttccgcctactttcaaggagactaatcagcttaaaaccaagctcccggaaaacctgagctccaaggttaaacttcttcagctgtactccgaagccagcgtggcactgctcaaacttaacaatcccaaagattttcaagaacttaacaagcaaactaagaagaacatgactattgacggtaaagaattgaccatctccccggcttacctgctgtgggaccttagcgccatttcacaatctaaacaagatgaagatatctccgcgtcgagatttgaggacaacgaggaactgaggtacagcctgcgttcgattgagcgccacgcgccgtgggtgcggaacatcttcatcgtgactaacggacaaatcccatcgtggctgaacctcgataatccgcgggtcaccatcgtgacccatcaggacgtctttaggaacctttcgcatctgcctactttttcgtctccagcaattgaatcccatatccatcgcattgagggactgtcccagaagtttatctacctcaatgacgatgtgatgtttggtaaggatgtgtggccagacgacttttactcgcattccaaaggacaaaaggtgtacctcacgtggccagtgcctaattgcgccgagggttgcccgggatcatggatcaaggacgggtattgtgacaaggcatgcaataacagcgcgtgcgattgggatggaggagattgttcgggaaatagcgggggatcgcgctacatagcgggcggcggcggtacgggttcgatcggtgtgggccagccatggcagtttggcggaggaatcaactcagtgtcctactgtaatcaaggatgtgcgaactcctggctcgcagacaaattctgtgatcaagcctgtaatgtgctctcctgcggttttgacgctggagattgtggccaggatcactttcatgaactctataaggtgattcttttgcctaaccagactcattacattattcccaagggcgaatgccttccctacttctcgttcgcagaagtggctaagcgaggggtcgaaggcgcatactccgacaaccctatcatacgacatgcctccattgccaacaaatggaaaactattcaccttatcatgcactccgggatgaacgcaaccacgattcatttcaatctcacttttcaaaatactaacgatgaggaattcaaaatgcagattactgtcgaagtggatacccgtgagggccccaagctgaactccaccgcgcagaagggatacgaaaacctggtcagccccatcacgttgctccccgaagcagagattctttttgaggatataccgaaggagaaacggtttccaaaattcaagcgacatgatgtgaactccactcgcagagcccaggaggaggtgaagatcccccttgtaaacatctcgctgttgcctaaggacgcgcaactctcactgaacaccctggacctccaactcgagcatggggacattactctgaaaggttacaacctgtcgaagtcggcactgcttcggagctttttgatgaattcccagcatgcaaaaatcaagaaccaagctattatcacggatgaaaccaacgattcactcgtggcaccacaggaaaagcaggtgcataagagcatccttcctaactccctgggagtgtcagaacggctgcagaggctgacttttccagctgtgtccgtgaaggtgaacgggcacgaccagggacaaaaccccccactggatcttgaaaccaccgctcgcttccgggtcgagactcatactcaaaagaccattggcggtaatgtgaccaaagaaaagccgccatcccttatagtccctcttgagtcccagatgaccaaggaaaagaaaatcacgggaaaggaaaaagagaattccaggatggaggaaaacgccgaaaaccatatcggagtcactgaagtcctgctgggaagaaagctgcagcattacactgactcctacctgggattcctgccttgggaaaagaagaagtacttccaggatctgctcgatgaagaagaaagtcttaagacgcagctggcatactttactgattcgaagaatactggtcgtcaactgaaagacacctttgccgactcgctccgctacgttaacaaaatacttaactcgaaatttgggtttacttcgaggaaggttccagcccacatgccacatatgatcgatagaattgtgatgcaagagcttcaagacatgttccctgaagaattcgataagacttcctttcataaggtgcgacattccgaggacatgcaatttgctttttcatacttctattacctcatgtcggcggtgcagcctttgaacattagccaggtgttcgacgaggtcgacaccgatcaatcgggagtgctctccgacagagaaatcagaaccttggcaaccagaatccacgaactcccactttccctgcaagacctgaccggacttgaacacatgctgatcaactgttcgaagatgcttcctgcagacattactcaactgaacaacataccccctacccaggaatcatactatgaccctaatttgcctccggtgactaaaagcctcgtgacgaattgtaagcccgtgactgacaagatccataaggcctacaaagataagaataagtaccggttcgagattatgggcgaggaggaaattgcctttaagatgatccgtactaacgtgagccacgtggtgggtcaacttgatgatatccgcaagaaccctagaaagtttgtgtgcctgaacgataacatcgaccacaaccataaggatgcacagacggtgaaggcagtcctgcgcgatttctacgaatcaatgttcccaattccatcacagttcgaactccctcgtgagtaccgcaatcgatttctgcacatgcatgaattgcaagaatggcgggcctacagggataagctcaagttttggactcattgtgtccttgcaactctgattatgtttaccattttctcgttttttgcggaacagctgattgcccttaagaggaagatttttcctcgtcgtcgtattcataaagaagctagccctaacagaatacgcgtg

SEQ ID NO: 16907 - DNA, 3768 bp, synthetic construct
  misc_feature 1..3768: note = source = /note="Description of Artificial Sequence: Synthetic coding sequence"
  source 1..3768: mol_type = other DNA
atgttgttcaagctgttgcaaagacaaacttacacttgtctttcgcatagatacgggctgtacgtctgctttctgggagtcgtggtgactatcgtgtccgcattccaattcggcgaagtcgtgctcgaatggagcagagatcagtaccatgtcttgtttgattcttacagagataacatagcaggcaagagcttccaaaaccgcctttgtctgcctatgcctatcgatgtcgtgtacacttgggtgaacggaactgatctcgagcttttgaaggaacttcagcaggtccgtgagcagatggaggaagagcagaaggcaatgagagagattctcggaaaaaacacgactgagccgaccaagaaaagcgaaaaacaactcgaatgtctcttgactcattgtattaaggtccccatgttggtgctggatcctgccctccccgcgaacattactctgaaggaccttccttcgctttaccctagctttcatagcgcgtcggatatcttcaacgtggccaaaccaaagaatccttcgaccaacgtgtcagtggtggtgtttgactcaaccaaggacgtggaagatgcacattccggcttgcttaaaggaaattcaagacaaactgtctggaggggatatctcactaccgataaggaggtgcctggtctggtccttatgcaggacttggcatttctgtcgggatttccaccgacgtttaaggagactaatcaactgaaaaccaagctgcctgagaaccttagctccaaagtgaaacttctccaactttacagcgaagcatctgtcgcgcttcttaaacttaacaaccccaaagatttccaggagctgaataagcaaacgaaaaagaacatgaccattgatggtaaagaactcactatatcgcctgcatacctgctgtgggatctttcggcgatctcccagtcgaaacaggatgaagatatttctgctagcaggttcgaggataacgaagagctcagatactcactcagatccattgaacgacacgcaccctgggtgcgcaacatattcatagttaccaacggacagattccttcctggctgaatctggataacccccgggtgaccatcgtgacccatcaagatgtgttcaggaatctgagccatcttccaacgttttcgtcccctgcaatagagtcacatattcatcgcattgaagggctttcccagaagttcatttaccttaacgacgatgtgatgttcggaaaggatgtgtggccggatgacttctactcacacagcaagggtcaaaaggtgtaccttacttggcccgtgcctaattgtgctgaaggatgtcctggatcttggattaaggacgggtactgtgataaggcatgtaacaactccgcatgcgattgggatggaggagattgctccggaaatagcggaggctcacggtatattgcaggaggagggggcaccggttcgatcggagtgggacaaccttggcaattcggtgggggtataaactcggtttcatactgtaaccaaggttgtgcaaactcctggcttgccgacaagttttgtgatcaagcctgtaacgtgctgtcatgtggtttcgacgctggcgactgcggccaagatcatttccacgaactttacaaggtcattctccttcctaaccagactcactacattattcctaagggcgaatgtttgccatacttttcgtttgccgaggtcgccaagcgcggtgtggaaggagcttacagcgataatcccattattcgtcatgcatcaatcgctaacaaatggaaaaccatccatttgatcatgcacagcggtatgaatgcaaccaccattcatttcaatctgacctttcagaacaccaacgatgaggagttcaaaatgcagattaccgtggaagtggacactagagagggaccgaaacttaactcaaccgcgcagaaggggtacgaaaacctggtgtccccaattaccctgctgcctgaggcagagattctgtttgaagatatacctaaggagaagagatttcctaagtttaagcggcacgacgtgaactcaactaggagagcacaggaagaagtcaaaatccctttggtcaacatttcccttcttccaaaagatgcacagctcagccttaacaccctggatcttcaactggaacatggtgatattactcttaaggggtacaatctgtccaagagcgccctcctgcgatcctttctcatgaactcacaacatgccaaaatcaagaaccaagcaatcattaccgacgagacgaatgatagcctcgtggcaccacaggaaaagcaagtccataaatcgatactcccgaacagcctcggagtttcggaaagactgcagcgactgacgtttcccgcagtgtcggtgaaagtgaacggacatgatcagggtcaaaatccacctttggatttggaaaccaccgccagatttcgcgtggaaacccatacccaaaagactataggcggtaatgttactaaggaaaagcctccatcgttgattgtcccgctcgagtcacaaatgaccaaggaaaagaagattaccggaaaggagaaggagaattccagaatggaagagaacgctgaaaaccacattggagtcacggaagtgctcctgggcagaaagctccagcattacaccgattcgtacctgggatttctgccatgggaaaagaaaaagtacttccaagatctcttggatgaagaagaatcgctcaagactcagctggcttacttcaccgactccaagaatactggaaggcagctcaaggatacctttgccgactcgcttcgatatgtcaataagattctgaactcgaagttcggatttacctcgcggaaagtgcccgcacatatgccccatatgattgaccgtattgtcatgcaagagctccaagacatgtttccagaagagttcgacaaaacttcctttcataaggtcagacactccgaagatatgcagtttgcgttcagctacttctactacctcatgagcgccgtgcaaccactgaacattagccaagtgttcgatgaggtcgatactgaccaatcaggcgtcctctcggacagggaaattagaactctcgcaaccaggatccacgaactgcctctttcgctgcaggaccttactgggcttgaacatatgctgattaactgctccaagatgcttcctgcggatataacccagctgaacaacattccacctacccaagaatcctattatgaccctaatcttccaccagtcaccaaaagtcttgtcaccaactgtaagcccgtcactgacaagattcataaggcctacaaagacaaaaacaagtacagatttgaaatcatgggtgaggaagaaatcgctttcaagatgattcggactaatgtgtcccatgtggttgggcagctcgacgatattcggaaaaatccaaggaaatttgtctgtctgaacgacaatatcgaccataaccacaaagatgcccaaactgtgaaggccgtgctgagggatttctacgaatcgatgtttccgataccaagccagttcgaacttccaagagaatacagaaaccgttttttgcatatgcatgaacttcaagagtggagagcctaccgggataagctgaaattctggacgcattgtgtgctcgccactctcataatgtttaccatcttcagttttttcgcagaacaacttatcgcgctgaaaaggaagatattccctagacgtcgtatccacaaggaggcatcgcctaaccgaattagggtc

SEQ ID NO: 16908 - DNA, 3768 bp, synthetic construct
  misc_feature 1..3768: note = source = /note="Description of Artificial Sequence: Synthetic coding sequence"
  source 1..3768: mol_type = other DNA
atgctgttcaagctgctgcagaggcagacatatacgtgtctctctcacagatacggtctgtatgtttgctttctcggcgttgtcgtgacgatcgtttcagccttccaatttggagaagtggttctggaatggtcgcgggaccagtaccatgtgctgtttgactcgtatagagataacattgctggcaagtccttccagaaccgactgtgcttacccatgccaatcgacgtcgtgtacacctgggttaatggaaccgacctcgagttgctcaaagagctacagcaagtgcgagagcagatggaggaggagcaaaaagccatgagggaaatcctagggaagaataccacagaaccaaccaaaaagtctgaaaagcagctggaatgtctactgacacattgcattaaagtgcctatgctcgtgctcgacccagctctgccagccaacatcacactgaaagatttgccaagcttatatccctccttccattctgcttccgacatatttaatgtagctaagcccaagaacccatccacaaacgtaagcgtggtggtattcgattccacgaaagacgtggaggacgcccactccggactcttgaaagggaactcgcgacaaactgtctggcgaggatacctgaccactgacaaggaggtgccaggcttggtgctgatgcaggatttggcttttctatctggctttcctcccacgttcaaagagacaaaccagctcaagaccaagctgcccgagaatctgagttctaaggtcaaattactgcagctttacagtgaggcctctgtagcgctgctgaagctgaacaaccctaaggacttccaagaattgaacaaacaaactaagaaaaatatgacgattgacggtaaggagttaaccatcagtcctgcttacctattatgggacctgtccgccatttcacagagcaaacaggacgaggacatttctgcgagccggtttgaggacaatgaggaactcaggtactcactgagatccattgagaggcacgcaccatgggtcaggaacatcttcattgttaccaatggccagatcccctcttggttgaatctcgacaacccccgggtaacgatcgttacccaccaggacgtttttcggaacctcagccatctccccacctttagttccccagcgattgagagccacatccatagaatcgaggggctctcccagaagtttatctatctgaacgatgacgttatgttcggcaaggatgtgtggccagacgatttctattcccacagtaaaggccagaaggtgtatctaacatggccagttccaaactgcgccgaggggtgccctggaagttggatcaaagatgggtactgtgataaggcctgtaacaactccgcctgcgattgggatggcggtgactgcagcggaaattccgggggatcacgctacattgcaggcggaggcggtacgggttctatcggagtcgggcagccatggcagttcggcggcggcatcaactcagtcagctattgcaaccaggggtgcgccaatagctggctcgcagataagttctgcgaccaggcctgtaatgtgctatcttgtggattcgatgctggagactgtggccaggatcacttccacgaattgtataaagtaattctgctcccgaatcagacacactacattattcccaagggtgagtgcctcccttatttctcattcgccgaggtggcaaaaagaggggtagaaggcgcttactctgataatcccattatcaggcatgcatccatagctaacaaatggaagactattcatctcatcatgcattcaggcatgaacgcaacaacaatccatttcaatctgacctttcagaatactaatgatgaagaattcaagatgcagatcactgtagaagtggatactcgtgagggccccaaactgaactcaacagcgcagaagggctatgaaaacctcgtgtcaccgatcacactgcttcctgaggcggagatcctgttcgaggacatacccaaggagaaaaggtttcccaagtttaaacgacacgacgttaatagcaccagaagagcccaggaggaagttaaaattcccctggtgaatatctcactgctcccgaaagatgcccaattatcactgaacactctggaccttcagctagaacacggcgacattactctcaaggggtacaacctaagcaagagtgcgctcctgcgttctttcctcatgaactcacaacatgccaagataaagaaccaggcaattattaccgacgagactaatgattccttggtggctcctcaagagaagcaggtgcacaagagtatcctgcctaattccctcggggtcagcgaaaggctccaacgactgacctttccagctgtgtccgtaaaagtgaacggccatgaccagggtcagaatccccccctggatctggaaaccacagccagattcagggtcgagactcacacccagaagaccattggcggaaacgtcacaaaagagaaacctccttcgctgattgtaccacttgagagccaaatgactaaagaaaagaaaattacgggcaaggagaaagagaattcgaggatggaggagaacgctgagaaccacatcggcgttaccgaagtgctgttagggcgaaagttgcagcactatacagactcctacttaggattcctgccctgggaaaagaagaagtacttccaggacttactcgatgaggaggaatctctgaaaacccagttagcctatttcaccgacagcaaaaataccggccgccagctgaaggacacctttgctgatagcttgaggtatgtgaataaaattcttaactcaaaatttggcttcacatccagaaaagtgcccgctcacatgccgcacatgattgacaggatcgtcatgcaggaacttcaagacatgttccctgaggagtttgataagacgtcttttcataaggtgcgacatagcgaagacatgcagtttgctttctcatacttctactatcttatgtcagccgttcagccactcaacattagtcaggtattcgacgaagtcgatactgatcaaagcggagtcctgtccgacagggaaatcagaacgttagcgactcgtatccacgaactcccactctcattgcaagatctgaccggcctggagcatatgttgatcaactgtagtaagatgctgcctgcagatattacccagctgaataacatcccacctactcaggagtcttactatgatccgaatctgcccccagtcaccaaaagcctggtaacgaactgtaaacccgtaaccgataaaatccacaaggcttacaaagataagaataaataccggtttgagatcatgggtgaagaagagatcgccttcaagatgatcaggacaaatgtcagtcatgtggtcggccagctcgacgacattagaaaaaacccccgaaaatttgtctgcctaaatgacaacatagaccataaccacaaggacgctcaaacagtcaaagcagtgctgagggacttttacgaatccatgtttcccattcctagccagttcgaactgcctagggaatacaggaataggtttctgcatatgcacgaactgcaggaatggagagcatatagagataagctgaaattttggacccactgtgtcctggccaccctgatcatgtttactatcttcagttttttcgcagaacaactgatcgctttaaaaagaaaaatttttccgaggcgacgaattcacaaagaagcttcacccaataggattagagtg

SEQ ID NO: 16909 - DNA, 3768 bp, synthetic construct
  misc_feature 1..3768: note = source = /note="Description of Artificial Sequence: Synthetic coding sequence"
  source 1..3768: mol_type = other DNA
atgctgttcaaactcctgcaacggcagacttacacttgcctgtcccatcggtacgggctctacgtctgctttctgggagtggtcgtcactattgtgtcggctttccagtttggggaggtcgtgctcgaatggtcccgcgatcaataccacgtgctgttcgactcataccgggacaacattgcgggcaagtcattccagaatagactctgtctgcctatgccgattgatgtcgtctacacttgggtcaatgggaccgacctggaactcctcaaagaactgcagcaggtgagggaacaaatggaagaggagcagaaggctatgagagaaatactggggaagaacaccactgagccgaccaagaaaagcgaaaagcaactggaatgccttctcactcactgtatcaaggtccccatgttggtgctggacccggcactccccgccaatatcaccctcaaggaccttccgtcactttacccatcattccactccgcctctgatatcttcaatgttgcgaaaccgaaaaatccgtctactaacgtgagcgtcgtcgtgttcgattcgactaaagacgtggaggacgcgcactccggacttctgaaaggcaattcacgtcagaccgtctggcgcggctatctcaccaccgataaggaggtgccgggcctcgtgctcatgcaggacctggccttcctcagcggcttcccacctaccttcaaagaaacgaaccagctgaaaacgaaactgccagagaacctgtcaagcaaggtcaagctcctgcagctttactctgaggcttcagtggctctgctgaagttgaataacccgaaggatttccaagaactgaacaaacaaactaagaagaatatgaccattgacggcaaggaactgactatttcccccgcatacctcctctgggatctgagcgccattagccagtctaagcaagatgaagatatctcggcgtcacggtttgaagataacgaggagctgcgctactcgctccgctccatcgagcggcacgcgccctgggtcagaaacatcttcatcgtgacgaatgggcagatcccgtcgtggctgaacctggataatccgcgggtgactatcgtgacccatcaggacgtgttcagaaacctttcgcatctgccgacgttctccagccccgccatcgagtcccacattcacagaatcgaaggattgtcccagaaattcatctacttgaatgacgacgtcatgtttggtaaggacgtgtggccagacgacttttactcccactcaaagggccagaaggtgtaccttacttggccagttccaaattgcgccgagggttgccctggttcctggatcaaagacggatactgcgataaggcctgtaataactccgcatgcgattgggacggaggagattgctcaggaaattcaggaggaagccggtacatcgctggcggtggaggtactggatccatcggcgttgggcagccgtggcagttcggaggaggaatcaattcggtttcctactgcaaccaaggctgcgcgaatagctggctggcagacaagttttgcgaccaggcatgtaacgttctctcgtgcggattcgacgcgggagactgtggccaggatcacttccatgagctgtataaggtgattctcctcccgaaccagacccactacattatcccgaaaggagaatgtctgccgtatttctcctttgccgaggtggctaagcgcggagtcgaaggtgcttactcggataacccgatcatccgccacgccagcatcgcgaataagtggaaaacgatccatctgatcatgcactccggcatgaacgcgactaccatccacttcaatctgacctttcaaaataccaacgacgaagagtttaagatgcaaatcactgttgaggtggatacccgggaaggtccgaagctgaactcgactgcccagaagggttacgaaaatctcgtgtctccaatcaccctgcttccagaagcggagatcttgtttgaagatatccccaaggaaaagaggttcccgaaattcaagcgccatgacgtgaactccactcgtcgagctcaggaggaagtgaaaatccctctggtcaacatctcgctgctcccgaaagacgctcagctgtcactcaacacccttgacctgcagctcgagcatggagacatcactctgaagggttacaacctctcgaagtccgcccttctcagatcctttctgatgaactcgcaacacgccaagatcaaaaatcaggctattatcaccgatgaaaccaacgacagcctggtggccccacaagagaagcaagtgcacaagagcatcttgccaaactcgcttggagtgtcagagcggctgcaacggctgacctttcctgcagtgagcgtgaaggttaacgggcatgaccaggggcaaaaccctcctctggacttggagactactgcacgcttccgggtggagactcacacccaaaagaccatcggcggaaacgtgactaaggaaaaaccgccgtcgctgattgtgccactcgaaagccagatgaccaaggagaagaaaatcactggaaaagaaaaagaaaattctcgaatggaagagaacgcggaaaaccacattggggtcacggaggtgcttctgggacggaagctgcagcactatactgactcgtacctcggcttcctgccttgggagaagaagaagtacttccaagaccttctggatgaggaggagtctctgaaaacccagttggcctatttcaccgattcgaagaacactggtcgacagttgaaggacaccttcgcagacagcctgcgctacgtcaacaaaatactgaattccaagttcggattcaccagccggaaggtgccagcccacatgccgcacatgatcgaccgcatcgtgatgcaggaactgcaggacatgtttccagaagaatttgataaaacctccttccacaaagtgcggcactcggaagatatgcaatttgccttcagctacttctactacctgatgtctgccgtgcaaccgctgaacatctcgcaagtgttcgatgaagtggatactgaccaaagcggcgtgctgagcgatcgcgaaatccggactctggccacgcggatccatgaactgccattgtctcttcaagatttgaccggactcgagcacatgctgatcaattgttcgaagatgctgccagccgacatcactcaactcaataacattccccccacccaggaatcgtactacgatccgaacctcccgccagtgaccaagagcctggtgaccaactgcaagccagtgactgacaaaatccataaggcatacaaggacaagaataagtaccgctttgagattatgggggaggaggagatcgccttcaagatgattcgcacgaatgtttcccatgtcgtgggacagctggatgacattaggaagaaccctcgcaaattcgtctgcctcaacgacaatattgatcataatcacaaggacgcacagaccgtcaaggctgtgctgcgcgatttctacgagagcatgttcccaatcccttcacagttcgaattgccgcgagaataccggaacaggtttctccatatgcatgaactgcaggaatggcgggcctaccgcgacaagttgaaattctggacccattgtgtgttggccactctcattatgtttactatcttctcgttcttcgcggagcagctgatcgctcttaagcgcaagatctttccgcgccggcgcatccataaggaggcatcgcctaatcggatccgggtt

SEQ ID NO: 16910 - DNA, 3768 bp, synthetic construct
  misc_feature 1..3768: note = source = /note="Description of Artificial Sequence: Synthetic coding sequence"
  source 1..3768: mol_type = other DNA
atgctgttcaagctgctgcagaggcaaacgtacacctgcctcagtcatagatacggtctgtacgtgtgctttttgggagttgtagtcactatagtgtctgcctttcagttcggcgaggtcgtgttggagtggagccgcgatcagtatcacgtgctgtttgatagttatagagataacatcgccgggaagtcattccagaacaggctgtgtctacctatgccaatcgatgtggtttacacctgggttaatggtaccgatcttgaactgcttaaagaactgcaacaagtacgggaacagatggaggaggagcaaaaggcaatgcgtgaaatattgggcaaaaacacgactgaacccacaaagaaaagcgaaaagcagttagaatgcctccttacgcactgtatcaaagttcctatgctggtgctggaccctgccctcccagcaaatatcaccctcaaggacctgcctagcctgtacccatcttttcactcagcatccgacatcttcaatgtagcgaagccgaagaatcccagcacaaatgtgtcagttgtggtgttcgattctacaaaggacgttgaagacgcccatagtggtctactaaaggggaactcccggcagactgtctggcggggctatctcaccactgataaggaggtcccaggactggttttaatgcaagatctggcttttctgagcgggttccctccaacatttaaagagacgaaccagttgaagaccaagcttcccgagaatctgtcctcaaaggtgaagttactgcagctctactcagaggcttccgtggccctcctgaaactgaacaatcctaaagatttccaagagctgaacaagcagacaaaaaaaaacatgacaattgacgggaaggaactgacaattagtcccgcatatctgctttgggatctgagcgctattagccagagcaaacaggacgaagatatctccgcgtcaagattcgaggacaatgaggaactccgctacagcctgcggagcattgagcggcacgccccctgggtgcgaaatattttcatagtgacaaacggccagatcccttcatggctcaatcttgacaatcctcgcgtgaccatcgtcactcatcaagatgtgttccgaaacctgagccacctccccacattctcgagtccggcaattgaatcccacatccatcggattgaagggctaagccagaagttcatttatttaaacgacgacgtcatgtttggaaaagacgtgtggcctgacgacttttactctcatagcaagggccagaaggtgtatttaacatggcctgttccgaactgtgcggagggttgtccaggatcatggatcaaggacgggtactgtgataaagcatgcaacaactcagcctgtgactgggacggcggggattgttccggaaacagtggcggcagccggtatatagccggcggcgggggtaccggctccatcggcgtaggccagccatggcaatttggcggcggaatcaattctgtgagctattgtaaccagggttgcgccaactcctggctagccgataagttttgtgatcaggcctgtaacgtgctaagttgcgggttcgatgccggcgattgcggtcaggaccactttcacgagttgtataaggttatcctccttcccaaccagacacattacatcatcccaaaaggcgagtgcttgccttatttttcattcgcagaggtcgccaagcgaggggttgagggagcttattccgacaatccaattatccgccatgcttctatagctaacaaatggaaaactatccacttaatcatgcattccggaatgaacgcaaccacgatccactttaacttgactttccaaaatacgaacgatgaggagtttaagatgcagatcacagtggaggtcgatacaagggagggtcctaaacttaacagcaccgctcaaaaaggctatgagaacctggtgtcacctattacactgcttccagaggccgagatattgttcgaagacattcctaaagagaagcggttcccaaagttcaaaagacacgatgtgaatagcaccaggcgcgctcaggaggaggtgaagatccccttggtgaacatctctctgctgccaaaggacgcccagctgtcattaaatactcttgatctacagctcgaacacggggatattaccctaaaggggtacaatttgtcgaagtctgctttgctgcgttcatttttgatgaatagtcagcacgccaaaatcaagaaccaggctataatcaccgatgaaaccaatgactctctggtggcaccccaggagaagcaagttcacaagagcatactcccaaacagcctgggcgtctctgagaggttacagcggttgacatttcctgcagtgtctgtaaaggttaacggacacgatcagggccagaatccaccgctggatttggaaactaccgcccgcttccgggtggagacacacacacaaaaaaccattggtgggaacgtgactaaggaaaaaccaccatctctcatagtgcccctggagagccagatgaccaaggaaaaaaagattacgggaaaggaaaaggaaaatagtaggatggaggagaatgcggaaaatcatatcggtgtgactgaagtccttttgggtcgcaagcttcagcactataccgactcctacctgggattccttccatgggagaaaaagaagtattttcaggatctattggatgaagaagagagcctcaagacccagctggcatatttcactgactctaaaaatacgggtcggcagttgaaagacacctttgcagacagtctgcgctacgtcaataagattctcaactcaaagttcggattcacatcaaggaaggtccctgcccacatgccccacatgattgaccgcatcgtgatgcaggagctccaggatatgttccccgaggaatttgacaagactagtttccataaggtccggcatagcgaggacatgcagttcgccttctcgtacttttattacctgatgagtgccgttcaaccactgaatatcagccaggtctttgacgaagtcgacactgatcagagtggggtgctaagtgatcgagagatccgcaccctggcaaccaggatccacgaactcccactaagtctccaggacctgactgggctggaacacatgttgattaattgcagcaagatgctgcccgctgacattacccagttgaacaacatcccacctacacaggagtcttattatgatcctaacctaccacccgtgaccaagagcctcgtcaccaattgcaagccagtcacggacaagattcacaaggcatacaaagataagaataaatatcggttcgaaattatgggtgaggaggaaattgcctttaagatgattagaaccaacgtgtctcacgttgtaggacagctggatgacatcaggaagaatccccgcaagtttgtttgtctgaatgacaacatcgatcataaccataaggatgcccagactgtgaaagccgtgctgagggacttttatgaatccatgttcccaatcccatcccagtttgaattgccaagagagtaccggaatcgctttctgcacatgcatgaattgcaagaatggagagcttatcgggataagttgaagttctggacacactgcgtcttggccacactgatcatgttcacaatcttttctttctttgccgagcagctgatagccctcaaaaggaaaatcttccctagacgaaggatccacaaggaagcgtcgccaaaccggatccgagta

SEQ ID NO: 16911 - DNA, 3768 bp, synthetic construct
  misc_feature 1..3768: note = source = /note="Description of Artificial Sequence: Synthetic coding sequence"
  source 1..3768: mol_type = other DNA
atgttgtttaaactgcttcagagacagacatacacatgcctgtcccatcgctatggcctgtatgtgtgtttcctcggggtggtcgtgactattgtctccgccttccagtttggggaagtggtgctagagtggagccgagatcagtaccacgtcctctttgactcatacagggacaacatagctggaaagagcttccagaacaggctttgcctcccgatgccaattgacgtcgtgtacacctgggtgaacggaactgatctggagctgctgaaggagctgcaacaggtgcgggagcaaatggaagaagagcagaaagccatgagagagatcttgggaaagaatacaaccgaacctaccaagaagtcagagaagcagctcgaatgtctgctgactcactgtatcaaagtaccgatgctggttctcgatcccgctctaccagccaatattacactgaaagatctgccgtcactgtatccatccttccattcagcgtctgacatcttcaatgtggctaagccgaagaaccccagcactaacgtcagtgtggtagtgttcgatagcaccaaagatgtggaggatgcgcattccggactcctaaaagggaatagccggcagacagtgtggcgaggttatctgaccacggacaaagaagtgccagggctcgtcctgatgcaggatcttgcattccttagtggcttcccccctacctttaaggaaaccaaccaattgaagaccaagctccccgagaatctctcttctaaggtaaagctgctgcagctctactccgaggcttcagtggcgctgctgaagctcaataacccgaaggacttccaggaactgaacaagcaaaccaagaagaatatgacgatcgacggcaaggagttgactattagccctgcatacctgctgtgggacctttctgccatcagccagtctaagcaagacgaagacataagcgcctcaagattcgaggataacgaggagctccgatacagcctgagatccattgagcggcatgctccctgggtgagaaacatttttatcgttaccaatggacagatcccgtcctggctgaaccttgacaatccaagagtcacaatcgtgacacaccaggacgtgtttcgcaacttatctcatctgcccacttttagcagcccggcaatcgagagtcacatacaccgcatcgaagggctttcccagaagtttatctaccttaatgatgatgtcatgttcggaaaggacgtctggcccgacgacttttacagccatagtaagggccagaaggtctaccttacttggcctgttccaaactgcgccgaaggttgtcctggatcttggataaaagacggttactgcgacaaggcctgcaacaactccgcttgcgattgggatgggggagattgcagtggcaacagcggaggcagtaggtatatcgcaggcggagggggtacaggcagtattggggtggggcagccttggcaattcggagggggcatcaactcagttagctactgtaaccagggatgtgctaacagctggctggcggacaaattctgtgatcaagcatgtaacgtgctgtcatgtggtttcgatgctggcgactgcggtcaagaccatttccacgagctgtataaagtgattttgctgcctaatcaaacacactacatcatccctaagggcgagtgcctgccttatttctcctttgccgaggtggccaagcgaggagtggagggtgcatatagtgataatccgatcattaggcatgcgagcattgcaaataagtggaagacaatccacttgattatgcatagcggcatgaacgctactacaatacatttcaatctgacttttcagaatacaaacgacgaggaattcaaaatgcaaatcaccgttgaggttgatacccgggagggccccaaactcaactccacggcccagaaaggctatgaaaacctggtgtcgcccattaccctcctgcctgaagcggagattctattcgaggacattcctaaggaaaaaaggttccctaaatttaagcgccacgatgtgaattctacacgtcgagctcaggaagaggtgaaaatccctctggtgaacatctccctgctgcccaaggacgcacagctctcattaaatacactggatctgcagttggagcatggagacattacactgaagggctacaacctgtccaagtctgcattgctgcggagtttcctgatgaactcacagcacgcgaagattaaaaaccaggccatcataaccgacgagacgaacgatagcctggttgctccccaagagaagcaggtgcacaagagtatcctgcccaatagtctgggcgtgtcagagcgcctacaacggctgacatttccggccgtgagcgtgaaggtgaatgggcacgatcagggccagaaccctcctctggatctggaaactactgcccgttttagagtcgagacacacactcaaaaaactattgggggcaatgtaacgaaggagaaaccgccatcactcatcgtcccgcttgagagccagatgaccaaggagaagaaaatcactgggaaggaaaaagaaaatagtcggatggaggaaaatgccgaaaaccatattggcgttacagaagtactgcttggcaggaaactgcagcactacacagactcctatctgggatttctgccctgggagaaaaaaaagtatttccaggatcttctggacgaggaggaaagcttgaaaactcagctggcatactttacggacagcaagaacacagggaggcagctaaaagacactttcgcagacagtctaaggtacgttaacaagatcctcaactcgaagttcggatttacgtcccgaaaggtccctgcacacatgccacatatgattgaccgtattgtgatgcaagagctccaagacatgttccctgaggagttcgataagacatcttttcataaggtacgacacagcgaagatatgcaattcgctttctcatacttctattatctgatgagcgcggtccagccactaaacatatcccaggtgttcgacgaagttgacacagaccaatcgggcgttctgagcgatcgtgaaattcgcacgctcgcgacacgcatccacgagctgcctctctcactccaggatttaactggcttagaacacatgctgatcaactgctcgaaaatgctcccagcggatattacacagctaaataacataccgccgacccaggagagctattatgaccctaacctgcctcccgtcaccaaaagtcttgtgacaaactgcaaacctgtcaccgataagatacacaaagcatacaaagacaaaaacaagtatagattcgaaataatgggtgaggaggaaattgcctttaagatgatccgcacgaatgtgagccacgtagtcgggcagctggacgacattaggaagaatccccgcaagttcgtctgtttaaacgataatattgatcacaaccacaaagacgcacaaaccgtaaaggccgtgttgagggacttctatgaatcaatgtttcctattccctcccagttcgagctcccccgggaatacagaaatcgatttctccatatgcacgagcttcaggaatggagagcctatagagacaagttaaaattctggactcactgcgttctggcaacgctcattatgttcaccatcttctcattttttgctgaacaacttatcgcattgaagcggaaaatatttcccaggcgcaggatacacaaagaggcatcccccaaccgaatccgcgta

SEQ ID NO: 16912 - DNA, 3768 bp, synthetic construct
  misc_feature 1..3768: note = source = /note="Description of Artificial Sequence: Synthetic coding sequence"
  source 1..3768: mol_type = other DNA
atgcttttcaagttgcttcagaggcagacatatacctgtttgagccacagatacggactgtacgtctgcttcctgggcgtggtggtgacaatcgtcagcgcttttcagttcggagaggtggtgctcgagtggtctagggatcagtaccacgtccttttcgattcctacagagacaacattgccggtaaatccttccaaaaccgcctctgcttgccaatgcccatcgacgtggtgtacacatgggttaacggcacggatctcgagcttcttaaagagctgcaacaagtcagggagcagatggaggaggagcagaaggctatgcgcgagattctgggcaaaaatacaaccgaaccgacaaagaagtccgaaaagcagttggagtgtttgctcacccactgcatcaaggtccctatgctcgtgctggacccagctctgccagcaaacatcaccctgaaggatctccccagcctttacccatcctttcactctgcttctgacatttttaacgtcgccaaaccgaaaaatccaagtaccaacgtaagcgtagtagtattcgactccactaaagatgtggaagacgctcactcaggccttctgaaaggcaattcccgccagactgtgtggagaggttacctcaccacggacaaggaagtgcccggtctcgtcctgatgcaagacctggcattcctttccggcttcccaccaacatttaaagaaacaaatcaactgaagaccaagctccctgagaatctttcttcaaaagtcaaactgttgcagctttacagtgaagcttccgtggccctgctgaagcttaacaaccccaaggacttccaggagctcaacaagcagaccaagaagaacatgactattgatggcaaagagctcactatctcacctgcttatctgctctgggacctgtcagcaattagccagtcaaagcaggacgaggatatatctgcaagcaggttcgaggataatgaggaacttcgctactccctgagatctatcgagcgccacgcaccatgggtgaggaacattttcatcgtgaccaacggacagattccaagctggctcaacctggacaatccaagagttactatcgttactcatcaagatgtgttcaggaacttgtctcacctgcccacattttcatctcccgccatagagagtcacatccacagaatcgaaggactgagtcagaagttcatttacctcaacgacgatgtaatgtttggtaaagacgtgtggccggacgatttctactctcattctaaaggtcagaaggtatatcttacctggcctgtgcctaactgtgctgaaggctgcccaggaagctggatcaaggatggatactgtgacaaggcgtgtaacaacagtgcttgcgactgggacggcggcgactgttctggtaatagtggtggcagtcgctacatcgcaggcggcggaggcacaggctccatcggtgtaggccagccgtggcagtttggaggaggaatcaactccgtatcctactgtaatcagggctgtgctaacagttggctcgctgataaattttgcgaccaagcctgtaatgtccttagttgtggtttcgatgccggcgactgcggtcaagaccacttccacgagctgtacaaggtgattctgcttccgaatcagactcattacatcatcccaaaaggagaatgcctcccctatttctcttttgccgaagtggctaagaggggcgtcgagggcgcttactccgataaccccatcatcagacacgcgagcatcgcaaataagtggaagacgatccacctcatcatgcatagcggaatgaacgcaactaccatccattttaacctgacattccagaacactaacgacgaagagtttaaaatgcaaattacagtggaggtggatactcgcgaaggaccgaagctcaacagtacagcccagaagggctacgaaaaccttgttagcccaatcactctgttgcccgaagcagaaatcctgttcgaggacatcccgaaggagaagcgcttcccgaagtttaagcgccatgacgtaaatagtaccagaagggcgcaagaggaggttaagatcccccttgtgaacatctcccttctcccaaaggacgcccagttgagcctgaacactttggaccttcagcttgagcacggagacattactctgaagggatataaccttagcaaatctgcccttttgagaagcttcctcatgaactctcagcatgctaagatcaagaatcaggccattataaccgatgaaactaacgacagcctcgtggccccacaagaaaagcaggtccataagtccattttgcccaacagtttgggtgtgtcagaacgcctccagaggttgacttttcccgcggttagcgtgaaggtgaacggacacgatcaaggccaaaacccccctctcgatttggagaccactgctagattccgcgtagagacgcatacccagaagaccattggcggtaacgtgaccaaggagaaacctccttcccttatcgttccgttggagtctcaaatgaccaaggagaagaagattaccggaaaagagaaagaaaactctaggatggaggagaatgctgagaatcatatcggtgtgacagaggtactgctcggtcgcaagttgcagcactatacagactcctacctgggttttcttccgtgggaaaaaaagaagtactttcaggacctgcttgacgaagaggagagcctgaaaactcagctggcctatttcaccgactcaaagaacactggaaggcagctcaaagacactttcgccgattctttgaggtatgttaataaaatccttaattccaaattcggatttacatctcgcaaggttccagcccacatgcctcacatgatcgatcgcattgtaatgcaggaattgcaagacatgtttcccgaagaatttgacaagacctcttttcataaggtgaggcacagcgaggatatgcagtttgctttctcttatttttattacctgatgtccgcagttcaacctttgaatatttcccaggtattcgatgaggtggacacggaccagtccggcgtactcagcgatcgcgaaattaggaccctggcaacaaggatccacgagctccccctctctttgcaggatttgacaggcctggagcatatgctgataaactgttctaagatgctgccggccgacattactcagctcaacaacatcccacctacgcaggagtcttactacgatccaaaccttccccctgttacaaagtcactcgtaacaaactgcaagccggttaccgacaagatccacaaagcttacaaagataagaacaaatacaggttcgagataatgggtgaggaggagattgcattcaaaatgattagaactaacgtgagccatgtggtcggacagctggatgacattagaaaaaatcccaggaaatttgtgtgcctcaacgacaacattgaccataaccacaaggacgcgcagaccgtgaaggcggtgcttagggatttctatgagtctatgtttccaattccatctcagtttgaactgcctagagagtatcgcaaccgcttcttgcatatgcacgagctgcaagagtggagagcttacagggacaaactcaaattctggacgcactgtgttcttgctaccctgatcatgttcacaatcttcagctttttcgccgagcaattgatagctctgaaaaggaagatctttccgagaagacgcatccataaagaagcgtccccaaataggattagggtc

SEQ ID NO: 16913 - DNA, 3768 bp, synthetic construct
  misc_feature 1..3768: note = source = /note="Description of Artificial Sequence: Synthetic coding sequence"
  source 1..3768: mol_type = other DNA
atgctctttaagctgcttcaacgccaaacctacacttgcctctcacaccggtacggcctgtacgtgtgcttcctgggggtggtcgtgactatagtctccgccttccagttcggagaggtcgttctcgagtggtcacgcgatcagtaccacgtgctctttgattcctaccgggacaacattgcggggaaatccttccagaatcggctgtgtctgccgatgccaatcgacgtcgtgtacacttgggtgaacgggaccgacctggaactgctgaaagagctgcagcaagtccgcgaacagatggaagaagagcagaaagccatgcgggaaatcctgggcaagaataccaccgagccaactaagaagtctgagaaacaacttgagtgtctcctgacgcattgcatcaaagtgccaatgctggtcctggatccggcgcttcctgctaatatcactctgaaagacctgccctcgctctaccctagcttccactcggctagcgacatattcaatgtggccaaaccgaagaacccttctactaatgtgtcagtggtggtgttcgatagcaccaaggatgtcgaggatgcacatagcggactcctgaaaggaaactcccgccagaccgtgtggcggggatacttgactacggataaagaagtcccgggcctggttctcatgcaggatcttgccttcctgtcgggattcccaccgactttcaaagaaaccaatcaacttaagactaagctgccggaaaacctgtcgagcaaggtgaaacttctgcagctgtactccgaagcgtcagtcgccctgctcaagctgaacaacccgaaggactttcaagaactcaacaaacagactaagaagaacatgaccatcgatgggaaggaactgactatctcacccgcgtatctcctgtgggatctctcagccatttctcaaagcaagcaggacgaggatatctctgcatcccgcttcgaagataatgaagaacttcggtactcgctccgctcaatcgaacgccacgcgccctgggtccgcaacatcttcattgtgactaatggtcagattccctcgtggctgaatctcgacaaccctcgggtgaccatcgtaacccaccaagatgtctttcggaacctgtcccacctccctaccttctcgagccccgctatcgaatcccacatccataggatcgagggcctgtcacagaaattcatctacctgaacgatgacgtgatgttcggcaaagacgtgtggcccgacgatttctactcccatagcaagggccagaaagtgtaccttacgtggccagtcccgaactgcgccgaaggatgccccggatcgtggatcaaggacggatattgcgacaaggcgtgcaacaacagcgcatgtgattgggatggcggagactgttccggcaactcgggaggatcgcgctatattgcaggtggaggcgggactggatcgatcggcgtgggccagccttggcagttcggcggaggaatcaactccgtgtcgtactgcaatcagggatgcgcaaacagctggctcgccgacaagttctgcgatcaggcgtgtaatgtgctgtcgtgcggtttcgacgccggagactgcggacaggatcactttcatgaactgtataaggtgatactcctgccgaaccagactcactacatcatccctaaaggagaatgcctcccctacttcagcttcgcagaggtggctaagaggggagtggagggcgcgtactccgataacccaatcatcagacatgcgtccattgccaacaagtggaaaactatccaccttatcatgcactcgggcatgaacgcgaccactatccatttcaacctcactttccagaatactaacgatgaggagtttaagatgcagatcactgtcgaagtggacaccagagaaggcccaaagctgaatagcaccgcgcagaagggatacgagaacctcgtgtcgccgattaccctgctcccagaggccgaaatcttgtttgaagatatccctaaggaaaaacggttccccaagttcaagcgccacgatgtgaatagcacccggcgggcacaggaggaggtgaagatcccgttggtgaacatttcgctgctgcccaaagacgctcagctctcgctcaacaccttggatctgcagcttgaacatggggacatcaccttgaagggatacaacctgtctaagtccgccctgctgcgctccttcctgatgaactcgcagcacgccaagatcaaaaaccaggctattatcacggacgagactaatgactccctggtggctccacaggaaaaacaagtccacaaatcaattctgcctaatagccttggcgtcagcgaacgcctgcagcggctgaccttcccggccgtcagcgtcaaggtcaacggacatgaccagggacagaatccaccgcttgacctggaaaccactgctcgcttccgcgtggagacgcacacgcaaaaaactattggcggaaatgtcactaaggagaagcctccgtcactgatcgtgccgctggagtcgcaaatgactaaggaaaagaagatcaccggaaaggagaaagagaactctaggatggaagagaacgccgaaaatcacattggagtgactgaggtgctgctgggaaggaagctgcaacattacaccgactcttacctgggattcctgccgtgggagaaaaagaagtactttcaagacctgttggatgaagaggaaagcctcaagactcagctggcctactttaccgacagcaaaaacactggacgccaactcaaagacactttcgccgactcactgcggtacgtgaacaaaattctgaatagcaagttcggattcacttcgagaaaagtcccggcacacatgcctcacatgatcgatcggatcgtgatgcaggaacttcaggacatgtttccagaggaattcgacaagacgagcttccataaggtgagacacagcgaggatatgcagtttgccttctcgtacttctattacctgatgtcggccgtgcaaccgttgaatatctcccaggtgttcgacgaggtggacaccgaccagtccggagtgctgtcggaccgcgagatccggactctggcgactagaatccatgagctcccgctctctctgcaagatctcactggtttggaacatatgctgatcaactgttcaaagatgctgccggcggatatcacccaactgaacaacatcccgccgacccaggaatcgtactacgatcctaacctgccaccagtcaccaagtcgctggtgacgaactgcaagccagttaccgacaaaatccataaggcctacaaagataagaacaagtacaggttcgagatcatgggagaggaagaaatcgcttttaagatgatccgcaccaacgtgtcacacgtggtgggacaactggacgatatcaggaagaacccgaggaagtttgtgtgcctgaacgacaatattgatcacaaccacaaggacgcgcagaccgtgaaggccgtcctgcgggacttctacgagtcgatgtttccgatcccgtcacaattcgagcttccacgggagtaccggaatcgcttcttgcacatgcacgagttgcaagaatggagagcgtaccgcgataagctgaaattctggacgcactgcgtcctcgcaactctcatcatgttcaccatcttctccttctttgcagaacaactcatcgccctgaaaaggaagattttcccccggaggaggatccacaaggaagcctctccgaacagaatccgcgtc

SEQ ID NO: 16914 - DNA, 3768 bp, synthetic construct
  misc_feature 1..3768: note = source = /note="Description of Artificial Sequence: Synthetic coding sequence"
  source 1..3768: mol_type = other DNA
atgctgttcaagttgctgcagcgccaaacctatacttgcctgagccacagatacggcttgtacgtctgttttctcggagtcgtggtgaccatcgtgtctgcttttcagtttggagaggtcgtcctggagtggtccagagatcaatatcacgtgctgtttgacagctacagagataacattgcaggaaagtcgtttcaaaacaggttgtgcctgcctatgccgatcgatgtcgtgtacacctgggtgaatggcactgacttggaattgcttaaggaactgcagcaagtccgcgaacaaatggaagaagagcagaaagcaatgcgggaaatcctgggaaagaataccaccgaaccgactaagaaatccgaaaaacagcttgagtgtctcctgacccattgtatcaaggtgccgatgctcgtgctcgatccggccttgccggccaatatcaccttgaaggatctgccgtccctgtacccttcgtttcactcggcgtcagatatcttcaatgtggcgaagccgaagaacccatcgaccaacgtgtctgtcgtcgtgttcgactcaaccaaggatgtcgaagatgcccactctggactgctgaaggggaattcgcgccagacggtctggcgcggttacctcaccaccgataaggaagtgccaggattggtgctgatgcaagacctcgcattcctctcaggcttcccaccgactttcaaggagactaaccagctgaaaacgaaactcccggagaacctgagctcgaaagttaagctcctccagctctactcggaggcatccgtggctctgcttaagctgaacaaccctaaggacttccaagagctgaacaagcagaccaagaagaacatgaccattgacggtaaggaactgaccatctcaccggcgtacctgctgtgggacctcagcgccatctcccagagcaagcaggacgaagatatctcggctagccggttcgaggacaacgaagagctgcggtactccctgcgctccatcgaacgccatgccccgtgggtccgcaacattttcatcgtgaccaatggacaaatcccttcctggctgaacctggacaacccccgggtcaccatcgtgactcaccaggacgtctttagaaatctgtcccatctgcctactttttcctcgccagcgatcgagtcacatatccaccgcatcgagggactgtcgcaaaagttcatctacctcaatgacgacgtcatgttcggcaaagatgtgtggcccgacgatttctattcgcattcgaaaggacagaaggtgtacttgacttggcccgtccccaattgcgcagagggttgtccgggatcgtggatcaaagatggctactgcgacaaggcctgcaacaactccgcgtgcgattgggatggaggagattgttcgggaaactcaggcggctcgcgctatattgccggaggtggaggaaccggctcgattggcgtcggacagccgtggcaattcggaggcggaatcaattccgtgtcgtactgcaaccagggatgtgcaaatagctggttggccgacaagttctgtgatcaggcatgcaacgtgctgagctgcgggttcgatgccggggactgcggccaagatcatttccatgaactgtacaaggtgatcctgctgccaaaccagactcattacatcatcccgaagggagaatgcttgccttacttttcatttgctgaggtggctaagcggggggtggagggagcctactcagataacccaatcatccggcatgcaagcatcgcgaacaagtggaaaaccatccatctgatcatgcactcaggaatgaacgctaccaccatccactttaatctgactttccaaaacaccaacgatgaggaattcaagatgcagatcaccgtggaagtggacacccgggaagggcctaaactcaattcgaccgcccaaaagggatacgaaaatctcgtctcacccatcacgctgctgccagaggccgaaatcctttttgaagatatcccgaaggaaaaacggttcccgaagttcaagcggcatgacgtgaactccacccgacgcgcgcaggaagaggtgaaaatcccactggtcaacatttcccttctgcctaaggatgctcagctgtcactcaacaccctggatctccagctcgaacacggcgatatcaccctcaagggatacaacctgagcaaatcggccctgctccggtcctttcttatgaattcgcagcatgccaaaatcaaaaaccaggccattatcactgatgaaacgaacgacagcctcgtggcgccgcaggagaaacaagtgcacaaatctatccttccaaactcgctcggagtgagcgaacggctccagcgcctgacttttccagcagtctccgtgaaagtaaacggacatgaccagggacaaaaccctccgctggatctggaaaccactgctcgcttccgggtggaaacccatacgcagaaaaccatcggaggcaacgtgacgaaagagaaacctccatcactcattgtccccctcgaatcacaaatgactaaggaaaagaagatcactggaaaggaaaaagaaaattcgcgcatggaggaaaacgccgagaatcatattggcgtgaccgaagtgctgcttggaaggaagctgcaacactacaccgattcgtacctcgggttccttccttgggagaagaagaaatactttcaagacctcctggacgaagaagaaagccttaagactcaactggcttacttcaccgattcaaagaacaccggccggcagctgaaagacaccttcgcagactccttgcggtacgtgaacaaaatcctgaacagcaagttcggcttcacctcccgcaaggtgccggcccacatgccgcacatgatcgaccggatcgtgatgcaagaacttcaagacatgttcccggaagaattcgacaagactagcttccacaaggtccgccacagcgaggatatgcaattcgcattcagctacttctactacctgatgtccgcagtgcagcctctgaacatctcacaagtctttgacgaggtggacactgatcagtctggagtgttgtccgaccgggaaatcagaacgctggcaacccggatccacgaactgccgctgtccctgcaagacctcactgggctggaacacatgctgattaactgttcaaaaatgctccctgctgatatcactcaactgaacaacatcccgccgacgcaagagtcctactacgatcccaatttgccaccggtgacgaagagcctggtgactaattgcaaaccggtgaccgataagatccacaaggcgtacaaagacaagaataagtacaggttcgagatcatgggtgaggaggagattgcctttaagatgatccgcaccaacgtaagccacgtggtcggtcaattggatgacatccggaaaaatccgcgcaagttcgtgtgcctcaacgataacattgaccataaccataaggacgcccagaccgtgaaggccgtgctgcgcgacttctacgagtcgatgtttccaatcccatcgcagtttgagttgccgcgcgaatacaggaatcgcttcctgcacatgcacgaactccaggaatggagggcataccgcgacaaactgaagttttggacccattgcgttctggctaccctcatcatgttcaccattttctcgtttttcgcggaacaactgatcgccctgaagagaaagatcttcccgcggcggcggatccacaaggaggctagccccaacaggatcagagtg

SEQ ID NO: 16915 - DNA, 3768 bp, synthetic construct
  misc_feature 1..3768: note = source = /note="Description of Artificial Sequence: Synthetic coding sequence"
  source 1..3768: mol_type = other DNA
atgctcttcaaactgcttcagcgtcaaacctatacctgtctctcccatcgctacggactgtacgtgtgttttctgggcgtagtggtgacgatcgtctctgcctttcagttcggcgaagtcgtactcgagtggagccgggatcagtaccatgtccttttcgatagctaccgtgacaacattgctgggaagagctttcagaatcgactatgtctgcctatgccgattgatgtcgtgtatacatgggttaacggaacagatttagagcttctgaaggaattgcagcaggtgcgggaacaaatggaggaggagcagaaggcaatgagagagatcttaggcaaaaatacaacagagcccacaaagaagtccgagaagcagctggaatgtcttctcacacattgcatcaaagttcctatgctggtgctcgatccggctctgcccgcgaatattacacttaaggacctgcctagcctgtacccgagctttcacagcgcctccgacatctttaatgtggcaaagccaaagaatccaagcaccaatgttagcgtggtcgtgttcgactcgaccaaagatgtggaggacgcccacagcggcttactaaaaggaaactctaggcagactgtttggcgcggctacctgaccaccgacaaggaggtgcctggccttgttctgatgcaggacctggcctttctaagcgggttcccgcctacttttaaggaaaccaaccagcttaaaactaagttaccagaaaatttgtcatcaaaggtgaaactcttgcaactctacagcgaggcctctgtggctctgctgaaacttaacaatcccaaggacttccaggaattgaacaaacagactaaaaagaatatgactattgacggaaaagagcttaccatctcgccagcctacctgctctgggacctgtccgcaatcagccaaagtaagcaggacgaagacatttctgcaagtcggttcgaggataacgaggagttgcggtactctctgagatccatcgaaaggcacgccccctgggtgcggaatatcttcatagtgacgaacggacagatccctagctggttgaacttggataacccccgggtgacaatagttactcaccaggatgtgttccgtaacctgtctcatctgccaactttctcatcaccagccatcgaatcacacatacacagaatagaggggctgtcacagaaattcatttacctgaacgacgacgtgatgttcggaaaagatgtttggcctgatgacttctattcccatagcaaaggacagaaggtgtatttgacgtggccggtgcccaactgcgctgaaggctgcccaggtagctggatcaaggatggatattgcgacaaggcctgcaataacagtgcctgcgattgggatggcggggactgtagtggcaacagcggtggatcacggtatatcgcagggggaggtggcaccggctcaataggtgtcgggcagccatggcagttcgggggcggcatcaactccgtatcttattgtaaccagggatgcgctaacagttggctggccgataaattctgcgaccaggcatgtaatgttctgtcttgcgggtttgacgctggggactgcggccaggaccatttccatgaactttataaggttattttgctgcccaaccagacacactacatcataccaaagggtgaatgtttgccgtattttagtttcgccgaagtcgccaagcggggagtcgagggagcctactcagacaaccctattatccgccacgcctcaatcgcaaataaatggaagaccatccatctcatcatgcatagcgggatgaacgccacaaccatccactttaacctgaccttccagaacactaacgacgaggagttcaaaatgcagataaccgtggaggtggatactcgggaaggtcctaaactgaactccacagcgcagaaaggatacgagaatcttgtgagccctatcaccctgctgcctgaggcagagatcctcttcgaagacatacccaaggaaaagcgcttcccaaagtttaagcgccacgacgtaaactcgaccagacgagcgcaggaggaagtaaaaattccattggtgaacatcagtctgcttcctaaggatgctcagctttcactaaacacactagacctgcagctcgaacatggcgacatcactcttaaggggtataacctgtcaaagtcagcccttctgaggtcctttctgatgaattcgcaacatgctaaaatcaagaatcaggccatcatcaccgacgagacgaatgatagcctcgtggccccacaggagaaacaggtacataaatccatcctgccgaatagtctgggtgtgtcggagcgactccaacgccttacgttccctgccgtcagcgtgaaagtgaacggacacgatcaaggtcagaatcctcctctagatctcgaaacgaccgcaaggttccgtgtggagacacatacacagaaaacaatcgggggaaatgttaccaaggagaagccgccttccctgatagtgcctctggagagtcagatgaccaaggagaaaaaaataaccggaaaggagaaggagaattctcggatggaggaaaacgccgagaatcatatcggagtcaccgaagttctgcttggccgcaaactgcagcactacaccgacagttacttggggtttctgccttgggagaaaaagaaatatttccaggatttgttggatgaggaggaaagcctgaaaacccagcttgcttacttcacggacagcaagaatacaggacgacagttaaaggataccttcgcggactcattgagatatgtcaataagatcctgaactccaaatttggattcacatctcgtaaggtacctgcgcacatgccccatatgattgaccggatcgtgatgcaagagctgcaggacatgttccccgaagagtttgataagacgtctttccataaggtaagacacagtgaagacatgcagttcgccttttcctatttttattacctgatgtccgctgtccagccactcaatatcagccaggttttcgacgaggtggataccgaccagtcaggcgtcttgtccgacagagagattcgcactttagctacccgaatacacgaattacccttgtcacttcaggatttgaccggtctcgagcacatgctcattaattgtagtaagatgcttcccgctgacatcactcagctcaataacatcccacctacgcaggagagctactatgatcctaatctcccacccgtgacaaagtctcttgtcactaactgcaagcccgtcaccgacaagatacataaagcatataaggacaaaaacaaataccgatttgagataatgggagaggaggagattgccttcaagatgattaggaccaacgtttcccacgtggtgggccagctggacgacatcaggaagaatcccagaaaattcgtgtgtctcaacgacaatattgatcataaccataaagatgcacagacggtcaaggccgtcctgcgggatttctatgagtctatgtttcctatccccagtcagttcgaattaccacgcgagtatcgaaataggtttcttcatatgcatgagcttcaggagtggcgcgcctatcgggacaaactgaaattctggacgcactgtgtactcgccacactgattatgttcacaatattttcattcttcgccgagcagctgattgccctcaagagaaaaatattccccaggcgtaggattcacaaagaggcatctcctaatcggatccgggtt

SEQ ID NO: 16916 - DNA, 3768 bp, synthetic construct
  misc_feature 1..3768: note = source = /note="Description of Artificial Sequence: Synthetic coding sequence"
  source 1..3768: mol_type = other DNA
atgctgttcaaactcctccagaggcagacctacacttgcctgtctcaccgctacggactgtacgtgtgtttcctgggtgtggtggtgactattgtcagcgcgtttcaatttggcgaagtggttctcgagtggtcccgagatcagtaccacgtcctcttcgattcctaccgcgataacattgcgggtaaatccttccagaaccgcctgtgtctcccaatgcctatcgatgtagtgtatacttgggtcaacggaactgacctcgagttgctgaaagagctccagcaagtccgtgagcagatggaagaggagcaaaaagccatgcgcgaaatcctgggtaagaatacgaccgaacccaccaaaaagagcgagaagcagctggaatgtctgctgacccattgcatcaaagttccgatgttggtcctggatccagctctgccagccaacatcacgttgaaggatctcccgtcgctctacccttcgtttcactcagccagcgacatcttcaacgtggccaagcccaaaaatccctcgactaacgtgtcggtcgtcgtattcgactccaccaaagatgtcgaggacgcccacagtggactccttaagggcaattctcgccaaacggtgtggcgcggatacctgaccaccgacaaagaagtgccgggactggtgctcatgcaggatctcgccttcctgtctggtttcccgccgacctttaaggaaactaatcagttgaaaaccaaactgccagagaacctcagctcaaaggtgaaactgctgcagctctactcggaagctagcgtggcgctgctgaaactcaacaacccgaaggatttccaagaactgaacaaacaaaccaagaagaatatgaccatcgacggaaaggagctgaccatctcgccagcgtatcttctctgggacctgtccgctatatcgcaatccaagcaggacgaggacatctcagcctcccgcttcgaagataacgaagaactgcgctactcacttcggtcgattgagcggcacgccccgtgggtgcgaaacattttcatcgtgactaatggacagatcccgtcttggctgaacttggataatccgagagtgacgatcgtgacgcatcaagacgtctttcggaatctgagccacctcccgactttctcatccccagctatcgagagccatatacataggatcgagggtctgtcccagaaattcatctaccttaacgacgacgtgatgttcggtaaagacgtgtggccagacgacttctattcccactcgaagggccagaaggtctaccttacttggccggtgcctaactgcgcagaaggttgcccgggatcatggatcaaagatggctactgcgataaggcctgcaataactccgcatgcgattgggatggaggcgattgcagcggaaactccggcggatcccggtacatcgcaggtggaggaggcactggcagcatcggagtgggacagccttggcagtttggcggcggaatcaactccgtgtcatactgcaaccaggggtgcgccaactcatggctggccgacaagttttgtgatcaggcctgcaacgtcctgtcgtgtggattcgatgcgggagactgcggtcaggaccatttccacgagctgtacaaagtgatactgctgcctaatcaaacccactatatcatccccaagggcgagtgcctcccttacttctcgttcgccgaggtggcaaagcgcggggtggaaggcgcctacagcgataatccaatcatccggcatgcttcaatcgcaaacaagtggaaaacgatccatctgatcatgcattcaggcatgaatgctactaccatccacttcaacctcactttccaaaacactaatgacgaagagttcaagatgcagataaccgtcgaggtcgacacccgggaagggcctaaactcaactccaccgcccagaagggatacgaaaatctcgtctccccgatcactttgcttccagaggcggaaatcctgttcgaggatatacctaaggaaaagagatttccaaaattcaagcgccacgacgtcaactcgactagacgcgcccaggaagaggtgaagatccctcttgttaacatctcactgctcccaaaagacgcacagttgtcgttgaacaccctggacctgcaactggagcatggagacatcaccctgaagggctacaacctctcgaagtcggctctgctgcgctcattccttatgaactcgcagcacgctaagattaagaatcaagcgattatcactgatgaaactaacgattccctcgtggctccccaggaaaagcaggtacataagtcaatcctgcccaactccctgggagtgtctgaaagactccagcgcctcaccttcccggccgtgtccgtgaaggtgaatgggcatgaccagggccaaaatccaccgctggacctggaaacgaccgcgagattccgggttgaaacccacacccaaaagacgatcggaggaaacgtcaccaaggaaaaaccgccaagcctgattgtgcctttggagtcccagatgaccaaggagaagaagatcaccggaaaggaaaaagagaactccaggatggaggaaaacgccgaaaaccacattggagtgactgaagtgctgttggggcggaagctgcaacactacactgactcctacctgggattcctcccctgggaaaagaagaagtactttcaagacctcctggacgaagaggagagcctgaaaactcagctggcctactttactgactcgaagaatactggccgccagctgaaggacaccttcgcggacagcttgcgctatgtgaataagattctgaattcgaagttcggattcacctcaagaaaggtcccggcccacatgccgcatatgatcgatcggatcgttatgcaggaactgcaagatatgttcccggaagagttcgataaaacctcctttcacaaagtgaggcattcagaagatatgcagttcgcgttctcgtacttctactacctgatgtccgcggtgcagcccctgaatatctctcaagtgttcgacgaagtggacaccgaccagtcaggcgtgctctccgaccgcgaaattagaactctggcgactcggatccacgaactgccactgtccctccaggacctgactggtttggagcatatgcttatcaattgtagcaagatgttgccggccgacatcacgcaactcaataacatcccgccaactcaggaatcctactatgacccgaatctcccgccggtcactaaatcccttgtgactaattgcaagccggtcaccgacaagattcacaaggcttacaaggataagaacaagtaccggttcgaaatcatgggggaggaagaaatcgcattcaaaatgatccgcaccaatgtgtcgcacgtggtcggacaacttgatgatattagaaaaaacccgcgcaagtttgtgtgcctgaatgataacatcgatcataatcacaaggacgcccagacggtcaaagcggtcctccgagacttctacgagagtatgttcccaataccatcccaattcgagcttccgcgggaatacagaaatagattcctgcatatgcacgaacttcaggagtggcgggcttaccgggacaagttgaagttttggactcactgcgtgctcgcaaccctgatcatgttcaccatctttagctttttcgccgagcaacttatcgccctcaagcggaagatctttcccaggcgccggatccacaaggaagcctcgccgaatcgaatccgcgtg

SEQ ID NO: 16917 - DNA, 3768 bp, synthetic construct
  misc_feature 1..3768: note = source = /note="Description of Artificial Sequence: Synthetic coding sequence"
  source 1..3768: mol_type = other DNA
atgctattcaaacttctacagcgccagacctatacctgtctgtcacatcgatacgggttatatgtgtgttttctcggggtcgtcgtgaccatcgtgagtgcctttcagtttggcgaggtggtcctggaatggagcagggaccagtaccatgtgctgttcgacagctatcgggacaacatcgcaggaaaatcgttccaaaatcggctctgtttgcccatgcctatagacgttgtgtatacttgggttaacgggacagacctcgagttactcaaggaacttcagcaggtgcgagagcagatggaggaggagcaaaaggccatgagagagattctcggaaagaatacaactgaacctacaaagaagagcgagaaacaattagagtgcttgcttacccactgtattaaagtccctatgctggtcctggatcccgccctccctgccaatatcactttgaaagacctgcctagtctataccccagtttccactctgcctcagatatcttcaacgtggcgaagccaaagaacccaagtactaacgtgtctgtggtggtttttgattccaccaaagacgtagaggatgctcatagcgggctgttgaagggaaactccaggcaaaccgtctggagggggtacttgactacagacaaggaggtgccgggcctggtacttatgcaggatcttgcgtttctctccggattcccacctacctttaaagagactaatcagctcaaaaccaagctgcccgagaatctgtctagcaaggttaagctgctgcaactgtactctgaggccagcgttgctcttttgaagcttaataaccccaaagactttcaggagcttaataagcagacaaagaagaatatgacgattgatgggaaggaattaaccatctccccagcctacctcctgtgggatctctccgctattagccaaagcaaacaggacgaggacatctcagctagtcgcttcgaggataacgaagaacttcggtactccctgcgttctattgagcgacacgctccatgggtgcgtaatattttcatcgtcaccaatggccagatcccctcatggctgaatctggataacccccgggtgacaatcgtgacccatcaagatgtgttcaggaatctatcacaccttccaacattctcaagtccagcaattgagtctcacattcatagaatcgaaggtttgagccagaagttcatatacctgaacgatgacgttatgtttggtaaagatgtgtggccagatgacttttactctcattcaaagggccaaaaggtgtacttgacctggccagtgcccaattgtgcggaaggctgccccgggtcctggatcaaggacggctattgcgacaaggcttgcaataattccgcctgtgattgggatggcggagattgttcaggaaattccgggggatcacgttacatcgctgggggaggcgggacagggtccatcggcgtcgggcaaccttggcagtttggtgggggaatcaattcagtgagctattgcaaccagggatgtgccaattcctggttggctgataagttctgcgatcaggcctgtaacgtgttatcgtgtggatttgatgcaggagactgcggccaggaccacttccatgagctgtacaaggtgatcctgctgcctaatcagacacactacataattcccaagggcgagtgtctaccatatttttcctttgcagaagtggctaagagaggggtggagggcgcttatagtgacaatccgattatcaggcacgcgtccatagcaaataagtggaagaccatccatttgatcatgcattcaggcatgaacgccacaactattcatttcaatctcacattccagaacaccaacgatgaggagtttaagatgcagatcactgttgaagtggatactagagaggggcctaaacttaattccacagcccagaaggggtacgagaatctggtttcgcccattaccctgcttcccgaggccgagatactgttcgaagacatacctaaggagaagcgattcccaaagtttaagcgccatgacgtgaattccacaagacgggcacaggaggaggtgaagattccactggtgaatatcagcctcctccccaaggatgcacagctgagcctcaatacgcttgacttacagttggagcacggtgacatcactctgaaaggatacaacctgtcaaaatccgccctgttgaggagcttcttaatgaatagccagcatgccaagataaagaatcaggccatcataactgacgagacgaacgattcacttgtcgcaccccaggaaaagcaggtgcacaagtctattctgcccaacagtcttggagtatccgagcgcctgcagcggctcacctttccagccgtctctgtaaaagtgaacgggcatgatcaggggcaaaaccctcccctggacttggaaacaaccgcgcggttccgggttgaaacccacacccagaagaccatcggagggaacgtgacgaaggaaaaaccaccctcattgattgttcctctggaatcccagatgacgaaagagaaaaagataactggaaaggagaaggagaacagtagaatggaagaaaacgcagagaaccacattggagtgactgaagtcttgctcgggcgcaagttgcagcattatactgattcatatcttgggttcctcccctgggagaagaagaagtacttccaagacctactggatgaagaagaaagcctcaaaacacagttagcgtattttactgactctaagaatacagggagacaactaaaagacacgttcgccgacagcctgcgctacgtgaataagatactgaactccaagttcggattcacaagcaggaaagtgcctgcacacatgccccatatgatcgatcgcatcgtgatgcaggagttgcaggatatgtttccggaagaatttgacaaaacatccttccacaaagtgcggcacagtgaagacatgcagttcgccttctcttatttttactacctgatgagtgcggtgcagcccctgaatatctctcaggtcttcgacgaggtcgatacagatcaatcaggcgtcctcagtgatcgggagatccggacactggctactcgtatacatgaactgccactctcccttcaggatttaactggactggagcacatgctcattaattgcagcaaaatgttgcctgctgacatcacacagttgaacaatatccctcctactcaagaaagttattacgatcctaacctaccccccgtaactaagtcacttgtgactaactgcaaacccgtgacagataagatccataaagcctacaaagacaaaaataaatacagattcgagatcatgggtgaggaagaaattgcattcaaaatgatccggaccaatgtgtcacatgtggtgggacaactggatgacatccgaaaaaatccccggaagttcgtgtgcctcaacgacaacattgatcacaatcataaggacgcgcagacggtaaaggccgtcctgcgggacttttatgagtccatgtttccaattccctctcagtttgagttgcccagagaatatagaaaccgctttctccacatgcacgaacttcaagagtggcgcgcctatcgtgacaaactgaagttttggacccattgtgttcttgccacactcatcatgttcactatatttagcttttttgccgagcaactcatcgctctgaagcggaagatcttccctcgccgcagaatccacaaggaagctagcccgaaccggatcagggtg

SEQ ID NO: 16918 - DNA, 3768 bp, synthetic construct
  misc_feature 1..3768: note = source = /note="Description of Artificial Sequence: Synthetic coding sequence"
  source 1..3768: mol_type = other DNA
atgctgtttaagctccttcagaggcagacctacacctgcctctcccatcggtacggactgtacgtgtgcttcctgggtgtcgtggtcaccatcgttagtgcattccaattcggagaggtcgttctggagtggagccgggaccagtaccatgtgctttttgattcctatagggacaatatagccggtaaaagctttcagaaccgcctctgcctgcccatgcccatcgacgtcgtctatacctgggtgaacggcacggatcttgaactattgaaagagcttcagcaggttcgtgaacagatggaagaagagcagaaggcaatgagagaaatcctgggcaagaatactaccgaacccacaaagaaatctgagaagcagctggagtgcttgctgacacactgtattaaggtgcccatgctggtgctggatcccgctttaccagccaatataacgctcaaggatctgccatcattgtatccttcattccactccgcctctgatatttttaacgtggctaaacctaaaaacccttcaacgaacgtgtctgttgtggtcttcgacagcacgaaagatgtcgaggacgcgcactcaggtctgctgaaaggaaactccagacagacagtctggcgtgggtatctgacaaccgacaaggaggtgcctggtctggttctgatgcaagacctggcatttctgagcgggtttccccccacattcaaggaaacaaatcagctgaaaactaagctgccggaaaatctttcctcgaaggtgaagttacttcagctctactccgaagcatccgtggctttactcaaactcaataaccccaaagatttccaggagcttaacaagcagactaagaagaacatgacgatcgacggaaaagagcttacaattagtcccgcctacctcctctgggacctctcagctatctcccagtcaaagcaagacgaggacatttccgcttcaagattcgaggacaacgaagagttaaggtatagtctgaggtcaattgagcgtcacgcaccttgggtgcgcaacatttttattgtcactaacggccaaattccctcatggttaaacttggacaacccacgcgtaaccatcgtcacccaccaggatgtgtttaggaatctcagtcatctgccgacattcagcagtccggcaattgaatcacacatccatcggatcgaagggctctctcagaagttcatctatttgaatgatgacgttatgtttggaaaagatgtgtggcccgacgatttctacagccattccaagggacagaaggtgtacctcacttggccagtgccaaactgtgctgagggctgtccaggctcgtggataaaagatggctattgtgataaggcctgcaacaactcagcgtgtgactgggacggtggggattgcagcggtaatagcggggggtcacggtatatcgcgggtgggggaggaaccggaagcataggcgtgggccaaccttggcagttcggcgggggtatcaactccgtttcgtattgtaatcagggctgcgcaaattcttggctggccgataaattctgtgatcaggcctgcaacgtgttgtcttgtggattcgatgcaggggactgcggacaggatcatttccacgagctgtataaagtcattctccttcccaaccagacacattatatcatcccaaaaggagagtgcctgccctacttttccttcgcagaggtcgccaaacgcggggtcgaaggcgcgtattccgataatcctattataagacacgcgtccatcgctaataagtggaagaccatccatctgataatgcattcgggtatgaacgcaaccactatccactttaatctcacttttcagaataccaacgacgaggaattcaagatgcaaattactgtggaggttgacacgcgcgaggggcccaagttaaattccaccgcccaaaaagggtatgaaaacttagtttctcccatcaccctcctacctgaggccgagatactgttcgaagatatcccgaaagagaagaggtttccgaagttcaagaggcacgatgtaaattcgacccggcgggctcaagaggaggttaaaatccctctggtgaacattagcctactccctaaggacgcacagctgagcttgaacacgctcgatctgcagctggaacatggcgacatcactctaaagggctataatctgtccaaatccgccttacttcggtcctttctgatgaacagccaacatgccaaaatcaagaaccaagccatcattaccgatgagaccaacgatagtctcgtcgccccgcaggaaaagcaggtgcataaaagtattcttccaaactccctcggagtgtcagaacggttgcaaaggctgacattccccgcagtcagcgttaaagtaaatgggcatgaccaaggccagaatccccccctggatctagagacaaccgctcggtttagagttgagacccatacacagaagacaatcggaggtaacgtaactaaggaaaagcctccctcacttattgttcctctggagtcccaaatgacgaaggagaaaaaaatcacagggaaagagaaagagaattcccgcatggaggagaatgctgaaaaccacataggcgtaaccgaggtcctgctcggccgaaagctgcagcactacactgatagttatctaggatttctgccctgggaaaagaagaagtattttcaggatcttctggatgaggaggaatccctgaagactcagcttgcatacttcaccgattcaaagaataccgggcgacagttaaaggacacatttgccgattctcttcggtatgttaataagattttgaactcaaagttcggattcacaagcaggaaggtgcctgctcacatgccacacatgattgatagaatcgtgatgcaggagctccaagacatgtttccagaggagttcgacaagacatcgttccataaggtgaggcatagcgaagatatgcagtttgcattcagttacttttactatctgatgagtgccgttcagccactcaacatatcccaggtattcgatgaggtggacactgaccagtccggggttctgtccgaccgcgaaatccgaacactagctacaaggattcacgaactgccactctccctgcaggatctgaccggactcgagcacatgctgatcaattgttctaaaatgctgccagctgacatcacccagctgaacaatatacccccgacccaggagagttattatgatcccaatctgccgccagtaaccaaatctctagttaccaactgcaagccggtgaccgataagattcacaaggcctacaaggacaaaaacaaatataggtttgaaatcatgggagaggaggagatagcttttaagatgataaggacaaatgtgtcccacgtcgtgggccagctggatgatattaggaaaaaccccagaaaattcgtttgtctcaacgacaacatcgaccacaatcataaagatgcccagaccgtcaaggcagtgcttagagacttctacgagagcatgtttcccatccccagccaatttgaacttcctagagaatatagaaaccgatttctacacatgcacgaactgcaggaatggcgcgcctacagggacaagctcaagttctggacacactgcgtgctcgcaaccctgataatgtttacaatcttttctttctttgccgagcaacttattgccctcaagagaaagatattccctaggaggcggattcacaaggaagcctctcccaaccgaattagggta

SEQ ID NO: 16919 - DNA, 3768 bp, synthetic construct
  misc_feature 1..3768: note = source = /note="Description of Artificial Sequence: Synthetic coding sequence"
  source 1..3768: mol_type = other DNA
atgctttttaagttgctccaacgtcagacctacacctgtctatcccacagatacggtctgtacgtgtgtttcctgggagtcgttgtgaccattgtgagtgcctttcaatttggcgaagttgttcttgaatggtctcgtgatcagtatcatgtgttatttgattcctatcgcgacaatatagccgggaaatctttccagaatagactatgtctgcctatgcccatcgacgtagtttacacatgggtgaacggcacagatttggagctgctgaaagaactccagcaggttcgagagcagatggaagaagagcagaaagcgatgcgggagattctgggcaaaaacacgacagagccaaccaagaaatctgagaagcagttggaatgtcttctgactcactgtatcaaagtaccgatgcttgtgcttgatccggcactcccagctaatataacactgaaggacctgcccagtttgtatccatctttccactccgcaagtgatatttttaatgtggcaaagccgaagaaccctagtaccaacgttagtgtagtggttttcgactccactaaggacgtggaggacgcgcatagcggactacttaagggcaattcccgtcagacagtctggcgcggctacctaacaacggataaagaggtccctggactagtccttatgcaggatctggccttcttaagcgggttcccgcccacatttaaggagacaaatcagctcaaaaccaaattgccagagaatctgtcttccaaggtgaaactgctgcagctgtactcagaggcctccgtggccctcttaaaactcaacaatccaaaagatttccaggaactgaacaagcagacaaaaaagaatatgaccattgacggtaaagaactgacgatatctcctgcctacctcttgtgggacctgagtgctatcagccagtcaaaacaagacgaagacatctctgcctcacgatttgaggataacgaggagctgcggtattctctgaggtcaatcgaaagacacgctccatgggtgcggaatattttcatcgtaacaaacggccagatccctagctggctcaatctggataatcctagggtcactatcgtcacgcatcaggatgtttttcggaacctatcccacctgcctaccttcagtagccccgccattgagtcccacattcatcgtattgagggactgagtcagaagttcatttatttgaacgatgatgttatgtttggtaaagacgtgtggcccgatgatttctattcacattcaaaaggtcagaaggtttatctaacctggcccgttccaaattgcgcagaggggtgcccgggcagctggatcaaagacgggtactgcgataaagcatgtaacaactccgcttgcgattgggatggcggggactgcagcggaaacagtggcggctctaggtatattgcggggggaggagggacaggcagcattggcgtgggtcagccttggcagtttggcggtggtatcaacagcgtgagctactgtaatcagggttgcgcgaactcatggctggccgacaagttctgtgatcaggcttgtaatgtgcttagttgcgggttcgatgccggcgactgtggacaggatcacttccatgagttgtataaagtgatactgttgcctaaccagacacactacattatccctaagggcgaatgccttccctatttttcctttgccgaggtcgctaagcggggtgtcgagggggcttactcggacaatcccattattcggcacgcatccattgcaaacaaatggaagaccattcatctgataatgcattctggcatgaatgcgactaccatccacttcaacttgacctttcagaataccaacgatgaggaattcaagatgcagattacagttgaggtggacacccgagaagggcccaagcttaacagtacggcccagaaaggctatgaaaacctagtgtctcctatcacccttctgccagaggcggagattcttttcgaagatattccaaaggaaaaaagattccccaaatttaagaggcatgatgtgaactccacaaggagggcacaggaggaagtaaagattccactggtaaacatctccctcctgcccaaggatgctcaactgtcattgaataccctggacctgcaattggaacacggggacattacactgaagggatacaacctgtccaagtctgcgctccttagaagcttcctgatgaactcccagcacgccaaaatcaagaaccaggctatcattactgacgagaccaacgactctctggtggcaccccaagagaagcaagtccacaaatcaatactcccaaactctctgggcgtaagtgagcggctgcagcgcctaacttttccggcagtgtctgtgaaggttaacggccatgatcagggacagaatcctcctctggatctggaaaccaccgcaaggttcagagttgagactcacacccaaaaaacaataggcggaaatgttaccaaggagaagcctcccagcctcattgttcctcttgagtcacagatgacgaaagagaagaagatcactgggaaagagaaagagaactccaggatggaagaaaacgccgagaatcatattggagtcacagaggtgctcctgggcagaaagctgcagcactataccgatagttacctcggattcctcccatgggagaagaagaagtactttcaggacttgctggacgaggaggaatctctgaaaacccagttagcctacttcacagatagcaagaataccggccggcagctcaaggatacgtttgcagactcactcagatacgtgaacaagatactaaactctaagtttgggttcactagccggaaagttccagctcacatgccgcacatgatagataggatcgtgatgcaggaactacaggacatgtttcccgaagagtttgataagaccagttttcacaaggttcgacattccgaagacatgcagtttgccttcagctatttctactacctgatgagcgctgtgcaaccccttaatatcagtcaggtattcgatgaggtggataccgatcagtccggtgttctgtcagaccgcgagatacgaaccctggccacccgcatccacgagctgcccctcagtttgcaggatctaactggactcgagcacatgcttatcaactgtagtaagatgctgcctgccgacattacccagttaaacaatattccaccaacccaggaatcgtattatgatccaaatctgccacccgtgacaaaatctctggttacaaactgtaagccagtgaccgacaagatccacaaggcgtataaagacaagaataagtatagatttgagattatgggcgaagaggaaatcgcatttaagatgattcgtacaaacgtcagccatgtagttgggcaactggatgacatccggaagaacccacgcaaattcgtgtgtctgaatgataatattgatcataaccacaaagatgcccaaaccgttaaggccgtgcttagggatttctacgaatcaatgttccccatcccaagccaattcgaactgccaagggagtacagaaaccggtttcttcacatgcacgaactgcaggagtggcgtgcctaccgagataagctcaaattttggacccactgtgtgctcgctacccttataatgttcacaatcttctctttttttgcagagcagctcatagcactgaaaaggaaaattttccctcgacgccgcattcataaagaggccagtcccaatcgaatacgcgtt

SEQ ID NO: 16920 - DNA, 3768 bp, synthetic construct
  misc_feature 1..3768: note = source = /note="Description of Artificial Sequence: Synthetic coding sequence"
  source 1..3768: mol_type = other DNA
atgctgtttaagctgcttcagcgccagacctacacttgtttgagtcaccgctatgggctctacgtctgttttctgggcgtcgtagttactatcgtgtcggccttccagttcggcgaggtagtacttgagtggtcgcgagatcagtaccacgtgctttttgactcatatagggataatatagccggcaaaagcttccaaaatagactgtgtctgcccatgcccattgacgtcgtctacacatgggtcaatggaactgacttagaactcctgaaggagttacaacaggtgagggaacagatggaagaagaacagaaagctatgagggagatactcgggaagaacacgacagagcctacgaaaaagagcgagaaacagctggaatgcttgttaactcattgtatcaaggttccaatgctggtgttagaccccgccttgcccgccaatatcaccttgaaagacctgccaagtctgtacccgtcattccattcagcaagtgatatattcaacgttgccaagccgaagaatcccagcaccaacgtcagtgtggtcgtcttcgattcaacaaaagatgttgaagacgcacactccggactgctgaagggcaactcccgccagaccgtgtggagaggatatctcaccacagacaaggaagtgccaggcctagtactaatgcaggacctagctttccttagcggattcccccctacgttcaaagagaccaatcagctcaagactaaactgcctgagaatctgtcatcgaaggttaaactcctgcaactctactctgaggctagcgtggcgcttctgaaactgaacaatcccaaggactttcaagagctgaacaaacaaactaagaagaacatgacgatagacggtaaggagctgacaatctctcctgcctacctcctgtgggatctgtccgccatttcacagagcaaacaggacgaagatattagcgccagcagattcgaggataatgaagagctgcggtattcgctccgaagtatcgaacggcacgccccgtgggtgaggaatatatttatagtgactaacggtcagattccttcgtggttaaatctagacaacccacgggtaaccatcgtgacacatcaggatgtctttcgcaacttgtcacaccttcccacattcagttctccagccatcgagtcacatatccacaggatcgaagggctgagccagaagttcatttacctgaatgacgacgttatgtttggcaaggacgtgtggccagatgacttttactctcacagtaaaggccagaaggtgtatctaacctggcccgtgccaaattgtgccgagggatgccccgggagctggattaaggacgggtactgcgataaggcttgtaacaattccgcctgtgactgggacggcggagactgcagcggcaactcaggagggtcccggtacatcgcaggcggaggcgggaccggctccatcggcgtgggccagccgtggcagttcggtggcggaatcaattccgtgtcatactgcaatcaggggtgcgctaactcttggcttgccgataaattctgcgatcaggcttgcaacgtactctcatgcggcttcgatgctggggactgcggacaagaccatttccacgaattatataaagtgatcctactcccaaaccaaacccactatataattcccaagggagagtgtttaccatatttcagctttgctgaggttgccaagaggggcgttgaaggggcttactcggacaacccaattatcagacatgcatctattgccaataagtggaaaactatccatttaattatgcattctggtatgaacgcgaccacgatccactttaatctgacattccagaatactaacgacgaagagttcaaaatgcagatcaccgtcgaggtagacactagggaggggccgaagctaaactcaaccgcgcaaaagggctacgaaaacctggtctcaccaattacattgctgcccgaagcagagatcttgttcgaagacattccgaaagaaaagaggttcccaaagtttaagagacatgatgtcaacagcactcggagggcccaagaagaagtgaagatcccattagtgaatatcagcctcctgcctaaggatgcacagctgagcctgaatacgttggatttacagcttgagcatggggacatcaccttgaaaggatataatctatctaaatcagccctgctgcgcagcttcctgatgaactcgcaacacgctaagataaagaaccaggccatcatcacagatgagaccaatgacagcctggtggcccctcaggagaagcaggtacataaatcaatactgcccaattctctgggagtttccgagcggctgcaaagactcacgttccctgccgtatcggtgaaggtgaatggtcacgaccaggggcagaatcctccactggatctcgagactaccgcacgctttagagtcgagacacatacccaaaagactattggcggtaacgtgaccaaggagaaacctccaagcctgatcgtgcccttagagtctcagatgaccaaggagaaaaaaatcacgggcaaggagaaagaaaactctagaatggaagaaaatgcagagaaccatataggtgtgaccgaagttctgcttggaaggaagctgcagcactacactgacagttacctaggattcctgccttgggaaaagaagaaatactttcaggacttgctggatgaagaggaatctctcaagacccagctcgcatatttcacagatagcaaaaatactggtagacagcttaaggatacctttgccgattccctgcgctatgtcaacaaaatcttgaacagtaagtttggctttacttcgagaaaagtacccgcccatatgcctcacatgattgaccgtatcgtgatgcaggagctccaggatatgttccctgaggagtttgataagacaagttttcacaaggtaaggcacagcgaggacatgcagttcgccttctcgtacttttattatctgatgagtgctgttcagccactaaatataagtcaggtgtttgacgaagtggacacagatcagtcaggcgtgctgtctgaccgggaaatcaggaccctggcaaccagaatccacgaactgcccttgagcctccaggacttaaccggacttgagcatatgcttatcaactgcagcaagatgttgcccgccgacataacccagcttaataacattcccccgacacaagagtcttactacgatcctaacctgccccccgttactaaatctctggtgacaaattgcaagcccgtcacggataagatccacaaagcctataaggacaagaataagtataggttcgaaatcatgggcgaggaggaaattgccttcaagatgattcggaccaatgtctcccatgtggtggggcaactggacgatatacggaagaatccccggaagttcgtatgcctgaatgataacatcgatcacaatcataaagacgcacagacagtgaaagctgtgctgcgagatttctacgaaagcatgttcccgataccatcccagtttgaactgcccagggagtatcggaacagattcctgcacatgcatgagctgcaagagtggagagcttatcgtgacaagcttaagttttggactcactgtgtgttagcgacgctaatcatgtttacaattttctccttttttgctgagcagcttatcgccttgaaacggaaaatttttccacgcaggcggattcacaaggaggcttccccgaatcgcattagggtc

SEQ ID NO: 16921 - DNA, 3768 bp, synthetic construct
  misc_feature 1..3768: note = source = /note="Description of Artificial Sequence: Synthetic coding sequence"
  source 1..3768: mol_type = other DNA
atgctgtttaagctactgcagagacagacctatacttgcctctcacatcgctacggactttatgtgtgctttttgggagttgtcgtgaccattgtgagtgcctttcaatttggcgaagtggtgctggagtggtcacgagatcagtaccatgtactattcgactcctatcgtgacaacattgctggaaagagcttccagaatcgactgtgcctacccatgcctatcgacgtagtttacacatgggtgaacggcaccgatttggagttactcaaggagctgcagcaggtccgtgagcaaatggaagaagaacagaaagcaatgcgagaaattttaggtaagaataccaccgaacctactaagaagtctgaaaagcagctcgaatgcctgcttacacactgtataaaggtgcccatgctggtgttggacccggccctccctgccaatattacccttaaggatctgccaagcctgtacccatcctttcacagcgccagcgatatctttaatgtggcaaaacccaagaatccctcaactaatgtgagtgtcgtcgtattcgacagcaccaaggatgtcgaggatgcacacagtggtctgttaaaaggtaactccagacagacagtgtggcgcggatatctcaccactgacaaagaagttcccggactcgtgctcatgcaggatctagcgttcctgtccggattcccacctacattcaaagagacgaatcaattaaagaccaagttgcccgagaacttgagcagtaaagtgaaattgctgcaactgtacagtgaagccagcgtcgccctcctaaagctgaataacccaaaggattttcaggagctgaataagcagaccaaaaagaatatgacaattgatggaaaagagttaacaatctcacccgcttacctgctttgggatctctcagcgatttcccagtccaagcaagacgaggatatcagtgcctccaggtttgaagacaatgaggagctgcgatattctctaagatctatcgagcgacacgccccctgggttaggaatattttcatcgtgacaaatggacaaatcccaagttggctgaatctggataatcctagggtgactatcgtgacccaccaagatgtgtttagaaacctcagtcacttacctacctttagcagtccagccatcgaatcccatatccataggattgaaggcctgtcacagaaattcatttatctaaacgacgatgtgatgttcggcaaggatgtgtggcctgacgacttttattcccacagtaaagggcagaaagtgtatttgacttggcccgtcccaaattgcgctgagggctgtcctgggtcttggattaaagatggatactgtgataaggcttgcaacaatagcgcctgcgactgggacggcggcgattgtagtggcaacagtggcggatcccgatatatcgccgggggagggggaacggggtccataggggttggccagccttggcagttcggcggtggcatcaactccgtgagttactgtaatcaaggctgcgcaaactcctggcttgcagataaattttgcgatcaggcttgcaacgtcctcagctgtggattcgatgccggggactgcgggcaagaccacttccatgaattgtacaaagtgatcttgctgcctaatcagactcactatatcatccctaaaggggaatgcctgccttacttttcattcgccgaagtagccaaacgcggagtggagggtgcctattcagacaaccccatcattcggcacgcgtccatagccaacaagtggaagactattcaccttattatgcactctggcatgaatgctacgaccatccactttaacttgacctttcagaacactaacgacgaggagtttaagatgcagattaccgttgaggtagacacaagggagggacctaagcttaattccaccgcccagaagggttatgagaacctggtctcccccatcaccctcctcccagaggccgagatcctattcgaagatatccccaaggagaaacgctttccaaagttcaagcggcacgacgtgaatagtactcgtagggcacaggaggaggtgaagataccacttgtcaacatatcactgctacctaaagatgcccagctatcattgaacacactggacctccagctagaacacggcgacatcaccttgaaaggctacaacctgagcaagagcgccctgctccgcagcttcttaatgaattcccagcatgccaagatcaagaaccaggccatcatcactgatgagaccaatgactccttagtggcaccacaggaaaagcaggttcacaaatcgatcctgcctaattccctgggtgtgtctgaaagactgcagcgactcacgttccccgctgtatccgtgaaagtaaatggacacgatcaaggccagaatccccccctggacttggaaacaacggcaagatttcgggtggagacccacacacagaaaacgatagggggaaatgtaaccaaagagaagccaccatctctgattgtgcctctggagtcgcaaatgactaaggagaagaagataactggcaaagagaaggaaaatagtcgtatggaagaaaatgccgagaatcatatcggagtgaccgaggtcctcttgggacgcaaactacaacattacacggacagctatctgggattcctcccttgggaaaagaagaagtacttccaagatctgctcgatgaggaagaaagcctcaaaactcagctagcatacttcaccgattcaaaaaacacaggaagacagctgaaagacactttcgccgacagcctgcgctatgtgaacaagattctgaactccaaattcgggtttacttcccggaaagtcccagcccacatgccccacatgatcgaccgcatcgtcatgcaggagctacaggatatgtttcctgaagagtttgataaaacctcattccataaggtgagacattcggaagatatgcagtttgccttcagttacttctattacctgatgagcgccgtgcagccactaaatatttcccaggtgttcgacgaggtggacacggaccaatcaggagtgctaagtgaccgggaaattcggactctggccaccagaatacacgagctccctctgtccctgcaggacctgacaggactggagcacatgttgattaactgttccaaaatgttgccagcagacatcacccagctgaataacatccctcctacccaggagagctactatgatcctaacctcccgccagtgaccaagagtctggtaaccaattgtaagcccgtcaccgataagattcacaaagcctataaggataaaaacaagtaccggttcgaaataatgggtgaggaggagattgctttcaagatgatacggacgaatgtctcccacgtggtcggccagcttgacgacattcgcaaaaaccctcggaaattcgtttgtctgaatgacaatatcgaccacaaccacaaggacgctcagacggtaaaagcagtactacgggacttctatgagtcgatgttccccatcccgagccaatttgagttaccaagagaatataggaacagattcctgcacatgcatgagctgcaggaatggcgggcatacagggacaagctcaagttttggacccattgtgtcctggccacattaattatgttcaccatcttcagcttttttgccgaacaacttatagctctgaaacgaaaaatattccctagacgaaggatccataaagaggcttccccaaataggatccgggtg

SEQ ID NO: 16922 - DNA, 3768 bp, synthetic construct
  misc_feature 1..3768: note = source = /note="Description of Artificial Sequence: Synthetic coding sequence"
  source 1..3768: mol_type = other DNA
atgctctttaagctgctccaaaggcaaacctacacttgtctttcccacagatacgggctctacgtgtgctttctgggagtggtggtgacgattgtgagcgcgttccagttcggggaggtggtcctggagtggtcgagggatcaataccatgttcttttcgatagctacagggacaacattgcgggaaagtcgtttcagaacagactttgcctccctatgccgatcgacgtggtgtacacctgggtgaatggaactgatcttgagttgctcaaagaactgcagcaagtgagagagcagatggaggaagagcaaaaggccatgcgtgagatcctgggaaaaaacactaccgaacctaccaagaaatcggaaaagcaactggagtgtctgttgactcattgcattaaggtgcctatgctggtgcttgaccctgcattgcccgcaaacataaccctcaaagatcttccttccctgtacccatcgttccactcagctagcgacatctttaatgtcgcaaagccaaagaacccctcgaccaatgtgtccgtggtagtgttcgactcgactaaggatgtggaagatgcgcactccggccttcttaaaggcaactcgcgtcaaactgtctggcggggatatctgaccaccgataaagaagttcctggcctggtgcttatgcaggacctggcatttctttcaggttttccccctacgttcaaggaaactaaccaacttaagactaagctccctgaaaaccttagctcaaaggttaagctgctgcagctttactcggaagcatccgtggcactgcttaaacttaacaaccctaaggattttcaagaactgaataagcagaccaagaaaaacatgactatcgatggaaaggagcttactatttcgcctgcgtacctgctttgggacctctcagcaatttcgcaaagcaagcaagatgaggacatctccgcatcacgctttgaggataacgaagaactgagatactcgcttagatccatcgagagacatgccccctgggtgagaaacatctttatcgtgaccaacggacagatcccctcctggctcaatctcgacaatcctcgcgtcaccatagtgactcatcaagacgtctttcgaaacttgtcgcatctccccactttttcgagccctgcaatcgaatcgcacattcatagaattgagggattgagccaaaagttcatttacctgaacgacgatgtgatgtttgggaaggacgtgtggcctgatgacttttactcccattcgaagggacaaaaagtgtacctcacttggcccgtccctaactgtgcagagggttgtcctggaagctggataaaggatggctactgtgataaagcgtgcaacaactcagcatgtgattgggatggcggagattgttcggggaactcaggaggttccagatacattgccggtggaggtggaaccggatcaattggagtgggccaaccttggcaatttggtgggggtattaactcagtgtcatactgtaaccagggttgcgcaaattcatggctggcagacaagttctgtgaccaagcgtgcaacgtgctgtcatgtggatttgacgcaggtgactgtggtcaagatcattttcatgagctgtacaaagtgattcttcttcctaatcaaacccactacataatacctaagggtgagtgccttccttacttttcgttcgcggaagtcgcaaagaggggagtggagggtgcctactcggataaccctattatcaggcatgcaagcatcgcaaacaagtggaaaaccatccacctgattatgcactccgggatgaatgcaaccactatacactttaaccttacgtttcaaaacactaacgatgaagaattcaagatgcagattactgtggaagtcgatacccgggagggtcctaagctcaattccactgcccagaagggatacgaaaacctcgtgtccccaattaccctgcttccagaagcagagattctgttcgaagatatccctaaagaaaagcgctttcctaaattcaaacggcatgatgtgaattcgaccagacgtgcacaggaagaagttaagatcccactggtcaacataagcctgcttccgaaagacgcccaactgagcctgaacactttggatctgcaacttgagcacggagatattactctcaagggttacaatctgtcgaaatcggcgcttctgagatcctttctgatgaactctcaacacgctaaaatcaagaaccaggcgataatcacggatgagactaacgactcactcgttgctcctcaggaaaagcaagttcataagagcattcttccaaactccctgggtgtgtcggagcggcttcaaaggctgacttttcctgccgtgtcggtcaaagtgaacggccatgatcaaggacagaaccccccactggatcttgaaactacggcacgattccgtgtagaaacccatacgcaaaagactatcggaggaaacgtgactaaggagaagcctccgtcactcatcgtgccactggaatcccaaatgaccaaagaaaagaagataaccggtaaggaaaaggaaaactcacgaatggaggaaaatgctgaaaaccatataggtgtgactgaagttcttctgggacgcaagctgcaacattacacggattcgtacctgggcttcctgccatgggaaaagaaaaagtactttcaagaccttctcgacgaagaagaatcgcttaagactcagcttgcctactttaccgatagcaagaacaccggacggcaactgaaggatacttttgctgactcactgaggtacgtcaacaagattctgaactcgaagttcggatttacctcgaggaaggtccctgcacatatgccccatatgatcgaccggatcgtgatgcaggaactccaagatatgtttcctgaagaatttgataagacctcgtttcataaggtgagacactcggaggacatgcaatttgcatttagttatttctactacctcatgtcggctgtccaaccactcaatatctctcaggtgttcgatgaagtggatactgatcaaagcggagtgctttcagatagagaaatccgaaccctggcaacgcggatccatgagctgccactgagcctgcaagatctgactggacttgagcacatgttgatcaattgctccaagatgctgccggccgatattactcagctcaataacatccctcctacccaggaatcctactacgatcctaatcttccccccgtcaccaaaagcctcgtgaccaactgtaaacctgtgaccgacaaaattcataaggcatacaaagacaagaataagtacaggtttgagatcatgggtgaagaggaaattgcttttaagatgatccgcacgaacgtgagccatgtcgtcggacagttggacgatatccgcaagaacccaaggaagttcgtgtgccttaacgacaacatcgaccataaccataaggacgcacagaccgtgaaggccgtcctgcgcgacttttacgaaagcatgttccccattccgtcgcagtttgaacttccaagggaatacagaaatcggtttcttcatatgcacgaacttcaagaatggcgcgcataccgggacaaactgaagttttggactcactgcgtccttgccaccctgattatgttcactatctttagcttttttgcagaacagctcattgcgctgaagcgcaagattttcccacggcggcgcattcataaagaagcatccccaaaccggatccgggtg

SEQ ID NO: 16923 - DNA, 3768 bp, synthetic construct
  misc_feature 1..3768: note = source = /note="Description of Artificial Sequence: Synthetic coding sequence"
  source 1..3768: mol_type = other DNA
atgctctttaaattactgcagcgacagacctacacctgtctttcccaccgttatggtctatacgtgtgttttctgggcgtcgttgtgaccatcgtcagtgcctttcagttcggcgaggtagtcttggagtggtcgcgcgaccagtaccacgtcctctttgactcgtaccgcgacaacatcgccggcaagtcatttcagaaccgcttgtgtttgccaatgccgattgacgtcgtctatacctgggtaaacggcacagacctggaactgctcaaggagctgcagcaggtgcgggagcaaatggaggaggagcagaaagcgatgcgggaaatccttggaaagaacactacagagcccactaagaaaagcgagaaacagctcgagtgtttacttactcattgcattaaagtacctatgctcgtattggatccagccctgccagcaaacattactttgaaggatctgcctagcctttacccctccttccattctgcttctgacatttttaacgtcgccaagcccaaaaatccatcaactaatgtgagtgtggtcgtattcgactccaccaaggacgtcgaggacgcccactccggcttgctcaaagggaactcacgccagaccgtttggcgcggctacctgaccacggacaaagaggttcctgggctggtcctgatgcaggatcttgcctttctatcagggttcccccctacctttaaggaaacgaaccaactgaagaccaagctccctgaaaacctgtcgagtaaggtgaaactgctgcagctgtacagtgaagcctccgtcgccctgcttaaattgaacaatccaaaagattttcaagaactcaataaacagacgaagaagaacatgacgattgacggtaaggaactcacgatctcccccgcttatctgctgtgggacctgtccgctatctcacaaagtaagcaggacgaagatatttcggccagccgcttcgaagacaatgaagagttgcggtactcactgagatcaatcgaaaggcatgccccttgggtgcggaatatttttatcgtcactaacggtcagattccctcctggttgaacctcgacaatcctagggtgaccatagtgacccaccaggacgtgttcaggaatctgagccacctgccaacttttagtagtccagcaatcgaatcccacatccaccgcatcgagggcttgtcccagaagtttatttacttgaatgacgatgtgatgttcggtaaagacgtgtggccagatgatttctacagccatagcaagggtcagaaagtctacctaacctggcctgtccccaactgtgcagaggggtgtccagggtcatggattaaagacggctactgcgacaaagcctgcaacaatagtgcgtgcgactgggatggcggcgactgctccggaaactctggtgggagtagatacatcgccggagggggtggcactggcagcatcggcgtgggtcagccctggcagttcgggggagggataaattcagtctcgtactgtaatcagggatgcgccaactcctggttggcagacaaattctgtgaccaggcctgcaacgtgctatcgtgcgggttcgacgctggggactgcggtcaggatcactttcacgaactctacaaagtcatactgctgcccaatcagacccactacattataccgaagggtgagtgtctcccatattttagctttgctgaagtggctaaacggggtgtggagggggcctacagtgataacccgatcataagacatgctagcatagcaaacaagtggaagacgattcatctcataatgcactctggcatgaatgcgactaccattcatttcaatcttacttttcagaatacgaatgatgaagagttcaagatgcagatcacggtggaggtggacaccagggaggggcccaagctgaattcgacagctcagaagggctatgagaaccttgtgagccctatcacgctacttccagaggctgagatcctgtttgaagacattccgaaggagaagaggttccccaagtttaagcgccacgacgtcaacagcacaagacgggcccaggaagaagttaagatcccgcttgtcaatatctccctcctgcccaaggacgcacaattgtctctgaacaccttggatctccagctagaacacggtgatatcacactcaaaggatataatctctcaaagtccgcgttgctgaggtctttcctgatgaatagtcaacatgcaaagatcaaaaaccaggctataataacagacgagacgaacgacagcctggtggcaccgcaggagaagcaggtgcataagtcaattctgccgaattctctcggagtatccgaaagattacagcgccttaccttcccggcagtaagcgtgaaggtgaatggacacgaccagggacagaatccccccctggatctggaaaccactgcacggttcagggtcgagacccacacacagaagactattggcgggaacgtgaccaaggaaaaaccacctagcctcattgttcctctggagtcccagatgacaaaagagaagaaaatcactggcaaggaaaaggaaaattctcgtatggaggaaaatgcagagaaccacatcggtgtgaccgaggtacttttaggcagaaagctgcagcactatacggactcctatctcggatttctgccttgggagaaaaagaagtactttcaggacctcctggatgaagaagagagcctgaagactcagttagcctactttactgactccaagaacacgggacgacaactcaaggacacatttgccgattcactacggtacgtgaataagatactgaacagcaaattcggattcacgagccggaaggttcccgctcacatgccccacatgattgacaggattgtgatgcaagaattgcaggatatgttcccagaagaattcgacaagacctcttttcacaaggtcagacattctgaggacatgcagttcgcattctcgtatttctattatttgatgagtgcagtccagccacttaatatcagccaggttttcgacgaagtggacacagatcaatctggggtgctgtcggaccgggaaatccgaacgttggctacccgcatccacgaactccccctgagcctgcaggatctcaccgggctcgagcatatgcttatcaactgcagcaagatgttacccgccgacatcacacagctcaataatatcccaccaacacaggaatcatactatgaccctaatttaccccctgtcactaagtctctcgttactaattgcaaacctgtcactgacaaaatccacaaggcctataaagacaagaacaagtaccgcttcgaaatcatgggtgaagaggaaatcgcgtttaaaatgatcagaaccaacgttagtcacgtggtgggacagctggacgacatccggaaaaaccctagaaagttcgtctgtttgaacgataacattgaccacaatcacaaagatgctcagaccgttaaggctgttctccgggacttttacgaatcgatgttcccaatccctagtcaattcgaattgccacgggaatacagaaataggttcttgcatatgcacgagctgcaggaatggagggcttatagggacaagttaaagttttggactcactgcgtgttggcgacactgattatgtttaccattttctcattctttgccgagcagctgatcgcccttaagagaaagatctttcctagaaggcgcatccacaaggaagcttcccccaaccgtattagagtg

SEQ ID NO: 16924 - DNA, 3768 bp, synthetic construct
  misc_feature 1..3768: note = source = /note="Description of Artificial Sequence: Synthetic coding sequence"
  source 1..3768: mol_type = other DNA
atgctatttaaactgcttcagcggcaaacctacacctgcttaagtcatcggtatgggttatatgtttgcttcctgggcgttgtggttactatcgtatccgcctttcaatttggagaggttgttctggagtggagcagggaccaatatcacgtgttattcgattcctacagggataacatcgccggaaagtccttccaaaaccggctctgcctgcccatgcccattgacgtggtatatacgtgggttaatggtactgacctggagctgcttaaagagcttcagcaggtgcgcgaacagatggaggaggagcaaaaagctatgagggagattttaggcaagaacacaacagagccaacgaagaaaagtgagaaacagctcgaatgcttactcactcattgcataaaggtgcctatgctggtgcttgatcctgccctacccgcaaatatcacgctaaaagatctccctagcctgtacccctcttttcatagtgcatcagatatctttaacgtggcgaaacctaagaaccccagcactaatgtgagtgtcgttgtgtttgactccacaaaagacgtggaagacgcccacagtggtttattaaaggggaattcccgccagaccgtctggagaggatacctgaccacggacaaggaggtgcctggtctggttctgatgcaggacctagcgttcttaagcggattcccaccgaccttcaaggagacgaatcagttgaaaacgaagcttccagagaacctgtcatctaaggtaaaactcttgcagctttacagcgaagctagcgtggctttgctcaagctaaacaatcccaaggacttccaggagctgaacaagcagacaaaaaagaatatgaccatagacggaaaagaattgacaatttctcctgcctatctcctgtgggatctgtcagctatttcacagtccaaacaagatgaggatatcagcgcgagcaggtttgaggataatgaagaattgcgctatagtctccgatcaatcgagcgtcatgctccctgggtacgcaacatcttcatcgtgacaaacggccagattccgtcatggctcaacctcgacaaccctagggtgaccattgttacccaccaggacgttttccggaacctgtcccacttacctactttttcatcccctgcaattgaatcccatattcatcggattgagggactgagccagaaattcatatacctgaacgatgatgttatgtttggaaaggatgtatggcccgatgacttctactctcactccaaggggcagaaggtctatctgacctggcctgttccaaactgtgcagaaggatgtccagggtcgtggataaaggacggctactgtgacaaggcgtgcaataactccgcctgcgactgggacgggggagattgtagcggcaattctgggggcagccgttacatagctggaggtggcggaacaggcagcatcggcgtcggtcagccatggcagttcggcggaggcattaatagcgtgtcttattgtaaccagggctgcgcgaattcgtggctggctgataaattttgtgatcaggcatgtaacgtgttaagctgtgggttcgatgccggagactgcggacaagaccactttcatgagttgtataaggtgattctgctgccaaaccaaacccactacattattcccaaaggcgagtgcctgccctacttttccttcgccgaagttgccaagcggggcgtcgagggtgcgtacagcgacaaccccatcattcgacacgcctcgattgcaaacaaatggaagactattcatcttatcatgcacagcggcatgaacgctacaacgatacactttaacttgacctttcagaatacaaatgacgaagagtttaagatgcagatcacagttgaggtggatactagggagggccctaagctcaattcgactgcccagaagggatacgagaacctggtttcccccattacactcctccctgaggccgaaatcttgttcgaggatattccaaaagagaaacgatttccaaaattcaaaagacatgatgttaattcaacacggagggcccaggaggaagtcaaaatacctctggtgaacataagcttgctgcccaaggacgcacaactgtccctgaacacccttgacctgcagctcgagcatggggatatcaccctgaagggctacaatctgagtaaatcagccctacttcggtcattcctgatgaactcccagcatgctaagatcaaaaatcaagcgatcattaccgacgagactaatgactcccttgtggctccccaagagaaacaggtgcacaaatcgatactgcctaactcactcggggtgagtgagcggctacagcggttgacattcccggcggtgagcgttaaagtcaatgggcatgatcagggtcagaacccacccttagacctcgagacgactgctcgattccgagtggagacccatacccagaagacaattggtggaaacgtaacaaaggagaaaccaccttcactgatcgtgcccctagagtcacagatgacgaaggagaagaagattaccgggaaagagaaagaaaattctagaatggaggagaacgccgagaatcatataggggtcacggaggtactgctcgggcgcaagcttcaacactacactgatagctatctcggcttccttccctgggagaagaagaaatacttccaggacctgctcgatgaagaggaatcgctgaagacccagttagcatactttaccgattccaagaataccggtcgccagctaaaggacacatttgcggactctctccgctacgttaacaaaatattgaactccaagtttggttttacatcacgcaaggttccagctcacatgccgcacatgatcgatagaatcgtgatgcaagagctgcaggatatgttccctgaagagtttgataaaacaagttttcacaaagttcggcattctgaagacatgcaatttgccttcagctatttctactatctgatgagcgctgtgcagcctctcaatattagccaggtcttcgacgaagtcgacaccgaccaatcaggcgtgttgagtgaccgggagattcgcaccctcgcaacgcgaatccacgagctacctctctcattgcaggatctcaccggactcgaacacatgttgatcaactgcagtaaaatgctcccggcagacattacccagctaaataacattccccctacacaggagtcctactatgatccaaatttaccccctgtaactaaatcgctcgtcaccaactgtaaacctgtcacagacaaaatacacaaggcttacaaagacaaaaataagtatcgcttcgaaatcatgggggaggaggaaatcgcattcaagatgataagaactaacgtttcacacgtcgtgggacagctcgacgacatccgaaagaatccacgaaagttcgtgtgtctcaacgacaacatcgaccataatcataaggatgctcagacagtgaaggctgtgctccgcgacttctacgagagtatgtttcctatcccatcacaatttgagttaccacgagaatacaggaaccgcttcttgcatatgcatgagctgcaagagtggagggcctatcgtgacaaactgaaattttggacccattgcgttcttgccacactgataatgtttacaatcttttcgttctttgcagaacagctgatcgcacttaagcgaaaaatattcccccggcgtcggatacataaggaggcatcgcccaatcggattcgtgtg

SEQ ID NO: 16925 - DNA, 3768 bp, synthetic construct
  misc_feature 1..3768: note = source = /note="Description of Artificial Sequence: Synthetic coding sequence"
  source 1..3768: mol_type = other DNA
atgctgttcaaacttttacagcgacagacttatacatgtttgtcccatcggtatggtttgtacgtgtgcttcctcggagtggtggtgactattgtctcagcctttcagtttggggaagttgtgttggagtggtcgcgggaccagtatcatgtcctttttgacagctaccgggataacattgccggtaagtccttccagaacaggctgtgtctgccaatgcccattgatgttgtgtacacatgggttaatggcaccgacctcgagcttctgaaggaactccagcaggtgagggaacagatggaggaagagcaaaaggcgatgcgtgagattctgggaaaaaatactactgaaccaaccaaaaagtcagagaaacagctggaatgtctcttgacgcattgtatcaaggttccaatgctggttctggatccagcactgccagcgaatatcacactgaaggacctcccctccctgtatccctcctttcacagcgcgagtgacatcttcaatgtggctaagcctaaaaaccccagcacaaatgtgtccgtggtcgtgttcgacagcaccaaagacgtggaggatgcgcactcagggctgctgaagggcaattctcggcagactgtgtggcgggggtatctcacaactgataaggaagttccaggtctggtcctgatgcaggatctggccttcttgtcaggcttcccacctacatttaaagagacaaaccagctcaagaccaaactgcccgagaatcttagctctaaggtaaagctcctgcaattatactctgaggccagtgtagccctgcttaagctcaataacccgaaagatttccaggaattaaataagcagacgaagaagaacatgacaatcgatgggaaggaattaaccatttctcccgcctatctcctgtgggatctgagcgctatttcccagtctaagcaggatgaagatatcagcgcaagtaggttcgaagataatgaggaactcagatactctctccgctctattgagcggcacgctccctgggttcggaacatctttatagttacaaatgggcagatcccctcatggttgaacctggacaacccccgagtaactatcgtcacccaccaagacgttttcagaaacctatctcatttaccaacctttagctcacccgccattgaatctcatatccatagaatcgaaggcctcagccagaagtttatctatctcaatgatgatgttatgttcggcaaggatgtttggcctgatgacttttatagccattcaaagggccagaaggtgtatctcacttggcctgtgccgaactgcgctgagggctgccctgggagctggattaaggacggctattgtgacaaggcatgtaacaactccgcttgcgattgggacgggggtgactgctcgggaaacagtggtgggagtcggtacattgctggtggcggtggtacgggcagtatcggagtgggacagccatggcaatttggcgggggcattaacagtgtgagttattgcaaccaggggtgcgccaatagttggctggccgacaaattttgtgatcaggcctgcaatgtcctgagctgtggctttgacgcaggggattgcggacaggatcacttccacgaactgtataaagtgatcctgttaccaaaccaaacgcattatattatcccaaagggggaatgcctgccatacttcagctttgccgaggtagcaaaacggggcgtcgagggagcgtatagtgacaaccccattatcaggcacgcttcaattgccaataagtggaaaactattcacttaattatgcattccggaatgaacgctaccacgattcatttcaacctcacttttcagaacactaatgacgaagagttcaagatgcaaatcaccgtcgaggtggacacccgcgaaggaccgaaactcaactcgacggcgcaaaagggatatgaaaatctggtgtcacctattacgcttctgcctgaagcagaaatcctcttcgaagatatcccaaaggagaaaagattccccaagttcaagcgccacgacgtaaattctaccaggcgcgcccaagaggaggtcaaaataccactcgtcaatatttccctcctccctaaagacgcacagctgtcccttaatactttggatctgcagctggagcacggcgatattacactgaagggatataatctttccaaatctgcactgctccggagcttcctaatgaatagccaacatgccaaaatcaagaatcaggccataatcacggacgagactaatgattccctggtggctccacaggagaaacaggtgcataaaagtatattaccgaattcgttgggggtgtcagagcgactccagaggttaactttccctgctgtgagtgtcaaggttaatgggcacgatcagggacagaatcccccattggatttagagaccactgccagattcagagtggaaactcatacacagaaaaccatcggaggaaacgtcaccaaggagaagccgccttctttgatcgtgcctctagagtctcagatgactaaggaaaagaaaattactggcaaagaaaaggagaactcccggatggaagaaaacgcagaaaaccacattggtgtgacggaggttctacttgggaggaaacttcagcattacacggattcttatctgggcttcctgccttgggagaagaagaaatacttccaggacctgcttgatgaagaagagagtttaaaaacccagttggcttacttcactgattcaaagaatacgggcagacaattaaaggacactttcgccgattccctgcgctacgtgaataagatcctaaacagtaagttcggatttacttctcgaaaagtgcccgctcatatgccacatatgatcgataggatcgttatgcaggagcttcaggatatgttccccgaagaatttgataagactagtttccacaaagtccggcactcagaggatatgcagtttgcctttagctacttctattatctcatgtccgcggtgcagcctctcaatatcagtcaggtttttgatgaggttgacaccgaccagtctggggtcctaagcgatcgcgagattcgaactcttgccacccgcatccatgagctgccactaagtctgcaggacctcacaggattagagcacatgttgatcaactgcagcaagatgttaccggcagacatcacccagctgaataacatcccccccactcaggagagctattacgatccaaatcttcctcccgtgactaaatcattggtgaccaactgcaagcctgtgactgacaagatccacaaggcctacaaggacaaaaacaagtatcggtttgagatcatgggtgaagaagaaatcgccttcaagatgattcgcactaatgtgtctcatgtcgtggggcagctggatgatatccgcaaaaatcccaggaagttcgtatgccttaacgataatatcgatcacaaccacaaagacgctcagaccgtcaaagccgtgctacgggatttctatgagagcatgttccctattccatctcagtttgagctgccaagagaatacagaaaccggttcctgcatatgcacgagctgcaggagtggagggcttatcgggacaagctaaaattttggacccactgcgtgttagccacattaatcatgttcacaattttcagcttctttgcagaacagctaatagccctgaaacgaaagattttccctaggagacgaattcataaagaggctagccctaaccggatccgggta

SEQ ID NO: 16926 - DNA, 3768 bp, synthetic construct
  misc_feature 1..3768: note = source = /note="Description of Artificial Sequence: Synthetic coding sequence"
  source 1..3768: mol_type = other DNA
atgttgttcaagctgcttcagagacaaacctacacttgcttatcccatcggtatggtctctatgtgtgcttcctcggtgtagttgtgaccatcgtgagcgcgtttcagtttggggaagtcgtcttggagtggagtagggatcagtaccatgtattgtttgacagttatcgagataacatcgcaggtaagtctttccagaacagattgtgcttacctatgcctatcgacgtagtttatacttgggtgaacgggacagacttggagttgctcaaagagcttcagcaagtgagagaacagatggaagaagaacagaaggctatgagggagatcctcggtaagaatacaactgagcctacaaagaagtccgaaaagcaattggagtgccttcttacccattgcatcaaagtaccaatgttagtgctggatcccgctctccccgctaacattacattgaaggatttgccgagtctttacccctctttccattccgcgagcgacatttttaatgtggctaagcctaaaaatccctctactaatgtctcggttgtggtgttcgattctactaaagatgtcgaggatgctcatagcggtcttctcaagggaaattccaggcaaactgtatggaggggttatctaactactgataaggaagttcctggccttgtgctcatgcaggacctggccttcttgtcaggtttcccgcctacttttaaggaaaccaatcagctgaagacaaagctacccgagaatctctctagtaaagtcaagctactccagctttactccgaagcttcggttgctcttttaaagctaaataatcctaaggatttccaagaattaaacaagcaaaccaaaaagaatatgacaattgacggcaaagaactcactatttcccctgcctatttgctctgggatctctccgccatttcacagtccaagcaagatgaagatatctctgcatcacgcttcgaagataatgaggagcttaggtacagcctcagatccatcgaaaggcatgcaccttgggtgagaaatatcttcatcgtgaccaatggtcagataccctcctggttaaatctcgacaatccaagagttacgatcgtgactcatcaagatgtgtttagaaacctgtcacatcttccaaccttcagttcacccgccattgaatctcatattcatagaatcgagggactttcccaaaagttcatttatttgaacgacgatgtaatgtttggtaaagatgtctggcccgatgacttttactcacatagcaaagggcagaaagtttaccttacttggccggtcccaaactgtgccgaaggatgtccgggatcttggatcaaggacggatactgtgataaggcatgtaataactctgcctgtgattgggacggcggagactgttctggcaatagtggaggatcccggtatatagctggcggaggtggtaccggcagtatcggcgtgggtcaaccgtggcaatttggtggtggcatcaatagcgtttcttattgcaaccaggggtgcgcaaattcatggcttgctgataaattttgcgaccaagcttgtaacgtgctctcttgcggtttcgacgcaggagattgcggacaagatcatttccatgaactctacaaggttattcttttgccaaatcagactcattacattatccctaaaggggagtgtctaccttacttcagtttcgcagaagtcgcaaagcggggcgttgaaggggcctactcagataatccaatcattcgtcatgcttctattgccaataaatggaagactattcatttgattatgcattctggtatgaatgcaaccacgattcattttaacttaacgttccagaacacgaatgatgaagagttcaaaatgcagattaccgttgaagtcgatacgagagaggggcctaagcttaattctaccgcccagaaaggatacgaaaacctcgtgtcacctattacgctcttgcctgaagctgagatactatttgaagatatcccgaaagagaaaagattcccaaaattcaagcgtcacgatgttaacagcactcgacgtgcccaggaagaagttaagatcccacttgtgaatatttctctgcttccaaaagatgcccaattgtccttgaacactttggatcttcaattagaacatggtgatattacgctgaagggttacaacctctctaagtcggctctcctcagatcttttcttatgaactcgcaacatgccaagattaagaaccaggcgataattactgatgagacaaatgattctttagtggctccgcaggaaaaacaggttcataagtctattttgccaaattcactgggagttagtgaaaggttacaaagattgacatttccagctgtttccgttaaggtgaatggtcatgatcaagggcagaatcctccgttagatttggagactaccgctagatttagggtcgagactcatacccaaaaaactatcggggggaatgtcacaaaggaaaaaccgccttcattgattgtacccttagagtctcaaatgactaaggaaaagaagattaccggtaaggagaaggagaattcgcgaatggaagagaacgctgaaaaccatatcggagttactgaagttcttctaggtcggaagcttcaacattatactgacagttacttggggttcctcccatgggaaaaaaagaaatacttccaagacctcttagatgaagaggagtctctaaagacccaattggcttactttacagatagtaaaaacactggtagacaattgaaagatacattcgcggactcactgcgttacgttaacaaaatcctgaactccaagttcggctttacttcgcgaaaagtccctgctcatatgcctcatatgatcgatcgcattgtcatgcaggagctgcaggacatgttcccagaagagttcgacaagacttctttccataaagttaggcattctgaagatatgcagttcgcattttcatatttctactatttaatgtctgctgtccagccccttaatatcagtcaggtcttcgatgaagtagatactgatcaatcaggtgtactttccgaccgagagatcagaactctcgctacgaggattcatgaactacctctttctctccaagatttaaccgggctcgaacatatgcttattaattgtagcaaaatgcttccagctgacattactcagttaaataacattccccctacccaggaatcttactatgacccaaatttgccgcccgtgacgaagtcactggttaccaactgtaagcccgttactgataagattcataaagcctataaggataagaataaatatcgttttgagattatgggagaagaagaaattgcatttaagatgattcggacaaacgttagtcatgttgttggtcaactcgatgatatccgaaaaaatcctaggaaatttgtgtgtcttaatgataacatcgatcataatcataaggatgcgcaaacggttaaagcagttctgagggatttctatgagtctatgtttccaataccctcgcaattcgagctacctagggaatataggaatagatttcttcacatgcatgagttacaggaatggcgtgcttatcgggataagttgaaattctggacccattgtgttctggctactctcattatgtttactatcttctctttcttcgcggaacagcttattgctctgaagagaaagatattcccaagaaggcgtatacacaaggaggcctctccaaatcgaattcgagtt

SEQ ID NO: 16927 - DNA, 3768 bp, synthetic construct
  misc_feature 1..3768: note = source = /note="Description of Artificial Sequence: Synthetic coding sequence"
  source 1..3768: mol_type = other DNA
atgttgtttaagctgctccagaggcagacctatacttgtctttcccatcgttacggattgtacgtctgttttctgggggtggtcgtgaccatcgtttccgcattccagtttggcgaagtggtgcttgagtggtcgcgtgatcaatatcacgtgctgttcgattcgtaccgcgataacatcgccggtaagtcgttccagaaccggttgtgcctgcctatgcctatcgatgtggtctacacctgggtgaatggcaccgatctcgaactgcttaaggaactgcagcaggtgcgcgagcagatggaagaagagcaaaaggccatgcgagaaattctgggaaaaaacaccaccgaaccaaccaagaagtcagaaaagcaactcgaatgccttttgacccattgtattaaggtgccaatgcttgttctggatcctgcactgcctgctaacattaccctcaaggatcttccatctctctacccatcattccactctgcatcggatatctttaatgtcgcgaagcctaagaatccctccactaacgtgtcggtggtggtgtttgactccaccaaagatgtggaagatgctcattcaggtcttttgaagggtaactccagacaaaccgtctggagaggctatttgaccactgacaaggaggtcccaggtctggtgcttatgcaagatctcgccttcctgtcgggatttccccctacctttaaggaaaccaaccaacttaaaactaaacttcctgaaaacttgtcctccaaggtcaaactgcttcagctgtactccgaagcctcggtggcactgcttaaacttaacaaccctaaggacttccaggagttgaataagcaaaccaagaagaacatgacgatcgatggaaaagaactgaccataagcccggcatacctgttgtgggatctctcggctatttcacagtccaagcaggatgaagatatttcggcttctcgctttgaagataacgaggagcttcgttactccttgcgaagcattgaaagacacgccccctgggtgcggaacattttcatcgtcactaacggacagatccctagctggcttaaccttgacaaccctagagtcacgattgtcacgcaccaggatgtgtttcgcaacctgtcacatcttcctaccttttcatctccagcaatcgaatcacatattcatcggatcgagggtctgtcgcaaaagttcatataccttaatgatgatgtaatgtttggtaaggatgtctggcccgacgacttctactcgcattccaaaggtcagaaggtgtacctgacttggccagtccctaactgcgcagaaggatgtccaggttcgtggattaaagacggatactgtgacaaagcatgtaacaactcggcctgcgattgggacggaggtgactgttcgggtaatagtggtggttcgcgttacatcgcagggggaggagggaccgggtcaatcggtgtggggcagccctggcagtttggcggaggcattaacagcgtgagctactgcaaccagggatgtgcgaactcgtggctggcggataagttttgtgatcaagcctgtaatgtgttgtcctgtgggtttgacgcaggagactgtggccaggatcattttcatgaactgtacaaggtgatcctccttccaaaccaaactcattacatcattccaaagggggagtgccttccctacttttcgtttgcagaagtggctaagagaggtgtggagggggcctacagcgacaatccgattatcagacacgcatccatcgccaacaagtggaaaaccattcatcttatcatgcactcaggcatgaatgcaaccactattcatttcaatctgactttccaaaacactaacgacgaagagtttaagatgcagatcaccgtcgaggtggacactagggaagggcctaaactgaacagcactgcgcaaaaaggatacgaaaacttggtgtctccgattacccttctcccggaagcagaaatacttttcgaagatattcctaaggaaaaaaggtttcctaaattcaagaggcatgatgtcaactccactaggcgagcacaggaagaagtgaaaattcctctggtgaacattagccttctgcctaaagatgcccaactgtcgcttaacaccctcgatcttcagctggaacacggcgacattaccttgaagggctacaatctgtccaagagcgcactcctccgtagcttccttatgaactcacaacacgcaaagattaagaatcaagcaatcattaccgatgagactaatgacagcttggtggctccacaagagaaacaagtgcataagtcaattcttcccaactccctgggcgtgtcagaacggctccaaaggctgaccttccctgctgtgagcgtcaaagtgaacggacacgatcaggggcaaaaccctccacttgacctcgaaactaccgcccgcttccgcgtggaaacccatactcaaaagaccattggaggaaacgtgactaaagagaaacctccttcgcttattgtgccgctggaatctcaaatgactaaggaaaagaagattaccggtaaagaaaaggaaaattccaggatggaagaaaacgcggaaaaccatattggtgtgacggaagtcctgcttgggcggaaacttcagcattacaccgattcctacctgggttttttgccatgggagaagaaaaagtactttcaggacctcctggatgaagaagagtcgcttaaaactcaactggcgtacttcacggatagcaagaacaccggtagacagctcaaggatactttcgccgactcgctccgctacgtgaacaagatcttgaatagcaagttcggatttacttcccgtaaggtgcccgcgcacatgcctcatatgatcgatcgcattgtgatgcaagaacttcaggatatgttcccagaagagtttgacaaaacgtcctttcataaggtgcgccattctgaggatatgcagtttgccttctcctacttttactacctgatgagcgcggtgcaacctctgaacatttcgcaggtgttcgatgaggtcgacactgatcaatccggcgtcctctcggatagggaaatccggactctcgcaaccagaatccatgagctcccactttcactgcaagatctcactggattggagcacatgttgataaactgttcaaagatgctgccagcagacatcacccaacttaacaacattcctcccactcaggagtcatactacgatccaaatctgccacccgttaccaagtcactggtcactaactgtaaacctgtgactgataagattcataaggcctacaaggataagaacaagtatcggttcgaaatcatgggagaggaagaaatcgcctttaagatgattagaacgaatgtgagccacgtcgtggggcaactggacgatattcgcaaaaatcctaggaaatttgtgtgtctgaatgacaacattgatcacaaccataaggatgcgcagactgttaaggccgtgcttagagacttttacgaatccatgttccctattccctcacagtttgaactccctagagaataccggaatcgcttcctgcacatgcatgaactccaagaatggcgcgcgtaccgggataagctcaagttctggacccattgcgtacttgccacgcttatcatgttcacgattttctcttttttcgcagagcaactgatcgcgttgaagagaaagatttttccaagacggcgtatacacaaggaagctagccctaacaggataagagtg

SEQ ID NO: 16928 - DNA, 3768 bp, synthetic construct
  misc_feature 1..3768: note = source = /note="Description of Artificial Sequence: Synthetic coding sequence"
  source 1..3768: mol_type = other DNA
atgctgtttaaactgcttcagaggcagacttacacttgcctttctcatcgctacggcctgtatgtgtgtttcctgggtgtggtcgtcaccattgtgtccgctttccagtttggcgaggtagtgcttgaatggtcaagggatcagtatcatgtactgttcgactcttaccgggataacatagccggaaagagcttccagaatcgactctgcctcccaatgcccatcgacgttgtgtacacatgggtaaacgggaccgatcttgagctgctcaaagagctgcaacaagtgcgggagcaaatggaagaagaacagaaagctatgcgcgaaattctgggcaagaataccactgagccgaccaagaaaagtgaaaaacagctggagtgtctgctcactcattgtatcaaggtgcctatgctggtactagatccagcactgcccgctaatattacgctcaaggaccttccaagcctttacccctcattccatagcgcgagcgacatcttcaacgtggctaaacccaaaaacccctctacaaacgtgagcgtagtggtgttcgactccactaaggacgtcgaggacgcccactctggcttgctgaaggggaactcccgccagaccgtgtggagaggctacctcacgacagacaaggaagtacctggtctcgtcctgatgcaggacctggctttcttaagcgggttccctccaacattcaaagaaacgaaccagctgaagaccaagctcccggagaatctgtcatcaaaggttaagctactacaattgtattccgaagccagcgtggcacttttgaagctcaacaatcctaaggactttcaagaattaaacaagcagacgaagaaaaatatgaccattgatggaaaggagcttacaatctctcccgcataccttctctgggatctgtccgccatcagccaatccaaacaagacgaagacattagcgccagccggttcgaagataacgaggaactgaggtattccctgcggtcaatcgaacggcatgccccctgggtccgaaacatcttcatcgtgacaaacggtcaaattcctagctggctgaaccttgacaaccccagggtgactatcgtcacccaccaggatgtgtttcggaatctgtctcatctgcctactttctcctctccagccatcgagtctcacattcaccgaattgagggcctctcacagaagtttatttacctcaacgacgatgtgatgtttggcaaagacgtgtggcccgacgacttctatagtcactccaaggggcagaaggtatatctgacgtggcctgtccctaactgcgccgaggggtgtccaggaagctggatcaaggatggatattgcgacaaggcctgcaataactcagcctgtgactgggatggtggggattgctccggtaactccggtggttcacggtacatcgccggagggggcggaacgggctcgattggcgtgggacagccctggcagttcggcgggggaattaattctgtatcgtactgtaatcaagggtgcgcgaacagctggctggcagacaagttttgtgaccaggcctgtaatgtgctgtcctgtggctttgacgcgggggactgtggacaggaccacttccatgaactatataaggtgatcttgttaccaaatcagacccattacatcattcccaagggggagtgcctgccttatttcagcttcgccgaagtagccaagagaggggttgagggagcttactctgacaaccctatcattaggcatgcgtcgattgctaataagtggaaaacaatacacctcatcatgcatagtggtatgaacgcaaccacaatccatttcaacctgacattccagaacaccaatgatgaggaattcaagatgcaaattactgttgaagttgacactcgcgagggaccaaaactaaacagcacagcacagaagggatacgaaaatctggtgtcccccataacactcctaccagaggccgaaatattgttcgaagatattcccaaggagaagaggttccctaagttcaaaaggcatgacgtcaatagcactcggagggcccaggaggaagtgaaaatccctcttgtcaacatttccctcctgcctaaggacgctcagttatctctgaatacccttgacctacagctagagcatggcgacatcaccctcaaaggctacaacttaagcaaaagtgctttactacgttccttccttatgaattcacaacacgctaagatcaaaaaccaggcaatcatcactgacgagaccaacgacagcctggtagctcctcaggagaaacaggtgcacaagagcatactcccgaatagcctgggcgtatctgagcggctgcagaggctgacattccccgctgtgtctgtgaaagtgaatggccacgatcagggccagaacccccccctagacctggagacgaccgcgcgcttcagggtcgaaacacacacccagaaaacgatcggagggaacgttaccaaggagaaaccgccaagcctcatcgtgccactagaatctcagatgacaaaagagaagaaaattacaggtaaagagaaagaaaattctcgaatggaagaaaatgcggagaaccacatcggagtcaccgaagttctgctcggcagaaaattgcagcactataccgattcttacctgggctttttgccctgggaaaaaaagaagtacttccaggatctccttgacgaagaagaatcgttgaaaacacaactggcatattttacagacagtaagaacacagggcgtcagctgaaggatacctttgccgacagcttgaggtacgtgaataagattcttaactcaaaattcggattcacaagcaggaaagtgccagcccatatgccccatatgattgataggattgtgatgcaggagttgcaagatatgttccccgaagaattcgacaagacctcctttcacaaggttagacactctgaagatatgcagttcgcctttagctacttctactacctgatgtctgccgtgcaacctctgaacattagccaggtgttcgatgaggtggataccgaccaatccggtgtgcttagcgatcgggaaatccgaacactagcaacaaggattcatgaactgcccctgtctctccaggatctgactgggctcgagcacatgcttatcaattgctctaagatgcttccagcagacatcactcagctgaataatatcccacctacacaggaaagctattatgatcccaatctcccacccgtcacaaagtccttggtcactaactgcaagccggtcaccgataaaatccataaggcctacaaggacaagaacaagtaccggtttgagattatgggtgaggaagagatagcattcaagatgattcggaccaatgtgagtcatgtggttggtcagttggacgacatcaggaagaatccaagaaaattcgtgtgtttgaacgacaacattgatcacaaccataaagatgcccaaaccgtaaaggctgtcctgcgtgacttctacgagtccatgtttcctatacccagccaatttgagttacctagggagtaccggaatcggtttctgcacatgcacgaactccaggagtggagggcctatcgcgataagctgaaattttggactcattgcgtgctagcaacactgattatgttcacgatcttctccttctttgctgagcagctgatagcacttaaaaggaagatcttcccaagacgaagaatccacaaagaagctagtccgaacagaatccgcgtt

SEQ ID NO: 16929 - DNA, 3768 bp, synthetic construct
  misc_feature 1..3768: note = source = /note="Description of Artificial Sequence: Synthetic coding sequence"
  source 1..3768: mol_type = other DNA
atgttgtttaaactccttcaacgtcaaacttacacttgcctgtcgcaccggtacggactgtatgtctgctttctgggcgttgtggtgaccatagtttcggcatttcaattcggagaagtggtccttgaatggtcgcgggaccaataccatgtgctgtttgacagctaccgggacaacatagcgggtaaatcgtttcaaaaccggctgtgtctgcccatgcctatagacgtggtgtatacctgggtgaatggcaccgacctggagctgctcaaggaactgcagcaagtgagagaacaaatggaggaggaacagaaggcgatgcgagaaattctgggtaagaacaccaccgagccgaccaagaagagtgagaagcaactggaatgtctgctgacgcactgcatcaaagtgccaatgcttgtcctggaccctgcactgcccgcaaacatcaccctgaaggatctccctagcctctacccctcgttccattcggcaagcgatatctttaatgtggccaaacctaagaaccctagcaccaacgtgtcggtggtggtgttcgactcaaccaaggacgtggaggatgcgcatagcggcctgctgaaaggaaactccaggcagactgtgtggaggggttaccttactactgacaaggaagttcccggacttgtcctgatgcaggatcttgcctttttgtcgggatttcctccaaccttcaaggaaactaatcagcttaagactaaactgcccgagaacctctcttcgaaggtgaagctgcttcaattgtacagcgaagcgtcagtggccttgctgaagctcaacaaccctaaggatttccaagaactgaacaaacagaccaaaaagaacatgaccattgatggcaaggaactgactatctccccagcatacctcctgtgggacctctcggccatctcccagtccaagcaggatgaggacatctcggcatcaagatttgaggacaatgaggaacttcgttacagccttcgatcgattgagcgacacgctccttgggtccggaacatctttatagtgacgaatggacagattccttcgtggttgaacctcgataaccctagagtgaccattgtgactcatcaggatgtgttcaggaacctctcgcatcttcctactttctcatcccctgcaattgaatcgcacattcaccgaatcgaagggctctcacaaaagtttatctacctgaatgatgacgttatgttcggaaaggacgtgtggccagatgatttctacagtcactcaaaaggccagaaagtgtacctcacttggccagtccctaattgtgccgagggctgccccggaagctggatcaaagatggatactgtgataaggcttgtaacaattccgcctgtgactgggacggaggcgattgctcaggcaactcgggaggctcccgttacattgcgggaggtgggggaactgggtcaattggagtgggccaaccttggcaattcggtggtggtataaactcggtatcgtactgtaaccaaggttgtgcaaactcgtggctggcagacaagttttgcgatcaagcctgtaacgtcctttcatgcggatttgacgccggggattgcgggcaggaccatttccatgaactctacaaggtgattcttcttcctaaccaaacgcactacataattccaaaaggagaatgccttccctacttcagctttgcagaagtcgccaaaaggggagtggaaggggcctacagcgataatccaattatcagacatgccagcattgcaaacaagtggaaaacgatccatctgatcatgcattcgggaatgaatgcaaccactatccactttaacctcaccttccaaaacaccaatgatgaggaattcaagatgcaaatcaccgtggaggtggataccagggaaggtcccaagctcaacagcactgcacaaaaggggtacgagaatctcgtgtcacctatcaccctcctgcctgaagccgaaatcttgttcgaggatatcccaaaggagaagagatttccaaagttcaagcggcacgatgtgaactcaactagacgtgcacaggaagaggtcaaaattccacttgtgaacatttcactgctgcccaaagacgcacaactttccctgaataccctggatctgcagcttgaacacggtgatattaccctcaaaggctataatcttagtaaatccgcgctgctgcggtctttcctgatgaacagccaacatgccaagattaagaaccaggcgatcataacggatgaaactaacgacagccttgttgccccccaagaaaagcaggtgcataagtcaatacttccaaactcccttggtgtgtctgaaagactccaacgtcttacttttcccgcagtctcggtgaaggtgaacggacatgatcagggacaaaatccaccccttgatctggaaaccactgcgaggtttcgtgtggaaacccatacccagaaaactattggcggaaacgtgaccaaggaaaaaccaccttccctgatagtgcccctggaatcccaaatgaccaaagagaagaaaatcaccggtaaggagaaggaaaactcgcgcatggaggagaatgcagagaatcacataggagtgactgaagtccttctgggacgtaagctgcaacattacactgactcataccttggttttctcccctgggagaaaaagaaatactttcaagatctcctggacgaggaggaaagccttaagacgcaactggcgtactttaccgattcaaaaaacacgggcagacaactcaaggataccttcgcggattcgctccgatacgtgaacaaaattcttaattccaagtttgggtttacctcgaggaaagtgccggcccatatgcctcatatgatcgaccgaattgtcatgcaggagttgcaagacatgtttccagaggaatttgacaagacttccttccataaggtgcgccacagcgaggatatgcagtttgctttttcttacttttactacctcatgtcagcagtgcaacctcttaacatttcccaggtgtttgatgaagtggataccgaccagagcggtgtgctgtcggaccgcgaaattaggaccctggccactcggatccatgaacttcctctttccctgcaagatctgaccggactcgagcacatgctcattaactgttctaaaatgctgcctgcagacattactcaactgaacaacattcctcctacccaagaatcctactacgatcctaatcttcctccagtgactaagtccctcgttacgaactgtaagccagtgaccgataagatccacaaggcgtacaaggacaagaacaagtaccggtttgagatcatgggtgaagaagaaatcgcttttaagatgattagaactaacgtgtcccatgtggtgggtcagctcgatgatattcgcaagaatcctcgaaagtttgtctgtctcaacgataacattgatcacaaccataaagacgcccagacggtgaaggctgtgctgcgcgatttctacgagagcatgtttcctattcccagccagtttgagcttcctagggaatacagaaatagatttctgcatatgcacgaactccaggaatggcgggcctaccgggataagctgaagttctggactcattgtgtcctcgccaccctcattatgtttaccatcttctcattcttcgcagaacaactgatcgccctcaagcgaaagatattcccgcgaagaaggattcacaaggaagcatcgcctaatcgtatcagagtg

SEQ ID NO: 16930 - DNA, 3768 bp, synthetic construct
  misc_feature 1..3768: note = source = /note="Description of Artificial Sequence: Synthetic coding sequence"
  source 1..3768: mol_type = other DNA
atgctgttcaaactgcttcagagacagacctacacttgccttagccatcgctacggactttacgtgtgctttctcggcgtggtggtgactatcgtgagtgcattccagtttggcgaagttgtgctcgaatggtcccgagatcagtaccatgtgctcttcgatagctaccgtgataacattgcaggcaagagcttccaaaataggctttgcctgcctatgcctatagatgtggtgtatacctgggtgaacggcactgaccttgaactgctgaaagaactccagcaggtgcgcgaacaaatggaagaggaacaaaaagcgatgagagaaatcctcggaaagaacactactgaacctaccaagaagtcggagaagcaactcgagtgtctgctcacgcactgtattaaggtgcccatgctcgtccttgatcctgctctcccggcaaacattaccctgaaagaccttccttcactctacccatcctttcattccgcatcagatatcttcaacgtggcaaagcctaagaacccgtccaccaacgtgtctgtggtggtgttcgattcaactaaggacgtggaagatgcgcacagcggactcctgaaaggaaactcacgtcaaaccgtctggcgtggatacctgactacggataaagaggtccccggtctggtgcttatgcaagaccttgctttccttagcggctttcctccaactttcaaggaaactaatcaactgaaaactaagctgcccgaaaatctgagctcaaaggtgaagctgttgcaattgtacagcgaagcgtcggtcgcactgctgaagttgaataaccccaaggatttccaggagctgaacaaacaaaccaagaaaaacatgacgattgacggaaaggagcttacgatcagccctgcataccttctgtgggatctgtcagcaatttctcagtcaaaacaagatgaggatatctcggcatccagatttgaagataacgaggaattgcgttactcgctccggtcaatcgaaaggcatgcaccatgggtccgcaacatctttatcgtgactaacggtcagattccttcctggttgaatcttgataacccgagagtgacgattgtgactcatcaagatgtgtttaggaacctctcgcacctccctacctttagttcgcctgcgattgaatcgcatatccaccgcatagaaggacttagccaaaagttcatctacttgaacgatgatgtgatgttcgggaaggatgtgtggcctgacgatttctactcgcattccaagggacagaaggtctacctgacctggcctgtgcctaactgtgcagaaggatgtccaggttcgtggattaaggatggctactgtgacaaggcatgtaacaattcagcatgcgattgggatggcggtgattgttcaggaaacagcggcggatcgagatacatcgccggaggaggtggtaccggctcgattggtgttggccaaccgtggcaatttggaggaggtattaactcggtcagctactgcaaccaaggatgtgccaattcttggctggcagataagttttgtgaccaagcgtgtaatgtgctgtcctgtggttttgatgcaggagattgcgggcaggatcatttccatgaactctacaaggtgattctgcttccaaatcaaactcattacattatccccaagggtgagtgccttccttacttctcgttcgcagaggtggccaaaagaggagtggaaggggcatacagcgataacccaatcattagacatgccagcatcgccaataagtggaaaacgattcatctgattatgcatagcggaatgaacgccaccactatacactttaatcttacttttcaaaataccaacgatgaggaattcaagatgcaaattaccgtggaagtggatactcgggaaggacctaaacttaattccaccgcacagaaaggttacgaaaacctggtgtcccccataactctcctgccagaagcagaaatccttttcgaggatatccctaaagaaaagagatttccaaagttcaaaaggcatgatgtgaatagcacccggcgcgcacaggaagaagtgaagatccccctggtgaacatctccctcctgccgaaggacgctcagctgtcactgaacaccctggatcttcagcttgagcatggggatataacgctgaaaggatacaatctttcgaagtccgcacttcttcgctcatttttgatgaattcccaacacgccaagattaagaatcaagccatcataaccgacgaaaccaatgattcgttggtggccccccaagaaaagcaggtgcataagtcaatccttccgaattcattgggagtctcggaaaggctccaacggcttacttttcctgccgtctcggtgaaggtcaatggacacgatcaaggacagaacccacccctggatctggagactaccgcaagattcagagtggaaacccacacgcagaaaactattgggggtaacgtgactaaggaaaagccaccatcgctgattgtacctcttgaatcccaaatgactaaagagaaaaagatcaccggtaaggagaaagagaattcccgcatggaggaaaacgcagaaaatcatattggggtgaccgaagtgctccttggccgaaaacttcaacactacaccgattcgtacctgggattccttccttgggagaagaagaaatactttcaggatctgctggatgaggaggaatcccttaaaacccagctggcatacttcaccgattccaagaacaccggacgtcaattgaaggatactttcgcagattcgttgcgatacgtgaataagatcttgaactcgaaatttggttttacctcgaggaaggtccccgcgcatatgccacatatgatagatcgcattgtgatgcaggaactgcaagatatgtttccggaagagttcgacaagactagctttcacaaggtgcggcacagcgaagatatgcagttcgctttttcgtacttttactacctgatgtctgcagttcaacctcttaacatcagccaggtctttgatgaggtggatactgatcaatctggagtgcttagcgacagagagatacgcactctggcaactcgtatacatgaactccctcttagcttgcaagaccttaccggactcgaacatatgctgattaactgttcgaagatgcttccagcagatataactcaactgaacaatattcctcccacccaggaatcgtactacgaccccaaccttcctccagtcaccaagtcgctggttaccaattgtaagcctgtgactgacaaaatccataaggcatataaggataagaataagtaccggtttgagattatgggagaggaagaaattgcttttaagatgattcgcactaatgtgtcccacgtggttggacaacttgatgatattcgaaaaaacccccgcaaatttgtgtgtctgaacgataacatcgatcataaccataaggacgcacagacggtgaaagcggttctgagagatttctacgagtcaatgtttcccatcccatctcagtttgaacttccaagagagtacaggaaccgcttcctccatatgcatgaactccaagagtggagagcataccgggataaactgaagttttggacgcactgtgtgctggcaactctgattatgtttactattttcagcttctttgcagagcagcttatcgcacttaaacgcaagatattccctcggcgacggattcataaggaagcgtcaccgaaccggattagagtt

SEQ ID NO: 16931 - DNA, 3768 bp, synthetic construct
  misc_feature 1..3768: note = source = /note="Description of Artificial Sequence: Synthetic coding sequence"
  source 1..3768: mol_type = other DNA
atgctgttcaaactgctccaacgacaaacctacacttgcctctcacacaggtacgggctgtatgtgtgttttctgggggtggtggttactatcgtgtccgctttccaattcggtgaggtcgtcctggaatggtcccgtgaccagtaccacgtcctcttcgattcttaccgcgacaacatcgcgggtaaatcatttcagaatagactgtgcctgccaatgccaatcgacgtggtctacacctgggtgaacggaaccgatctggagctgctgaaggagcttcagcaggtccgcgaacagatggaagaagaacagaaagccatgagagaaattctgggaaagaatactactgagccaactaaaaaatcagaaaagcaactcgaatgcttgctgacccactgtatcaaggtgccgatgctggtcctggacccagccctgccggctaacatcacccttaaagacctgccttccctgtacccgtcgttccactcagcttcggatatcttcaatgtggcgaaaccgaagaaccccagcaccaacgtgtcggtggtcgtttttgattcgactaaggacgtggaggatgcccacagcggccttctgaagggaaactcccgccagaccgtgtggcgcggatacttgactacggacaaggaggtgccgggcttggtcctcatgcaggacctcgcattcctgtccggatttccacctaccttcaaggagacgaaccagctcaagaccaagctccccgaaaatctcagcagcaaggtgaagctgctgcagctctacagcgaagctagcgtggcgctgttgaaactgaataacccgaaggacttccaagaactcaacaaacagactaagaagaatatgacgatcgacggaaaggaactgaccatttcgccagcttacctgttgtgggacctgtccgccatctcacagtcaaagcaggacgaagatatctccgcttcgagatttgaggataatgaagagctccggtattccctgcggtcgatcgaacggcacgccccttgggtgcggaatatcttcatcgtgactaacggccagatcccgtcttggctgaacctggacaacccacgcgtgaccatcgtcactcatcaagatgtgttcagaaatctttcccatctgcccaccttctcgtccccggcgatcgaatcacacatccaccggattgaaggactctcgcaaaagttcatctaccttaacgacgatgtgatgttcggcaaagatgtgtggcctgacgacttctatagccatagcaaggggcagaaggtttacctcacctggcccgtgccgaactgtgccgagggttgccctggatcctggataaaagacggctactgcgataaagcatgcaacaactcggcgtgtgattgggacggaggagactgcagcggaaattcaggaggatcacggtatatcgctgggggaggagggactggctccatcggagtgggtcaaccttggcaattcggcggcggaatcaactccgtgtcctactgcaaccagggatgcgcaaacagctggttggccgataagttttgcgaccaagcctgtaatgtcctgagctgcgggttcgacgcaggagattgcggacaagaccacttccacgaactttacaaggtgatcctgctgccgaaccaaacccactacatcatcccgaagggcgagtgtctgccgtacttctcgttcgcggaagtggccaagagaggagtggaaggagcctacagcgacaaccctatcatcaggcacgccagcatcgccaataaatggaaaacgatccatttgatcatgcactcgggcatgaatgccaccactatacatttcaatctgacgttccaaaataccaacgacgaggagttcaagatgcaaatcactgtcgaggtggacactcgagaagggccgaagctcaacagcactgcccagaaaggttacgaaaatctggtgtcaccaatcacgctgctgccggaggcagaaatcctctttgaggacattccaaaggaaaaacggttccccaagtttaagcggcatgacgtgaattcgactagacgggcgcaggaggaggtcaagattccacttgtgaacatctccctgctcccgaaggatgcacagttgtcgctcaacacccttgatcttcagcttgagcatggagatatcaccctgaaaggctacaacctgagtaagtccgcactgctgaggtctttccttatgaactcccagcacgccaaaatcaagaaccaggcaattatcaccgacgaaaccaacgatagtctcgtggcaccgcaggaaaagcaggtgcataagtccattctcccgaattccctgggcgtgtcagagcggctgcaacgcctcaccttcccggctgtctcagttaaggtgaatggtcatgatcaagggcaaaaccctccgctggacttggaaacgaccgcccgctttcgggtcgaaacccacactcaaaagactatcggcggaaacgtgaccaaagagaagccgccttcgctgatcgtgccactcgaatctcagatgactaaagagaagaaaatcacgggcaaagaaaaggaaaactcgcggatggaagagaacgccgagaatcacattggggtgaccgaagtgctcctcggccgcaaactgcagcattacacggactcatacctgggattcctgccgtgggagaaaaagaaatacttccaggatctgctcgacgaagaggagtcccttaagactcagttggcgtacttcactgactcgaagaatactggtagacagctcaaggacaccttcgccgattcgttgcggtacgtcaataagatcctcaactccaagttcggatttactagccgcaaggtcccagcccatatgccgcatatgatcgatcgcattgttatgcaggaactgcaggacatgttccccgaagaatttgataagacctcgtttcacaaggtccggcacagcgaggacatgcagttcgcgttctcctacttttactacctcatgagcgcggtccaacccctgaacattagccaagtctttgacgaggtcgatactgaccagtcgggagtgctgtcggaccgcgaaatcagaaccctcgctacccggattcatgagctgccgctctcgctccaagatttgaccggtctggagcacatgctgatcaactgctcaaagatgctgccggccgacatcacccagctgaataatattccaccaactcaggaaagctactacgatccgaatttgccacctgtcaccaagtcactggtcaccaactgcaagccggtgactgacaaaatccacaaggcatacaaagataagaataagtaccgcttcgaaatcatgggagaagaggagatcgcgtttaagatgatccgtactaacgtgtcgcacgtagtcggacagttggacgatatcaggaagaacccgaggaagttcgtgtgcctgaacgacaacattgatcacaaccacaaggacgcgcagaccgtgaaggccgtgcttcgcgacttctacgagtcgatgttccctatcccttcccaattcgaactgccccgcgagtatcggaaccgctttcttcatatgcacgagctccaggaatggcgagcttacagggataagctcaaattctggactcattgcgtgctcgcaactctgatcatgttcaccattttcagctttttcgcagagcagctgatcgccctcaagagaaaaatcttccctcgccgcagaatccataaggaagcgtccccaaaccgcatcagagtg

SEQ ID NO: 16932 - DNA, 3768 bp, synthetic construct
  misc_feature 1..3768: note = source = /note="Description of Artificial Sequence: Synthetic coding sequence"
  source 1..3768: mol_type = other DNA
atgttgtttaaacttctccaaaggcagacctatacatgtctgtctcacagatacggcctctatgtgtgttttctcggagtcgtggtgactatcgtcagcgccttccagttcggcgaggtcgtattggaatggtcaagagatcagtaccacgttcttttcgacagctacagggataacatcgctggaaaaagcttccagaacaggctatgcctccccatgcccatcgacgtggtgtatacatgggtaaacggcactgacttggaactgttgaaggagcttcagcaagttcgggaacagatggaagaggagcagaaggccatgagagagatcctgggcaagaacacgacagagccaactaagaaaagtgaaaaacaactcgaatgtctgctgactcattgcatcaaggtcccgatgctcgtgctggatcctgccctgccggcaaatataacccttaaggatctgccaagcctttacccctcgtttcatagcgcttccgacatatttaacgtagctaagcctaaaaacccatctacgaatgtttccgtggtggtgtttgacagtaccaaagacgtggaagatgcgcatagcggcctgctgaagggcaatagccgacagacggtgtggcgcgggtacctcacaactgacaaagaagtgcccggcctggtactgatgcaggacctcgcttttttgtccggattcccgccaacgttcaaagaaactaatcaactcaagacgaaactcccggaaaacttatcctctaaggttaagcttctgcagctgtactcagaggcaagtgtggcactgctgaagctgaacaatcctaaagattttcaggagttaaataaacagactaaaaagaatatgacaatcgacggcaaggagctgaccatctcccctgcttacttgctgtgggatttatccgccatctcacaatcaaagcaggatgaggacattagcgcctcaaggtttgaggacaacgaagagctcaggtatagcctgagatcgattgaacggcatgccccctgggtgcgcaatatctttatcgttaccaacgggcagattccctcctggctgaatttggacaatcctcgcgtcacaatcgtgacccaccaggacgttttcaggaatctaagtcacctcccaacgttcagcagtcccgcgatcgaaagtcacatccacaggatcgaggggctgtcccagaagtttatttaccttaacgatgacgtgatgtttgggaaagacgtatggccagatgatttttacagccactcaaaggggcaaaaggtctacctcacatggccagtgccaaattgtgccgagggatgtcccggtagctggatcaaggatggatactgtgataaggcctgcaataattcagcttgtgactgggatgggggggactgttccggcaattccggaggaagcaggtatattgccgggggtgggggtactggctctatcggggtcggtcaaccctggcagttcgggggaggcatcaatagcgttagctattgcaaccagggttgtgccaactcctggcttgcggacaagttctgtgaccaggcctgtaatgtcctttcgtgcggcttcgacgccggcgattgtgggcaggaccattttcacgaactttataaagtgatacttctgccaaatcagacacattatatcattcccaaaggggagtgcttaccatacttctcctttgccgaggtggccaaaaggggcgtggaaggcgcttacagcgataatccaattattcgccatgcgtcgatcgctaacaagtggaagacaattcatcttattatgcattcgggaatgaatgctaccactatccatttcaacctgactttccaaaatactaacgatgaggagttcaaaatgcaaatcaccgttgaggtggacaccagagaaggccccaagctgaacagcactgctcagaaaggctacgaaaacctggtgagccctatcacgctacttccagaggctgaaatcctcttcgaagacatcccaaaagagaaacggtttcccaagttcaagaggcacgacgtcaacagcacaaggcgagcacaggaggaagttaagattcctctggttaatatttctctcttgcccaaagacgcccagttatctctcaatacactggacctgcagcttgagcacggcgacataacactcaagggttataatttgtccaagagcgctctgctaaggagctttctaatgaactcccagcacgccaaaataaagaaccaggccataatcactgacgagacgaatgactcacttgtggcaccacaagaaaaacaggtgcataagtcaatcctgcccaacagcctcggcgtttctgagagactgcagcgactgacgtttccagccgtgtctgtgaaggtgaacggacatgaccagggacagaatccaccactcgatctcgagaccaccgccagattccgtgttgagacgcatacacaaaagaccattggagggaacgtgacgaaggagaagcccccatccctgattgtaccccttgagagccagatgaccaaagaaaaaaaaataacaggaaaagagaaagagaatagtcgcatggaagagaatgcagagaaccacatcggggtcaccgaggtgctgctcggaagaaagctccaacactatactgactcatatctggggtttttaccttgggagaaaaagaaatacttccaagacctcttagacgaagaggagtcactgaaaacacagcttgcttactttactgatagtaaaaacacaggacgacaacttaaagataccttcgcggactccttgcggtacgtaaacaaaatcctgaatagtaagtttggattcaccagtcggaaagtcccagctcacatgcctcacatgatcgataggatcgttatgcaggagttgcaggacatgtttcctgaagaattcgataagacctcctttcataaagtcaggcacagcgaagatatgcagttcgccttttcttatttttattatctgatgtccgccgtccagcctcttaacatcagtcaggtttttgacgaagtcgacacagatcagtctggggtcctctccgacagggagataagaacactagccacccgaattcatgaactgcccttatccttacaggatctcacggggcttgaacacatgctgattaattgctcaaagatgctgcccgctgatatcacacaactcaataatatacctcctacccaggaatcttactatgacccaaacctgcctcccgttactaagagcctggtcaccaattgtaagcccgtcaccgataagatacacaaggcctataaagacaaaaacaaatatcgatttgagatcatgggcgaggaggagatcgcgtttaagatgattcgcacgaacgtaagccacgtggtgggtcagcttgacgatattcgtaagaacccccggaagttcgtatgtctgaacgataacatcgatcataaccacaaggacgctcaaactgttaaggccgtcttgagagatttctatgaaagtatgttccccattccatcacaatttgagctgcctcgtgaatatcggaatcggttcttgcacatgcacgagctacaggaatggcgtgcatatagagataagctgaagttttggacccactgcgttctggccacactgataatgttcactatctttagttttttcgcggaacagctgatagctttgaagaggaagatcttcccaagacgcaggattcataaggaagcctctccgaaccgtatccgcgtg

SEQ ID NO: 16933 - DNA, 3768 bp, synthetic construct
  misc_feature 1..3768: note = source = /note="Description of Artificial Sequence: Synthetic coding sequence"
  source 1..3768: mol_type = other DNA
atgttgttcaagctgctgcagcgacagacatatacttgcctgagccaccgctacggactgtatgtttgcttcctcggcgtcgtcgtcacaattgtctccgctttccaatttggagaggtggtacttgagtggtcacgagaccagtaccacgtcctgtttgatagttatagggataatatcgcagggaagtccttccagaatcggctctgtctccctatgccgatcgacgtcgtatatacttgggtgaacggaaccgatctcgagctcctgaaggagctccagcaagttagggagcagatggaggaggagcagaaggccatgagggagatactgggcaagaacaccactgaacccactaaaaagtcggagaaacagctggagtgcttactgacccactgtatcaaagtgccgatgctcgtgcttgacccggcccttccggccaatataactctgaaggatctgccatctctctacccttcgtttcactctgcctctgatattttcaacgtggccaaacccaaaaatccatccacgaatgtgtctgtggtagtgttcgattcaactaaggatgtggaagatgcgcatagcggccttctgaaaggaaactctaggcagacagtgtggcggggttacttgaccactgataaggaggtaccaggtcttgtgttgatgcaagacctggctttcctctcaggattcccccctacctttaaagaaacaaatcagctgaaaaccaagctgcccgaaaacctgagcagcaaggtaaaactgctgcaactctactctgaggccagtgtggctctcctcaagctgaacaaccctaaagacttccaggaacttaacaagcagactaagaagaacatgacgattgacggtaaagagctgacaattagccccgcttatctgctgtgggacttgtccgctatttctcagtcaaaacaagacgaggacatctcggccagccggtttgaggacaatgaagaacttaggtacagcctgaggagcatcgagcgtcatgcaccttgggtgaggaacatttttattgttaccaatggtcagatccctagttggctgaatttggataacccacgagttactatcgtcacacaccaggatgtcttccgtaatctgagtcacctgcccaccttcagtagtcccgctatcgaaagccacatccaccgaatagaaggactctcccagaagttcatatatctgaatgacgacgtcatgtttggcaaggacgtttggcccgatgacttctatagtcatagtaagggccagaaggtatacctgacttggcctgtcccgaattgtgcagaagggtgtcccggaagttggataaaggacggatactgtgacaaagcatgtaacaattctgcctgcgactgggacggcggagattgctccggaaactcaggcggtagtagatacattgcaggtggggggggcaccggatctatcggagttgggcagccttggcagttcggtggcggaatcaatagcgtgagttattgcaatcaaggctgcgccaattcgtggctagcagacaaattctgtgatcaagcctgcaacgtcttaagctgtggatttgacgctggggattgcggacaggaccattttcacgagctgtataaggtcatcctgttgcctaaccagacccattacataattccaaaaggggaatgtctaccctacttctcctttgccgaggtggccaaaagaggtgtcgagggggcgtactctgacaacccgattattaggcatgctagcattgccaataagtggaagacaatccacctgattatgcactccggcatgaatgccactacaatccactttaacctgacgtttcagaacaccaacgacgaggagtttaagatgcagattacagtggaggtggacactcgcgagggacctaagttgaattctactgcccagaaaggctacgaaaaccttgtgagcccgatcaccctgctgccagaagccgaaattctgttcgaggacatccccaaggagaagaggttcccgaagttcaaaagacacgacgtgaatagtactagacgggcacaggaggaagttaaaatcccattggtgaatatctctctgctccccaaggacgcccagctttctctaaacaccctggacttacagctggagcacggcgacattacattgaagggatataacttgtcaaagagcgcactgcttaggagtttcctgatgaactcacagcatgcaaaaataaaaaaccaggccataatcacagacgagacaaacgactctttggttgctccccaggagaaacaagtgcacaagtctattctgccaaactcactgggcgtctcagagcgcctccagcgcctaactttccctgccgtctcggtgaaggttaacgggcacgatcagggccagaatcctcctctggatctggagactaccgcccggttccgggtggaaacccatacccagaagaccataggaggaaacgtgactaaggagaagccgccatcactcattgtccctctggagtcccagatgacaaaggagaagaagattacaggaaaggagaaagagaattcacggatggaggaaaatgcagaaaaccacatcggtgtgacagaggttctgctgggaagaaagctgcagcattatactgatagttatctgggcttcctgccatgggagaagaaaaagtatttccaggacctactagacgaggaggagagcctgaaaacacaattggcatattttaccgacagtaagaacaccggcagacagctgaaggacacattcgccgacagcctgaggtacgtcaacaagattttaaacagtaagttcggctttacctctcgcaaggtgccagcacatatgcctcatatgatcgatcggattgtgatgcaggagctgcaggatatgtttcctgaagagttcgacaaaacctcattccacaaagtccgccactcagaggatatgcagttcgccttttcctacttttattatctcatgtccgctgtgcagcccctcaatataagtcaggtgttcgacgaagtggataccgaccaatctggagtgttgtcagatagagaaataaggactcttgcgaccaggatccacgagcttccattatctctgcaagacctgacaggactggaacacatgctgataaattgctcgaagatgctgcccgcagacataacacaattgaacaatattccccccacccaagaaagttattatgaccccaatctccctccggtgaccaagtcactggttacgaactgtaagccagtgacagataaaattcacaaggcttataaggataaaaataagtaccggtttgagataatgggtgaggaggaaatcgccttcaaaatgatccgcactaatgttagtcacgttgtcgggcagctggatgacatccggaagaacccccgcaaatttgtctgcctgaacgacaatatcgatcacaatcacaaggacgcccagacagtcaaggcagtgttgcgagatttctatgagagcatgttcccaattccttcccaattcgagctccctagggaatacagaaaccggttcctccacatgcacgaactgcaggaatggagggcctatagggataaattgaaattttggacgcattgcgtactcgcaaccctgatcatgttcacgatctttagtttcttcgctgagcaattgatcgccttgaaaaggaagattttccccagacgccgtatccataaagaagcaagccccaatagaatcagagtg

SEQ ID NO: 16934 - DNA, 3768 bp, synthetic construct
  misc_feature 1..3768: note = source = /note="Description of Artificial Sequence: Synthetic coding sequence"
  source 1..3768: mol_type = other DNA
atgctcttcaaacttcttcaacggcagacgtacacctgtctctcgcacagatacggactgtatgtgtgctttctcggggtggtggttactatcgtgtccgcgttccaattcggagaggtggtgctggagtggtcgcgggatcaataccatgtgctctttgacagctatcgtgacaatatcgccgggaagagtttccagaatcggctctgtctcccaatgcctatcgatgtggtctacacctgggtcaacggaactgacctggagctcctgaaagaacttcaacaggtgagagagcagatggaagaggagcagaaggcaatgagggagatcttggggaagaacaccactgagcctaccaagaagtcggagaagcagttggagtgcctgctgactcattgcatcaaagtgccgatgctggtgctggacccggcactgcccgcgaacattactttgaaggatcttccgtccctctacccatcctttcactccgcctcagacatcttcaacgtcgcaaagcctaagaatccttccacgaacgtgtcggtggtggtgttcgattcgactaaggacgttgaggacgcgcactcaggattgctgaaaggaaactcgagacagaccgtttggcgcggatacctgactactgataaagaggtgcccgggctggtgctgatgcaggacctggccttcctgtcaggattcccaccgactttcaaagaaaccaaccaactcaagaccaagttgcctgaaaatctgtccagcaaagtgaagctgctgcaactgtactctgaagcctccgtcgcgttgctcaagctgaacaatcccaaggacttccaggaactgaacaagcagaccaaaaagaatatgaccatcgacggcaaggaactgaccatcagcccagcctacctcctgtgggatctgtcagcaatttcacaatcaaagcaagatgaggacatctccgcgtcgcgcttcgaagataacgaggagctgagatacagcttgcgctccattgaacgccatgccccctgggtccggaacattttcattgttactaacggacagatcccgtcatggctgaatttggacaatccacgcgtgaccatcgtgactcaccaagacgtgttccggaacctctcgcacttgccgaccttctcgagcccggcaatcgagagccatatccatcggattgagggtctgtcacaaaagttcatctacctgaacgatgacgtgatgtttggcaaagatgtgtggccggacgacttctacagccactcgaaaggacagaaggtttacctcacctggccggtgccgaactgtgccgaaggatgcccgggctcttggattaaggacggatattgtgacaaggcttgcaacaactctgcctgcgactgggacggaggtgactgctcggggaactcaggcggaagccgctacattgctggaggtggaggtaccggatcaatcggagtgggccagccatggcagttcggcgggggcatcaactccgtctcctactgtaaccagggatgcgctaactcctggctcgctgacaagttttgcgaccaagcctgcaatgtcttgtcctgcggatttgatgcgggagactgtggccaagatcacttccatgaactgtacaaggtgatcctgctgccgaaccaaacccactatatcatccctaaaggggaatgcctcccgtacttctcctttgctgaagttgccaagcggggtgtggagggtgcatattccgataatcctatcatccggcacgctagtatagcgaacaaatggaaaaccatccatctgattatgcacagcggaatgaatgctaccaccatccacttcaacttgacttttcaaaatactaacgacgaggaattcaagatgcagatcactgtggaggtcgacactcgcgagggccctaaactcaattctaccgctcaaaagggatacgagaatctggtgtcgcctatcaccttgctcccggaggcggaaatcctgttcgaggacatacccaaagagaagagatttccaaagttcaaaagacacgacgtgaactcgacccgcagggctcaagaggaagttaagatccctcttgtcaacatttcgctgctcccaaaggacgcgcagttgagcctgaacaccctcgaccttcagctggagcacggagacattaccctgaagggctacaacctctcgaagtccgcgttgttgcggtccttcctcatgaactcccagcatgcaaagatcaagaatcaggccatcatcaccgatgaaaccaacgattccctcgtcgctccacaggaaaagcaagttcataagagcattctgcccaattcgttgggagtaagcgagcgactgcagagattgactttcccggcagtcagcgtgaaggtgaatggtcacgaccagggacaaaatccgccgcttgaccttgagacgacggcgcgctttcgggtggaaactcacactcagaaaactatcggaggcaatgtcactaaggaaaagccaccgtccctgatcgtgccgctggagtcccaaatgacgaaagagaaaaagattaccggaaaagaaaaggaaaactcgcgcatggaagaaaacgccgaaaatcacatcggagtgaccgaggtgctcctggggcggaagctgcaacactacactgacagctacctgggatttctcccctgggagaagaagaagtactttcaggacctcctcgatgaagaggagtcacttaaaacgcagctggcctactttacggattcgaaaaacacgggccgccagttgaaggacactttcgctgactctctgaggtacgtgaataagatcctgaactcaaaattcggattcacttcgcgcaaggtgccagcacatatgccgcacatgatcgatcgcatcgtgatgcaggaactgcaggatatgtttcccgaagaatttgataagactagcttccacaaagtgcgccactcagaagatatgcagttcgcattctcctacttttactaccttatgtccgccgtccagccgcttaacatctcccaggtgttcgatgaagtggacaccgaccagtccggagtgctcagcgatagagaaattcggactctggcaaccaggatacatgagctgccgctttccctgcaagatttgaccgggttggagcacatgctgataaactgctccaagatgctgccagccgacatcacgcaactgaacaatatcccgccaacccaggagtcgtattacgatcctaacctgccgccagtgaccaagagcctcgtgaccaattgcaagcccgtcaccgataagattcacaaggcatacaaggacaagaacaagtaccggttcgagatcatgggcgaggaagagatcgcgttcaagatgatccggactaatgtgtcccacgtcgtgggccagctggatgatatccgcaaaaatccccgcaaattcgtgtgcctgaacgacaacattgatcataatcataaggatgcccaaactgttaaggcggtgctccgggacttctacgagagcatgttccccatcccttcgcaattcgaacttccaagggaataccggaacaggttcctgcacatgcatgaattgcaggaatggagagcatacagagacaaactgaagttttggactcattgcgtcttggccaccctcatcatgttcaccatcttctctttcttcgccgagcaactgatcgccctcaagcgcaagatattcccgagacgccgcatacataaggaagcgtcgccaaacagaatccgcgtg

SEQ ID NO: 16935 - DNA, 3768 bp, synthetic construct
  misc_feature 1..3768: note = source = /note="Description of Artificial Sequence: Synthetic coding sequence"
  source 1..3768: mol_type = other DNA
atgctgtttaaactgctgcagagacaaacgtatacgtgcttaagccatcgttatggcctgtacgtatgctttcttggtgtggtcgtaaccattgtctcagcttttcaatttggcgaagtagtacttgaatggtctagagatcagtatcatgtgctgttcgattcttaccgcgacaacatcgctggcaaatcatttcaaaatcgactttgtctgccgatgcctattgatgttgtatatacatgggtgaatggaacagaccttgaactactgaaagaactccaacaggttcgcgagcaaatggaagaagaacagaaagcaatgagagaaatcttgggcaaaaatacgacggaaccgacaaaaaaatcagaaaaacagcttgaatgtcttcttacgcattgcattaaagtgccaatgctagtgcttgatcctgcgttaccggctaatatcacactaaaggacttgccatcattatatccgtcctttcactcagctagcgatattttcaatgtcgccaaaccgaaaaatccttctacaaatgtttcagttgtagtgtttgattcaacaaaagatgtcgaagacgcccattctggtctgctgaaaggtaatagcagacagaccgtttggagagggtatctgactacagataaagaagttcctggccttgtactgatgcaggatttagcttttctatcagggtttccgccaacgttcaaagaaacgaatcaattgaaaacaaagttgcctgaaaacctgtcttcgaaagttaaattgctccaattatatagcgaagcgtctgtagcactgttgaagttgaataaccccaaagatttccaagagcttaacaaacaaacaaagaaaaatatgacgattgacggcaaggagttgactatatcgcctgcgtacttgttatgggatttatcagccatttcacagtctaagcaggatgaggatatcagcgcgtcgcgcttcgaagataatgaagaactgcgatattctttacgttccatcgagcgccatgcgccatgggtgaggaacatattcattgtcacaaacggtcaaatcccctcatggctgaacctggacaacccgcgggtgacaattgtgacccaccaagacgtttttcgtaacttgagccacttaccgacgttttctagcccggctatagaatctcatatccataggatcgaagggctgtcacagaaatttatttatttaaacgacgacgttatgtttggaaaggatgtatggccagatgacttttattcccattctaaaggccaaaaggtgtatcttacatggcctgtgccgaattgcgctgaaggatgtccgggttcctggattaaagacggatactgcgataaagcttgtaacaatagtgcatgcgactgggatggtggggattgttcgggcaactcaggcggaagccgttacattgctgggggcggcggcacgggatcaattggggtcggacaaccgtggcaatttggtggtggcattaatagcgtatcttattgtaatcagggctgtgcgaattcatggttagctgataaattttgtgatcaagcttgtaatgtgttatcttgcggattcgatgctggagactgcggccaggatcattttcatgaattatataaagtaattctgcttccgaatcagacacattacatcatccccaaaggtgaatgccttccgtatttttcatttgccgaagttgcaaaaaggggggtggagggagcatattcagacaatccgatcatccggcatgcgagtattgctaataaatggaagacgatccatttaattatgcatagcggtatgaacgcaactacaatccactttaacctgacatttcaaaacacgaatgatgaagaatttaagatgcaaatcacagtcgaggtcgacacgcgtgaggggcctaaactgaactccacagcccagaagggatatgagaatttggtgtctcctatcactcttctgccagaagcggaaattctgtttgaagatattccgaaagaaaaacgttttccaaagtttaaacgacatgatgtcaatagtacaagaagagcccaggaggaagtcaagataccgctggttaatatatcattgcttccgaaagacgctcagctctctcttaacactttagaccttcagcttgagcatggcgacattacgctgaagggctacaacctctcaaaatcggcattgctgcgtagttttctgatgaatagtcaacatgcaaaaataaaaaatcaggccatcatcactgacgaaaccaacgattcattggtggcgcctcaggaaaaacaagtgcacaaaagcatcctgcctaatagtctcggcgtttcagaacgcttgcagaggttaacctttccggcggtcagtgttaaagtaaatggtcatgaccaaggccagaatccaccgctggatcttgaaacgacggcaagatttcgagttgaaacgcacactcaaaagacgataggcggtaatgtaacaaaagaaaaaccgccgtcacttatcgtgcctctcgaatcacagatgacaaaagaaaaaaaaattacgggaaaagaaaaagagaatagccgtatggaagaaaatgcggaaaatcacataggagttacagaggtcttactgggacgaaaattacaacactatacagatagttatttaggatttctgccgtgggaaaaaaaaaaatactttcaggatcttctcgatgaagaagaatcattaaaaactcagctggcctactttactgactccaaaaatacgggaaggcaactcaaagatacttttgcagattctttacgttatgtaaacaagattctgaactctaagtttggctttacaagtcgtaaggtcccagcacatatgccgcatatgatcgaccgtattgtgatgcaagaattgcaagatatgtttccggaggaatttgacaaaacaagcttccataaagtgcgccatagtgaagacatgcagtttgcgtttagctatttttattaccttatgtcagccgtccagccattaaacatttcccaagtctttgacgaggtggacacggaccaatccggcgtgctttccgatcgcgaaatcagaacgctggcaacccgaatccacgaactaccactgtcattgcaggatttaactggattagaacatatgcttattaactgcagcaagatgctgcctgcagatattactcaacttaacaatatacctccgacacaagaaagctactatgatccgaatcttccaccagtgaccaaatctctggtaacgaattgcaaaccggttacagataaaattcataaagcttacaaggataaaaataagtatagatttgaaataatgggcgaagaagaaattgcttttaaaatgatccgtaccaacgtttcacatgtagtcggacagcttgacgacatccggaagaatccgcgaaaattcgtctgtttaaatgacaatatagatcacaatcacaaggatgcacaaaccgtgaaagctgtgcttcgagatttctatgaatcaatgttcccaatcccgagtcaatttgaattacctagggaatatagaaaccgatttctccatatgcatgaactgcaagaatggagggcttatcgcgacaaacttaagttttggacgcattgcgtgttggccactttaataatgtttacaatcttttccttcttcgcggaacagcttatcgcattaaaaagaaaaatctttccgagacggcgcattcataaggaagcatcaccgaaccgaatacgtgtg

SEQ ID NO: 16936 - DNA, 3768 bp, synthetic construct
  misc_feature 1..3768: note = source = /note="Description of Artificial Sequence: Synthetic coding sequence"
  source 1..3768: mol_type = other DNA
atgttatttaaactattacaacgtcaaacgtatacgtgtctatcgcatcgttatggtctatatgtatgttttttaggtgtagttgtaacgatagtatcggcgtttcaatttggtgaagtagttttagaatggtcgcgtgatcaatatcatgttttatttgattcgtatcgtgataatatagcgggtaaatcgtttcaaaatcgactatgtctaccgatgccgatagatgtagtttatacgtgggtaaatggtacggatttagaattattaaaagaattacaacaagttcgagaacaaatggaagaagaacaaaaagcgatgcgtgaaatactaggtaaaaatacgacggaaccgacgaaaaaatcggaaaaacaattagaatgtctactaacgcattgtataaaagttccgatgttagtattagatccggcgctaccggcgaatataacgctaaaagatttaccgtcgttatatccgtcgtttcattcggcgtcggatatatttaatgttgcgaaaccgaaaaatccgtcgacgaatgtatcggttgtagtatttgattcgacgaaagatgtagaagatgcgcattcgggtctactaaaaggtaattcgcgacaaacggtttggcgtggttatctaacgacggataaagaagttccgggtctagtactaatgcaagatttagcgtttctatcgggttttccgccgacgtttaaagaaacgaatcaattaaaaacgaaactaccggaaaatctatcgtcgaaagtaaaattattacaattatattcggaagcgtcggtagcgctattaaaactaaataatccgaaagattttcaagaattaaataaacaaacgaaaaaaaatatgacgatagatggtaaagaactaacgatatcgccggcgtatctattatgggatttatcggcgatatcgcaatcgaaacaagatgaagatatatcggcgtcgcgatttgaagataatgaagaactacgatattcgttacgttcgatagaacgacatgcgccgtgggttcgtaatatatttatagtaacgaatggtcaaataccgtcgtggttaaatctagataatccgcgtgtaacgatagtaacgcatcaagatgtatttcgtaatttatcgcatctaccgacgttttcgtcgccggcgatagaatcgcatatacatcgaatagaaggtctatcgcaaaaatttatatatttaaatgatgatgttatgtttggtaaagatgtatggccggatgatttttattcgcattcgaaaggtcaaaaagtatatctaacgtggccggtaccgaattgtgcggaaggttgtccgggttcgtggataaaagatggttattgtgataaagcgtgtaataattcggcgtgtgattgggatggtggtgattgttcgggtaattcgggtggttcgcgttatatagcgggtggtggtggtacgggttcgataggtgtaggtcaaccgtggcaatttggtggtggtataaattcggtttcgtattgtaatcaaggttgtgcgaattcgtggctagcggataaattttgtgatcaagcgtgtaatgtattatcgtgtggttttgatgcgggtgattgtggtcaagatcattttcatgaactatataaagttatattattaccgaatcaaacgcattatataataccgaaaggtgaatgtctaccgtatttttcgtttgcggaagtagcgaaacgaggtgtagaaggtgcgtattcggataatccgataatacgtcatgcgtcgatagcgaataaatggaaaacgatacatctaataatgcattcgggtatgaatgcgacgacgatacattttaatctaacgtttcaaaatacgaatgatgaagaatttaaaatgcaaataacggtagaagttgatacgcgtgaaggtccgaaattaaattcgacggcgcaaaaaggttatgaaaatttagtatcgccgataacgttattaccggaagcggaaatattatttgaagatataccgaaagaaaaacgttttccgaaatttaaacgtcatgatgtaaattcgacgcgtcgagcgcaagaagaagttaaaataccgctagttaatatatcgctactaccgaaagatgcgcaattatcgctaaatacgctagatttacaactagaacatggtgatataacgttaaaaggttataatctatcgaaatcggcgctactacgatcgtttctaatgaattcgcaacatgcgaaaataaaaaatcaagcgataataacggatgaaacgaatgattcgctagtagcgccgcaagaaaaacaagtacataaatcgatattaccgaattcgttaggtgtatcggaacgactacaacgattaacgtttccggcggtttcggtaaaagtaaatggtcatgatcaaggtcaaaatccgccgttagatttagaaacgacggcgcgatttcgagtagaaacgcatacgcaaaaaacgataggtggtaatgtaacgaaagaaaaaccgccgtcgctaatagtaccgttagaatcgcaaatgacgaaagaaaaaaaaataacgggtaaagaaaaagaaaattcgcgtatggaagaaaatgcggaaaatcatataggtgtaacggaagtattattaggtcgtaaactacaacattatacggattcgtatctaggttttctaccgtgggaaaaaaaaaaatattttcaagatttattagatgaagaagaatcgctaaaaacgcaactagcgtattttacggattcgaaaaatacgggtcgtcaactaaaagatacgtttgcggattcgttacgttatgtaaataaaatattaaattcgaaatttggttttacgtcgcgaaaagtaccggcgcatatgccgcatatgatagatcgaatagttatgcaagaattacaagatatgtttccggaagaatttgataaaacgtcgtttcataaagtacgtcattcggaagatatgcaatttgcgttttcgtatttttattatctaatgtcggcggttcaaccgctaaatatatcgcaagtttttgatgaagtagatacggatcaatcgggtgtattatcggatcgtgaaatacgtacgctagcgacgcgtatacatgaattaccgctatcgttacaagatttaacgggtctagaacatatgttaataaattgttcgaaaatgctaccggcggatataacgcaattaaataatataccgccgacgcaagaatcgtattatgatccgaatttaccgccggtaacgaaatcgttagtaacgaattgtaaaccggttacggataaaatacataaagcgtataaagataaaaataaatatcgttttgaaataatgggtgaagaagaaatagcgtttaaaatgatacgaacgaatgtatcgcatgtagtaggtcaactagatgatatacgtaaaaatccgcgtaaatttgtatgtctaaatgataatatagatcataatcataaagatgcgcaaacggttaaagcggtactacgtgatttttatgaatcgatgtttccgataccgtcgcaatttgaactaccgcgagaatatcgaaatcgatttctacatatgcatgaactacaagaatggcgagcgtatcgagataaactaaaattttggacgcattgtgtactagcgacgctaataatgtttacgatattttcgttttttgcggaacaactaatagcgttaaaacgaaaaatatttccgcgacgtcgtatacataaagaagcgtcgccgaatcgtatacgagta

SEQ ID NO: 16937 - DNA, 3768 bp, synthetic construct
  misc_feature 1..3768: note = source = /note="Description of Artificial Sequence: Synthetic coding sequence"
  source 1..3768: mol_type = other DNA
atgctgttcaaactcctgcaaaggcaaacctacacctgtctatctcatagatatggcctttacgtgtgctttttgggagtggtcgttaccatcgtttctgccttccagttcggcgaagtcgtacttgagtggagcagggaccagtatcatgtgctgttcgattcttaccgcgacaatattgccggtaagtccttccaaaaccgcctgtgtctcccaatgccgatagacgtggtttacacatgggtgaatggcaccgacttggagctgctgaaggaactgcagcaggtcagggaacagatggaggaagagcagaaggccatgagggagatcctgggcaagaatacaaccgagcccaccaagaaaagtgaaaagcagctggagtgtcttctgacccactgtattaaggtgccaatgttggtgctggacccagccttgcccgccaacattaccctcaaggatttgccttcgttataccccagcttccattccgcaagcgacatttttaacgttgcgaaacctaaaaaccctagtactaacgtctccgtcgtggtcttcgattctacaaaagatgtcgaggacgcccatagtggcctgctgaagggaaactcccgccagaccgtgtggagaggctacctgacgaccgataaggaagtccccgggctggttcttatgcaggacttagcttttttgtctggctttccgccgactttcaaagagaccaaccagctgaaaactaaactgccggaaaatctcagttctaaagtgaaactgctgcagctgtattcggaagcgtccgtggccttattgaaattgaataacccgaaggacttccaagagctcaacaagcagacaaaaaagaacatgacaattgatgggaaagagctgacaatctccccagcatatctgctatgggatctgtcggccatatcccagtctaaacaggacgaagatataagtgcatcaaggtttgaggacaacgaagaactgagatattccctgagatctattgaacgccacgcaccttgggtcagaaatatctttattgttacaaacggtcagatcccgagctggctaaatttagacaatccgcgggtcacaattgtcactcaccaggacgtgtttcggaacctgtcccacttgccaactttcagctctccggccattgagtcccacattcaccggatcgaaggcctgtctcagaagttcatttatctaaacgacgacgtcatgtttgggaaagatgtgtggcccgatgacttctattcccattccaagggacagaaagtctatctgacctggccagtgcctaactgcgcagagggctgtccaggctcttggatcaaagacggatactgcgacaaggcttgcaacaattctgcctgtgattgggatggcggcgactgctccggtaattccggggggtcacgatatatcgccgggggaggaggcaccggcagtattggcgtgggccagccttggcagttcggggggggtatcaacagcgtcagttattgcaaccaagggtgcgctaacagctggctagcagacaaattctgcgaccaggcctgcaacgtgctttcatgtggcttcgatgcaggtgattgcggtcaggaccattttcacgagctgtacaaggtgattctgctcccgaatcagacccactatataatcccaaaaggggaatgcctgccatacttctcatttgccgaggtggctaagcgtggggtagagggcgcctacagcgataaccccattatcaggcacgcaagtatcgccaacaaatggaagaccatccatcttataatgcacagtgggatgaacgcaacaactattcactttaacctgacgtttcagaacacaaacgacgaggagtttaagatgcagatcaccgtggaagtcgacacgcgggaaggtcctaagctgaattctactgcccaaaaaggctatgaaaacctggtatcccctatcacactgctgcccgaagcagaaatccttttcgaagatattccaaaggagaagaggtttccaaagtttaagcgccatgacgtgaacagtaccagacgggcccaggaggaggtgaagatccccctggttaacatttccctcttaccaaaagacgctcaactctccctcaacaccctggatttacagttggagcacggcgacatcactctgaagggatataacctgtcaaaatcggccctgctgcgctccttcctcatgaatagtcagcacgcgaagattaagaatcaggctattattacagacgagacaaatgacagtctggtcgcacctcaggaaaagcaggtccacaagtctattcttccaaacagcctgggagtctcagaacggctgcagagactcacctttcccgctgtgtcggttaaggttaacggacacgaccagggccagaatcctcctctggacctcgagactaccgcgcgctttcgcgttgagacgcacacacagaagactatcggaggaaatgtaaccaaagagaagcccccctccttgatcgtcccactagaatctcagatgacgaaagagaagaagataaccgggaaggaaaaagagaactctcgtatggaggagaacgccgagaatcatattggagtcacggaagttctgctgggaagaaagctacagcactacactgacagctacttgggattcctaccctgggagaagaaaaaatactttcaagacctgctggatgaagaggagtcattgaaaacacagctcgcttacttcaccgatagtaaaaataccggacggcagctaaaggacacattcgccgacagtcttagatacgtgaataaaattctcaattctaagtttgggttcacatcccggaaggttcccgctcacatgcctcacatgatcgatcgaatcgttatgcaggagctccaggatatgttccccgaggagtttgacaaaacatccttccacaaggtgcggcactcagaggacatgcagtttgcattttcttatttttactatctcatgtccgccgtgcagcctctcaatatctcacaggtcttcgacgaggtggacaccgaccagtctggtgtgttgtctgaccgtgagattaggactctcgccaccagaatacatgagcttcctttaagcctgcaggacctgaccggattggaacacatgctgattaactgcagcaaaatgctccctgcagatattactcagctcaataacatccccccaacgcaggagtcctactatgaccctaatctcccgccagttactaaatcacttgtgacgaattgcaaaccagttacggacaaaatccataaggcctataaggataagaacaaatacaggtttgaaattatgggcgaggaggagatcgcctttaaaatgatcaggactaatgtgtcacacgtagttggacagttggatgatattcgcaagaaccctcgcaagttcgtctgcttgaatgacaatattgaccataaccataaggacgcccagacagtgaaagctgtcctgagagacttttacgagtctatgttcccaattccaagtcaatttgaattaccgcgggagtatagaaaccggtttctgcatatgcacgaactacaggagtggagggcctaccgggacaagttaaagttttggacacattgtgttctggccacccttattatgttcacaatattttcttttttcgccgagcagctgatagcattgaagcgcaagatttttcctcgcagacgcatccataaggaagcatcccccaatcggatacgagtg

SEQ ID NO: 16938 - DNA, 3768 bp, synthetic construct
  misc_feature 1..3768: note = source = /note="Description of Artificial Sequence: Synthetic coding sequence"
  source 1..3768: mol_type = other DNA
atgctatttaaactcttgcagcggcaaacatatacatgcttgtctcaccgctatgggctctatgtttgtttcctgggagtagtcgtgactatagtcagtgctttccaatttggggaagtggtgctcgaatggtcccgcgatcagtaccatgtgctctttgattcttatcgggataacatagcaggaaaatcctttcagaaccgactctgcctacctatgcccatcgatgtggtgtatacatgggttaatgggacagatctcgaactgttaaaagagctacagcaggtccgcgaacagatggaagaagaacagaaagcaatgagggaaatcctaggaaaaaacactacagaacctacaaagaaatcagaaaaacagctggagtgcctattgacacactgtattaaagtacccatgctcgtgctagatccagccctgccagctaacatcacattaaaagatctcccctccctatatccatccttccattcggcctcggatatctttaacgtggctaaacctaagaacccctcaactaacgtttctgtggtggtgttcgattcaactaaggatgttgaagatgcccattctggattactaaaagggaattctcgacagacagtatggcgaggatatctcactacggataaggaggtaccaggactagtgctgatgcaggatctcgcctttctctccgggtttccacctacattcaaagaaactaaccagcttaagactaaactgccagaaaacctttcaagtaaagtgaaactgttacagctttactccgaggcctctgttgcccttttgaagctaaacaacccaaaggattttcaggaactcaacaaacagacgaagaagaatatgacaatcgatgggaaggaattgactatctcccccgcctatctcctttgggatctctccgccatatctcagtctaaacaggatgaagacatatccgcatctaggttcgaggataacgaagagttgaggtactctctcagatcgatcgaaaggcatgccccttgggtgcggaacatcttcatagtgacaaatgggcagattccaagttggctcaacctggataatcctcgggtcactatcgtgactcaccaggatgtattccggaacctctcccaccttcctacattctcttctccggccatagaaagtcacatccacagaatagaggggctctctcagaaattcatatatctgaacgatgatgtgatgttcggaaaagatgtgtggccagatgatttctacagtcattccaaagggcaaaaggtgtatttgacatggcctgtgcccaactgtgccgagggatgtcccggatcttggatcaaagatggatattgcgataaagcgtgcaacaacagtgcttgcgattgggatgggggagactgttcagggaactctggagggagtaggtacatcgccgggggaggaggaacagggtctatcggggtagggcagccctggcagttcgggggagggataaattctgtctcatattgcaaccaggggtgtgcaaactcatggctggccgataagttctgcgatcaggcatgtaacgtcttaagttgtgggtttgatgcaggagattgtgggcaggatcatttccacgagctgtataaggtgatccttctcccaaatcagactcactatataatacccaaaggggaatgtcttccatatttttccttcgcagaagttgccaagcggggagtcgagggagcatattctgataatcctataatcaggcatgcctctatagctaataaatggaagactatacatcttatcatgcactccggaatgaacgcaactacaatccacttcaatttgacatttcagaatacaaatgatgaagagttcaaaatgcagatcacagtagaagtagatacaagagaagggccaaaacttaatagtactgcccagaaagggtatgaaaacctcgtatcccctataacgctacttccagaggccgagatcctatttgaagatatacctaaggaaaagaggtttccaaaatttaaaaggcatgatgttaattcaactcggagggcccaggaagaagtaaaaataccgctcgtgaatatctctttgctccccaaagatgcacagctgtccctgaatacactagacttacagcttgaacatggagatatcacattgaaagggtacaacctttcaaaatctgctttgctcagatcatttcttatgaactcacagcacgctaagatcaaaaaccaggccataatcacagatgaaacaaacgactcactggtggctccccaggagaaacaggtgcataaatccatcctacctaactctctcggagtgtctgaaaggctacagaggctcacatttcctgctgtgtctgtgaaagtaaacgggcacgaccaggggcagaatcctcccctcgacttggaaacaactgctcgcttccgggtagaaactcatactcagaagacaattggggggaatgtgactaaagaaaaacccccatcactcatagtcccccttgagagtcagatgactaaagaaaaaaaaatcacaggaaaagaaaaagaaaacagtcggatggaagaaaacgctgaaaatcacatcggagttacggaagtcttactcggaaggaagctgcaacattatacagatagttacctgggatttcttccctgggaaaaaaaaaaatattttcaggacctacttgatgaagaggaatcccttaagactcagctggcttacttcacagatagtaaaaatacaggacggcagcttaaagatactttcgctgacagtctaaggtatgtcaataagatactcaactccaagttcggatttactagtaggaaggtgcctgctcatatgcctcacatgatcgataggatcgtgatgcaagaactccaggatatgtttccagaagaattcgataaaacatccttccacaaggtgcgacattctgaggatatgcagtttgctttctcctatttttattacctcatgtctgccgtccagccccttaatataagtcaggtatttgatgaagtcgatactgatcagagtggggtactaagtgaccgcgaaatcagaacactggcaacacggatccatgaactccccttatcattgcaggatctcacaggactggaacacatgctcattaattgttcaaagatgctaccagctgatataacacagttaaacaatatcccacctacacaggaaagttactatgatcccaacctgccccccgtgactaaatccctggtgacgaattgcaaacctgtgacagataaaatacacaaagcatataaggacaaaaacaaatatcggtttgaaataatgggggaagaagaaatagcctttaaaatgattaggactaacgtatctcacgtcgtggggcagcttgacgatatcaggaaaaatccaagaaagttcgtctgcttgaacgataatatagaccacaaccataaagatgcgcagactgtaaaagccgttctccgcgacttctatgaatcgatgtttcccatcccttcacaatttgaacttcctcgcgaatatcggaataggtttctccacatgcatgaacttcaggaatggcgagcatatcgcgataaattaaaattctggacacattgtgtgctggccactctgatcatgttcactatattctcctttttcgccgagcagcttattgcattgaaaaggaaaatattccctagacggcgaatacacaaagaagccagtccgaacaggatcagagtg

SEQ ID NO: 16939 - DNA, 3768 bp, synthetic construct
  misc_feature 1..3768: note = source = /note="Description of Artificial Sequence: Synthetic coding sequence"
  source 1..3768: mol_type = other DNA
atgctcttcaagttgctccagagacaaacctacacgtgcctctctcacagatacggactgtacgtctgctttctgggagtcgtcgtcactatcgtgtcagcgtttcagttcggggaggtggtcctggaatggagccgcgaccagtaccatgtcctcttcgattcctaccgcgataacatcgctggaaagtcatttcaaaaccggttgtgtctgccaatgccgattgacgtcgtgtacacttgggtgaatggtaccgacctcgaattgctgaaagaactgcagcaagtccgggagcagatggaagaggagcaaaaggccatgcgcgaaatcctcgggaagaatactactgaaccgaccaagaagagcgagaagcagttggaatgcttgctgacccattgcatcaaagtgccgatgctggtgctcgatcctgcgctgcctgctaatatcacgctgaaagacttgccaagcctttatccgagtttccatagcgcatccgacatcttcaacgtggcaaagcccaagaatccgagcaccaacgtgtcggtcgtcgttttcgactctacgaaggatgtggaggacgcccattccggactgctgaagggaaattcacgccagactgtgtggagaggttaccttaccactgacaaagaagtgccgggccttgtcctgatgcaggacttggcgttcctgtccggcttccctccgacctttaaggagactaatcagcttaagaccaaactgccggaaaacctgtcgtcgaaggtgaaactcctgcagctgtattcagaggcttcggtggccctgctgaaactgaataaccccaaggacttccaggaactcaataagcaaaccaagaaaaacatgactatcgacggtaaggagctgaccatctccccggcctacctgttgtgggacctttccgcaatctcacagtcgaaacaggacgaggacatcagcgctagccgtttcgaagataacgaagagctgcggtactcgctgcgcagcatcgagcgccatgccccatgggtgcgcaacatcttcatcgtgaccaatggccaaattccctcatggctgaatctcgacaacccgcgggtgactattgtgactcatcaagacgtgtttagaaacctctcacatctgccaacgttttcttcaccggctatcgagtcacacatccaccgcatcgaaggattgtcacagaaattcatctacctgaacgatgatgtgatgttcggcaaggacgtgtggccggatgacttctactcccatagcaaaggacaaaaggtgtaccttacctggccggtgccaaattgtgccgagggatgcccggggtcctggatcaaagacggctactgcgacaaggcgtgcaacaactcagcttgtgattgggacggcggagattgctccggtaactcaggaggatcgcgctatatcgccggtggaggcgggactggatccatcggtgtggggcagccgtggcagtttggcggtggcatcaattccgtctcctactgcaatcagggctgtgcgaattcctggctcgctgacaagttttgcgaccaggcctgcaacgtgctgtcttgcggattcgacgccggagactgcggacaggatcactttcacgaactctacaaggtcatcctgctgcctaatcaaacccattacattattcccaagggagagtgtctcccttacttctcgttcgcagaagtggcaaagaggggcgtggagggcgcatatagcgataacccgatcataaggcatgcctcaatcgccaacaagtggaaaactattcatctgattatgcactccggaatgaacgccaccactatccacttcaatctcactttccaaaatactaacgatgaagagttcaagatgcaaatcactgtggaggtcgatactcgcgaggggccaaaacttaattccacggctcagaagggatacgaaaacctcgtcagccctatcacgcttctgcctgaagccgaaatcttgttcgaggatataccaaaggagaaacggttcccaaagttcaaaagacacgacgtgaactcgactcggcgggcccaagaagaagtgaagatcccgctggtcaacatatcgctgctcccgaaggatgcgcaactttctctgaacaccctggatttgcaactggaacatggagatattacgctcaagggctataacctgagcaagagcgcgcttctgcgctcgttcctgatgaattcgcaacacgcaaagatcaagaatcaagccatcatcactgacgaaactaacgactcgctggtcgcaccgcaggaaaagcaggtccacaagtcaatcttgccaaattcgttgggcgtgtcggagcgcctgcaacggctgaccttcccggccgtgtcggtgaaagtgaatggacatgaccagggacaaaaccccccgctggatctggagactactgctcgtttcagggtggagacgcacacccagaaaacgatcgggggcaacgtcacgaaggaaaagccgccgtccctcatcgtgcctctcgaatcacagatgaccaaagagaagaaaatcaccggtaaggaaaaagaaaactcgcggatggaagagaacgctgaaaatcatatcggcgtgaccgaggtgctcctgggccggaagctgcagcactacactgattcctacctcggtttcctgccgtgggagaaaaagaaatacttccaggatcttttggacgaagaagaatcgttgaaaacccagctggcctactttaccgactctaaaaacacgggccggcagctcaaagacactttcgctgattccctccggtacgtcaacaagatcctgaattccaagttcgggtttacgtccagaaaggtgccggcccacatgccgcacatgatcgaccggatcgtgatgcaggagctgcaggacatgttccccgaggagttcgacaagacctccttccacaaggtccggcactcggaagatatgcagtttgcgttctcatacttctactacctgatgtcagcggtgcagcctctcaacattagccaggtctttgatgaggtggacaccgaccaatctggcgtgctgtcagatagagagatccggaccctggccactagaatccatgaactgccgctgtcgctccaggacctgaccggactcgagcatatgctgatcaattgttccaaaatgcttcccgcagacatcacccagctgaacaacattcctccgacccaagagagctactacgatcctaaccttccgcccgtgacgaaatccttggtcaccaactgcaaaccagtcactgataagatccataaggcctacaaagacaaaaacaagtaccgcttcgagatcatgggagaagaagaaatcgccttcaagatgatcagaactaacgtttcccacgttgttggacagttggatgatatcagaaaaaacccgcggaagtttgtctgcctgaacgacaatatagaccacaaccataaggacgcacagacggtgaaggctgtcttgcgcgatttctacgaaagcatgttcccaatcccgtcgcagttcgagttgccccgggaataccgcaaccgcttccttcacatgcacgaactgcaagagtggcgggcatacagagacaagctgaaattctggacccattgtgtcctggctaccctgatcatgttcactattttcagcttctttgcagagcagcttatcgccctcaagagaaagatcttcccacgccgccgcatccacaaagaggctagcccaaaccgcatccgcgtc

SEQ ID NO: 16940 - DNA, 3768 bp, synthetic construct
  misc_feature 1..3768: note = source = /note="Description of Artificial Sequence: Synthetic coding sequence"
  source 1..3768: mol_type = other DNA
atgctgtttaagttgcttcaacggcaaacctacacttgcctttcgcatagatacggactgtacgtgtgctttctgggggtggtcgtcactatagtttcagcatttcaattcggcgaagtggtgctcgagtggtcgagagatcagtaccacgtcctttttgattcgtacagagacaacattgccggaaagagctttcagaatcggttgtgcctgcctatgccaattgatgttgtgtacacctgggtgaatggaaccgacctggaactgctcaaagagctgcaacaagtgagagaacaaatggaagaagaacaaaaagccatgagagagatactgggcaagaacaccacggagccgacgaagaaaagcgaaaagcaacttgaatgtctgcttactcattgcatcaaggtgcccatgttggtccttgatcccgccttgccagcgaatatcacgttgaaggatctgccttcactttacccttcgttccattcagcatctgacattttcaacgtggcaaagccaaagaatccttctaccaatgtgagcgtggtggtgtttgactccactaaggatgtggaagatgcacactcaggactgctgaagggtaattcgcgacagaccgtgtggcgaggatacctgaccactgataaagaggtgccgggacttgtgctgatgcaggacctcgcgttcctgtcagggtttcctcctaccttcaaagaaaccaatcaactgaaaaccaagctcccggagaacctgagcagcaaggtgaaactcttgcaactgtatagcgaagcatcagtggctttgttgaagctgaacaacccaaaggattttcaagagctgaacaagcaaactaaaaagaacatgaccatcgacggaaaggagttgactattagcccagcatacttgctctgggatctcagcgccatctcgcaatctaagcaagacgaggacatatcagctagccggtttgaagataatgaggaactccgttacagccttcgatcaatcgagcgccatgccccgtgggtgcggaatatctttatagtcactaacggtcaaattccctcgtggcttaatcttgacaacccaagagtgacgatcgtgacccatcaggatgtgtttcgtaacctttcacatctgcctaccttcagctcgcctgccatcgagtcccacatccaccgtattgaaggactgagccagaagttcatctacctgaatgacgacgtgatgtttggtaaggatgtgtggcctgatgacttctactcccattcaaagggtcaaaaggtgtacctgacttggccagtgcccaattgtgcggaaggttgtcctggatcatggatcaaggacggttactgtgataaggcctgcaacaactcggcttgcgattgggatggtggcgattgtagcggcaattcaggtgggagccgctacatcgcgggtggaggtggaactggctcgattggggtcggacagccttggcaattcggcggtggtattaactcggtgtcttactgcaatcaaggctgtgcaaattcatggctggccgataagttctgcgaccaggcctgtaacgtgctttcatgtggatttgatgccggagattgcggtcaggatcacttccacgagctttacaaagtcatccttttgcctaaccagactcattacattatacccaagggagaatgtctgccctatttctcctttgcagaagtcgcaaagcgaggtgtggaaggtgcatactcggataaccccataatacgacatgcatccatcgcaaacaagtggaaaacgatccacctgatcatgcatagcggtatgaatgcaactaccattcacttcaacctgacttttcagaatactaacgacgaagagtttaagatgcagataaccgtggaagtcgatactcgcgaaggaccaaagctgaattcaactgcgcaaaagggatacgaaaatcttgtgtccccaattactctccttcctgaagcagagatccttttcgaggatattccgaaagaaaagagatttcctaaattcaagagacatgacgtcaactctactcggagagctcaggaagaggtgaaaattccgcttgttaacattagcttgctgccaaaagacgcacaattgtctttgaacactctggatctccagttggaacacggagatattactctgaaaggatacaacctctcgaaaagcgcactcctccgctcgtttcttatgaatagccaacatgccaagattaagaatcaggcaatcatcaccgacgaaaccaacgattctctggtcgcaccccaagagaaacaagtgcacaagagcattctgcctaactcccttggtgtctccgaaaggctgcaacggctgacgtttccggcagtgtccgtcaaagtgaatggtcatgatcagggacagaacccaccactggacctcgaaaccaccgcacgctttagggtggaaactcacactcaaaagactattggaggaaacgttaccaaggaaaaaccccccagccttatcgtgcctcttgagtcacagatgaccaaggagaaaaagatcactggaaaagaaaaggaaaactccaggatggaagagaatgcggagaaccatattggcgtcactgaagtgctgcttggaagaaaattgcagcattacaccgactcgtacctggggtttctgccgtgggaaaagaagaagtacttccaagatctgctcgatgaggaagaatcccttaaaactcagcttgcgtatttcaccgatagcaagaacacggggaggcaacttaaggataccttcgccgactcgttgaggtatgtcaataagatcctcaattcgaagtttgggtttacctcgcgcaaagtcccagcgcacatgccacacatgatagatcgcattgtcatgcaagagctccaggacatgtttccggaagaatttgataagacctcctttcataaagtccgccattccgaagatatgcaatttgcattcagctacttttactatctcatgtccgcagttcaacctcttaacatttcacaagtgtttgatgaagtggacaccgatcagtcgggcgtgctttccgatcgggagattagaacccttgcgacccgcatccacgagctgcccctctcccttcaagatcttactggactggaacatatgttgattaactgttccaagatgctgccagcagatattactcagctgaacaacattccaccaacccaggaaagctactatgacccaaatctgcctccagtgaccaagtcccttgttacgaactgtaaacccgtcaccgataagattcataaggcctacaaagacaagaacaagtacagatttgagatcatgggcgaagaagaaattgcattcaaaatgattcggacgaacgtcagccacgtcgtgggtcagcttgacgatattcggaagaatccaaggaagttcgtgtgtctgaatgataacatagaccataaccataaggatgcacagactgtcaaggccgtgctgagggacttttacgagtccatgtttcctattcccagccaatttgagcttcctagggagtatagaaatcgattcctccatatgcatgaactgcaagaatggcgtgcatacagggacaagctgaagttctggactcactgtgtgctggcaaccctcattatgttcaccattttctcatttttcgcggaacagctcatagccctgaagcggaagatttttcctaggcgtcggatccataaggaagcatccccgaacagaattagggtg

SEQ ID NO: 16941 - DNA, 3768 bp, synthetic construct
  misc_feature 1..3768: note = source = /note="Description of Artificial Sequence: Synthetic coding sequence"
  source 1..3768: mol_type = other DNA
atgctcttcaaactgctgcagcggcagacctacacctgcctctcacaccggtatggtctttatgtgtgcttcctgggcgtggtggtgaccatcgtctccgctttccagttcggagaagtggtgctggaatggagccgcgatcagtaccatgtcctcttcgacagctaccgggacaacatcgcaggaaaatcctttcagaatcgactgtgtctgccgatgccaatcgatgtcgtgtacacgtgggtgaatggaactgatctggagctccttaaggaactgcagcaagtccgcgagcaaatggaggaggagcagaaggccatgcgcgaaatcctcggtaagaacactactgaacccacgaagaagtccgagaagcaactggagtgcctgctgacccactgcataaaagtgcccatgctggttctggacccggcgcttccagccaatatcactctgaaggacctgccatctctctaccctagctttcattccgcgtcagacatcttcaatgtcgcgaaacccaagaacccatcaactaacgtcagcgtggtggtcttcgactccaccaaggacgtcgaagacgcccactccggactgctgaagggaaactcccgccagactgtgtggcgcggctacctcacgaccgataaggaggtgcctggactggttctgatgcaagatctggcgttcctgtcaggatttccaccaacctttaaggaaaccaaccagctcaagaccaagctgccggagaacctcagctcaaaagtcaagttgttgcagctctactcggaggcatcggtcgcgcttctcaagctcaataaccccaaggattttcaggaactgaataaacagactaaaaagaacatgactatcgacggtaaagagctcactatttccccggcgtacctcctttgggatctgtccgccatctcgcaatccaagcaggatgaagacatcagcgcgtcgcgcttcgaagacaacgaggaactgagatacagcctgcgctctatcgagcggcatgcgccgtgggtgcgcaatatctttatcgtgaccaatggccagatcccctcatggcttaatctcgacaacccaagggtcactatcgtgacccaccaggacgtcttccggaacctgtcccacctgcctactttcagctctccggcaatcgaatcgcacattcaccgcatcgaaggcctgagccaaaagtttatctacctcaacgatgacgtgatgttcgggaaagatgtctggccggatgacttctacagccacagcaagggccagaaggtgtacctcacttggccggtgccaaactgcgcagagggatgtccaggcagttggatcaaggatggatactgcgataaagcctgcaacaacagcgcttgcgactgggatggtggcgattgctcgggaaatagcggtggatcgagatacatcgctggtggaggaggaaccggttctatcggggtgggacaaccgtggcagttcggagggggcatcaattcggtcagttactgcaaccaaggctgcgctaactcctggttggccgacaagttctgcgaccaggcgtgcaacgtgctgtcgtgtggcttcgacgcgggcgactgcggacaagaccacttccatgaactgtacaaagtaattttgttgcctaatcagactcactacatcatcccgaagggtgagtgtctcccgtacttctcgtttgcagaggtggcgaagagaggagtggagggcgcctactccgacaacccgatcatcaggcatgcatccatcgcgaacaaatggaaaaccattcacctgatcatgcattcgggaatgaacgccaccactatccacttcaatctgactttccagaacactaatgacgaggagttcaaaatgcagatcaccgtggaggtggacacccgggaaggcccaaaactcaactcaactgctcagaaggggtacgagaatctggtttcgccaatcactctgctgccggaagcggaaatcctgttcgaggacatcccgaaagaaaagcgtttcccgaaattcaagcgccacgacgtgaattcgacgaggcgcgcccaggaggaagtgaagatccctctggtcaacatctcccttctcccaaaggatgcgcagctctctctcaacacgcttgacctgcagcttgagcatggcgatattactctgaagggatacaacctctcgaagtcagcccttctccggtcatttttgatgaattcacaacacgccaagatcaaaaaccaagccatcatcactgacgaaactaatgactcactggtagccccgcaggagaagcaagtgcacaaaagcattttgccgaacagccttggtgtgtccgaacggctccaacgcctcacgttccccgccgtgtcagtcaaggtcaacggacacgaccaggggcagaacccacctctggacctggaaacgaccgcacggttccgggttgaaacccatactcaaaagactattggaggcaacgtgactaaggaaaagccaccatcactcatcgtgccgcttgaatcgcaaatgaccaaggagaagaagatcaccggcaaggaaaaagagaactcacgcatggaagagaacgccgaaaaccacatcggggtgacggaggtgctgctgggaagaaaactgcagcactacactgattcttatctcggattcctgccgtgggagaagaagaagtacttccaagatctgcttgatgaggaagagtccctgaagacccagctggcgtacttcaccgactcgaaaaacaccggcaggcaactgaaggatacttttgcagatagcctgcgctacgtgaataagatcctgaacagcaaatttggctttacctcacgaaaggtgcctgcccatatgcctcacatgatcgaccgcatcgtgatgcaagaactgcaggacatgttcccggaggaattcgacaagactagcttccataaggtgcggcattctgaagacatgcaattcgccttttcctacttctactatctcatgtccgcggtgcaaccgctgaacatcagccaggtcttcgacgaagtggataccgaccagtcaggtgtcctctcagacagggagatccgaaccctggccacccggattcacgaactgccactctcactgcaagacctgaccggactcgaacacatgctcataaattgctcaaaaatgctcccagcggacatcactcagctcaacaatatccctccgacccaggagtcatactacgaccctaacctcccaccggtcaccaagtcgctggtgactaactgcaagccagtgacggataagatccacaaggcgtacaaagacaaaaacaagtaccggttcgaaatcatgggagaagaggaaatcgcattcaaaatgataaggaccaatgtgtcccatgtcgtgggacagctggacgatatcagaaaaaatccacggaagttcgtctgcctcaatgacaatatcgaccacaatcacaaggacgcccagaccgtcaaggcggtcctccgcgatttctacgagtcgatgtttccaatcccctctcaattcgagctgccgcgcgaataccgcaacagattccttcacatgcatgagctgcaggaatggagggcctatcgcgataagctgaagttctggacccactgcgtcctggccactctgattatgttcaccatattcagcttcttcgcggaacagctcattgcactgaagagaaagatcttcccgcggcgcagaatccacaaggaagcctcgcctaaccgcatccgcgtg

SEQ ID NO: 16942 - DNA, 3768 bp, synthetic construct
  misc_feature 1..3768: note = source = /note="Description of Artificial Sequence: Synthetic coding sequence"
  source 1..3768: mol_type = other DNA
atgctcttcaaactgcttcagagacagacatacacctgcctgagccataggtacggactgtacgtatgctttctcggagtggttgtcaccattgtgtcagcattccagtttggagaagtggttctggaatggagccgcgaccagtaccacgtcctgtttgactcttacagggataacatcgccggaaagtccttccagaacaggctttgcttgcctatgccaatcgacgttgtgtacacctgggtcaatggaaccgacttagaattgctgaaggaattacagcaggtgcgcgaacaaatggaagaagaacagaaagctatgcgcgagatcctgggcaaaaatacaacagagccgaccaagaagtcagaaaagcagctggaatgcctacttacccactgtattaaagtacctatgcttgttctcgatcctgcactgcccgccaatataactttaaaggatctaccgtctctttaccccagttttcatagcgcatcagatatcttcaatgttgctaagcccaagaatccttccactaacgtaagcgtagtggtattcgacagcactaaagatgtagaagacgcccacagcggactgcttaaaggaaattcgcgtcagacagtctggaggggctacctgaccaccgataaagaagtccccggcctcgtgctgatgcaggatttggcattcttgagcggatttccaccaaccttcaaggaaacaaaccaacttaagactaagctgccagagaatctttcaagcaaagttaaattgcttcagctctatagcgaagccagcgtcgccctgctgaagctgaacaatcctaaagactttcaagagttgaacaaacaaaccaaaaagaacatgaccatcgacggcaaggaactaactatcagccccgcttatcttttgtgggatttgtctgctataagccagagtaaacaagatgaggatattagcgccagccgattcgaagacaatgaagaacttaggtatagtttacgttctattgaacggcacgcaccctgggtgaggaacatatttatagtcaccaacggccaaatcccctcatggctcaacctggataaccctagggttacgatcgtcacacatcaggatgtatttcgcaatctgagccatctgcctactttctcatcaccggcgatagaatctcacatccatagaatcgagggcctctcccagaaattcatctatttgaacgatgatgtcatgttcggcaaagacgtttggccagatgacttttatagccactctaagggacagaaagtctatctgacatggcccgtccctaattgtgcagagggatgtcccggatcttggatcaaggacggttactgcgacaaggcctgcaacaacagtgcctgcgactgggacggcggagattgctctggaaattcaggcggatcaagatacattgctggcgggggcggtacaggatcaattggagtggggcagccttggcagtttggggggggaatcaactccgtgagttactgtaaccaagggtgtgcaaactcctggctggctgataagttttgcgatcaagcatgtaacgtcctgtcatgcggctttgatgccggcgattgtggacaagatcattttcacgagttgtacaaggtcatactgttgccaaatcaaacccactatattatcccaaagggtgagtgcctcccgtacttctcattcgccgaggttgcaaaaaggggagtcgaaggtgcctactcagacaacccaataatccgccacgctagcatcgcgaacaaatggaaaacaattcacctgattatgcactcgggaatgaacgcaactaccattcactttaacctgacatttcaaaacaccaacgacgaagaatttaaaatgcagataaccgtggaagtggatactcgagaaggtcctaaactgaattcaaccgctcaaaagggctacgaaaatctggtgtcacctatcaccctccttcctgaagctgagatcttgttcgaggacatcccaaaggagaaaagatttccaaagtttaaaagacacgacgttaatagcacccgtcgtgctcaggaggaagtgaagattccactggtcaatatcagtttgctgccgaaggatgcgcagctgtccctgaataccctcgaccttcaactcgaacatggcgatattaccctcaaaggctataacctttcgaagagtgccctcctgcggagcttcttgatgaacagccagcatgctaaaatcaagaaccaagccattatcacagatgagacaaacgatagcctggtggctcctcaagagaagcaggtacacaaaagcattctgcctaacagcctaggggtgtctgaacggctgcagaggctcacatttcccgctgtgagtgtaaaggtgaatggccacgatcagggtcagaaccctccactggacctcgaaacaaccgctagattccgggtcgagactcatacccagaagacaatcggtggcaacgttactaaggaaaaacctccttccctgattgtccccttggagtcacaaatgaccaaagagaagaaaataaccggcaaggagaaagaaaacagccgtatggaagagaatgctgaaaaccacatcggcgtcacagaggttttgctgggccggaagctgcaacattataccgatagctacttaggctttctgccttgggagaaaaagaagtactttcaggacctgctcgatgaagaagaatctctgaagacacaacttgcctacttcacagactctaaaaacacaggaaggcaattaaaggacacttttgccgacagcctgcgatatgtgaacaaaatcctcaactcaaaattcgggtttacttccaggaaggtgccagcccatatgccccacatgatcgatcgcatcgtgatgcaagaactccaagatatgtttcccgaggagtttgataaaacatcttttcataaggtaaggcatagcgaggacatgcaattcgctttttcctacttctattatctcatgagtgctgttcagccacttaatataagccaggtgttcgacgaggttgacaccgatcagagcggagtccttagcgaccgagaaatccgcacccttgctaccagaatacacgaactccccctcagtctgcaggacctgaccggtctggagcatatgctgatcaactgctctaagatgctgccggccgacataacacagcttaataacatcccacccacacaggagagttactacgaccctaacctgccccccgtaacaaaaagtctggttactaattgcaaaccagtcactgacaaaattcacaaagcatacaaagacaaaaacaaatacaggtttgagattatgggagaggaggaaatcgctttcaaaatgataagaaccaacgtaagccacgtggttggccagctggatgatatacggaagaaccctagaaaatttgtatgccttaatgataatattgatcacaaccataaggatgcccaaactgttaaggctgtgttgcgggacttctatgaatcaatgtttcctatcccaagccaattcgagcttcctcgcgagtatagaaacagattcctacatatgcatgagctccaggaatggcgagcgtatcgcgacaagctaaagttctggactcactgtgtgctggctacactgatcatgtttactatcttcagctttttcgccgaacagctgatagcacttaagcggaaaattttcccaaggcgtaggatccacaaagaggcaagtcctaacaggatccgggtt

SEQ ID NO: 16943 - DNA, 3768 bp, synthetic construct
  misc_feature 1..3768: note = source = /note="Description of Artificial Sequence: Synthetic coding sequence"
  source 1..3768: mol_type = other DNA
atgttgttcaagctgcttcaaagacagacctatacctgcctttcgcaccggtacgggctgtacgtctgttttctgggagtcgtggtgaccatcgttagcgcgtttcagtttggagaggtcgtgctggagtggtcacgcgatcagtaccatgtgcttttcgattcataccgcgataacattgcaggcaagagctttcaaaacagattgtgtctgccgatgcccatcgacgtcgtctatacctgggtgaacggaaccgatcttgaactgctcaaggaacttcagcaagtgagagagcagatggaagaggaacaaaaagccatgcgagagattttgggtaagaacactactgaacctaccaagaagtcggaaaaacaactggaatgtctgctcacccattgcatcaaagtccctatgctcgtccttgacccagcacttcccgcaaacattacccttaaagatctcccctccctttacccgtcatttcactccgcctcagacatctttaacgtggctaaaccaaagaatccatccactaacgtctcggtcgtcgtattcgatagcactaaggatgtggaggacgcacattcaggactccttaaaggaaactctcgtcaaactgtgtggcgcggatacctcactacggacaaggaggtgcctgggctggtgttgatgcaggacctggcatttctctccgggtttcctcctactttcaaggaaacgaaccaacttaagaccaaactccccgaaaacctcagctccaaggtgaagctcctgcaactgtactccgaggctagcgtggccctgcttaaacttaacaaccccaaggattttcaagagctcaacaagcaaaccaagaagaacatgactattgacggaaaggaacttactatcagcccagcatacctcctctgggacctgtccgcaatttcgcaatcaaagcaagatgaagatattagcgcatccagattcgaggataacgaggagctgcgttattcccttagatccattgagcggcatgcgccgtgggtccggaacattttcattgtcaccaatggccaaataccgtcgtggctcaatctggataaccctcgggtgaccattgtgactcaccaggacgtctttaggaacctctcccatctgccgacgttttcctctccagcaattgaatcacatatccacaggatagaaggtctttcgcaaaagttcatctatctcaatgatgatgtgatgtttggaaaggatgtctggccagatgatttctacagccatagcaagggacagaaagtatacctgacttggcctgtgcccaactgtgcggaaggctgtccaggttcatggattaaggatggatactgtgacaaggcatgcaacaactctgcatgtgattgggatggtggtgattgttccggcaatagcggaggttccaggtatatagctggaggcggtggaaccggttcgatcggcgtggggcagccttggcagttcggcgggggaataaactccgtgtcctactgtaaccaaggatgtgcgaactcgtggttggccgacaagttttgcgatcaggcatgcaacgtgctgtcatgtgggtttgatgctggcgactgcggtcaggatcactttcacgagctctacaaggttattctgcttccgaaccagactcactacattattcccaaaggagagtgtttgccttactttagcttcgcagaggtggcaaagaggggcgtggagggtgcatactctgataaccctatcattagacatgcatccatcgccaacaaatggaaaactatacaccttatcatgcatagcggtatgaacgccaccactatacatttcaatcttacctttcaaaatactaatgacgaggaattcaagatgcaaatcactgtggaagtggatacccgggaaggaccaaaacttaactcgactgcgcagaaaggatacgagaatctggtgtcccctatcactttgctgcctgaagcagaaattctttttgaagatattcccaaagaaaagcgattccctaagttcaagcgccatgatgtgaactcgacccgaagagcacaagaagaagtgaagatacccttggtcaacatttcgcttctgcctaaggatgcccagctgtccttgaacaccctggatttgcagcttgagcatggtgatataactcttaaggggtacaacctgtcaaagtctgcactccttaggagctttctcatgaactcacaacacgcaaagatcaaaaatcaagccataatcaccgatgaaaccaatgattcccttgtggctccccaagaaaagcaagtgcataagtcgatcctcccaaactcacttggggtcagtgaacggctgcaaagactcacttttcctgcagtgtcagtgaaggtgaacggacacgaccagggacagaatcctcctctcgatcttgagacgaccgcaagatttagagtcgagactcatacgcaaaagacgattggaggtaatgtgaccaaggagaaacccccttccctgatcgtgcctctggagtcccaaatgacgaaagaaaagaagataactggaaaagaaaaggaaaattccagaatggaggaaaacgccgaaaatcatattggagtcaccgaggtgctccttgggcgcaaacttcagcattacacggactcatacctggggtttctgccttgggaaaagaagaaatacttccaggatcttttggacgaagaagagtcactcaaaactcagttggcatacttcaccgacagcaagaacactggacgtcagctgaaggataccttcgcggactcacttcgctacgtgaacaaaatacttaattccaaattcggattcacctcacgcaaggtcccagcgcacatgccacacatgatcgaccggattgtcatgcaggaacttcaggatatgttccccgaggagtttgataaaacttcatttcacaaggtcagacattccgaggatatgcaattcgcgttctcatatttctactaccttatgtcggccgtgcagcctcttaacatttcccaagtgtttgatgaggtggatactgatcagtcgggtgtgctctccgacagagaaattcgcacgttggcaactagaatacatgaactgccgctgtcactgcaagatctgaccggcttggaacatatgctcattaactgcagcaagatgcttcctgcagatatcacccagctcaacaatattccacctactcaggaatcatactacgatccaaatcttccgccagtgacgaagtcgctggtgaccaactgtaaacctgtgacggacaagatccataaggcctataaggacaagaataagtaccgtttcgagataatgggtgaagaagaaattgcattcaaaatgattagaaccaacgtctcgcacgtggtgggacaacttgacgatataagaaaaaacccaagaaagtttgtgtgcctgaatgataacatagatcacaaccacaaggatgcacagaccgtcaaagcagtcctccgcgacttctacgaatccatgtttccaatcccctcgcaattcgaactgccacgagaatacagaaatagatttttgcatatgcatgaactgcaggaatggcgcgcatacagggacaaattgaagttttggactcactgcgtgcttgccaccctcattatgtttaccatcttttccttttttgcagagcaacttatcgccctgaagcgcaagatttttccgcggcggcgcattcataaggaggcatccccgaaccgcatcagggtg

SEQ ID NO: 16944 - DNA, 3768 bp, synthetic construct
  misc_feature 1..3768: note = source = /note="Description of Artificial Sequence: Synthetic coding sequence"
  source 1..3768: mol_type = other DNA
atgctgttcaagttgctccagagacaaacctacacttgtctgtcgcaccggtacgggctgtacgtttgctttctcggagtggtggtcactatcgtgagcgccttccagtttggcgaggtcgtgttggagtggtcaagggaccagtaccacgtgttgttcgactcttaccgcgacaatatcgcggggaagtcctttcagaatcggctgtgcttgccaatgccgatcgatgtggtgtacacctgggtgaacgggactgaccttgagctgcttaaagagctgcagcaagtccgtgaacaaatggaagaagaacagaaggccatgcgggaaatcttgggaaagaacaccactgagccgaccaagaaaagtgaaaaacagttggaatgcttgctgacgcactgcatcaaagtgcctatgctggtgcttgacccggctcttccggcgaatatcactctcaaagaccttccatcgctctacccctcattccacagcgcctcggacattttcaacgtggccaagccgaagaacccctccaccaacgtctccgtggtcgtgtttgactcaacgaaggacgtcgaagatgcccacagcggcctgctgaagggtaattcgcggcaaacggtgtggcgaggttacctgaccaccgacaaggaggtgccggggctcgtgttgatgcaggatctggcattcctcagcgggtttcctccgaccttcaaagaaaccaaccaattgaaaaccaagctccctgagaacctgtcctcaaaggtgaagctgctgcagctgtactccgaagcaagtgtggctctgctgaagctcaacaacccgaaagatttccaggaactcaataagcagaccaagaagaatatgactatcgatggtaaagagctcacgatcagcccagcgtacctcctgtgggatctgtcggctatatcgcagtctaagcaggatgaggacatctcagcatctcggttcgaagataacgaagaactccgctactccctgcggtccatcgaacggcatgctccgtgggtccgaaacattttcatagtgacgaatggccagatcccaagctggctgaacctggataaccctcgcgtgacgattgtgacccaccaggatgtgtttcgcaacctctcacatctgcccacgttctcgtcaccagcgatcgaatcccatatccaccgcatcgaaggactgtcacaaaagttcatctacttgaacgacgacgtgatgttcggcaaggacgtgtggccagatgacttttactcccactccaaagggcagaaggtttacctgacctggccggtccctaactgcgcggaaggatgtccgggctcatggatcaaggacggctattgtgataaggcctgcaacaattccgcgtgcgattgggacggaggcgactgctcaggaaattcgggaggatcccggtacattgctggcggaggcggcaccggatcgattggtgtgggacaaccgtggcaatttggaggtggaattaactcggtttcctactgcaatcagggatgcgcgaatagctggctggccgacaagttttgcgaccaagcctgtaacgtgctgtcctgcggattcgatgcaggagactgcggacaggaccatttccacgagttgtacaaggtgatcctgctcccgaaccaaactcattacattatcccgaagggagaatgccttccctacttctcgttcgccgaagtggccaaacggggagtcgagggagcatactccgacaaccccatcatcagacacgcgtcaatcgccaacaaatggaaaactattcacctcataatgcatagcggcatgaacgcgactaccatccatttcaacctgaccttccagaacactaacgacgaagaattcaagatgcaaattaccgttgaagtggatactcgcgaggggcctaagctgaattcgaccgcgcaaaaggggtatgagaacctcgtctcgcctattaccctgctcccggaagccgaaatactgttcgaagatatcccaaaagagaagagattcccgaagtttaagagacacgacgtgaactctaccaggcgggcccaggaagaggtgaagatccctctggtgaatatctccctgctccccaaggatgcccaactgtccctgaacactcttgacctccagctcgaacacggcgacatcaccctgaaaggatataacctgagcaagtcagcgctgttgcgctcgttcttgatgaattcccaacatgccaagatcaagaaccaagcaatcatcaccgacgaaactaacgactcgctggtcgcgccgcaggagaagcaggtgcacaaaagcattcttccaaattcgttgggcgtgtcggagcggctgcagcggcttactttcccggcagtgtccgtgaaagtgaacggtcacgaccaaggtcaaaacccgccactggacctcgagactaccgcccgcttccgcgtggagactcatactcaaaagacgattggagggaatgtgacgaaggagaagcctccgtcgctgattgtgccgctcgaatcacagatgactaaggaaaagaaaatcactggaaaggaaaaggaaaatagtagaatggaagaaaatgcggagaatcacatcggagtgacggaggtcctcctcgggagaaagctgcaacattacactgattcgtacctggggttcctcccgtgggagaaaaagaaatacttccaggaccttctcgacgaggaggaatctctcaagacgcagttggcatatttcaccgattcgaagaatacgggcagacagctgaaagataccttcgctgattcgctgagatacgtgaataagatcctgaactcaaaattcggatttacttcccgcaaggttccagcgcacatgccgcatatgatcgatcggatcgtgatgcaagaacttcaagatatgtttcctgaagaattcgacaaaacttccttccacaaggtgcggcacagcgaggatatgcagtttgccttctcctacttttactaccttatgtccgcggtgcaaccattgaatatctcacaagtgtttgacgaggtggacacggaccagtccggagtcctgtcggacagagagatccgtaccctcgccaccagaatccatgagctgccactctctttgcaagatctgaccggactggagcatatgctgatcaactgttccaagatgctgccagcggatatcacccagttgaataacatcccgccgactcaggagagctactacgaccctaacctgcctccagtgactaagtccctggtgactaactgcaaacctgtgaccgacaaaatccacaaggcgtacaaggacaagaacaaataccgcttcgagatcatgggagaagaggagatcgcgtttaagatgatcaggaccaatgtgtcacatgtggttggccagctcgatgacattagaaaaaacccacggaagtttgtgtgcctgaatgataacattgatcacaatcacaaggatgcacagaccgtaaaagccgttttgcgggacttctacgagtcgatgttcccaatcccgtcccagttcgagcttcctagagaatacaggaacagattcctccacatgcatgaattgcaggagtggcgagcctaccgcgacaaactcaagttctggacccactgcgtgctggccactttgatcatgtttaccattttcagctttttcgctgaacagctcatcgcgttgaagcgcaagatctttccgcgccgcagaatccataaggaagcctcgcctaaccgcatcagggtg

SEQ ID NO: 16945 - DNA, 3768 bp, synthetic construct
  misc_feature 1..3768: note = source = /note="Description of Artificial Sequence: Synthetic coding sequence"
  source 1..3768: mol_type = other DNA
atgctgtttaagcttcttcaacggcagacttacacgtgcctaagccacagatacgggctctatgtgtgttttctgggagtggtagtgactatcgtgagcgctttccagtttggagaggtggtgctggagtggtccagggaccaatatcatgttttgttcgattcctaccgtgataatatagctggaaaaagctttcagaatcggctctgccttcccatgccaatagacgttgtgtatacatgggttaatggaacagatctggagcttctcaaagaactgcagcaggtgagggaacagatggaagaggaacagaaggctatgcgcgagatcctgggcaagaacacgactgagcctaccaagaagtccgaaaagcagctagagtgtctcctgactcattgtattaaggtcccgatgcttgtgctggatccggccttacctgctaacatcactctgaaagacctcccttcattgtacccatcttttcactccgctagcgatatctttaatgtcgccaaaccaaagaatccttctacaaacgtgtcagtcgtcgtcttcgactcaacgaaggatgtcgaggacgcccactcaggcctgttaaaagggaacagccgtcagacagtgtggcgaggatacttgactaccgacaaagaggtgcccgggcttgtcctaatgcaggacctcgcctttctgtcggggttccctccaacattcaaagagacaaaccagcttaaaaccaagctgcctgagaacctgtcatccaaggtaaagctgctccagttatacagcgaagcatctgtggctctgctcaagctgaacaatcctaaggattttcaagagctgaacaagcagaccaagaaaaacatgacaatcgacgggaaggaacttacaatcagtcccgcctacctcctgtgggatttgagtgcaatcagtcaaagcaagcaggatgaggacatctccgcttctagattcgaagataatgaggagttgagatactccctgagaagcatagaaaggcatgcaccttgggtgagaaatatcttcattgttaccaacggccagatcccctcatggctgaacttagacaacccccgagttactatcgtcacccaccaggacgtgtttcgtaacctgtcacaccttccaacattttccagccccgccattgaaagtcatattcaccgcattgaagggctgtcccaaaagttcatatatttgaacgatgatgtgatgtttgggaaagacgtttggccagacgatttttactcccactcaaaggggcagaaagtctacctgacgtggcccgtacccaactgcgcagagggttgccctggctcttggataaaggatggttactgcgataaggcctgtaacaatagcgcctgtgattgggacggcggcgattgctccggcaatagcggtggttccagatacatcgctggcgggggaggtactgggtcgataggggtcggtcagccttggcagtttggtggtgggatcaattctgtctcgtattgcaatcagggctgtgccaatagttggcttgcggataaattctgcgaccaggcatgtaatgtgctctcttgcggctttgacgcaggcgattgcggtcaggaccacttccatgagctctacaaagtgatactgctgccaaatcagacacattatataattccaaagggcgaatgtctaccctatttttctttcgccgaggtggccaaaagaggagtggaaggggcatactcagataacccaattatcaggcatgcctccatagctaataagtggaaaactatccacctcatcatgcatagtggcatgaatgcaaccaccatccacttcaatttaacgttccagaacacaaatgacgaagagttcaaaatgcagattacagtggaagtagacacgcgggagggtcctaaactaaattctacggctcagaagggatatgagaacctggtttctcccattacgttactgcctgaggccgagatcttattcgaagacatacctaaagaaaaacggttccctaagttcaagaggcatgatgtaaattcaaccaggcgggcacaggaagaggtgaagataccgctggttaacataagccttctacctaaagatgcacagttgtccttgaacaccctggacttgcagctggaacacggtgatattaccctcaagggttataacctgtctaaatccgccttattgaggagcttcctgatgaactcccagcatgctaagataaaaaatcaggccattatcacagacgagacaaacgactcattggtagctccccaggagaagcaggtgcacaagtcaatcttgcctaattcattgggagtctccgagaggctgcagcggctgacctttcccgctgtctcagtgaaagtgaatggacatgaccagggtcagaacccccctctcgacctagaaacaaccgcccgttttagagtggaaacacacacccaaaagactatcggaggaaatgtgaccaaggagaaaccccctagccttattgtgcccttagagagtcagatgaccaaggagaagaaaatcacaggcaaggaaaaagagaattcacgtatggaagagaatgctgagaatcatattggcgttaccgaggtgctgctcggtagaaaactccagcactacactgactcctacctggggttcctgccttgggagaagaaaaagtattttcaggatctcctagatgaggaggagtccttgaagacccagttggcctacttcaccgatagtaagaatacagggcggcagctgaaggacacgttcgctgactccctcagatacgttaacaagattctcaacagtaaatttggtttcacaagccggaaggtccccgctcacatgccgcacatgattgatcggatcgtaatgcaggagcttcaggatatgtttccagaggagtttgataagacatctttccataaagtcagacatagcgaggacatgcaattcgcttttagctatttctattatctgatgtctgcggttcagcctctcaatatctcacaagtgttcgatgaggtcgacaccgaccaatcgggcgttctgtcagatcgtgagatcaggaccctcgccactagaatacacgagctgcctctcagtctgcaagacctcactggcctcgagcatatgttaattaattgttctaaaatgttaccggccgatataacacagctgaacaacataccgccaacccaagagtcctactacgacccaaaccttccgcctgtgactaagagtctggttactaactgcaaaccagtaactgacaagatccataaagcgtacaaagataagaacaaatatcgtttcgagattatgggcgaagaagagattgcttttaagatgattagaacaaatgtgtctcatgtggtgggccagctcgacgacattaggaaaaacccccggaagttcgtttgccttaatgataacatcgaccacaatcacaaagacgcccagaccgtgaaagccgtcctgcgagacttctatgagtctatgttccctataccttcacagttcgagttgccacgcgaatatcggaaccgctttttgcatatgcacgaacttcaggagtggcgagcatatcgtgataagctaaagttctggactcattgcgtacttgcaacacttataatgttcacaattttttcctttttcgcagagcaactaatcgctttgaaaaggaaaattttcccacgaagacgcatccataaagaggcttctcctaatcggattagggtc

SEQ ID NO: 16946 - DNA, 3768 bp, synthetic construct
  misc_feature 1..3768: note = source = /note="Description of Artificial Sequence: Synthetic coding sequence"
  source 1..3768: mol_type = other DNA
atgttgttcaaattgctgcaaaggcagacctacacatgtctttcgcacagatacggcctttacgtctgtttcttgggcgtggtggtaacgattgtttcggctttccaattcggtgaggtcgttctcgaatggtctcgggatcagtatcacgtcttgtttgacagctacagagataacatcgctggcaagtcgttccaaaaccggctgtgtcttcctatgccgattgatgtcgtgtacacctgggtcaatggtacggatctcgagctccttaaggagctgcaacaagtccgcgaacagatggaagaagaacagaaagcaatgcgtgagatactcggtaaaaataccacagaacctactaagaaatcggagaagcaacttgaatgcctgttgactcactgtattaaagtacctatgctcgttcttgaccccgctcttccagcgaacataacccttaaggatctgcctagtctctacccttcctttcattcagctagtgacatctttaacgtagcgaaacctaagaaccccagtacaaatgtttccgtcgtggtctttgactcaacaaaggatgttgaagacgctcattctggattgcttaaaggaaattccaggcagactgtctggcgaggttatcttacaaccgacaaagaagttcccgggttggtgctcatgcaggatctggccttcttgtctggtttcccacccaccttcaaggagacaaatcagctgaaaaccaagctcccagagaatttgagctctaaggttaagttgctacaactgtacagcgaggcgtcagtggcgttattgaaactcaacaaccctaaagacttccaagaactgaataagcaaactaagaagaacatgactatcgatggtaaggagctcacgatctcaccagcttacctgctatgggatctatcggcaatctctcagtccaagcaggacgaagatatctctgcctcccgattcgaggataatgaggagctcaggtattcactacgctcaattgagagacatgccccatgggtgcgcaatatattcattgtaaccaatggccaaattccttcctggttgaatctggacaatccccgcgttacgatcgtaacccatcaagacgtttttcgaaacctgtcccatctacccacattctctagcccggcgatagaatctcatattcatcgtattgagggattgtctcaaaagtttatatatttgaatgacgatgtaatgtttggaaaagatgtgtggcccgatgatttttacagccactctaagggtcagaaggtctacctgacatggcctgtaccaaattgtgccgaaggttgcccaggatcctggatcaaggacggctattgtgataaagcttgtaacaattcggcttgtgattgggatggaggtgattgctcaggaaactctggcgggtcgaggtacattgctgggggaggcggtacagggtcaataggcgtcggccaaccgtggcagtttgggggtggtatcaactctgtgagttactgcaaccaaggctgtgccaactcctggttggcggataagttctgtgaccaagcctgtaacgtgttgtcctgtggatttgacgccggcgattgcggtcaagatcacttccatgaactgtacaaggtcattcttttacccaaccaaacacactacatcattcccaagggtgaatgcttgccttacttctcgttcgctgaagtggctaaacgtggagtcgagggcgcatattctgacaacccgattatacggcacgccagcatagctaataagtggaagacgatccacctaatcatgcacagcggtatgaacgctaccacgattcactttaacctgacgtttcagaacaccaacgacgaagagttcaagatgcagatcaccgtcgaagtggacacgcgtgaagggcctaaactcaactctacggcccagaaaggttacgagaacctggtttctcccattaccctcctgccggaggccgagattctgtttgaggatattccaaaggagaaaagatttccaaagttcaaacggcatgacgtgaattctactcggcgcgctcaggaggaggtcaaaataccgctcgtcaacatctccctattgcccaaggatgcacagttgtctctgaataccctggacttacagctggaacatggcgacatcacccttaaaggatacaatctttctaagtcagctctcctccgctctttcctaatgaattctcagcatgccaagatcaaaaaccaagcgatcatcactgatgagactaatgactccctggtggcgccccaggaaaagcaggtgcacaagtcgattctgcctaatagcttgggcgtctctgagaggctgcagcgcctcacctttcctgcggtttcggtaaaagtaaatggtcatgatcaaggccagaaccctcctttagatttggagactaccgcacgtttccgtgtggaaacacacacgcagaaaactatagggggcaatgtgacaaaagagaagcccccttcccttattgtaccgcttgaaagtcagatgacgaaagaaaaaaagattacaggaaaagaaaaagagaactcccgaatggaagaaaatgccgaaaaccatattggagtgacagaggtcctgttgggccgcaagcttcagcactatacagatagctaccttggttttctaccttgggagaagaagaagtactttcaggatctacttgatgaagaagaatcactgaagacgcaattggcttatttcaccgacagtaagaatactggccgccagctcaaagatacattcgcggactcacttagatacgtgaataagatcctgaatagcaagtttggcttcacgtcccggaaagtacccgctcacatgccgcatatgatcgaccggattgtgatgcaggaactgcaggatatgttccctgaggagtttgataagaccagcttccataaagtgaggcactctgaggacatgcagtttgctttttcttatttctattatctcatgtccgctgtccagccgttgaacatcagccaggtcttcgatgaggtcgatactgaccagagtggagtgctctccgatcgcgaaattcggacgctcgctactagaattcacgaactgccactgtccctccaggacctaaccggactcgagcacatgttgataaactgttccaaaatgcttccggccgatataacccagctcaataacatcccaccaacccaggagtcgtactatgaccctaacttgccccctgtaacaaaatctttagttaccaattgtaagccggtgactgataaaatacataaagcctataaggacaagaacaagtacaggtttgagatcatgggcgaggaggagatagcatttaaaatgattcgcaccaacgtttcgcacgttgtgggtcaacttgacgacatccggaagaatccgcgtaaattcgtttgtttgaatgacaacatagaccacaatcacaaggacgcccagaccgtcaaggccgttctgcgtgatttttacgaatccatgtttcccataccatcgcagtttgagcttcctcgtgaatatagaaatcggtttcttcatatgcatgaactgcaagaatggcgtgcgtatcgggacaagctaaagttctggacccattgtgttttggccactttgattatgttcacaatattttcatttttcgccgagcagttaatcgccttaaaacggaaaatcttccctcgccgccggatccataaagaagcttctcctaatcgcattagggtt

SEQ ID NO: 16947 - DNA, 3768 bp, synthetic construct
  misc_feature 1..3768: note = source = /note="Description of Artificial Sequence: Synthetic coding sequence"
  source 1..3768: mol_type = other DNA
atgctcttcaagctgctgcagagacaaacttacacctgcctctcccaccgctatggcctgtacgtctgcttcctgggagtcgtggttaccatcgtgtcggctttccagttcggtgaggttgtgttggagtggtcgagggaccaataccatgttctgttcgattcgtaccgcgacaatatcgccggcaagtcgttccagaatcggctgtgcctgccaatgccaatcgatgtcgtctacacctgggtgaatggaactgacctggagctgcttaaggaactgcagcaggtgcgggagcaaatggaggaagagcagaaggccatgagagaaattctgggtaagaataccaccgaaccaaccaagaagtctgaaaagcagttggaatgcctgctgactcattgcatcaaggtgccaatgctcgtcttggacccggccttgccggcgaacatcaccctgaaggacctgcctagcctctacccatccttccacagcgcctcagatatcttcaacgtcgctaagcctaagaatccgtccactaacgtcagcgtggtcgtgttcgactcgactaaggatgtggaagatgcccattctggacttctcaagggtaactcgagacaaaccgtgtggcggggataccttactaccgacaaggaagttcctggcctggttctcatgcaggatctcgcctttctgagcggatttccaccgactttcaaggaaactaaccaactcaagaccaagttgccggaaaatctgtcgagcaaggtcaaacttctccagctgtactcagaagctagcgtcgccctgctgaaactgaacaaccctaaggacttccaggagctgaacaaacagaccaagaaaaacatgactatcgatggtaaggaactgactatctcgccggcctacttgctctgggacctgagcgctattagccagtcaaagcaggacgaagatatctcagcgtccagattcgaagataacgaagaactgcgatactcgctccgatccatcgagcggcatgccccatgggtgcgaaacatctttattgtgaccaatggccaaatcccctcgtggctcaacctcgacaacccacgcgtcaccatcgtcacccaccaggacgtgtttcgcaacctgtcgcatctgccaaccttctcatcccctgctatcgaatcgcacattcaccggattgaaggactctcccagaagttcatctacctgaacgatgatgtgatgttcggaaaggacgtctggccagatgacttttactcccattccaagggacagaaggtctacctcacctggccggtgccaaattgcgccgagggttgccccgggtcctggattaaggacgggtactgcgataaggcgtgcaacaatagcgcgtgcgactgggacggaggagattgctccggaaactccggtgggtcacggtacatcgccggaggtggaggcactggtagcattggtgtcggacagccgtggcagttcggcggaggtattaacagcgtgtcttactgtaaccagggttgcgcaaactcatggctggcagacaaattctgtgatcaggcgtgtaacgtgttgagctgcgggttcgacgcgggagactgtggacaggatcacttccacgagctttacaaggtgatcctcctcccaaaccaaactcactacatcatcccaaagggcgaatgcctcccgtacttctcgttcgctgaagtcgccaaaagaggcgtggaaggagcgtactcggacaacccgatcattcggcatgcatccatcgccaacaaatggaaaactattcacctgattatgcactccggaatgaacgcgactactatccacttcaaccttactttccagaacactaacgacgaagaattcaaaatgcagattaccgtcgaagtggatacccgggaggggccgaaactcaactccactgcgcaaaagggatacgagaacctcgtgtcgccaatcaccctgctccctgaagccgaaatcctgttcgaagatatcccgaaagaaaagagattccccaagttcaagagacacgacgtgaactccactcgccgggcgcaagaagaggtgaagattccattggtgaacataagccttctgccgaaagacgcccaactgtcgctgaacaccctggacttgcagctggaacatggagacatcacccttaaggggtataacctctccaaatcggcgctgctgcggagctttcttatgaattcgcaacatgccaagatcaagaatcaagctatcattaccgatgaaacgaacgactcgctggtcgcccctcaggaaaagcaagtgcacaagtcgattttgccgaactcgctgggggtttcagagcggctgcagcggctgaccttccccgcggtcagcgtcaaagtgaacggccacgaccagggacagaacccgccactggatcttgaaactactgcacgatttcgggtcgaaactcatacgcaaaagactatcgggggaaacgtcactaaggaaaaaccgccatcgctcatcgtgcctctcgagtcacagatgactaaggagaagaagatcaccggaaaagaaaaggagaatagccgcatggaagaaaatgccgaaaatcacatcggagtgacggaagtgctgctcggccgcaagctgcagcactatactgactcgtacctgggcttcctgccttgggaaaagaagaaatacttccaggacctcttggatgaggaggaatccttgaaaacgcaactcgcatatttcaccgactccaagaatactggaaggcaactgaaggacaccttcgcggactccctccgctacgtcaacaagattctgaactccaagttcggctttacctcccgcaaagtgccggcacatatgccgcatatgatcgatcggattgtgatgcaagaactgcaggatatgtttcctgaagaattcgacaaaacgagcttccataaggtgcggcactcggaggacatgcagttcgccttctcatacttttactacctcatgagtgcggttcagcccctgaatatctcacaagtgttcgacgaagttgacaccgatcaatccggagtcctgtcggacagagagatcagaaccctcgccacccggatccacgaactgccgctctcactgcaggacctgacggggttggaacatatgctgataaactgctcaaagatgctccctgccgacatcactcaactgaacaacattccgccgacccaggagtcttactacgatccgaacctgccgccagtgacgaagtcgttggtgacgaactgcaagccagtgaccgacaagatacacaaggcctacaaagacaaaaacaaatacagatttgagatcatgggcgaggaggaaattgcgttcaaaatgatcaggacgaacgtttcgcacgtcgtgggccagctggacgacataagaaagaatccgaggaaattcgtctgccttaacgacaatatcgaccataatcacaaggatgctcagactgtcaaggccgttcttcgggacttctacgaatcaatgtttcccatcccttcccaattcgagctgccgcgcgagtaccggaaccgttttctccacatgcatgaactgcaggaatggcgcgcctaccgggataagctgaagttctggacccactgtgtgctcgctaccctcatcatgtttacgatcttcagcttcttcgcggagcaactgatcgcgttgaagaggaagatttttccgagacgccggatccacaaagaagcatcgccgaatagaatccgggtg

SEQ ID NO: 16948 - DNA, 3768 bp, synthetic construct
  misc_feature 1..3768: note = source = /note="Description of Artificial Sequence: Synthetic coding sequence"
  source 1..3768: mol_type = other DNA
atgctgtttaaattgttacagcgccaaacttacacttgcctgtcccatcggtatggactgtacgtgtgcttcctgggggttgtggtaaccattgtgagtgcctttcagtttggagaagtggtactggaatggtccagggatcagtaccatgttcttttcgacagctatcgggataatattgccggcaagtccttccagaatcgcctatgcctcccgatgccaatcgacgtggtctatacatgggtaaacggaacagacctcgaactgctgaaagaactccagcaagtgcgtgagcaaatggaggaagaacagaaagcaatgcgggagatattgggcaaaaataccactgagcctaccaagaagagtgaaaagcaactagaatgccttctcacacattgcataaaagtcccaatgctcgtgctggacccagcacttccagcaaatatcactctgaaggaccttccttccttatacccctctttccattctgcctctgacatctttaacgtggccaagcctaaaaacccttctactaacgtgagtgtagtcgttttcgacagcactaaggacgtggaagacgctcactccggcctactcaagggcaattctcggcagaccgtgtggcgcggttacctgacaaccgataaagaagtgcctgggctggtcctgatgcaagatttggcttttctatctggctttccacctacctttaaagaaaccaaccagctgaagacgaaattacccgagaatctgtctagcaaagtcaagctactgcagctgtattccgaagcctctgtggcactcttgaaactaaataaccccaaggacttccaagagttgaataagcagactaagaagaacatgaccatcgacggaaaggagctcaccatctcacccgcttacctcctctgggatctgtcggccatatctcagtccaagcaggatgaggacatcagcgcaagccggttcgaggataatgaggagctgcgatacagtttgcggagcatcgagaggcacgccccttgggttcgcaacatcttcattgtgacgaatggccaaatccctagttggctgaatctcgacaacccacgcgtgactatcgttacccaccaggacgttttccgcaacctatcgcatctccccacattctcgagccctgcgatcgaatcccacatccacaggatagaaggactgagccagaaattcatctacctcaatgacgatgtgatgtttggcaaggacgtttggcccgatgacttctacagccatagtaaaggtcagaaggtgtatttgacatggcctgtccctaattgtgcggagggatgtccagggagctggataaaggacggctattgtgacaaagcctgtaataatagcgcctgcgactgggacggcggggactgttctggaaacagcgggggatcccggtacatcgccggcggcggaggcacaggctctattggagttgggcagccttggcaattcggtggcggcattaactctgtatcctattgcaaccagggttgcgccaatagctggctggccgacaaattttgtgaccaggcatgtaatgtgctgtcttgtggatttgacgcaggcgactgcggtcaagaccacttccatgaactttacaaagtgattctcttacccaaccaaacacactacattattcccaagggcgagtgccttccctacttctcattcgccgaggtagctaagagaggtgtggaaggtgcttatagtgataatccaattatccgtcacgcaagtattgcaaacaaatggaagaccatccatttgattatgcactcaggaatgaatgctactactatccacttcaacctgacattccagaacaccaacgacgaagagttcaagatgcagattaccgtggaggtcgatactagagaggggcctaagctaaactcaacggcccagaagggatatgaaaacctggtcagtcctattacactcttacccgaagccgagatcctgttcgaagacatccctaaggagaaacggttccctaagttcaagaggcatgacgtgaacagtacccgtagagcccaggaagaggtgaagatcccattggtcaacatctccctcttaccgaaagacgcacagctcagcctcaacaccctcgatcttcagctcgagcacggagacatcacactcaagggctacaacctctcgaagagcgccctcctgcggtcttttctcatgaactcgcagcacgcgaagattaaaaaccaggctatcattacagacgaaaccaacgacagtctcgtcgcaccccaagagaagcaagtccataaatcaatcctccctaactctctgggagtgtcggagagactacagcggttaaccttcccagctgtttccgtgaaagtgaacggccatgaccagggtcagaatcctcccctggacttggaaaccaccgcaagatttcgcgtggaaacccacacacagaaaactatcggcgggaatgttactaaggagaagcctccaagcctaatcgttcctctggaaagccagatgaccaaagagaagaaaatcacaggcaaagagaaggagaattctaggatggaagaaaacgccgaaaatcatatcggggtgactgaggtgctcctcggaagaaagctccaacattatacggacagctacttggggttccttccttgggaaaaaaaaaaatactttcaagacttgctcgacgaggaagaatccctcaagacccagctcgcgtatttcacggattctaagaacacggggaggcagctgaaagatacttttgccgatagcctccgttacgtcaacaagatcctgaactcaaaattcggatttacaagccggaaggtccctgcacacatgcctcacatgatcgaccgaatcgttatgcaggagctgcaagacatgttcccagaggagttcgataagacttccttccacaaagtacgccatagtgaggatatgcagttcgcctttagctatttctactacctcatgagcgcagtccagcctttgaacatcagtcaggtttttgatgaggtggatacagatcagtccggcgtgctgtccgatagagagataaggactctggccacccgcattcacgagctgccgctctctctgcaagatctcaccggcctggagcacatgctgatcaactgcagtaaaatgctgcctgctgacattacccagctaaataatattccacccactcaggaatcctactacgacccaaacctgcccccagtgactaagtccttggtcactaactgcaagcccgtcactgacaaaattcacaaggcctacaaggacaagaacaagtaccgattcgaaatcatgggagaagaagaaattgcttttaagatgatcagaacgaacgtctctcacgtggtcggtcagctcgatgatatcagaaagaaccctagaaagtttgtgtgcctaaatgataacatcgatcacaatcacaaggacgcccagacggtgaaggctgtgctgcgcgacttttacgaaagcatgtttccgattcctagccagtttgagctacctcgcgagtataggaaccgatttcttcatatgcacgagctgcaggaatggagggcttatagagataagctgaaattctggacacattgcgtgctggccacacttattatgttcacgatcttctccttctttgccgagcagttaatcgcgctgaaaagaaaaattttccctcgccgtcggatccataaagaggcttcgccaaaccgaattcgagtg

SEQ ID NO: 16949 - DNA, 3768 bp, synthetic construct
  misc_feature 1..3768: note = source = /note="Description of Artificial Sequence: Synthetic coding sequence"
  source 1..3768: mol_type = other DNA
atgctgtttaagctcctgcagaggcaaacttacacctgcttgtcccacaggtatggactttacgtgtgcttcctgggcgtagtggtgactattgtctcagcttttcaatttggtgaagttgtcttggaatggagcagggaccagtatcacgtgctttttgattcttaccgcgataatatcgcaggaaagagttttcaaaaccgcctgtgcctcccaatgcccattgacgtcgtgtatacatgggttaacggaacagatctcgaactgctcaaggaactgcagcaggtgcgcgagcagatggaagaggagcagaaggctatgcgtgagattctgggcaagaataccacagagcccacaaagaagagcgaaaagcagttggagtgcctgcttacacattgcatcaaggtccccatgttggtgcttgatcctgcactcccagctaacataacattgaaggacttgccctccttgtatccaagttttcactccgcatcagacatcttcaacgtcgctaagcctaagaatccctctaccaacgtatccgtggttgtgttcgactcaactaaggacgtggaagatgctcattcaggtcttctgaagggcaactcccgtcagaccgtttggcgcggatacttgactaccgacaaggaagttcctggtttggtgttgatgcaagacttggcctttctctccggctttccccctacttttaaggaaactaatcaactgaagaccaaacttcctgagaacctttctagtaaggtgaaactgcttcaactgtattccgaggcttcagtcgccttgttgaaacttaacaatcccaaagattttcaggagctcaataaacaaactaaaaaaaatatgaccatcgacggaaaggagttgaccatttcaccagcatatcttctttgggacctcagcgctatctcccagagcaagcaagacgaggatatctctgcttcccgcttcgaggacaacgaggagctgcgttactccctccgcagcatcgagcgccatgctccttgggttcgcaacatatttatcgttactaacggtcaaattccctcctggctgaacttggataacccacgcgtgacaatcgtaacccatcaagatgtcttcagaaatctttcccatctccccactttctcctcccctgccatagagtctcatattcatcgtatagaaggcctctcccaaaagtttatctatctgaatgatgacgtaatgtttggcaaggacgtttggcctgacgacttctactctcacagcaagggacaaaaggtttacttgacctggccagttcccaattgcgccgagggttgccctggatcttggattaaagatggctactgcgacaaagcctgtaacaactctgcttgtgattgggacggcggtgactgctctggtaattctggaggcagccgctacatcgcaggcggtggaggtactggaagcataggagtaggacagccctggcagttcggaggcggcatcaactctgtgagttattgcaaccaaggatgcgccaactcctggcttgctgataagttctgtgaccaagcctgtaacgtcctgagctgcggttttgatgccggcgactgcggacaggatcacttccacgagctttacaaggtaatcctcctccccaaccagactcattatatcattcctaagggtgagtgtctgccttactttagctttgctgaggtggctaagagaggtgtcgaaggcgcttacagtgacaatccaataatcaggcatgcttctatcgccaacaaatggaagaccatccacctcatcatgcattccggcatgaacgcaacaacaatacacttcaacctcacattccagaacaccaatgatgaggaatttaaaatgcaaatcaccgtggaggtggatacccgtgaaggacccaaattgaacagcactgcccagaagggttatgaaaacctcgtttccccaatcactctcctcccagaggccgagattctgttcgaggacatccccaaggagaagcgtttcccaaagtttaagcgccacgatgtgaatagtacacgtcgcgcccaagaagaagtgaagatccctctggtcaacattagtctgctgcccaaggacgcccagttgtcattgaatactcttgatttgcagttggaacacggcgacataacactcaagggctataatctgagcaaatccgctctgcttcgcagtttcctgatgaactcacaacacgccaagatcaaaaatcaggccatcattactgacgaaacaaacgatagtctcgtagcccctcaggaaaagcaggtccataaatctatcctgcccaatagcctgggcgtctctgaaaggttgcagcgtctgacatttcccgccgtgagtgttaaggtcaatggacatgaccaaggtcaaaaccctccactggacttggaaacaaccgctaggtttagggtggaaacacacacccagaaaaccataggtggcaacgtgactaaggagaagcctccttctctcattgtccccctggagagccagatgacaaaagagaagaagataaccggcaaggaaaaggaaaattcacgtatggaggaaaacgctgagaatcacataggagtgacagaggtcctgcttggcaggaagctgcagcactatactgatagttatctgggtttcctcccttgggagaagaagaagtacttccaggacctgctggatgaggaggagagtctgaagacccaattggcatacttcaccgactctaagaacactggccgccaactgaaggacaccttcgccgatagcctgcgttatgtaaacaagatactgaatagcaaattcggctttacttctcgcaaggtaccagctcacatgccacacatgatagaccgtatagtcatgcaggagttgcaggacatgttccctgaggaatttgataagacctccttccacaaagttcgccattccgaggacatgcagttcgccttctcctacttctattacttgatgagcgcagtgcagcccctgaatatttcccaggtgttcgacgaggttgataccgaccagtcaggcgtgctctccgatcgcgagatccgcactctggccacaaggattcacgagctgcctctctccctccaagatcttaccggactggaacacatgctgataaattgctcaaaaatgttgccagccgatattacacagctgaacaacattccccccactcaggaatcatactacgaccctaacctccctcctgttacaaaatctctcgtgactaactgcaagcccgttaccgacaagatccacaaggcctacaaggacaaaaataagtacaggtttgaaatcatgggagaagaagagatcgctttcaagatgatccgcactaatgtgtctcatgtagtgggacagttggacgacatcagaaagaaccccagaaaattcgtctgcctcaacgacaacatcgatcataatcacaaggatgcccagaccgttaaagccgtcctgagagacttctatgagtctatgttcccaatccccagccagtttgaactgccccgcgagtacaggaaccgcttcctgcacatgcacgaactgcaggagtggcgtgcttaccgcgataaactcaagttctggacacactgcgtcctggcaactctgatcatgtttacaatcttcagctttttcgctgaacagctcatcgcactgaagagaaaaatcttccctagacgccgcatacacaaggaggcatccccaaacaggattcgcgtc

SEQ ID NO: 16950 - DNA, 3768 bp, synthetic construct
  misc_feature 1..3768: note = source = /note="Description of Artificial Sequence: Synthetic coding sequence"
  source 1..3768: mol_type = other DNA
atgctgttcaagctccttcagcgccaaacgtacacctgcctgtcccatagatacggactctatgtttgttttctgggagtcgtggtcaccatcgtgagcgcttttcagttcggtgaggtggtgctcgaatggagcagggaccaataccatgttctcttcgacagctacagggacaatatcgccggaaagagcttccaaaatagactttgtctgcctatgcccatcgatgtggtctatacctgggtgaacggcaccgatcttgagctcctcaaggaacttcaacaagtgagagagcagatggaggaagaacagaaagccatgagagaaatccttggaaagaacactaccgagcctacgaagaaatcggaaaagcaactcgaatgcttgctcacccactgcattaaagtcccaatgcttgtgctcgatcctgcacttccggccaacattactctcaaagatctgccctcactttacccttcctttcacagcgcaagcgacattttcaatgtggctaaaccgaagaacccctcgaccaacgtcagcgtggtcgttttcgattccactaaagacgtcgaagatgcacattccggtctgctcaagggcaactcacgacaaactgtgtggcgcggctacctcaccaccgataaggaagtccctggacttgtgcttatgcaggatctggcgtttctttccggtttccccccaactttcaaggagactaaccagctgaaaaccaaactccccgagaatctgtcctcgaaggtgaaactgctccaactgtactcggaagcctcagtggccctccttaaactcaacaaccccaaggacttccaggagctcaataagcaaactaagaaaaacatgaccattgacggtaaggaacttactatctcacccgcttaccttttgtgggacctgtcggcgattagccagtctaaacaagatgaagatatttccgcaagcagatttgaggataacgaggaactgagatactcactgcgctctattgagaggcatgcgccatgggtgcgtaacatattcatcgtcactaatggacaaataccatcctggctgaatcttgataatccgcgggtgaccattgtgacccatcaggatgtgtttcggaaccttagccatcttccaacctttagctccccggccatcgaatcgcatatccatcgcatcgagggattgtcgcaaaagttcatttaccttaatgatgatgtgatgttcgggaaggatgtgtggcctgatgacttttacagccattccaaaggacagaaggtctacctgacctggccagtgccaaattgtgccgagggatgtccaggatcatggattaaggatggctactgcgataaggcttgtaacaactccgcctgtgattgggatggaggtgattgttccggaaattcgggagggtcacggtacattgcgggaggcgggggaacggggtcgattggagtgggtcaaccatggcaatttggaggtgggattaacagcgtctcatactgcaaccagggatgcgcaaactcgtggcttgcggacaagttctgcgatcaggcatgtaacgtcctgtcctgtggatttgatgcaggagattgcggacaagatcatttccatgaactgtacaaggtcattcttcttcctaaccagactcattacatcattccaaagggcgaatgcctgccttatttctcgtttgcagaggtcgccaagcgtggggtggaaggagcatactccgacaacccgatcatcaggcatgccagcattgcaaacaaatggaaaaccatacacctgatcatgcattcaggaatgaatgccaccactatccactttaatcttactttccaaaatactaatgatgaggagtttaagatgcaaattacggtcgaagtggatacgagagaggggccaaaacttaattccacggcacaaaagggatacgagaatctggtgagccccattactcttcttccagaagcggagattcttttcgaggatattccgaaagaaaaaaggtttccaaagttcaagagacatgatgttaacagtaccaggcgggcacaggaagaagtcaagatccctctggtgaacattagtctgctgccaaaagatgcacagctttcccttaacacccttgatctgcaacttgaacacggcgatattactttgaagggttacaacctttcgaagagcgcgctgcttcgatcgtttctgatgaattctcaacacgccaagataaagaaccaggcaattatcactgatgaaaccaatgattcacttgtcgccccacaagagaagcaagttcacaagtcgattcttccaaattcgcttggtgtgtccgaaagacttcaacgacttacttttccagcagtctcagttaaagtgaatggacatgaccaaggtcaaaatcctcctctggaccttgaaactactgcacgcttcagggtggaaacccacactcaaaagaccattggaggcaatgtgaccaaggagaaacccccctcgcttatcgtcccactggagtcgcaaatgaccaaagagaaaaagataaccggcaaggagaaggaaaactcgcgaatggaggaaaacgccgagaaccacattggagtgaccgaggtgctgctggggcgtaagctgcaacattacacggatagctacctgggtttcctgccgtgggagaagaagaagtattttcaggacctgcttgatgaagaagaatccctgaaaacccagctggcatactttaccgattcgaaaaacaccgggagacagctgaaggacacctttgccgattcacttcgatatgtcaataagattctcaactcgaaatttggatttacttcacgcaaagtgcctgcccacatgccacacatgattgaccggatcgttatgcaagagctccaagatatgttccctgaagaatttgacaaaaccagcttccacaaggttagacactcggaagatatgcaatttgctttctcgtatttctactacctgatgtctgcagtgcaacccctcaacattagccaggtgtttgatgaagtcgacaccgatcagtcaggcgtgctgagcgaccgcgaaatcagaaccctggcgactcggattcatgaactgcctctgagcctccaggatttgaccgggctggaacatatgctgatcaactgttcgaagatgcttcctgctgacattacccaactcaacaacatcccaccaactcaagaatcctactacgatccaaatctgccacccgtcactaagagcctggtgactaactgcaaaccggtgactgacaaaatacataaggcatacaaagataagaacaaatacagatttgagataatgggagaggaggagattgcatttaagatgatacgaaccaacgtgagccacgtggtcggacaactggatgatattcgtaagaatcctcgcaaatttgtgtgtcttaatgataacatcgatcataaccataaggacgctcagactgtgaaggccgtgctgcgagacttttacgagagcatgtttcccataccatcgcaatttgagctgccaagagaatataggaacaggttcctccacatgcatgaactgcaagaatggcgggcgtacagggacaagctgaagttttggacccactgtgtcttggcgactctgattatgtttaccatcttctcgttcttcgcagaacagctgatcgcccttaagagaaaaatcttcccaagacggcggatccataaggaggcctcccccaaccgcattcgggtg

SEQ ID NO: 16951 - DNA, 3768 bp, synthetic construct
  misc_feature 1..3768: note = source = /note="Description of Artificial Sequence: Synthetic coding sequence"
  source 1..3768: mol_type = other DNA
atgctgtttaagctgctccagcggcaaacctatacctgtctgtcgcacaggtacggcctgtacgtgtgcttcctgggagtggtggtgactatcgtgagcgcgtttcaatttggagaggtggtgctggagtggtcccgagatcaataccatgtgctgttcgacagctatcgtgacaatatcgctggtaaatcgttccagaatcgcttgtgtctgccaatgccgatcgacgtcgtgtacacctgggtgaatggtaccgatcttgagctgttgaaagagctccaacaggtgagggagcagatggaagaagagcagaaggctatgcgggaaattctgggaaagaatactaccgaacccaccaagaaatcggagaaacagttggagtgccttctcacccactgtataaaggtgccaatgctcgtgctggatcctgcgctcccggcgaacatcactctcaaagacctgccctccctgtacccatccttccactccgcttcggacatctttaatgtggcaaagccgaagaacccatccactaatgtaagcgtggtcgtgttcgacagcaccaaggacgttgaagatgcccattcaggcctgttgaagggaaactcaaggcagactgtgtggcgcggctacctgactaccgacaaggaggttccgggactcgtgctcatgcaggacttggcgttcctgtcgggattcccgcctactttcaaggaaactaaccaactcaaaaccaagctcccggaaaacctcagcagcaaggttaagctcctgcagctgtactcggaggcgtccgtggcactgctgaagctgaataacccgaaggatttccaggaactgaacaaacagactaagaagaatatgaccatcgatgggaaggaactcactatttcaccagcgtaccttctgtgggatctgagcgcaatctcccaatcaaagcaggacgaggacatctccgcttcccggttcgaggataacgaagagctgagatactctcttcgcagcattgagagacatgccccttgggttcgcaacatctttatcgtgacgaacgggcagattccgtcttggctgaatctggataatccacgcgtgaccattgtcacccaccaggatgtgtttcggaatttgtcacatttgcctactttttcgtcaccggcaatcgaatcacatatccatagaattgaaggactctcgcaaaagttcatctacctcaacgacgacgttatgttcggcaaggacgtatggccggacgacttctactcgcattcgaaggggcaaaaagtctacctgacttggccggtgccgaactgcgcggagggctgcccagggtcgtggatcaaggatggctactgcgacaaggcctgcaacaactcggcctgcgactgggacggaggagattgcagcggcaactccggtgggagccgctacattgctggaggtggaggaactggatccatcggggtcgggcaaccgtggcagttcgggggcggaatcaacagcgtctcctactgcaatcaaggttgcgccaatagctggcttgccgacaaattctgcgatcaggcgtgcaacgtcctctcctgtggattcgacgccggagattgtggacaagaccatttccatgaactctacaaggtcattttgctgccgaaccaaacgcactatatcatcccgaagggggaatgtttgccgtacttctcatttgcggaggtggccaagcggggagtcgagggggcatacagcgataatcctatcattcggcatgccagcatcgccaacaagtggaaaacgatccacctgattatgcattccggtatgaacgccactaccatccatttcaacttgactttccaaaacaccaacgacgaggagttcaaaatgcaaatcaccgtggaggtggacacccgcgagggcccgaaactgaattcaactgcgcaaaaggggtatgagaatctcgtgtcgccgatcactctgctgcctgaagccgaaatcctgtttgaagatatcccgaaagaaaagagattcccaaagttcaagcggcacgatgtcaacagcaccagaagagcccaggaagaagtgaagatccctctcgtgaatatctccctgctgcccaaggacgcccaactttcgttgaacactctcgacctgcagctcgagcatggggatatcacccttaaaggatacaacctcagcaagtcggccttgttgcgcagcttccttatgaattcacaacatgctaaaatcaaaaatcaggcaatcatcacggatgagactaatgactccctcgtggcaccacaagagaagcaggtccacaaatcgatcctcccaaactccctgggcgtgtccgaacggctgcagagactgaccttcccagcagtgagtgtgaaagtgaacggacacgaccagggacagaacccgccgctggacctggaaaccactgctcggtttcgggtagaaactcatactcagaaaacgatcggaggcaatgtgacgaaggaaaaaccgccaagcctcatcgtgcctctggaatcccagatgactaaggagaagaagatcactggaaaggaaaaggaaaattcacgcatggaggagaatgcagaaaaccatatcggtgtgaccgaggtcctccttggtcgcaagctgcagcactacaccgactcctacctgggatttctgccatgggaaaagaagaaatacttccaggacctgctcgatgaagaggaaagcctcaagactcagctggcatacttcaccgattcgaagaatacgggccgccaactgaaggataccttcgcggactcgctgagatacgtgaataagatccttaactcaaagtttgggttcacctcaaggaaggtgccggcccacatgcctcacatgattgaccgcatcgtgatgcaggagctgcaggacatgtttccagaagaattcgacaagacctcattccacaaagtccgccatagcgaagatatgcaatttgcgtttagctacttctactacctgatgtcggcagtccaacctctgaacatctcgcaggtattcgatgaggtggatactgaccagagcggagtgctttcagaccgggagattagaactctggcaacccggattcatgaactcccgttgtcgctccaagatctgactgggctggagcatatgctgattaactgcagcaaaatgctgccagctgacattacccagctgaacaacatcccgccgacccaggagtcctactacgacccaaacctgccaccggtcactaagtcgctggtgaccaattgcaagccggtgaccgacaagatccataaggcctacaaggacaaaaacaagtatcggtttgagatcatgggtgaagaggagatcgcgttcaagatgatccggaccaatgtcagccacgtcgtcggtcaactggacgacatccggaaaaatccacgcaagttcgtgtgcctcaatgacaacatcgaccataaccacaaggatgctcagacggtgaaggcagtactgagagatttctatgagtccatgttccctatcccatctcaattcgaacttccgagagagtacaggaaccgtttcctgcacatgcacgagctgcaagaatggagagcttaccgggataaactcaaattctggacccactgcgtcctggcaacccttatcatgttcaccatcttctcgttctttgctgaacagctgatagcgctgaagcgcaaaatctttccgcgccgcaggatccacaaggaggcgtcccctaaccgcatcagggtg

SEQ ID NO: 16952 - DNA, 3768 bp, synthetic construct; identical to SEQ ID NO: 16879
  misc_feature 1..3768: note = source = /note="Description of Artificial Sequence: Synthetic coding sequence"
  source 1..3768: mol_type = other DNA

SEQ ID NO: 16953 - DNA, 3768 bp, synthetic construct
  misc_feature 1..3768: note = source = /note="Description of Artificial Sequence: Synthetic coding sequence"
  source 1..3768: mol_type = other DNA
atgctgttcaagctgctgcaacgccagacttacacctgcctgtcacatagatacggtctgtacgtctgtttcctcggggtggtggtgaccatcgtctccgcttttcagttcggagaggtggtcctggagtggtcacgagatcaataccatgttctcttcgattcgtaccgcgacaacattgcaggtaagagcttccaaaaccggctctgtctgcccatgccaattgatgtcgtgtatacttgggtgaatggaaccgatctggagctcttgaaggaactgcagcaagtgcgggagcagatggaggaagagcaaaaggctatgcgcgagatccttggaaagaatactactgagccgaccaaaaagtccgagaagcaattggagtgcctgctcactcactgtatcaaggtcccgatgcttgttcttgacccggccctgccggccaacatcacgctgaaggaccttccgtcactctacccttccttccattccgcctcggacatcttcaatgtggcgaaaccgaaaaatccgtcgaccaacgtgtccgtggtggtgttcgactcgactaaagacgtcgaggatgcacactcgggacttctgaaggggaactccagacagacggtctggcggggctacctgaccaccgacaaggaggtgccgggtcttgtcctgatgcaggatctggcctttctctcgggctttcctccaactttcaaagaaaccaatcagctgaaaactaagttgccggagaacctttcgagcaaggttaagctgctgcagctgtactcggaagcgtccgtggctcttctcaagctgaacaatccgaaagattttcaagaactcaacaagcagaccaagaagaatatgaccatcgacggaaaggaactgactatctcaccggcctacctcctctgggacctctccgcaatctcccagtcaaagcaagatgaggacatctccgcgagccgtttcgaagataatgaggaactgcgctacagcctgaggtccatcgagcgccatgccccgtgggtccggaacatcttcatcgtcactaatggccaaatcccgtcatggctgaatctggataatccaagagtgaccatcgtgactcaccaagacgtgttccgaaacctgtcacatttgccgactttctcatctccagccatcgagtcgcatatccatcgcattgaaggactgtcgcagaagttcatctacctcaacgacgacgtcatgtttggaaaggatgtgtggccggacgacttctacagccactcgaaggggcagaaggtgtatcttacctggccagtgcctaattgtgcagagggctgcccgggatcctggatcaaagacgggtactgcgacaaggcgtgtaacaattcggcctgcgactgggatggaggtgattgctcaggaaactccggaggatcccgctacatcgcgggtggaggaggaactggctccatcggcgtcgggcagccatggcagtttggaggaggaataaacagcgtctcttactgcaaccaaggttgcgccaacagctggctggcggacaagttttgtgaccaagcatgcaacgtgctctcgtgcggcttcgatgcaggcgactgtggccaggaccacttccacgagctctacaaagtgatcctcctcccgaaccaaactcactacataattccgaagggagaatgtctgccttacttctccttcgcagaagtggcgaagcggggtgtggaaggtgcgtactccgacaatcctatcatccggcatgcgtccatcgccaacaagtggaaaaccatccacctgatcatgcattcgggcatgaacgcgaccacgatccacttcaacctcaccttccagaataccaacgacgaagaattcaaaatgcaaatcaccgtggaggtggacacccgcgaaggaccaaagctgaacagcaccgcacaaaaaggttacgaaaatctggtgagcccgatcacgctgctgcccgaggctgaaatactgtttgaagatatcccgaaggagaaacggtttccaaagttcaagcggcacgacgtgaattcgactaggcgagctcaggaagaagtgaagatccctttggtcaacattagtctgttgccaaaggacgcccagctgtccctcaatacccttgatctgcagctggaacacggggacatcaccctcaagggttacaatctgtctaagtccgcgctcctgaggtcgtttctcatgaactcgcagcacgccaagatcaagaaccaagccatcatcactgatgaaaccaatgacagcctggtcgcgccgcaggaaaaacaggtccataagtcaatactgcccaactcccttggagtctccgaacgcttgcagaggctgaccttcccggcggtgtccgtgaaagtgaatggccatgaccagggtcaaaaccctcctctggatctcgagacgaccgcgaggtttagggtcgaaacccatacgcaaaaaaccatcggaggcaatgtgaccaaagaaaagccaccctccttgatcgttccgctcgagtcgcagatgactaaagagaagaagattactgggaaggaaaaggaaaactctcggatggaggagaacgcggagaaccatatcggggtgactgaagtgctcctgggacgcaaactgcagcactacaccgatagctacctcggtttcttgccgtgggaaaagaagaaatacttccaagacctgctggacgaggaggaatctctcaagactcagttggcctatttcactgatagcaaaaacactggccggcagcttaaggacactttcgcggattcgctccggtacgtcaacaaaattctcaattccaagtttggattcacttcgaggaaggtgccggcccacatgccgcacatgatcgacagaattgttatgcaggaactgcaagatatgttccccgaggaattcgacaaaaccagctttcataaggtgagacattccgaggatatgcaattcgccttctcatacttctactaccttatgtctgctgtacaaccactgaatatcagccaggtctttgacgaagtggacaccgatcaatctggcgtgctgtcggacagagaaatccggaccctggccactcggattcatgaactgcccctgtcccttcaagacctcactggactggaacatatgctgatcaactgcagcaaaatgttgccagcggacatcacgcagctgaacaacatcccacctactcaggaatcgtactacgatccgaacctgcccccggtgaccaaatcgctggtgactaactgcaagccggttaccgacaagattcataaggcctataaggacaagaacaagtacaggttcgaaatcatgggggaggaggaaattgccttcaaaatgatcagaacgaacgtttcccacgtggtgggtcagcttgatgatatccgcaaaaacccacggaagttcgtctgcctcaacgacaacatcgaccataatcacaaggatgctcaaaccgttaaggcagtgttgagagacttttacgaatccatgttcccaattccatcacaattcgaactccctcgggagtaccggaatcggttcttgcacatgcacgagctccaggagtggcgggcctaccgggataagctgaagttctggacccattgcgtgctggccactctgattatgttcaccatcttttctttcttcgcggaacagcttatcgcgctgaagcgtaaaatctttcctcgtcggaggattcacaaggaggcgtcacctaacagaatccgggtg

SEQ ID NO: 16954 - DNA, 3768 bp, synthetic construct
  misc_feature 1..3768: note = source = /note="Description of Artificial Sequence: Synthetic coding sequence"
  source 1..3768: mol_type = other DNA
atgctgtttaagttgcttcaacgtcaaacttacacttgccttagccaccgatacgggctctatgtctgttttcttggagtggtcgtaaccatcgtttcggcctttcaatttggagaagtggtgctcgaatggtccagggatcaataccacgtccttttcgactcgtaccgcgataacatcgcgggcaagtcgtttcaaaatcgcctgtgtctcccgatgcctattgatgtggtctatacgtgggtgaacggtactgatctcgaactcctcaaggaacttcagcaggtcagagagcaaatggaagaggaacagaaggctatgagagaaatccttgggaagaacactactgaacctaccaaaaagtcagaaaagcagctggaatgccttctcacgcattgtattaaggtgccaatgcttgtgctggatcctgcattgcccgctaatatcactcttaaggaccttccgtcgctttacccctcctttcattccgcctctgacattttcaatgtggcaaagccaaagaatccatctaccaacgtctccgtggtggtatttgattcgactaaggatgtggaggacgcccatagcggattgctcaaagggaattcgcgacagactgtatggcgaggctacttgactaccgacaaagaggtgcccggcctggtccttatgcaggatctggcgtttctgtcgggttttccaccgactttcaaagaaaccaatcaactgaaaaccaaactgccggagaatctttcaagcaaggtgaaactcctccaattgtactcagaggcttcggtggcgttgcttaaactcaataatcccaaggacttccaagaactgaataagcagactaagaagaatatgactatcgacggtaaagaactcaccattagcccagcatacctgctgtgggatctttcggcaatctcccaatccaagcaggatgaggatatctcggcatcgcgttttgaggacaacgaggaactgcgctactcacttaggtccattgagagacacgccccatgggtccggaacatattcattgtcaccaatggccaaatccccagctggcttaacctggataaccccagagtcacgatcgttacgcatcaggacgtgtttcgcaacctctcccaccttccaactttttcctcgcccgcaatcgagtcccatattcatcgcatcgagggactctcccaaaagttcatttacctgaatgatgatgtcatgttcggtaaagatgtgtggcctgatgacttttacagccatagcaaaggccaaaaggtgtaccttacttggccggtgccgaattgtgcggagggctgcccggggtcctggatcaaagacggttactgtgataaggcctgcaacaactcggcctgcgattgggatggaggagattgttcgggtaattccgggggttcaagatacattgctggtggaggaggcaccggttcaattggcgtgggacagccctggcagttcggtggcggtataaacagcgtgagctactgtaaccaaggatgtgcgaacagctggcttgcagacaaattctgcgatcaggcatgtaacgtactttcgtgtggttttgatgcaggtgattgtggacaggatcatttccatgaactctacaaagttattctgttgccaaatcagacgcactatatcatcccaaagggggaatgtctgccatatttctcgtttgcagaagtcgcaaagcggggggtcgaaggagcatacagtgataaccccataattcgacatgcaagtatcgcaaacaaatggaaaactattcaccttatcatgcactcgggaatgaatgcaaccaccattcatttcaacctgacctttcagaacaccaacgatgaggagttcaaaatgcagattaccgtggaagtggatactagggaaggaccaaagctgaactcgaccgcccagaaggggtacgaaaacctcgtgtcacctatcacccttttgcctgaggcagaaattcttttcgaggacattccaaaggaaaaacgttttcctaagtttaagcggcacgatgtgaactccactaggagagcccaagaagaagtgaaaattcctcttgtgaatatctccctgctgcctaaagatgcacaactttcactcaataccctggaccttcaattggaacacggagacattacgcttaaggggtacaatctctccaagtcggcactgttgagatcctttttgatgaattctcaacacgcaaagattaagaaccaggctatcattaccgatgagactaacgactccctcgtcgcaccgcaggaaaagcaagtccataagagtatcctgccaaactcactgggcgtttctgagcgcctccaacgtctgacgtttcccgctgtgtcggtgaaagtcaacggacatgatcagggacaaaacccccctcttgatcttgagactacggcaaggttcagggtggaaactcatactcaaaagaccatagggggtaacgtgactaaagaaaagcccccttcgctgatagtgccactcgaaagccagatgacgaaggagaaaaagattaccggaaaggaaaaggaaaatagtagaatggaagaaaacgccgaaaaccatatcggtgtgaccgaagtgctcctgggacgcaagttgcagcattacaccgatagctaccttggctttcttccatgggaaaagaaaaagtactttcaggacttgcttgatgaagaggagagcctgaaaacccagctcgcgtacttcaccgactcaaagaacacgggtagacaacttaaggatacttttgcagactcccttcggtatgtcaataagattttgaacagcaagtttggatttacctcccgcaaagtgcctgcacatatgccgcatatgattgacagaatcgttatgcaagagctccaagatatgtttccagaagaatttgataaaacctcgttccataaggtgcggcactcggaggacatgcagtttgccttctcatacttctactacctgatgtcagcagtccagcctctgaacatctcccaagtgtttgatgaagtagacaccgaccaatcgggggtgctttccgaccgggagatacgtactctggcaactcggattcatgagctgcctctgagccttcaggaccttaccggtctggaacatatgctcatcaactgctcgaagatgctgcctgcggatattacccaactgaacaacatcccacctacccaagaaagctactacgaccctaacctgcctcctgtcactaagtccctggtcaccaattgtaaacctgtcactgataagattcacaaagcctacaaggataagaacaagtacaggttcgagataatgggagaagaagaaatcgcatttaagatgatccggacgaacgtgtcccatgtggtgggccaactcgacgatattagaaagaatccacgcaagttcgtctgcctcaacgacaatattgatcataaccacaaagatgcccaaaccgtgaaggcagtgcttcgggacttttacgaaagcatgttccccattccttctcaatttgaactgccacgtgaatacagaaatagattcctgcatatgcacgaattgcaggaatggcgcgcgtacagagacaaattgaagttttggactcactgtgtgctcgcaaccctgattatgtttaccatattcagcttctttgcggagcagctgattgccctgaaacgcaagatattccctcggcggagaattcataaggaggcctcacctaaccgaattcgtgtc

SEQ ID NO: 16955 - DNA, 3768 bp, synthetic construct
  misc_feature 1..3768: note = source = /note="Description of Artificial Sequence: Synthetic coding sequence"
  source 1..3768: mol_type = other DNA
atgctgtttaagctgttgcaacgtcagacatatacatgcctttcacaccggtacggtctgtatgtatgtttcttgggtgtggtagtgacgattgtctcagcgtttcagttcggcgaggtggtgctagagtggagccgggatcagtatcacgtcctgttcgacagttaccgcgataacatcgctggcaagagctttcagaaccgtctttgcctgcccatgccgattgatgtagtgtacacttgggtaaacgggactgacctggagctgctgaaggagttgcagcaagttcgcgaacagatggaggaggagcagaaggccatgcgcgagatcttgggaaagaatacgacggaacccactaagaagagtgagaaacaactggagtgcctgctgacacactgcatcaaggtgccaatgctcgttctggacccggcgctgccagccaatattacgcttaaggatctgccctccttgtatccaagcttccattctgccagcgatatattcaacgtcgccaaaccaaaaaatcccagtacgaacgtatccgtggtggtgttcgattccacgaaggatgtggaggatgcgcacagcgggctgttgaaaggaaatagccgccaaacagtgtggcgcggatatctgaccaccgataaggaagtccctggtctcgtgctcatgcaagacctggcgttcctttctggtttccccccgacatttaaggagaccaaccagctcaaaaccaaactgccagaaaaccttagctccaaagtcaagctgctgcagttgtactcggaagcctcagtcgccctcttgaagcttaataatccgaaggacttccaggagcttaataagcagaccaaaaagaatatgaccatcgatggcaaagagctgacgatcagtcccgcctatttattgtgggacctgagtgcgatatcccagagcaagcaggacgaggacatttccgcctcaaggttcgaagataacgaggaactccgatacagtctgagaagtatcgagcgacatgctccctgggtgagaaacatttttatcgtcaccaatggacagattccgagctggctgaacttggataacccgcgcgtgacaatagtcacgcatcaagatgtcttcagaaatctatctcacctgccaaccttcagcagccccgccatcgaatcacacattcaccgaatagagggcctcagccagaaattcatttatctgaatgacgacgtcatgtttggaaaggatgtttggcccgatgatttttactcccatagtaaaggccaaaaggtctacctaacctggccagttccgaattgcgcagagggctgcccaggctcgtggatcaaggatggctattgtgacaaggcttgcaataattccgcttgcgattgggatgggggagattgctccggcaacagtggcggctcccgctacatcgcaggcggtggaggcacggggtcgatcggcgttggtcaaccgtggcagtttggcggcggaattaactcagttagttattgcaaccagggttgtgctaatagttggctcgccgacaagttctgcgaccaggcttgcaacgtcttgtcctgcggctttgatgcgggtgattgtggacaagatcacttccacgagctgtacaaggtcattctactaccgaaccagacccattacatcattcctaagggtgagtgcctgccttatttctccttcgctgaggtagcaaagcgcggcgtcgagggcgcctacagcgacaatccgatcatcagacacgcctccattgcaaacaagtggaagactatccatctgatcatgcattcgggcatgaatgccacgacgattcacttcaaccttacctttcaaaacaccaacgacgaggaatttaagatgcagatcacagtggaagttgatacgagggagggccccaaactgaactcgaccgcacaaaaaggctacgagaaccttgtatcgcccatcaccttgctgcctgaagctgaaatactgttcgaagacattccaaaggaaaagcgcttcccgaagttcaagcgccacgatgtgaattccacccgccgggctcaagaggaggtcaagatccccctcgtcaatatctccctgctccccaaggatgcccagctgtctctgaataccctcgacctgcagctcgaacacggcgacatcaccttgaagggctacaatttgtccaagagtgccctcctgaggtcctttctaatgaactcccagcatgctaagataaagaatcaagctattattacagacgaaacaaacgatagcctcgtggccccgcaggaaaaacaggtacacaaatccattttgcccaactcgttgggcgtgagcgagcgcctgcagaggctaacgttcccagcagtgagtgtaaaggtaaatggacacgaccaaggacagaaccctcctctggacctcgagaccacggccagatttcgcgttgaaacccacactcaaaagaccataggtggcaatgttacgaaggagaagccaccaagcctgatagtgccccttgagtcgcagatgacaaaggagaagaagattaccgggaaggagaaggaaaacagcagaatggaagagaacgctgagaatcatataggggtaaccgaagttttgctgggccgaaagctccagcattataccgactcgtatctgggcttcctcccctgggaaaagaagaagtactttcaagacctattggatgaggaggagtccctcaagacccagctggcatattttaccgactccaagaacacgggcagacagctaaaggatacttttgccgatagtctaaggtatgttaacaagattttaaactcgaaattcggcttcacaagtagaaaggtgccggcacacatgccacacatgatcgaccgtattgtgatgcaggagctgcaggatatgtttcccgaagagtttgataaaacgtcctttcacaaggttcgccatagtgaggatatgcagtttgcctttagctatttttactacctcatgtccgctgtccagccgttaaacatttcccaggtcttcgacgaagtggacaccgatcaatcgggagtgctttccgatcgcgagatacgcaccctcgcaacgcgtattcatgagttacctttgagcctgcaggatctgaccggtttggagcacatgctgattaattgctccaaaatgcttccagcggacattactcaactgaataacatcccacccacgcaggagtcctattatgatccaaatctacctcccgtgaccaagagcctggtcacgaactgcaagcccgtcaccgacaagatccacaaagcctataaagataagaacaagtatcgcttcgagatcatgggcgaagaggagatcgcatttaagatgatccgtacgaatgtgtctcatgttgtaggacagctggatgacattcggaagaacccgcgaaagttcgtgtgtcttaatgacaacatagatcacaatcacaaggacgcccagacggttaaggcagttcttcgtgatttttacgagagcatgtttccaatcccttctcagttcgaattgccacgcgagtaccgtaatcgcttcctgcatatgcacgaactgcaggaatggcgcgcttaccgcgataagctgaagttttggacccactgtgtactagcaactctcatcatgttcaccattttcagtttcttcgcggagcagcttatcgcgttaaaacgcaagatatttccacgccgtagaatacataaggaggcctccccgaacagaattcgcgtg

SEQ ID NO: 16956 - DNA, 3768 bp, synthetic construct
  misc_feature 1..3768: note = source = /note="Description of Artificial Sequence: Synthetic coding sequence"
  source 1..3768: mol_type = other DNA
atgcttttcaagctcctgcaacggcaaacctacacttgcctgtcccatcgatacggactgtacgtgtgttttcttggtgtggtggtcaccatagtcagcgccttccaattcggggaagtggtgctggaatggtcgcgggaccagtaccacgtcctgtttgattcatacagggataacattgcagggaagtcctttcagaatcggctgtgcctgccgatgccaattgatgtggtgtacacttgggttaatggaaccgatctcgaattgcttaaggaacttcaacaagtgagagaacaaatggaagaagaacagaaagctatgcgcgagattctggggaaaaacaccaccgaaccgactaaaaagtcggagaagcagctcgaatgtcttttgacccattgtattaaggtgccaatgttggttcttgatcctgcgctccctgccaacataaccttgaaggatcttccttctctttacccatcatttcattcggcatcagacatctttaatgtcgcgaaacctaaaaacccttcaactaacgtctctgtggttgtgtttgactccaccaaggatgttgaggacgcacactctgggttgctgaaggggaattcgaggcaaactgtgtggagaggatacctcactaccgacaaagaagtgcctgggttggtcctcatgcaggatttggcatttctgtccggttttccccctacctttaaagaaactaaccaacttaagacgaagctcccagaaaatctttcgagcaaggtgaagctccttcaactttactccgaagcgtcggtggcgttgctcaagttgaacaatcctaaagactttcaagaactcaataagcaaacgaagaaaaacatgactatcgatggaaaggaactcaccatttcgcccgcttaccttctgtgggatctgtccgccatttcccaatcgaagcaagatgaagatatctccgcatcacgcttcgaagataacgaagaacttcgatactcccttcgatcaattgaacgccatgcaccttgggtgcggaacatctttattgtgaccaatggacagatccctagttggcttaatcttgataatcccagagtaaccattgtgacccatcaagatgtgtttcgtaacctttcccatctgccaaccttcagctcaccagcaattgagtcgcatatccatcgcattgaaggactttcccagaagttcatctatctgaacgatgatgtgatgtttggaaaggatgtatggcctgacgacttctactcccactcgaagggacagaaggtctaccttacttggcctgtgcctaattgtgccgaaggatgtcccggatcgtggattaaagatggatactgcgataaggcatgcaacaactcagcttgtgactgggacggaggtgattgctcgggtaactccggtggttcacgctatatcgcggggggcggagggactggttcaatcggcgtcggacaaccgtggcaatttggaggtggtatcaattcggttagctactgcaaccaaggttgtgcaaacagctggttggctgataagttttgtgatcaagcctgcaacgtgttgtcgtgcgggtttgatgcaggtgattgtggccaggaccatttccatgaactttacaaagttattcttctgccaaatcagacgcattacattatcccaaagggggaatgtctcccatacttttccttcgcagaagtggcaaagagaggggtggaaggcgcatacagcgataaccccatcattaggcatgcgtcgattgctaacaaatggaaaactatccatctcattatgcatagcggcatgaatgccaccacgattcacttcaacctgacctttcaaaacaccaacgacgaagagttcaaaatgcagattacggtcgaggtcgatacccgagaggggcctaagctgaattccaccgcacagaagggctacgaaaatctggtttcgccgataactcttctccctgaagcagaaattcttttcgaagatatccctaaggaaaagcggtttccaaagttcaaacgccatgatgttaactcgactagaagagcacaggaagaggtgaagattcccctggtgaacatttcgctccttccaaaggacgcccaactctcgttgaacactcttgatctccagttggaacacggagacattactcttaaggggtacaacctttccaagagcgcactcctcaggagctttcttatgaattcacagcatgcgaagatcaagaatcaagccattatcactgacgagactaatgattccctggtggctcctcaggaaaagcaagtccacaagagcattctgcctaactcactgggtgtgtccgaaagacttcagaggcttacctttcccgcagtgagcgtaaaggtgaacggacatgatcagggtcaaaacccccctctggacctggaaactactgcgagatttcgggtggagacgcacactcaaaagacgattggaggaaatgtgaccaaagagaagcccccaagcctcatagtgcccctcgaaagccagatgacgaaagagaagaagattaccgggaaggagaaggaaaattctcggatggaagaaaatgccgaaaaccacataggtgtcaccgaggttctcctcggcagaaagctgcagcactacaccgattcgtatctgggatttcttccatgggaaaagaagaagtactttcaagatttgctcgacgaggaggagtcactgaaaacccaacttgcatacttcactgactcgaagaacaccggacgccaactgaaggatactttcgcagattcgctgcggtatgtcaacaagatattgaactccaaatttggttttacctcacgaaaagtgccagctcatatgcctcacatgatagatcgcattgtgatgcaagaattgcaggatatgttcccggaggaatttgacaagacttcttttcacaaagtgaggcactccgaggatatgcaatttgcattctcctacttttactaccttatgtcggcagtccaacccctcaacattagccaggtgttcgacgaggtggataccgaccaatccggcgtcctgagcgacagggaaattcggactctcgccactcgaatccacgagctcccgctgagtctgcaggacctgaccggccttgagcatatgctgatcaactgttcgaaaatgcttcctgccgatattacgcagctcaacaacatacccccaacccaagaatcgtattacgatcccaacctgcccccagtgactaagtctctcgtgaccaactgtaagccagttaccgataagatccataaagcctacaaagacaagaataagtaccgttttgagataatgggcgaggaagagattgcattcaaaatgatcagaactaacgtgagccacgtcgtgggtcagcttgacgatatcagaaaaaacccacgaaaattcgtctgtctgaatgacaatatagaccataatcataaagatgcgcaaactgtgaaggcagtcctgcgagacttctacgagagcatgtttccgatcccatcccagtttgagctccctagagagtacaggaatagatttctgcatatgcacgaactgcaagaatggagagcataccgagacaaactcaagttctggacccattgtgtacttgcaactcttatcatgtttactatctttagctttttcgcagagcagctgatcgccttgaaacgtaagattttccctaggcggagaattcataaggaggcttcaccaaaccgaatccgtgtg

SEQ ID NO: 16957 - DNA, 3768 bp, synthetic construct
  misc_feature 1..3768: note = source = /note="Description of Artificial Sequence: Synthetic coding sequence"
  source 1..3768: mol_type = other DNA
atgctgtttaagctcctgcagcgccaaacttacacttgtctgtcccatcggtacggcctgtatgtctgtttcttgggcgtggtcgtaactattgtttccgcgttccaattcggtgaagtcgttcttgagtggtcccgcgaccagtaccatgtgctgttcgattcataccgtgacaacatcgcaggcaagtcctttcagaatcgcctatgcttgcctatgcccattgatgtggtgtacacgtgggtgaatggtactgacctggaactgctgaaggagttacagcaggtccgagagcagatggaagaggaacagaaagcaatgcgcgagatccttgggaagaacaccaccgagccaacaaagaagtccgagaagcaactggaatgtctactcacccactgcatcaaggtccccatgttggttctcgatccggctctgcccgccaacatcacgttgaaagacctgcccagcctttacccatccttccattccgcgtcggacatcttcaacgtggccaagccgaagaacccgtctaccaacgtctcggtcgtcgttttcgacagtaccaaggatgtggaggacgctcactccggtctgctcaagggaaattcccgccaaaccgtctggcgcggctacctgaccactgacaaagaagttcctggtctagtcctcatgcaggacctggcgttcctctccggttttccccctacgtttaaggagactaaccaactcaagacgaagctcccggagaacctgtcctcgaaggttaagcttctccagctgtactctgaagctagcgtcgcactcctgaagcttaacaaccccaaagactttcaagagctgaacaagcagaccaagaaaaacatgacgatcgacggaaaggagctaaccattagccctgcatatttactttgggacctgtctgctatctcacaaagcaagcaggacgaggatataagtgcttctaggttcgaggacaatgaggaactccgctatagcttgagaagtatcgaacggcacgcgccatgggtcaggaacatcttcattgtcaccaatggtcagatcccttcgtggctgaatctggacaaccctcgtgttaccatcgtgacccatcaggatgtatttcgcaatctgtcacacctgcctactttctcgtcccctgcgattgaatcccacatccaccgtatcgagggtctctcccagaagtttatctacctgaacgatgacgttatgttcggtaaggacgtctggcccgacgacttctactcccattcgaagggccagaaggtttacttgacctggcccgtgcccaactgcgctgaaggttgcccgggcagctggattaaggacggatactgcgacaaggcctgtaacaattccgcctgcgattgggatggtggagattgcagtggtaactccggtgggtcgcgctatatcgcaggtggaggaggcactggttctatcggagtcggacaaccttggcagttcggtggcggcatcaactccgtctcgtactgcaaccagggttgtgcgaactcatggctggcagataaattctgcgatcaggcttgcaacgtcctgagctgcggcttcgatgctggggactgtggtcaggatcacttccatgaattatacaaggttatcctcctccccaaccagacacactatattatccctaagggagagtgtctgccctactttagcttcgctgaggttgctaaacgtggagtcgaaggcgcttactccgacaatcccatcattcggcacgccagcatcgcaaacaagtggaagaccattcatctgatcatgcattcgggcatgaatgctactactatccatttcaaccttacttttcaaaatacaaacgacgaggagttcaagatgcaaattaccgtcgaggtcgacactagggagggcccaaagcttaattccacagcgcagaagggatacgagaacctagtctcccctattacgcttttgcccgaggcggagattttgttcgaggacatccccaaggagaagcgtttccccaagttcaaacgtcatgatgtcaatagcacccgccgtgcccaggaggaggtgaagatcccccttgtgaacatatcccttctccctaaggatgctcaactttcgctcaacacgcttgatctgcagctcgagcacggtgacatcaccttgaagggatacaacctgtcgaagtccgctctgctgcggtccttcctgatgaactcgcagcacgcaaagatcaaaaatcaagctatcatcacggacgaaactaacgactccctggtcgcccctcaggagaagcaggtgcacaagtccatcctgcccaactccctcggcgtgtctgagcgccttcaacgtttgacctttcccgccgtttccgtaaaggtcaatggccatgaccaggggcagaacccccccctcgacttggagacgacagctcgcttccgtgtcgagactcatacccaaaagaccattgggggcaatgtcaccaaggaaaagcctccgagcctgatcgttccccttgagagtcaaatgaccaaagagaagaagatcaccggcaaagagaaggaaaatagcaggatggaggagaatgcagagaaccatattggcgtcactgaggtgctattgggccgaaagctccagcactataccgattcttacctgggcttcctaccgtgggagaagaagaagtatttccaggacttactggatgaggaggagtccctcaaaacccagctggcctacttcactgattctaagaacacgggaagacaactcaaggatacgttcgccgatagtcttaggtatgttaacaagatcctcaacagcaaattcggcttcacttcccgtaaggtgcctgcccacatgccccacatgattgaccgcatcgtcatgcaggagcttcaggatatgttccccgaggagttcgacaaaacatcgttccataaggtccgtcactctgaggatatgcagttcgccttctcgtacttttactatctgatgtccgccgtccaaccactcaacatctcccaagtgtttgacgaagtcgatactgaccagagcggcgtactgagcgaccgcgagatccggacgttggcgactcgtatccacgagcttcccctaagcctgcaggatctgactgggctcgaacacatgctgatcaactgtagcaagatgttgccagctgatatcacacagcttaacaacatcccacccacacaggagagctactacgatccgaaccttccccccgtgactaagtcccttgtcactaactgcaagcctgtcaccgacaagatccacaaagcctacaaggataagaacaagtaccgatttgagattatgggtgaggaggaaattgcattcaaaatgatccgaactaacgtgtctcatgtggttggccaactggacgatattcgcaagaacccgcgcaagttcgtttgcctcaatgacaacattgatcataaccataaggatgcgcagacggtcaaggccgtgttgcgggatttctacgagtcgatgttccctatcccctcacaatttgagctcccacgagaataccgcaaccgtttcctgcatatgcatgagcttcaggagtggcgcgcttaccgcgacaaacttaagttctggactcattgcgtgctcgctacgttgattatgttcacaatcttctccttttttgccgagcagcttatcgccctgaaaagaaagatcttccctcgtcgccgcatccataaggaggctagcccaaatcggatccgggtc

SEQ ID NO: 16958 - DNA, 3768 bp, synthetic construct
  misc_feature 1..3768: note = source = /note="Description of Artificial Sequence: Synthetic coding sequence"
  source 1..3768: mol_type = other DNA
atgctgttcaagctcctgcaacgccagacctacacctgcctgtcacacagatatggactttacgtctgcttcttgggagtggtggtgactattgtgtcagcgttccagtttggcgaggtggtgctcgaatggtcgagggaccagtaccatgtcctgttcgattcgtaccgggataacattgccgggaagtccttccagaaccgcctgtgcctgccgatgcctatcgatgtggtctacacctgggtcaacggaactgacctcgagttgctgaaagagctgcagcaagtgcgcgagcagatggaggaggaacagaaggccatgcgcgaaatcttgggaaagaatactactgaaccaactaaaaagtccgaaaaacaactcgaatgcctcctgactcactgcatcaaagtgccgatgctcgtcctcgatccagccctgccagctaatatcaccctcaaggacctgccttccctgtaccctagctttcactcggcgtccgacatcttcaacgtcgcaaaaccgaagaacccatccacgaacgtgagcgtcgtggtgttcgattcgaccaaagatgtggaagatgcccattccggactccttaagggaaactcccgccagactgtgtggaggggatacctgactactgacaaagaggttccaggcttggttctgatgcaggacctggcattcctctcgggattcccgccgaccttcaaggaaaccaaccagctgaaaactaaattgccggaaaacttgtcctcaaaggtgaagctgctgcaactctattccgaggccagcgttgccctgctgaagctcaacaatccgaaggactttcaagaactgaacaaacagaccaagaagaacatgactatcgacgggaaggagctcaccatcagccctgcctacttgctgtgggacctgtcggcaatctctcaatcgaagcaggacgaagatatctcggcttcgcgtttcgaagataacgaggaactgcgctactcgctccgatcaatcgaacggcacgccccgtgggtcagaaacatcttcatcgtgaccaatggccagatccctagctggctgaacctcgacaatcctagggtcaccatcgtcacgcatcaagatgtgttccgcaatctctcccatctgccaacgttctcgtcacccgcgatcgagtcccacatccaccgcatcgaagggctctcccagaaattcatctacctgaatgatgacgtgatgttcggcaaggacgtgtggccggacgatttctattcgcattcgaaggggcagaaggtctacctgacctggccggtgccaaactgtgccgagggatgcccaggttcgtggattaaggacgggtactgcgataaggcttgtaacaattcggcatgtgactgggacggaggggactgctccggcaactcgggtggttcacgctacattgccgggggtggaggaacgggatcgattggcgtgggacagccgtggcagtttgggggagggatcaactccgtctcatactgcaatcagggatgcgctaactcatggctggccgacaaattctgcgaccaagcgtgcaatgtcctgtcgtgcgggttcgacgctggagactgcggtcaggaccacttccacgagctctacaaggtgatcttgctccccaaccaaactcattacatcatccccaaaggagagtgcctgccctacttctccttcgctgaagtggccaagcgcggagtggagggcgcctacagcgataaccctatcattcgccacgcatccattgccaacaagtggaaaactattcacctcatcatgcactccggcatgaacgccactaccatccatttcaacctgacctttcagaacactaatgatgaggagttcaagatgcaaatcacggtcgaagtggacaccagagaggggccaaaactgaactccaccgctcagaagggatacgaaaacctcgtcagcccgatcaccctgctgcccgaagcggagattctgtttgaggatatcccgaaagagaaacggtttccaaagtttaaacgccacgatgtgaattccacccggcgagcacaggaggaagtcaagattccgctcgtgaatatctcacttctgcctaaggacgcccaactgagcctgaatactctcgacctccagcttgagcatggggatatcacccttaaagggtacaacctgtcaaagtcagcactcctgcgctcattcctgatgaattctcaacatgctaagatcaaaaatcaggcgataatcactgatgaaaccaatgactcgctcgtcgcgccgcaggagaagcaggtgcataagagcatcctgcctaactcgctgggcgtttcggaacggcttcagagactgaccttcccggcggtgtcagtcaaggtgaatggccacgatcagggacagaaccctccgctggatctggagactaccgcgcggttccgggtggaaacccacactcaaaagacgatcggtggaaatgtgaccaaggaaaaaccgccgtcattgattgtcccgctcgaatcccagatgactaaggaaaagaagataactggaaaggaaaaagaaaactcgcggatggaagagaacgcggaaaatcacattggtgtgaccgaggtgctcctggggcgcaaactgcaacactacaccgatagctatctgggcttcttgccttgggaaaagaagaagtactttcaagatctccttgatgaagaggaatcgctgaaaacccagctggcgtacttcactgacagcaagaacaccggacgccagctcaaagatacgttcgcagatagcctgcggtatgttaacaagatcctgaattccaagtttgggttcacctcccggaaggtgcccgcccatatgcctcacatgatcgaccggatcgttatgcaagaactccaggacatgttcccggaagaattcgacaagacgagctttcacaaggttcgccattccgaggacatgcaattcgctttttcgtacttctactacctgatgagcgccgtgcaaccgctgaacattagccaggtctttgatgaggtcgacaccgatcaatcaggggtgctgtcggatcgcgagatccgcactttggcaaccagaattcatgagctgcctctttcgctgcaggaccttaccggactggaacacatgttgataaactgttccaagatgctgcctgccgacattacgcaacttaacaacatcccgcccacgcaggagtcgtactacgacccgaacctgccgcctgtcactaagtcgctggtgactaattgcaagcctgtgaccgacaaaatccataaggcttacaaggacaagaataagtacagatttgagatcatgggagaagaggaaatcgcattcaagatgatccgcacgaatgtgagccacgtggtgggacagctggatgacatccgcaagaacccacgcaagttcgtctgtttgaatgacaatatcgaccacaaccacaaggatgcccagaccgtgaaggctgtcttgcgcgacttctacgagagcatgttccctatcccaagccaatttgaactcccgcgagagtaccgaaacagatttctgcacatgcatgaactgcaagaatggagagcttacagagacaagctgaagttctggactcactgtgtgcttgccaccctcatcatgttcaccatcttctcattcttcgcagagcaattgattgcgctgaaacgcaagatctttcctagacgccggatccataaggaggcgagcccgaataggattagagtc

SEQ ID NO: 16959 - DNA, 3768 bp, synthetic construct
  misc_feature 1..3768: note = source = /note="Description of Artificial Sequence: Synthetic coding sequence"
  source 1..3768: mol_type = other DNA
atgctcttcaagctgctccagagacagacctacacatgtctctcccatcggtatgggctgtacgtgtgtttcttgggggttgttgtgacaatagttagcgcgtttcagttcggggaggtggtgctggagtggagcagggatcaataccacgtgttgttcgacagttacagggataatattgccggcaagtcgttccagaacaggctctgtctccccatgcccatagatgtagtttatacttgggtgaacgggaccgatctggaactgctcaaagagctacagcaggttagggagcaaatggaagaagagcagaaagctatgcgcgagattcttggaaaaaataccaccgagcccacaaagaagtccgaaaaacaattggagtgcctgcttacccattgtatcaaggtgcccatgctagtgctggaccccgccctgcccgcgaacattacactgaaagacctcccatccttgtatccttcttttcacagcgcttctgacatctttaacgtggccaaaccaaagaaccctagcactaacgtgtcagttgtcgtgttcgatagtaccaaggacgtcgaagacgcccattctgggctgcttaagggtaatagtagacaaaccgtatggcgtggttacttgacaacggataaagaggtccccggactcgtcctgatgcaagatctggcttttctgagtgggttcccaccgacctttaaagagaccaaccagctaaaaaccaagctgcccgaaaatttgagcagtaaagttaagttgcttcagctctattcggaggcatctgttgcgcttttaaagctaaacaaccccaaagacttccaggaactgaacaagcagaccaaaaagaacatgacaatagacgggaaagagctcacgatttccccggcgtatctgctgtgggacttgtctgccatttcacagtccaaacaggacgaggatattagcgcctcacgcttcgaggacaatgaagagctgcggtattcactgcgttctatagagcgacacgctccatgggtgaggaatatttttatcgtgacgaacggccagatcccctcttggctgaatctcgacaatccccgcgtcaccatagtaacgcaccaagatgtttttcggaatctatctcaccttccgaccttttcatctcctgcaatcgaatcccacatccaccgaattgaaggtctgtcccagaagtttatctatctcaatgacgatgtgatgtttggaaaggacgtgtggcccgacgacttttacagccacagtaaggggcagaaagtctacctgacttggcctgtccccaactgcgccgaaggttgccccgggagttggattaaagatggatactgcgataaggcatgcaataactcggcatgtgactgggatggcggtgactgtagtggtaattccggagggtctaggtacatcgccggaggcggcggaacaggctccataggcgtagggcaaccctggcagttcggcggtggcatcaactccgtgtcatactgtaaccagggatgtgccaacagctggcttgcagacaagttctgcgatcaggcgtgcaacgtgctgtcttgcgggtttgacgcaggagactgcgggcaggaccacttccacgagctgtataaggttatattgcttccaaaccagactcattacattattcctaagggtgagtgtctaccctacttcagcttcgccgaagtcgccaagcgcggggtagagggggcgtattccgacaacccaatcatcagacacgcttccattgccaacaagtggaagaccatccacctgatcatgcacagtggaatgaatgccaccacaattcatttcaacctaactttccaaaatacaaatgacgaggagtttaaaatgcagattacagtggaagttgacacccgagaggggcccaaattaaattcaaccgcccagaaaggttacgagaacctggtctcaccgattacattgttgccagaagcagagatcctctttgaagatatccctaaagaaaagcggtttcctaaattcaagcggcatgatgtcaattctacgcggagagcacaggaggaggtgaagatcccattggtgaatatctcactccttccaaaggatgcccagctttcacttaatacactggacctacaactggagcacggagacattaccctgaaggggtataacctttcaaaaagtgctttgctacgttcttttcttatgaatagtcaacacgcaaagattaagaatcaggccattatcacagacgagacgaacgatagcctggtggctccacaggaaaagcaggtgcacaaaagtattcttccaaactctctgggtgtcagcgaaaggctgcagcgactgacatttccggcagtgtctgtgaaagtcaacggccatgaccagggacagaaccctcccctggatctagagactaccgccaggtttcgcgtggagactcacacacagaagactataggcgggaatgtgacgaaagagaagcccccctcactgattgtgccactggaatcccagatgacaaaggagaagaagataactggaaaggagaaggagaacagccggatggaggaaaacgccgagaaccatataggagtcaccgaagtccttctgggtcgcaagttgcagcactatactgactcgtacctgggctttctcccatgggagaaaaaaaagtatttccaggacttgttagacgaagaagagtccctgaagactcagctcgcctatttcaccgacagcaagaacaccggaagacagcttaaagatacattcgccgatagtctccgctacgtcaacaaaatcctgaattctaaatttggttttaccagtagaaaagtgccagcccacatgccgcacatgatcgatagaatagtgatgcaggaactgcaggatatgtttcctgaagagttcgacaagacatccttccataaggtgagacacagtgaggacatgcagttcgcctttagctatttctattatttaatgagcgccgtgcagccactgaatataagccaggtttttgacgaggtcgacaccgaccaaagtggggttctgtctgatagagagatccgaaccctggccacgcgaattcacgagctcccattgtccctccaagaccttacgggacttgaacatatgctgattaactgttcgaagatgctgcctgcagacatcacccaactgaacaacattccaccaacgcaggaatcctattacgaccctaacctcccccccgtcactaagagtctggtgaccaactgcaaacctgtgaccgataagatccacaaagcatacaaagacaagaataagtacagatttgagatcatgggcgaggaggaaattgcttttaagatgatccgaaccaatgtcagccacgtggttggccagctggacgatattcggaagaacccccgcaagtttgtgtgcctgaacgacaatattgaccacaaccacaaggacgcgcagaccgtaaaagccgtgctgcgcgatttttacgagtcgatgtttccaatcccatcccaatttgagctgccccgtgagtaccgcaataggttcctgcatatgcatgaattacaggaatggcgtgcttaccgcgacaaattgaagttttggacccactgtgtcctggccacactcatcatgtttaccatcttttctttcttcgcagaacagctcatcgcacttaagagaaaaatcttcccccgcaggagaatccacaaggaagcttcgcctaacaggatcagggtt

SEQ ID NO: 16960 - DNA, 3768 bp, synthetic construct
  misc_feature 1..3768: note = source = /note="Description of Artificial Sequence: Synthetic coding sequence"
  source 1..3768: mol_type = other DNA
atgctgttcaagctgctgcaacggcaaacgtacacgtgtttgagccataggtacggtctgtacgtctgttttctcggtgtggtggtgaccatcgtctccgcatttcaattcggcgaagtggtgctggagtggtcgcgcgatcaataccacgtcctgtttgatagctaccgtgataacatcgccggcaagagctttcagaaccggctgtgcctcccaatgccgatcgatgtcgtgtacacctgggtcaatggcactgatctggagcttcttaaagaacttcagcaggtccgcgaacagatggaagaagaacagaaggcaatgcgtgagatacttggtaagaacaccactgaaccgaccaagaagtcggaaaaacagctcgaatgcttgctgactcactgtattaaggtgccaatgctggtgctggatccggcgcttcccgcaaacatcactttgaaggatctgccaagcctgtacccttcgtttcactccgcttccgacattttcaacgtcgccaagccaaaaaacccttctaccaacgtttcggtggtcgtgtttgattccaccaaggacgtggaggacgcgcactcgggactccttaaagggaattcccggcaaaccgtctggcggggataccttacgacggataaagaagtgcctggactggttcttatgcaggatcttgcatttctttcgggatttcccccgacctttaaggaaactaatcaactgaaaaccaaacttccggaaaatctgtccagcaaggtgaagctgctccagctttacagcgaagcctccgtcgcgcttctcaaactgaacaaccccaaggactttcaagagttgaataagcaaacgaagaaaaacatgactatcgacggtaaggaactcactatttcgcctgcataccttttgtgggatctttcggcaatctcgcagagcaaacaggatgaagatatctcggctagccgctttgaagataacgaagagttgagatactcgttgagatcgatagaacggcatgcaccgtgggtgagaaacatctttatcgtgactaacggtcagattccatcatggctcaatcttgacaaccctcgcgttaccattgtcacccaccaggacgtgttcaggaacctttcacatctccccacgttctcctcccccgcaattgaaagccatattcatcgcatcgaaggcctttcgcaaaagtttatctaccttaatgatgacgtgatgtttggaaaagatgtgtggcctgatgatttctattctcatagcaagggacagaaggtgtaccttacttggccagtgcctaactgcgcagaaggttgtccaggttcatggatcaaggacggttactgtgacaaggcctgtaacaacagcgcatgtgattgggatggaggagattgctcggggaactcgggaggctcacgctacatagccggaggaggcggaactggctccataggtgtcggtcaaccctggcagttcggaggaggaattaactccgtgtcgtactgcaatcagggatgtgccaactcatggctggcagacaagttttgcgaccaagcatgcaatgtgctgagctgcgggttcgacgcaggtgattgcggacaagatcacttccacgaactgtataaggtgatactgctgcctaatcaaacccattacataattccgaagggggaatgtctcccgtacttttcctttgcagaagtggccaagcgcggagtggagggggcatacagcgataatccaattatccgccatgcctcgattgccaacaagtggaaaaccattcatctgatcatgcactcaggtatgaatgcaaccactattcacttcaacctgacgtttcaaaacaccaatgatgaggagtttaagatgcaaataactgtcgaagtcgacacccgcgaaggaccgaaactcaattcaactgcacagaagggttacgagaatctggtgtcgccgattaccctcctgccagaggcagagattctcttcgaggatattccaaaggagaaacgctttcctaaattcaaacgccatgatgtgaactcgacccgccgtgcacaagaagaggtgaagattccgcttgtgaacatctctctcctccccaaggacgcgcaactttccttgaatactttggacctgcagctggaacatggagatattaccttgaaggggtacaacctttcgaaatcagcgctccttcggagctttctcatgaactcgcaacatgcaaagattaagaatcaggctattatcaccgacgaaaccaacgatagcctggtcgcgcctcaggagaaacaagtccataaaagcatcctgcccaacagcctcggggtgtcggagcgactgcagcgactgacctttcccgcagtgtccgtgaaggtcaacgggcatgaccaaggacaaaatcctcccttggatctggaaactactgccagattccgcgtggaaacccacacccaaaaaactataggcggcaatgttactaaggaaaaacctccatccttgatcgtgcctcttgagagccaaatgactaaagaaaagaagataacgggaaaggaaaaggaaaactcccgtatggaagaaaacgcagagaatcacatcggagtgactgaggttctgctgggacgtaagctccagcactacactgattcctacctcggattcctcccttgggagaagaagaagtattttcaagatttgcttgatgaagaagagtcacttaaaacccagcttgcgtactttaccgattcgaagaacacggggcgtcaactgaaggatacttttgcagattccctccggtatgtcaacaagattctgaacagcaagtttggattcacttccagaaaggtgccagcgcacatgccacacatgatcgatagaattgtgatgcaggaactccaggacatgtttccagaggagtttgataaaacttcctttcacaaggtgaggcattccgaggatatgcaattcgctttttcgtacttctactaccttatgtcagctgtccaaccattgaacataagccaggtgtttgacgaggtcgacaccgaccaatcaggtgtgctttcggaccgggaaatacgaacccttgccactagaatacacgagctccctctgtcactccaagaccttacgggtctggaacatatgctgataaactgttcaaaaatgttgccagcggacattactcagctgaataacatccctcctactcaagaatcctactacgaccctaacctgcctcctgtgaccaagtcgctggtcactaattgtaagcctgtcaccgataagattcataaagcatacaaggacaagaacaagtacaggtttgagattatgggtgaagaagagatcgctttcaaaatgatcagaactaatgtgtcacacgtcgtgggccagctggacgatattagaaagaatcctcgaaagtttgtgtgtctcaatgataacattgaccataaccataaagacgcacagaccgtgaaagcagttctgagagacttctacgaaagcatgttccctatcccgtcccaatttgaactgccaagagaatacagaaatagatttctgcatatgcatgaacttcaggagtggagggcatatcgggataagttgaagttttggacgcactgcgttctggcaacgctgataatgttcaccatcttctcgttctttgccgaacaactcattgcactcaaacgtaaaatcttccccagaagaaggatccataaagaggcatcgccaaatcgcatccgtgtg

SEQ ID NO: 16961 - DNA, 3768 bp, synthetic construct
  misc_feature 1..3768: note = source = /note="Description of Artificial Sequence: Synthetic coding sequence"
  source 1..3768: mol_type = other DNA
atgctgttcaaactcctgcaaagacagacctacacttgtttgtcgcaccggtacggactgtacgtgtgctttcttggggtcgtggtgaccatcgtgtcagccttccaatttggtgaagtggttctcgagtggtcccgtgaccaataccacgtgctcttcgactcgtaccgagacaatatcgccggaaagtccttccaaaacaggctgtgtctgcctatgccaattgacgttgtgtacacttgggtgaatggaaccgatctggaactgctgaaggaactgcaacaagtgagagagcagatggaagaagagcagaaagcgatgcgagaaatcctcggaaagaacactactgaaccgactaagaaatccgaaaagcaactcgaatgcctcctcacgcactgcatcaaggtgcctatgctcgtcctggatccagctcttcctgcaaacatcactctgaaggacctgccatcactctacccgtccttccacagcgcatcagatatcttcaatgtggcaaagccgaagaacccatcgacgaatgtgtcagtggttgtgttcgattcgacgaaagatgtggaggatgcccattccggcctcttgaaaggaaattcccgccaaactgtctggcgcggataccttaccaccgacaaagaggtgccggggctggtcttgatgcaagacttggccttcctgtcgggtttcccaccaaccttcaaagaaactaaccaactgaaaaccaagctgccggaaaatctgtcctctaaggttaaactgttgcaactctactccgaggcttcggtggctctcctgaaactgaacaatcctaaagacttccaagagctgaacaagcagacgaaaaagaatatgaccatcgacggaaaggaattgaccatctcgcctgcgtacctcctctgggacctttccgcgatctcccagtcaaagcaggatgaggacatctccgcatcgcggttcgaagataatgaagaactgagatactccctgcgctccatcgagcggcatgctccatgggtgcgcaacatctttatcgtgaccaacggccagatcccatcgtggttgaacttggacaacccacgggtcactatcgtgactcaccaggacgtctttcgcaatctgagccatctcccaactttctcctcgccggccattgaaagccacatccatagaatcgaagggctctcgcagaagtttatctacctcaatgacgacgtgatgttcggaaaggatgtgtggccggatgacttttacagccattcgaagggacagaaggtgtacctcacttggccggtgccgaactgcgctgaggggtgccccggctcgtggatcaaagatgggtactgtgataaggcgtgcaacaattcagcgtgcgactgggacggaggagattgctccgggaacagcggaggctcgcgttacatagctggaggcggagggactggctcaatcggagtgggccagccgtggcagttcggtggagggattaactctgtgtcgtactgcaaccaaggatgcgccaattcatggctcgccgacaaattctgtgaccaggcttgcaacgtgttgtcgtgcggtttcgatgcaggcgactgtggacaagaccacttccatgaattgtacaaggtgattctgctgccgaaccaaactcactacattatcccaaaaggagaatgcctgccttacttcagcttcgccgaagtcgccaaacgcggagtggagggtgcatactccgataatcccatcatccgccacgcgtccatcgccaacaagtggaaaacgatccacttgatcatgcacagcggtatgaatgcaactaccatccacttcaatctgacgttccagaacaccaacgacgaggagtttaagatgcagatcactgtcgaggtcgacactcgcgaaggcccgaaattgaattccactgcacaaaaggggtacgagaatctcgtctcgcctattaccctgctgcccgaagcagaaatcctgttcgaggacattcccaaggagaagagattccctaagtttaagaggcacgacgtgaattcgacccggcgcgcgcaggaggaagttaagatcccgctggtcaacatctctctgctgccaaaagacgcacaactgagcctcaacaccttggatctccaacttgagcatggtgacatcaccctgaagggatacaacctgtccaagtcggcactcctgcgcagctttctcatgaatagccagcacgccaagatcaagaaccaggctatcatcaccgacgagactaatgactcgctcgtggctccgcaggaaaagcaagtgcacaaatctatcctgccgaacagcctgggagtgtcggagagactgcaacgcctgaccttccctgcagtgtcggtcaaggtcaacggacacgatcaaggacaaaacccgcctctcgacctggaaactaccgcgcgcttccgggttgaaacgcatacccagaaaactatcgggggcaacgttaccaaggagaagccgccgtcgctcatcgtgccactggaaagccaaatgacgaaggagaagaagatcaccggaaaagagaaggaaaattccagaatggaagagaacgccgagaaccacataggtgtgactgaggtgctgctgggcagaaaactccagcattacaccgacagttacctgggatttctgccttgggagaagaagaaatacttccaggacctgctggacgaagaagaatccttgaaaactcagttggcgtatttcactgactcgaaaaacaccggtcggcaactcaaggacaccttcgctgactcgctgaggtacgtgaacaaaatcctcaattcaaagtttggattcacttcaaggaaggttccggcccacatgccacatatgattgatcggatcgtgatgcaggaactccaggacatgtttcctgaggaatttgataaaacctccttccacaaggtgagacatagcgaggatatgcaattcgctttctcgtatttctactacctcatgtcggctgtgcaaccgctgaacatttcccaggtattcgacgaggtcgatactgaccagagcggagtgctgtcggatagagagatcagaaccctggctacccgcatccatgagctgccactttcgctgcaggacctcaccggactcgagcatatgctgatcaattgctccaagatgctgccagcagatatcacccaactcaacaatatcccgccgacccaagagtcgtactatgacccgaatctgccgcctgtgactaagtcgctggtcacgaattgcaaaccagtgaccgacaagatccacaaggcgtacaaagataagaacaagtatagattcgaaatcatgggagaagaggaaattgccttcaaaatgatccgcactaacgtgtcgcatgtggtgggacagcttgatgacattagaaagaacccacggaaatttgtatgcctgaacgataacatcgatcacaaccataaggacgcgcagactgtgaaggccgtgctgcgcgatttctatgagtccatgttccccatccctagtcagtttgaactcccccgcgaatataggaatcgcttcctgcacatgcacgaactccaggagtggcgcgcatacagggataagctgaagttctggacccattgcgtgctggccaccttgatcatgttcacgatcttctccttcttcgccgaacagctgatcgcactcaagaggaagatattccctcggcggcggatccacaaggaagcctctccaaataggatccgggtt

SEQ ID NO: 16962 - DNA, 3768 bp, synthetic construct
  misc_feature 1..3768: note = source = /note="Description of Artificial Sequence: Synthetic coding sequence"
  source 1..3768: mol_type = other DNA
atgctcttcaaactgctgcagcggcaaacctacacctgcctgtcccaccggtacggactgtacgtgtgcttcctgggagtcgtggttaccatagtcagtgccttccagttcggcgaagtggtgttggagtggtccagagatcagtatcatgtattgtttgactcctaccgggataacatcgccgggaagagtttccagaatcggctgtgcctgcctatgcctattgacgtggtttacacttgggtgaacggaaccgatctcgaactcctcaaagaactgcagcaggtcagagaacagatggaggaggaacagaaagcaatgcgagagatactggggaagaatacaacggagccgaccaagaaatccgagaaacagctggagtgtctgctgacacactgcatcaaggtcccaatgctggtgttggacccagcactgccagccaatataacacttaaggacctgccatcactgtaccccagcttccactctgcgagcgatatctttaatgtggccaaacccaagaatccatccaccaacgtgtccgttgttgtcttcgacagtaccaaagatgtcgaggatgctcacagtggactgttgaagggtaattcacggcaaacagtgtggcgcggatacttgaccacggacaaagaggttcctggcctggtactcatgcaggacttggcttttctctctgggttccctcctacctttaaggaaacgaatcagcttaagaccaaacttccggaaaacctctcatccaaagtaaagcttctccagctgtacagcgaggctagcgtagcgctcctgaaacttaataatcccaaagatttccaggagctgaataagcaaaccaaaaaaaatatgaccatcgatggcaaggaactgaccatctcccctgcgtatcttctgtgggacctgagcgctattagtcaatctaaacaggacgaggatatcagcgcatcacggttcgaggacaatgaggagctgcggtattccctcaggagtatagagagacacgcgccttgggttcgaaatattttcattgtcacgaacggacagatcccttcctggcttaatctggataaccccagggtgaccattgtgacccatcaggatgtgttcaggaacctttctcatctcccaacttttagctcacccgccatagaatcccacatacaccggattgagggtctctcacagaaatttatataccttaacgatgatgttatgtttggcaaagacgtgtggcccgacgacttttactctcacagcaaaggtcagaaggtgtatctgacctggcccgtgcccaattgcgctgaagggtgccctggaagttggatcaaggatggctattgcgataaagcctgtaacaattcagcttgcgactgggatggtggagattgtagtggcaatagtggtggctctcggtacatagccggcggcgggggcactggctctattggtgttggccagccttggcagttcggggggggaattaattcagtgtcatactgcaatcagggatgtgctaactcatggctcgcagataagttttgtgatcaagcgtgcaacgtgctgagttgcggatttgacgcgggtgattgtggccaggaccattttcacgagctttacaaggttatcctgcttccgaaccagacccattatatcatccctaagggcgagtgccttccctactttagttttgctgaagtggctaaacgcggagtggagggcgcctactctgacaatccaataattcgccatgcctccattgcgaacaaatggaagacaatccatcttatcatgcactcaggaatgaacgctacaaccattcactttaacctgacatttcagaataccaatgacgaggagtttaagatgcaaatcaccgtcgaagtggacacaagagagggcccaaagttgaactctactgcccagaaaggatacgagaacttggtctcccccataaccctgctgccagaggctgagatcctgtttgaggacatacccaaggaaaagaggttccctaagtttaaaagacacgacgtgaattcaactcgaagagctcaggaagaagtcaagattcccctggtcaacatctctctgctccccaaagatgcccagctgagtctgaataccctcgacctccagcttgagcatggagatatcacactgaaaggatacaacttgagcaaatccgctctgctgcggtctttcctgatgaactcccaacacgccaagatcaaaaatcaggctattatcacagacgaaaccaatgattctctggtggcccctcaggagaaacaggtccataaaagcattctgcccaattcactgggagtcagcgaaagactgcaacggctcactttcccagcagtctcagtcaaggtgaacggccatgatcaaggtcagaacccccccttggatctggagacgacagcgcgctttcgagtggagactcacactcagaaaacgatcggggggaacgttacaaaggagaagcccccaagcctgatcgtccctcttgagtcacagatgactaaagaaaagaaaatcaccggaaaggaaaaagaaaactccagaatggaggaaaacgccgagaatcatattggcgtaacagaggttcttctgggccgcaagctgcagcattacacagactcctacctcggttttctgccatgggagaaaaagaaatactttcaggacttgctcgacgaggaggagagcctcaagactcagttggcgtactttaccgatagtaagaacacaggtcgccagctgaaggatactttcgccgacagcttgcgctatgtcaacaaaatcctcaatagcaaattcggctttactagcaggaaagtgccggcacatatgccgcacatgatcgaccggatagtgatgcaggagcttcaggatatgtttcctgaagagttcgataaaaccagctttcacaaagtcaggcattccgaagatatgcagtttgcgttctcatacttttattacctgatgagtgccgttcagcccctcaacatttcccaagtctttgacgaggtcgacacagatcagtcaggggtgctgagcgatcgcgagattaggactcttgccacacggattcacgagctccctctgagcctgcaagacctgacagggctcgaacacatgctgattaactgttccaagatgctgccagcggacatcactcagctcaataatattccccctacccaagaaagctattatgaccctaatttgccgcccgttaccaagagcctggtgactaattgtaaaccggtgaccgataaaattcacaaagcctataaggacaagaataagtaccgctttgaaatcatgggcgaagaggagattgcattcaagatgattagaaccaacgtgtcccacgttgtgggacagctggacgatatacgaaaaaaccctcgcaagttcgtatgtttgaatgacaacatcgaccacaatcacaaagacgcccagacagtaaaagcggttctccgagacttctacgaaagcatgttccccattccttcacagttcgagctccctcgagaataccggaatcgatttctgcatatgcacgagctccaggagtggagagcctaccgggacaaactcaagttctggacacattgtgttctggccacactgataatgtttacaattttctctttttttgccgagcagttgatagcccttaagcgcaaaatctttcccaggaggcggatccacaaagaggcctctccgaaccggattagagtt

SEQ ID NO: 16963 - DNA, 3768 bp, synthetic construct
  misc_feature 1..3768: note = source = /note="Description of Artificial Sequence: Synthetic coding sequence"
  source 1..3768: mol_type = other DNA
atgctttttaagttgcttcagcgtcagacgtacacttgccttagccatcggtacggtctttacgtgtgctttcttggcgtggtagttaccatagtgtcagcatttcagttcggagaggtcgtgctggagtggtcaagagatcagtatcatgtgctttttgatagctatcgggacaatatagcagggaagagttttcaaaaccggctgtgtctgcctatgccaattgacgtcgtgtatacttgggtaaatggaacggatttagaactcctgaaggagttgcagcaggtgagggagcagatggaggaggagcaaaaggcgatgagggaaatcctggggaagaatactacagagcccactaaaaaatcggagaagcaactggaatgcctgctcacgcattgtatcaaggttcccatgctggtgttagatccagcgctgcctgctaacatcacacttaaggacctacctagtttgtacccaagcttccattctgccagcgatattttcaacgtggccaaacccaaaaatccttcgactaacgtctctgtggtggtgttcgactccactaaggacgttgaggacgcccacagtgggctgttgaagggcaacagccgtcagacagtatggcgcggatacctaacgaccgacaaggaagtgcctggtcttgtgctgatgcaagatttggcctttctcagcggattccctcctacatttaaagaaactaaccaacttaagaccaaactccctgaaaatctgagtagtaaggtgaagctccttcagctctattcggaggcttccgtggcgttgctgaagttaaataacccaaaggacttccaggagcttaataagcaaacaaagaaaaacatgactattgatggaaaggaactaaccatatcaccagcctacctcctttgggatcttagcgcaattagccagagcaagcaggacgaagacattagtgcctcaagattcgaggacaacgaggaactgcggtacagtctgagatccatcgagcggcatgcgccttgggttcgaaacatttttattgtgactaatgggcagataccgagttggctgaatctggacaatccacgggtgaccatcgttacacatcaggatgtgtttcgaaacctttcacatctcccaacgttcagctctcccgccattgagagtcatattcataggatcgaggggctcagccagaaatttatatatcttaatgatgatgtgatgttcggcaaagacgtgtggcccgacgacttttattcacacagtaaaggccaaaaagtgtaccttacatggccggtgcccaattgcgcagaaggctgtcccggctcgtggattaaggacggatattgcgacaaggcctgtaacaattcagcgtgcgactgggacggaggcgactgctcaggaaactctggcggatcccgttacatcgcgggtggtggtggcacagggtctatcggcgtggggcagccctggcagtttggcggtggcattaactcagtctcgtattgtaatcagggttgcgcaaactcctggctggccgataaattctgcgatcaggcctgcaatgtgttatcttgcggcttcgacgccggggattgtggccaggaccattttcacgaactctataaggtgattttgctgcccaaccagacacattacatcatccccaagggagaatgcctgccctacttcagttttgccgaggtcgccaagagaggagtagagggcgcatactcagataaccccatcatacgtcacgcaagcatcgccaacaaatggaagaccattcatttgattatgcacagtggtatgaatgcgacaacaatccattttaatctaacttttcagaacactaatgacgaagaatttaaaatgcagatcactgtcgaggttgataccagagaagggcccaaactcaatagtactgctcaaaaggggtacgaaaatcttgtgtctccaattacgctactgcccgaggctgaaatcctcttcgaggacatccccaaagagaagcgatttccaaagttcaagagacacgatgtgaactcaacaagacgggctcaggaagaggttaaaatcccactggttaatatctccctgcttcccaaggacgcacagctgtccctgaataccctggatttgcagctggagcacggggatatcactttgaagggctataatctcagcaagtcagccttgctgagatcgttcctgatgaatagccagcacgccaagataaaaaatcaagctattatcaccgatgagacgaacgacagtctggtcgccccacaggagaagcaggtgcacaaatccatcctgcccaattctttgggggtctcagaacggctgcaacgactgacgtttccggcagttagtgtcaaggtgaatggccacgaccaaggacagaacccaccactggatttggagactacagctcggtttcgggtcgagacccacactcaaaaaacgatcggcggcaatgttactaaagagaaaccgccatccctcatcgttccacttgagtctcagatgaccaaggagaagaaaatcactggaaaagaaaaagagaacagccgcatggaagaaaacgccgagaatcatatcggggtcaccgaagtcctgttaggaagaaagctgcagcattacaccgattcctatttaggctttctgccctgggagaagaaaaagtattttcaggaccttttagacgaagaggaatctcttaagacccaactcgcgtattttacggactcaaagaacactgggcgccagctgaaggatacatttgccgattctttacgttacgtgaataaaattctgaattcaaaatttggtttcacaagcaggaaagtccctgcacacatgcctcatatgatcgatcgaattgtcatgcaggaactgcaggacatgtttccagaagagtttgataaaaccagctttcacaaggtgaggcatagcgaggacatgcaattcgccttctcatatttctattatctgatgtccgccgtccaacccttgaatatcagccaggtgttcgacgaagtggacaccgatcaatctggggtgctatccgaccgcgagattcgcaccctggccaccagaattcacgaattacctctatccctacaagatctgacaggcctagaacatatgctaatcaactgtagtaaaatgctgccggcggacattacacagctaaataacattccgccaactcaagaaagctactatgatcccaacctcccacccgttacgaagtcgctagtgacaaactgtaaaccagttaccgataaaatccataaagcctataaggataagaacaagtatcggttcgagattatgggcgaagaagagatcgctttcaagatgattcgcactaacgttagccacgtggtggggcagctcgacgatattagaaaaaaccctcgcaagttcgtctgtcttaatgataatatcgaccataaccataaggacgctcagactgtgaaagccgtgctgcgggatttctacgagtccatgtttcccataccttcccagttcgaactgcctcgagagtacagaaacaggttcttgcatatgcacgagcttcaagagtggagagcttatagggataagctcaagttctggacacactgcgtgctggctacccttattatgttcaccattttttctttctttgccgagcagctgatagctttgaaacgaaaaatcttccccagaaggagaatccataaggaggcatctcccaaccgtatcagagtg

SEQ ID NO: 16964 - DNA, 3768 bp, synthetic construct
  misc_feature 1..3768: note = source = /note="Description of Artificial Sequence: Synthetic coding sequence"
  source 1..3768: mol_type = other DNA
atgttgttcaaacttttacaacgacaaacctatacttgcttgagtcaccgatacggtctatacgtttgcttcttgggagtagttgtgactattgtttctgcattccagttcggagaagtggtgctagaatggtcacgtgaccaatatcatgttttgtttgattcctatcgggataatatcgctggaaagtcgttccaaaatagattatgtttacctatgccgattgatgtggtctatacatgggtaaatggaaccgatcttgaattactcaaagaattacaacaggtacgtgagcaaatggaagaagaacagaaggctatgcgtgagatcctgggaaaaaatactacagaaccgactaagaaaagcgaaaaacaacttgaatgcttgttaacgcattgtataaaagtgccaatgttggtccttgatcctgcactcccggctaatataactcttaaagatcttccatcactatatccatcattccattcggcctcagacattttcaatgtggcaaaaccaaagaacccttctaccaatgtgtccgttgtggtgtttgattcaacgaaggatgtggaagacgcacattcagggcttcttaagggaaatagccgtcaaacggtttggagaggttatcttaccacggataaagaagtgcctggactggtgcttatgcaagacttggcttttttatcgggatttccgccaacatttaaagagactaaccaattaaaaacgaagttgccagaaaatctgtcatctaaagtaaaattgcttcaattatactccgaggcttcagtggctttgctgaaattgaacaatccaaaagactttcaagagttgaataaacaaacaaaaaagaatatgacgatcgacggtaaggaacttacaataagtccagcttatcttttgtgggatctatctgcaatctctcagtctaaacaagatgaagatatatctgcgagcagattcgaagataatgaggaactccgctattccctcagatctatcgaacgccacgctccctgggttaggaacatttttattgtaactaacggtcagatcccctcatggttaaatctagataatccacgagtcacaattgtaactcaccaagatgttttcaggaatctgtcacatctccctacgttttcgtcaccggcaatagagtctcatattcatcgtattgaaggactgtctcagaagttcatttatttgaacgatgatgttatgttcggtaaggatgtatggccagatgacttctatagtcactcaaagggccaaaaagtttacttgacttggccagtccctaattgtgcagaggggtgcccggggagctggattaaggatggatattgtgataaggcatgcaataatagtgcctgtgactgggatggcggagattgctcgggaaattccggaggaagccgatacatcgctggaggcggaggaacgggttctatcggagtgggtcagccatggcaatttggaggtggaattaatagcgtgtcttattgtaatcaaggttgtgctaattcttggctcgctgacaaattctgcgaccaagcatgtaatgtgctatcgtgtggtttcgatgccggtgattgtggacaagatcattttcatgagttgtacaaggttattctactcccaaatcagactcattacatcattccaaagggagaatgcttaccctatttctcgtttgctgaagttgcaaagcggggagtagagggagcctatagcgataatccaattatacgccatgcttctattgccaacaaatggaagacaatacacctcataatgcattcaggaatgaacgcgacaactatccattttaatttgacgttccaaaatactaacgacgaggaattcaaaatgcagatcactgttgaagttgacacacgtgagggaccgaagttgaattcaacggctcaaaaaggatacgagaacttggtgtctcctattacattgttgccagaggctgagatcctattcgaagacattcctaaagagaaaagattcccaaaatttaaacgacacgatgtcaattccactaggcgcgcccaggaagaagtcaaaattccactcgtcaatatttccctcctcccaaaagatgctcaactcagcctgaatacactcgatttgcaacttgagcacggcgatattacactgaagggttataatctttcaaagtcggcattgcttaggtcattcttgatgaattctcaacatgctaagatcaagaatcaagcaattataaccgatgaaacaaacgactcacttgtcgctccacaggagaagcaagtacataagtccattcttccaaattcattaggagtcagcgaacgtctacaacgtttgaccttcccagctgtgtcagtaaaagtaaacggacatgatcaaggacaaaatccaccactcgatcttgaaacaaccgcaagatttcgtgttgagactcatactcagaagacaatcggtggaaacgtcacaaaagagaaaccgccaagccttatagtaccacttgagtcgcagatgactaaagaaaaaaaaattacgggaaaagaaaaggaaaactcgcgtatggaggagaacgccgagaatcatatcggtgtaactgaagttcttttgggtagaaagctacaacactatacagatagttacttaggatttttgccatgggaaaaaaagaaatactttcaagatttgttagacgaggaagagtcattgaaaacacaacttgcatattttactgactcaaaaaatacaggacgtcaactgaaggatactttcgccgattcactaagatatgttaataagatcttaaactcaaagttcggatttaccagcagaaaagttccagctcacatgccccacatgattgatagaatcgttatgcaggaattgcaagatatgtttccggaagaatttgataaaacttcattccataaggttaggcattcggaagatatgcaatttgcattctcatacttttactaccttatgtcggcagtgcaaccgctaaacatcagtcaggttttcgatgaggttgataccgatcagagcggtgtgctctctgacagggagatcaggactttggcgactcggatccacgaactcccattgagtttgcaagatttgactggattggaacatatgttaattaattgcagtaagatgttgccagcggacattacacaactcaacaatatcccacccacacaagagagctactatgacccgaatctgccacctgtaactaaatcattagttacaaattgtaagccagtgaccgataaaattcataaggcatataaagacaagaataaatatagatttgaaattatgggagaagaagagatcgcattcaaaatgattcgcactaatgtttcgcatgtcgttggacagctcgatgacattaggaaaaatcctcgcaagttcgtttgtctaaatgacaatattgatcataatcacaaggacgctcagacagtaaaagcagttctgcgagacttctatgaatctatgtttccgatcccaagtcaattcgaactcccacgagaatataggaatcgctttcttcatatgcatgagcttcaggagtggcgtgcttatcgagacaagttaaaattttggacgcattgtgtcctggccaccttgattatgtttactattttctcgttcttcgctgaacaattgatcgcactgaaacgaaagatttttccacgaaggagaatccacaaggaagcgtctccgaaccgtattcgagtt

SEQ ID NO: 16965 - DNA, 3768 bp, synthetic construct
  misc_feature 1..3768: note = source = /note="Description of Artificial Sequence: Synthetic coding sequence"
  source 1..3768: mol_type = other DNA
atgctgttcaagctgctgcaaagacagacctacacgtgtctgtcccatcgatacggcctgtacgtgtgctttttgggagtggtcgtcactatcgtgtccgcctttcaattcggagaagtcgtgttggaatggtcccgtgatcagtaccacgtgctgtttgactcgtaccgcgacaacatcgctggaaagtcattccaaaaccgcctgtgcttgccgatgccaattgatgttgtgtatacttgggtgaacggaaccgacctcgaactgctcaaagaacttcaacaggtgagagagcagatggaggaagaacagaaggcgatgcgggagatcctggggaagaataccactgagccgaccaagaagtctgagaagcaacttgaatgcttgctgacccattgtatcaaggtgccgatgctcgtgctggaccctgcgctcccagcgaatatcactctgaaggatctgccaagcctctacccgtctttccactccgcctcagacattttcaacgtcgctaaacctaagaatccgagtacgaacgtcagcgtggtggtgttcgactcaaccaaggatgtggaggacgctcacagcggccttctgaagggaaatagcaggcagaccgtgtggcggggatatctgaccactgacaaagaagtgcctggcctcgttctgatgcaagacttggcattcctgtccggctttcctccaacttttaaggagactaatcagctgaaaaccaagctgccagaaaacctctccagcaaggtgaaactgctccagctgtacagcgaagcctcggtggcgttgctcaaactgaacaatccgaaagactttcaggagctgaacaagcagactaaaaagaacatgactatcgacggcaaggaattgaccatctcgccggcctacctgttgtgggacctctccgcgatctcgcagtccaagcaggacgaggacatctcagcgtcccgcttcgaggacaatgaggaactccgctacagccttagaagcattgaaaggcacgcaccgtgggtccgaaacatcttcatcgtaaccaacggccagatcccgtcctggctcaatttggacaacccgagagtcaccatcgtcactcaccaggatgtctttcgaaacctctcgcatctcccgaccttctcctcacctgccatcgaatcacacatccatagaatcgagggactctcccaaaagttcatctacctcaatgatgacgtcatgttcggaaaagacgtgtggcctgacgatttctattcccactcgaagggacagaaagtgtacctgacttggccggtcccgaactgcgcggaaggatgccccggttcgtggattaaggatggatactgcgacaaagcctgcaacaattcggcctgcgactgggacggtggagactgctcaggcaattcaggaggatcccgctacatcgctggcggcggaggaacgggttcaattggtgtggggcagccttggcagttcgggggagggatcaactccgtttcttactgcaaccaaggctgcgcgaattcgtggcttgccgacaagttctgcgaccaagcctgtaacgtgctgtcatgcggattcgacgcgggcgattgcgggcaggatcacttccatgaactctacaaggtcattctgctgcctaaccagactcattacatcatcccgaagggagagtgtttgccgtacttttcctttgctgaagtggcaaagcgcggcgtagaaggagcctacagcgataaccccatcatccggcatgcttcgatcgctaacaagtggaaaaccatccacctgatcatgcattccggcatgaacgccaccaccatccatttcaatctgaccttccaaaataccaacgacgaagaattcaagatgcaaatcaccgtcgaagtggatacccgcgagggacctaagctgaatagcactgcacagaagggatacgaaaacctggtgtcaccgatcaccctgctgccggaagcggaaatcctgttcgaagatattccaaaggaaaagaggttcccgaagtttaagcgccatgacgtgaactcgactagacgggcgcaggaggaagtgaaaatcccgctggtcaacatctcgcttcttccaaaggacgcccaactcagtctgaataccctcgatctgcagctggagcacggagacatcacgctgaagggttacaacctgtccaagtcagcgctccttagatccttcctgatgaactcgcaacatgccaagatcaagaatcaggcgatcattactgatgaaacgaacgactcgctcgtcgctccacaagaaaagcaagtgcacaaatcgatcttgccaaatagcttgggtgtctccgagaggctgcaacggctgacttttcccgccgtctccgtgaaggtcaatggacatgatcagggacaaaatccgccgttggacctggaaaccaccgcgcgcttcagagtcgaaacccacactcaaaagaccatcggcggaaacgtgaccaaggaaaagccacccagcctgatcgtgcctctggaatcacaaatgactaaggagaaaaagatcacgggcaaggaaaaagaaaattctaggatggaggaaaacgcggaaaatcatatcggagtgactgaggtgctcctgggacgcaagctccaacattacactgactcgtacctgggattcctgccgtgggagaagaaaaagtacttccaagacctccttgacgaagaagagtctctcaaaacccagctcgcctactttactgacagcaagaacacgggacgccagttgaaggacacctttgcagattcacttaggtacgtgaacaagatcctcaattccaagttcggatttacttcccggaaggtcccagcccacatgccgcacatgatcgaccgcatcgtcatgcaggaactgcaagacatgttccctgaggagtttgacaagactagcttccacaaagtccggcatagcgaggacatgcagtttgccttctcgtacttctattacctcatgtccgcagtgcagcctctgaacatctcacaagtgttcgatgaggtggacactgaccaatctggagtcctctccgaccgagaaatccggactctggcaacccggatccatgagctgcccctgtccctgcaggacctgaccggattggagcacatgctgatcaattgctcgaagatgctccccgcagatatcacccaactgaacaacatcccaccgactcaggagtcctactacgacccaaatctcccgccggtgactaagtcgctggtgactaattgtaagccggtaaccgacaagatccataaggcgtacaaagacaagaacaagtaccgcttcgagattatgggtgaagaggaaatcgcctttaagatgattcgcacgaacgtgtcacacgtggtgggacagctggacgatatccgcaagaatcccaggaaattcgtgtgtctcaacgacaatattgatcacaaccataaggacgcccagactgtgaaagctgtgctgcgcgatttctacgagtccatgttcccaatcccttcccagtttgaactgccgcgcgaataccgcaaccgcttcctccacatgcacgagctgcaggaatggcgcgcctaccgggataagttgaagttctggacccattgtgtcctggcgacgctgatcatgttcaccatcttctcatttttcgcggaacaactcatcgccctcaaaagaaagatcttcccgaggaggaggattcataaggaggcctcgcctaaccgcatcagagtg

SEQ ID NO: 16966 - DNA, 3768 bp, synthetic construct
  misc_feature 1..3768: note = source = /note="Description of Artificial Sequence: Synthetic coding sequence"
  source 1..3768: mol_type = other DNA
atgttgttcaagctgttgcagagacagacttacacgtgcttgtctcataggtacggcctctatgtgtgcttcctcggagtggtggtcaccatcgtctcagcctttcagtttggagaggtcgtgttggagtggagcagagaccagtaccacgtgctgtttgacagctatcgagacaacatcgctggaaagagcttccagaatcggctctgtcttccgatgcccatcgacgtcgtttacacctgggtcaacggaaccgaccttgagttgcttaaagagctacaacaggtcagagaacagatggaagaggaacagaaggcgatgcgggagatcctgggcaaaaacactacagagccgaccaagaagtcagagaagcagcttgaatgtctgcttacccattgcattaaagttccaatgttagtgcttgatccagcgctgccagcaaacattaccctgaaagacctgccctccctgtacccatctttccatagcgcctctgacatctttaacgtggctaagcccaagaacccaagcacgaacgtctctgtggtggtgttcgacagcaccaaagacgttgaagacgcccacagcggactgctgaaaggcaattcaagacagaccgtttggcgcggctatctcaccacagacaaggaggtgcccgggctggttctgatgcaagacttggcttttctttcagggttcccgcctacctttaaagaaacaaaccagttgaaaaccaaattgcctgaaaatctcagtagcaaagtcaagcttctccagctgtattcggaggccagcgtggctttactgaaactgaacaaccccaaagactttcaggaactgaataagcaaaccaaaaaaaacatgactattgacggaaaggagctgaccattagcccagcgtatctgctgtgggaccttagcgctataagccaaagtaaacaagacgaggatatctccgccagtcgttttgaggataacgaagagttgcgctatagcctgcgcagtatagaaaggcacgcaccttgggtcaggaatatctttatagtgacgaacggacaaatcccttcctggctgaaccttgataacccacgggtgaccattgtgacccaccaagatgtgttccgaaacttgtcacatttaccaaccttctctagccccgcaatcgagagtcacattcatcgcatcgaaggcctgtcacaaaaatttatctacctcaacgacgatgtgatgttcggcaaagatgtttggcctgatgacttttacagtcattcaaagggccaaaaagtttatctgacctggccagtgcccaattgcgcggaaggctgcccaggaagctggatcaaagacggatattgtgacaaagcttgtaacaattctgcatgtgactgggatggcggcgactgctcaggaaactctgggggctcaaggtacatcgccggggggggaggaaccggatccatcggagtaggccagccctggcaatttggagggggaattaacagcgttagctactgtaaccagggatgcgctaatagctggctggcggacaagttctgcgaccaggcttgcaacgtgctctcatgtgggttcgacgccggcgattgcgggcaggatcattttcatgagttgtacaaagtgatactcctgcccaaccagactcactacatcatcccgaagggagaatgtcttccctatttcagcttcgctgaggttgctaaaaggggtgttgagggtgcatattctgataacccgataatcaggcatgctagcatagcaaataaatggaagacaatacacctgatcatgcacagcgggatgaatgccaccaccatccatttcaacttgacattccagaacacaaacgatgaagagtttaagatgcaaataaccgtagaggtcgacactagagagggacccaaactgaatagtactgcgcagaagggctacgaaaatttggtgagccctattactctcttaccggaagccgaaatcctgtttgaggacatccccaaagaaaaaagattcccaaaatttaaacgccatgatgtgaactctactcgccgcgcccaggaagaggtgaaaatcccgctggtgaatatctctttgctccccaaggacgcgcagctgtcgttgaatacactcgatttgcagctggaacacggcgatatcacactcaaggggtataatctgtccaaaagcgcacttctgcgctctttcctgatgaacagtcagcacgctaaaatcaagaaccaggccattataaccgatgagactaatgatagtctagttgccccccaggaaaaacaagtccataaaagcattctgcccaacagcttgggtgttagcgaaagactccagcggctcacatttcccgcagtttctgtcaaagtgaatgggcatgatcagggacagaaccctcctctggatcttgagacgaccgcacgtttccgagtagagacacatacacagaaaactatcgggggcaacgtcaccaaggaaaaacccccttccctgatcgtccctttggaaagccaaatgactaaagaaaaaaagataacaggtaaggagaaggagaatagcagaatggaggagaacgctgagaaccacattggtgtcacagaggtgctccttggcaggaaacttcaacactacaccgactcttaccttggctttttgccctgggaaaagaagaaatattttcaagatctgctggacgaagaagagtctttgaagacacaattggcttacttcactgactcgaaaaacacgggtaggcagcttaaggatacattcgcagactctctgaggtatgtcaacaaaattttgaactccaaatttggctttacatcacgcaaggtgcccgctcacatgccccatatgatcgataggatcgtgatgcaagaattgcaagacatgtttcctgaagaatttgacaagacgtcattccataaggtccggcattccgaagacatgcagttcgccttcagctacttctattacctgatgagcgccgtgcagcctctgaatatcagtcaagtcttcgatgaggtggacaccgatcaatcaggcgtactgtctgacagggagatccgaactctggcaactaggattcatgaactcccccttagcctgcaagacctgacaggcctcgagcacatgctgattaactgtagtaagatgttgccggcggacattacgcagctcaataatattccgccgacccaggagtcttactatgacccaaacctcccaccagtgactaaatccctggtgacaaactgcaaaccagtaaccgataaaattcacaaagcatataaagacaaaaataagtataggttcgagattatgggcgaggaggagattgcgtttaagatgatccgcactaacgtgagccatgtcgtaggccaactcgacgatatccgcaaaaatccgcgaaagttcgtgtgcctgaacgataacatcgaccacaatcacaaagatgcacaaaccgtcaaggctgtgttgcgagacttctacgagtccatgttccccatcccatcccaatttgaattgcccagggaatacaggaacagattcttacacatgcacgaattgcaggagtggagggcttatagggacaaactgaaattttggacccattgtgtcctggccacgcttatcatgtttacaatctttagcttctttgccgagcagctgatcgcattgaagagaaagatattcccgaggaggcgcattcacaaagaagcttctcccaaccggatcagagta

SEQ ID NO: 16967 - DNA, 3768 bp, synthetic construct
  misc_feature 1..3768: note = source = /note="Description of Artificial Sequence: Synthetic coding sequence"
  source 1..3768: mol_type = other DNA
atgctatttaaactgctgcagaggcagacctatacatgccttagccataggtatggcctgtatgtatgttttttaggcgtggtggtcactatcgtgtccgcttttcaattcggcgaagtggttctggagtggtctagagaccaataccatgttctcttcgattcctaccgggacaacatagccggaaagagcttccagaaccggctgtgtctgccaatgcccattgacgttgtctacacctgggtcaacggcacagatctcgaactgctcaaagagcttcagcaggtgagagagcagatggaggaggaacaaaaagcaatgcgggagatccttggtaagaatacgactgagccaaccaagaagagtgagaagcagctggagtgcctactcacacactgcattaaggtgcccatgcttgtcttggacccggccctccccgcaaatatcacccttaaggatctcccttctttatacccatcgttccattctgcaagcgacatctttaacgtcgcaaaacccaagaacccctccacaaatgtgtccgtggttgtctttgactcaacaaaggacgtggaggacgctcacagtggtctcctgaagggcaatagcaggcaaactgtgtggaggggttatctgactaccgacaaagaggtgcccggtcttgtccttatgcaggacttagcatttctctctgggtttccacccactttcaaggagacgaatcagcttaagaccaagctccccgaaaatctttcttccaaggtcaaacttctgcaactatattctgaagcttccgtggcgctcctcaaactgaataatcccaaagattttcaggaacttaacaaacagactaaaaaaaatatgactatagatggcaaggagttgaccatttctccagcctatctgctctgggacctgtccgcgatctcccagagcaaacaggacgaagatattagtgcttctcggttcgaggataatgaggaactgcgctactccttgaggagcatcgagcgacacgccccctgggtccggaatatcttcatagtgaccaacggacagatcccctcctggcttaatctggacaaccctcgagttacgatcgtgactcatcaggacgtctttcggaacctgtcacaccttcccactttctccagccccgcgatcgaaagccacatccataggatcgaggggctctcacagaaattcatctatctgaacgacgatgtcatgttcggtaaagacgtctggccagacgatttttactctcactcaaaaggccagaaagtctacctgacctggcctgtcccaaattgcgcagagggatgtcctggctcttggatcaaggatggatattgtgacaaggcctgcaataatagcgcctgtgactgggacggtggggactgtagcggaaactctggggggtcacgatacattgcaggaggcggcggaacaggctccataggggtaggccaaccttggcagtttggcggcgggatcaacagtgtgtcatattgtaatcaagggtgtgctaactcctggttagccgacaaattttgtgatcaggcctgcaacgtgctctcctgcggtttcgatgcaggcgactgtggtcaggatcacttccatgaactatacaaggtgattctcctcccaaaccagacccactacataatccctaaaggtgagtgcctgccgtatttttcctttgcggaggtggcaaagaggggcgtggagggcgcgtattctgacaaccccatcattagacatgcttcgatagccaacaaatggaaaaccatccacctgatcatgcactccggcatgaacgccaccacaattcattttaatcttacctttcagaataccaacgacgaggagtttaaaatgcaaataacggtggaggttgatactcgagaggggcccaagctgaattcgactgcacagaagggctatgagaatctggtttcgccaattaccctgttgcccgaagcagagattctctttgaggacatacccaaagaaaagaggttcccgaaattcaaacgccatgacgtaaactctacccggcgcgctcaggaagaggtgaagatcccccttgtgaatattagtctgctgcccaaagacgctcagctctctctcaatacattggacctccagttggagcacggcgatatcacactgaaggggtacaatctctcaaaatctgcccttctcagatccttcctgatgaattctcagcacgctaaaattaaaaaccaagccatcatcaccgacgaaaccaacgacagtctggtggccccccaggagaaacaagtgcataagtctatactcccaaactcccttggcgtctccgaacggctccaacgattgactttcccggccgtaagtgtaaaggttaatggccatgatcagggccagaacccccccctcgatctggaaactactgcccgttttcgcgtggagacacacacacagaagacaattggtggaaatgtgaccaaggaaaaaccgccatccctcatagtccccctcgagtcccagatgaccaaggaaaagaaaatcaccggcaaggagaaagaaaacagcaggatggaggagaacgctgagaaccacatcggggttaccgaggtcctcttaggcaggaagttacaacactataccgacagttatctggggttccttccctgggagaaaaaaaagtacttccaggacctgttggatgaagaggaatcccttaaaactcagctcgcctactttacagacagcaagaacactggtaggcagctaaaagatacatttgcagacagtttgcggtatgtgaacaagattttgaatagtaaattcgggttcacatctaggaaggtccccgcacacatgccacacatgatcgatagaattgtaatgcaggaacttcaggatatgtttcccgaggagtttgacaaaaccagttttcataaggtcagacattcggaagacatgcaatttgccttctcatacttctactatctgatgtccgcagtgcaacctctgaatatctcccaggtgttcgatgaagtggatactgaccagtccggggtcctctctgatcgcgagatccggacgttggccacccgaatccacgagttgcccttgagcctccaggatctaacaggcttggaacatatgcttatcaactgctcaaaaatgctgcccgccgatatcactcagttaaataacatcccacccacacaagaatcatactatgacccgaatctaccaccggttaccaagtcgctggttacgaactgcaaaccggtgactgataagatacacaaagcctacaaagacaagaataaatatcggtttgaaatcatgggggaagaagaaattgcttttaaaatgatcaggacgaacgtctcgcacgttgtgggccagctcgacgatatacgcaagaaccctcgcaagtttgtctgtcttaacgacaacatagaccacaatcacaaggatgcccaaaccgtgaaggctgtcttgcgggatttctacgagtccatgtttccaatcccttctcaatttgagttgcctagagaataccggaaccgctttcttcatatgcatgagttgcaggaatggcgagcttaccgcgacaaactgaagttttggacccattgcgtgctggcgaccctgataatgtttaccatcttttctttcttcgccgagcaattgatcgcactgaagcggaagattttcccacgccggagaatacacaaagaggcatcccccaacagaatccgggtg

SEQ ID NO: 16968 - DNA, 3768 bp, synthetic construct
  misc_feature 1..3768: note = source = /note="Description of Artificial Sequence: Synthetic coding sequence"
  source 1..3768: mol_type = other DNA
atgctctttaagctcctgcagcggcaaacatacacatgcctgtcacacagatacggcttgtatgtttgcttcttgggtgtggtagtaactattgtgtcggctttccagtttggagaagttgtgctggaatggagtcgtgaccagtatcacgtcttgtttgattcctatagagataatatcgcgggaaaatcttttcagaatcgcttgtgtttgcccatgcccatcgacgtggtgtacacatgggtgaacggtacagatctcgagcttttgaaggagctccagcaggtccgcgaacagatggaggaagagcaaaaggcaatgcgggagattctgggcaagaacacaacagaacctacgaagaagagcgagaagcagctcgaatgcttattgacgcactgcatcaaggtccccatgttagtgctcgaccccgccttgccagccaacatcaccctgaaggacctgccgagtttgtaccccagtttccatagcgcaagtgatatttttaacgtggcaaagcctaaaaacccttccacgaatgtgagcgttgtcgtatttgattccacaaaagacgtggaagatgcccactccggtctgttgaaaggaaactccagacagaccgtatggagaggatatctgaccactgacaaggaagtacccggcctggtgttgatgcaggacctcgcgttcttatccggttttccgccaactttcaaagaaaccaatcagctcaagacaaaactgccagagaacttaagttcaaaagtaaaacttttgcagctttatagcgaggcctcggtcgcactgttaaaacttaacaatcccaaagactttcaggagctgaataagcagactaagaagaacatgacaattgatggcaaggaattgaccatcagtccggcatacctgttgtgggacctcagcgccatatcccagagcaaacaagacgaggacattagcgcttctcgcttcgaagacaacgaagagttgcgctactccctccgaagcatcgaacggcacgctccctgggtgagaaacatttttatcgtcacaaatgggcaaatcccgtcgtggcttaacctagataatccgagggtcacaatcgtgacgcaccaggatgtgttccgcaatctatctcatctgcctacgttctccagtcccgcgattgaatcacacattcaccgcatcgaaggcctatctcagaagtttatttatctgaatgatgacgtgatgttcgggaaggacgtgtggccggatgacttctatagccattccaaaggccagaaggtctacctgacttggcctgtcccgaactgtgccgaggggtgtcctggctcctggatcaaggatggttattgcgataaagcttgtaataacagtgcctgtgattgggacggcggggactgcagcgggaatagcggcggatcacgctacatcgcgggtggcggtggaacggggtccatcggagtgggacagccctggcagtttggagggggcataaacagcgtgagctactgtaatcagggctgcgctaattcatggctcgcagacaaattctgcgaccaggcttgcaacgttttgagttgtgggtttgacgctggggattgcgggcaggaccactttcatgagctatataaagtaattttgctccccaaccagacacactatatcattccaaagggggaatgcctgccttatttcagtttcgctgaggtggcaaagcgaggcgtagaaggcgcctactcggacaacccaattatcagacacgcgagcatcgcaaacaagtggaagactattcatttgataatgcatagcggtatgaatgctaccaccattcattttaacttaaccttccagaacacaaatgacgaggaattcaaaatgcaaataacggtggaagtggacactcgcgagggacctaagttgaactctacagcccaaaaaggctatgaaaatctggtctcacctattactcttctacccgaagctgaaatcttgtttgaagatatcccaaaggagaagcgcttcccgaaatttaaaaggcatgatgtcaactcgacaaggagggctcaggaggaggtcaagatacctctcgtcaatataagccttttgccaaaagatgcccagttgagcctaaacactctggacctccagctcgagcacggcgacattactctcaaaggctataatttaagtaagtccgcgctactgcgatcctttctcatgaacagtcagcacgcgaagatcaaaaaccaggctattatcactgatgaaaccaacgacagcctggttgcaccccaggagaaacaggtccacaagagcatcctgcccaacagtctcggcgtgagtgagaggctccaaagactgacttttcccgccgtgtccgtgaaagtgaacggccacgatcagggccagaacccaccgttggatttagagaccactgcacgattcagggtggagactcatacacagaaaactatcggaggcaatgttacaaaagagaaacccccatctttgatcgtgcccctcgaatcccaaatgacaaaagagaaaaagataacgggaaaagagaaggagaattcccggatggaagagaacgctgagaatcacattggcgtcacagaagtcctgctcggcagaaaactgcaacactacacagatagctacttgggtttcctcccctgggagaagaagaaatattttcaggatctactagatgaggaggaatcactgaagacccagcttgcctacttcacggattcgaagaacacaggcagacaactgaaggacactttcgctgacagcctgcgatatgtgaataaaattctaaactcaaagtttggcttcacaagtaggaaggttccagcccacatgccccacatgatcgataggatcgtcatgcaggaactgcaggacatgttccctgaggagttcgacaagacctcctttcacaaagtgaggcactctgaagatatgcagtttgctttcagttacttttattatttgatgagcgcagtgcagcctttgaacatctcccaagtcttcgatgaagtggacactgatcaatctggggtgttgagtgaccgtgaaatccggactctggccactcgcattcacgaactgccactttctctgcaagatctcaccggcttggagcatatgcttataaattgttccaagatgctgcctgccgatattacacaactgaacaacattcctccaacacaggaatcctactatgaccccaaccttcctccagtcaccaagtctctggttacgaattgcaaaccagttactgacaaaattcataaggcgtacaaggataaaaataagtatcgctttgagatcatgggcgaggaggaaatagccttcaaaatgatcagaaccaatgtgagccacgtcgtgggccaactggatgatatccgtaaaaacccccgcaaatttgtttgcctcaatgacaatatagatcacaaccacaaagacgcccagaccgtgaaggctgtgctcagagacttttatgaaagtatgttccctatccctagccagttcgaactgcctcgagaatacagaaacaggttcctgcatatgcatgaactccaagagtggcgggcctacagagataagctcaaattttggacacactgtgtgctggctacactgattatgttcacaatcttctccttcttcgccgaacagctcatcgcactgaaacgaaagatattccctagaaggcggatccacaaggaggctagccccaacagaattcgcgtc

SEQ ID NO: 16969 - DNA, 3768 bp, synthetic construct
  misc_feature 1..3768: note = source = /note="Description of Artificial Sequence: Synthetic coding sequence"
  source 1..3768: mol_type = other DNA
atgctgtttaagctgctgcagagacagacatacacctgcctgtcccaccgctatggactgtacgtatgtttcctcggggtagtggtcactattgtgagcgcattccagttcggtgaagtggtcttggagtggtccagggaccagtaccatgtgctcttcgattcttatagagacaatatcgcaggaaaatcattccagaaccgtctatgcctgcccatgcccatagatgtggtgtacacctgggttaatggcacagacctggagctgctaaaagagctgcagcaagtgcgcgagcaaatggaggaggaacagaaagctatgagagaaatcctgggcaagaacaccaccgagccaacaaaaaagtctgagaagcagctggaatgcctgctgacacactgcatcaaggtgcccatgctcgttctggacccagcgctccccgccaatataactttgaaagacctcccctccctgtacccttccttccactccgcctcggacatcttcaatgtggccaagcctaaaaacccatctacgaacgtcagcgtagtggtcttcgactcaacaaaggacgtagaagacgcacatagcggactgctcaagggaaattcaagacagaccgtttggcggggttacttgactaccgataaggaagtccccgggctggttcttatgcaagacctggcctttctgtccgggtttccccctacatttaaggagaccaaccaactcaagaccaagttgccggaaaatctgtcttcaaaggtcaagttgctgcagctatattccgaggcttcagtggccctgcttaaacttaataacccaaaggatttccaggaactgaataaacagacaaagaagaatatgaccatagacggcaaggaacttacgatctctccagcatatctgctctgggatctttccgccattagccaatctaagcaggacgaggatattagcgcctctagattcgaggataacgaggagctgcgctattccctgcggtccatcgaaaggcatgcaccgtgggtgagaaacatattcattgttaccaacggccaaattccatcttggctgaacctcgacaaccctagagtgacaattgtgacgcatcaagacgtattccggaacctgagccacctacccaccttcagctcccctgctatagagtcgcatatccaccgtatagaggggctgtctcagaagttcatatacctcaatgatgacgtcatgtttggcaaggacgtgtggccagacgacttttattcacactctaaggggcagaaggtatatttgacatggcccgtgcctaactgcgctgaaggctgtccaggttcttggataaaggacggatactgtgacaaggcttgcaacaacagcgcatgcgactgggacgggggagactgcagtggcaattccggggggtctcgctatatcgccggtgggggggggacaggaagcataggcgtgggacagccttggcaattcggcggcgggattaattccgtgtcttattgcaaccagggctgcgctaattcttggctagccgataaattctgcgaccaggcctgcaacgttctttcctgtggcttcgacgctggggactgtgggcaggaccatttccacgagttatataaagttatcctgctgccaaaccagacacactacattattcctaagggtgagtgcctaccgtacttttccttcgccgaagtggcgaaacgcggcgtggaaggtgcgtattctgataaccctatcatccggcatgcctctatcgcaaataagtggaagaccatccacctcattatgcattcaggcatgaacgccacaaccattcacttcaacctcaccttccagaatacaaacgacgaggaatttaagatgcaaataaccgtcgaagtcgacacacgggaaggtccgaaacttaacagtacggctcaaaagggttacgaaaacctcgtgagtccaatcaccctactgcctgaagctgaaatcctgttcgaagatatccccaaggagaagcggtttcccaaattcaagagacacgatgtgaatagcacacggagagctcaggaggaggtgaagattcctttagttaacatttctctcctccccaaggatgcgcagctgagtctgaataccctggacctccagctggagcatggagacattaccctcaaaggctataacttgtccaagagtgcccttttgcgctctttcctaatgaattcacagcacgctaaaatcaaaaatcaagccattataaccgacgagaccaacgactctcttgtggctcctcaggaaaagcaggtgcacaaatccatcctccctaattccctgggggtgagcgagcggttgcagcgccttaccttccccgcagtctccgttaaggtgaacggacatgatcaggggcagaatccccctctggatctcgagaccacagcacgatttagagtcgagactcacacacagaagaccataggcggtaatgtgactaaggagaaacctccatccctgatcgtccccctggagagccaaatgactaaggaaaagaaaattacaggtaaggaaaaggagaatagcagaatggaggaaaacgccgaaaaccatattggtgtgaccgaagtgcttctgggaaggaagttacaacattatactgactcttatttgggttttctaccttgggagaaaaaaaaatatttccaggatctgctggatgaagaggagtcacttaagacacagctggcttactttactgacagtaagaatacggggcgacagttgaaggacaccttcgccgacagtctgagatacgttaacaaaatcctgaatagtaaattcggattcacttcaagaaaggtgcccgcacatatgccacacatgatcgatcgcatagtcatgcaggagttgcaggatatgtttccggaagagttcgacaagactagttttcataaagtgcgccactcggaggacatgcagttcgctttctcttatttttactacctgatgtccgccgtgcagcccttgaatatcagtcaggtatttgatgaggttgatacggatcaatccggggtattgtctgacagagaaattagaacgctggccactagaatacacgaactgcccctctcactgcaggacttaaccgggttggagcacatgttgatcaactgtagtaaaatgttgccggcagacattacccaattgaataacatccctccaacccaggagagctactacgatcccaacctgccccctgtaacaaaatctctcgtaaccaattgtaaacctgtcaccgataagatccataaagcttacaaggataaaaataaatataggtttgagatcatgggagaggaagagatcgccttcaagatgattaggaccaacgtgagccacgtggttggccagctggacgacataagaaagaatccgaggaagtttgtgtgcctgaatgacaatattgaccacaaccacaaagacgcacaaaccgtcaaggctgttcttcgggatttttacgagtcaatgtttcccattcctagccagttcgagctgccgagagaatatagaaaccgatttctgcatatgcatgagctccaggaatggcgagcatacagggataaactgaagttttggactcactgcgtactagctacattgataatgtttactatcttttctttttttgccgagcagctgatagcgctgaaacggaagatctttcccagacgacggatccacaaggaggcatctccaaatcgaatccgagtc

SEQ ID NO: 16970 - DNA, 3768 bp, synthetic construct
  misc_feature 1..3768: note = source = /note="Description of Artificial Sequence: Synthetic coding sequence"
  source 1..3768: mol_type = other DNA
atgttattcaagctcctgcagcgacaaacgtacacctgcctcagccaccgttacggattgtacgtgtgctttctgggtgtcgtcgtgacgattgtctccgcttttcaattcggagaggtggttttggagtggtcccgcgatcagtaccatgtgctcttcgactcctaccgggataacatcgcaggcaagagcttccagaaccgtctgtgtctccctatgccgattgatgtggtgtacacctgggtgaatggtaccgatctagagcttttgaaggagctccagcaggtccgtgaacagatggaggaagagcaaaaggcgatgcgggagatcctggggaagaacactacagagccgacgaagaagtccgagaagcagcttgaatgcctactcacacactgcattaaggtacccatgttggtgctcgatccggcactgcctgctaacatcaccctcaaggatctgcccagtctgtacccctccttccactcagccagcgacattttcaacgtggctaagccaaagaatccctctaccaacgtgagcgtcgttgttttcgatagtacaaaggacgtcgaagacgcccactccggtcttttaaagggcaattcgcgtcagaccgtgtggcgtggttacctgacgaccgataaggaagttcccggccttgtgcttatgcaggacctggcattcctctctggctttccaccgaccttcaaggaaaccaaccagctcaaaacgaaactcccggaaaacctctcttctaaggtgaagctgcttcagctatatagcgaggcctctgtcgcactcctgaagttgaacaacccgaaggacttccaggagctgaataagcaaaccaaaaagaacatgacaatcgatgggaaggaactgaccatcagccccgcctacttactctgggacctctccgccatctcccagagcaagcaggacgaagatatcagcgcctctcgctttgaagacaacgaggaattacggtactctctgcgcagtattgaacgccacgcgccatgggtccgtaatatcttcattgtcactaacggtcagatcccatcttggttaaatctggataacccgcgggtcaccattgtgacccaccaggacgtcttccgtaacctctcccacctccccaccttctcgtcccccgcgattgagtcccacatacaccgtatcgagggcctcagccagaaattcatctacctcaacgatgacgtcatgtttggaaaggatgtctggcccgacgacttttattcgcactctaaagggcagaaggtttacctcacctggccggttccaaactgcgccgagggatgccccggttcgtggatcaaggatggatattgcgacaaggcatgcaacaactctgcttgcgattgggacggtggggattgttccggaaacagcgggggttcacgatacattgcgggtggtggcggcactggctcgattggcgttggtcaaccttggcagttcggcggaggtatcaactctgtctcttactgcaaccagggatgtgcaaactcctggctggctgataaattttgtgatcaggcttgcaatgtcctgtcgtgtgggtttgacgctggggactgtggacaggaccatttccatgagttgtacaaggttatcctcctccctaaccagacacactacatcatccctaagggcgagtgcttgccttacttctccttcgccgaggtggcgaaacgcggtgtagagggcgcatatagcgacaaccccatcattagacacgcctcgatcgccaacaagtggaagaccatccacctcatcatgcacagtggtatgaacgccaccactatccacttcaacttgaccttccagaacaccaacgatgaagagttcaagatgcagatcaccgtcgaggtagacacccgtgagggtccgaagcttaattccacagcccaaaagggctacgaaaacctggtctctcccatcacacttttaccggaagcagagatactctttgaggacatccccaaggagaagcgcttcccgaagttcaaacggcacgatgtaaattccacgcgccgggctcaggaggaagtcaagatcccgctggtgaacatctccctccttcctaaggatgctcagctttctttgaacaccctggacctgcagctggagcatggcgatatcacgctgaaggggtacaacttgtcgaagtctgcgctgttgagatccttcctgatgaatagccaacacgctaagatcaaaaatcaggctatcattactgacgagaccaatgattcgttagtggccccccaggagaagcaggtccataagagcatcctgccgaatagcttgggcgtctcggaacgcttgcagcgacttacctttcccgccgtctcggtcaaagttaacggtcatgaccaagggcagaacccaccgcttgacctggagaccaccgccaggttccgcgtcgagactcacacccaaaagaccatcggaggcaacgtcaccaaagaaaagcctccatccctcattgtgccgctcgagtctcagatgaccaaggagaagaagatcaccggcaaggagaaggaaaactcccgtatggaagaaaacgccgagaatcatatcggtgtaaccgaggtcctgctaggcaggaagcttcagcattatacagactcctaccttggcttcctgccttgggagaagaaaaaatatttccaggacctcctggacgaggaggaatctttgaaaacccagctggcctactttacggattcaaagaacactggtagacagctgaaggataccttcgccgattcgcttcggtacgttaacaagatactcaactcgaagttcggttttacgtcccgcaaggtgccggcccacatgccgcacatgattgacagaattgtcatgcaagagcttcaggacatgttcccagaggagttcgataagacttcctttcacaaggtgcggcactcggaggacatgcagttcgcattctcgtatttttactacctgatgagcgctgttcagccgctgaatattagccaggtgttcgatgaggtcgacactgaccagagcggcgtgttgtcggaccgtgaaatccgcacccttgcgacccgtatccacgagctgcccctctccctgcaggatttgacaggcctcgagcacatgcttattaactgctcgaagatgctccctgcagatatcactcagctcaacaacattccccccacccaagagtcttactacgatccaaacctcccccccgtcaccaagtctcttgtgaccaactgcaagcccgtgactgacaagattcacaaggcatataaggataagaacaagtaccgtttcgagatcatgggtgaggaggaaatcgctttcaagatgatccgcactaacgtctctcacgtcgtcggccagctggatgatatcagaaagaaccctcggaagttcgtctgcctgaacgataacatcgatcataaccataaagatgcccagactgtgaaggccgttttgagggatttttacgaatcaatgtttcccatcccctcgcagtttgagcttccacgggaataccgaaatcgcttcctgcacatgcatgagctccaggaatggcgcgcttacagagacaaactgaagttctggacgcattgtgtgttggcaacattgatcatgttcaccatctttagtttcttcgctgagcagctcatcgctctgaagcgcaagattttcccgcgtcggcgcattcataaggaggcctccccaaaccgcattcgggtg

SEQ ID NO: 16971 - DNA, 3768 bp, synthetic construct
  misc_feature 1..3768: note = source = /note="Description of Artificial Sequence: Synthetic coding sequence"
  source 1..3768: mol_type = other DNA
atgctgttcaagcttttgcagcgacagacgtacacctgtctcagtcaccgatacggcctgtacgtgtgttttctcggggttgtggtaacaattgtctccgcattccaattcggtgaggtcgtgctcgagtggtctcgagaccagtaccacgtgctctttgattcctatcgagataatatcgccggcaaatcatttcaaaatcgactgtgcctgccgatgcctatcgatgtggtttatacgtgggtaaatggcacagatctggaactcctgaaggaacttcagcaggttagagagcagatggaagaagaacaaaaggcgatgcgtgaaattctcggtaaaaataccactgagcctactaaaaaatcagaaaagcagctggagtgtttactcacacattgcattaaggtcccaatgcttgttctcgatcctgccttacccgccaatatcactctcaaggacctgccaagtctgtacccaagcttccacagtgcttcagacatcttcaacgtagcaaaaccaaaaaatccatcaactaatgtgtccgtggtagtcttcgactccacaaaagacgtggaagatgcccactctggactgctgaaaggcaacagtcgacagactgtctggagagggtatttgactacagacaaagaagtgcccggactggtgctgatgcaggacctcgcttttctgagtggcttcccaccaacgtttaaggaaaccaaccaacttaagactaagctgccagagaatctgtcttccaaagttaagctgctgcagctctattccgaagcttctgtggcactgctaaaactgaacaatcccaaggactttcaggaacttaacaaacagacaaaaaagaatatgactatcgacggcaaagaactaactatctctcctgcttacctgctctgggatttatccgcgatttctcagtctaaacaagacgaagatatctccgcgtctagattcgaagataatgaagagcttcgctacagcctgcgaagcatcgaaaggcatgcaccatgggtgagaaatatcttcattgtaacgaacgggcagattccctcctggctgaatctggacaatccaagagtgacgatcgtgactcaccaggacgtgttcagaaacctgagccatttacctacattcagctcccccgcgatcgagagccatatccataggattgagggtctaagtcagaagttcatataccttaacgacgacgtgatgttcggcaaggacgtctggcccgacgacttctactctcattccaaaggtcaaaaagtgtacctcacttggcctgtgcccaactgcgctgaagggtgccccggatcctggatcaaggacggatactgtgataaagcctgtaataacagcgcgtgcgattgggacggaggagattgtagcggcaactcggggggcagcaggtacattgctgggggcggcggtactggaagtatcggcgtggggcagccgtggcaattcgggggggggattaactccgtgagttactgcaaccaggggtgtgctaatagttggcttgccgataagttttgtgaccaagcatgcaatgtcttgtcctgcggatttgacgctggagattgtggtcaggaccactttcacgaattatataaggtgatacttttgcctaaccaaacacattacataatccctaagggagagtgcctgccttacttcagcttcgctgaagtggccaaacgcggcgtcgagggtgcatactccgacaatcctataattaggcacgcaagtatcgcaaataagtggaagacaatccacctcatcatgcactccgggatgaatgccacaaccattcattttaatttaacttttcagaacacgaacgacgaggaattcaaaatgcaaataactgtcgaggttgatactagagagggccccaaacttaacagtaccgcacagaagggttacgaaaatctggtctctcccattacactactcccagaggccgaaatcctgtttgaagatattccgaaggaaaaacgtttccctaagttcaaacggcatgacgtgaactccacaaggcgagctcaggaagaagtgaagataccgctggtgaacatctcactgcttcccaaagatgctcaactctctctgaacacccttgacctgcagctggagcacggggacatcaccctgaagggttataatctgtcaaaaagcgctctgttaagatccttccttatgaattcacaacacgctaaaattaaaaatcaggctatcattaccgatgaaacaaatgactcactcgtggccccccaagaaaaacaagtgcacaagagcatcctccccaacagcctgggggtatccgaaagactgcaaaggctgacttttccggccgtgtctgtgaaggtaaatgggcatgatcagggacagaatcctcctttggacctggaaacgaccgcccgcttcagggtggagacgcatactcagaagactattgggggaaacgtgactaaggaaaagccgcctagcctcatcgtgccgctcgaaagccagatgaccaaagaaaaaaagattaccggtaaggaaaaggagaactcgaggatggaagagaacgcagagaaccacatcggggtgactgaagtgttgctcggcaggaagctacagcactataccgactcctatttaggcttcctaccatgggagaagaagaagtattttcaggatctcctcgatgaggaagagtctttgaagacgcagctagcttacttcaccgactccaagaacacagggcggcagctcaaagacaccttcgccgatagtctccgatatgttaacaagatcttgaactcaaagttcggcttcacgagtcgaaaagtcccagcccatatgccgcacatgatagaccggatagttatgcaggaactacaggacatgttccccgaggaattcgacaaaacgtctttccataaagtgcgccattccgaggacatgcagtttgcattctcctacttttattacctcatgtccgctgtgcaaccgctgaacatcagtcaagttttcgacgaggtcgatactgaccagagtggcgtgttgtcggacagggagataaggactttggccactcgcatccatgaactccctctgagtttgcaggacctcactggtcttgagcacatgctaataaattgcagtaagatgttgcctgcagatatcacccagctgaacaacatccctcccacgcaggaaagttactatgatcctaacttacctccagtgacaaagtcactggttaccaattgcaagcctgttaccgataagattcacaaggcttacaaagacaaaaataagtatagattcgagattatgggggaagaagaaatcgcatttaaaatgatccgtacaaacgtgtcccatgtggttggacagctagacgatattcgcaaaaatcctcgtaaatttgtgtgcttgaatgataacatcgatcacaatcacaaagacgcccaaacagtgaaagccgttctgagggatttctacgagagcatgttcccaattccttctcaatttgaacttcctagggaatatcggaacagattcctgcacatgcacgagctacaggaatggcgagcctacagggataagctcaaattttggacgcactgtgtcctcgctaccctaatcatgttcactatcttctctttctttgcggaacagctgatagcactcaagagaaagatatttccgaggagaagaatccataaagaagcaagccccaatagaatacgtgtt

SEQ ID NO: 16972 - DNA, 3768 bp, synthetic construct
  misc_feature 1..3768: note = source = /note="Description of Artificial Sequence: Synthetic coding sequence"
  source 1..3768: mol_type = other DNA
atgctgtttaagcttctccagcgccagacctatacctgtctttcacacagatatgggctgtatgtctgcttcctgggagtggtcgttactatagtgtcagctttccagtttggggaagtggttctagagtggtcaagggaccagtaccacgtgctgtttgattcataccgggacaatattgctggtaaatccttccagaatcgcttatgtctgccaatgcccattgatgtggtatacacgtgggtgaacggcacagatttggagctcctgaaagagctccagcaggtgagggagcaaatggaagaggagcagaaggccatgcgggagatcttgggtaaaaatactactgaaccaacaaagaagagtgagaagcagttggaatgtctgttgactcactgtatcaaggtcccaatgctggtgttggacccggctctgcccgcaaacattacgctcaaggacctgcccagtttgtacccttcttttcactctgcatccgacattttcaatgtggccaagccgaaaaacccatcaacaaatgtttcagtcgtagtctttgatagcacgaaagatgtggaagacgcacattctggtctactgaaaggaaacagccggcaaaccgtttggcgaggctatttgaccacggataaggaagtgcccggcctggtcctgatgcaggatctggcgtttctatcaggcttcccacctacttttaaagagacaaatcaactgaagacaaagctccccgagaacctttcctctaaggtaaagcttctccagctttattctgaggccagtgtggctctgctgaagctcaacaatcctaaagacttccaagagctcaacaaacaaactaagaagaacatgaccatagatggaaaggagctgaccatctctccagcatatctgctgtgggacctatcagcaatcagccaatccaagcaagatgaggacatcagcgcctctcgttttgaggacaatgaggagcttcgctattctctgcggtcaattgaaaggcatgcaccttgggtgagaaacatattcatcgtcaccaacggccaaattccaagctggctcaacctggacaaccctcgcgtaacgattgtcacccaccaggatgttttccgcaacctctcccacttacctacgttttctagcccagccatcgagagccacatccatagaattgaaggcttaagtcagaaattcatttacctcaatgatgacgtgatgttcggcaaggacgtgtggcccgatgacttttatagccactccaaggggcagaaggtgtacctcacatggcccgtacccaattgtgcggaaggctgtcccggttcttggattaaagatgggtactgtgacaaggcctgcaacaattctgcttgcgattgggatggaggggactgctcaggcaatagcggcggtagcagatacatcgcaggtggaggaggaacgggcagcatcggggtggggcagccttggcaatttgggggcgggatcaactcggtgagctactgcaatcagggatgcgcaaattcctggctggcagacaagttctgcgaccaggcatgtaatgtgctctcctgtggattcgatgccggcgattgtggtcaggatcacttccacgaactctacaaggtgattctcttacctaaccaaacacactatatcattcccaagggggagtgtcttccgtatttctccttcgctgaggtcgccaagaggggtgtggagggcgcctactcggataatcccatcattcgccatgctagcattgcgaacaagtggaagactattcatcttataatgcatagcggaatgaacgctactacaatccactttaacttgacctttcagaacactaatgatgaggaatttaaaatgcagataaccgtcgaagttgacacccgggaaggcccgaagctcaattccaccgcccagaagggatacgagaatcttgtcagtcctatcaccctcttgcccgaagcggagatactctttgaggatatccccaaagagaaaaggttccctaagttcaagcggcacgatgtgaattccactcgcagagcccaggaggaggttaagataccactggtaaatatttctttgctgccaaaggatgctcagctgagcctcaatacactcgatctgcagctggagcatggagatatcaccctgaagggctacaatttgtccaaatctgccctcctgcgcagttttctaatgaactcccagcacgcgaagatcaagaaccaggctatcattactgacgagaccaatgacagtctggttgcccctcaggaaaagcaggtacataaaagtatactccccaattccttgggcgtgtccgagaggctgcagcggctgactttcccagccgtctccgtgaaggttaacggtcacgaccaagggcaaaacccaccactcgatctggaaactaccgcccgatttagagtggaaacacacacgcagaagaccataggcggaaacgtgactaaggaaaaaccaccgagtctgatcgtacccttggagtcgcaaatgaccaaggaaaagaagattaccgggaaggagaaggagaacagcaggatggaagagaatgctgagaatcacatcggcgtgactgaagtcttattgggccggaaattgcagcattacactgattcctatttgggttttctcccatgggaaaagaaaaaatattttcaggatctgctggatgaagaggagagcctgaagacccaactcgcctacttcacagattccaaaaatactggaaggcagctgaaggatacttttgctgattcgcttcgttatgtcaacaagatactgaactctaaatttggcttcacttcccgcaaagtaccggctcatatgccccacatgattgacagaattgtgatgcaggaacttcaggacatgtttcccgaagaattcgacaaaacaagttttcataaggttaggcacagtgaggacatgcaattcgcattctcctatttctattacttgatgtctgctgtgcagcctctgaacatcagccaagtgtttgacgaggtggataccgaccagagcggcgttctgtcggacagggaaattcggacgctcgccacccgaatacatgagctgcctttgtctttacaggatctcaccggcctggagcacatgctgattaattgcagtaaaatgctcccagcagacatcacgcagctgaataatatcccaccaacccaggaatcatattatgatcccaatttgccccctgtgacaaagagcttggtaacaaactgcaaacctgtgacagacaaaattcacaaggcctataaagacaaaaacaagtataggttcgagatcatgggcgaggaagagatcgcctttaaaatgatacggactaatgtttcacacgtggtgggtcagttggatgacataagaaaaaatccacgcaagttcgtttgcctaaacgataacatagatcacaatcacaaagacgctcagactgtcaaggcggtactgcgggacttttacgaatctatgtttccaattccatctcaattcgagctaccccgggaataccgtaataggttccttcacatgcatgagctccaggaatggcgggcctacagagacaagctaaagttctggactcactgtgtcctagccaccctgatcatgttcaccatcttttcctttttcgccgagcagctaatcgctttgaagagaaagatcttcccgcgtcggcgtatccataaggaggctagccccaacagaatacgagtg

SEQ ID NO: 16973 - DNA, 3768 bp, synthetic construct
  misc_feature 1..3768: note = source = /note="Description of Artificial Sequence: Synthetic coding sequence"
  source 1..3768: mol_type = other DNA
atgcttttcaagctgctgcaaaggcaaacctacacatgtctttcacatagatacggtctttacgtgtgcttcctgggtgtggtggtgacgattgtgagtgcctttcagttcggggaggtggtgttggaatggtctcgggatcagtatcacgtcctgttcgattcttatcgggacaatattgccggcaaatccttccaaaaccggctgtgcttgcccatgcccatcgatgtggtttacacatgggtcaacggaacagacctggaactgctgaaggaacttcaacaggtccgggagcaaatggaggaggagcagaaggctatgcgcgaaatactcggtaagaacactaccgagccgaccaagaagtcagagaagcagcttgagtgcctccttacgcattgtattaaagtcccaatgttggtgcttgaccccgcactgccagcgaatatcaccttgaaggacctgccaagcctttatccttccttccactccgcgtccgatattttcaatgtggccaagcccaaaaatccctccaccaacgtgtccgtggtggtgtttgatagtactaaagatgtcgaggacgctcacagtggccttcttaagggcaacagccgacagactgtttggagggggtatttgacaactgacaaagaagtgcccggactcgttctcatgcaggatctggccttcctgtccgggttccctccaaccttcaaggagacaaatcagctgaagacaaaacttccggaaaacctttcatcaaaggtcaaactgctccaactgtatagcgaggcctcagttgccctcctgaaactgaacaaccctaaggattttcaggagctcaacaaacaaaccaagaagaacatgaccattgacggcaaggaactgaccatttccccagcatacttgctttgggatttgtccgccattagccaaagcaagcaggatgaagatatcagcgccagtcgattcgaggataatgaggagctgcgctacagcctgagatccattgaacggcatgccccatgggtccggaacatcttcatcgtgacaaatggccaaattccgtcttggctcaacctcgacaaccccagagtcaccatcgttacacatcaagatgtatttcggaacttgagccacttgcctacgttctcatccccggctatagagtcccatatacataggatcgaggggctgtcccagaagtttatttacctgaatgatgatgtcatgtttggcaaggacgtctggccagacgacttctatagccattccaagggacagaaggtgtatctcacctggcctgtgcctaactgcgctgaggggtgtccaggttcttggattaaggacggctattgtgataaagcctgtaacaacagtgcatgcgattgggacggcggagactgcagtggaaactcagggggcagtcgatacatcgccggcggaggtggtaccggatccatcggtgtggggcagccttggcaattcgggggcggtatcaatagcgtgagctactgtaaccaggggtgtgccaattcttggctcgccgacaagttctgtgatcaggcgtgcaacgtgctctcctgcggattcgacgccggagactgcggccaggaccacttccacgagctgtataaggtcatcctcctgccgaaccaaacgcactatattatacccaaaggagagtgcctgccctactttagttttgccgaagtggcgaaacgcggcgtcgagggggcttatagtgacaatcccataattcgccacgcctctatcgcaaataagtggaaaactattcatctgattatgcattccgggatgaacgcaaccacaattcacttcaatctcacttttcagaataccaatgacgaggagtttaagatgcagattactgtcgaggtagatacacgggaaggtccgaagctgaactccaccgcccagaaaggatacgagaacctcgtgtccccaatcactctgctccccgaggcagagattctcttcgaggatatccccaaagagaagagattccccaagtttaagcgccacgacgtcaactccacacgacgggcccaggaggaagtaaaaataccattggttaacatttcactcctgcctaaagatgcacaactcagcctcaacacacttgatctgcagctggagcatggagacatcaccctgaaaggatacaatctgtccaagtctgcactcctgaggtcatttctgatgaatagccagcatgcaaagatcaaaaatcaagccataatcaccgacgagacgaacgatagtctggtggcgccccaagagaaacaagtacataagagcatccttcccaacagcttgggggtgagcgagaggctgcagcgcctgacttttcctgcagtatccgtaaaagtcaacggtcacgatcaggggcagaatcctcctttggacctggaaaccacagccaggttccgggtggaaactcatacgcagaaaacaatcggtggcaatgtaaccaaggagaagccccctagtcttatcgtacccctggagagccagatgactaaggaaaaaaaaataactggtaaagaaaaagagaattccagaatggaggaaaacgccgagaatcacattggcgtgaccgaggtactgctgggcaggaagcttcagcactacaccgacagctatctcggctttcttccgtgggaaaagaaaaagtattttcaggatctgctcgatgaggaagagagcttgaaaactcagttggcatatttcacagacagtaaaaatacaggccggcagctgaaggacacctttgctgactctctgcgctatgtgaacaagatcttgaattcaaagtttggctttacttcacgcaaagtacctgctcacatgccccacatgatagacaggattgttatgcaggaactgcaggatatgttccccgaggagtttgacaagacgagtttccacaaggtcaggcacagtgaggacatgcagttcgccttctcctatttctattacctgatgtctgctgttcaacctctgaatatatcacaggtttttgatgaggtggacactgatcagtcaggggtcctgtcagaccgggagattcgcaccctcgccacgagaattcacgagctcccattgagcctccaggaccttacggggcttgagcacatgctgataaattgttccaagatgctgccagctgacatcactcaactgaacaacatacctcctactcaggagagctactatgaccccaatctgccacctgtgactaaatccctggtcactaactgtaagccagttaccgataagattcacaaggcatataaggataaaaacaaatatcgctttgaaatcatgggcgaggaggagattgctttcaagatgattcgaaccaatgtgtcccacgtcgtgggacagctggacgatatcaggaaaaaccccagaaagttcgtatgtctcaatgacaacattgaccataatcataaagatgctcaaactgtgaaagcagttctgagggacttttacgagtccatgttccccatcccaagtcagttcgaactgccgagagaatatcggaaccggtttctccatatgcatgagctgcaggagtggagggcttaccgagacaaactgaaattttggacacattgcgtccttgccacactgatcatgtttaccatctttagcttttttgctgaacagctgatcgccctcaagaggaagatttttccccggagaagaattcacaaagaggccagtccaaatcgaatccgggtg

SEQ ID NO: 16974 - DNA, 3768 bp, synthetic construct
  misc_feature 1..3768: note = source = /note="Description of Artificial Sequence: Synthetic coding sequence"
  source 1..3768: mol_type = other DNA
atgctttttaagctgcttcagaggcaaacctacacatgcctttcccaccgttacgggctgtacgtctgttttctcggcgttgtcgtgacgatcgtcagtgccttccagttcggggaggtcgtgttagaatggagccgtgaccaatatcacgttttattcgattcataccgagataacattgccgggaaatctttccagaaccggctatgccttcccatgccaatcgatgttgtgtatacatgggtaaacggcaccgatctggaactgctaaaagagctgcagcaagtcagggagcagatggaagaggagcagaaggccatgcgagagattcttggaaagaacacaactgaacctactaaaaaaagtgaaaagcagctggaatgcctgctgacccattgcatcaaggtgccgatgttagtgcttgatcctgctctccccgctaatataaccttaaaggatctcccatccttatacccaagcttccactccgcatctgacatcttcaatgtggccaaacctaagaatccttctacgaacgtgtccgtcgttgtgttcgattcaacaaaggatgttgaggatgcccacagcggactactcaaggggaacagtagacagacagtttggcggggatacctcacaacagataaggaggtaccgggactcgtgctgatgcaggatctcgcctttctgtccgggttcccgcccactttcaaggagacaaatcagctgaagactaaactccccgagaacttgtccagcaaggtgaaactgctgcagctgtactctgaggcctcagtggctctacttaaactgaataatcctaaggacttccaggagttgaacaagcagacaaagaaaaacatgactattgacgggaaagagttgaccatatccccggcatatttactgtgggacctaagtgccatcagccagtccaaacaggacgaagatatttccgctagtaggttcgaggacaatgaggagctccgctactcgttacgtagcatcgaacggcacgccccatgggtgcgcaacatttttattgtcaccaatggtcagatcccaagctggctcaacctggacaaccccagagtcaccattgtcacccaccaagacgtgtttcgcaacctgagtcatctgcccaccttttcttctcctgccatcgaaagccacattcatcgaatcgagggtctcagtcagaagtttatatatctgaacgatgatgttatgttcggtaaggatgtatggccagacgacttctacagccattctaaagggcagaaagtctacctcacctggcccgtacctaattgtgcagagggatgtccaggtagctggattaaagatggttattgtgataaggcttgtaataatagtgcgtgtgattgggacgggggggattgctccgggaactccggcggctcccggtacatcgcaggcggggggggcactggctccataggcgttggccagccatggcaatttggcggaggaatcaatagcgtgtcttactgtaaccagggttgtgctaacagctggctggcagacaagttttgcgaccaagcgtgtaatgtactgagttgcggttttgatgccggcgattgtgggcaagatcattttcatgagttgtacaaggtgatccttttgcctaatcagactcactatatcatcccgaaaggggagtgcctgccatacttttccttcgcagaggtcgccaagcggggagtggagggagcctacagcgacaatccaattatcaggcacgctagcattgcaaacaaatggaaaactatccacttgatcatgcattccggtatgaacgctaccaccattcatttcaaccttacatttcaaaatacaaatgatgaagagttcaagatgcaaattacagtggaggttgacaccagagaagggcctaagctgaatagcacagcacagaaaggatacgaaaacttagtcagcccgattacactactgcctgaggctgagatacttttcgaagatatacctaaggagaaaagattccccaagttcaagaggcatgatgtcaattcgaccagaagagcccaggaagaggtaaaaattcctctggtaaatatctccctgctgccgaaggatgcccagctgtccttaaatactttagacctccagttggagcatggggatattaccctcaaaggctacaacctcagcaagtctgctctgctgcgaagctttctcatgaactctcagcatgccaagataaaaaaccaggcgataataaccgatgagaccaacgattccttggtcgcaccccaagaaaaacaggtgcacaagtcaatcctgccaaatagtctgggggtgagtgagcggctgcagaggctcacttttccagcggtatcagttaaggtcaacggccatgaccaggggcagaaccctcccctcgacctggaaactaccgccagattcagagttgagacgcacacacaaaagacaatcggagggaacgttacaaaagaaaaaccgccatctctcatcgtaccactggagtcacagatgaccaaggagaagaaaataacagggaaagaaaaagagaattctcgtatggaagagaatgcggagaaccatattggagtaactgaggttttgctgggaagaaagctacagcactacaccgatagctacctggggttcctcccatgggaaaagaagaagtattttcaagatctgctggacgaagaagagtccttgaagacccagctggcatattttaccgacagcaaaaacaccgggagacagctgaaagatactttcgctgattctttgcggtatgtcaacaaaatcctcaacagcaagtttggatttacctctcggaaagttcccgcccacatgccacacatgatagaccggatagtcatgcaggagctgcaggacatgtttccggaagagttcgacaagacaagctttcataaagtccgacactctgaggatatgcagttcgccttctcctacttctattacttgatgagtgctgtccagcccctgaacatctcacaggtgttcgacgaagtggacaccgatcaaagcggagtgttgtctgaccgtgagatccgaaccttggctactaggatccacgagctgcccttgagtttgcaggatcttaccgggctggaacacatgcttatcaactgcagtaaaatgttgcctgcggacatcacccaactgaacaacatcccacccacccaggaatcttattatgatcctaatctgccacctgtcacgaagagcctggtgacgaattgtaagcctgtgacagacaagattcacaaagcctacaaggataagaataaatatagattcgaaatcatgggagaagaagaaatcgcctttaaaatgatacgtacaaatgtgtcccacgtggtaggtcagctggacgatatccggaagaaccctaggaagttcgtgtgccttaacgacaacatagaccacaaccataaagatgcgcagacagtcaaagctgtgctgcgcgacttctacgagtccatgttccctattccttcccaatttgaactgccaagggagtatcgtaatagatttctccacatgcacgaactccaggaatggagagcatatcgggataaattgaagttttggacccattgtgtactggctaccctgatcatgtttactatctttagcttttttgccgaacagctgatagccttgaagaggaagatatttcctcgacgacgcatccacaaggaagccagtccgaatagaatccgcgtt

SEQ ID NO: 16975 - DNA, 3768 bp, synthetic construct
  misc_feature 1..3768: note = source = /note="Description of Artificial Sequence: Synthetic coding sequence"
  source 1..3768: mol_type = other DNA
atgctcttcaagctcttgcagcgccagacctacacctgtctctcccaccgctacggtctttacgtgtgcttcctgggcgttgttgtcacgatcgttagcgctttccagttcggcgaagttgtactggagtggtctagggaccagtatcacgtcttgttcgactcttacagggataatatcgccggcaagtcttttcagaaccgcctgtgcctgcctatgccgatcgacgtcgtctacacctgggtgaatggcactgacctggagctgctcaaggagcttcagcaagttcgcgagcaaatggaggaagaacaaaaagccatgagagagattctgggcaagaatactacagagccaactaagaagtcagaaaagcagctggagtgcctgctgactcactgcataaaggttcctatgttggtcctggatccagccttgcccgctaacataactctcaaagacctgccaagcctttaccctagctttcatagtgcgtccgacatttttaatgttgccaagcctaagaacccttccaccaatgtatcagttgtggtgtttgatagtactaaggatgtggaagacgcacacagcggacttcttaaaggcaattctagacaaaccgtgtggcgcggctacctgaccacggacaaggaggtccctggactggtgctgatgcaggacttggcctttctgtctggtttccccccgactttcaaagagactaaccagctgaagactaagcttcctgagaatctgagcagtaaggtgaagctgcttcaactgtacagcgaggcctccgttgctctgctcaagctgaacaaccccaaggacttccaagagcttaataaacaaacgaagaagaacatgactatcgatggaaaggagttgacaattagccccgcttacctgctgtgggacttgtctgccatcagtcaaagtaagcaagatgaggacatcagtgcctccagatttgaggataatgaagagcttcgctattccttgaggagcatagaaaggcacgcaccctgggtgcgcaacatcttcattgttaccaacggacagatcccatcctggctgaacctggacaaccccagagttactatcgtgacccaccaggatgtgttccgcaaccttagtcatctgcctaccttctcatctcctgcgattgagtctcatattcatcgcatagagggcctgtctcagaagttcatctatctgaacgatgacgtaatgttcggaaaggacgtgtggccggacgacttctattcccacagcaagggtcaaaaggtgtatctgacctggcctgtgcccaactgcgccgaaggttgtcctggatcatggatcaaagatggttactgtgataaggcttgtaacaacagtgcttgcgactgggacggaggcgattgcagcggcaactcaggcggtagtcgctacatcgcgggaggaggaggaaccggttccattggagtgggccagccctggcaatttggcggcggtataaactcagtgagctactgcaaccagggctgtgcaaacagttggctggcagacaaattctgtgaccaagcatgcaacgttctttcttgtggttttgatgcaggtgattgtggacaggaccatttccacgaactgtacaaggtaattctcctcccaaatcaaacccactacatcatccccaagggagagtgcctgccgtacttttcatttgccgaggtggcaaagaggggcgtcgaaggcgcgtactccgacaatccaattattcgccatgctagcattgctaacaaatggaagaccattcatctgattatgcactccggaatgaacgccaccaccatccacttcaacctcacattccaaaacaccaacgacgaggaattcaagatgcagatcacggtggaggtggacaccagggaaggaccaaaactcaactccactgcccagaagggatatgagaatctggtgagccccatcaccctgctgcccgaggccgaaatcttgttcgaagatatcccaaaggagaagaggttccccaagttcaagcgccacgatgtcaacagcacacgccgcgcacaggaggaggttaagatcccccttgtgaacataagcctgttgccaaaggacgcccagttgtctctcaacacgttggatctgcagctggaacatggtgatatcactctgaagggatacaaccttagcaaaagtgcgctgctccgcagttttctgatgaattcccagcacgccaagattaagaatcaggcaatcatcactgacgaaactaacgactcacttgtggcaccccaagagaaacaggtccacaagtcaatactgcccaacagtctcggtgtcagtgaaaggctgcagcgcctgacatttccagcagtttccgtgaaggtgaacggacatgaccaaggtcaaaatcctcccctcgacctcgagaccaccgcgaggttcagggtggagacccatacccaaaagactatcggaggaaatgttactaaagagaaacccccgagcctgattgttcccctggaatctcagatgaccaaggagaagaagatcacgggtaaggaaaaagaaaactcacgcatggaggagaacgctgagaatcatattggtgtgacagaagttctgctgggtagaaagcttcagcactatactgactcttatttgggtttccttccatgggaaaagaaaaaatacttccaagatttgctggacgaagaggaatctttgaagactcagctggcatatttcacagacagcaagaatactggtcgccaactcaaggacacctttgcggacagtctgcgctacgttaacaaaatacttaacagtaaatttggctttacatccagaaaggtgcccgctcatatgccccatatgatcgacaggatcgtgatgcaggaactgcaggatatgttccccgaggaatttgataaaacctcattccacaaagtcagacatagtgaagacatgcagttcgccttctcttacttctactacctcatgtctgccgtccaaccattgaacatctcacaggtcttcgacgaggtcgatactgatcagtctggtgtgctgtctgaccgcgagattagaacgctggcgaccagaatccacgaactgcctctctcccttcaggacctcaccggtctggaacacatgctcattaactgttcaaagatgctgccggcagatatcacgcagctcaacaatattccacccacacaggagtcctactatgatcccaacctgcccccagtcactaaatcacttgtcacgaactgtaagccggtgaccgacaagatccataaagcttacaaggacaagaacaagtatagatttgagatcatgggagaggaggaaattgcatttaagatgattagaacgaacgtcagccacgttgtaggtcagctggacgatatcagaaaaaaccccagaaagttcgtgtgcctgaacgacaatatagatcataaccacaaagacgcccaaacagtgaaagctgttctgagagatttctacgagtctatgttcccaatcccatcccaatttgagctcccccgcgagtatagaaatagatttttgcacatgcacgaactccaagagtggagagcctaccgcgacaagctcaaattctggacacactgcgtactcgccaccctgatcatgtttacaatttttagcttcttcgcggaacagttgatcgccctgaagcgcaagatctttcctagaaggagaatccacaaagaggcatcaccgaatcgcatccgcgtt

SEQ ID NO: 16976 - DNA, 3768 bp, synthetic construct
  misc_feature 1..3768: note = source = /note="Description of Artificial Sequence: Synthetic coding sequence"
  source 1..3768: mol_type = other DNA
atgctgttcaagctcctccagcgccagacttatacatgcctgagccacagatatggcctttacgtatgttttctgggggtggtcgtgacaattgtgagcgctttccagttcggggaagtagtgctcgagtggtcccgggatcagtaccatgtgctgttcgacagctatagagacaatatcgcaggaaaatccttccagaaccgcctatgtctgcccatgcctatcgacgttgtgtatacttgggttaacgggaccgaccttgagctgctgaaagaactacagcaggtgcgagagcagatggaagaggaacagaaggccatgcgtgaaatcctgggaaaaaacaccactgaacctaccaaaaaatccgagaaacagctcgagtgcttgctaacacactgcataaaagtccccatgctcgtgcttgaccctgcactccccgcgaatatcacattaaaagacttaccgtccttgtatccctcatttcattcagcgagtgatatatttaatgtggctaagcccaaaaatccaagcacaaatgtgagtgtcgtggtgtttgattccaccaaggatgtcgaggacgcccactccgggctcctcaagggcaattctagacagactgtgtggagagggtatcttacgactgataaggaggtacccgggcttgttctgatgcaggatctcgctttcctgagcggatttccccccacatttaaggagacaaatcagctgaagacgaagctcccggagaatttgagctcaaaggtgaaactcctgcagctctactccgaagcgtccgttgcccttctgaagttgaataacccaaaggacttccaagagttgaacaagcagaccaagaaaaacatgaccattgacggcaaagaactgacgatatcaccggcttatttgctttgggatctctctgctataagtcagtccaagcaggatgaagacatctcagcaagccgattcgaagacaacgaagagcttagatattccttgcgatctattgagcgccacgcgccgtgggtgagaaatatttttatagtaacaaacggacaaatcccttcttggctgaacctggataacccacgcgtgaccattgtgactcaccaggatgtattccgcaacttgtctcacctgcccactttcagctcaccggctatcgaatcccacatccacaggatagaagggctcagtcagaagttcatatacctcaacgacgatgttatgtttgggaaggatgtctggccggacgacttttatagtcacagcaaaggacagaaagtatacctgacgtggccggtgccaaattgtgccgaaggatgtcctggttcatggattaaagacggctactgcgataaagcctgcaataacagcgcatgtgactgggatgggggcgactgctctggcaacagcggtgggtctcggtacattgccggggggggcggtacagggagcatcggggtgggccagccttggcaattcggcggagggataaacagcgtctcatactgcaatcagggctgcgctaactcttggctcgcggacaagttctgtgaccaagcttgtaatgtactgtcatgtggcttcgacgcaggggactgcgggcaggaccactttcatgagctttacaaagttatcttgctcccgaaccagacccattacattataccaaagggcgagtgcttgccgtactttagcttcgctgaggtagctaagcgcggggtcgagggcgcctatagcgataatcccattataaggcacgcttctattgctaacaagtggaagaccatccacctcattatgcactcagggatgaacgcaaccacaatacacttcaacctgactttccagaacaccaatgatgaagagttcaagatgcagatcacagtagaggtggacacccgtgaaggaccgaaactcaattctacagcacagaagggctatgaaaacttagtgtcccccataactttactacctgaagctgagattctgttcgaggacatcccaaaggagaagcgctttcccaagttcaagcgacacgacgtgaatagtacccggcgcgcccaggaggaagtcaagattcccctcgttaacatttcactgttaccaaaagatgcccagctctccctgaatactctggatctgcagctggaacatggagatatcaccctgaaaggctataatctgtctaagtccgctttgctcagatctttcctaatgaactcccaacatgcaaagatcaaaaaccaggctatcatcaccgatgagactaatgattccttagtggccccacaggaaaaacaagtgcacaagtcaatccttcccaacagcctgggcgtgtcagaacggttgcagcgcttgaccttcccagcggtctctgttaaagtgaacggtcacgaccaaggacagaatcccccgctggacctggagactactgcgcgattccgagtcgagacacacactcagaaaacaattgggggaaacgtgactaaggagaagcccccatccttgatcgttcctctcgagtctcagatgactaaggaaaaaaagattaccggcaaagaaaaggagaattctaggatggaggagaacgcagaaaatcacataggggttacagaagttcttttgggcagaaaactccagcactatacggacagctatctaggctttcttccctgggaaaaaaaaaaatattttcaggatctcttggacgaggaggaatccctgaaaactcagctggcttattttacagactccaaaaacaccggaagacaattgaaagataccttcgcagacagcctacggtacgtgaacaaaattctgaatagcaagtttggctttacttctcggaaagtgccggcccacatgccccacatgatagatcgtatcgtgatgcaagaattgcaggatatgttccctgaggagttcgataagacctccttccacaaggtgcgacactctgaagacatgcagttcgcgttctcttatttctactacctgatgtctgcagtgcaacccctcaatatttcacaggttttcgatgaggtagataccgatcaaagcggtgttctgagcgatagggagatcaggacactggccacacgaattcacgaactgcctctttccttacaggacctcactggcctggaacacatgctcatcaattgttccaaaatgcttcctgctgatattacacagctgaataacatccctcccacgcaggaatcatattacgatcctaatctgccgccggttactaagagtcttgtcactaattgcaagcccgtaaccgataaaatccataaagcttacaaggacaagaataaatacagatttgaaattatgggtgaagaggagattgccttcaagatgatcaggaccaacgtgtcccacgtggtcggacagcttgatgatatcaggaagaatcctcggaaatttgtgtgcctgaacgataatattgatcacaatcacaaggacgcacagacagtgaaagctgtgttgagagacttttatgaatctatgtttccgatcccctctcagtttgagctgccccgtgagtatcgaaatcggtttctgcacatgcacgaactacaagaatggcgcgcctatcgtgacaagctgaaattttggacccattgtgtgcttgctacactgataatgttcaccattttttctttttttgcagagcaactaattgccctgaaacgcaaaatattccctagacgaagaatacacaaggaggcatcccctaaccgtatcagggtg

SEQ ID NO: 16977 - DNA, 3768 bp, synthetic construct
  misc_feature 1..3768: note = source = /note="Description of Artificial Sequence: Synthetic coding sequence"
  source 1..3768: mol_type = other DNA
atgctcttcaaactcctccagcgacaaacatatacctgtttgagccaccgttatggcttatatgtctgtttcctgggtgtcgtcgtcaccattgtgtccgcgttccagttcggtgaagtcgtcctcgagtggagtagagatcagtatcatgtgcttttcgatagttatcgcgataacatagcgggaaaaagcttccagaacaggctatgtctacccatgccgattgatgtggtctatacatgggtaaatggcacagatctggagttgttaaaggaacttcagcaggtgagggaacagatggaggaggagcaaaaagctatgcgcgaaattctcggaaagaacaccactgaaccaacgaagaagtcggaaaagcaactcgaatgcttgttgacccactgcattaaggttcccatgctggtgttagaccccgcactgcccgcgaacatcaccttgaaagacctgccatcattgtacccatccttccactcagcaagtgacatcttcaatgttgcgaagcccaagaacccatccacaaacgtgagcgtcgttgttttcgatagtaccaaggatgtagaagatgcccatagcggcctgctcaaggggaatagccggcaaacggtgtggcgaggatacctcacgaccgataaggaggtgcctgggctcgtcctcatgcaagacctggccttcttatcgggcttcccacccacatttaaggaaaccaatcagcttaagaccaagctgcctgaaaatctatcgtcgaaagtgaagcttctccaactgtattcggaagcatcggtggcgcttctgaagttgaataatccaaaagacttccaggagctcaacaaacagaccaaaaaaaacatgactatcgacggcaaagagttgaccatctcgccagcatatctgctgtgggatctctctgccatctctcaatctaagcaggatgaagatatctcggcgagtaggttcgaagataacgaggaacttagatatagcctgaggtccattgaacgccacgccccctgggttagaaacattttcattgtgacgaatggacagatccccagctggctcaacctggataatccacgtgtgacaatcgtcacgcatcaagacgtctttcgcaacttgtctcacctgcccactttttcgtctccggctatcgagtcgcacattcaccgtattgaaggtctcagccaaaaatttatctatcttaatgacgatgttatgttcggaaaggatgtatggcctgatgacttttattcgcacagcaaggggcaaaaggtttacttgacctggcccgtccccaattgcgcggaaggatgccccggttcctggataaaggatgggtattgcgacaaagcgtgtaacaactcggcgtgtgactgggacggtggagattgctcaggaaactctggaggttcacggtatattgcaggagggggtggtacgggttccatcggcgtaggtcaaccttggcagttcgggggaggaattaacagtgttagttactgcaatcaggggtgcgcgaactcctggttggcggataagttctgtgatcaggcgtgcaatgtgctatcatgcggcttcgacgccggggattgcggacaagaccatttccacgagctttacaaggttattctattgcctaaccaaacgcactatattatacctaaaggcgagtgtctcccgtatttcagcttcgccgaggttgcaaagcgaggggtcgaaggcgcatattccgataaccctatcattcgccacgcttccattgcaaacaagtggaaaacaatccatctaattatgcattcagggatgaacgcaaccactattcatttcaatctgactttccaaaacacaaacgacgaagagtttaagatgcagatcacagtggaagtcgatacgcgtgagggtcctaaactcaattccaccgcccagaaaggatacgaaaacctggtctctccaataacgctcttgcctgaagctgaaatcctatttgaagacattcctaaagaaaaaagatttcctaagtttaagcggcatgacgtcaattccaccaggcgtgcccaagaggaggtgaaaattccattggttaatatctccctgctgccgaaagacgctcaactttctttgaacacccttgatcttcagctagagcatggagatataactctcaagggatacaacctttcgaaatctgcactcctacggagcttcttaatgaattctcagcatgcgaagatcaaaaatcaagccataattacggatgaaactaacgactccttggtggccccgcaagagaaacaggttcacaaatcgattctaccaaacagtttgggcgttagcgaacgccttcagagactgacctttcctgccgtttcagtcaaagtgaatggacatgaccagggacagaaccccccactggaccttgagactacagcgcgcttccgtgtagaaacgcatacgcagaagacgattggtggaaatgtcaccaaagagaagcctcccagcctgatcgtgccactcgagagtcaaatgaccaaagaaaagaaaatcacaggaaaggagaaggaaaactcacgcatggaggaaaacgcagaaaaccacatcggcgtcacagaagtattactgggaagaaagcttcagcactacaccgattcatacctcggcttcttgccctgggagaaaaagaagtatttccaagatctgttggatgaagaagagagtttaaaaacccaactggcttactttaccgattccaaaaacacaggacgtcagctgaaggacactttcgcagacagccttcgttacgtcaacaagattctgaattccaagttcggatttacttcccgaaaggttccggcccacatgcctcacatgatcgatcgcattgttatgcaagaattgcaagacatgtttccggaggagttcgataagacgtcttttcataaggtacgtcactctgaagatatgcagtttgccttctcctatttttactacctaatgtctgctgtccagcctttgaacatcagccaggtcttcgacgaggtcgatactgatcagagtggagtcctttctgatcgcgaaattcgtacgcttgcgacacgaatccacgaacttcccctatcgcttcaagacttaacagggctcgagcacatgctaatcaattgctcaaagatgctccccgcggacataactcaactcaacaatatcccaccaacgcaagagtcctattatgacccgaatctaccgccggtgactaagagcctcgttactaactgcaagcctgtaaccgacaagatccataaggcctataaggacaagaacaagtaccgcttcgaaatcatgggagaggaggaaatcgcctttaagatgattagaacgaatgtgtcgcacgttgtagggcaattagacgacatccgcaaaaatccgcgaaagttcgtctgtcttaatgataatattgaccacaaccataaggacgctcagacggtaaaggccgtgcttcgggacttctatgaatcgatgttccctataccgagccaattcgagttgccacgcgagtaccgtaaccgattcctacatatgcacgaactccaggagtggcgcgcctatcgtgataagttgaaattctggacacactgcgtgcttgcaactttaataatgtttacgatcttttcattctttgcagagcaacttattgcgcttaagcgcaaaattttcccgagacgtcgaatccataaagaggcgtctcccaaccgtatccgcgta

SEQ ID NO: 16978 - DNA, 3768 bp, synthetic construct
  misc_feature 1..3768: note = source = /note="Description of Artificial Sequence: Synthetic coding sequence"
  source 1..3768: mol_type = other DNA
atgctcttcaagctgttgcagcggcagacctacacttgcctgtcccatagatacggactatatgtctgcttcctcggggtcgtggtcactattgtgtctgcgtttcagtttggcgaggtggtattggagtggtcccgggaccagtatcatgttctctttgattcatatcgcgacaatattgcaggtaaaagcttccagaatagactttgcttaccaatgcccatcgatgtggtctacacatgggttaacgggactgacctcgagctcctcaaagagttgcagcaggtccgtgaacagatggaggaagaacagaaggcgatgcgggaaattctcggcaaaaacaccacagagcctaccaagaagtccgaaaagcagcttgagtgcctgctcacacattgcatcaaggtacccatgctggtgttggaccccgccttgcctgccaacattaccttgaaagatctgccctccttatatccttctttccatagtgcatccgacatcttcaatgtcgccaagcctaaaaatccgtcaacgaacgtgtcagtggtggtttttgacagcaccaaagatgtcgaggatgcccacagtggtctactgaagggcaatagccgacaaaccgtttggagaggttatctcaccacggataaagaagtacctgggctggtacttatgcaagaccttgcgttcctttcaggatttccccctacatttaaggaaacaaaccaactgaaaacaaaattgccggagaatctgtcctctaaggtcaagttgcttcagctgtacagtgaggcctctgtggcgctgctgaaactgaacaaccccaaggatttccaggagctgaacaagcagactaagaaaaacatgaccatcgatggcaaggagctgaccatctccccagcctatctgttgtgggacctaagtgccatcagtcaatcaaagcaagatgaagacatcagcgcttctaggtttgaagataacgaagagctgaggtattccctgcgctctatcgaacggcacgctccgtgggtcagaaatatattcatcgtgactaatgggcagatcccttcctggttaaaccttgacaaccctcgtgttactatagtgactcaccaggacgtcttcagaaacctttctcaccttcccaccttcagctctccagcaatagagagtcatatccaccggattgagggtctgtctcaaaaatttatctacctgaacgatgacgtgatgtttggcaaggacgtgtggcccgatgacttttacagccattctaaaggtcagaaggtttatttgacctggcctgtcccaaattgcgctgaaggctgtcccgggtcctggattaaggacggttattgtgataaggcttgcaacaatagtgcatgtgactgggacggcggggactgttctgggaacagtggcggctcgaggtatatcgcaggaggaggcggcactggatccatcggcgtcggccagccttggcaatttggaggtggtattaattctgtgtcgtattgtaatcagggctgcgcaaactcctggctcgcggataaattctgtgaccaagcttgtaacgtactgagttgtggctttgacgccggggactgcggacaggatcacttccacgagttgtataaagtgatcctgctacccaaccagactcattacattattccaaaaggtgagtgtctgccctactttagctttgctgaagtggccaaacgtggggtcgaaggagcatacagcgacaatcccattatcagacacgcaagcatagcgaataagtggaagacaatccacctaattatgcacagcggtatgaacgcaactacaatccatttcaatctgacattccagaataccaacgacgaggagttcaagatgcagattaccgtggaggttgatacccgagagggcccaaagctgaattcaactgcgcagaaagggtacgaaaatcttgtctctccaattacccttttgcctgaggcggagatcctcttcgaggatattccaaaagaaaaaagattcccgaagttcaaacgccacgacgtgaactctactcgccgagcccaagaagaagttaagattccactcgtaaacatatccttgctgcctaaggatgcgcagctgtccctgaatacactggacctgcagctcgaacacggcgacatcaccttgaaaggatataacctgagtaagagcgcactgcttaggtctttcctcatgaactcacagcacgcaaaaatcaaaaatcaggccatcatcacagacgagacaaacgactcactggtggctccccaggagaagcaggtgcataagtccattctgccgaactcactgggtgtgtccgaacgtctgcagcgcctcacctttcctgcagtcagcgtgaaggtgaacggacacgaccaaggccagaacccccctttagatctggagacaaccgcaaggttccgcgtcgaaacacacacacagaagacaatcgggggaaacgtcactaaggaaaagccaccttctctgattgtcccactggaaagccaaatgacgaaagaaaaaaagatcacagggaaggaaaaggagaacagtagaatggaggagaacgcggagaatcacattggggttacagaggttttgctgggcagaaaattgcaacattacaccgatagctaccttggcttcctcccttgggagaagaaaaagtatttccaagacctgttggatgaagaagagtcgcttaagacccaacttgcttactttacagacagtaaaaatactggccgacagctgaaggataccttcgcagactccctgcgttacgtgaataagatccttaactccaaattcgggtttacttcccggaaggttcctgcgcacatgcctcatatgatagatagaatcgtgatgcaagaactccaggacatgtttccggaggagttcgacaaaacttcattccacaaagtgaggcactctgaggacatgcagttcgcattctcttatttttactacttgatgagcgctgtacaacccttgaatatctcccaggtgtttgacgaggtagacaccgatcagtcgggtgtcctttctgacagagagatcagaacgttagcgaccaggatccacgagctccccctcagcctgcaggacttgaccggactggagcacatgttaatcaattgctcaaaaatgctgccagcagacatcacacaactgaataacatcccgcctactcaggaaagttactatgatccgaacctcccccctgtgaccaaatcactcgttaccaattgtaagccagtcaccgacaagatccacaaagcctataaggataaaaacaaataccgtttcgagattatgggggaagaggagatcgcctttaaaatgatacggactaacgtgagccacgtcgtcggtcaattagatgacatccgaaaaaatccaaggaaattcgtctgtctcaacgacaacattgatcacaaccacaaggatgcccagaccgtgaaagccgtcctgagagacttttacgagtcaatgttccccatacctagccaattcgagctccctcgggagtaccgcaaccggtttctacacatgcacgaactgcaggaatggcgggcttatagggacaagctgaagttctggacccactgtgtgctggccacactgatcatgtttacaatctttagctttttcgctgagcagctcatcgccctgaagcgcaagatctttcctcgccgcaggattcacaaggaggccagccccaacaggattcgcgta

SEQ ID NO: 16979 - DNA, 3768 bp, synthetic construct
  misc_feature 1..3768: note = source = /note="Description of Artificial Sequence: Synthetic coding sequence"
  source 1..3768: mol_type = other DNA
atgctgttcaagcttcttcagagacaaacatacacatgtctcagccaccggtacggcctctacgtctgtttcctgggagtggtcgtgacaattgtcagtgcctttcaatttggagaggtggtgctggagtggagcagagaccagtaccacgtactgttcgactcatatagggataatattgcaggaaagagttttcagaatcggctgtgtctgccgatgcctattgacgttgtctacacttgggtcaacggcaccgatctggaacttcttaaagagctccaacaggttagggaacaaatggaggaagagcaaaaggctatgcgtgagatcctcggtaagaacaccacagaacctacaaaaaaaagtgagaaacagctcgaatgtcttcttacccactgcattaaggtgccgatgctggttctcgatcctgccctgcccgctaacatcacactgaaagacctgccatccctgtacccatccttccacagtgcatccgacattttcaacgtcgctaaaccaaaaaaccccagcactaacgtgtcagtggtcgtgtttgacagtactaaggacgtggaggatgctcactctggcctattgaaggggaattccagacaaaccgtttggaggggctacctgaccaccgataaagaggtcccaggtttggtgctgatgcaagatttggcttttctatctggatttcccccaacatttaaagaaacaaatcaactgaagactaagctccccgagaatcttagctctaaagtcaaactccttcagctgtactccgaggcaagcgtagccttgcttaaactgaacaaccccaaggacttccaggaactcaacaaacagactaagaaaaatatgactatagacggaaaggaattgaccattagccctgcttatctgctctgggatctgtccgccatctcacagagcaagcaggatgaggacatttcggcctctagattcgaagataatgaagaacttaggtattctcttagatcaatagagaggcacgccccttgggtgcggaacatattcatcgtgactaacgggcagatcccctcatggttgaacctcgataacccaagggttactatcgtgacccaccaggatgttttcagaaatctcagccatctccctacttttagctcccccgcaatagaaagtcacattcaccgcattgagggtctctctcaaaagttcatctatctgaatgacgacgtgatgtttggtaaggacgtgtggccagatgacttctacagccactcgaaagggcagaaagtttaccttacttggcccgtgcccaactgtgccgaggggtgtcctggttcgtggatcaaagacggctattgcgataaagcttgcaacaacagcgcctgcgattgggacggaggcgattgctctggaaattctggtggatcgcgttatatagctggtggtggaggcacgggctccatcggagtagggcagccctggcagtttggcgggggcatcaatagcgtgagctattgtaaccaaggctgtgccaacagctggctagctgacaagttctgtgatcaagcttgcaacgtgctgtcttgcggattcgatgcaggcgattgcggccaagatcactttcacgagttgtacaaagtgatcctgctcccaaaccagacacattacataattcccaagggcgaatgtctcccgtatttctcctttgctgaagtggccaaacgtggtgtcgagggtgcctacagtgataacccaatcattagacatgcctccattgctaacaaatggaagactatccacctcatcatgcatagtgggatgaatgctaccactatacacttcaacctcaccttccaaaacacaaacgacgaggaatttaaaatgcaaataaccgttgaggtggacactagagagggccccaagctcaatagcacagcacagaaaggatacgagaacctggttagccccatcacacttcttcccgaagcagaaatcctcttcgaagatattcctaaggagaagaggtttccaaaattcaaacgacacgacgtcaacagcactcggcgcgcacaggaagaagttaagatcccccttgttaacatctctttacttcctaaggatgctcagttgtcgctgaacacacttgatctgcaactcgagcacggtgatatcactctcaaaggttacaatctctcaaagtctgctcttctgagaagcttccttatgaactcacagcacgcgaagattaaaaatcaggctatcatcacagacgagaccaacgatagcctcgtggcacctcaggaaaagcaagtgcacaagtccatactgcccaactctctgggggttagcgaacggctgcaaagacttacattccccgctgtgagtgtcaaagtcaacggccacgaccaaggccagaacccacccctggatttagagactacagctagatttagggttgaaactcacacacagaagaccattggcggaaacgtaacaaaggagaagcctccatccctgattgtacccttggaatctcaaatgaccaaagaaaaaaagatcaccggcaaggagaaggagaacagtcgtatggaggaaaacgctgagaatcacatcggggtgaccgaggtgctcctgggaagaaaacttcaacactataccgacagctacctcgggtttttgccctgggaaaagaagaagtatttccaagacctgcttgatgaggaggagtctttgaagacacaacttgcttactttactgactcaaagaacacgggaaggcagctgaaggatactttcgctgacagcctcaggtacgtcaacaaaatccttaacagcaaatttggctttacttccagaaaagtgcccgcacacatgccacacatgatcgacagaatagtgatgcaggaactgcaagatatgttcccagaggaatttgataaaacaagcttccacaaggtccgccacagcgaggacatgcaatttgcatttagctatttctattacttgatgagcgccgtccagcctcttaacatatctcaggtattcgacgaagttgatacagaccagagtggggtgctgagcgaccgagaaataagaacccttgcaactcggatccacgagcttccactctcgctccaggacttgactggacttgagcatatgcttattaactgcagtaaaatgctgcctgccgatatcacccagctgaacaacatccccccaacccaggaatcgtactacgacccaaaccttcctcctgtcaccaagagcctcgtgacaaattgcaagccagtgaccgataaaatccataaggcatacaaggacaaaaacaaatacagatttgaaatcatgggcgaggaggagatagcttttaaaatgattcgcactaatgtgagccatgtggtgggacagctggacgatattagaaagaatcccaggaagtttgtctgcctgaacgacaacatagatcacaaccacaaggatgctcagaccgtgaaagctgtgctgcgggatttttacgagagtatgttccctatccccagccagttcgagcttcctcgtgagtacagaaaccgctttctccatatgcacgaattgcaagagtggagggcttatagagacaaactgaagttctggacccactgcgtcctggcaacccttattatgtttaccatcttttccttctttgcagagcaactgatcgctctgaaaagaaagatttttcctaggagacgaatacataaagaagccagtcctaacaggattagagtc

SEQ ID NO: 16980 - DNA, 3768 bp, synthetic construct
  misc_feature 1..3768: note = source = /note="Description of Artificial Sequence: Synthetic coding sequence"
  source 1..3768: mol_type = other DNA
atgctgttcaagctgttgcagaggcagacttacacttgcctgtcccacaggtacgggctgtacgtatgcttcttgggggtcgtggtcaccatcgtgtccgcgttccaattcggcgaagtggtgctcgaatggagccgggatcagtaccacgtgctgttcgactcataccgcgacaatattgccggtaaatccttccagaaccggttgtgtctgcccatgcctatcgatgtggtctacacctgggtcaacgggacggaccttgagcttctgaaggagctgcagcaagtgcgggagcaaatggaagaagaacagaaggcaatgcgggagatcctgggaaagaataccaccgagccaacgaaaaagtccgagaagcaactggaatgcctgctcacccattgtatcaaggtcccgatgctcgtactggatccggcgctcccagctaacatcactctgaaagatctgccctcattgtacccgagcttccattcggcttcagacattttcaatgtcgccaagccgaagaacccctcgactaacgtcagcgtcgtggtgttcgattcaactaaggacgtggaggacgctcattcaggcctgctcaaaggtaattccaggcagacggtgtggagaggatacctgaccactgacaaggaagtcccggggctggtcctcatgcaggacctggcttttctctcgggattccctcctaccttcaaggaaactaaccaactgaaaactaaactgccggaaaacctgtcgtccaaggtgaaacttctgcagctttattcggaagcctcggtcgcactgctcaagctcaataatcccaaggactttcaagagctgaacaagcagaccaagaaaaacatgaccatagatggaaaagaactgaccatcagtccagcatacctgctttgggacctgtccgccatctcccaatcgaagcaggacgaggatatcagcgccagccgcttcgaggacaacgaggagcttcgctacagcctgcgatctatcgagcgccacgcaccgtgggtccgcaatatcttcatagtgactaacggccagatccctagctggctcaacctcgacaatccacgcgttaccatcgtgactcaccaagacgtgtttcgcaacctgagccatctgcctacgtttagcagcccagcgatcgaatcgcacatccataggatcgaaggactgtcccagaaatttatttacctgaatgacgacgtgatgttcggaaaagacgtgtggcctgacgacttttattcacactcaaagggacaaaaagtgtaccttacctggcctgtgcccaattgcgcagaaggctgccccgggtcatggatcaaggacggatattgtgacaaggcatgtaataacagcgcctgcgactgggatggaggggattgctcgggaaactcaggtggaagccgctacatcgccggcggaggaggtacggggtcaattggggtgggacagccgtggcagtttggcggaggcatcaactccgtctcatactgcaaccaaggttgtgcgaatagctggttggccgataagttttgtgatcaggcttgcaacgtgctgagttgcggtttcgacgccggagattgcggtcaggatcacttccacgaactgtacaaagttatccttctgccgaaccagactcattacatcatcccgaagggagagtgcctcccatacttttcattcgcggaggtggccaaacggggggtggaaggagcgtattcggataacccgatcatccgccacgcgtctattgcgaacaaatggaaaacgatccatttgattatgcacagcggaatgaatgcgactaccatccactttaatctcacttttcagaacaccaatgatgaagaattcaaaatgcagatcaccgtggaggtggacactagagagggaccaaagctgaactccactgcccagaagggctacgagaacctcgtgtccccaattactctgctgccggaggcggaaattctgttcgaagatattccgaaggaaaaaaggttcccaaagttcaagcggcatgacgtgaattcgacccgtcgcgctcaggaagaagttaagatcccgctcgtcaacatctcactgctcccgaaggatgcccaactctccctgaacactctggacctgcagctcgagcacggagacatcacgctcaagggctacaacctctcgaaaagcgctctgctgaggtcgttcttgatgaactcccagcacgccaagatcaagaatcaagcaatcatcaccgacgagactaacgattcgctcgtggccccgcaggaaaagcaggtgcacaagtctatccttccgaattcgctcggagtgtccgaacgattgcaaagattgacttttccggctgtgtcggtgaaggtcaacggccatgaccagggacagaaccccccgctggacctggaaaccactgcccgctttagagtggaaactcacacccagaaaaccatcggcggaaatgtgaccaaagagaagccgccttcactgatcgtccctctggaatcacagatgaccaaggagaaaaagatcaccggaaaggagaaagaaaactccagaatggaagagaatgcagagaatcacatcggagtgactgaggttctcctgggcagaaagctccagcactacaccgattcgtatctgggcttcctgccctgggaaaagaaaaagtacttccaagatctcctcgatgaggaagagtccttgaaaactcagcttgcctactttactgacagcaagaacactggccggcaactcaaagacaccttcgcagacagcctgagatacgtgaacaaaatcctcaactcgaagttcggattcacttcccgaaaggtcccagcacacatgccgcacatgattgaccgcatcgtgatgcaggaacttcaagatatgttcccagaagagttcgacaagacttcgttccataaggtgcgccactccgaagatatgcaatttgccttctcgtacttctactacctcatgtctgccgttcagccacttaacatctcgcaggtgttcgacgaagtggataccgaccagtcgggagtgttgtccgatcgggagattcggactctggcgacccggattcatgaactgccgctgagcttgcaggatctcaccggccttgagcacatgctcattaattgctcaaagatgctgcctgccgatatcacccaactgaacaatatcccgccgacccaggagagctactacgacccgaacctccctccagtgaccaagtccctcgtcacgaactgcaagccagtgactgacaagatccataaggcttacaaggacaagaacaagtaccggttcgagatcatgggagaagaagaaatcgccttcaagatgatcagaaccaacgtgagccatgtggtcggtcaactggacgatatccggaagaacccacggaaatttgtctgcctgaacgataatatcgaccataatcataaggatgcgcaaacggtgaaggcagtcctgcgcgacttttacgaatccatgttcccaatcccttcgcagttcgagctgccgagagagtaccggaatcgcttcctccacatgcatgaattgcaagaatggcgcgcctaccgtgacaagttgaaattctggacccactgcgtgctcgccaccctgatcatgttcaccatcttctcgttcttcgcggaacaactgattgcactgaagcgcaagatcttcccgagacggcggatccacaaggaggcttccccaaaccgcatcagagtc

SEQ ID NO: 16981 - DNA, 3768 bp, synthetic construct
  misc_feature 1..3768: note = source = /note="Description of Artificial Sequence: Synthetic coding sequence"
  source 1..3768: mol_type = other DNA
atgttattcaaactgctccagagacagacatacacgtgcctcagccataggtatggcctctacgtctgttttctgggggtcgtcgtaacgatcgtctcggcgtttcagtttggggaggtggtcctcgaatggtcccgggatcagtaccacgtattgttcgactcctaccgagacaacatcgcagggaagtcattccaaaataggctctgtttgccgatgccgatcgacgtagtatacacctgggtgaacgggaccgacttggagctcctgaaagagcttcagcaggtgagagaacaaatggaggaagaacagaaggcgatgcgggagattctgggtaaaaacaccaccgaacccacaaagaagtccgagaagcagcttgaatgcctcttgactcattgcatcaaggtccccatgctagtattagatcccgcgttgcctgcaaatatcacgctcaaagacctcccttccctctacccatcattccacagcgccagcgatatttttaacgtagccaaaccaaaaaaccccagcaccaatgtgagcgtggttgtctttgactctacaaaggacgtggaggacgcccatagcggattgttgaagggtaacagtaggcaaaccgtgtggagggggtacctgaccacggacaaagaagtaccaggcctggtcctcatgcaagacctggcttttctgtctggatttccccctacttttaaagaaaccaatcagctaaaaacaaagctgcccgagaacttatcctctaaggtaaaattgctccagctctacagtgaagcctcagttgccttgcttaagttgaacaacccaaaagacttccaggaactcaacaagcagactaagaagaatatgacaatcgatgggaaggagttgaccattagtccagcctacctgctgtgggacctatctgctatcagccaaagtaaacaggatgaagacatcagcgcctctcgatttgaggataacgaggagctgcgttattccctgagatctatcgaacgccatgccccttgggtgagaaacatattcatcgtgactaatggccagattccctcttggctgaacctggataaccctagggtcacaatagtgacccaccaagacgtctttcggaatctgtcccacttgcccacttttagtagccctgcaattgagtcccacatccatcggatcgaggggttgtctcagaaatttatctacctcaatgatgatgtgatgtttggtaaggacgtgtggcctgacgatttctattcacacagtaaaggacagaaagtgtacttgacttggcccgtgcccaactgcgctgaggggtgccccgggtcctggatcaaagacggatattgtgacaaggcttgcaacaatagcgcctgtgactgggatgggggagattgcagtggtaactccggcgggagccgctatattgccggtggaggtggcaccggttccataggggtcggacagccctggcagtttggaggaggaattaatagcgtttcatactgtaatcaggggtgcgcaaactcgtggctggcggataaattttgtgatcaggcttgcaatgtgttgtcttgcggcttcgatgcaggcgactgcggacaggaccatttccatgagctgtacaaggtgattctcttgccaaaccagacacactacatcataccaaaaggcgaatgtttaccatattttagctttgctgaagtggctaaacggggcgtggaaggagcatacagcgacaatcccataatccggcacgcgtctatcgccaataagtggaagaccatacacctcatcatgcattctgggatgaatgccaccacaattcactttaacctgacattccaaaatacaaacgacgaagagttcaagatgcaaattaccgtcgaagtggacaccagggaaggtcccaagctgaacagtactgctcagaaggggtatgaaaaccttgtaagtccgatcactctgctccccgaagcagagatcctgtttgaggacatacccaaggagaagcgcttcccaaagtttaagcgccatgatgtgaacagtactcgtcgggcacaggaggaagtgaaaattccgctggtgaatattagtctcttaccgaaagacgcgcaactgtccctgaataccctggacctgcagctggagcacggagacatcacgctcaagggctacaacctctccaagtcggctctcctgaggtctttcctgatgaactctcaacacgcaaaaataaaaaaccaggctatcataacggatgagaccaacgactctctggtcgcacctcaggagaaacaggtgcacaagtctatcctgccaaacagcctcggggtgagcgagaggctccagcgcctgacattccctgctgtttccgtgaaggtgaacggccacgaccaggggcagaatccaccgctcgacctcgagactaccgccagattcagggtggagacgcatacccaaaaaacaataggcggcaatgttaccaaggaaaagcctcccagcctgattgtacccctagagtcacagatgacaaaggagaaaaaaattaccgggaaagaaaaggagaactcacgtatggaggaaaacgcagaaaatcacataggggtgacggaagtcctgctcgggaggaagttgcagcattacaccgactcctacctcggctttctgccttgggaaaagaaaaaatactttcaagatttactagatgaggaggagtcactcaaaacacagctagcttactttaccgactccaaaaacacaggcaggcagttgaaggacacgtttgcagactccctgaggtatgtgaacaagatactgaatagcaaatttgggtttacatcaaggaaagtaccggcccatatgccccacatgattgataggatagtgatgcaggaactccaggatatgttcccagaggagtttgataagacttccttccataaagtcaggcattctgaagacatgcagttcgcctttagctacttttattatttgatgagcgccgtccaacccctgaacatctcccaagtgttcgatgaggtagacacagatcagtccggtgttctgtctgatagagagattcgaacactggcaacaagaatccatgaattgccgttgtcactgcaagacctgacaggcctagagcatatgctgataaactgcagtaaaatgttaccagcagacatcactcaactgaacaatattccacccactcaggaatcatattacgatccaaacctgccacctgtgaccaaaagtctggtaaccaactgcaaaccggtcacggataaaatccacaaagcctacaaggataagaataagtacagattcgagatcatgggagaagaagagatcgcattcaaaatgattagaacaaacgtctcacacgtcgtcggccaactggacgacattaggaaaaacccacggaagttcgtttgcctcaatgacaacatcgaccataatcacaaagacgcccagacagtgaaagcggttctgagggacttctacgaatccatgtttcccatcccttctcagttcgaactgccccgggaatataggaaccggttcttgcacatgcacgaactccaggaatggcgtgcgtaccgggacaaactgaaattctggacacattgtgtgttggccactctgatcatgttcaccattttctcattcttcgccgagcagctgattgccttaaagagaaagattttcccccgaaggagaattcataaggaagcatcgcctaaccgaataagagtg

SEQ ID NO: 16982 - DNA, 3768 bp, synthetic construct
  misc_feature 1..3768: note = source = /note="Description of Artificial Sequence: Synthetic coding sequence"
  source 1..3768: mol_type = other DNA
atgctatttaagctgctacagcggcagacatacacgtgtctaagccacaggtacggtctctacgtttgctttctgggcgtagtggttacaattgtaagcgccttccagttcggcgaggtggttcttgagtggagcagagatcagtatcacgtcctgtttgattcctatagggataatatcgccggcaaatcatttcagaacagattgtgtctccctatgcccatagacgttgtgtacacgtgggtgaatgggacagacttggaactcttgaaggagctgcagcaggtgcgcgaacagatggaggaggaacagaaagccatgagggaaatccttgggaaaaacaccacagagcccaccaaaaagtctgagaagcaactggagtgtctactgactcactgtatcaaggtccctatgctcgtcctggaccctgccctgcctgccaatattactttaaaggatttgcctagcctttatcccagctttcatagtgcatccgatatctttaacgtggccaaacctaagaacccttcgactaatgtctctgtcgtggtattcgacagcacaaaagatgtggaggacgcacacagcggcctgctcaaaggaaactctcgtcagaccgtttggcgggggtatctgactaccgataaggaagtgcccggcttagtgctgatgcaggatctcgcctttctgtctggatttcctcccacctttaaggaaactaaccaattaaagaccaagctacctgaaaatctgtcttcaaaagtgaagcttctgcagctttattctgaggccagcgtcgccctactgaagctgaataatcctaaggatttccaggagctgaacaaacagacaaagaagaatatgacaatagatggaaaggaactcaccatctcgccagcgtacctgctgtgggacctgtctgccatttctcaaagcaagcaagacgaagacatctcagcttccagatttgaggataatgaggagctaaggtatagccttcggtccattgagaggcatgctccttgggtcaggaatatttttatagtcaccaacggacagataccatcatggctgaacctggacaatccccgcgtgaccatagtgacccatcaggacgtttttcgcaatttatcccatctgcctacattctcatctcccgctattgagagccatatacatcggatcgaggggctgtctcagaaattcatctatttaaatgatgacgtgatgtttggcaaggatgtttggcccgacgacttctactcacacagtaaaggccagaaagtctacctgacctggccagtgcccaactgcgccgaaggctgcccgggaagctggattaaagacggatactgcgataaagcatgtaacaatagtgcctgtgattgggacggaggcgactgcagtggcaattcagggggctcacgatatattgcgggtgggggcggcacagggtccatcggagtgggtcagccctggcagtttgggggaggtattaactcggtgtcttactgcaaccagggatgcgctaacagttggttagcggacaaattctgcgaccaggcttgtaatgttctctcctgcggttttgacgccggggattgcggccaggaccatttccacgaactatataaggttattctgttgccgaatcagactcattacatcatcccaaagggagagtgtctcccatacttctcgttcgctgaagtggcgaagagaggcgtcgagggggcttacagcgataaccctattatccgtcatgcatccatcgctaataaatggaagaccatccatctgataatgcacagcggcatgaacgccacgacaatacactttaatctgacgtttcaaaataccaatgatgaggagtttaagatgcagattacagtcgaggtggataccagagaggggcctaagctaaatagtactgcccagaaaggatacgagaaccttgtatccccgattacgttgctacctgaggctgaaatactgttcgaagacattcctaaggagaaacgctttcccaagtttaagaggcacgacgtaaatagcactcgtagggcacaagaggaggtgaaaattccactggtcaatatcagtctgctgcctaaggatgcccagttgtcattgaatactcttgacttgcagttagaacacggagacataactctgaaggggtacaacctgtctaagtcagcactgctcagatccttcctgatgaattctcaacacgccaagataaaaaatcaggctatcataactgatgaaactaacgacagcctcgtcgccccccaagaaaaacaagtgcacaaaagtatcctcccaaatagtttaggggttagtgagcgactgcaacgcctaacgtttcctgctgttagcgtcaaggtaaacggacatgatcagggacaaaacccccctctcgatcttgaaactacagctagattccgggtagagacgcatactcagaagacaatcggcggcaacgttactaaggagaagcccccttctctgatagtgccactggagtcgcagatgaccaaagagaagaagattactggaaaagagaaggagaacagtcggatggaagagaatgcagagaaccacatcggtgtaactgaggtgctgctgggcagaaaattgcagcactacactgacagttaccttggcttcctgccatgggaaaagaagaaatactttcaggacctgttggacgaagaagaaagcttaaaaactcaactcgcttacttcactgacagtaagaataccgggcgccagctgaaagatacatttgcggattctttgcggtatgtgaataaaatattaaacagcaagttcggcttcacctcgcggaaggtgccagcacacatgccgcacatgattgatagaattgtgatgcaagagctccaggacatgttccctgaggagttcgacaaaacgtcctttcataaggtcaggcactcagaggatatgcagtttgctttcagctacttttattacctgatgagtgcagtacagccattgaatatctctcaggtgtttgatgaggtggacaccgaccagtcaggcgttctgagcgacagagagatcaggacactcgccactcgcatacacgaactcccactgtctttacaggatctaactggcctagagcacatgttgatcaattgttcaaagatgctgcccgccgatattacacaactaaataatatcccacctacacaggagagctactatgaccctaacttaccccccgtgaccaagtccctggtaaccaattgtaagcccgtgacagacaagatccataaggcttataaggataaaaataagtatcgatttgaaattatgggcgaggaagaaattgcctttaagatgattagaacgaatgtgagccacgtggttggacagctcgatgatattaggaagaatcccagaaaattcgtttgtttaaatgataatatcgaccacaatcacaaggacgcccagactgttaaggccgtgctaagagatttttacgaatcaatgtttcctattcccagccaattcgagctgcctcgtgaatacagaaatagatttctgcacatgcacgaactgcaggaatggcgggcgtatagggataagttgaagttttggacgcactgcgtgctggcaactctgattatgttcacaattttttcatttttcgccgaacagttaatcgcactgaagaggaagattttcccgcgacgacgaattcacaaggaagcttcgccaaaccgcataagagtt

SEQ ID NO: 16983 - DNA, 3768 bp, synthetic construct
  misc_feature 1..3768: note = source = /note="Description of Artificial Sequence: Synthetic coding sequence"
  source 1..3768: mol_type = other DNA
atgctatttaagctcctgcagcggcaaacttatacctgcttgtctcatagatacggactttatgtatgctttctgggcgtcgtagttacaatagtctctgcctttcagtttggtgaggtggtactcgagtggtctcgcgaccaatatcatgtgctcttcgatagttaccgtgacaacattgctggcaagtccttccagaacagactgtgcttaccgatgcccattgatgttgtgtacacatgggtcaatggtacagacctggagctcctgaaggagctgcagcaggtacgtgagcaaatggaggaggaacaaaaggcaatgagggagatcctaggcaaaaatactaccgaacctaccaagaaatcggagaagcagctggaatgcctgctgacacactgtataaaggtgccaatgctggtgctggacccggccctgcctgctaacatcacgctgaaggatctgccaagcctgtacccctcctttcactccgcatccgatatttttaacgttgccaagccaaagaacccatcgaccaacgtctctgtggttgtgtttgatagtacgaaggacgtggaagatgcgcattcggggctgctgaagggcaactccaggcaaacggtctggaggggttacctcactaccgataaggaggtccccggactggtgttaatgcaggatttggctttcctgtcggggttcccacccacgttcaaggagaccaatcaacttaagaccaaactcccagagaatctgtcgagtaaggtaaagttacttcaactatacagcgaagcgagcgtggctctactgaagttaaacaacccaaaagactttcaggaactcaataaacaaactaagaaaaacatgacaatagatggcaaagagctgaccatcagtcccgcgtatctgctgtgggatctgagcgctatcagtcaatctaagcaggacgaggacatcagcgcatctcggttcgaggataacgaggagttgcgctactctctccgaagcatagagcgtcatgctccctgggtcagaaacatcttcatagtcaccaacgggcagattccttcatggctcaacctggacaatcctcgtgtcaccatcgtgactcaccaagacgtgttccggaacctgagccatctgccgacctttagttccccggctatcgagtcccacatacacagaatcgagggtttgtctcagaagttcatctatcttaatgatgacgttatgttcggcaaagatgtgtggcccgacgatttctactcccatagtaagggtcagaaggtctatcttacctggccagtgcccaattgtgctgagggttgccccgggtcctggataaaggacgggtactgcgataaagcttgcaataatagcgcgtgcgactgggacgggggagattgtagtggcaattccggaggctccaggtacattgctggcggtggcgggaccggctccattggcgtgggtcaaccttggcagtttggggggggcatcaatagcgtgtcgtattgcaaccagggctgcgcaaactcatggctggccgacaaattctgtgaccaggcatgcaacgtgctgagttgcggatttgatgccggtgactgcggacaggaccattttcatgagttgtacaaagtcatcctcctccccaaccagacacactacattatacctaagggtgaatgtctgccctatttctccttcgcggaggtggcgaagcgcggagttgagggagcttactcagataacccgataatccgacatgcctcgatcgcaaacaaatggaagaccattcacttgatcatgcacagcggaatgaacgccacaacaattcattttaaccttaccttccagaataccaatgatgaggagttcaagatgcagattaccgtggaggtggacacccgcgaagggcctaagctgaatagcacagctcagaaggggtacgaaaatctggtttcccctattacccttctgccagaggccgaaatactgtttgaagacattcctaaggagaagcggttccccaagtttaaacgccacgacgtcaacagtacccgaagggcccaggaggaagtcaaaatcccgctggtcaacatttctctgctgccgaaagatgcccagctgtcactgaacacattggacttacaacttgaacatggggacattaccctgaagggctacaacctgtctaagtccgccctgctgcggtcctttctcatgaacagtcaacatgccaaaataaagaaccaggctattattactgacgagacaaatgattctctcgtcgctcctcaggaaaagcaggtccacaaatctatcttgccaaatagcctgggcgtcagtgaacgtctgcagcgcctcacgttccctgccgtgtccgtgaaggtcaacgggcacgatcaggggcagaatccccctctagatctagaaactaccgccaggttccgggtcgagacccacactcagaagaccataggtgggaatgtgacgaaggagaaacccccgagcttaattgtgccactggagtcacagatgaccaaagaaaagaaaatcacaggcaaagagaaggagaacagcagaatggaggagaacgcagagaaccacatcggcgtaactgaggtgcttctgggcagaaagctccagcactacacagatagctacctgggttttttaccctgggagaagaagaaatacttccaggatctgttagatgaagaggagagtctgaaaacccagctggcctactttaccgactcgaaaaacacaggtcgacagctgaaagatacctttgccgactcgctgaggtatgtgaacaaaatactgaattctaagtttggtttcacgtcccggaaggtccccgcgcacatgccccacatgatcgataggatcgtaatgcaggaactgcaggacatgttcccagaagagtttgacaaaacctcttttcacaaggtccgccatagtgaagacatgcagtttgcattttcgtatttctactacctgatgtccgccgtgcagccattgaatatcagtcaggttttcgacgaagttgacacagaccagtctggcgtcctgagcgatagggagatccggaccttagcaaccagaatccacgaactgcccctgagcttgcaggatctgactggactggagcatatgcttatcaactgttctaaaatgctgcccgctgatattacccagctgaataacatcccccccacgcaagaaagttactatgaccctaacctcccccccgtaacgaagtcactggtgaccaactgcaagccagtgacagacaagattcacaaggcttataaggacaagaataagtaccgcttcgaaataatgggagaagaagagattgcttttaaaatgatccgcacgaatgtcagccacgttgtcgggcaactggacgacattagaaagaatccccgcaagttcgtctgtctgaacgacaacatagaccacaaccataaggatgctcaaacggttaaggcagtgctgcgggacttttatgagagcatgttcccaatacccagccaattcgagttgcctcgggagtaccggaatcgctttctccacatgcatgagctgcaagagtggcgtgcctatcgcgacaaactgaaattctggacgcactgcgtgctggcgactttgattatgtttacaatcttttccttcttcgcagaacagctcattgcgctcaaacggaagattttcccccggcggcgcatccacaaggaggcctcccccaatcggattcgcgtt

SEQ ID NO: 16984 - DNA, 3768 bp, synthetic construct
  misc_feature 1..3768: note = source = /note="Description of Artificial Sequence: Synthetic coding sequence"
  source 1..3768: mol_type = other DNA
atgctttttaagcttctgcaacgtcaaacttacacatgcctctcccatagatatggtttgtacgtttgctttcttggtgtcgtcgtgacaatagtctcagcattccagtttggtgaggtggtactagagtggtcaagagaccagtaccatgtgttgtttgattcgtatcgagataacattgctgggaagagctttcagaaccgcttatgtcttcctatgccaattgacgttgtttacacatgggttaatggtaccgatctcgagctgcttaaagaattgcagcaagtaagagagcagatggaagaggagcagaaggccatgagggagatattaggaaaaaacactactgagcccacaaaaaagtctgagaagcagctggagtgtcttttgacacattgcataaaggttcctatgttagtgctcgacccagctttgcctgcgaatataacccttaaagatttacctagcttgtacccttccttccactccgcttctgatatattcaacgtcgctaagcctaagaacccttctactaacgtaagtgttgtggtgtttgattcaacaaaggatgtcgaagatgctcatagtgggcttcttaagggtaattccaggcaaacagtttggaggggatatttgactactgacaaggaagtccccgggctcgttttgatgcaagatcttgcattcttatccggttttccacctactttcaaagagacaaatcagctcaaaactaagcttccggagaacttaagtagtaaggtgaagctcttgcaattgtactctgaggctagcgttgctctcttgaaactgaacaaccccaaggattttcaagaacttaacaaacaaactaagaaaaatatgactattgatgggaaggaacttacaatctctccagcctaccttctttgggatttatcggcaatctctcagagtaagcaagacgaggatatatctgcgagtaggttcgaggacaatgaggaactgcgttatagtctcagaagcatcgaaaggcatgccccatgggtgagaaatatatttatcgttaccaacggtcagataccgtcatggctcaacttggataacccccgagttaccatagtgacccaccaagatgtttttaggaacctctctcatctcccgactttctcttcccctgctatcgagtcacatattcatcgaattgaggggctctctcaaaaatttatttacttgaatgatgacgttatgttcggtaaagatgtctggccggacgacttttatagccatagtaaaggacagaaggtgtatttaacatggcctgttcctaattgtgctgaggggtgtccgggttcttggatcaaggatggatattgcgataaagcatgcaataacagcgcctgcgattgggatggtggagattgctccggaaactctgggggcagtaggtatatagcaggaggggggggtaccggttcaatcggtgttgggcagccctggcagttcgggggtggaattaacagtgtttcttactgtaaccaaggttgcgctaactcttggcttgctgataagttttgtgatcaagcgtgcaatgtgctatcctgcggattcgatgccggtgattgtggtcaagaccacttccacgaactgtacaaggtcattctcctgcctaatcagactcattatattatcccaaagggagagtgcctcccatacttttctttcgcggaagtagctaagcgaggggtggagggtgcctactcagataatccaatcattcggcatgcatctattgctaacaaatggaagactattcacctgattatgcattctggtatgaacgccacgacgattcatttcaacttaacattccaaaacacaaatgatgaagagttcaagatgcaaattacagttgaagtggacactagagagggacctaagctcaattccaccgctcaaaaaggttacgagaatctagtttccccaataactctgctgccggaggctgagatactcttcgaagacataccgaaggaaaagagatttccaaaatttaagcgacacgatgtgaatagcactaggcgtgctcaagaagaagtaaaaattcccctggtgaatatttccctccttcctaaggacgcacaattgtcacttaatactcttgatctccaactcgagcatggtgatattactcttaaggggtataacctgtcaaaaagcgctctattacgatcattcttgatgaactcccaacacgcaaaaattaagaatcaggctattataactgacgaaacgaatgattctctagttgctccacaggagaaacaagtgcataaatcaattttacctaacagcttgggcgtctcagagagactacagcgtttgacctttcctgctgtttcggttaaggttaatggacacgaccaagggcagaatccccccctggatttggagaccacagctaggtttagggttgagactcacacccagaaaacaatcggcggaaatgtcacgaaagaaaaaccaccaagtcttatcgtccccctggaaagtcaaatgacgaaagaaaagaaaattacagggaaagagaaagagaattctaggatggaagagaacgctgaaaatcacatcggtgttaccgaagttcttcttgggagaaagcttcagcattatacagactcctacctcggattccttccctgggaaaaaaaaaagtattttcaggatctgttggatgaagaagaatctctaaagacacaacttgcatacttcactgactctaagaatactggacgtcagctaaaggatactttcgctgattcgcttaggtatgtgaataaaattcttaatagcaagttcggattcacatccaggaaggtccctgctcatatgcctcacatgattgataggattgttatgcaagaacttcaggacatgtttccagaagagtttgataaaacttcatttcataaagtgaggcacagtgaggatatgcaatttgctttctcttacttttattatttaatgtccgctgttcagccccttaacatcagccaagtctttgatgaagtcgatacagatcagtcaggggttctttcggatagagaaatccgaacgctcgctaccaggatccacgagttgccactttcactgcaggatcttaccggtcttgaacatatgctaatcaattgctctaagatgttgcctgctgatattacacagctaaataatatccctccaactcaggaatcctactatgacccaaaccttccgcctgttactaagagtctagtaactaactgtaaaccagttactgacaaaatacacaaggcttataaagacaagaacaaatatagattcgagattatgggtgaggaagagatcgcattcaaaatgattcggacaaatgtttcgcacgtggtcggtcaacttgatgatatcagaaaaaatcctcgtaaattcgtttgtttgaacgacaacatcgaccataaccataaagacgctcaaacagttaaagctgtgctgagggatttctatgagagcatgttccccattccgtcccaatttgagttgcccagggaatataggaatcgctttctccatatgcatgagcttcaagaatggcgagcctatagggataagctcaaattctggacacactgcgtgttagctactctaataatgttcacaatatttagcttctttgctgagcaattgattgctttgaaaaggaagattttccctaggagaagaatacacaaggaggctagccctaataggattagggtg

SEQ ID NO: 16985 - DNA, 3768 bp, synthetic construct
  misc_feature 1..3768: note = source = /note="Description of Artificial Sequence: Synthetic coding sequence"
  source 1..3768: mol_type = other DNA
atgctgtttaaactgctgcaacggcaaacctatacttgcctttcgcacaggtatggactgtatgtatgctttctaggtgttgtggtcactatcgtatcagccttccagttcggcgaagtagtcctggaatggtcaagagatcaataccacgtgcttttcgactcgtaccgggataacattgcaggaaagtcctttcagaatcgcctctgtctccctatgccaatcgatgttgtctatacctgggtgaatggtactgacctggagttattgaaggagctgcagcaggtccgcgagcaaatggaggaggaacaaaaggcaatgcgtgagatattaggaaaaaacaccactgaacctaccaaaaagtctgagaaacagttagaatgtctgctcactcattgtatcaaagtgcctatgctggtgctggaccctgcactccccgccaacataacactgaaggatttacccagcctgtacccatccttccactcagctagcgatatcttcaatgtagctaaacccaaaaacccatccactaacgtttccgtagtggtatttgatagcaccaaggatgtcgaggacgcacactcagggcttctgaagggcaactctcgccaaactgtctggcgaggatatctcacaacagacaaggaggtccccggactggtgcttatgcaggatctggctttcctaagcggctttcccccaacattcaaggagaccaaccagctcaaaactaaactgcccgaaaacctgtcctctaaggtcaagttactgcagctctactcagaagccagcgtcgccctcctcaaattaaacaatcctaaggacttccaggaactgaataagcagactaaaaagaacatgaccatcgacggaaaagagctgaccatctcccctgcctatcttctttgggacctgagtgcaatctcacaatccaagcaagacgaggatatctcagcctcacgattcgaagataatgaagagctccgatattcgctccgcagtatcgagcggcacgccccctgggtcagaaacatcttcatcgtgaccaacggacagattccctcgtggctcaacctggataatccccgcgtgacgatcgtgacacaccaggatgtcttccggaatctctctcacctgccaacttttagctcacccgccatcgagtctcatatccacaggatagaaggtctatctcagaagtttatttatctgaatgacgacgtcatgtttggaaaggacgtctggcccgacgatttttactcccactctaaaggacagaaggtatatctcacatggcccgtgcctaactgcgcagagggctgtccaggtagttggatcaaagacggatactgcgataaagcttgcaacaatagcgcatgtgactgggacggcggtgactgttccgggaatagcggtgggtcacggtacattgccggtggcggaggtacagggtccataggagtcgggcagccttggcaatttggtggcggcatcaatagcgtgagctattgcaatcaaggctgtgcaaattcttggctggccgataaattctgtgaccaggcctgcaacgttctgagttgtggctttgacgctggcgactgcggccaggatcacttccatgagctgtataaagtcatactgctgcccaaccagacccactatatcattcctaagggcgaatgtctgccctacttctcctttgccgaggtggcaaagcgcggggtggaaggcgcatattccgataatccaatcatcagacacgccagcatcgcaaacaagtggaagactatacacttgatcatgcattcggggatgaatgcgacaactattcactttaacctaaccttccaaaatacgaacgatgaggagttcaagatgcagatcaccgtcgaggtggacacccgcgagggacccaaactcaacagcactgcgcagaagggttatgaaaaccttgtgagccccatcactttgcttccagaggccgagatactgtttgaagatataccaaaggagaaaagatttccaaagttcaaacggcacgacgtcaatagcactcgcagggcccaggaggaggttaagatccctcttgtgaacatatctctgctcccaaaggatgcccagcttagcctgaatacactggatttacaactcgagcatggagacatcacattgaaaggctacaacctgtccaaaagcgctcttctcagatcattcctgatgaacagtcagcacgccaagattaaaaaccaagccatcattaccgatgaaacgaacgactccttggtcgcaccacaggagaagcaggtgcataagtccattctgccgaactctctcggggtctctgagaggctccagaggctcactttcccagcagtctctgtgaaggttaacggccacgaccagggtcagaatccccccctggacttggagacaacagcccggtttcgagtggaaactcatacccagaagacgatcgggggcaacgtaaccaaggagaagcctcccagtttgatagttcccttagaatcccagatgaccaaagaaaagaaaattacgggaaaggaaaaagaaaactcgcggatggaggagaatgctgagaaccacatcggcgtgaccgaagtgttgctaggaaggaaactgcaacactacaccgatagttacctcggcttcctgccctgggaaaagaaaaagtatttccaggatctgctcgatgaggaggagtctctgaagacacagctagcctattttaccgatagcaaaaataccggcaggcagctgaaggatacgtttgccgatagtctacggtacgtgaataagatcctcaactccaagttcggtttcaccagtaggaaagtcccagcccatatgccacatatgattgataggatcgtcatgcaggagctgcaggacatgtttcctgaagaattcgataagactagttttcataaggtgcggcacagcgaggacatgcagtttgcgttttcatacttctactacctgatgtcagctgtacagccattgaacatctcacaggtgtttgacgaggtggatacagatcagtcaggagtgctgtcagaccgagaaatccgtacgctggccacgaggatccatgagctgccactatctctgcaggatctgaccgggctggagcacatgctgatcaactgcagcaagatgctgcccgcggacatcacccagctgaataatatcccgcccacacaagaaagttattatgatccgaacttaccacctgtgaccaaatccctagttaccaactgtaagcccgtgacagacaaaattcataaggcatacaaagataagaacaagtatcgcttcgaaatcatgggcgaagaggagattgcctttaagatgataagaaccaatgtcagccacgtcgtcggccagctcgacgatatcaggaagaatccgcgaaaatttgtgtgcctgaacgacaacattgaccacaaccacaaagacgcccagaccgtcaaagccgtgcttcgcgatttttatgaaagcatgttccctataccctcccaattcgaactcccacgggagtatagaaataggtttcttcacatgcacgaacttcaggagtggcgcgcctacagagacaaactcaagttctggactcactgcgtgcttgcaacactgattatgtttactatcttctctttctttgccgagcagctgattgctttgaagaggaaaatatttccaagaaggcggatccacaaggaggccagtcccaatcgaattagggtg

SEQ ID NO: 16986 - DNA, 3768 bp, synthetic construct
  misc_feature 1..3768: note = source = /note="Description of Artificial Sequence: Synthetic coding sequence"
  source 1..3768: mol_type = other DNA
atgctcttcaaactgttacagcgccaaacctacacttgcttgtcacataggtatgggttatacgtgtgttttcttggcgtggtcgtaacaattgtgagcgctttccagttcggtgaagttgtgttagagtggtcccgcgatcaatatcacgtgctctttgattcttatagagacaacatcgctgggaaatccttccagaacagattgtgtttgcccatgcccatcgatgtagtctatacctgggtaaatgggacagaccttgagctgttgaaggaactgcagcaggttagggaacagatggaagaagagcaaaaggccatgagggaaatcttaggcaaaaataccaccgaacctactaagaaatccgaaaaacaactcgaatgcctgctgacccactgcattaaggtcccaatgctggttttggatcccgccctgccagctaacattactcttaaggacttgccttcgctttaccctagcttccactcagcttcagatatcttcaacgtcgcaaagcccaaaaatccttctactaatgtgtccgtcgtggtgtttgacagcacaaaagacgttgaggatgcccattccggcctgctgaaaggaaattcgcggcagaccgtttggagaggctacctgactaccgacaaggaagtccctggactagtactgatgcaggatctcgctttcttgtccggttttccaccaacattcaaagaaacaaaccagctgaagactaaactaccagagaacctctcctctaaagtcaagttgctccaactctacagcgaggcatctgtggccctcctgaagctcaataacccaaaagatttccaagaactgaataaacagacaaagaagaacatgaccatcgatggcaaagaattaaccattagcccagcctacttgctgtgggacttgagcgcaatcagtcaaagcaagcaggacgaggacatcagcgctagcagattcgaagacaatgaggagttaaggtacagcctgaggtcgatcgaacgacacgcaccatgggtcaggaatattttcatcgtgactaacggtcagatcccaagctggcttaacctggataacccccgagtaaccattgtgactcatcaggatgtgttcaggaatctatcacacctgccgaccttctcatctccggcgattgagtctcatatccatcggattgaaggactgtcacagaaattcatctatctgaacgacgatgtcatgtttggcaaagatgtctggccagatgatttctacagccattccaagggccagaaggtgtatcttacctggccagtcccgaattgcgcggaggggtgccctgggagttggatcaaagacggctattgtgataaggcctgtaataactccgcatgtgattgggacggcggcgactgttcagggaatagtgggggtagtaggtatattgcgggcggtggaggcactggctccatcggcgtgggccagccatggcagtttggcggtggcatcaactcagtttcctattgcaatcaggggtgtgctaatagttggctggcagacaagttttgcgaccaggcctgtaacgtcctcagttgcggcttcgacgccggcgattgtggacaggatcactttcatgagctgtacaaagtgatactgctccctaatcagacgcactacataattcctaagggcgagtgtctcccctactttagctttgccgaagtggctaagagaggggtggaaggggcgtattcggacaatcctatcatcagacatgcgtcaatagccaacaaatggaagaccatccacctcattatgcatagtggaatgaatgcaacgaccattcatttcaacttaacattccagaataccaatgatgaggaattcaagatgcagattacagtagaagtggacactcgcgaaggaccaaaactgaatagcaccgcccaaaagggatatgagaacctggtctcccctattacgctgctgcccgaagctgaaatcctgttcgaagatatcccgaaggagaagagatttcccaaatttaaaaggcacgacgtcaatagcacccggcgcgctcaggaggaagtgaagatcccacttgtgaacatctctctgttacccaaggacgcgcagctttccttgaacacgctcgatcttcaattagaacacggagatatcactctaaagggttataacctatcgaaaagcgccctgcttagatccttcctgatgaatagccaacacgcaaagataaaaaatcaggctataatcaccgatgagaccaatgactctcttgtggcgccacaggagaaacaggtccataaatctatcctgccaaactccctcggcgtctctgaaagattacaacgccttacatttcccgctgtgtctgtgaaggtgaatggccacgaccaaggccagaacccaccgttagatttggagacaaccgcacggtttcgcgtggagacacacacacagaagacgataggaggaaatgtcaccaaggagaaacccccctcgctgattgtgcctctagagtcccagatgacgaaggaaaagaaaatcaccggcaaggaaaaggaaaacagcagaatggaggaaaatgctgaaaaccacattggcgtcacagaagttcttctgggacgcaaattgcagcattacactgatagctaccttggtttcctcccgtgggagaagaaaaagtactttcaagatttactagacgaggaagagagtcttaagactcagctagcctatttcacagactcgaagaataccggaagacagttaaaggacaccttcgcggatagtttacgatatgtcaacaagatccttaacagcaaatttgggtttactagtaggaaagtgcctgcccacatgcctcatatgattgatcgaatcgtgatgcaggaattgcaggacatgtttccagaagagtttgataaaacctctttccataaggtgaggcactctgaggacatgcaatttgctttctcttacttttactacctgatgtccgccgtgcagcctcttaacatatcacaagtgttcgacgaagtggataccgaccagagcggtgtcttgtcagaccgagaaattcgcacactggccacacggattcatgaactgcctttgagtctccaagacctgacaggtcttgaacatatgctcattaattgttctaaaatgctgccagccgacatcacccaactcaacaacattcctccgacccaggaaagctactatgatccaaacttaccaccagttactaagtctctggtgaccaactgcaaacctgtaaccgataagatccataaagcttacaaagacaaaaataaatatcgcttcgaaatcatgggggaggaggaaatcgcgttcaagatgatccgtaccaacgtgtcacacgtggttggacagctcgatgacatccgtaagaacccacgcaaatttgtctgcctgaatgacaacattgaccacaaccataaagacgcgcaaactgtgaaggcagtgctcagagacttctatgaaagcatgtttccgatcccatcacagttcgagctcccacgcgagtacaggaatcggtttctgcacatgcatgaactccaggaatggagggcttatcgggataaattaaagttctggactcattgcgtcctggcaactttgattatgttcaccattttttccttcttcgcggagcaactgatcgcccttaagaggaaaattttcccgcgcagacgtattcataaagaagcttcaccaaaccgcatacgcgtg

SEQ ID NO: 16987 - DNA, 3768 bp, synthetic construct
  misc_feature 1..3768: note = source = /note="Description of Artificial Sequence: Synthetic coding sequence"
  source 1..3768: mol_type = other DNA
atgttgtttaaactcttacagagacagacttacacatgtctatcccatagatatgggctatatgtgtgcttcctaggcgtcgtggtcactatagtcagtgcattccagtttggtgaagttgtcctggaatggtctcgcgatcagtaccatgtgctattcgatagttaccgtgataacatcgccgggaagagtttccagaacagactgtgcctgccgatgcctatcgacgtagtatatacctgggtcaacggcacggatctagagctgctgaaagagttgcagcaagtgagggagcagatggaggaggaacagaaggcaatgcgcgagatactgggcaagaatactaccgagcccaccaagaagagcgagaaacagctcgagtgcttgctgacccactgcattaaggttcccatgttggtcctcgatcctgctcttcccgcaaacatcaccctgaaggatctacccagcctctatcccagtttccacagtgccagcgacatcttcaacgttgcaaagcctaagaacccatcaaccaatgtatcagttgttgtattcgactcaactaaagacgtggaagatgctcacagcgggctccttaagggaaattcccgccagacagtgtggcggggttatctgaccaccgataaggaagtgccaggcctggtgctgatgcaggatttggcattcctatctggctttccaccaacgtttaaagagacgaatcagttgaaaacgaagctgcctgagaacctgagctcaaaggttaaacttcttcagctgtacagtgaagcgtcagtagccctgctgaaactaaacaaccccaaggacttccaagaacttaacaagcagaccaaaaaaaacatgacaatagatggcaaagaactgacaatatctccagcttacttgctgtgggacttgtccgcaattagccagtccaagcaggacgaggacatatccgcaagcaggttcgaagacaatgaggagctcaggtattctctcagaagtattgagagacacgcaccttgggtgcggaatattttcatcgttacgaatggacagatccccagctggcttaatctggataatccccgggtaactattgtcacacaccaagatgtgtttagaaacctgagccacttgcctactttctcttcacccgcaattgagagtcacatccaccggatcgaggggctgagccagaagtttatttacttaaacgatgacgtgatgtttggcaaagatgtttggcctgatgacttttacagccatagcaagggccagaaagtgtatctgacctggcctgtcccaaactgcgcagaagggtgccctggatcctggatcaaggacggatattgcgacaaagcgtgtaataacagcgcttgcgattgggatgggggggactgcagtggtaacagtggtgggtctcgctacatcgctggcggggggggcactggatccatcggtgtaggccagccatggcagttcggtggagggatcaattcagtgtcctactgtaatcagggatgtgccaatagctggctggccgataaattctgtgaccaagcatgcaatgtgttgtcatgtggatttgatgcaggggattgtggccaggatcatttccatgagttatataaggtgattctgcttcctaaccagacacattacattataccaaaaggagagtgcctgccatacttttccttcgctgaggtcgccaaacgcggcgtcgagggggcatactccgacaaccccatcattcggcatgcctcgatcgctaataagtggaaaaccatacacctcatcatgcacagcggcatgaacgcaaccaccatacacttcaacctgacatttcagaatacgaacgatgaggaattcaagatgcagatcacagtggaggttgacacacgcgagggaccgaagcttaatagcaccgcgcagaaaggatatgagaatctggtgagccctatcacccttctgccggaggccgagatcctttttgaagacatcccgaaggagaagaggttccccaagttcaagaggcacgatgttaattccacaaggagggcacaggaagaagtgaaaatacccctggtgaatatttctctattgcctaaggacgcacagctgtcactgaatactctggaccttcagcttgaacatggcgacattacactcaagggatacaacctgtctaagagtgccctgttacgcagctttcttatgaattctcagcacgccaaaattaagaatcaggccatcatcacagatgagaccaacgacagcttggttgctcctcaagaaaagcaggtgcataagtcaatcttaccaaattctttgggcgtgagcgagcgactccagcggctgaccttccccgccgtgtccgtcaaggtgaacggacatgaccaggggcagaacccacctctggatctcgaaactacagctagattcagagtggaaacccacactcagaaaactattggaggcaatgtgactaaggagaaacccccgtctctgatcgtgcccctggagtcccagatgacaaaagaaaagaaaatcacggggaaagagaaggagaatagcaggatggaggagaatgcggagaatcacatcggtgtgaccgaagtcttgctcggaaggaagttgcagcactacacagacagctacctaggattcctgccatgggagaagaagaaatatttccaagacctgctggatgaagaagagtccctgaagacccagctggcctactttacagatagtaagaacacaggccggcagctcaaagacacctttgccgactctttgcgatacgttaacaaaatcttaaattccaagtttggcttcacgtcacgaaaagtgcctgcccacatgccacatatgattgatagaattgtgatgcaggaactacaggacatgtttcctgaggagtttgataagacatctttccacaaggtccgccactctgaagacatgcaattcgctttcagctacttctactatctcatgtccgctgtacagcctctgaatatttcacaagtgttcgatgaggtggatactgaccagagtggcgtgttgagcgatcgcgagattcggacattggccacaagaatccacgaattgccactgtccctgcaagatcttaccggcctggagcacatgcttattaattgcagcaagatgctgcctgctgatatcacccagctgaacaacattcctccgacgcaagaatcgtactatgatcctaacttacccccagtcaccaagtcactggtgactaactgcaaacctgtaaccgacaagattcataaagcgtataaggataagaataagtatcgcttcgaaattatgggagaagaagagattgcatttaaaatgatccggacgaatgtgtcccatgtggtgggccagctggacgacataaggaaaaacccccgcaaatttgtttgtctgaacgataacatagatcataaccacaaggacgcacagacagtgaaggccgtgttacgggatttctatgaaagcatgttcccaattccctcacagtttgaactgccacgagagtacagaaatcggtttctgcatatgcatgaactgcaagagtggagagcctaccgagacaagttgaagttctggacccattgcgtgctagcaactttgataatgtttactattttttcctttttcgctgaacagctgattgcactgaaaagaaaaatattccctaggcggaggattcacaaggaggcaagtcctaatcgcattagggta

SEQ ID NO: 16988 - DNA, 3768 bp, synthetic construct
  misc_feature 1..3768: note = source = /note="Description of Artificial Sequence: Synthetic coding sequence"
  source 1..3768: mol_type = other DNA
atgctgttcaaactgctgcagcgtcagacatacacgtgtctttcacatagatatggcttatatgtttgctttctcggagttgttgtaacgatagtaagcgcttttcaatttggagaagttgtgctcgaatggagccgagatcaatatcatgtcctttttgattcgtatagggataatattgcgggaaaatcatttcagaacagactgtgcttaccaatgcctattgatgttgtgtatacgtgggtgaatggcacggacttggagctgcttaaagagctgcaacaagtgcgtgagcagatggaggaagaacaaaaggccatgagagaaattcttgggaaaaatacgacggaacccactaaaaaaagtgaaaaacagctggaatgcctgctgactcattgcatcaaggtacctatgcttgtacttgatcctgctctgcctgctaacataacgcttaaagatctgccttccctgtatccgagctttcactctgcgagcgatatatttaacgtggccaaacctaaaaatccgtcgaccaacgtttctgtcgtcgtgtttgatagcacgaaggatgttgaagatgcacattcaggcttgcttaaaggcaactcccgccaaacggtgtggaggggttatcttaccaccgataaggaagttcctgggcttgttttgatgcaggatcttgcctttctttcaggttttccgccgaccttcaaagaaacgaaccagttgaagacgaaattaccagaaaacctgagctctaaagttaaactgttgcagctttatagtgaggcatcggtggcgctgctgaaattgaacaatccaaaagatttccaggagctcaataaacaaacaaaaaaaaacatgacgattgatggcaaagagctgacaattagcccggcgtacctcttgtgggatctgtcagcaatctcacagtcgaaacaggacgaagatatttcggcttcgagatttgaagacaacgaggaattacggtatagccttagaagcattgagagacatgcaccgtgggtccggaatattttcatcgtgacaaatggacaaatcccgtcgtggcttaacttggacaatccgagggttactatcgttacgcaccaagatgtttttcgcaatctgagtcatcttccgacattctcctcaccagctattgaaagccatatacataggatcgaaggactatcgcaaaaattcatctatctgaacgacgatgtaatgtttggcaaggacgtatggccggacgacttctatagccatagcaagggacagaaagtttatctgacgtggccagtgcctaattgtgctgagggctgtccgggctcttggataaaagatggctactgcgataaagcgtgtaataacagcgcctgcgactgggatggaggcgactgctcagggaatagcgggggatctaggtatattgcaggtggcggaggcacaggctctattggtgtagggcagccgtggcagtttggtgggggcatcaactccgtttcgtattgcaaccagggctgcgcaaactcatggttagctgataaattctgtgaccaggcctgcaacgtgttaagctgcggttttgacgcaggcgattgcggccaagatcatttccacgaactctataaggttattcttttgccgaatcaaacacattatattattcccaaaggagaatgcttaccttattttagtttcgcagaagtggccaaacgtggtgttgaaggcgcgtattcagataaccctatcattagacatgcaagtattgcaaataaatggaaaaccatccatcttatcatgcattctggaatgaatgcgacgacaattcattttaacttgacctttcagaatacgaacgatgaagagttcaagatgcaaattacggtggaagttgatactagggaaggacccaaactgaactcgacggcacagaagggctacgaaaatttggtcagccctattactctcttaccagaagccgaaattctctttgaagatatcccgaaagagaaaagatttccgaagtttaagcgtcatgatgtaaattcgacacgtcgtgctcaggaagaagtgaaaatcccgctggtgaatatatcacttttgcctaaagatgcccaactttctttgaacactcttgatctgcaactcgagcatggagatattacgctcaaaggttataacctctctaagagtgcacttcttcgcagctttctcatgaattcacaacatgccaaaatcaaaaatcaggccatcattacggacgaaacgaacgattcacttgtagcccctcaggagaagcaagtgcacaagtcaattcttccgaattcgctgggggttagtgaacgcctccagagattaacgtttcccgcagtcagcgttaaagtgaatggccatgatcagggtcaaaatcctccgcttgatctggaaacaacggctcgcttccgcgttgagactcatacgcagaagactattggtggaaatgtgacgaaagagaaaccgccgagccttatagttccgctggaatctcaaatgacaaaggaaaaaaaaatcacaggcaaagaaaaagaaaatagcagaatggaggaaaatgcggaaaatcatattggtgttacagaagttctcttaggccggaagttgcaacattacaccgactcatacttaggtttcttgccctgggaaaaaaagaagtacttccaggacctgttagatgaggaagaatctttaaagacgcaacttgcctacttcacggattctaaaaacaccgggcgacaacttaaagacacattcgctgattcattaagatacgtaaataagatcttaaacagcaaattcggctttaccagcagaaaagttccggcacacatgcctcatatgattgatcgcatagttatgcaggaacttcaagatatgtttccggaggaattcgataagaccagtttccacaaagtccgtcattctgaagacatgcaatttgcattctcttatttttattatttaatgtcagccgtccagccgttgaatatctcccaggtatttgatgaagtggacaccgatcaatctggcgtgttaagtgatcgtgaaatccgaacccttgcaaccaggatccatgaattgccgctatccctgcaagatttaacgggacttgagcacatgttaatcaattgcagcaagatgctgccggctgacatcacgcagctgaataatattccgcctacacaagagtcgtactatgatcctaatctgcccccggttacaaaatcacttgttacaaattgcaaacccgtcacagataagatccataaagcgtacaaagacaagaacaaataccgctttgagattatgggagaagaagagattgcattcaagatgattcggaccaacgtatctcacgttgtagggcagcttgatgatattagaaaaaatccgagaaagttcgtttgcctgaacgataatatagaccataatcacaaagatgctcagaccgttaaggctgtactccgtgatttttacgaaagtatgtttccaattccgagccagtttgaactgccgagggaataccgaaatagatttttacatatgcacgaactgcaagaatggcgggcatatcgggataaattaaaattctggacacattgtgttttagcgacactcatcatgtttactatcttttcttttttcgcggaacagttgattgctttgaaacgaaagatttttccaagacgacgcatacacaaagaggcgtcgccgaaccggatccgcgta

SEQ ID NO: 16989 - DNA, 3768 bp, synthetic construct
  misc_feature 1..3768: note = source = /note="Description of Artificial Sequence: Synthetic coding sequence"
  source 1..3768: mol_type = other DNA
atgctgtttaaactactgcaacgtcagacatacacgtgcctgtcacataggtacgggctctatgtctgcttcttgggcgtggtagtaactatcgtgtctgccttccagtttggcgaggtggttcttgagtggtccagagatcaataccatgtgcttttcgattcatatcgagacaacattgccgggaagtcattccagaatcggctctgtttgccgatgcccattgacgtggtttatacctgggtgaacggcacagacctggaacttctgaaggaattacagcaagtccgtgagcaaatggaggaggagcagaaggccatgcgcgaaatcctgggaaagaacaccaccgaaccaaccaagaaatcagagaagcagctggagtgcctcttaactcattgtatcaaagtgccgatgctcgtgctggatcccgcactgcctgcaaatattacactgaaggatttaccgagtctgtacccttcctttcattctgcgtccgacatctttaatgtggccaagccaaaaaatcctagcacaaacgtgtccgtcgtggtttttgactctacaaaggatgtcgaagacgcccattccggcctcttaaaggggaactctcgacagacggtgtggcgcggatacttaactacagacaaagaagtccctggccttgtgcttatgcaggaccttgcattcctgtctggcttccccccaaccttcaaagagacaaaccagctgaagacaaagttgcccgagaatctctcttcgaaggttaagttgcttcaactttattcagaggcaagtgtcgcgcttctgaagctgaataatcctaaggactttcaggagttgaataaacagaccaagaagaacatgactattgacggcaaagagcttaccatttcccctgcatatctcctatgggatctgagtgccatctcacagtcaaaacaagatgaggatatttccgcctccagattcgaagacaacgaggagttaaggtactccctacgctcaatcgagcgccacgctccgtgggtgcgcaacatctttatcgttacgaacggccagataccaagttggttgaatttggacaaccccagggtcactatagtgactcatcaggacgtgttccgcaatctgagccatcttccaaccttcagttctcccgccattgaaagtcacattcataggatcgaaggcctttcccagaaattcatctacctcaatgatgacgttatgttcggcaaggacgtgtggcctgatgacttttattcacatagtaaaggccagaaggtgtatctaacatggccagtccctaattgtgctgaggggtgccccggcagctggattaaggatggctactgtgacaaagcttgtaataacagcgcttgcgactgggatggaggagactgcagcggaaattctggaggttcccgctatatcgccggcggaggcggcacaggatctattggggtgggtcagccatggcaatttggtggggggattaactccgtttcctactgtaatcaagggtgcgccaactcttggctagctgataagttctgcgatcaggcgtgcaatgtgctctcatgcggctttgacgccggcgactgcgggcaggatcattttcacgaactgtataaggttatcttgttacccaatcagacacactacattattcccaagggagagtgcctaccttacttctcgttcgctgaggtcgccaaacggggagtcgaaggagcttactccgataaccctatcatcagacacgcctctattgccaataagtggaagacaattcaccttattatgcattccggaatgaatgctaccacgatacactttaatctcacttttcagaacaccaacgatgaagagtttaagatgcagattaccgtcgaggtggataccagggagggtcccaagcttaactccacggctcaaaaaggatatgagaacctggtcagtcccattaccctgctgccagaggctgaaatactgttcgaggatatcccaaaagagaagcgatttccgaagttcaaaaggcatgacgtcaattcgactagacgcgcgcaggaagaagtgaagattccattggtgaacatttccctgcttcctaaggatgcccaactcagcctcaacaccttagacctgcagctcgaacatggggacatcacactgaagggttataatctgtctaaaagcgccctcctgcgctcattcctcatgaatagccagcacgcgaaaatcaaaaatcaggcgattattacggacgagaccaatgacagtctggttgccccacaggagaagcaggtacataagtctattctgcccaactccttaggagtgtccgaaagactgcagaggctcacatttcccgccgtgtccgtcaaagtgaatgggcatgatcaaggccagaacccacctctggatctcgagaccacagcgagattccgagtcgagacgcacacacaaaagaccatagggggtaacgtaacgaaggaaaagcccccctctctcatcgtgccacttgagagccagatgactaaggaaaagaagattacggggaaggaaaaagaaaacagtaggatggaagaaaacgcagaaaatcatatcggggtgaccgaagtcctgttggggcggaaactacaacattacaccgacagttacctcggcttcttgccatgggaaaaaaaaaaatactttcaggatcttctggacgaagaagagtcactgaaaactcagctcgcctacttcacagactccaaaaataccggcagacagctgaaggacaccttcgcggacagtctgcggtacgtcaataagatccttaacagcaagtttggcttcacctcaagaaaagtgcctgctcacatgccacacatgattgatagaatcgtcatgcaagaactgcaggatatgtttcctgaagagtttgataaaaccagttttcacaaggtgcgacacagcgaggacatgcaattcgcatttagctatttttactacctcatgtcggctgttcagccactgaacatttcacaagttttcgatgaggtggacactgatcagtccggcgttctgagcgatcgggaaattcggactctcgccacgagaattcatgaactgccactttccctccaggatctgaccggtctggagcatatgctgatcaattgtagcaagatgttacctgctgatattacacagctgaataatattccccccacgcaggagagctattacgacccaaacctgccccccgtgactaagtctctcgtgaccaactgcaagcccgtgaccgacaagatccacaaagcttataaggataaaaataagtatcgttttgagatcatgggggaggaggagattgcttttaaaatgatcaggacgaatgtctcgcatgtcgtcggacaactagacgatatacgcaagaatccacgcaagttcgtgtgtctgaacgataatatcgatcacaaccacaaagatgctcagaccgtgaaagccgtgttaagagacttctacgaatcgatgtttcccattcccagccagtttgagcttccccgcgagtaccgcaatagattcctccacatgcacgaactccaggagtggcgtgcataccgggataagctgaagttctggactcactgcgtgctcgctaccctcataatgtttacgattttttcattctttgcagagcagctgatcgccctaaaacgaaaaatctttccaaggaggcggatacacaaagaggctagcccaaatcggattcgggtt

SEQ ID NO: 16990 - DNA, 3768 bp, synthetic construct
  misc_feature 1..3768: note = source = /note="Description of Artificial Sequence: Synthetic coding sequence"
  source 1..3768: mol_type = other DNA
atgctgttcaagctcctccagaggcagacatatacgtgcttgagccataggtacggcctttacgtctgtttcctgggcgtggtggtcaccatcgtgtcagcatttcaatttggcgaggtggtgctggagtggtcgagagatcagtatcatgtcctgttcgactcatatagagacaatattgcaggtaaatctttccagaacagattgtgcctgccaatgcctattgacgtggtgtacacatgggtgaacggcaccgacctggagttgctcaaagagctgcagcaggtgcgggagcaaatggaagaggaacagaaagccatgcgcgagatcctaggcaagaacaccaccgagcccacaaagaagtctgagaagcagctcgaatgcctgctgacccactgcattaaggtgcctatgctggtgctggatccggctctgcccgccaacatcacattgaaagaccttccttcactgtatcccagctttcatagcgcgtccgacatctttaatgtggccaagccaaagaatcccagtacaaacgtctcggtggtcgtgtttgactccactaaagacgtggaggatgcgcactctggcctccttaagggcaactctcggcagacagtgtggcggggatacctgacgaccgataaagaagttccaggtcttgtgctgatgcaggacctagcatttctgtctggatttcctccgactttcaaggagacgaatcagctgaagacaaagcttcccgagaatctttcctccaaggtgaagctgctccagctgtactctgaggcgtccgttgccctcctgaagctgaacaacccaaaggatttccaagagctgaataagcagacgaaaaaaaatatgaccatcgacggtaaggagttgacgatatcacccgcatacctgctatgggatctaagtgccatatcacagtctaagcaggatgaagacatcagtgccagccgattcgaggacaatgaagagttgagatatagcctaagatcaatagagagacacgcaccgtgggtgcgtaatattttcatcgttacaaatgggcagatcccctcttggctaaatcttgataacccacgggtcactatagtgacacatcaggatgttttccgcaacttgagtcatttgcctactttctccagccctgccatcgagagtcatatccaccggatcgaaggcttgtcccagaagtttatttacctcaacgacgatgtgatgtttgggaaggacgtgtggcctgacgacttctattcacatagcaagggccagaaggtgtacctgacttggcctgtccccaactgcgctgagggctgcccagggagttggatcaaagacggctactgcgacaaagcttgcaataattcagcttgtgattgggacggcggggactgctccgggaattccggcggtagcaggtacatcgccggcggcggcggcactgggtcaattggagtggggcagccttggcaatttggaggtggcatcaattcggtgtcctactgcaaccaaggatgcgccaactcctggctggcggacaagttttgcgaccaggcatgtaacgtcttgtcatgcggattcgatgccggcgattgtggccaggaccactttcacgagctgtataaagtgatccttttaccaaaccagacccattatattatccccaagggggagtgtttgccctattttagctttgccgaggttgccaaaagaggtgtggaaggggcctatagcgacaatccaataataaggcatgcaagcattgcaaataagtggaagaccatccatctgataatgcacagtggaatgaacgcaacgacgattcattttaacctcacctttcagaataccaatgatgaagagttcaaaatgcagattactgtcgaagttgacacccgggaaggtcctaaactcaactccacagcccagaaggggtatgagaatcttgtctctcccatcacgctgttgccagaagcagagatattgtttgaagatattccaaaggaaaagcggttccccaagttcaaaaggcatgacgtgaactccaccagacgcgcacaggaggaagttaaaattcctcttgtgaacattagtctgcttcccaaggacgcccagctttccctaaacacactcgatttgcagctggagcatggtgacatcacattgaagggctataatctttccaagagtgctctgttgcgaagtttcctgatgaattctcagcacgccaaaataaaaaaccaggcaattatcaccgatgagacgaatgattcgctggtagcgccacaggaaaagcaggtgcacaagtccatactacccaatagtttgggcgtttccgaacgcctacaaagactgacctttccagccgtgagcgtgaaagtgaacggccatgaccagggtcagaaccccccccttgatctggagactaccgcccggtttagagtggaaactcacactcagaaaactattgggggaaacgtaaccaaagaaaagcctcctagccttatagtgcctctggagagccagatgactaaggagaagaagataaccggcaaggagaaggagaattctcggatggaggagaatgcggagaaccatattggcgtgactgaagtgctgcttgggcgtaagctccagcactatactgactcatatctggggtttctgccctgggagaagaagaaatattttcaagatttactggacgaggaagagagtcttaaaactcagctagcctacttcacagactctaagaacacgggtaggcagttaaaggatacgttcgcggactctctacgatacgtcaataaaatactgaacagtaagttcgggttcacctctaggaaagtgcctgcgcatatgcctcacatgatcgaccgaatagtgatgcaggagctgcaggacatgttccctgaagagttcgataaaacaagtttccacaaggtcaggcactcagaagacatgcagttcgccttcagttatttctattatctgatgtctgcggtccaaccactcaatatatctcaggtgtttgatgaggtggacaccgaccagtctggggttctgtctgacagagaaatcagaacactggcaaccaggatccatgaacttcctctcagcctccaagacctcacgggattggagcacatgcttattaactgttctaaaatgctgcctgccgacatcacacaactcaacaatattccacctacacaggaaagctactatgaccctaacctgccccctgtaacgaaaagccttgtcacaaattgtaagccagtgactgataagatacataaggcatacaaagataagaacaagtatcggttcgaaataatgggagaagaggaaatagctttcaagatgattcgcaccaatgtttcccatgtcgtcggtcagttggatgatatcaggaagaatccccgcaaatttgtgtgcctcaatgataacatcgaccataaccacaaggacgcccagaccgtgaaggccgttctgcgcgacttctacgagtccatgtttccgattccgtcccagttcgagctgccgagagagtatcggaatcggtttctgcacatgcacgagcttcaggagtggcgtgcctaccgcgacaagctcaaattctggacccactgcgtacttgccacattaatcatgtttacgatcttctcgttcttcgctgaacagctgatcgcgctgaaacgcaaaatattcccgcgccgacgaattcacaaggaggcgtcccccaaccgcatccgcgtg

SEQ ID NO: 16991 - DNA, 3768 bp, synthetic construct
  misc_feature 1..3768: note = source = /note="Description of Artificial Sequence: Synthetic coding sequence"
  source 1..3768: mol_type = other DNA
atgctgttcaagctactgcagaggcagacctatacatgcctctcacaccgctacggactttacgtgtgttttctcggagttgttgtcactatcgtgtcagctttccagttcggagaggtggttctcgagtggtctcgtgatcagtatcatgttctcttcgactcatacagggataacatagcaggcaaatcgttccaaaatcgcctgtgcctccctatgccgatcgatgttgtgtatacgtgggtgaacggcaccgaccttgaattgttgaaggagcttcagcaggtgcgtgagcaaatggaagaggaacagaaggctatgagagaaatactgggcaagaataccacggagcccacaaagaaatccgagaagcagctggagtgtcttcttacccattgtataaaagtgcccatgctggtgttggaccctgccctgccggctaacatcacgctgaaagacctgccctccctgtaccccagcttccactcagcatctgacatatttaatgtagcaaagccaaaaaatcctagcaccaatgtgtccgtggtcgtcttcgactctaccaaagacgtagaagacgcccactccgggctgctcaagggaaattcacgccaaactgtttggcgcggctacctgacgacggacaaggaggtaccaggactcgtcttaatgcaggacctcgctttcctgagtgggttcccaccgacctttaaggaaaccaaccagctcaaaacgaaattacccgagaatctaagttcaaaggtcaaactactccaattgtactcagaagcctccgtggccctgctgaagcttaacaacccaaaggatttccaggaactgaacaaacagacgaagaagaacatgaccatcgatgggaaggaactgaccatctcgcccgcatatcttctttgggatctgtctgccatatcccagtccaagcaagacgaggacatcagcgcgtccaggtttgaggataatgaagagctgcggtactctctccgttcgattgagcggcatgcaccctgggtaaggaatattttcatagtcaccaacggccagattccctcttggctcaaccttgataacccacgagtgaccatcgtcacccaccaggatgttttcagaaacctcagccatctccctacttttagctctcccgccatcgagagccacatacatcgaatagaagggctgtcccagaagttcatatacttgaacgatgacgtgatgtttgggaaagacgtttggccagatgatttttactcacatagtaagggtcagaaagtttatctgacttggccagtgcccaattgcgctgaagggtgtcccggctcttggatcaaagacggatactgtgacaaagcatgtaataattccgcttgcgactgggacggaggggactgcagcggcaattccgggggtagtaggtacattgccggggggggcggcaccggttcaatcggtgtgggccagccgtggcagttcggcggcggtatcaatagcgtgagctattgtaaccagggatgtgctaactcttggctggcagataaattctgcgaccaagcctgcaatgttctgagttgcgggttcgacgcaggcgactgtggccaggaccatttccatgaactgtacaaggtaatccttcttccgaaccagacacattacattatccccaaaggtgagtgcctgccctacttttctttcgctgaggtggcaaaaagaggagtggagggcgcctactccgataaccctatcattcgacacgcctccatcgccaacaagtggaagaccatccacctgattatgcacagtggaatgaatgcgacaacaatacattttaatctgactttccagaatacaaacgatgaagagtttaagatgcagattaccgtagaggtggacactcgagagggcccaaaactgaattcaaccgcgcagaaagggtatgaaaatctggtgtcaccaatcactcttctccctgaggctgaaatcctcttcgaggatattcccaaagagaagcggttccctaagttcaagaggcacgatgtgaatagcacaaggagggcccaggaggaagtgaagatcccgcttgtaaatataagtctcctgcccaaagacgcccagctgtcactgaacacactggatctgcagctggagcatggcgacattaccttgaaggggtacaacctgtcaaaaagcgcactgctccggtccttcctgatgaattcacaacacgcaaagatcaagaatcaggctatcatcaccgacgaaaccaacgattcactggtggcgccccaagagaaacaggttcacaagtcaattctgcctaactctctgggtgtgtctgaacggttgcagaggttgacctttcccgccgtctccgtcaaagtgaacggccatgaccaaggtcagaaccctccactggatctggaaaccactgcccgatttagagtggagacccacacacagaaaacaatcggcggcaacgtgaccaaggagaagcccccctcattgatcgttcctcttgagtcccagatgactaaggagaagaagataacaggcaaagaaaaggagaactctcggatggaggagaacgccgagaatcacatcggcgtgacggaagttctactggggaggaagctgcaacactatactgactcctacctcgggttcctgccttgggagaagaagaagtatttccaggatcttctggacgaggaggaaagcctcaaaacacaactagcttactttacggattctaagaatacaggcagacagctgaaggacacgtttgcggattctctgagatacgtgaataaaatcctaaacagcaaatttggcttcacatcacggaaagtgcccgcacatatgccgcacatgattgatagaattgtgatgcaagaactgcaggatatgttccccgaagaatttgataaaacaagctttcataaggtacgacactccgaggatatgcagttcgctttctcctacttctattacttgatgagtgcggtccagccattgaatatctcccaagtgttcgatgaggtagataccgaccagtcaggagtcctctctgatcgggaaatccggacactagccacaagaatacacgaacttccactatcactccaggatctgaccgggttagaacatatgctcatcaactgctcaaaaatgctgccagcagatataacacaacttaacaacattccacctacgcaggaaagctattacgacccgaaccttcctcccgtgactaagtccttggtaacaaattgcaagccggtaacggacaagattcacaaggcgtataaggataaaaataaatacaggtttgagataatgggcgaagaggagatcgcctttaaaatgattcgaactaacgtgtcccacgttgttggccagctggacgatatccggaaaaacccccgcaagtttgtgtgtctgaacgataatattgaccacaatcataaggacgcacagactgttaaagcagttctccgagatttctacgaatctatgtttcccatccctagccaatttgagttgccccgtgagtatcggaatagattccttcatatgcacgagctccaggagtggcgcgcttatcgggacaagttgaaattctggacccactgtgtactcgccacgctgatcatgttcacgatctttagcttcttcgccgaacaactgattgcgctcaagcggaagattttccccagacggaggatccacaaagaggccagcccaaaccgcattcgtgtg

SEQ ID NO: 16992 - DNA, 3768 bp, synthetic construct
  misc_feature 1..3768: note = source = /note="Description of Artificial Sequence: Synthetic coding sequence"
  source 1..3768: mol_type = other DNA
atgctgtttaaattgcttcagcgtcagacctatacctgcctgagccatcgctacggactgtacgtgtgcttcctgggcgtggtggttactatagtgagcgcattccagttcggggaggtggttctagaatggagtcgcgatcagtatcacgtgttattcgacagctatcgcgataatatagccggcaagagctttcagaacaggttatgtttgcccatgccaatcgacgtcgtttatacatgggtgaatggtactgacctggagttactgaaggagctgcagcaggtgagagaacagatggaagaggagcagaaggcaatgcgggaaattctcggcaagaacacaaccgagcctacaaagaagtctgaaaagcagttggaatgcctgctgacccattgcataaaggtgcctatgctggtgctggaccccgctttacccgctaatatcactctgaaggacctaccctccttatacccgagctttcacagcgcctccgatatatttaatgtggccaagccaaagaatccatctacaaacgtctctgtggttgtcttcgatagcaccaaggacgtcgaggatgctcactctggtctactgaaggggaatagcagacagaccgtgtggcggggatacctgaccaccgataaagaggtgcctggcctggtactgatgcaagatctggcatttctgtccgggttcccccctaccttcaaggagactaatcagctcaagacaaagctgcctgagaatctgagttccaaggtcaagttactgcaactgtactccgaggctagcgtggctctactgaagctcaataatcctaaggatttccaagagctgaacaagcagaccaaaaagaatatgactattgacggaaaagaattgaccatatctcccgcctaccttttgtgggaccttagcgccatcagccaaagcaaacaggacgaggacatatcagcctcaaggttcgaggacaatgaggagcttcggtattctctgcggtctatcgaacggcatgctccctgggtgaggaacattttcatcgtcactaatgggcaaatccccagctggctaaacctggacaacccacgggtgacaatcgtgacccaccaagatgtctttaggaacctgtcccatttacccaccttctcctctcccgccatagagagtcacatccaccggatcgaggggctctcccagaagtttatctatctgaacgatgatgttatgttcggtaaggacgtgtggccagatgatttctacagtcacagcaaggggcagaaggtgtacctgacctggcccgtccctaactgcgcagaaggttgcccaggcagttggataaaagacggctactgcgataaggcatgcaataacagtgcctgcgattgggatggtggggattgctccggcaattctggtggaagccgctacatagctggcggcggcggcactggctcaatcggcgtgggtcagccttggcagttcggcggcggaattaactcagtgtcttactgcaaccaaggttgcgcaaattcttggctggctgacaaattttgcgaccaggcctgtaacgtgctgagctgcggctttgatgcaggcgattgcggacaagatcattttcatgagctgtacaaggtgatcctgctgccaaatcagacccattacatcattcctaagggggaatgtctgccctacttctcctttgcagaggtggctaaacgcggagtggagggggcatatagcgataatccaataatcaggcacgccagtattgctaacaagtggaagaccatccatctgatcatgcactccggcatgaacgctactaccattcattttaatctgacctttcaaaacactaacgatgaagaattcaaaatgcagataaccgtggaggtcgacactagagagggacctaagctaaattccacagcccaaaagggatacgagaacctggtgagccctataaccctactgcctgaggcagagattctgtttgaagacatcccaaaagagaagcgcttccccaaattcaagaggcacgatgtcaatagtacacgacgcgcccaggaagaagttaagatccctctcgtgaacatttctttactgcccaaggatgcccaactatctctcaacaccctggacctacagctggaacatggcgacatcacactgaaaggttacaacctcagcaagtctgcattactgaggagttttctgatgaatagtcagcacgccaagatcaagaaccaggccataattaccgatgagaccaacgactctttggtggcacctcaggagaaacaagtgcataagtctatactcccaaactctctgggcgtgagcgaaaggctgcagagactcaccttccctgctgtgagcgtgaaggtgaatggccacgaccaaggacaaaaccctcccctggatctagagactacagcacgattcagggtagagacacacactcaaaaaaccattgggggaaatgtgacaaaggagaagccaccttccctgattgtgccgttagagagccagatgactaaagagaagaagatcactggcaaggagaaagaaaacagtcggatggaagagaatgctgagaatcacattggagttactgaggtgctgttggggcgcaagctacaacactacactgatagttatctgggcttcctgccctgggaaaaaaagaaatacttccaggatttactagatgaagaagagagtctaaagacacagcttgcttacttcacagactctaaaaataccggcagacagctgaaagatacatttgctgactctctgcgctatgtcaacaagatactcaattctaagtttggcttcaccagccgaaaagtgcctgctcatatgccccacatgattgaccggatcgttatgcaagaattacaggatatgtttccagaagagtttgacaaaacctctttccacaaggtcaggcatagtgaggatatgcaattcgcattttcatatttttactatctaatgagtgccgttcaaccactgaatatatcccaggtcttcgatgaagtcgacaccgaccagagcggggtgctgagtgacagggaaatcaggaccctcgccacacgcatacatgagctccctttatctctccaggacctcaccggcctcgaacacatgctgattaattgcagtaagatgctgcctgcagacataacacaactgaataacataccccccacacaggaaagctattacgacccaaacctaccacccgtgacaaagagcctcgtgacaaattgcaagcccgttaccgataaaattcacaaggcatacaaagataaaaacaagtacagattcgagattatgggtgaggaagagatagcctttaagatgatccggaccaacgtaagccacgtggtgggccagttagacgacatcaggaagaacccccggaagttcgtgtgtctcaacgataatattgaccataaccataaagatgctcagactgtgaaagcagtgctgcgcgacttctatgagagcatgtttccaatcccttctcagttcgagttgccccgagagtaccgaaatcgcttcctgcacatgcatgaactgcaggagtggcgagcctatcgagacaaactcaaattctggacacactgtgtcttagccaccctgatcatgtttacaatcttttctttcttcgccgaacaactgatcgccctcaaaaggaagattttcccccggagacgcatccataaagaggccagcccaaatagaatccgtgtt

SEQ ID NO: 16993 - DNA, 3768 bp, synthetic construct
  misc_feature 1..3768: note = source = /note="Description of Artificial Sequence: Synthetic coding sequence"
  source 1..3768: mol_type = other DNA
atgctatttaaattactacaacgacaaacgtatacgtgtctatcgcatcgatatggtctatatgtatgttttttaggtgttgtagtaacgatagtatcggcgtttcaatttggtgaagtagtattagaatggtcgcgagatcaatatcatgtattatttgattcgtatcgtgataatatagcgggtaaatcgtttcaaaatcgattatgtttaccgatgccgatagatgttgtatatacgtgggtaaatggtacggatttagaactattaaaagaattacaacaagtacgagaacaaatggaagaagaacaaaaagcgatgcgtgaaatattaggtaaaaatacgacggaaccgacgaaaaaatcggaaaaacaactagaatgtctactaacgcattgtataaaagttccgatgttagtactagatccggcgttaccggcgaatataacgctaaaagatttaccgtcgttatatccgtcgtttcattcggcgtcggatatatttaatgttgcgaaaccgaaaaatccgtcgacgaatgtatcggttgtagtatttgattcgacgaaagatgtagaagatgcgcattcgggtctactaaaaggtaattcgcgacaaacggtttggcgaggttatctaacgacggataaagaagtaccgggtttagtactaatgcaagatttagcgtttttatcgggttttccgccgacgtttaaagaaacgaatcaattaaaaacgaaactaccggaaaatctatcgtcgaaagtaaaattattacaattatattcggaagcgtcggtagcgttattaaaattaaataatccgaaagattttcaagaactaaataaacaaacgaaaaaaaatatgacgatagatggtaaagaattaacgatatcgccggcgtatttattatgggatttatcggcgatatcgcaatcgaaacaagatgaagatatatcggcgtcgcgatttgaagataatgaagaactacgttattcgctacgttcgatagaacgacatgcgccgtgggtacgtaatatatttatagttacgaatggtcaaataccgtcgtggttaaatttagataatccgcgagtaacgatagttacgcatcaagatgtatttcgaaatttatcgcatttaccgacgttttcgtcgccggcgatagaatcgcatatacatcgtatagaaggtctatcgcaaaaatttatatatctaaatgatgatgtaatgtttggtaaagatgtatggccggatgatttttattcgcattcgaaaggtcaaaaagtttatctaacgtggccggtaccgaattgtgcggaaggttgtccgggttcgtggataaaagatggttattgtgataaagcgtgtaataattcggcgtgtgattgggatggtggtgattgttcgggtaattcgggtggttcgcgttatatagcgggtggtggtggtacgggttcgataggtgtaggtcaaccgtggcaatttggtggtggtataaattcggtttcgtattgtaatcaaggttgtgcgaattcgtggctagcggataaattttgtgatcaagcgtgtaatgttttatcgtgtggttttgatgcgggtgattgtggtcaagatcattttcatgaattatataaagttatattactaccgaatcaaacgcattatataataccgaaaggtgaatgtctaccgtatttttcgtttgcggaagtagcgaaacgtggtgttgaaggtgcgtattcggataatccgataatacgtcatgcgtcgatagcgaataaatggaaaacgatacatttaataatgcattcgggtatgaatgcgacgacgatacattttaatttaacgtttcaaaatacgaatgatgaagaatttaaaatgcaaataacggtagaagtagatacgcgagaaggtccgaaactaaattcgacggcgcaaaaaggttatgaaaatttagtatcgccgataacgctactaccggaagcggaaatattatttgaagatataccgaaagaaaaacgatttccgaaatttaaacgtcatgatgtaaattcgacgcgtcgtgcgcaagaagaagtaaaaataccgttagtaaatatatcgctactaccgaaagatgcgcaattatcgttaaatacgttagatttacaactagaacatggtgatataacgttaaaaggttataatttatcgaaatcggcgttattacgttcgtttctaatgaattcgcaacatgcgaaaataaaaaatcaagcgataataacggatgaaacgaatgattcgctagttgcgccgcaagaaaaacaagtacataaatcgatattaccgaattcgctaggtgtatcggaacgactacaacgtctaacgtttccggcggtttcggtaaaagttaatggtcatgatcaaggtcaaaatccgccgctagatttagaaacgacggcgcgatttcgagtagaaacgcatacgcaaaaaacgataggtggtaatgtaacgaaagaaaaaccgccgtcgttaatagtaccgttagaatcgcaaatgacgaaagaaaaaaaaataacgggtaaagaaaaagaaaattcgcgtatggaagaaaatgcggaaaatcatataggtgtaacggaagttttattaggtcgtaaactacaacattatacggattcgtatctaggttttctaccgtgggaaaaaaaaaaatattttcaagatctactagatgaagaagaatcgttaaaaacgcaattagcgtattttacggattcgaaaaatacgggtcgtcaactaaaagatacgtttgcggattcgttacgatatgttaataaaatactaaattcgaaatttggttttacgtcgcgtaaagttccggcgcatatgccgcatatgatagatcgtatagttatgcaagaattacaagatatgtttccggaagaatttgataaaacgtcgtttcataaagtacgacattcggaagatatgcaatttgcgttttcgtatttttattatttaatgtcggcggtacaaccgctaaatatatcgcaagtatttgatgaagttgatacggatcaatcgggtgtactatcggatcgtgaaatacgtacgttagcgacgcgaatacatgaactaccgttatcgttacaagatctaacgggtctagaacatatgctaataaattgttcgaaaatgttaccggcggatataacgcaattaaataatataccgccgacgcaagaatcgtattatgatccgaatttaccgccggttacgaaatcgctagtaacgaattgtaaaccggttacggataaaatacataaagcgtataaagataaaaataaatatcgttttgaaataatgggtgaagaagaaatagcgtttaaaatgatacgaacgaatgtatcgcatgtagttggtcaactagatgatatacgaaaaaatccgcgaaaatttgtttgtctaaatgataatatagatcataatcataaagatgcgcaaacggtaaaagcggtattacgtgatttttatgaatcgatgtttccgataccgtcgcaatttgaattaccgcgagaatatcgaaatcgttttctacatatgcatgaattacaagaatggcgagcgtatcgtgataaattaaaattttggacgcattgtgtattagcgacgttaataatgtttacgatattttcgttttttgcggaacaactaatagcgctaaaacgaaaaatatttccgcgtcgtcgtatacataaagaagcgtcgccgaatcgtatacgagta

SEQ ID NO: 16994 - DNA, 3768 bp, synthetic construct
  misc_feature 1..3768: note = source = /note="Description of Artificial Sequence: Synthetic coding sequence"
  source 1..3768: mol_type = other DNA
atgctgttcaagttgctgcaacggcagacttatacctgtctgtcgcatcggtatggcctgtacgtctgtttcctgggtgtggtggttaccatcgtatctgcctttcagttcggcgaggtagtgctcgagtggtctcgcgaccagtaccacgtactctttgatagctatcgcgacaatatcgccggcaagtcattccagaacaggttatgcctgccaatgcctatcgatgtagtgtacacgtgggttaatggaaccgaccttgaattgctgaaggaactccaacaggtgagggaacagatggaagaagaacagaaggctatgagggaaattcttggaaagaacaccacagaacctacaaaaaagtcggagaagcaactggagtgcctgctgacccactgcatcaaagtccctatgctggtcctggaccctgccctccccgccaatattaccttgaaggacctcccatccctttacccctcatttcattctgcaagcgatattttcaatgttgccaagcccaagaatccatctacgaatgtgagcgtggttgtcttcgattctacaaaagacgtcgaggacgcccatagcggcctgctcaagggcaactcaaggcaaaccgtatggaggggctatctgaccactgataaagaggtgccgggccttgtacttatgcaagacctcgcctttcttagcggatttccccccacctttaaggaaacgaatcagttaaaaactaagctgcctgagaatctctccagcaaagtgaagctgcttcagctctacagcgaagccagtgtggccctgttaaaactgaataatccaaaggactttcaggaactgaacaaacagaccaaaaaaaacatgactatcgatggcaaggagctgactatctccccagcatacctcctgtgggatctcagcgcaatttctcagagcaagcaggatgaggacatctcggctagcaggtttgaggataacgaggagttacgctactccctgaggtccatcgagcgacacgcaccctgggtcaggaacatttttatcgtaaccaatggccaaattcccagttggctaaacctggataacccacgcgtcaccattgtcactcatcaagatgtgttcaggaatttgtctcacctgcctaccttctcaagccctgccatcgaaagccatattcaccgtatagaagggctgagccaaaaatttatctatttaaatgacgacgtcatgttcgggaaggatgtgtggcccgatgatttctacagccacagcaagggacagaaggtgtacctcacttggcctgtccctaactgtgctgaaggctgcccaggtagttggatcaaggacgggtattgcgacaaagcttgcaataacagtgcctgcgactgggatgggggggattgttctggtaacagtggtgggtcgagatacattgcaggcggaggtggaacaggttccattggggttggacagccttggcagtttggaggtggaatcaactctgtgtcttactgcaatcaggggtgtgccaactcctggctggcagataaattttgcgaccaggcttgcaacgtcttaagctgtggcttcgatgcgggggattgcgggcaggaccacttccacgagctttataaggtgatcttgttgccaaaccaaacccactacatcattcccaagggggagtgtctgccttatttcagtttcgctgaagtggccaagcgcggggttgaaggcgcctactcagataatccgataatccggcatgcttcaatagctaacaagtggaagacaatacatttaatcatgcacagtggcatgaatgcaacaactatccatttcaatttgacattccagaacaccaatgacgaagaatttaaaatgcaaatcacggtggaagtggacaccagggagggccccaaactgaacagcaccgcccagaagggatatgaaaatctcgtctcccctatcacactgctacctgaggccgagattctctttgaggacatccccaaagagaaacggttccctaagttcaagcgtcacgacgtgaactcaactcgcagagcgcaagaagaagtgaaaatcccattggtgaacatatccttgctgcccaaagacgcacagctctcactgaacactctagaccttcagcttgagcacggcgatattaccttaaaaggctacaacttgagcaaatcagcgctgctgcgatccttcctcatgaattcccagcacgcgaagatcaagaaccaggctatcatcaccgatgagactaatgatagcctcgttgccccacaggagaagcaggtgcacaaatcaatcctgccaaactccctgggtgtcagcgagaggctgcagcgcttgacgttcccagctgtttcagttaaagtgaatggtcatgaccaggggcaaaatccaccactagatctagaaaccaccgccaggttccgggtggagacacatacacaaaagaccatcgggggaaatgtgaccaaggagaaacccccgtcgctgattgttccgctcgagtcacagatgactaaagagaagaaaattaccggaaaggagaaggaaaatagtagaatggaagaaaacgctgaaaatcacattggtgtgactgaggtgttattagggcgaaagctgcagcattacaccgatagttatttgggcttcctcccctgggaaaaaaagaagtattttcaggatctgcttgacgaagaggagtccctcaaaacacagttggcctacttcaccgatagcaaaaacactggaaggcagttgaaagacaccttcgccgacagcttgcggtacgtgaacaagattttgaactccaagttcggatttacttcacggaaggtccctgcccatatgccccatatgatcgacagaatcgtgatgcaggaacttcaggatatgtttcccgaggaattcgacaaaacttccttccacaaagtacgccactctgaagatatgcagtttgccttctcttatttctactatctgatgtccgccgttcagccactaaacatcagccaagtcttcgatgaagtggataccgaccagagcggggtcttatctgatcgtgagatcaggaccctcgcgacccgcattcatgaactccccctgagcttgcaggacctgactggactagagcatatgctgattaattgttctaagatgttgccagcggacattactcagttgaataatatcccacccacccaggagagctactatgaccccaatctccctccagtaactaagtccttggtgaccaactgcaagcctgtgactgacaagatccataaagcctacaaagacaagaacaaataccggtttgaaattatgggagaggaggagatcgcttttaagatgatccgcaccaatgtgagccatgtcgtaggtcagctcgacgatattcgcaaaaacccgaggaaattcgtctgtttgaatgacaatatcgaccacaatcacaaagatgcacagaccgtgaaggctgtgctacgagacttctacgagagcatgtttccaattccaagccagtttgagctccctcgcgagtaccgcaatagatttcttcatatgcacgagttacaggaatggcgggcctatagagataagcttaaattctggactcactgtgttctggcgacactgatcatgtttacaatcttctcttttttcgccgaacagctgatagccctgaaacgaaagatctttccccgaagaagaattcataaagaggccagtcccaatcgcatccgggtg

SEQ ID NO: 16995 - DNA, 3768 bp, synthetic construct
  misc_feature 1..3768: note = source = /note="Description of Artificial Sequence: Synthetic coding sequence"
  source 1..3768: mol_type = other DNA
atgctttttaaactgctacagcggcagacttatacatgcctttctcaccgctacggactctacgtttgttttctcggagtagttgtgactatcgtttccgcattccagtttggagaggtggtgcttgagtggtcacgcgatcagtatcatgtgttatttgactcatatcgcgacaatatagctgggaaaagttttcagaacaggctttgcctacccatgcctatcgacgtggtctatacttgggtgaacgggactgacctggaactcctgaaagagcttcagcaggtgcgggaacagatggaagaagaacagaaggctatgagagagattctggggaagaatactactgagcccacaaaaaaatcagaaaaacagctagagtgcctccttacacactgcattaaggttccaatgctggtattagaccctgccctccctgcaaacataacgctaaaagatctcccctctctatatccctcgttccattccgcttcagatatcttcaacgtcgccaagcccaaaaatccttctacaaacgtgtccgttgtggtcttcgactccacaaaagatgtcgaagacgcccactcagggctgctgaagggaaatagtcgacaaactgtgtggcgggggtatcttacaacagacaaggaggtacccggacttgtgcttatgcaggacctagctttcctatcaggatttccacccactttcaaagaaacaaaccagcttaaaactaagctgcctgaaaacttgtcctcaaaagttaaactcctgcagttgtattccgaagcttctgtggctctgctaaaactcaataatcccaaagatttccaagagttgaataaacagacaaaaaagaacatgactatagatggaaaagaactcactatttctcccgcatacctactatgggacctttccgcaatctctcagtctaaacaggatgaagatatttctgcttctagattcgaagataatgaggaactgcgatattcattaagatctatcgaaaggcacgccccttgggtgcgaaacatcttcattgtgactaacggacagatacctagttggcttaatctagataacccacgggtcactatcgttactcatcaggatgtgtttcggaatctgtcgcacttacccactttcagtagtcccgctattgaatcacatatacatcggatcgaaggactctcacagaagtttatatacttaaatgatgatgtgatgttcggaaaagatgtatggcccgatgatttctattctcattccaaaggacagaaagtttacttaacatggccagtacccaactgcgctgaaggatgcccagggtcttggatcaaagatggatattgcgacaaggcttgtaataattcagcatgcgattgggatggaggggattgttctggaaactcagggggaagtcgatacatagccgggggaggagggacaggatccatcggagtcggacagccttggcagttcggagggggaattaactctgtatcctattgcaaccaggggtgtgcaaacagttggctggctgacaaattctgtgatcaggcctgcaatgtgctctcttgtggatttgatgcaggggattgcggacaggatcatttccacgaactctacaaagtaatcctgctgcctaaccagactcattatataataccaaaaggagaatgtctgccctatttctcattcgctgaagtggcaaaaagaggagtcgaaggggcttactccgataatcctattatcaggcatgcgtccatagccaacaaatggaaaacaatacacctcatcatgcattcgggaatgaacgctacaacgattcattttaatttaacattccagaacacaaacgatgaggagtttaaaatgcagatcactgtggaagtggatacacgggaaggacctaaactcaattctactgctcaaaaagggtatgaaaaccttgtatctcccatcactttactgcctgaagcagagatactctttgaagatatccccaaagagaaacggtttcccaaattcaaaagacatgacgtgaatagtacaaggagagctcaggaagaggtgaaaatccctttggtcaatataagtctcctccccaaagatgcccagctgtcgctaaacactttagacctccagctcgaacatggggatattactcttaaagggtataacctctctaagtctgctctccttcgctcttttctcatgaactcacagcacgcaaaaataaaaaaccaggctattattacggacgaaactaacgactcactggtggcaccccaggagaaacaagtgcataaatcaatcctgccaaactctctcggagtctcagaacgactacagcggctgacatttcctgcggtgagtgtcaaagtgaatggacacgaccagggacagaatcctccactcgaccttgaaacaactgcacgcttccgggtggaaacacacactcagaaaacgatcggaggaaatgtaactaaagaaaaacctccttctttgatagtccctctcgagtctcagatgacaaaagaaaagaagatcacagggaaagaaaaggaaaattctcggatggaagaaaacgccgaaaaccatattggagtcactgaggtccttctcgggcggaaattgcagcattatactgattcctacctagggttccttccctgggaaaaaaaaaaatattttcaggatctattggacgaagaagagagtctcaaaactcagcttgcttacttcacagactcgaagaatacaggacgccagctcaaggatactttcgctgattcactgaggtatgtcaacaaaatcctcaactctaaatttgggttcacgagtaggaaagttcccgctcacatgcctcatatgatcgatagaatagttatgcaggaattacaggatatgttccctgaagaatttgataaaacaagttttcataaggtgagacattctgaagacatgcagtttgcgttcagttatttctattatctgatgtctgcggtccagcctttgaatatttcccaggtgttcgatgaagtggatactgatcagtctggagtcctgagtgatcgggaaattaggacactcgccacaaggatacacgaactccctctgagtctgcaggatctaactgggctcgaacatatgttaataaactgtagtaaaatgttacccgcagatatcactcagctaaataacatcccccctacacaggagtcttattacgatcctaatcttccaccagtgacaaaatccctagtgactaattgcaaaccggtaacagataagatacataaagcatataaagataaaaacaaatatcggttcgaaattatgggggaagaggaaatcgcatttaaaatgataaggacaaacgtctcccacgtcgtcggacagctggatgatatccgcaaaaaccctcgcaaatttgtatgtcttaatgataatatcgatcacaaccacaaagatgcccaaacagttaaagccgttctaagggatttttacgaatctatgtttccaataccttcacagttcgaactgccacgggaatatcggaacaggtttttacatatgcatgaacttcaggagtggagagcttaccgggataaattaaagttctggactcactgcgtgctcgccacacttataatgttcactattttttcattctttgccgaacagctaatagccctgaaaagaaagatctttcccagacgccgcatccacaaagaagcgtcacccaacagaatccgggta

SEQ ID NO: 16996 - DNA, 3768 bp, synthetic construct
  misc_feature 1..3768: note = source = /note="Description of Artificial Sequence: Synthetic coding sequence"
  source 1..3768: mol_type = other DNA
atgctattcaagctgctacagcgccagacttatacctgtttgagccatcgctacggactgtacgtctgttttctcggggtggtggtgactattgtctctgcttttcagttcggagaggtggtgttggagtggtcacgtgatcagtatcacgtgctgttcgacagctatagggacaacattgctggtaagtctttccaaaatcgcctctgcctgccaatgccgattgatgttgtgtatacttgggttaacggtacggatctcgagcttttgaaagaactgcagcaagtccgagagcaaatggaagaagagcagaaggccatgcgcgagatcctgggaaaaaacacgaccgaaccaaccaagaagtccgagaagcagttggaatgtctactgactcactgtataaaggtaccaatgctggtcttggaccccgcactcccagccaatatcactctgaaggatcttcccagtctgtatcccagtttccattccgccagcgatatctttaacgttgcgaaaccaaaaaatccttccactaacgtaagtgttgtggttttcgactcgaccaaagacgttgaggacgcacactcaggccttcttaaaggaaacagtagacagacggtgtggcgcggctaccttacaaccgacaaggaggtgcccgggctcgtgcttatgcaggatctggcatttctctctgggtttccacctacattcaaagagacaaaccagcttaagacaaaactcccagagaacctctcaagcaaagtaaagctgttacagctgtattcagaagcttccgtcgccctgctgaaactgaataatccgaaagattttcaggagctgaacaaacagaccaaaaagaacatgactatagacggcaaggagttgacaatctcgccggcgtaccttttgtgggacctctcagccatcagccagtccaagcaggacgaggatatctccgcaagccggttcgaagataatgaggagctgagatatagcctccgctccatcgaaagacacgctccctgggtgagaaatattttcattgtgacgaatggacagataccttcctggttgaatctggataaccctcgggtgactatagtgacccaccaagatgtgttcaggaacttatcccatcttcctacattttcgtctcctgccattgaaagccacattcatagaatcgaaggactttcgcagaagttcatttacctcaatgacgatgtgatgttcggaaaggacgtgtggcctgatgacttctactcccactccaagggacagaaggtctatctaacatggcctgtccctaactgtgcagagggctgccctggtagttggatcaaggacgggtattgtgataaggcttgcaataatagcgcctgcgattgggacggaggggactgctccggaaattcgggcggttcacgctacatagccggcggaggcgggactgggtccatcggcgtaggtcagccatggcagttcggaggcggcattaattctgtgtcgtattgtaatcagggttgtgctaacagttggctagcagataagttctgcgatcaggcttgtaatgtgttaagctgtggtttcgatgctggtgattgtggccaagaccatttccacgagctgtacaaggtgatcctactgcccaaccaaacgcactatatcatcccaaaaggcgagtgtctaccgtacttctcgttcgcagaagttgcaaaaaggggcgtcgagggggcttatagcgataatcccatcatacgccatgcctcaatcgccaataaatggaagactatccatctgattatgcattctggtatgaatgcgaccacaattcacttcaacctcacctttcagaatacaaacgacgaggagttcaagatgcagattaccgtggaggtggatacaagagaaggacctaaactgaactcgaccgcgcaaaagggctatgagaacctagtgtctccgatcacgctgctgcctgaagcggaaattcttttcgaagatatccccaaagagaagagatttcccaagtttaagcgacacgacgtgaacagcactaggagggcacaagaggaggtgaagatccccctcgtgaatatctccttgttgcccaaagatgcacagttaagcctcaacactctagacctccagttggagcacggcgacataacgttaaagggatataacctgagcaagtccgctctgctccgctcattcctgatgaactcccagcacgcgaaaataaaaaaccaggccattattaccgatgaaaccaacgattcgttggtggccccacaggaaaagcaggtgcataagtccattctgcccaattcccttggggtgagtgagagattgcagcgattgacgttccccgcagtaagcgttaaggtgaacggacatgaccaggggcagaacccaccgctggaccttgagactaccgctagatttcgtgtggaaacccacactcaaaagaccatcggggggaatgtgacgaaggaaaagcctcccagcctgattgttcccctggagagtcagatgacaaaagagaagaagatcacagggaaagagaaagaaaacagccgcatggaggagaatgctgagaaccacatcggcgtcacggaggtgctcctaggccgtaagctccaacattacacagactcatacctagggttcctgccctgggagaagaagaagtacttccaggacctgttggatgaagaggagagcctgaaaactcagctggcttacttcactgattccaagaacactggccgccaactcaaagatacttttgcggactccctcagatacgtgaataagattcttaattccaaattcgggtttacctcccgtaaagtccctgcgcacatgccgcacatgattgacaggatcgtgatgcaggagctgcaggatatgttccctgaagagtttgacaagacctcttttcacaaagtgcggcacagcgaggacatgcagttcgccttttcctatttctactatctgatgtccgccgtgcagccactgaacatctcacaagtgttcgacgaagttgacaccgaccagagtggagtacttagcgaccgagagatcaggacgcttgctacccgcattcacgagctgcccctttccctgcaagacttgaccggcctggagcatatgctgattaactgttctaagatgctccctgctgatataactcagctgaataacataccaccaacccaggagtcctactatgaccctaacttaccccccgtcaccaagtcactggttacaaactgcaaacccgtgaccgataaaatccacaaggcctacaaagataaaaataaataccggttcgaaataatgggggaggaggaaatcgccttcaagatgatacgcactaatgtctcgcacgtagttggtcagctggatgacattcgtaaaaaccctcggaagtttgtgtgcttaaatgataacattgaccacaaccacaaagatgcccagaccgtgaaggctgtgttgcgtgacttctacgagtccatgttccccataccctcccagttcgaactaccgcgggagtataggaacagatttctccacatgcatgaactgcaggaatggagggcctacagagataaactgaagttctggacacattgcgtcttggctaccctaattatgttcacaatcttcagtttttttgctgaacaactgatcgcgcttaagcgaaaaattttccctcgtcggaggatccacaaggaggcaagccctaatcgcattagagtt

SEQ ID NO: 16997 - DNA, 3768 bp, synthetic construct
  misc_feature 1..3768: note = source = /note="Description of Artificial Sequence: Synthetic coding sequence"
  source 1..3768: mol_type = other DNA
atgctgtttaaattgctgcagcgccagacgtatacctgcctgtcgcaccgctacgggctgtatgtgtgctttctgggtgtcgttgtgactatcgtcagcgccttccagtttggtgaagtggtgttggagtggtcacgtgaccagtaccacgttctgttcgacagctatcgtgacaacatcgccggaaaatctttccaaaaccgattgtgcctgccgatgccaattgacgttgtgtatacttgggtcaatggaactgaccttgagctgttgaaggagcttcaacaagtgcgcgaacagatggaggaggagcagaaggcgatgcgcgagattttggggaagaacaccaccgagccgaccaagaaatccgagaagcagctggagtgcttactgacacactgtatcaaagtgccaatgctggtcctggacccggcgctgcctgcgaacatcaccttgaaagatttgcccagcttatatccatcgttccacagcgcctccgacattttcaacgtcgccaaaccaaaaaatcctagcaccaacgtgagcgtggtggtgtttgactccacgaaagacgtcgaagatgctcacagcggtctgctgaaaggaaatagccgccagacggtttggaggggttacctgacaactgacaaggaggtgcctggtctagtgctgatgcaggacctcgctttcctgagcgggttcccaccgacgtttaaggagaccaatcaactaaaaacgaagctgcctgaaaatctgagcagcaaagttaagttgctgcaactgtacagcgaggccagcgttgctttgctgaagctgaacaatccaaaggattttcaggaattgaataagcaaaccaaaaaaaacatgacgattgatggtaaagaactgaccatctccccagcgtatctgctgtgggacttgtccgccatttcccaaagcaagcaggacgaggacatttcggcttctagatttgaggataatgaggaactgcgctactcacttcgcagcatcgaaagacacgccccatgggtgagaaatatttttatcgttaccaacggccaaatcccatcctggctgaatttggacaacccgcgcgtaaccatagtgacccatcaagatgtcttccgaaacctgagccacctgccaacctttagctctcctgctattgagagccacatccataggatcgaaggtttgagccagaaatttatttacttgaatgacgatgtgatgttcggaaaggatgtatggccggatgacttctactcgcatagcaaagggcagaaggtttatttgacatggccagtgccaaactgcgccgagggctgtccgggtagctggattaaggacggctactgcgacaaggcttgtaacaactcagcgtgcgattgggacggcggagattgcagcggcaactcagggggcagcaggtatatcgctgggggcggtggtaccggtagcatcggcgtgggccaaccttggcaatttggcgggggcatcaatagtgtgagctattgtaaccaaggttgtgcaaacagctggctggcggataagttctgcgatcaggcctgtaacgtcctgagttgcggtttcgatgccggcgattgcggacaggaccattttcatgagctatataaggtgattttgctgccgaaccaaacgcactacatcatccccaagggggagtgtctcccatatttcagcttcgcggaggttgctaagcgcggcgtggagggggcgtacagcgacaaccctatcatccgtcacgcgtccatcgccaataaatggaaaacaatccatttgattatgcacagcggcatgaacgccacgaccatccactttaacttgacttttcagaacacaaacgacgaggagttcaagatgcaaatcactgtagaggttgacacccgcgagggccctaaattaaatagcaccgctcagaagggatatgagaacctggtgtccccaattactttattgcctgaggccgaaatcctgtttgaagacatcccgaaagagaaacgcttcccaaagtttaaaagacacgacgtaaacagcacacgtagggcgcaggaggaagtgaaaattccgcttgttaatattagcctgttgcctaaagatgcacagctcagcctgaatacgctggatctccaattggagcacggcgatataactctgaagggatacaatctgtctaaaagcgcgctgctgcgcagcttcctaatgaactctcaacacgccaagattaaaaatcaagctattattacggacgagaccaatgacagcctggtggccccgcaggagaagcaggtccataagtcgatcctgccaaattctctgggtgtgtctgagcgcctgcagagactgacctttccggcagtgtccgtgaaggtgaatggtcacgaccagggtcagaaccctccgctggacctggagacgacggcccgcttccgcgttgaaacccacacgcaaaagaccattggtggcaacgtgacgaaagaaaagcctccatccctgattgttcctctggagagccagatgaccaaagaaaaaaaaatcaccggtaaggaaaaggagaattctcgaatggaggaaaacgccgagaatcatatcggtgtcaccgaagttctgctgggtcgaaagttgcaacattacaccgactcctatctgggctttctgccttgggaaaagaaaaaatattttcaagatctgctggacgaagaggagagtctgaagacccaactggcatatttcaccgacagcaaaaacacaggcagacagttgaaggatactttcgcagatagcctccgctacgtcaataagatcctgaattctaagttcggcttcacctctcgcaaagtcccggcgcatatgccgcacatgatcgatcggattgtcatgcaggagctccaggacatgtttcccgaggagttcgacaagaccagctttcataaggtccgacatagcgaggatatgcaattcgcgttctcgtacttctattatctaatgtctgccgtacaaccactgaatattagccaagttttcgacgaggtagacactgaccagtccggggtgctgagcgaccgcgagatccggactctggcaacgcggatccacgaactgccactgagcctgcaagatctgacaggtctcgaacatatgctgatcaattgttctaaaatgctgccggctgatattacccagctaaacaacatcccaccgactcaggagagctactatgacccaaacctgccaccggtgaccaaatcattggtgacgaactgcaaacccgtcaccgataaaatccacaaagcttacaaggataaaaacaaatataggttcgagataatgggcgaggaagaaattgcgtttaagatgattagaaccaatgtctctcacgtcgtcggtcagctggacgatataaggaagaacccacgcaagtttgtgtgcctaaatgacaacatcgaccacaaccataaagacgcgcaaaccgtcaaggccgtgctgcgtgacttctacgaaagtatgttcccgatcccgtcccagtttgagctgcctcgcgagtatcgaaaccggttcctgcacatgcacgagttgcaggaatggcgcgcttaccgagataagctgaagttctggacccactgcgtgctggccacgctgatcatgttcactatattctccttctttgctgagcagctgatagcattgaagcgcaaaatttttccacgccgccgcatccacaaggaggctagcccaaacaggattcgtgtt

SEQ ID NO: 16998 - DNA, 3768 bp, synthetic construct
  misc_feature 1..3768: note = source = /note="Description of Artificial Sequence: Synthetic coding sequence"
  source 1..3768: mol_type = other DNA
atgctatttaaactactgcagcgacagacttacacctgcttgagtcatagatatggtctatacgtgtgctttctcggcgtggtagtaactatagtaagtgcattccagttcggagaagtggtgctcgaatggtcccgagatcaatatcatgtcctgttcgatagctacagggataatatcgctgggaaatcgtttcagaacaggttatgtttgccaatgcctatcgatgttgtttatacatgggtgaacgggacggatctggaactgctaaaagaattgcagcaggtcagggagcagatggaggaggagcagaaagcaatgcgcgagatattggggaagaatacaaccgaacccactaagaaaagcgaaaagcagctcgagtgtctcctgactcactgcataaaggttcccatgctggttcttgatcctgcgctccctgcaaacatcaccctgaaggacctaccaagtttgtacccgtcttttcacagcgccagtgacatattcaacgtagccaaacctaagaaccctagcacgaatgtgtctgtggtcgtgttcgacagtactaaagacgtggaggacgcgcattccggactgctgaagggaaattctaggcagaccgtatggcgcggttaccttacaactgacaaagaagttccaggcctggtcctgatgcaggatctcgcgtttctgtcaggattcccacccacattcaaggagacaaaccagttgaaaaccaagctacccgagaatctaagctccaaggtcaaactactccaactgtattcagaggcgtcagttgcactcttgaaactgaacaatcccaaggacttccaggagctaaacaagcagaccaagaagaacatgacaattgacggaaaagagttgacaatctccccagcctacctcttgtgggatctaagcgcaatttcacaatcgaagcaagacgaggatattagtgccagtagatttgaggataacgaagaactgcgctactccctccgcagcatagagcgccatgccccgtgggtgcgcaatatctttatcgtgacaaatgggcagatcccttcctggttgaacctggataatccccgggtgactattgttactcaccaggacgttttccggaatctcagtcatcttccaactttcagtagtcctgcgatcgaaagccacatacacaggatcgaaggcttgtcccagaagtttatttatctgaatgatgatgtcatgtttggtaaagatgtctggcccgacgacttttatagtcattcaaaggggcagaaggtgtatttgacctggcccgtgccaaattgtgccgagggttgccccgggtcttggatcaaggatggatattgtgataaagcatgcaataactctgcgtgcgattgggatggaggagactgttctgggaattcggggggcagtaggtacatcgctgggggcgggggcaccggatccattggtgttgggcagccatggcagtttggcggcggaattaacagtgtgtcctattgtaatcaagggtgcgctaactcctggctggcagataagttttgcgatcaggcatgcaacgtgctttcttgtggctttgacgcaggggattgcggccaagaccactttcatgagctttacaaggttatcctcctcccgaaccagacacactacatcattccaaagggggagtgtcttccttattttagctttgccgaggtggccaaaagaggggtggagggggcatacagcgataatcctataattcggcacgccagcattgccaacaagtggaagaccatccatttgattatgcactccgggatgaatgctaccactatacacttcaatctgaccttccaaaacaccaatgacgaggaatttaaaatgcaaataaccgtcgaggtagataccagagaaggacccaagttaaacagtacagcacaaaaaggctatgaaaacttagttagtcctatcaccctgctaccggaggccgagatcctctttgaagatattcccaaggagaagaggtttccgaaattcaagcgccacgacgtaaactctacccgcagagcccaggaggaggtcaaaattcctttggtaaacatcagcttgctcccaaaggacgcccaactgagcctgaataccttggacctacagcttgaacacggcgacattacgttgaagggctataacctcagtaagagcgcacttcttcgatcttttttaatgaactcacagcacgccaaaattaagaaccaggccatcatcaccgacgaaaccaatgacagcctggttgcaccccaagagaagcaggtgcacaaatccattctccctaacagcctgggggtatctgagcgcctgcagcgacttacctttcctgcagtgagtgtaaaagtgaatggacacgaccaggggcagaacccccctctggacctggaaaccaccgcccggttccgagtagaaacccatacacagaaaacaatcgggggtaatgtgaccaaagagaaacctcctagtctcattgtccctctggaaagccagatgactaaagagaaaaagatcacagggaaggagaaagagaattcgagaatggaagagaatgctgagaatcacattggggtaaccgaggtgctgctgggccgaaaactccagcactacacagattcatatttaggctttctgccctgggagaagaaaaaatattttcaggacttactcgacgaagaagaaagtctcaagactcagttagcttacttcaccgattctaagaacacaggacgccaactcaaggacactttcgcggactccttgcgatatgtgaacaaaatcctaaattctaaattcgggttcacgtccaggaaggtgccagcccacatgccccatatgattgatcggatcgtgatgcaggaactccaggacatgtttccagaagagttcgataagacatccttccacaaagtgagacactccgaggacatgcaatttgctttctcctatttttattacctgatgtctgccgtgcagcctcttaacataagtcaggtgttcgatgaagttgacacagaccagtccggggtactgtctgatagggagattaggacgctagccaccaggatccatgagctccctttatcgctccaggacctcacgggcctggagcacatgctgatcaactgctcaaagatgctgccagccgatatcacacagcttaacaacattcctcctacccaggagagctactatgatccgaacctgcctccggttaccaagagtctcgtcactaactgcaagccagtaacggacaaaatccataaagcatataaagacaaaaataagtatcgcttcgaaatcatgggcgaggaggaaatcgccttcaagatgataaggacaaacgtgtcccacgtggtgggccagctcgatgatatcaggaagaatccaaggaaattcgtctgtctaaacgacaatattgatcataaccataaggatgcacaaaccgtgaaagccgtcctgagggacttctacgagagcatgttccctataccgtcccagtttgagctgcccagagaatatcgcaatcgatttctccacatgcatgaactgcaggaatggagggcctacagggataagctgaaattctggacccattgcgtgttggctacactcatcatgttcaccatattttccttttttgctgagcagctgatagctctgaagcgaaaaatcttccccagacgacggatccacaaggaggcaagtccaaatagaattcgcgtg

SEQ ID NO: 16999 - DNA, 3768 bp, synthetic construct
  misc_feature 1..3768: note = source = /note="Description of Artificial Sequence: Synthetic coding sequence"
  source 1..3768: mol_type = other DNA
atgttattcaaattgctccaacgtcagacctacacctgcctatcgcatcgttacggattatacgtttgcttcttgggcgttgtcgttactattgtgtcggcgttccagttcggtgaggttgtcttagagtggagccgtgatcagtatcatgtcctcttcgattcgtaccgagataatattgccggtaaaagcttccaaaacagattatgccttcctatgccaatcgatgtcgtttacacttgggttaatggaaccgatttggaactcttgaaagaattacaacaggtaagagagcaaatggaagaagaacaaaaagcaatgagagagatcctgggtaagaatacaacagagccaactaagaaatcagaaaaacaacttgaatgtctgctcacacattgcattaaggtaccaatgcttgttcttgatccagcattgccagctaatatcacattgaaggatttgccgagtctatacccatcctttcattctgcttcagatatttttaatgttgctaagccaaaaaacccaagcactaatgtatcagtggtggtatttgatagcaccaaggatgtcgaagatgctcattctggattacttaaagggaactctcgccaaactgtttggagaggctaccttactaccgataaagaggtgccaggattggttctcatgcaagacctcgcctttctgtccggcttcccaccaacgttcaaagaaaccaaccaactcaagactaagcttccagagaatcttagttctaaggtcaaattgttacaactttactcggaagcttccgtcgccttattgaaacttaataacccgaaggatttccaggaattgaataagcaaacaaagaaaaatatgacgattgatggtaaagaactaacgatatcacctgcttacctgctgtgggacttaagtgcaatctcacagtcgaagcaggatgaagatatttcggcatctcgattcgaagataacgaagaacttcgatattcgcttcgatcaatcgaacgccatgctccatgggttcgaaatatttttatagttactaatgggcagataccatcgtggctcaatcttgacaatccacgggttacaattgtaacacaccaggatgttttccgaaacctctcccatttgccgacattttcatcaccggcgattgaatctcatattcatcggattgaaggcctatcacaaaagttcatttatcttaatgacgatgttatgttcggaaaggatgtttggccagacgatttctactctcacagcaaaggacagaaggtctatttgacatggccagttccaaactgtgctgagggatgcccaggcagttggattaaggacggttattgtgacaaagcttgtaacaattcagcttgtgattgggatggaggggactgttctggaaattcgggaggatcacgatatatcgctggaggaggtggaacagggtctattggtgtgggccaaccatggcaattcggaggggggattaatagtgtgagttactgcaaccaaggatgtgctaactcatggttagcagataaattttgcgatcaagcgtgcaacgttctgtcgtgcggattcgatgctggggattgcggacaggatcattttcacgaactttacaaggtcatattgcttccaaaccagactcattatattatcccaaaaggtgagtgtttgccctatttctctttcgctgaggtggccaaacgaggagttgagggtgcttactcagacaatccaattattcggcatgcttcgattgctaacaagtggaagaccattcatttaattatgcacagtggaatgaatgctacaacaatccattttaacctgacgtttcaaaatacaaacgatgaggaatttaagatgcaaattacagttgaagtcgatacgcgagagggtccaaagttaaatagcaccgcacaaaagggctacgaaaacctggttagcccgatcacattgctgccagaagcggaaattttgtttgaagatatcccgaaagaaaaacgatttccaaaatttaaacgccatgatgttaatagtactagacgagctcaagaggaggtcaaaattccactcgtcaacatctcattgctcccgaaagatgcacagctttcactaaacacattagatctacagcttgagcacggagatattacacttaagggatataatctgagcaaatccgctctcttaagaagtttccttatgaatagtcagcatgctaaaattaagaatcaagcgattatcacagatgagaccaatgatagcctagtggcacctcaagaaaaacaggttcataaaagcatccttccaaattctctcggagtatccgaacgacttcaacgcctaacattccctgctgtatcagtcaaggtaaatggacatgatcaaggtcaaaatccacctcttgatcttgagacaacggctcgattccgagtggaaacacatacacagaagactattggcggtaatgtaactaaggaaaaaccaccttcgttaatcgtcccactagaaagccaaatgaccaaggaaaaaaaaattacaggaaaagaaaaagaaaacagccgtatggaggaaaatgctgaaaaccatattggagtcacggaagttttgctgggacgtaaattacaacattacactgattcctatcttggattcctgccatgggaaaaaaaaaaatatttccaagatcttttggatgaggaagagtcgcttaaaacccaacttgcctattttactgattcaaaaaatacaggccgtcagctcaaagatacatttgcggattctttgcgatatgtaaacaaaattttaaattcgaaattcggttttacatcacgaaaagtgcctgcacatatgccgcacatgattgatagaatcgtcatgcaagagctacaagatatgttcccagaagaattcgataaaacatcctttcataaagtccgacactcagaagatatgcaatttgctttctcttatttctactacctcatgtctgcggttcagcctctcaatataagccaagtgttcgatgaagtagatacagatcagtctggagttttgagcgatagagagattagaaccctcgcgaccagaattcatgaacttcctttgtctcttcaggatctcacaggtctggaacacatgttaattaattgttcaaaaatgctccctgcagatatcacacagttgaacaacattccaccgacacaagagtcttactatgatccgaatcttcctccggtaactaaatcacttgttactaattgtaaaccagtcaccgacaagattcacaaagcatataaggataaaaataaatatcgcttcgagatcatgggagaggaagaaattgcttttaaaatgatacgtaccaatgtgtcacatgttgtcggtcaacttgatgatattcgaaagaaccctcgaaagttcgtctgtttaaatgataatattgaccataatcataaggacgcacaaactgttaaagcagttttgcgggatttttacgaatcgatgttccctattccgtcacaatttgaattaccaagagaatacagaaatcgttttttgcatatgcatgaattgcaagaatggcgagcttacagagataaactcaagttctggacacattgtgtactcgccacactcatcatgttcactattttctcgttttttgctgaacaattgatagcacttaagcgaaagatctttccacggcgtagaatacacaaggaagcgtcacctaatcgaattagagtt

SEQ ID NO: 17000 - DNA, 3768 bp, synthetic construct
  misc_feature 1..3768: note = source = /note="Description of Artificial Sequence: Synthetic coding sequence"
  source 1..3768: mol_type = other DNA
atgttatttaaactgctccaacgacaaacttacacatgtttaagtcataggtatggcctgtacgtgtgttttctcggggtggttgtgacaatagtatccgcctttcaattcggggaggtagttctcgagtggtcccgagaccagtaccatgtccttttcgactcctaccgagacaatatcgctggaaaatcatttcagaatcgattgtgcctgccaatgccaatcgacgttgtgtatacatgggtcaacggaacagatcttgaactcctaaaagagctccagcaggtgcgagagcagatggaggaagagcagaaagcgatgagggaaatcctgggtaagaacacgacagaacctaccaaaaagtctgagaagcaactggaatgcctgctgactcactgcataaaagtccccatgctggtgttagatccagcgttgccagcaaatataactctgaaagacctgccaagcctgtacccttccttccactccgccagtgatatatttaacgtggccaagccaaagaacccttccacaaacgtctccgtcgttgtcttcgactctactaaagatgtggaggatgcgcactctggactcctcaagggtaattcaagacagacagtgtggaggggctatctcaccacagacaaagaggtgccagggctcgtcctcatgcaggacctcgccttcttaagcggctttccacctacctttaaagaaacaaatcaattgaagacaaagctgcccgagaacctcagctccaaggtcaaattgttacagttatactctgaggcgtctgtggcgcttttaaaattgaataaccccaaggacttccaagaactgaataaacagactaagaagaatatgactatcgacggcaaagagctgaccatcagtccggcttacctgctctgggacttgtcggcaattagtcagtccaagcaggacgaagacatatcagccagccgtttcgaagacaacgaagaactgaggtattcacttaggtccatagaaaggcatgcaccctgggtgcgaaacatttttatcgttaccaacggccagattccatcctggttgaatctcgacaatccaagggtcacgatcgtaacccatcaagacgtgtttaggaatttgtcacacttgccgacctttagcagccccgcgatagaaagtcatatccataggattgagggtttgtctcagaaattcatctacttgaacgatgatgtgatgtttggtaaggacgtttggcccgacgacttttactcccattccaaagggcagaaagtctatttgacatggccggtgccaaactgtgccgagggctgccctggatcttggatcaaagacggctactgcgacaaagcctgtaacaattctgcttgtgattgggatggcggggactgttctggaaactccggaggctctagatatattgccggcggagggggtaccgggtcgatcggggtgggccaaccatggcagttcggtggggggatcaatagtgtgtcctattgcaatcaggggtgcgctaattcctggctggcggacaagttttgtgatcaggcttgcaacgtactttcctgtgggttcgacgccggcgactgcggccaggaccactttcatgagctgtacaaagtaattctgttgcccaatcaaacccattacatcatcccaaaaggtgagtgcctgccctatttctcgtttgcagaggtggccaaacgaggtgtggaaggtgcgtacagtgataatccaattatccgacatgcgtccattgccaataagtggaaaactattcacctgattatgcacagcgggatgaatgcgacaacaattcactttaacttgacttttcagaacaccaatgacgaagagttcaagatgcagatcactgtagaggtggacacccgagagggtccaaagctcaatagcacagctcaaaaaggctacgagaacctcgttagcccaataaccctgctacccgaagctgagattctgttcgaggacatccccaaagaaaagagatttccaaagttcaagagacacgacgttaattcaactagaagagcgcaggaagaggtaaaaattcctctcgtgaacatcagcctccttcctaaagacgcacagttgtctctaaacaccttggacctgcagctggaacatggagacataaccttaaaagggtataacctgagtaaaagcgctctcctgcgttccttccttatgaatagccagcatgccaagatcaagaaccaggcaataataaccgatgagaccaatgatagccttgtagctccacaggagaaacaggtacataaatcaattctgcctaactccttgggggttagtgagcgactccaaaggctcacttttcccgccgttagcgtgaaagttaacggccatgatcagggacagaatccgccactagacctggaaactacagctagattcagagtagagactcatacccagaagactatcggtgggaatgttaccaaggaaaaacctcctagtctgatagtacctctggaatcccagatgactaaggaaaaaaaaattacaggaaaggagaaggagaattcccgaatggaagaaaatgccgagaaccacattggtgtaaccgaagtgttattggggcgaaagctgcaacactataccgactcctatctgggctttttgccatgggaaaagaaaaagtattttcaggacctgttggacgaggaagaatctctgaaaacacaactggcatattttactgattcaaaaaatacggggaggcagctgaaggatactttcgccgactcactccgttacgttaacaagatcctgaacagtaagtttggattcaccagccgtaaggttcccgcccacatgccccatatgattgatcgaatcgtcatgcaggaactgcaggatatgtttccggaagagttcgataagacctccttccacaaagtcagacactctgaggacatgcagtttgcgttctcgtacttttactacctcatgtctgcagtgcagcccttgaacatatcccaggttttcgacgaagttgacaccgatcagtcaggagtgctgagcgatcgcgaaattagaacgctggccactagaatccacgagttacccttaagtctgcaggacctaactggccttgagcacatgctgatcaattgttctaagatgcttcctgcagacataacccagctgaataacattccgccgacccaagagtcctattatgaccctaaccttccccctgtgaccaaatctttggtgaccaattgtaaaccggtgactgacaaaattcacaaagcttataaggataaaaataaataccgtttcgaaatcatgggcgaagaggagattgctttcaaaatgatccgaactaatgtgagccacgtcgtgggtcagttagatgacattaggaagaacccgcgaaagttcgtatgtctgaatgataatatagaccataatcataaggacgcccaaacagtgaaggcagtgctgcgagacttttatgaatccatgttccccatcccgagtcagtttgagctgcctagagagtacagaaatcgttttctccacatgcacgagttgcaggaatggcgtgcatatcgagataaactgaaattttggactcactgtgtcctggccaccctgatcatgtttacaatatttagtttttttgccgagcagctgatcgctctgaaaaggaagatcttccccaggagaaggattcataaggaagctagccccaacagaatcagagta

SEQ ID NO: 17001 - DNA, 3768 bp, synthetic construct
  misc_feature 1..3768: note = source = /note="Description of Artificial Sequence: Synthetic coding sequence"
  source 1..3768: mol_type = other DNA
atgctctttaagctgctgcaacgacagacctacacctgcttgagtcaccgctacggcttgtacgtctgcttcctgggtgttgtggtgactattgtgtccgccttccagttcggcgaggtggttctggagtggagccgggaccagtaccatgtattgtttgattcgtaccgggataacatcgccggcaaatccttccaaaatcgcctgtgtctacccatgccaattgatgtcgtttatacatgggtgaacggtaccgacctagagttgctgaaggaattacagcaggtacgcgagcagatggaagaggaacagaaagccatgagggaaattcttgggaagaatacgacggagccgaccaaaaagagcgagaaacaactggagtgtctcctcactcactgtataaaggtgcccatgcttgtattagatccggctctcccagctaatattaccttgaaggacctcccaagcctgtatccctcgttccacagtgctagcgatatctttaacgtcgctaagccgaagaacccgagtacgaatgtctctgtggtggtatttgactccaccaaggatgttgaggatgcccactcagggttgctgaaaggcaattcgagacaaactgtgtggcgtggatacctgactactgataaggaggtcccaggcctcgtgctgatgcaggatctggcgtttttatcgggcttcccgccaacgtttaaggagacgaaccagctgaagacgaagctgccggagaacttatcgtcaaaagtcaagctactgcagctctactccgaagccagcgttgctctgcttaagctgaacaacccgaaggacttccaggagttgaataaacaaacgaaaaagaacatgacaatagatggaaaggaacttaccatatcacccgcctacctgctgtgggatctaagcgctatctcgcagtcaaagcaggacgaggatatttcggcgtcccggttcgaagacaatgaggagcttcgctatagcctccgctcgattgagcgtcatgctccctgggtccgaaacatctttatcgttactaacggccagatcccctcctggctcaaccttgacaatccccgagtgacgatagtgacccatcaggacgtcttccgcaatctatctcacctgccaactttctcgtcgccagcaattgagtctcacatccaccgcatcgagggtctctcgcagaagtttatctatttgaatgatgatgtgatgttcggcaaagacgtctggcctgacgatttttattcccatagcaagggacagaaggtgtacctgacctggccagtgccgaactgcgcggagggttgtcccgggtcttggatcaaggatggctattgcgacaaggcctgcaacaattcggcgtgtgattgggacggcggcgattgctcaggcaatagcggagggtcacgttacatcgctggcggaggcggcacaggaagcatcggagtaggccagccgtggcagttcggaggcggcattaacagtgtgagttattgcaatcagggctgtgctaattcgtggcttgcagacaaattttgcgaccaagcctgcaatgtgttgtcttgcggattcgatgcgggtgactgtggccaggatcattttcatgagctgtataaggtcattctcctgcctaaccaaacacattatatcattccgaagggtgagtgccttccgtatttcagcttcgctgaggttgcaaagcgaggggtagagggcgcatacagtgacaatccgattatcaggcatgcaagcattgcgaataagtggaagaccattcatctgataatgcactccggaatgaacgcaacaacgattcacttcaatttgactttccagaatacaaatgacgaagagttcaagatgcagattactgtggaggtggacacgcgagagggccccaaactgaactccacagcacagaaaggttacgagaacctggtctcccccatcactctgctgccagaggcggagatcttattcgaggatattccaaaggaaaagcgattcccgaagtttaagagacacgacgtcaactctacccggcgggcccaggaagaggtcaagatccccctggttaacattagcctcctcccaaaggatgcccagttgtcactgaacacactggacctacagctcgaacacggcgatattacactgaagggttacaatttgtccaagtcagcactgctgcgctcctttctgatgaatagccagcacgcgaagattaagaaccaggcaattattaccgacgagacaaatgattctttggtggcaccacaggagaaacaggtccacaaaagcatactacccaattcgctgggggtgtccgagcgcctgcaacggttgacgttcccggccgtttcggtgaaggttaatggccacgaccagggccaaaacccaccactcgatttggaaactactgcacggttccgcgtggagactcatacgcaaaaaactatcggcggcaacgtgacgaaggaaaaacccccaagtctaatcgtgcccctggaaagccagatgaccaaggaaaagaaaattactgggaaagaaaaggagaatagccgcatggaagagaacgcagagaaccacatcggcgtgaccgaggtcctgctgggacgtaagctccaacactacacagactcctaccttggcttcttgccttgggagaaaaagaagtacttccaggatctgttggatgaggaagagagcctgaagacgcagctggcatactttacggatagtaagaacaccggaaggcagctgaaggacacgtttgccgactcgctgcgctatgtgaacaaaattctcaattccaagttcggattcacgagcagaaaggttcccgcccatatgccacacatgatagatcgaatcgtgatgcaagaactccaggacatgttcccggaggagttcgataagacgagcttccacaaggtccgacacagtgaagacatgcaattcgcattttcgtacttctactacctgatgagcgccgtccagccgttgaacatctcgcaggtgttcgacgaggtagatactgatcaatcgggtgtcttgtctgatcgagagattcgaaccctggcaactaggatccacgaactgccacttagcttgcaggaccttaccggcttggagcatatgcttatcaactgttcgaagatgctcccagcagatatcacccaactgaacaacattccgcccacgcaagagtcttactatgatcccaacctgccgcccgtcaccaagtcactggtaactaactgcaaaccagtcaccgataagattcacaaggcatacaaggacaaaaataagtaccgcttcgagattatgggtgaggaggagatagcctttaagatgatacgcactaatgtctcccacgttgtcggacagctggacgatattcgcaagaacccgcggaagttcgtttgtttaaacgataacattgaccacaaccacaaggacgcccaaaccgtgaaggccgtccttcgagacttctatgagtcgatgtttcccataccatcgcaatttgaactcccacgggaatatagaaaccgcttcctgcatatgcacgagttgcaagagtggcgggcgtacagggacaagctgaagttttggacccattgcgtgttggccacgctcatcatgttcaccatttttagctttttcgccgaacagcttattgcgctcaagcgcaagatcttccctagacgccgcatacacaaggaagcctcgccgaatcgaatacgagtt

SEQ ID NO: 17002 - DNA, 3768 bp, synthetic construct
  misc_feature 1..3768: note = source = /note="Description of Artificial Sequence: Synthetic coding sequence"
  source 1..3768: mol_type = other DNA
atgctgttcaagttgcttcagcgtcaaacgtacacgtgtctgtcacataggtatggtttgtatgtttgctttttaggagtggtggttactatcgtgtcagcgtttcagttcggggaagttgtcctggagtggtctagagaccagtaccatgtgttgtttgacagctatagggataacattgccggaaaaagctttcagaatcgactatgtctgcctatgcccatagatgtcgtgtacacctgggtgaacggcactgatctggagctgttgaaggagttgcagcaggtacgggagcagatggaagaagaacaaaaagccatgagagagatcctgggcaaaaatacaaccgagccgaccaagaaatctgaaaagcagctagagtgtcttctgacccattgcattaaggtgcctatgctggtgctcgatcctgccctgccggcaaatattacacttaaggatcttccctctctctatccttcatttcattctgcctctgacatcttcaacgtcgccaagccaaaaaatccatctaccaatgttagcgtggttgtgtttgacagtacgaaagatgtggaggatgcacactcggggctgctcaagggcaactcgagacagacggtgtggaggggctacttgaccacggacaaggaagtgcccggattagtgctgatgcaggacctggcatttctctccggcttccctccgacattcaaagagacaaatcagcttaagactaaactccccgaaaacctttcctcaaaggtgaagttactgcagctatattctgaagcttcagttgccctcctgaaattgaacaatcccaaggatttccaagaactgaacaaacaaaccaaaaagaacatgactatagatggaaaggagcttacgataagcccagcctacctgctttgggacctgtccgccatttctcagagtaagcaagacgaggatatctccgcatctagattcgaagataacgaggagttgcgttactcacttagaagtatagaacgccatgctccatgggtaaggaatattttcatcgtcacaaatggtcagatcccgtcttggctgaacctcgataatccaagggtgaccattgttacacatcaggatgtgttccgaaatctgtctcatctgccaaccttctcgtcgccggcgatagagtcgcacattcaccgaatcgaaggtctgtcccagaagttcatctaccttaatgatgatgtgatgtttggtaaagatgtctggcctgacgacttctattcccattcaaaaggccaaaaagtgtacctgacgtggccagtccccaactgtgccgagggctgtccaggaagttggatcaaagatgggtactgtgacaaagcgtgtaataactctgcctgcgactgggacggaggcgattgctccggcaatagcggaggctctcgttatatcgcaggagggggtggtaccggcagtataggcgtcggacagccgtggcagtttggggggggaatcaacagcgtgtcctattgcaatcaaggttgcgccaacagctggctagccgacaagttttgtgatcaggcgtgtaacgtgctcagttgcggatttgatgccggagactgcgggcaggatcattttcacgaactgtataaggtgatcttactgccaaatcagacgcattacataatccctaaaggagaatgcttaccatacttcagctttgctgaggtggccaagcggggagtggagggcgcttacagcgataatcccatcatccgtcacgccagtatagcaaacaagtggaagactattcatttaatcatgcacagtggaatgaacgccactactatccattttaacctcactttccaaaataccaacgacgaagaattcaagatgcaaattaccgttgaagtcgacacaagagagggaccgaagctcaactcaacggcgcagaaggggtacgagaacctcgtatccccaatcactttgttgccagaagcagaaatattgttcgaggacatccccaaggagaagagatttcccaagttcaaacgacatgacgttaactctacacggcgcgcccaggaagaagtgaagatcccattagtcaatatttctctacttcccaaagacgctcagctgtcattaaacaccctagacttacagctggagcacggtgatatcacactgaagggatacaatctttccaagtcagctcttttgcggtctttcttgatgaatagccagcacgccaagattaagaatcaggcaattatcacggacgagaccaacgattcactcgtggcacctcaagagaagcaggttcacaaaagcattctacccaactcgttgggagtgagtgaacgcctccagaggcttacatttccagcagtgtcggtaaaagtgaacggacacgatcagggccagaacccaccgctcgacctagaaaccacagcccgcttccgggtggagacccatacccagaaaacaatcggggggaacgtgaccaaggagaaaccaccctcgctgatcgtgcctctggagtcacagatgactaaggagaaaaagattactggaaaagagaaggaaaatagtcgcatggaggaaaacgctgagaaccacattggagtaacagaggttctcctggggagaaagctgcagcactacaccgattcatacctgggtttcctgccatgggaaaaaaaaaaatactttcaagatctcctggacgaagaagagagccttaagactcagctcgcatatttcactgattccaaaaatacggggaggcaattaaaggatacttttgcagactctctgcggtatgtcaacaaaatccttaacagcaagtttggatttacaagccgaaaggtccctgctcatatgccccacatgattgatcggattgtgatgcaggagctgcaggatatgttcccggaggagtttgataagacctcattccataaggtcagacactctgaagatatgcagttcgcttttagctatttttattacctgatgagcgccgtacagcccctgaacataagccaggtgtttgatgaagtggacactgatcagtctggtgtcctgagcgacagagaaatacgcacgctggctacacggattcatgaactgccccttagcttacaagatttgaccggccttgagcacatgctcattaactgcagtaaaatgctacctgcagatatcacacagctgaataatatccccccaacccaggaaagttactatgacccaaacttgccaccagtgactaaatcactggtgaccaattgtaaacccgttacggataagatccacaaggcctataaagataagaacaagtaccggtttgagataatgggcgaagaggaaatcgcgtttaaaatgatccggacaaatgtttcccatgtggtgggccagttggacgatattagaaaaaacccacgaaagttcgtctgcctgaatgacaatattgaccacaatcataaggacgcccaaacagttaaggccgtgctccgtgatttttacgagagtatgtttcctatcccttcacagttcgaactacctagggagtatagaaaccggtttttgcatatgcatgaactgcaggagtggcgcgcttatagggacaaactgaagttctggacccactgtgtgctggctaccttaatcatgtttaccatcttctccttcttcgcagaacagttaatagctctgaagcgcaagattttccctcgccgaagaatccacaaggaagcttcccctaacaggatcagagtg

SEQ ID NO: 17003 - DNA, 3768 bp, synthetic construct
  misc_feature 1..3768: note = source = /note="Description of Artificial Sequence: Synthetic coding sequence"
  source 1..3768: mol_type = other DNA
atgctatttaaacttcttcaacgtcagacatacacatgtctgtcgcatagatacgggctatatgtgtgctttctgggggtggtcgtgactatagtctctgcgtttcagtttggtgaggtggtgcttgagtggtctcgagatcagtaccatgtgttgttcgattcctatcgcgataatattgcaggcaaaagctttcagaaccggctgtgcctccctatgccaattgacgtcgtatacacctgggtaaatggcactgatttggagctacttaaggaactgcagcaggttcgcgagcaaatggaggaggagcaaaaagcgatgcgggaaatactgggaaagaacaccacggaacccaccaagaaatcggagaagcaactggagtgtctgctaacgcattgtataaaggttcccatgttggttctggacccagcactgccagccaatatcaccctgaaggacctgccatcactatacccatcatttcatagcgcgtctgatatcttcaacgtggcgaaacccaagaacccgagcacaaacgttagtgtggttgtgtttgactccactaaggatgtggaggacgcacatagtgggctgctcaaaggaaactccaggcaaaccgtttggcgggggtaccttacgacggataaagaagtccccgggttggtgctgatgcaggatctggccttcttgtccgggttcccccccacttttaaggagactaaccaactaaaaaccaaactcccagaaaacttgtcttcaaaggtgaaactgcttcagctctactctgaagcatccgtggccctgttaaagttgaataatcctaaggatttccaagagttgaacaaacagactaaaaagaatatgacgatcgacggtaaggagctcactatatctccagcctaccttctctgggacttaagcgccatttcgcaatctaagcaggacgaagacatctcagccagccgctttgaggataacgaggagctgagatacagtctgaggtccatcgagaggcacgccccttgggtacggaacatattcatcgtgacaaacgggcagattcccagctggttgaacctggacaaccctagagtcactatagtgacacaccaggacgtgtttagaaacctcagtcacctgcctacatttagtagtcccgccattgaaagccatatacatcggatcgagggtctgtcgcagaagtttatatacctcaatgacgacgtgatgttcggcaaggatgtatggccagacgatttttattcacattcaaaggggcagaaggtatacctgacctggcctgtcccaaactgcgcagagggatgtccgggttcctggataaaggacggctactgtgacaaggcgtgcaacaatagcgcttgcgactgggacggtggagactgttctggcaactccgggggtagtcgctatattgcaggcggaggcggcactggctcgatcggcgtggggcagccatggcagttcgggggaggcatcaactcagtctcatactgcaaccaggggtgcgccaactcttggcttgctgataaattttgtgatcaggcttgcaatgtgctgagctgtggtttcgacgctggcgactgtgggcaagaccattttcatgagttgtataaggtgatcctgctcccgaatcaaacccattatattatacctaagggggagtgtcttccatacttctcgtttgctgaagtggccaagagaggggtcgagggagcatattccgacaaccctattattaggcatgctagcatcgctaacaagtggaaaaccattcatttgatcatgcattccggcatgaatgccacaactattcacttcaatttgactttccaaaatacaaatgatgaggagttcaagatgcagatcacggtagaggttgacacaagagaagggccaaaactcaattccaccgcccagaaagggtacgagaacctagttagcccaatcacgctgttacctgaggctgaaattcttttcgaggatatcccaaaagagaaacgatttccaaagtttaagagacacgatgtaaattcaaccagacgagcccaggaggaggtgaagatcccactagtcaacatttcattgctcccaaaggatgcccagctgtcactgaataccctcgacctgcagctcgagcacggtgacatcacgttgaaaggttacaacctgtcaaagtcggcactcttgcggagtttcctcatgaactcacagcacgctaaaattaagaatcaagcaatcattaccgatgagaccaacgactcgctcgtcgctccccaagagaaacaagtacataaaagcatccttcctaactccctcggcgtgtcagagcgtctccagagattgacatttcctgccgtttcagttaaagttaatggtcatgaccaaggccagaaccctcccctggatttggagactaccgcgcggtttcgagtggaaacacatacacagaagacaataggcggcaacgtgaccaaagaaaaacccccgagcctgatcgtccccctagaatctcagatgaccaaggaaaagaagataacagggaaggagaaggaaaactctcggatggaggaaaacgcagaaaaccacatcggcgtaacagaggtcctgctcggtagaaagcttcagcactatacagacagctacttggggtttttaccgtgggaaaagaagaagtactttcaagacctactagatgaagaagagagcctgaaaacacagcttgcatattttactgactctaaaaataccggacgccaactcaaagatacatttgcagattccctccggtacgtgaacaagattttgaacagtaagttcggcttcactagcaggaaagtcccggctcatatgccacacatgattgacagaattgtcatgcaggaactgcaggacatgtttccggaggagttcgataaaactagcttccacaaagtccggcatagtgaggacatgcagttcgccttctcttatttctactatcttatgagcgcagtccagcctctaaacataagtcaagtgttcgatgaggtggatacagatcaatcgggcgtcttgtccgaccgggaaatccgcaccttggctacgagaattcacgagttacccctgtctttgcaggacctgactgggttagagcacatgttgattaactgttccaaaatgttgccagcagatatcacccagctcaataacatcccccccactcaagaatcctactatgacccgaatttgccacctgtgacaaagtccttagtcactaattgtaagcctgtaaccgataagattcacaaagcctacaaggacaagaataaataccgtttcgagataatgggagaggaggaaatagctttcaagatgataaggacaaacgtgtctcatgttgtcggccaattggatgatatacggaagaaccctcggaagttcgtttgcttgaatgacaacatcgatcacaatcacaaggacgcccaaacagtgaaggccgtgctgagggacttttatgagtccatgttccccattcccagccagtttgagctgccaagggaatataggaacaggtttctacatatgcatgagttgcaggagtggcgggcctacagggataagttaaaattctggacacactgtgttttagcgactctgatcatgtttacaatctttagcttttttgctgagcagcttatagcactgaagaggaaaatctttcctcggcgtaggatccataaggaagcctcccctaatagaatcagagtg

SEQ ID NO: 17004 - DNA, 3768 bp, synthetic construct
  misc_feature 1..3768: note = source = /note="Description of Artificial Sequence: Synthetic coding sequence"
  source 1..3768: mol_type = other DNA
atgctgtttaaactgctgcagcggcagacctacacctgtctatcacacagatatggcctctacgtatgtttccttggagtggtggtgacgatcgtctcagcattccagttcggtgaagtagtgctggagtggtcgcgagaccagtaccacgtactgttcgactcatatcgagataatatagctggaaagtccttccagaacaggctgtgcctccccatgccaatagatgttgtttatacctgggttaacgggacagatttagagctcctgaaggaactacaacaggtgagggaacagatggaagaggaacagaaggctatgagggagatcctcgggaaaaatacaaccgagcccaccaagaaaagcgaaaagcaactagaatgtctgctcacacactgcatcaaagtccctatgctggtgctggatcccgctttgccggcgaacatcactcttaaggacctgccttccttatatccctctttccattcagcttctgatatattcaatgtggcaaagcccaagaacccgagtacaaacgttagtgttgtggtgttcgattctacaaaggacgtcgaggacgctcatagcggattacttaagggtaacagtagacaaacagtgtggcggggctacctgacgaccgataaggaagtacctgggcttgtattgatgcaggacctggcattcctgtcaggattcccacctacctttaaggagaccaaccagttaaagactaaattgcctgagaatctaagcagcaaggtaaagctgctccaactgtatagcgaagcttccgtggcactcctcaaactaaacaaccctaaggactttcaggaactgaataagcaaactaagaaaaacatgaccattgatggaaaggagctgacaattagcccagcttacctgttatgggacctatccgctatctcgcagtccaaacaggacgaagacattagcgcaagccggttcgaggataatgaagagctaagatattccctgcgctcaattgagagacacgcaccctgggttagaaacatctttatcgtaactaacgggcagatcccttcttggctcaacctggataatccaagggttacaatcgtgactcatcaagacgtctttcggaacctgtctcacctgccaacttttagttcgccagcaatagagagtcacatccatcgcatagagggcctatcacagaaattcatatacttgaatgacgacgttatgtttgggaaagacgtatggcctgatgacttctacagccacagcaagggtcagaaagtttatctgacctggcccgtgcccaactgcgccgaagggtgtccaggtagctggattaaggacggctactgtgacaaagcttgcaataactccgcatgcgattgggacggcggagactgttctggaaactccggaggcagccggtacattgccggggggggcggaacaggatcaatcggcgtgggccagccttggcagttcggtggggggataaactcagtctcctattgcaatcagggatgtgcgaatagttggcttgccgataaattttgtgatcaggcctgcaatgtgttgagctgcgggttcgacgccggagattgtggccaggatcactttcacgaattgtacaaggtgatcctactgcccaaccagacccactacatcatccccaaaggggagtgtctaccatacttttcttttgctgaagtggccaagcgcggagtggagggtgcttattcagacaatcccattataagacatgcatcgattgcaaacaaatggaaaactatccatttaatcatgcactcaggcatgaacgcaacgaccatacacttcaacctcactttccagaatacgaatgacgaggagttcaagatgcaaattaccgttgaagtcgacacgagagagggtcccaagctgaattctacagcccagaagggctacgagaaccttgttagtccaattacactcttgcctgaagctgagatcctgtttgaggacattcctaaagagaagaggtttccaaagttcaagaggcatgacgtaaattcaacccgtagagctcaagaagaagtgaagatacccctcgtaaatatttctctcttgccaaaagacgcccagttatccctgaatactttggaccttcagctagaacacggggatatcacactcaaggggtacaacctcagcaagtctgcactcctcagaagttttttgatgaactcacagcatgccaaaattaagaaccaagctatcattacagacgaaacgaatgatagccttgttgcccctcaggagaagcaagtccataaatctattctcccgaatagcttgggcgtgtcggaacggttgcagcgccttaccttcccagcagtcagtgtgaaagtgaacggccatgaccagggccagaatcctccactcgatctggagacaactgcccggttcagagtggaaacacacacacagaaaactatcggtggaaatgtgaccaaggaaaaaccaccgtctctgatcgtcccactcgagtcacagatgaccaaggagaaaaagattacaggaaaagagaaagagaattcacgtatggaagaaaacgctgagaaccacatcggagtgaccgaagtgcttctgggccgcaaactgcagcattacacggatagttacttgggcttcttgccttgggagaagaaaaaatatttccaagatcttctcgatgaagaggagagcctcaaaactcagttggcctactttactgatagcaagaacaccggacgccagctaaaagacaccttcgccgattccttaagatacgtaaataagatactgaattctaagttcggcttcacctctagaaaggtgccggcgcacatgcctcacatgattgacaggatcgtgatgcaggagttgcaggatatgttccccgaagagtttgacaagacttctttccataaggtgcggcactctgaggacatgcagtttgccttttcatatttctactatctaatgtctgccgttcagcccttaaatatttcacaagtattcgatgaggttgataccgatcaatctggagtgctgtcagaccgagagataaggactcttgccaccaggattcatgagctgcctctgtcgctgcaggacctgacgggccttgaacatatgttgatcaattgctccaaaatgctgcccgccgacatcacccagctcaacaacatcccaccaactcaagaatcctactatgaccccaacctaccccctgtgactaaatccctggtcacgaactgcaagcctgtgacagataaaatccataaagcatataaagacaagaacaagtatcgctttgagataatgggggaggaggaaattgccttcaaaatgattcgtaccaacgtttctcatgtagtggggcagctggatgatattcgcaaaaacccccgcaagttcgtttgcctcaatgacaacatcgaccataatcataaggatgcccagaccgttaaggcagtcctccgagatttctatgaaagtatgttccccataccctcccagttcgaattgccacgggaataccgtaatcgattcttacacatgcatgagttgcaggagtggcgggcatacagggataagttgaaattttggacgcattgcgtcttggcaacactgatcatgttcactatcttctcattcttcgccgaacagttgatcgcgctgaaaaggaaaatcttcccgcgccggcgaatccacaaagaggcatcaccgaaccgcatcagggtg

SEQ ID NO: 17005 - DNA, 3768 bp, synthetic construct
  misc_feature 1..3768: note = source = /note="Description of Artificial Sequence: Synthetic coding sequence"
  source 1..3768: mol_type = other DNA
atgctgtttaagctcctccaacgacagacttatacctgcctatctcatcgctacgggctatacgtgtgttttctcggagtggtggtgacgatcgtctctgctttccagtttggtgaagtggtgctggagtggtccagggatcagtatcatgtgctgttcgatagctatcgcgacaatatcgcaggcaagagttttcagaacaggctgtgcctgccaatgcccatcgacgtcgtgtacacgtgggtgaacggtactgacctggagctcctcaaagagttacagcaagtgcgggaacagatggaggaagaacagaaggccatgagagagatactgggaaaaaacaccaccgaacccaccaagaaatccgaaaagcaactggagtgtctcctcacgcactgcatcaaggtgcctatgctcgtgctggatcctgcactccccgcaaatattaccctaaaggaccttcctagcttgtaccctagcttccacagcgcctcggatattttcaacgtggccaaacccaagaacccttccactaacgtctccgtcgtggtattcgatagtaccaaggacgtggaggatgcccactcggggctattgaaagggaattctaggcaaaccgtgtggcgcggatacctgacaaccgacaaggaagtaccagggctggttctgatgcaagatctggcatttctatctgggtttccccccacatttaaggagacaaatcagctcaagacaaagttgccggaaaacctctcatctaaggtgaaacttctccagctctactctgaggccagtgtcgccctgctgaaactgaataatcctaaagatttccaggaacttaacaagcaaacgaaaaaaaacatgaccattgacggtaaagagctgaccatatcccccgcatatttactctgggacctgtcagcaatttcccagtcaaagcaggacgaagacatttcagcaagccggtttgaggataatgaggaattacgctactctcttcggtccatcgagaggcacgctccatgggtccgtaacattttcattgtgacgaacggccagatcccaagctggcttaatctagacaacccgcgggtgaccattgtcacccaccaggatgtcttcagaaatctttctcacctgccaacattctcttcgccagctatcgagagccacatccaccggattgagggattgagtcaaaagtttatttatctcaatgacgacgtgatgtttgggaaagatgtgtggcccgacgacttttattcacattccaagggacaaaaggtctatcttacctggcccgttcccaattgcgcagaagggtgcccgggaagttggatcaaggatggatactgtgataaagcctgcaacaacagcgcctgtgattgggacggaggcgactgctcgggtaacagtggtgggtcgcgctacattgccggcgggggaggcaccggatccattggcgtggggcagccgtggcagtttggaggtgggatcaactctgtgtcctattgcaaccaaggatgtgctaactcctggcttgcagataagttctgcgatcaggcctgtaacgtgctgagctgtggcttcgacgccggcgactgcgggcaagatcactttcacgaattgtacaaagtgatccttctgccaaatcagacccactacattatcccaaagggcgagtgcctgccctacttcagttttgccgaggtggccaagaggggtgtcgaaggcgcttacagcgataatcctataatacgccatgccagcatcgcaaacaagtggaagacgatccacttgataatgcattcggggatgaacgccacgaccatacattttaatctgacgtttcagaacaccaacgatgaggagtttaagatgcaaattaccgtggaggtggacactagggagggaccgaagctcaactctactgcgcagaagggttacgaaaacctcgttagtccgatcacattgcttcctgaggcagaaatcctttttgaagatatccctaaggagaaaaggtttcccaaatttaagagacacgacgtgaacagcacgcggagggcacaggaggaggttaaaatccccctagttaatatcagccttcttccaaaggacgctcaactctccttgaacacactggacctccagctcgagcatggagatattacactaaaaggatacaacctttccaagagcgccctgttgcgctcttttctgatgaactcacaacacgctaagatcaaaaatcaggcaattatcaccgatgaaaccaacgactccctggtggctccacaggaaaaacaggtacacaagagtattctccccaattccctgggagtatccgaaagactgcagcggctgacctttcctgcagtctccgttaaagtgaacggccacgaccaaggccagaaccctccgttagatcttgagacaaccgcacgattcagagtggaaacgcatactcagaaaacaatcggagggaatgtgaccaaagaaaagccaccttcactgattgtgcccctcgagtctcagatgactaaggagaaaaaaattaccgggaaagagaaggagaattccagaatggaggagaatgctgaaaatcatatcggcgtcacggaggtgctactcgggagaaaattgcagcactacactgactcatatttgggtttcctcccttgggagaagaagaaatattttcaagacctcttagacgaggaagagagcctgaagacgcagctggcgtacttcaccgattcaaagaacaccgggcggcagctcaaggacaccttcgcagattcattgcgttatgtgaacaagattctcaatagcaagtttggattcacaagccgcaaagtgcccgctcacatgccgcatatgatcgacagaattgtcatgcaggaactgcaagatatgtttcccgaggagttcgataagacgtctttccacaaagtgagacacagtgaggacatgcagttcgccttctcttatttctactacctgatgagtgcagtgcaaccactgaatatttctcaagtctttgacgaggtggacaccgaccagtcaggcgtgctgtccgatagagagatccgcacactggccacaaggatccatgagctccctctgtccctgcaggatttaactggcctggagcatatgctcatcaactgctccaagatgcttcctgctgacattacgcagctgaataacatcccccccactcaggagtcctattacgaccctaacctcccaccggtaaccaaaagcttagtcaccaattgtaaaccagtgaccgataagatccacaaagcatacaaagacaagaacaagtataggttcgagatcatgggcgaggaagaaatagccttcaagatgatacgcactaatgtgtcccacgtagtcgggcaacttgacgacattcggaaaaatccaaggaagtttgtctgcttgaacgacaatatcgaccataaccacaaggatgcccaaaccgtgaaggctgtcctacgagatttctacgagtccatgtttccgattccatcacagttcgaactacctcgggaatatcggaatagattcctccacatgcacgaactgcaggaatggcgcgcttacagggacaaactcaagttctggacgcattgcgtgttagctaccctgatcatgttcaccatcttcagtttctttgcggagcaacttatcgcactgaagcgcaaaattttcccccgtcggcgcattcataaagaagcctcgcctaaccgcattcgggtg

SEQ ID NO: 17006 - DNA, 3768 bp, synthetic construct
  misc_feature 1..3768: note = source = /note="Description of Artificial Sequence: Synthetic coding sequence"
  source 1..3768: mol_type = other DNA
atgctgtttaagctcctacagcgccaaacttatacctgcctgagccaccgatacggactgtatgtttgctttctgggggtggtggtaaccatcgtgtctgccttccagtttggcgaggttgttctggagtggagtcgagatcagtaccacgtcttgtttgactcttatagggacaacattgcagggaaatcctttcaaaataggctttgcctccctatgccaattgacgtggtctacacctgggtgaatggaaccgacctcgagttactgaaagagctgcagcaggttagggagcaaatggaggaagaacaaaaggccatgcgcgagatactgggtaagaacacaaccgagccgacaaagaaaagcgagaaacaactggagtgcctacttacgcattgtatcaaagtgcctatgttggtcttagacccagccctgcccgctaatattaccttaaaagatttacccagcttgtatcctagctttcacagcgcatccgatatctttaatgttgcaaaaccaaagaatccatccacaaacgtctcagtggtcgtgttcgacagcaccaaggatgtggaagacgctcacagcggtctactgaaaggcaactcccgccagacagtttggagaggttacctcactaccgacaaggaagtgccagggctggtgctgatgcaagacttggctttcctcagcggattcccacccacatttaaggagacaaatcagcttaagacaaagctgcccgaaaatctctcgtcaaaggtaaagctgctgcagctttacagtgaagcttccgtggctttgctcaaactgaacaacccgaaagactttcaagagctaaacaagcaaacgaaaaagaacatgaccatcgacggtaaggagctgaccatcagtcccgcatacctgctgtgggatctgtctgcaatctcacagagcaagcaggatgaggatataagcgcctctcggtttgaggacaatgaggagctgcggtattcactgagatccattgagcgccatgctccctgggttagaaatatttttatcgtgactaacgggcagattccaagctggctgaatttagataatcccagggttactattgtgactcaccaggacgttttccgcaatctgtcccatctgcctacattctcaagtcccgccatagagagccacatccaccggatcgagggtctttcccagaaattcatctacttgaacgacgacgtcatgtttgggaaggatgtgtggccagatgatttctatagccacagcaagggccagaaggtctacttaacgtggcctgttccaaattgcgccgaaggctgcccgggttcctggattaaagacggctactgcgataaggcctgtaataattctgcttgcgactgggacggcggcgactgcagtgggaatagcggagggtcgagatacatcgcggggggcggtggaaccggttccattggggttggccagccctggcaattcggaggcggaattaattcagtaagctactgtaaccaaggttgtgctaattcgtggctggcagacaagttttgcgatcaggcatgcaatgtgctttcctgcggctttgacgctggcgattgtgggcaggatcacttccacgaactgtacaaggttatccttcttcctaaccagactcattacataatccctaaaggggaatgtctgccatatttctccttcgccgaggtggccaaaaggggggtcgaaggggcatattcagacaaccctatcataagacatgcgtcaatcgccaataagtggaagacaattcacctcataatgcacagcgggatgaatgcaaccactatccactttaatctcacctttcagaacacgaatgacgaggagtttaagatgcagattaccgtggaggtggacacacgggaggggcccaagctgaattcaacagcacagaagggttatgagaatctggtctcccctatcactctgctcccagaggccgagatcctatttgaggatataccaaaggaaaagcggtttcctaagttcaaaaggcatgacgtgaactctacaaggcgcgctcaggaagaggtgaaaatacctctcgtcaacatcagcttgcttcccaaggatgcgcagctttcactcaacacactagatctgcaactcgaacacggcgacattacactgaagggctacaatctgtcgaaatcagccctactcagatcttttctcatgaactctcagcatgctaaaatcaaaaaccaggctattatcactgacgaaacgaatgatagtctagtggcacctcaggaaaagcaggtgcataagtcgatcttacctaacagtctgggtgtgtccgagaggcttcagcgcttgacctttcccgcagtgtcggttaaagtaaacggacatgatcaggggcagaacccacctctcgatctcgaaactactgcgcggtttagggttgaaacccacacccagaagactatcggtggaaacgtcaccaaggagaagcccccgagcctgatcgtacccctggaatcacagatgactaaagaaaaaaagatcacaggtaaggagaaggaaaactcgaggatggaagagaacgccgagaaccatatcggggtaacagaggtgttgctggggcggaagctccagcactacaccgactcatacctgggattccttccttgggagaagaaaaagtattttcaggatctgctggatgaggaggagagcctaaagacccagctggcctactttaccgattctaaaaatacaggacgacagctgaaggataccttcgcagactccctgcgatacgtgaataagattcttaacagtaagtttgggttcacaagccggaaggtcccggctcatatgccacacatgattgaccgaatcgtgatgcaggagctacaagacatgttccccgaggaattcgataagacatccttccataaagtgcgacacagcgaagacatgcagtttgccttctcctacttctattatctgatgagtgccgtgcaacccctgaatataagccaggtctttgacgaggtcgacacagaccagtcaggggtgctgagcgatcgagaaattaggactctggctacccgcatacacgagctccccttgtccctacaggacctcacaggattagagcacatgctgattaattgcagcaaaatgcttccggctgacatcactcaacttaataatattccccccacccaggagtcatactatgatcccaatttacccccagtgacgaagtccctcgtgaccaactgcaaaccggtgacggacaaaatccataaagcatacaaagataagaacaagtacaggttcgaaatcatgggtgaagaggagattgcgttcaagatgataagaacaaatgtgtcccacgtagtgggacagctggacgacattagaaagaacccccgcaagttcgtttgtctgaatgacaacattgaccataatcataaggacgctcagacagttaaggccgtgctgcgggacttctacgaaagcatgttccctattccgagtcagtttgaacttccgcgggaatacaggaataggttcctgcatatgcacgagctccaagaatggcgggcttacagggataagctcaagttttggacccactgcgtgctcgccacgctcattatgttcacaattttctctttttttgccgagcagctcattgctctgaagcggaaaatatttccccgacggcgtatacataaagaggcaagccccaatcgaatacgtgta

SEQ ID NO: 17007 - DNA, 3768 bp, synthetic construct
  misc_feature 1..3768: note = source = /note="Description of Artificial Sequence: Synthetic coding sequence"
  source 1..3768: mol_type = other DNA
atgctcttcaagctgctccagcgccagacctatacatgtctgtcccatcgctacggcttgtatgtgtgcttcctcggggtggtggttaccatcgtgtctgcttttcaatttggtgaagtcgtgctcgagtggagtagagaccagtaccacgtgctgtttgactcttaccgggataatatcgctgggaaaagcttccaaaacaggctgtgcctgcccatgccaattgacgtggtgtatacatgggtcaatggcaccgatctggaactgctgaaagagctccagcaggtgagagagcagatggaagaagagcaaaaagccatgcgcgaaatcctcggcaaaaataccaccgaacctacaaaaaaatctgaaaaacagctcgagtgtcttctcacacactgcatcaaggttcccatgctcgtgctggaccccgctctgccggcaaacatcacgctcaaggatctgcccagcctgtaccccagctttcattcagcctccgatatctttaatgtggccaagccgaagaacccttcaacaaacgtgtccgtggtcgtgttcgactccaccaaagacgttgaggacgcacactctggtctcctgaaaggcaactcccggcagacagtgtggagaggctacctgacgaccgataaggaggtccccggattggtactgatgcaggatctcgcgtttctctcaggatttcctcccaccttcaaggagaccaaccagctgaagaccaagctccctgagaatctgagcagtaaagtaaaattgctgcagttgtacagtgaagcctctgtggcgctgctgaagctcaataatccgaaagattttcaagagctgaacaaacaaactaagaagaacatgactattgacggcaaagagttgacaatttcccccgcttatcttctttgggatctctctgcgatttctcagagtaagcaggacgaggacattagcgcatccaggtttgaagataatgaggaattgagatacagtctgcgatccatcgaacggcatgccccatgggtgcgcaacatctttattgtcacgaacggtcaaatcccttcatggctgaatttggacaacccgagagtgacaattgtcacacaccaggacgtctttaggaacctgagccatcttcctactttttcctctcccgcgatagagtctcacatccatcgaattgaaggattgtcacaaaaatttatttatctgaatgacgacgtgatgttcggaaaggacgtctggcccgatgacttttatagtcacagtaagggtcagaaggtgtaccttacctggcccgttccaaactgcgcagaaggatgcccaggctcctggattaaagatggctattgtgacaaagcatgcaataattctgcatgtgactgggacggaggagactgctctgggaatagtggggggagcagatacatcgcagggggcggaggaacaggcagtatcggtgtgggacaaccatggcagttcggcggcgggattaactctgtatcctactgtaaccaaggctgtgccaattcatggctggccgataagttttgtgaccaagcctgcaacgtgctcagctgtggctttgacgcaggtgactgcgggcaagatcacttccatgaactctataaggtgattctgctgccaaatcagacccattatattatccctaagggggaatgtcttccatactttagctttgcggaggtcgccaaaaggggagtggaaggggcatattccgacaacccaatcatccgccacgcctccatagcgaacaagtggaaaaccatacacctgatcatgcactctgggatgaatgccacgacaattcatttcaacctgacctttcagaacactaacgatgaagagttcaaaatgcagatcactgtggaagtggatacaagagaaggtcccaagctgaactctactgcacaaaagggttacgaaaacctggtgtcaccgatcacactgctgcccgaggcagagatcttgttcgaagacattccgaaggaaaagcggtttcccaagttcaagcggcatgatgtgaactcaaccagaagggcacaggaggaggtgaagatccccctggtgaatatatccctgctcccgaaagacgcccaattgagtctcaacacgttggacttgcagctggagcacggagatatcaccctgaagggctataatctgtccaagagcgcattgttgagatcctttctgatgaatagccagcacgccaagattaagaatcaggctatcatcacagacgagactaacgattcactcgtggcaccccaggagaaacaggtccacaagtcaattcttcccaacagcctcggagtgtcagagaggctccaaaggctgacttttccagctgtgagcgtgaaggtcaatggacacgaccaaggccagaacccacccctggatcttgagacaactgcacgcttcagggtggagacccatactcagaaaactatcggcggaaatgtgactaaggaaaaacctcccagcctgatcgtgcctctggaaagccagatgaccaaagaaaagaagatcactggtaaggaaaaggagaatagccggatggaagagaatgcggagaatcacattggagtgactgaggtgctgttgggacgcaaactgcagcattataccgacagctacctggggtttctgccttgggagaagaaaaaatattttcaggatcttctggatgaagaggagtcacttaagacgcagctggcctacttcactgactcaaaaaataccggaagacagctgaaggatacatttgcggactcactgcgctacgtgaacaagatactgaattcaaagtttggctttacgtccagaaaagtccccgcccatatgccccacatgatagaccggattgtgatgcaagagttgcaggatatgtttccagaggagttcgataagacaagctttcacaaggtccgacacagcgaagacatgcagttcgccttctcttatttttactacctgatgagtgccgtccaacccctgaatatttctcaggtgttcgacgaggtagacacagaccagtccggagtcctgtctgatagggaaatacgaacactcgcaactcgaatccatgaactgcccctgagtctccaagaccttacgggactcgaacatatgctgattaactgtagtaaaatgctcccagcggacatcacgcagttgaataatattccgcccacccaggaaagctactatgaccccaatctcccccctgtgacaaaatctctggtgactaattgcaagcctgtgactgacaagatccacaaagcgtacaaggataagaataagtaccgctttgagatcatgggcgaagaggagatcgcctttaaaatgatccgcaccaacgtgtcccacgtggtggggcagttggacgatatacgaaagaacccgaggaaattcgtgtgtctcaatgacaacatagatcataatcacaaagatgcccagactgtcaaggccgtgttgagagacttctatgagagtatgtttcccatcccatcccagttcgaactgccgagggaatatcgcaatcgctttttgcatatgcacgaacttcaagagtggagagcttacagggacaagctcaaattctggacacactgcgtgctggcgacgttgattatgtttacaatcttctccttttttgccgaacagctgatagctctgaagaggaaaatttttccgaggcgcagaatccacaaggaagcctcacccaatagaattcgggtg

SEQ ID NO: 17008 - DNA, 3768 bp, synthetic construct
  misc_feature 1..3768: note = source = /note="Description of Artificial Sequence: Synthetic coding sequence"
  source 1..3768: mol_type = other DNA
atgcttttcaaactgctgcaaagacagacctatacatgtttgtctcatcgatacggcctgtacgtctgtttcttgggggtggtcgtgaccatcgtctcagcatttcagttcggagaggttgtgttggagtggtcgcgggaccagtatcatgtcctgttcgattcttacagggataatattgccggaaagtcctttcagaacaggctgtgcctaccgatgcccatcgatgtcgtgtacacttgggtgaacgggacagacctggaacttctgaaagaacttcagcaggtgcgagagcagatggaggaggagcagaaagccatgcgggagatcctcgggaagaacaccaccgagccaactaaaaagtccgaaaagcagctggagtgcttgttgactcattgcatcaaagtcccgatgctggtcctggaccctgctctgccagccaatatcacgctaaaagacctgccgtctctgtatcctagctttcatagcgcttctgacattttcaacgtcgctaagcccaagaatccaagcacgaatgtatccgtggtggtcttcgactcaacgaaggacgtcgaggatgcgcactctggtctgctgaagggaaatagtcgacagaccgtgtggcgagggtaccttacaactgataaggaggtccctggcctggtgctgatgcaagacctggctttcctgtcaggttttccacccacattcaaggagaccaatcaactgaaaaccaagctaccggagaacctgtctagtaaggttaagctcttgcagctgtacagtgaggcctcagtagcccttctcaaactgaataacccgaaggatttccaggaattgaacaagcagacgaagaaaaacatgactattgatggaaaagagctgactattagccctgcctatctgctgtgggatctctcagccatcagtcagtcaaagcaggacgaggacatcagcgccagtaggttcgaagataacgaggaactgaggtacagtctgagaagtatcgagaggcacgccccctgggtccggaacatcttcattgtgacgaacgggcagatcccaagttggctcaatctggacaatcctcgcgttacaatcgtcacgcatcaggacgttttccgaaatctgtcacacctgcctactttcagtagccccgctattgaaagccatatacaccgaattgagggcttgagtcagaagtttatttacctcaatgatgacgtgatgtttggtaaagatgtgtggcccgatgacttttattcccactctaagggccagaaagtttatctgacttggcctgtaccgaactgcgccgagggctgcccaggttcatggataaaagacggctactgtgataaagcctgcaacaacagtgcttgtgactgggacgggggagactgcagcggtaactctggcggatcacgttacatcgcaggtggggggggcacgggctcaattggcgtcggccagccttggcaattcggaggcggaataaattccgtctcttattgcaatcaggggtgcgcaaacagctggctggctgacaaattttgtgatcaggcctgtaatgtattgtcctgcggctttgatgctggcgactgtggtcaagaccacttccatgaactgtacaaggtcatactcctacccaaccagacgcattatattatccccaagggggaatgtctgccctacttctcgttcgccgaagtagctaagaggggagttgaaggtgcctactcagataatccaattatccgccatgcctcgatcgcaaacaagtggaagactattcacttaatcatgcactccgggatgaatgccaccaccattcacttcaatctcacgttccaaaataccaacgacgaagaatttaaaatgcagatcaccgtcgaggtggacacgcgggaggggccgaagctcaacagtaccgcccagaaagggtacgagaatctggtgtctccgatcacgctcctgcccgaagcagaaattctcttcgaggacattccaaaagagaagcggtttcccaagttcaagaggcacgacgtgaacagcacaaggagagcccaggaggaagtgaagatccctttggtgaatatctccctactgccaaaggacgcccaactgtcactcaacacacttgatttacaactggagcatggggatatcaccttaaaggggtataaccttagcaagagtgcgttgctgcgctcattcctcatgaattctcagcacgcaaagattaagaatcaggcaattatcacggacgaaaccaacgattcactcgtggcacctcaagagaagcaggttcataaatccatactgccaaactccctgggagtctctgagcgtctgcagcgactgacctttccggcagtgtcagtcaaagtgaacggtcacgatcaagggcagaaccctcctctggatctcgagaccacagccaggtttcgagttgagacccacacccagaaaaccataggaggaaacgtgacaaaagagaagcctcccagtttgatcgtgccattagagagccagatgactaaagaaaagaaaattactgggaaagaaaaggaaaattcccgaatggaagaaaacgcagagaaccacataggggtgaccgaggtcctgcttggacggaaactgcagcactacactgatagttatttgggattcctgccctgggaaaagaaaaagtatttccaggatcttctggacgaagaagaatccctgaaaacccagctcgcatactttacagactcgaagaacacgggcagacagctcaaagacacttttgcagactctttgcggtatgtgaataagattctaaacagcaagttcggctttacatcccgcaaggttcctgcccacatgccccacatgatcgacagaatcgtgatgcaagaacttcaggacatgtttccagaggaatttgataaaacgtcctttcacaaggtccgccacagtgaggatatgcagtttgcctttagctatttctattatctgatgtccgctgtgcaacccctcaacattagccaggtttttgatgaagtggataccgaccagtccggggtgttatctgacagagagatccggacactggcaacaaggatccacgaactgccgctgtctctccaagatctgactggtctggagcatatgctgatcaactgttcaaagatgctaccggcagacattacgcaacttaataatataccacccactcaggagagctattacgatccaaaccttccgccagtgactaaatcgttggtaacgaactgcaagcctgttaccgacaagatacataaggcctacaaggataagaacaaatatcgatttgaaatcatgggcgaagaggagatagcctttaaaatgattcgaacaaatgttagccacgtggtgggacaacttgatgatattcgcaagaaccccagaaagtttgtttgcttgaacgataacatcgaccacaatcataaggacgcacaaacagtgaaagccgttctccgagacttctacgaaagcatgttccctatacctagccagtttgagctgccacgggagtaccggaaccgcttcctgcacatgcacgagctacaggagtggagagcgtaccgcgataagttaaagttttggactcactgcgtccttgccaccctgatcatgtttacgatcttttctttctttgccgagcaacttatcgctctgaaaaggaagatcttcccgaggcgacgcatccacaaggaggcgagtccgaacagaatcagagtc

SEQ ID NO: 17009 - DNA, 3768 bp, synthetic construct
  misc_feature 1..3768: note = source = /note="Description of Artificial Sequence: Synthetic coding sequence"
  source 1..3768: mol_type = other DNA
atgttatttaagcttcttcaacgtcaaacttatacttgtcttagtcatagatatggattatatgtatgtttcttaggagttgttgttactattgtctctgcatttcaatttggagaagttgttcttgaatggtcaagagatcaatatcatgttctttttgactcttatagagataatattgcaggaaaaagttttcaaaatagattatgtcttcctatgccaattgatgttgtttatacttgggttaacggtacagatcttgagttattaaaggagttacaacaagttagagaacaaatggaagaagaacagaaagcaatgagagaaattttaggaaagaatactacagagccaacaaaaaaaagtgaaaaacaacttgaatgtttacttacacattgtataaaagttccaatgttagtattagatcctgctttaccagcaaatataactttaaaagatcttccatcattatatccatcatttcattcagcatcagatatctttaatgttgctaaaccaaaaaatccatcaacaaatgtatcagttgttgtcttcgatagtacaaaagatgttgaagatgcccatagtggattattaaagggtaattcaagacaaacagtttggcgtggttatttaactacagataaagaggttccagggcttgttttaatgcaagatttagcatttctctcaggttttccacctacttttaaagaaactaatcaacttaaaaccaaattaccagaaaatttaagtagtaaagttaaattattacaattatattcagaagctagtgtagccttgttaaagttaaataatccaaaagatttccaagaacttaataagcaaactaaaaaaaatatgactatcgatggaaaggaacttactatttctccagcttatttattatgggatctttctgctatatcacaaagtaaacaagatgaagatatttcagcttcaagatttgaagataatgaagaattaagatatagtttacgttctattgaaagacatgctccatgggtaagaaacattttcatagttacaaatggacaaattccaagttggttaaatttagataatccaagagttacaatcgtaactcaccaagatgtttttagaaatctttcacatttaccaacatttagttctccagctatagaatcacatattcacagaattgaaggattaagtcaaaaattcatttatcttaatgatgatgttatgtttggaaaagacgtttggccagatgatttttattctcattcaaagggtcaaaaggtttatcttacatggccagttccaaattgcgcagaaggatgtccaggtagttggattaaagatggatattgtgataaagcatgtaataattctgcatgtgactgggatggaggagattgttcaggaaattcaggaggttcaagatatattgctggaggaggaggtacgggatcaattggtgttggacaaccatggcaattcggtggaggaattaattcagttagttattgtaatcaaggatgtgcaaattcatggcttgcagataaattttgtgatcaagcatgtaatgttttatcatgtggatttgacgctggagattgtggtcaagatcattttcatgaattatataaggttattttgttaccaaatcaaacacattacattattccaaaaggagaatgcttaccatatttttcgtttgcagaagtagcaaaaagaggggttgaaggtgcttattcagataatccaataatacgtcatgcttcaattgcaaacaaatggaaaacaattcatttaattatgcattcaggtatgaatgcaacaacaattcatttcaatcttacttttcaaaatactaatgatgaagaattcaaaatgcaaattactgttgaagtagacacacgtgaaggtccaaaacttaatagtacagctcaaaaaggatatgaaaatttagtatctccaataacattacttccagaggctgaaatattatttgaagatattccaaaagaaaagagatttccaaagtttaaaagacatgatgttaactcaactagaagagcacaagaggaagttaagattccacttgttaatatatctttattaccaaaagatgcacaattaagtcttaatactttagatttgcaattagaacatggggatattactcttaaaggttataatttatctaaatcagctttacttcgatcttttcttatgaattcacaacacgctaaaattaaaaatcaagctattatcactgatgaaacaaacgattcattagttgcacctcaagaaaagcaagtacataaaagtatattaccaaactcccttggtgttagtgaaagattacaacgtttgacatttccagctgtaagtgttaaggttaatggacatgatcaaggtcaaaatccaccattagatttagaaactacagcaagatttagagttgaaactcacactcaaaaaactattggaggaaatgttactaaagaaaaaccaccaagtcttattgtacctttagaatctcaaatgacaaaggaaaaaaagataacaggaaaagaaaaggaaaatagtcgtatggaagaaaacgcagaaaatcatattggagtaacagaagtcttattaggacgtaaattacaacattatacagatagttatttaggttttttaccatgggaaaagaaaaaatattttcaagacttattggatgaagaagaatctttaaaaacccaattagcatattttacagattcaaaaaatactggaagacaattaaaagatacgtttgcagattcattgagatatgtaaataaaattttaaattctaaattcgggttcacaagtagaaaagtacctgcacatatgccacacatgattgacagaatagtaatgcaagaacttcaagatatgtttccagaagaatttgataaaacatctttccataaggtaagacactctgaagatatgcaatttgctttttcttatttttattatttaatgtcagctgttcaacctctcaatattagtcaggtatttgatgaagttgatacagatcaaagcggagttctttcagatagagaaattagaacattagctactagaattcatgaattaccattgtcactacaagatttgacaggattagaacatatgttaattaattgctcaaagatgttaccagcagatataacacaattaaataatattccaccaacacaagagagttattacgatccaaacttaccaccagttacaaaatcattagtaactaattgtaagccagtcacagataagatccataaagcatacaaagataagaataaatatagatttgaaattatgggagaagaagaaatagcttttaagatgattagaactaacgtctctcatgttgttggacaattggatgacattagaaaaaatccaagaaaattcgtatgtttaaacgataatattgatcataatcataaagatgctcaaacagttaaggctgttttacgtgatttttacgagtcaatgttcccaataccatctcaatttgaattaccaagagaatacagaaatagatttttacatatgcatgaattacaagaatggagggcatatagagataaacttaaattttggactcactgcgtacttgcaactttaatcatgtttactatttttagtttctttgctgaacaattaattgcattgaaaagaaaaattttccctagaagaagaattcataaagaagcaagtccaaatagaattcgagtt

SEQ ID NO: 17010 - DNA, 3768 bp, synthetic construct
  misc_feature 1..3768: note = source = /note="Description of Artificial Sequence: Synthetic coding sequence"
  source 1..3768: mol_type = other DNA
atgctgttcaaattactgcagagacagacatatacctgtctttctcaccggtacggcctgtacgtgtgcttccttggagttgtggtgactattgtcagcgcgtttcagttcggggaggtggtgctcgaatggtcccgcgatcagtatcatgtgctatttgacagttaccgagacaatattgcaggtaaaagcttccagaacagactttgtctgcctatgcccatagacgtggtgtacacctgggtgaatgggacggatttagagctgctgaaagaactgcaacaggtccgcgagcagatggaggaggagcaaaaggcaatgagggaaatactcggaaagaatacaacagaaccaacgaagaaaagtgagaagcagcttgaatgcctcctgacccattgcatcaaagtgcccatgctggtgctggatccagcattgcccgccaacatcactctaaaagacctgccttccctctatccctctttccactctgccagtgatatttttaacgtcgccaaacccaaaaacccgtcaaccaacgttagcgtagtggtctttgattcaaccaaggatgtagaagacgcgcatagtggtctcctgaaggggaactctagacaaaccgtttggaggggataccttactacagacaaagaggtgcctggactagttctcatgcaggatctggccttcctgagcggcttcccgcccaccttcaaagaaactaaccaacttaagaccaaactgccagaaaatctgagttctaaggttaagcttctccagctgtattcggaggccagcgtggcattactcaagctgaataatcccaaggactttcaagaattgaataaacagacaaaaaagaatatgaccatcgacggaaaagaactcactatatcaccagcctacctgctgtgggatctctcagcgatctcccagtctaaacaggatgaagacatctcagctagcaggtttgaggataatgaggagctaaggtattcactgcggagcatagaacgtcatgccccgtgggttagaaatattttcattgtaactaacggacagatcccgagttggcttaatctcgataacccgcgggtcacgatagtgacgcatcaggacgtctttagaaatctgtcccacctaccaacattttcatccccggcaatagaatctcacattcaccggatcgagggactgtcccagaagtttatctaccttaacgacgatgtgatgttcggcaaggatgtatggccagacgatttttactcccactctaaggggcagaaggtctacctgacttggccagtgcctaactgtgcagaaggttgccctggctcatggattaaagacggctactgcgataaggcatgcaacaactcagcttgtgattgggacggcggagattgtagcggaaactctggaggcagtcgctatatagccggcgggggcggcactgggagtataggcgtcggacagccatggcaatttggcggggggatcaacagcgtgtcctactgcaatcaaggatgcgctaactcctggttggcggataaattttgcgaccaggcatgtaatgtcctgtcttgtggattcgacgcaggagattgtgggcaggatcatttccatgaactctacaaagtaatccttctaccaaatcagacacactacatcatccctaagggagaatgcctgccatacttctctttcgccgaggtggccaagaggggagttgagggtgcctattccgacaatccaatcattcggcacgccagcattgctaataagtggaagacaattcatctgatcatgcactcaggcatgaatgcaacgacaattcatttcaatctgacgttccagaacacaaatgacgaggaatttaaaatgcagatcacagtcgaggttgacacgcgcgaagggcctaagctgaatagcacagcgcagaagggatacgaaaatctggttagtccaatcacactgcttcccgaggccgaaattctgttcgaagatatcccaaaggagaagcgttttcccaagtttaagcgacacgacgttaattcgacccgacgcgcccaggaagaggtgaagatccctctggttaatatttccctgctgccaaaagacgcgcagctgtcactcaatacactggatttacaactcgagcatggggacattaccttgaagggttacaatctgagcaaatcggcgttactgcgttcttttctcatgaattcccagcatgcgaagataaaaaatcaggctatcattacagacgaaaccaacgactcgctggttgctccccaggaaaagcaagtgcataagtccatcctgcccaatagtctgggtgtcagcgagcggctccagaggctcacgttcccagcagtgtcggttaaggtcaatggacatgatcagggccaaaaccctcctctagatctcgagaccacggcaagatttagagtggagacacatacccagaaaacaataggcgggaacgtcacaaaagagaaacccccctccctgattgtgcccttggaatcacagatgaccaaagaaaagaaaatcactggcaaggagaaggagaattccaggatggaagaaaacgccgagaatcatattggggtgactgaggttctcctgggccgtaagctgcagcactatacagattcctacctgggcttcctcccatgggagaaaaagaagtactttcaggacctgctcgacgaggaggaatctctgaagacacaactggcatatttcaccgattctaaaaacactgggagacagctgaaggacacctttgccgatagcttgcggtacgtgaataaaatcttgaatagtaagtttggtttcacgtctcgtaaagtccccgcccatatgcctcacatgattgatcgtatcgtgatgcaggagttacaagacatgtttccagaagagtttgacaagaccagcttccacaaagtgcgccactccgaggatatgcagtttgcattcagttatttctattacctcatgtctgccgtgcagcccctcaacatctcccaggtcttcgacgaagttgacacagaccagtccggagttctgtccgaccgggaaatcaggaccctggccacccgaatccacgagctgccattgtcactgcaggacctcacgggacttgagcacatgctgattaactgctcaaagatgctacctgctgatattacgcaactgaataatattccacctacccaggagagctattacgatccaaatctcccaccagtgacaaaatcccttgttaccaactgcaaaccggtgactgataaaattcataaggcctataaggacaaaaacaagtaccgcttcgagatcatgggagaggaagaaatcgcttttaagatgatcagaacaaacgtgtcccacgtagttggacagctggatgatatacggaaaaatccccggaagtttgtatgcttgaacgacaacatcgatcataatcacaaagacgctcagacagttaaagctgtgctaagagacttttacgagtcgatgtttcctatcccaagccaattcgaactgccacgggaataccgaaacagattcctgcatatgcatgaattgcaagaatggagagcatacagggataagctgaagttctggactcactgcgtcctggccacccttatcatgttcaccatcttttctttctttgccgagcagctgattgccctgaaaaggaagatattcccacggcggcgcatccataaggaggcctcgcctaatagaattagggtc

SEQ ID NO: 17011 - DNA, 3768 bp, synthetic construct
  misc_feature 1..3768: note = source = /note="Description of Artificial Sequence: Synthetic coding sequence"
  source 1..3768: mol_type = other DNA
atgcttttcaagctcttgcagcggcagacctatacctgcctcagccacagatacggtctgtacgtgtgctttttgggcgtagtggtaaccattgtttctgctttccagtttggcgaggtggtgttggagtggtcaagggaccagtatcacgtgctgttcgatagctatagggacaacatcgcaggaaagagctttcagaataggttgtgtctgcctatgcccattgacgttgtgtatacctgggtgaacgggacagatttggaactcctgaaagagcttcagcaggtacgcgagcagatggaagaggagcagaaagctatgagggaaatactgggaaagaatacgacagagcccacgaagaaatcagagaagcagctcgaatgcctgcttacccactgtatcaaagtccccatgctggtgctggaccccgctcttccagcaaacatcacactgaaggatctgccgtctctgtacccctcatttcacagtgcctcagatatctttaacgtggcaaagcccaagaaccccagcactaacgtgtcagtcgtggtgttcgattctaccaaggacgttgaggatgcccattctggactgctgaaaggcaacagcaggcagacggtgtggaggggctatctgacaacagataaagaggtccccggactcgtgcttatgcaggacctcgcatttctcagtggcttccctccaaccttcaaagagacaaaccagctcaagaccaaactgcctgagaaccttagcagtaaagtgaaactcctgcaactttattctgaggcctccgtggcactgcttaagctgaacaatcctaaggacttccaggagctgaataagcaaacaaagaaaaatatgaccattgacgggaaggagcttactatctccccagcttatctgctttgggatttgagcgctattagccaatctaaacaagatgaggatatttcagcctctaggtttgaggataatgaggagctcagatattccctcaggagcatcgaaaggcacgcaccctgggtacgaaacattttcatcgttaccaatggccaaatcccctcctggctcaacctggacaatcctagggtaacgatagtcactcatcaggacgtgtttagaaaccttagccacctgcccacctttagctccccagcaatcgagagtcacatacaccgaatagagggcctctctcagaaatttatttatctgaatgatgacgtaatgttcggtaaggacgtctggccagacgatttttattcacattctaagggacagaaggtgtatcttacctggcccgttccaaattgcgccgagggttgtcccggatcctggatcaaggacgggtactgtgataaggcgtgcaacaactccgcctgtgactgggatgggggagattgcagcggtaacagtgggggttctagatacattgcaggagggggtgggaccggatccattggagtgggtcagccttggcagttcggcggtggcattaatagtgtgagttactgtaatcagggttgtgcaaacagctggctggctgacaagttttgtgatcaggcctgtaacgtgctttcctgcggatttgacgccggagactgcggccaagatcacttccacgagctgtataaagttattctgctgcctaaccagacccattacatcattcccaagggggagtgtctgccatacttcagttttgctgaggtggccaaaagaggtgttgaaggggcctactcagataaccccataatccggcatgcttctattgcaaataaatggaagactatccatcttataatgcattctggtatgaacgccactactattcatttcaacttgacgtttcagaataccaatgacgaggaatttaaaatgcagatcacagtggaggtagacactagggaggggcctaagttgaacagcacagcacagaagggctacgagaacctggtttctccaataacgttgctgcctgaggccgaaatcctgtttgaggatatcccaaaggagaagcgatttcctaagttcaaacgacacgacgtcaatagcacacggagagcgcaagaagaagtgaaaattccactggtgaacatttcccttcttcccaaggacgcccagttgagccttaacacacttgacttgcagctggagcatggcgatattactcttaaaggctataatttgagcaagagcgccctcttgcgatcttttctgatgaatagccagcacgccaagatcaagaaccaggccattatcaccgacgaaaccaacgactcacttgttgcaccccaggaaaaacaggtacacaaatccatcttgccaaactccctgggcgtcagcgagcgcctgcagagactcacttttccggcggtatctgttaaggtcaatggccacgaccagggacagaatccaccactggatttggagactacagcccggttccgcgtggaaacacatactcagaaaaccatcgggggaaatgtgactaaggagaaacccccatcacttatcgttccacttgagtcccagatgactaaggaaaaaaaaatcacggggaaggagaaagagaattcaaggatggaagaaaatgccgaaaatcatatcggggtgactgaagtgcttctcggacgcaagctgcagcactataccgactcctacctgggctttctgccctgggaaaagaagaaatacttccaggacttgctggatgaagaggagagtctgaagacccagcttgcctactttaccgacagcaagaataccggaaggcaattgaaggataccttcgccgatagcctgcggtacgtcaataagattctgaattcaaaattcggatttacctcccgcaaagtgcctgcacacatgcctcatatgatcgatagaattgtgatgcaggagctgcaggatatgttccctgaagaatttgacaagacaagcttccataaagtgaggcattcagaagacatgcagttcgcgttctcttatttctactatcttatgtctgctgtgcagccgttgaatatatcccaggtgtttgacgaagtggacacagatcagtccggcgtccttagcgacagggagattcgcacgctcgctactcgaattcacgagctccccctttctctgcaggaccttactggactggagcacatgttgattaattgctccaaaatgctgcccgcagacatcacacagcttaacaacatcccccccacacaagagagttactacgatcctaatctgcccccggtaacgaaatcactggtgacaaactgcaaacctgtcaccgataagattcataaggcttataaggataagaataagtacagattcgaaatcatgggagaggaagagatagcctttaagatgatacggacaaacgtttctcacgtggtgggacaactggatgatattcgaaaaaacccccgcaaatttgtgtgcttgaatgacaacatcgaccataaccacaaggatgcacagacagttaaggctgtactccgcgacttttacgagtccatgttccctatcccttcacagttcgaacttcccagagagtatagaaatcgctttctgcatatgcatgaactccaggaatggcgggcatatagggacaaactgaagttctggacgcattgtgtcttggcaaccctgatcatgtttactattttctcattctttgccgagcaactgatcgcccttaagcgcaagattttcccaaggcggaggatacacaaggaagctagtcctaacagaatcagggtg

SEQ ID NO: 17012 - DNA, 3768 bp, synthetic construct
  misc_feature 1..3768: note = source = /note="Description of Artificial Sequence: Synthetic coding sequence"
  source 1..3768: mol_type = other DNA
atgctgttcaagttattgcagagacaaacttatacctgtcttagccatagatatggcttatacgtgtgctttttgggggtcgttgtgacaattgtgtcagcttttcagttcggcgaagttgtgttagaatggtcccgagaccaataccacgtgctgttcgattcgtaccgtgacaatatcgccggcaagagcttccaaaataggctgtgcttgccgatgcccattgatgtggtttacacctgggtgaatggaacagacctcgaactgctcaaagaactgcagcaggttagagagcagatggaggaggaacagaaggctatgagggagatccttggtaaaaacacgactgagccgacgaaaaagtcggaaaagcagctggaatgtctcctgacacactgcatcaaagttcctatgctggtgctcgaccccgccctgcctgctaacataactctcaaggatctgcctagcctatacccaagctttcacagtgccagtgacatattcaatgttgccaagcccaagaaccctagtaccaatgtgagcgtggtcgtgtttgatagtactaaagatgtagaagatgctcactctggtttgctgaagggcaactcaagacagacagtgtggaggggctatctgaccactgacaaggaggtcccgggattggtactgatgcaggacttggcctttttgagtggatttcctcccaccttcaaggagacgaatcagttgaagacaaagttaccggaaaatctttctagcaaggtaaaattgctgcagctttattctgaggcctctgtggcactccttaagctaaacaacccaaaagactttcaggagctcaataagcagacgaagaaaaacatgactattgatggcaaggagctgaccatcagtccagcctatctcctttgggacttgagtgccataagccagtccaaacaggatgaggatatcagcgcctcccgttttgaggataatgaagaacttaggtattctctccggtcgattgagagacatgctccttgggtcagaaacatattcattgtaaccaatgggcagataccaagctggcttaacctagataatcccagggtaacgatcgtgacacaccaggacgtatttaggaatctgtcccacctgcccactttttctagcccagccattgaaagtcacatccaccggattgaggggctgtctcagaagtttatatatttaaatgatgatgttatgttcggcaaagatgtttggccagacgacttctattcccactcaaaaggccaaaaagtgtatctcacttggcctgtccctaattgcgccgaagggtgccccggtagttggattaaggatgggtactgtgacaaggcttgcaacaattcagcgtgtgactgggacggtggagattgctctggcaattccgggggctctcggtatatcgctggcggaggtggaaccggctccataggagtgggacaaccatggcagtttggcggaggtattaattcagtatcctattgtaatcagggctgcgccaatagttggttggctgacaagttctgtgaccaggcttgcaatgtgctgagctgtggatttgatgctggggattgcggtcaagatcactttcacgagctttacaaagtgatcctcctgccaaaccaaactcactatattatccctaagggcgaatgtttgccatacttcagctttgcagaagtcgccaaacgaggggtcgagggagcctactcggataacccaataatccggcacgcatctatagccaataagtggaagaccatacatctgatcatgcactcaggaatgaacgcaaccaccatccactttaacctgacttttcaaaatactaatgatgaggaattcaagatgcagattacagtcgaagttgacacaagggagggccctaagctgaattcgaccgctcaaaagggctacgagaacctggtttctccaattaccctactgccggaggccgaaattctctttgaggacatccccaaggaaaagcggtttcctaagttcaagagacacgatgtaaattcaactagacgggcacaggaggaagtcaagatccctctggtcaacatttcattattgcccaaggatgcacagctgtccttgaacaccctggatctccagctggaacacggagacatcactctgaaaggctacaacctgtctaaaagcgctctactgcgttccttcctgatgaattctcaacacgccaagatcaagaaccaagccataatcacggatgagacgaacgacagtctggtggccccccaagaaaaacaggttcataagtccatactgcctaacagcctgggcgtatctgaacgcttgcagcgcctgacgtttcctgccgtctcggtgaaagtgaatggtcatgaccagggccagaaccctcctttagatttggagacaactgctcggtttagggtggagacgcatacacagaagaccattggaggaaacgtgacaaaagaaaaacccccctccctgatagtgcctttggagtcccaaatgacaaaagaaaaaaagattaccgggaaagaaaaggagaactcaaggatggaggagaacgcagaaaatcatatcggagtgacggaggtgcttctgggcaggaagctgcagcactacacagactcatatctgggctttctgccctgggagaaaaagaagtactttcaggatctcctggacgaggaagagagcctgaaaacgcagctagcgtacttcacagatagcaagaacaccggaaggcagttgaaggacacctttgccgattcgctcagatatgtgaataagatccttaacagcaagttcggattcacctcccgaaaagtaccagcacacatgccccacatgattgatcggatcgtgatgcaggagctccaggacatgtttcctgaggagtttgacaagacatcatttcataaggtgcgccatagcgaggacatgcagttcgctttctcctacttctactatctaatgagcgccgtccagcctttgaacattagccaagtctttgatgaggtcgacacggatcagtctggcgtgctcagcgacagagagatcaggacactcgccacccgaatccatgagctgcccctcagtttgcaagatctgaccgggctggaacatatgctcatcaactgtagcaaaatgcttcccgcagatatcacacaactgaataacatcccaccaacacaggaatcatattatgaccctaacctgcccccggtgacaaaatcactggtgaccaactgtaagccagtgacggataaaatacacaaggcgtacaaagataagaataaatacagatttgagatcatgggcgaggaagaaatcgcgtttaagatgatccgcaccaacgtgtcacacgtagtcgggcagctagacgatatccgcaagaacccccgtaagttcgtctgtctgaacgacaatatcgaccacaatcataaggacgctcagacagtgaaggccgttctgagggacttttacgagtcgatgtttcctatcccctcacaatttgaacttcctcgcgaatacaggaaccgttttctgcacatgcatgagttgcaagaatggcgggcctatcgcgacaagctaaagttttggactcactgtgtgttggctacactgattatgttcaccatttttagcttctttgccgaacagcttatcgccctgaagcggaagatcttcccgaggcggcggattcacaaagaagcctctcctaataggatacgtgtg

SEQ ID NO: 17013 - DNA, 3768 bp, synthetic construct
  misc_feature 1..3768: note = source = /note="Description of Artificial Sequence: Synthetic coding sequence"
  source 1..3768: mol_type = other DNA
atgctctttaagcttctccagcggcaaacctacacatgtctttcccaccggtatgggctttacgtttgctttctgggggtggtggtgacaatcgtgagcgcatttcagtttggcgaagtggttctagagtggtctagagaccagtatcacgtcctgtttgattcatacagggataacattgcagggaagtcctttcagaacagactgtgtctgccaatgccaatcgatgtagtttatacatgggtgaacggcactgacctggaactgctaaaagaacttcagcaagtcagagagcagatggaggaggagcagaaagctatgcgtgagattctcggaaagaataccactgaaccgacaaagaaaagcgaaaagcagcttgagtgtctcctgacgcattgcattaaggttcctatgttggtcctcgaccccgcgcttcctgcaaacatcactcttaaggatttgccttcactgtacccctcttttcactcggccagtgacattttcaacgtggccaaacctaagaatcccagcaccaatgtctctgttgttgtgtttgattccacgaaagacgtggaagacgcgcattcaggtctgctgaagggtaattcgcgacagactgtgtggcggggataccttactactgacaaggaggtgcctggcttggtactcatgcaagacctcgcttttctgtctgggttcccacccactttcaaagagacaaaccaactgaagactaagttgccggaaaatttgagtagcaaagttaagctgttacagctatactctgaagcttctgtagctctgctcaaattaaacaacccaaaggacttccaggagctgaataaacaaactaagaagaacatgactattgacggaaaagaactgacgatatcacccgcttacttgctgtgggacctgtccgcaatttctcaatcgaagcaggatgaggacatcagcgcatctagatttgaagataacgaggagctccgatacagcctgaggtccattgagagacacgcaccctgggtgcggaacattttcattgttaccaatggtcagatccccagctggttgaatctcgacaatccaagggtgaccattgtgacccaccaagatgtgttccgcaacctaagtcaccttccgaccttctcttcccctgcaatcgagtcacacatacacaggatcgaagggctgtcccagaagtttatctatctaaacgacgatgtgatgtttggcaaagatgtttggcctgacgacttctattcccatagcaaaggccagaaggtgtatttaacatggcccgtgccaaattgcgcggagggatgccccggctcttggattaaagacggttactgtgacaaggcttgcaataactccgcatgtgattgggatggtggcgattgtagtgggaattctggcggcagcaggtatattgctgggggcggaggaactggcagcatcggagtgggacaaccttggcagttcggcggaggcattaactccgtgtcctactgcaatcaaggttgcgcgaattcgtggctagcagacaaattctgcgatcaggcatgcaatgtgttaagctgtggcttcgacgcgggggactgcggtcaggaccactttcacgagctctacaaggtcattctgctgccaaaccagacccattacatcatccccaaaggggaatgtctgccttatttcagctttgcagaagtggctaagaggggggttgagggcgcgtattctgacaaccctattatacgtcatgcgtccattgccaacaaatggaaaactattcatctgatcatgcactccggaatgaacgccaccactattcatttcaatctgacattccagaataccaatgacgaggaatttaagatgcaaataaccgtcgaagtggatacacgagagggccctaagcttaattcaactgctcagaaagggtatgaaaacctggtgtccccaatcacactgctccccgaagctgagatactgttcgaagacatcccaaaggaaaagagatttccgaagtttaaacgacacgatgtcaattcaacacgcagggctcaggaggaggtgaagattccccttgtgaacataagcttgctaccgaaagatgcacaactctctctcaatactctagatctacagttggaacatggggacattacgctcaaaggctacaaccttagcaaaagtgctttgcttaggtccttcctgatgaacagccaacatgcgaagattaagaatcaggccatcatcactgatgagactaacgatagcctagtggcacctcaagaaaagcaggtgcataagtcaatcctgcctaactcactcggggtctctgagaggttgcagcgcctgaccttcccagctgtgagcgtcaaggtgaatggtcatgatcagggccagaacccaccactggatctcgagaccactgctaggttcagagtagaaacccacacacagaagacgatcggggggaatgtgactaaagaaaaaccaccaagtcttattgtgcctcttgaatctcagatgacgaaagagaagaagatcaccggcaaggagaaggagaactccaggatggaggagaacgccgaaaatcatattggggttaccgaagtgcttcttgggcggaagctgcagcattacacagactcgtatctgggcttcctgccatgggaaaagaagaaatactttcaggacttgttggacgaggaggaatccctgaagacgcagctggcctacttcacggactctaagaacaccggtaggcagctgaaagacactttcgccgactcattacgctacgttaacaagattctgaattctaagttcggctttacgagcagaaaggtccctgctcacatgccacatatgattgataggatcgttatgcaggagctgcaggatatgttcccagaggagtttgataaaacatcattccacaaagtccgccactctgaggacatgcaattcgccttcagctatttctactacttaatgagcgccgttcaacccctaaacatttcccaggtgtttgacgaagtcgatacggaccaatctggggtactgagtgacagagaaatccgcactctggccaccagaattcatgagctaccgctgtctctgcaggaccttaccggactcgaacacatgctcatcaactgctccaagatgctgcctgctgacattacacaactgaacaatataccccctactcaggagtcatactacgatccgaacctgccacctgtgacaaagagcctggtgaccaattgcaagcccgttacagataagatacacaaagcgtacaaggacaaaaataagtatcgttttgaaatcatgggcgaagaggagatagctttcaagatgataagaaccaatgtttcacatgtggtggggcagctggacgatatccggaaaaatcccagaaagtttgtctgtcttaacgacaacatcgatcacaatcacaaagacgcgcagaccgttaaagctgtgctaagggatttttacgagtctatgtttcctatcccgtcacagtttgagcttccgcgtgaataccggaataggtttcttcacatgcatgagctgcaagagtggcgcgcataccgcgataagctaaagttttggacgcattgtgtcctagcgacccttataatgttcaccatcttttcattctttgccgagcagctgatcgcgttgaagcgaaaaatctttccacggagacgaatccacaaggaagcgagtccaaatcgcattcgggtg

SEQ ID NO: 17014 - DNA, 3768 bp, synthetic construct
  misc_feature 1..3768: note = source = /note="Description of Artificial Sequence: Synthetic coding sequence"
  source 1..3768: mol_type = other DNA
atgttgtttaagttgcttcagaggcagacttatacctgtctgtctcatagatacggcctgtatgtgtgcttcttgggtgttgtggtgactatcgtgagcgctttccagtttggagaggttgtcctggagtggagccgcgaccagtatcatgtgttgttcgacagctatcgcgacaacatcgcaggaaaaagcttccagaacagattgtgcttgccaatgcctatcgatgtggtatatacttgggtcaacggaaccgatctcgagctccttaaggaactccagcaggtgcgtgaacagatggaagaagaacaaaaggctatgcgcgagattttgggcaagaacactacagagcctaccaagaagagtgaaaagcaacttgaatgtcttttgacacactgtatcaaagtgcctatgcttgtgttggaccccgctctccccgccaacatcaccctgaaagacctcccatctctgtaccctagctttcatagtgcctcagacatcttcaacgtggcaaaacccaagaaccccagcacaaacgtctccgttgttgtcttcgactccactaaagatgtagaggacgcacatagtggattgttgaagggtaactccaggcaaaccgtctggaggggatacctcactacagacaaggaagttccaggactggtgcttatgcaagacctggcctttttgtccggtttcccacccaccttcaaagaaactaaccagttgaagactaagctgcccgagaatctcagttccaaggtaaagctgctccagttgtactctgaggcatcagtggctctcctgaagttgaacaatccaaaggactttcaggagcttaacaaacagactaagaaaaatatgactatagacggcaaagagcttactatctccccagcctatctcctctgggatctttcagccatttctcaatctaagcaagatgaggacataagcgctagtaggttcgaggacaatgaagaactgcgctacagcctcaggtcaatcgaacgccacgctccttgggtgagaaacatctttatcgtgaccaacggacagatcccttcctggcttaacctggacaaccccagggtgacaattgtcactcaccaagatgtgttcaggaatttgtctcatctgccaacatttagcagtccagccattgaatcccatattcatcgcatcgaaggactctcccagaagttcatctacctcaatgacgacgtaatgttcggcaaggacgtgtggcctgatgacttctactctcactccaagggtcagaaagtgtatctcacatggcctgttccaaattgcgccgaaggatgccccggatcatggattaaggacggttactgtgataaagcttgcaacaacagtgcctgtgattgggatggtggcgactgctccggtaacagcggaggatccaggtatatcgccggaggtggcggcacaggctccattggcgtgggccagccttggcaattcggaggtggcatcaactcagtgtcttactgcaaccagggatgcgctaatagctggttggcagataaattctgtgaccaggcctgcaatgtattgtcatgcggatttgatgcaggagattgtggccaggaccattttcacgagctgtacaaagtgatattgctgcccaaccagacccactacatcattccaaagggagaatgcttgccctacttctcctttgcagaggtggcaaagcgtggagtcgaaggtgcttacagtgacaacccaattattagacacgcttccattgccaataagtggaaaaccattcatctcataatgcacagcggaatgaatgccaccaccattcacttcaaccttacatttcaaaatactaacgacgaggaattcaagatgcaaatcaccgtggaagttgatacaagagagggccctaaacttaattccacagctcagaaaggctacgaaaatctcgtctccccaatcaccctgctccctgaggctgaaattctttttgaggacattcctaaggaaaaaagatttcctaagttcaagagacatgatgttaattctacccgtagggctcaagaagaagtcaaaatacccctcgtgaatattagtcttctgccaaaggatgctcagctctctctgaacacactggacctccagctggagcatggcgacatcaccctcaagggctacaatctttcaaagtccgcactgcttagatcctttcttatgaactcccagcacgctaaaatcaaaaaccaagctatcataactgatgaaactaacgactcactcgtggctcctcaagagaaacaagtgcacaagagtatcttgcctaattctttgggtgtgtctgagaggctgcagagactgacctttcctgccgtttctgttaaggttaacggacacgatcaaggacagaacccacctctcgatctggagaccacagcaaggttcagagttgaaacccatactcagaagacaattggtggcaacgtgacaaaggagaaacccccctcactcattgtgccactggagtcacagatgaccaaggagaagaagatcaccggaaaagagaaggagaatagcaggatggaggagaacgccgagaaccatatcggcgtaactgaggtgctgcttggtcgcaaattgcagcattacactgactcctacctcggattcctcccatgggagaagaaaaaatattttcaggacttgctcgatgaggaggaatcactcaagactcaactggcttacttcaccgactctaaaaacactggtaggcagttgaaggatacttttgctgatagcctccgttacgtgaacaagatcctcaattccaagtttggttttactagcaggaaggtgcccgcacatatgccacacatgatcgatcgcatcgtcatgcaggagctccaggatatgttccccgaagagttcgataagactagcttccataaggtccgtcacagcgaggacatgcagttcgcattcagctatttctattatctgatgagcgccgttcagccattgaatatttcacaggtattcgatgaagtcgatacagaccaatctggagttttgtctgaccgcgagattagaacattggctacacgtattcacgaattgcctctcagccttcaggacttgaccggtctcgagcacatgcttatcaattgtagtaaaatgttgcccgctgacatcactcagcttaacaacatccccccaacacaggagtcttactacgaccccaacctcccaccagttaccaaaagtctggtgaccaactgcaaacccgtgaccgacaaaatccacaaggcctataaagacaagaataagtataggttcgagattatgggcgaggaggaaatcgcttttaagatgattcgtaccaacgtaagccacgttgtgggccaactggacgacattcgtaaaaaccctaggaagttcgtttgcttgaacgacaatatcgatcacaaccataaggacgcacagaccgtgaaagccgtgcttcgcgacttttatgagtctatgttccctatcccttcacagttcgaactgcctcgtgagtataggaaccgtttcctgcacatgcatgaactccaagagtggagagcctacagggacaagctgaagttctggacccattgtgtccttgccactctcatcatgttcactattttttcattttttgcagagcagcttattgcactgaagcgcaagatcttcccccgtcgtcgcattcacaaggaggcctctcccaatcgtattcgcgtg

SEQ ID NO: 17015 - DNA, 3768 bp, synthetic construct; identical to SEQ ID NO: 16985
  misc_feature 1..3768: note = source = /note="Description of Artificial Sequence: Synthetic coding sequence"
  source 1..3768: mol_type = other DNA

SEQ ID NO: 17016 - DNA, 3768 bp, synthetic construct
  misc_feature 1..3768: note = source = /note="Description of Artificial Sequence: Synthetic coding sequence"
  source 1..3768: mol_type = other DNA
atgctctttaaattactacagaggcagacatatacatgtctttctcatcgatatggactgtatgtctgttttctcggagtagttgtgacgattgttagtgctttccagtttggggaagtggtcttagagtggagtcgggatcagtaccatgtcctatttgattcttacagagataacatcgctgggaaaagtttccagaatagactgtgtcttccaatgcctatcgatgtggtgtatacttgggttaatgggacagatctggaacttctcaaagaactccagcaggttcgggaacagatggaagaagaacagaaggcaatgcgggagatacttggaaaaaatacaactgaacctactaagaaatctgaaaaacagctcgaatgtctcctcacacactgtattaaagtgcccatgcttgtactagacccagctttacccgctaatatcacactgaaggatctcccctctctttatcctagttttcattccgcctctgatatcttcaacgtggctaaacccaaaaatccttccacaaatgtgtccgtggttgtttttgattcaacaaaagatgtcgaagatgctcatagtggactcctaaaagggaactcacgccagacagtctggcgtgggtatttgactactgataaagaggtgcccggactcgtacttatgcaggatttagcttttctgtcaggatttccccctacttttaaggagacaaatcagttaaaaacaaaacttcccgaaaatctgtcatcgaaagtcaaattactacagctctatagtgaagcctcagtagccctgctgaagctgaataaccccaaagatttccaggaacttaataaacagactaagaaaaatatgactatagatggaaaggaactcacaatatcaccagcttaccttttatgggatctcagtgccatatcccagagtaaacaggatgaagatatctctgcctcacgattcgaagataacgaggaactccggtattccctacgatccatcgaacggcatgcaccctgggtgcggaacatattcattgtgacaaacggacagataccttcatggctaaacttggataaccctcgcgtgactatagtcactcaccaggatgtattcagaaacttgtcacatctccccactttctcatctccagcaattgaaagtcacatccacaggatcgaagggctcagtcagaagtttatctatcttaatgacgatgtgatgtttgggaaggacgtgtggcctgatgatttttactctcacagtaaagggcagaaagtgtatctaacatggcccgtccccaattgcgctgaaggatgtcctggatcatggataaaggatgggtattgtgataaagcatgtaataacagtgcgtgtgattgggacgggggggattgtagtggaaattctgggggaagtaggtatatagcaggggggggaggaacaggatcaataggggtggggcagccttggcagtttggaggggggattaattccgtgtcttactgtaatcaggggtgcgcaaattcttggctagcggataaattctgcgatcaggcatgcaacgttttatcttgtgggttcgacgctggagattgtgggcaggatcactttcatgagctatacaaagtgattctcctccctaaccagacacactacataattcctaagggggaatgtctgccctatttctcattcgcagaagtggctaaaagaggggtggaaggggcctattccgataaccccatcatccgacatgcatccattgcaaataagtggaaaactatccaccttatcatgcactccggaatgaatgctacaactatacatttcaacctaacattccagaacacaaacgatgaagaattcaagatgcagataactgtagaagttgatacacgagaaggacccaaactcaactccacggcccagaaggggtatgaaaacctggtgtcgccaatcactctccttcctgaagccgagatccttttcgaagatatccccaaagaaaagagatttcctaaatttaaaagacacgatgtcaattctacaaggcgcgcacaggaagaagtgaagattccactagtgaacatctccctgctcccaaaagacgcacagttatcactaaacactctggatctgcagttagagcacggagatataacgctgaaaggatacaatctatctaagtccgccctactccgctcatttttaatgaattcccagcatgctaaaatcaaaaaccaggctattataacagacgaaacaaatgattctctagtggcacctcaggaaaagcaggtgcataaatctatcctgcctaattcccttggagttagtgagcggcttcagaggctgacatttcctgcagtcagtgtgaaagtaaatgggcatgaccaggggcagaacccacctctcgacttagaaacaacagcacggttccgagtagagactcatactcagaaaactattggagggaacgtcacaaaagaaaaaccaccttctctaatcgtgccactcgaatctcagatgactaaagaaaaaaagataacaggaaaagagaaggagaactctcgaatggaggaaaacgccgaaaaccacataggggtgactgaagtacttctcgggcgtaaattgcagcactacacagattcctatcttggatttcttccctgggaaaaaaaaaagtattttcaggacctcctcgatgaagaggaatccttgaaaacacagttggcctatttcacagatagtaaaaatactggacggcagctcaaagatacttttgccgattcactaagatatgtaaacaagatcctgaactcaaaatttggatttacatctaggaaagtgcctgctcacatgcctcatatgatagatcgaatcgtgatgcaggagctgcaggatatgttccccgaagaattcgacaagacatctttccataaagtcaggcactccgaagatatgcagttcgctttctcttatttttattacctcatgtcagccgtgcagccccttaacatctcacaagtgtttgatgaagtcgatactgatcagagtggagtgttgtcggatagggagatacgaactctcgccacacgaattcatgaactgccactgagtctgcaggatctgacggggcttgaacatatgctcatcaattgtagtaaaatgctgcccgctgatatcacacaacttaacaacatcccacccactcaggaaagttattatgatccaaatctacctccggtgacaaaatcactggttacaaattgtaaaccagtaactgataaaatacataaagcctataaagacaaaaataagtatagattcgagattatgggagaagaagagattgcatttaaaatgatcagaacaaacgtttcacacgttgtggggcagctcgatgatatccgcaagaaccctaggaaattcgtgtgtctgaatgataacatagatcataaccataaggatgcgcagacagtcaaagcagtgctgagagatttctacgaatctatgtttcccatcccttcacagttcgaactaccacgggaatatcggaatcgcttcctccatatgcatgaactgcaagaatggcgcgcatatagggacaagctgaagttctggactcactgtgtcttagctacattgattatgtttacaatcttttcattctttgcagagcagctcatagcacttaaacggaaaatatttccaaggcgaaggatccataaagaagcctcaccaaatcggattcgggtt

SEQ ID NO: 17017 - DNA, 3768 bp, synthetic construct
  misc_feature 1..3768: note = source = /note="Description of Artificial Sequence: Synthetic coding sequence"
  source 1..3768: mol_type = other DNA
atgttgttcaagctgctgcagcgccagacatacacctgcttgtcacaccgctatggcctgtatgtctgcttcctcggcgtcgtagtcacaatagtttcggcgttccagtttggcgaggtggtcctcgaatggagccgggatcagtaccatgtcctttttgactcttatcgcgacaatatcgcggggaagtctttccaaaatagactgtgtttgccgatgccaatcgacgtcgtttacacttgggtgaacgggaccgacctggagttgcttaaggagctacagcaggtgcgggagcagatggaagaggaacagaaagcaatgcgggagattttagggaagaatacgaccgaacctactaaaaagtcggagaagcagctcgaatgtctcctaacccactgtattaaagtccctatgctcgtgctggacccagctttacccgcgaatattactttgaaggatcttccctcactgtacccctccttccatagcgcctcagacatttttaatgttgcaaaaccaaagaacccttctaccaatgtctcagtggtggtgttcgacagcacaaaggatgttgaggacgcccatagcgggttgctgaaaggcaactctcgccagaccgtctggaggggctacctgactacagacaaggaggtgcctggtcttgtgctgatgcaggacttggcctttctctccgggttcccgcctactttcaaagaaaccaaccagctcaagacaaaactgccggaaaacctcagctcaaaggtaaaactactgcagctctacagtgaagcttcagtagccctcctcaagctcaataaccccaaagattttcaggagctaaacaaacagacaaagaagaacatgacaatcgacggtaaggaactaaccattagtcccgcctatctcctgtgggacctctcggcaatatcacagagcaagcaggatgaggatatcagcgcctcccgatttgaggataatgaagagctccggtattcactacggtccatcgagaggcatgctccctgggtgcgcaatatattcatcgttaccaacgggcagataccatcgtggcttaatttggacaaccccagggtgacaattgtcacgcatcaagacgtgttccgaaatctctcccacctgccaaccttctctagtcccgcaatagaaagccacatacataggattgaggggcttagtcagaaatttatctacctcaacgatgatgttatgttcggcaaggacgtttggcccgatgacttttactcccacagcaaggggcagaaagtgtatcttacatggccagtcccgaattgcgctgaaggctgcccaggatcatggattaaagacggatattgtgacaaggcttgcaataattcggcttgcgattgggacgggggggactgttcaggcaactcaggtgggagcaggtatattgccggcggaggaggcactggcagtattggagtgggacagccatggcagttcgggggcggtatcaattccgtgtcctactgcaaccagggctgtgccaattcatggctggctgataaattctgcgatcaggcttgcaacgtattgtcctgcggatttgatgcaggggactgtgggcaagaccacttccacgagctgtataaggtcattctgctgcccaaccaaacacactacataatccctaagggagagtgcctcccatatttcagctttgcggaggtggcaaaaagaggagtggagggcgcttactctgataaccctatcatccgacatgcatccattgccaataaatggaagacaatccatctgattatgcatagtgggatgaacgctaccacgatccactttaatctcacattccaaaacaccaatgatgaagagttcaagatgcagatcactgttgaagttgatacccgtgaaggaccgaagcttaacagcaccgctcagaagggttatgaaaacctggtttctcccatcactttactgcccgaagccgagatactgttcgaggacatccctaaagagaaacgattccctaaattcaagcgccatgacgttaactctaccaggcgcgcccaggaagaagttaagatccctttggtgaacataagccttctgcccaaggatgctcagctgtctctcaatacgctggacttgcagctggaacacggagacattaccctgaaaggctacaacctcagcaaaagtgctctgctccggtcattcctgatgaactcccagcatgccaagattaaaaaccaggctatcattaccgacgagacaaatgatagtctcgtggctccgcaggagaagcaggtgcacaagagtattcttcccaacagtttgggtgtgtccgaacgtttacaacgacttacctttcctgccgtgtcagtgaaggtgaacggccatgaccaaggacagaaccccccccttgatctggaaaccacggctaggttccgagtcgaaacccacacccagaaaactatcggaggcaacgttacaaaagagaagccacctagtcttatcgtcccgctggagagccagatgactaaggagaaaaaaatcaccggaaaagaaaaagagaattcccgaatggaggagaatgcagaaaatcatataggagtgaccgaagtgcttctcgggagaaaactgcaacattatacggatagctatttagggtttctaccatgggagaagaaaaagtactttcaggatttactcgatgaggaagagtctctgaagacccagcttgcgtacttcaccgacagcaaaaatacaggaagacagctgaaggataccttcgctgattctctgcggtatgtgaacaagatcttgaactccaaattcgggttcacatccaggaaggttcccgcgcatatgcctcatatgatcgaccgaatcgttatgcaggaactccaagatatgtttccggaagaattcgataagacgagctttcataaggttcgccactccgaggacatgcagttcgcctttagttatttttactatctgatgagcgcagtgcagccccttaacatcagccaagtgttcgatgaagtggacaccgatcaatcaggggtactgtctgaccgcgaaattcggacacttgccacccgaatacacgaactgcccctgagcctgcaagacctcaccgggctggaacatatgttaattaattgttctaagatgctgcctgccgatataacccagctcaataatatcccaccaacacaggagtcttactatgatccgaatttgcctcccgtcactaagagcctcgtcaccaactgtaagcctgtgacagataagatccataaggcatataaagataagaacaaatatcgcttcgagatcatgggtgaggaggagatcgcctttaaaatgatccgtaccaatgttagccatgtggttggtcagctcgatgatatccgtaaaaaccctcgcaagtttgtgtgccttaatgacaatatcgaccacaaccataaggacgcgcagaccgtcaaggccgtcctccgcgacttttacgagagcatgttccctattccctcgcagtttgaactgccgagggaatatagaaatagatttcttcacatgcacgagctccaggagtggagggcctaccgagataagttgaagttttggacccactgtgtgctcgcaactttaattatgttcactattttcagcttttttgccgaacagctgatcgctctcaagcgaaagattttcccaaggagacgcatccacaaagaggcctcgccaaataggatcagggtt

SEQ ID NO: 17018 - DNA, 1602 bp, synthetic construct
  misc_feature 1..1602: note = source = /note="Description of Artificial Sequence: Synthetic coding sequence"
  source 1..1602: mol_type = other DNA
atggcaaccgccctcatggccgtggtcttgcgggccgctgctgtagccccgcgcctgcggggaaggggcggaactggaggggctcggagactgtcttgcggagccagaagaagagcagcccgaggcacttccccgggacgcagactgtcgactgcgtggtcccaaccgcagccaccgccggaagaatacgcgggagcggatgacgtgtctcagtcgccggttgcagaggaaccgagttgggtcccatccccgcgtccacccgtcccgcacgaatccccggagcctccgtctggccgtagcctcgtgcagcgagatatccaggcattcctcaaccaatgtggtgcctcccctggagaggcaagacactggctgacgcagtttcaaacttgccatcacagcgcggataaaccatttgcggtgatcgaggtggatgaagaggtgctcaagtgtcaacagggcgtgtcctcgctggcgttcgcactggctttcctgcagcgcatggacatgaagcctttggtggtcctgggcctcccagccccgactgcaccttccggatgcctctccttttgggaggcaaaggcgcagctcgccaagtcttgcaaggttttggtggatgctcttcgacataacgcggcggccgcagtacctttcttcggaggaggtagcgtgctccgggccgctgagcctgccccgcacgccagctacggtggtatcgtctccgtggagactgacctcctgcagtggtgcttggaatccggctccatccctatcctgtgcccaatcggggaaaccgcagcgaggcgcagcgtcctcctggactcgctggaggtgaccgcgtctctggccaaggccctgcgcccaaccaaaatcatcttcttgaacaataccgggggcctccgtgattcatcgcacaaggtgctttcgaacgtgaaccttccggccgatcttgatctcgtgtgtaatgctgaatgggtgtcgaccaaggaacgacaacaaatgcgcctgatcgtggacgtcctgagccgcctgcctcatcactcatcagccgtcatcaccgccgcctcaaccctcctgaccgaattgtttagcaataagggaagcggtaccctgtttaagaacgccgagcgcatgttgcgggtgcgctcgttggacaaactggaccagggacgcttggttgatctggtgaatgcatcattcgggaagaagctgagggatgactacctggcttcgcttcggccccgattgcacagcatttacgtgagcgagggttacaacgccgctgcgatcctgactatggaaccagtcctcggcgggactccataccttgacaaattcgtggtgtcatcaagccgccagggacaaggttccggacagatgctctgggaatgcttgagacgcgatctgcaaactctgttctggagaagccgcgtgactaacccgattaatccatggtactttaagcactcagacgggtccttctccaataagcagtggattttcttttggttcggactcgcggacatacgcgacagctatgaacttgtgaaccatgcgaaaggactccctgattcgttccataaaccagcctcagaccctggaagc

SEQ ID NO: 17019 - DNA, 1602 bp, synthetic construct
  misc_feature 1..1602: note = source = /note="Description of Artificial Sequence: Synthetic coding sequence"
  source 1..1602: mol_type = other DNA
atggccactgccctgatggccgtcgtgctgagagcagcggccgtcgctccaaggctgcgcggtagaggcggtaccggtggtgctcgccgcctttcctgcggagctcgcaggagggcagcaaggggcacttctcctggcagaaggcttagtaccgcatggtcacagccccaacctcccccagaggagtatgccggcgcagacgatgtctcacagagtcccgttgcagaagaaccatcctgggtgccatctccgaggccccccgttccacacgagtcccccgaacctccctcaggaaggtcccttgtccaaagggacatacaggctttcctcaatcagtgtggtgcgagtcccggtgaagcaagacactggcttacacagtttcagacctgtcatcatagtgccgacaaacctttcgccgtcattgaggtggacgaggaggttctgaagtgccagcaaggcgtgtcctctcttgctttcgccttggcgtttctccagcgcatggatatgaagcccctggttgtattgggactgccagctcctaccgctccctctggatgcctgtccttttgggaggctaaggcccaactggcaaagagttgcaaagtgcttgtagatgcactcagacacaacgcggctgcagccgttcctttctttggtggaggttcagttctcagagccgctgagccggctcctcacgctagctatggcggcatcgtatctgttgagaccgatcttctgcagtggtgtctggagtccggttctatcccgattctctgccccatcggtgagaccgctgcgagaaggagcgtcctcctggacagcctggaggtgacggcctccttggctaaggcccttcgcccaacaaagataatcttcttgaataataccggaggccttcgcgattcatcacataaggtgctgagcaatgtcaatcttcccgcggaccttgacctggtctgtaacgccgagtgggtatctacaaaagagcgccaacagatgagactgatcgtggatgtgttgtcccgccttccccaccatagctctgctgtcatcaccgcggccagtaccctcctcaccgaactgttctctaataagggtagtggcaccctgtttaagaacgcggaaaggatgctgagggtgagatctcttgataaactcgaccaaggaaggctggtcgatctcgtaaatgcctcctttggcaagaagctgagagatgattacctggccagcctccgcccacgcctccatagcatctacgtgtccgagggctataatgctgctgccatcctcacaatggaaccagtccttggtggaacaccataccttgacaaatttgtagtgagtagttctaggcagggccaaggttcaggccagatgctttgggaatgcctgaggagagacctccaaacactgttctggagatccagagtgactaacccaattaacccctggtactttaaacacagtgacggatcattctccaacaaacaatggatcttcttctggttcggtttggccgacatcagggactcctatgagctggtcaatcacgctaagggccttcccgactctttccataagcctgcctcagacccgggctct

SEQ ID NO: 17020 - DNA, 1602 bp, synthetic construct
  misc_feature 1..1602: note = source = /note="Description of Artificial Sequence: Synthetic coding sequence"
  source 1..1602: mol_type = other DNA
atggcgaccgcactcatggcagtggtgctgagagccgctgccgtggcaccacggctccggggcagaggtggaaccggaggggcacgtaggcttagctgtggggcccgtaggcgtgcagctcgagggacctcgccaggccggaggcttagcactgcgtggagccagccccagcccccacctgaggaatacgcgggtgcagacgatgtgtcccagtccccagtggctgaagaaccctcctgggtcccaagcccgaggcctcctgtgcctcatgaatcccctgaaccaccctcaggaaggtcccttgttcaaagggatatccaagcatttcttaaccaatgtggagcctccccaggagaggccagacactggctgactcaatttcaaacttgccaccactcggcagacaagccgttcgcggtcattgaagtggatgaggaggtgcttaagtgtcagcagggagtctcgtcacttgccttcgccttggcatttctccagaggatggacatgaagccactggtggtcctgggtctgcctgcccctactgcacccagcggatgtctttccttttgggaagcaaaggcccagctggccaagtcgtgtaaagttctggtggacgcgctgagacataacgccgcagccgcagtgccatttttcggaggaggctccgtgcttcgggcagcagaaccggccccacatgcatcgtacggcggaattgtgtcagtggagactgatctcctgcagtggtgtctcgagtcaggatcaatacctatcctgtgccccattggtgagactgcagcgcgccgctccgtcctgctcgattcgcttgaagttacggccagcctggccaaggcactgcggcctactaagattatctttctcaacaacacgggtggactccgagattcctcccataaggtcctgagcaacgttaacctgccagcagacctggacctcgtgtgtaatgcagaatgggtgtccactaaagaaaggcagcagatgagactgattgtggacgtcctctcaagacttcctcaccatagctcggcagtcataaccgcagcatcgaccctcttgaccgagctctttagcaacaaaggttccggtactttgtttaagaacgccgagcggatgctgcgtgtgcggtcgcttgacaaactggaccaaggacgtcttgtggacctggtgaatgcatcctttggtaagaagttgagggatgattacctcgcgtccctgcgcccgaggctgcattcgatctatgtgtcagagggttacaacgccgccgccattctgaccatggaaccagtgcttggaggcaccccctatctcgataagtttgtggtgtcatcatcgcggcaggggcaaggttccggacaaatgctttgggaatgcctgcggagagatctgcagactttgttttggcgctcaagggtgacgaatccgattaacccttggtactttaagcatagcgacgggtccttttcgaataaacagtggattttcttctggtttgggcttgcagatataagggactcgtacgagctggtgaaccatgccaaaggattgcccgattcgtttcacaaaccagcaagtgatcctggttcg

SEQ ID NO: 17021 - DNA, 1602 bp, synthetic construct
  misc_feature 1..1602: note = source = /note="Description of Artificial Sequence: Synthetic coding sequence"
  source 1..1602: mol_type = other DNA
atggccacagccctgatggcagtggtgcttcgcgccgctgcggtcgcccctcggctcagggggcggggaggcactgggggggcccgaaggctaagctgtggagcacgaaggagagcagcccgaggcacctctccgggccgaagattatctacggcgtggtcacagcctcagccccccccagaagaatatgccggggccgacgacgtgtcacaaagtcccgtggccgaagagccaagctgggtgccctctccgcggccacccgtcccacacgagtctcccgaacctccttcgggccgctcccttgtgcagcgggacatacaggccttcctgaatcaatgcggcgcctcacctggcgaagcgaggcactggctcacacagtttcagacgtgccatcatagtgcggacaagccttttgctgtcatcgaggtggatgaggaggtcctgaagtgtcaacagggcgtgtcaagcctggcctttgctcttgccttcctccagaggatggacatgaaacctctggtggtgctgggcctgccagccccaacagccccaagtgggtgcctctcattctgggaggcaaaggcacagctggctaagagctgcaaggtgcttgtggacgcccttaggcacaatgcggccgccgcggtgcccttctttgggggtgggagcgtccttcgagccgctgagccagcccctcatgcaagctacggcgggatcgtctccgtcgagaccgacctgctccagtggtgcctggaaagcgggagcattcccattctgtgccctataggggaaaccgcggcccgacgaagcgtgttgctggattctctggaggtgaccgccagtcttgcaaaggctctgagaccaaccaagatcatatttcttaacaatactggcggtctgcgcgattcgtcccataaagttctttccaatgtaaatctccctgccgatttggacctggtgtgcaacgcggagtgggtgtccacaaaggagaggcagcaaatgagactcatcgttgacgtcttgtcaaggctgccacaccattcttcagccgtcatcactgctgcatccacgttgctgacagagctctttagcaataagggaagcggcacactctttaagaatgcagaacgaatgctgagggtccgaagtctggataagctggatcagggacggcttgtggacctggtgaatgcctcgttcggcaagaagttgcgcgatgactatctggcgtcgctgagaccaagactacatagcatatacgtctccgaaggctacaacgcagcagctatcctgaccatggaacctgtgctagggggtactccctacctggacaagttcgtcgtatcctcttcccgacaaggccagggtagtgggcaaatgctgtgggaatgtctccggcgggacctccagacgcttttctggcgcagcagagtaactaaccccattaacccatggtattttaaacactcggacggaagtttcagcaataagcagtggatttttttctggtttgggcttgcagacataagagattcctacgagctcgttaatcacgcgaaaggacttcctgactccttccataagcctgcaagcgaccccggtagc

SEQ ID NO: 17022 - DNA, 1602 bp, synthetic construct
  misc_feature 1..1602: note = source = /note="Description of Artificial Sequence: Synthetic coding sequence"
  source 1..1602: mol_type = other DNA
atggccactgctctcatggcagtcgtgctcagagccgcagcagttgctcccaggctcaggggaaggggcggaactggtggagcgcgaaggctctcgtgtggcgccagacggagagcagccaggggtactagcccaggtcgtagactgtcgaccgcgtggtcgcagcctcagcccccacctgaagagtatgccggtgcagacgatgtgtcacaatcgccagtggcagaagagcccagctgggttccttccccccgccctcctgtccctcatgaatcgccagagccgcctagcgggcgctcactggtccaaagagatatccaggcattcctcaaccaatgcggtgcgagccctggagaggcacgtcattggcttactcaatttcaaacttgccatcattcagcggataagccatttgcagtgatcgaagtggatgaagaggtgctcaagtgtcagcagggcgtctcatcccttgcatttgcactggcctttcttcagaggatggatatgaagcccctcgtcgtgctgggactgcccgcacctactgcgccaagcggttgtcttagcttttgggaagcaaaagcacagctggctaaaagctgtaaggtgcttgtggacgcacttagacataacgcggcggcagcagtgcccttttttgggggtgggtcggttctccgcgcagcagagcctgcaccacatgcatcctacggcggaatcgtctccgtggaaactgacctgcttcaatggtgtctggagtcggggtcgattccgatcctttgtcctatcggagaaactgcggcacgaaggagcgtgcttcttgactcgttggaggtcacggcatcgcttgccaaggccctcagacctactaagataatcttcctgaacaacaccggtgggcttcgggactcgagccataaggtgctttcaaacgtgaatcttcccgcagacctggacttggtgtgtaacgccgaatgggtgagcaccaaggaacgacagcagatgcgcttgattgtggacgtgctgtctcgccttccccatcatagctccgcagtgattaccgcggcgtcaacccttcttaccgaactttttagcaacaaaggttcaggcaccctgtttaagaacgctgagcggatgctgagagtgaggagcctggataaactcgaccaagggcggcttgtggacctggtgaacgcttcatttgggaagaagctccgcgatgattacctggcatccctgcggccacgactgcactcaatttacgtatccgaagggtacaacgccgcagcgatccttaccatggaaccagtgctcggcggaaccccatacctggataagtttgttgtgtcctccagtagacaggggcaagggtcagggcagatgctgtgggaatgtctgagaagagatctgcaaacccttttttggcgatcccgggtcactaatccaattaacccatggtacttcaaacattcagatggatccttttctaacaagcagtggatctttttctggtttggactggcagatattcgggattcgtacgagcttgtgaaccatgcaaagggactgccagacagctttcataagccggcctccgatcctgggtcc

SEQ ID NO: 17023 - DNA, 1602 bp, synthetic construct
  misc_feature 1..1602: note = source = /note="Description of Artificial Sequence: Synthetic coding sequence"
  source 1..1602: mol_type = other DNA
atggccactgccctgatggcagtggtgctccgggctgcagcagttgccccaagactacggggtcggggaggcactggcggcgcccgccgcctgtcctgcggggcaagacgacgggctgcaaggggcacatcccccgggcgaagattatcaaccgcatggagccagccccagccccccccagaagaatatgctggcgccgacgatgtttcacagtctcctgtcgctgaagaacccagctgggtacccagcccaaggccccccgtaccacacgagtcacctgaacctccttccggccgctccctggtccagcgggatattcaagcattcctgaaccagtgtggcgccagccccggagaggctagacattggctgacccagttccaaacttgtcatcattcagcagacaagcctttcgccgtgatcgaggtggatgaggaggtgctgaaatgccagcagggtgttagcagcctagctttcgccttagcatttcttcaacggatggatatgaagcccctggtggtgctgggactgcccgcacctacagcccccagtggctgtctgagtttctgggaggctaaggctcagctggctaagtcttgtaaagttctggtggacgctttgagacacaacgctgctgccgccgtgcccttttttgggggcggaagcgtactgagggctgccgagcctgcaccacatgcatcctatggcggtatcgtttccgtcgaaactgatctcctacagtggtgcctggaatcaggaagcataccgatactttgcccaataggcgagactgccgcccgccggtctgtgctactggactcactggaagtcaccgcttctttggcaaaggccctgcggccaaccaagattatttttctgaataacacaggcgggctcagagactccagtcacaaggtgttgtccaacgtgaatttgcccgccgatctggatttggtgtgcaacgctgagtgggtgtctacaaaggaacgacagcagatgcggctaatcgtcgatgttctatccagactaccacatcactctagtgctgtgataaccgccgcaagcactctgctcactgagctattttccaataagggcagcgggaccctatttaaaaatgctgaacgaatgctcagggtgaggtccctcgacaagctggaccaaggccggctagttgatttggtcaacgcttcttttggtaaaaagttgagggacgattaccttgctagcctccggcccagactgcatagtatatatgttagcgaagggtataacgctgcagccattctaaccatggaaccagtgctgggggggacaccctacctagacaaattcgtggtgagcagttcccggcaagggcaggggagtggccaaatgctgtgggagtgcttaaggcgggacctacagactctgttctggcggtcaagagtgaccaacccaataaacccatggtacttcaaacattccgacggcagcttctctaataaacagtggatcttcttttggtttggtctcgctgatatacgcgattcttatgaactggttaatcatgctaaaggtctccctgatagtttccataagcccgcctctgaccctggcagt

SEQ ID NO: 17024 - DNA, 1602 bp, synthetic construct
  misc_feature 1..1602: note = source = /note="Description of Artificial Sequence: Synthetic coding sequence"
  source 1..1602: mol_type = other DNA
atggcgacggcgctaatggcggtagtactacgagcggcggcggtagcgccgcgattacgtggtcgaggtggtacgggtggtgcgcgacgattatcgtgtggtgcgcgtcgacgagcggcgcgaggtacgtcgccgggtcgtcgattatcgacggcgtggtcgcaaccgcaaccgccgccggaagaatatgcgggtgcggatgatgtatcgcaatcgccggtagcggaagaaccgtcgtgggtaccgtcgccgcgaccgccggttccgcatgaatcgccggaaccgccgtcgggtcgatcgttagttcaacgtgatatacaagcgtttttaaatcaatgtggtgcgtcgccgggtgaagcgcgtcattggctaacgcaatttcaaacgtgtcatcattcggcggataaaccgtttgcggttatagaagtagatgaagaagtattaaaatgtcaacaaggtgtatcgtcgttagcgtttgcgctagcgtttctacaacgtatggatatgaaaccgttagtagtattaggtctaccggcgccgacggcgccgtcgggttgtctatcgttttgggaagcgaaagcgcaattagcgaaatcgtgtaaagttttagtagatgcgttacgacataatgcggcggcggcggttccgttttttggtggtggttcggttttacgtgcggcggaaccggcgccgcatgcgtcgtatggtggtatagtatcggttgaaacggatttattacaatggtgtctagaatcgggttcgataccgatactatgtccgataggtgaaacggcggcgcgtcgttcggtactactagattcgttagaagtaacggcgtcgctagcgaaagcgctacgtccgacgaaaataatatttttaaataatacgggtggtttacgtgattcgtcgcataaagtactatcgaatgtaaatctaccggcggatctagatttagtttgtaatgcggaatgggtatcgacgaaagaacgtcaacaaatgcgactaatagttgatgtactatcgcgactaccgcatcattcgtcggcggtaataacggcggcgtcgacgttattaacggaattattttcgaataaaggttcgggtacgttatttaaaaatgcggaacgtatgttacgagtacgatcgctagataaattagatcaaggtcgtctagtagatttagtaaatgcgtcgtttggtaaaaaactacgtgatgattatctagcgtcgttacgtccgcgtttacattcgatatatgtatcggaaggttataatgcggcggcgatattaacgatggaaccggtattaggtggtacgccgtatttagataaatttgttgtttcgtcgtcgcgtcaaggtcaaggttcgggtcaaatgctatgggaatgtctacgtcgtgatctacaaacgttattttggcgttcgcgagtaacgaatccgataaatccgtggtattttaaacattcggatggttcgttttcgaataaacaatggatatttttttggtttggtttagcggatatacgtgattcgtatgaactagtaaatcatgcgaaaggtttaccggattcgtttcataaaccggcgtcggatccgggttcg

SEQ ID NO: 17025 - DNA, 1602 bp, synthetic construct
  misc_feature 1..1602: note = source = /note="Description of Artificial Sequence: Synthetic coding sequence"
  source 1..1602: mol_type = other DNA
atggctacagctttaatggcagtcgttctccgtgcggctgctgtggcacctcgcctgcgtggccgcggtggtaccgggggggctcgacggctgtcctgcggcgcccgacgccgcgccgcccgtggcacctcgccggggcgtaggctgagcacagcctggagtcaacctcagcctcccccagaggaatacgctggcgctgacgatgtgagccagagccctgtggcagaggagcccagctgggttccgtccccacggccccccgtgccgcacgagtcccctgaaccaccgtcgggacgcagtctggtgcaacgagacattcaggcgtttttgaaccagtgtggtgcgagcccgggagaggctaggcattggctcactcagtttcagacatgccaccactcagctgacaagcccttcgccgtgatcgaggttgatgaagaagtcctgaaatgccagcagggtgtatcatcgctagccttcgcattggcatttttgcagcggatggatatgaaacctctggtggtgctgggcttaccagcccccaccgctccatcgggttgtctctcgttctgggaggcgaaggcgcaactcgcaaagtcttgcaaggtcctggttgatgcgctcagacataacgcggctgctgccgtaccgttttttggaggaggttcggttctccgcgcagcagaaccggcgccacatgccagctatggaggtatcgtttcggtcgagacggacttgctccaatggtgcctcgaatcgggatctattcccatcttgtgtccaatcggagagaccgcggcccgacgatccgtcttgctcgactcgttagaggtcaccgccagtcttgcaaaggctttgcggccaacaaagataatctttcttaacaatactggcggactgcgagactctagccataaggtcctgagtaatgtaaacctcccagccgatcttgatctagtgtgcaacgcagaatgggtctctaccaaggaacgacagcagatgcgtctgattgttgatgtcctctcacggctgcctcatcattccagcgccgtcataactgcggcgtcaacccttttgaccgaacttttttcaaataaaggctccggcaccctgttcaagaacgccgaaaggatgcttcgagtgcggtcccttgacaaacttgatcaaggtcgcttggtcgatttggtcaatgccagttttggcaagaagctccgagacgattacctcgcttctctgcgtccgcgcctccactcaatctatgtttccgagggatataacgctgccgcgattttaacgatggagccagtcttaggtggcacaccttatcttgataagtttgtcgtttctagcagccgacaaggtcagggttcaggtcagatgttatgggagtgcctgaggcgagatcttcagactcttttctggagaagccgggtcaccaatccaatcaatccgtggtattttaagcactcggatggaagtttttccaataaacagtggatttttttctggttcggcctcgctgacattcgtgattcctacgaattggtgaatcacgccaaaggcctccctgattccttccataagcctgcttcagatccaggctca

SEQ ID NO: 17026 - DNA, 1602 bp, synthetic construct
  misc_feature 1..1602: note = source = /note="Description of Artificial Sequence: Synthetic coding sequence"
  source 1..1602: mol_type = other DNA
atggccacagcgctgatggctgtggtgctgcgggccgcagcggttgcacccagacttcgcggacggggaggaaccggtggcgctcgcagactgtcctgcggcgcccggaggcgggccgcaagaggcacgtctcctggcaggagactgagcaccgcttggagccagccgcagccaccgccagaagaatacgccggcgctgacgacgtgagccagtccccggtggcagaggagccgagttgggtccccagtccccgcccacccgttcctcacgaatctcctgagcccccgtctggccggtctctcgtgcagcgcgacattcaggcatttctgaatcagtgtggagccagtcccggagaagcgcgccattggttaactcagttccagacttgtcatcattcagccgacaagccttttgctgtgattgaggtcgatgaagaggtgcttaaatgccagcagggagtctcctcacttgcctttgccctcgcctttctccagagaatggatatgaaaccgctcgtcgtgcttggtctgccagcacccaccgccccatctggttgtctgtcattctgggaggctaaggctcaattggccaagagttgtaaggttcttgtcgatgctcttcggcataacgcagcagcggccgtgcccttctttggagggggaagtgtgctgcgtgctgcagagccagctccccatgctagttacggaggtatcgtgtccgttgaaactgacctgttgcagtggtgtttggagagcggctccatccctatcctgtgcccgattggagaaaccgcggcccggcgctcggtgttactcgatagcttggaggtgacagcatcactggcgaaagccctaagacccacaaaaataatcttcctgaacaacaccggcggcctcagggattcttctcataaagtcctgagtaacgtcaacctgcctgcggatcttgatctggtgtgcaatgcagagtgggtaagcaccaaggagcggcagcaaatgagattgattgtggatgtgctgtcacgtttaccgcaccattcaagcgcagtgatcacagctgccagtacattgctgaccgaacttttctcaaataagggtagcgggaccctgttcaaaaacgccgagagaatgctccgtgttagatccctagacaagctcgaccagggccgccttgtcgatctcgtcaatgcctctttcggaaaaaaactaagggatgattacctcgcgtcactgagaccccgtctgcacagtatctatgtatctgaaggatataatgcagccgcaatactgacaatggagcctgtcctggggggcaccccttaccttgacaagtttgtagtgtcttcaagccggcaggggcaagggtccggccagatgttgtgggaatgtctgagaagggacctgcagacgctcttttggcggagccgagtgacaaaccccatcaatccctggtattttaagcacagtgacggctctttttcgaacaagcagtggattttcttttggttcggactagcagacatacgcgatagctacgaactggttaaccatgctaagggtcttccggacagcttccacaagcccgcctccgaccccggtagc

SEQ ID NO: 17027 - DNA, 1602 bp, synthetic construct
  misc_feature 1..1602: note = source = /note="Description of Artificial Sequence: Synthetic coding sequence"
  source 1..1602: mol_type = other DNA
atggccacagctttaatggcagtcgtgctccgagccgcagcggtggcaccacgattgagaggaagaggcggcaccggtggtgccaggcgactgtcgtgtggagctaggcgcagggctgcgagagggaccagccctgggaggcggttgtccacagcttggagtcagccccagccgccgccagaagagtatgctggcgctgacgatgtgagccagtcccccgtggctgaggagccgtcgtgggtccccagccccaggcctcccgtccctcatgagtcccccgagccccctagcgggcgttctttggtccaaagggatatacaggcattcctgaaccagtgtggcgccagtcccggcgaagctaggcactggctaacacagtttcagacatgccaccactcggcggacaagccgtttgccgtgattgaagttgatgaggaagtgctaaagtgccagcagggcgtgagctcccttgcgttcgcactcgcttttctgcagcgaatggacatgaagcccctagtggttcttggccttccggcccccactgcacccagcggttgcctgtccttctgggaggccaaagctcaactggctaagtcatgcaaagtacttgtagacgccctgcgccataacgccgcagcggccgtgccattcttcggcgggggaagcgtcttgagggccgcagagcctgccccccacgctagctacggtgggatcgtgagtgtagagacggatcttctccaatggtgtttagaatccgggtctattccaatcctatgcccaatcggagagacagctgcacgacgatccgttctgctggactcccttgaggtcacagcttctctggccaaggcccttaggccaaccaagattatctttctgaataacaccggcgggcttagagactcttctcacaaagttttgtctaatgtgaacttgcctgccgacctcgacctggtatgtaatgccgaatgggtctctaccaaagaaaggcagcagatgcgacttatagtggacgtgttaagcagacttccccaccactctagcgccgtaatcaccgccgcatctacattgctgactgaactgttctcgaacaaggggagtggaaccctgttcaagaacgccgaacgtatgctccgcgtgagatctctagacaaactcgaccaggggagactggtcgacctcgtcaacgcttctttcggcaagaagttgagagatgactacctggcttcattgcgtccacgcctgcatagtatttacgtgagcgagggatataatgccgccgcaatacttacaatggaacccgtcctgggaggaacaccgtatctggacaagttcgtagtctcgagtagccgacagggccaaggctccggccagatgttatgggaatgtctcaggcgagatctccaaacactcttctggcgaagtcgagtcactaacccaattaacccctggtacttcaaacattccgatgggtccttcagcaacaaacagtggatcttcttttggttcggcttagctgatattagggatagctatgagctagtaaaccatgccaagggtctgcctgactccttccataagcccgcctctgatcccgggtcc

SEQ ID NO: 17028 - DNA, 1602 bp, synthetic construct
  misc_feature 1..1602: note = source = /note="Description of Artificial Sequence: Synthetic coding sequence"
  source 1..1602: mol_type = other DNA
atggcaaccgcgctgatggcggtggtcctgcgggcagcagccgtggcgccgcgcttgagaggccggggaggaaccggcggggctagacggttgtcctgcggggccagacgccgggccgcccggggcacttcgccaggacgccgcctgtctactgcctggtcgcagccacaaccgcctccagaggaatacgccggagccgacgacgtgtcgcagagcccggtggccgaagaaccatcatgggtgccgagcccgcgaccgccggttccccacgaatcgccggaaccgccgtccggacgctcgctggtgcagagggacatccaggccttccttaaccagtgtggcgcatccccgggagaagcacgccactggcttacccagttccaaacttgccatcattccgccgacaaaccgttcgccgtgatcgaggtcgatgaagaggttctgaagtgccagcagggggtgagttccctggctttcgcactggcattcctccagagaatggatatgaagccgctcgtggtactggggttgccagcgccgactgcgccgtcaggatgcctctcgttttgggaagcgaaggcccagctcgccaagtcctgcaaggtgctggtggacgcgctgcgccataacgcggccgctgcggtcccgtttttcggaggggggtccgtgctgcgcgctgccgagccagcgcctcatgcgagctacggaggaatcgtgtcggtggagactgacctcctgcagtggtgcctcgaatcaggatcgatccctatcctgtgcccgatcggggaaaccgccgcacggcgatccgtcctgttggactcccttgaggtgaccgcatccctggccaaggcgttgcgccccaccaagatcatcttcctcaacaatactgggggactgcgggactcctctcacaaggtgctttcgaatgtcaacctcccagcagacctggatctggtctgcaacgccgaatgggtgtcaactaaggagcgtcaacaaatgagactgatcgtggatgtgctgtcacgcttgccgcaccactcgtccgcagtgatcacggcggcttcaaccctcctgaccgagctgttctcgaacaagggctcaggaaccctgttcaaaaacgccgaacgcatgttgcgggtgcgctcccttgacaagctggaccaaggacggctggtggacctcgtaaacgccagctttggtaagaagctgcgcgacgactaccttgcatccctccggccgcgcctgcactcgatttacgtttccgagggttacaatgcagccgccatcctcactatggaaccggtgttgggcggaacgccgtacctggacaagttcgtggtgtcgagctcacgccaaggtcagggatcgggtcaaatgctgtgggagtgtctgcggcgcgatcttcagaccctgttttggcgcagccgcgtgacgaatccgattaacccctggtactttaaacactccgatggatcattttcgaacaaacagtggatcttcttctggtttggcctcgcggatatcagagactcatacgagttggtgaaccatgctaaaggactcccggactccttccacaaaccggccagcgatcctggatcc

SEQ ID NO: 17029 - DNA, 1602 bp, synthetic construct
  misc_feature 1..1602: note = source = /note="Description of Artificial Sequence: Synthetic coding sequence"
  source 1..1602: mol_type = other DNA
atggcaacagcattaatggctgttgttttaagagctgcagctgtggcacctagattaagaggacgtggaggaacaggaggagcacgtagactttcatgtggagctagaagaagagctgcaagaggtacatcaccaggtagacgacttagtacagcttggtctcaacctcaaccaccacctgaagaatatgctggagcagatgatgtgagtcaatctccagttgcagaggaaccatcatgggttccttctccaagacctccagttcctcatgaatctccagaaccaccttctggaagatctttagttcaacgtgacattcaagcttttttaaatcaatgtggtgcttcacctggggaagcaagacattggttaactcaatttcaaacatgtcatcactcagcagataaaccatttgctgtaattgaagttgatgaagaagttttaaaatgtcagcaaggtgtcagttcattagcttttgcactagcttttttgcaacgtatggatatgaaacctttagttgttcttggattaccagctccaactgctccatcaggatgcctttcattctgggaagcaaaagcacaattagctaagtcatgtaaagttcttgttgatgctttgagacataatgcagcagctgcagtaccatttttcggaggaggaagtgtattaagagcagctgaaccagctccacatgcatcatatggaggtattgttagtgttgaaactgatttattacaatggtgtttagaatctggaagtatacctattctttgtccaattggagaaactgctgctaggcgatctgtccttcttgattctttagaagtaactgcaagccttgctaaagctcttagaccaacaaaaattatttttcttaataatacaggtggattaagagatagtagtcataaagttttatcaaatgtaaatcttccagcagatcttgatcttgtttgtaatgcagaatgggtgtctactaaggaaagacaacaaatgagacttattgtggacgtattatcaagattaccacatcattcatcagcagttattactgcagcaagtactttattaactgaattatttagtaataagggttcaggtactcttttcaaaaatgctgaaagaatgttaagagttagaagtttggacaaactagatcaaggaagattagttgatcttgtaaatgcatcttttggtaaaaaattaagagacgattatttagcatcacttcgtccaagattacattctatatatgttagtgaaggatataatgcagcagcaattctaacaatggaaccagttttaggtggtactccatatttagataagttcgttgtttcatcatctagacaaggacaaggatctggacaaatgttatgggaatgtttacgtagagatttacaaactttattttggagatcacgtgttacaaatccaataaatccatggtattttaaacattctgatggatctttctctaataaacaatggattttcttttggttcggattagctgatataagagacagttatgaattagtaaatcacgcaaaaggattaccagattcattccataaacctgcatcagatccaggatct

SEQ ID NO: 17030 - DNA, 1602 bp, synthetic construct
  misc_feature 1..1602: note = source = /note="Description of Artificial Sequence: Synthetic coding sequence"
  source 1..1602: mol_type = other DNA
atggccaccgccctgatggccgtggtgttgcgggccgccgccgtggctccaaggctccgcggaagaggagggactggaggtgctaggcggctgtcctgcggcgcgcggcggcgggcagctcgcggaacttcaccggggcggcgcctttccacggcctggagccagccacaacccccgccagaagagtatgcgggtgcagatgacgtgtcacaaagccctgtcgctgaagagccgtcttgggtgccgtctccccgtccgccggtcccgcacgaatcgcctgaaccgccctccggacggtcgctggtgcaacgcgacattcaggccttccttaaccaatgcggagccagcccgggagaggcccgacattggctcacccagttccagacctgccaccactcagccgataaaccatttgccgtcatcgaggtcgatgaagaggtgctgaaatgtcaacaaggcgtgagcagcctggcctttgctttggccttcctccagcggatggacatgaagccgctggtggttctcggtctgccggcgccgaccgctccttcgggatgcctgagcttctgggaagcaaaggctcaactcgcaaagtcgtgcaaggtgctggtggacgcactccggcataatgcagcggcggcagtgccgttctttgggggagggagcgtcctgcgcgctgcagagcccgcaccgcatgcctcgtacggcggaatcgtgtcagtggagactgatttgctccagtggtgtctggaatctggctccattccgatcctgtgtcctatcggagaaacggcagctcgccggtcagtcctgttggactcgctggaggtgaccgcatcgctggcgaaggcgcttcgcccgaccaaaatcatttttctgaacaataccggagggctgagagactcgagccataaggtcctgtcgaatgtgaatctgccggccgatctcgacctggtttgcaacgcagaatgggtgagcacgaaggagcggcagcagatgcgcctgatcgtggatgtgctctcaagactcccacaccactcgtcagccgtgatcaccgcagcgtcaaccctgctgaccgagctgttctcgaacaagggatcgggaaccctgttcaaaaacgctgaacgcatgctgagggtgcgaagcctggataaacttgatcaaggacgcctggtggacctcgtcaatgcgagcttcggcaagaagctgagagacgattacctggcttcgctgcgcccgcgcctgcactcgatctatgtctccgaggggtacaacgcggccgccatcctgaccatggaaccagttctcggaggaaccccatacctggacaaattcgtcgtcagctcgtcgaggcaaggccaaggcagcggacagatgctgtgggaatgccttcggagagatcttcagaccttgttctggcggtcgagagtgactaacccgattaatccatggtacttcaaacactcggacggatcattcagcaacaagcaatggattttcttttggttcggactggctgacatccgcgactcctacgaactcgtgaaccatgctaagggactgccggactcgttccacaagccagcatccgaccctggctca

SEQ ID NO: 17031 - DNA, 1602 bp, synthetic construct
  misc_feature 1..1602: note = source = /note="Description of Artificial Sequence: Synthetic coding sequence"
  source 1..1602: mol_type = other DNA
atggctactgctttgatggcagttgttttgcgtgctgccgctgttgctccaagattgaggggtaggggggggacaggtggtgctagacggctaagttgtggtgcacgtaggcgtgctgctcgcggaacgtcacctggacgcagactgtccacagcttggagtcaacctcagccccctcctgaggagtatgctggagccgatgacgtgagtcaatcccccgttgctgaggaaccttcctgggtgcctagcccccgaccacctgtccctcacgagtccccagaacctccaagcggaagaagtcttgtgcaacgtgatatacaggcttttcttaaccagtgcggggcaagtcctggggaagctagacactggttgacccaattccagacttgccatcactccgccgacaaacctttcgctgtcatagaagttgacgaggaagttcttaaatgccaacagggggtgagtagcctagcctttgcgcttgctttccttcagaggatggatatgaaaccactggtggttctgggcttgcctgcacctaccgccccatccgggtgcctatcattctgggaggctaaagcacagctggctaagagttgcaaggtcttagttgatgccctccgacacaacgcagcagctgctgtgccgtttttcgggggtggctccgtcttgcgtgctgccgagccagcaccacatgcttcatatggaggtattgtgtcggttgaaacagatttgttgcagtggtgcttggaatctggttctatcccaatcttgtgccctattggggagactgctgctaggcggagtgttttgctagattccctggaagtgactgcttcactagctaaggctcttcggcctacgaagattatttttctcaacaatacaggggggttgagggatagttcccataaggttctcagtaacgtcaacttgcctgctgatcttgaccttgtatgcaatgccgaatgggtttccactaaggaacgtcaacagatgaggctcatagttgatgttctttctagactacctcaccattctagcgcagtgattacagcagcttccacactgctgaccgagctattctccaacaaaggatccggaaccctatttaaaaatgctgagaggatgctaagggttcgctcacttgataagcttgatcaaggaagattagttgacctggtcaacgcctcatttggaaaaaaacttagggatgattacttggcttctttgaggccacgattgcattctatttatgtttcagaaggttacaacgctgctgctattcttacaatggagcctgtcctcggcggaacaccttatctggacaagtttgtcgtaagttcttctcggcaggggcaaggctcagggcagatgctttgggaatgtctccgtagagatcttcagacgcttttttggcggtctcgagttacaaacccgattaacccctggtactttaaacatagtgacggcagtttctccaataagcaatggatcttcttttggttcggtctagctgacatacgagactcttacgaattagtaaaccacgctaaaggacttcccgacagttttcataagcctgcatctgatccgggctcg

SEQ ID NO: 17032 - DNA, 1602 bp, synthetic construct
  misc_feature 1..1602: note = source = /note="Description of Artificial Sequence: Synthetic coding sequence"
  source 1..1602: mol_type = other DNA
atggcgacagctttaatggcggtggtcctgcgggcagcagctgttgcccctagactacgagggcgggggggaactggcggcgcaaggcgactgagttgcggtgcacgaagacgcgccgccagagggacgtctcccggacgacggctaagtactgcgtggagccaacctcaacctccccctgaggaatacgctggggcagatgacgtaagtcagtctcccgtggccgaagagcccagctgggtcccctcccctcggccccctgtgccgcacgagagccccgagcctcccagtgggaggagtctggtacaacgggatatccaagcattcttaaatcagtgtggagcatcacctggtgaagcacggcactggttgactcagtttcaaacctgccaccattccgcagacaaacccttcgctgtcatagaggtcgatgaggaagtgttgaaatgccagcagggagtctcttctctggcgtttgccctggcctttctgcaacgtatggacatgaagcctctggttgtattagggctcccggccccgactgccccttctggctgcttgtcattttgggaagctaaggctcagctggcaaagagctgtaaagttctagtcgatgctctgcgacataacgcggctgcagctgtccccttcttcggaggggggagcgtcctgcgcgccgccgagccagctcctcacgcttcttatggaggcatcgtctccgtggagactgatctcctacagtggtgcctggagtcaggaagcattccaattttatgcccgatcggggagacggccgctagacgctcagtgctgctcgactctctggaggtgaccgcttcattagcgaaggctctgcgccccacgaagatcatatttctcaataatactggcgggctgagagactccagccataaagtgctttccaacgtcaacctccctgcagacctggacctggtttgtaatgctgaatgggtgtccactaaagagcggcagcagatgcggttgatcgtggacgtcctgagcaggctgcctcaccactcttcggcggtcatcaccgccgcctccaccctgctgacagagctctttagcaacaaaggcagtggcaccctcttcaagaacgctgaaaggatgctgagggtacgatctctggataaactcgatcagggacgtctggtcgacctggttaacgcttccttcggaaaaaaactgcgggacgactatcttgcctctctgagacctcgcctgcattccatttacgtctctgagggttacaatgccgcagccatcttaacaatggagcccgttctcggtgggaccccctacctggataagtttgtggtgtctagctctcgccagggtcaaggcagcgggcagatgctgtgggaatgtcttaggcgcgacctgcagacactattctggaggtcccgggtgacaaatcccattaatccttggtactttaagcatagcgatggatcttttagcaacaagcaatggatctttttctggttcggcctggccgatatccgagattcgtacgaactggtgaatcacgctaaaggactgccagactccttccacaaacctgcaagtgatcccggtagc

SEQ ID NO: 17033 - DNA, 1602 bp, synthetic construct
  misc_feature 1..1602: note = source = /note="Description of Artificial Sequence: Synthetic coding sequence"
  source 1..1602: mol_type = other DNA
atggctaccgccctgatggctgtggtgctgcgcgccgccgctgtcgccccacggctgcgcggacgcggaggcactggaggagccagacggctgtcatgcggagcccgccgccgggcggcccggggaacctcaccgggacgccgcctcagcaccgcatggtcgcaaccgcagccaccacctgaagaatacgcgggagcagatgacgtctcgcagtcccctgtcgcggaagaaccaagctgggtgccgagcccgcggccgccagtccctcatgagagccctgaaccgccttctggacgctcacttgtgcagagagacatccaggcctttctcaatcaatgcggagccagcccgggagaggcacgtcactggctgacccaatttcaaacttgccaccactccgctgacaaaccatttgcggtcatcgaagtggacgaagaagtgctgaaatgccagcaaggcgtgtcgtcactggcctttgcgctggctttcctgcagcgcatggatatgaagcccctggtggtcctgggacttcccgcgccgaccgcaccatcaggatgcctgtccttctgggaagctaaggctcaattggcaaagtcatgcaaggtgctcgtggacgcgttgcgccacaacgccgcagccgccgtgccatttttcggaggaggatcagttctgagagcagccgaacccgcaccgcacgcttcgtacggcggtatcgtgagcgtggaaaccgatctgctccagtggtgcctggagtcaggaagcatccctatactgtgcccgatcggcgaaaccgccgcccgcagatcggtgttgctggactcccttgaagtgactgcctcgcttgccaaggcgctgcgcccgactaaaatcatcttccttaacaacaccggcggtctgcgcgactccagtcataaggtgctgtccaacgtgaatctgcctgcggacctcgacctcgtctgtaacgcagagtgggtgtccaccaaggagagacagcaaatgagactgatcgtggacgtgctctcaaggctccctcaccatagcagcgccgtgatcaccgccgcatcaactctgctgaccgagctcttcagtaacaaaggctccggaacccttttcaagaacgctgaacgaatgctgcgcgtgcggtccctggacaaactcgatcagggacggcttgtggacttggtgaacgcttccttcggaaagaaacttcgcgacgactacctcgctagcctgcgtccgcgcctgcactccatctacgtgtcggaaggctataacgcagccgccattctcaccatggagccggtcttgggagggacgccctatctggataagttcgtcgtgagctcatcgaggcagggccaaggatccgggcagatgctctgggagtgcctgagacgggacctgcaaactctcttctggcggtcccgcgttactaatccgatcaacccatggtacttcaagcattcggatggcagcttctcaaacaagcagtggattttcttttggtttgggctggccgacatccgggattcgtacgaactcgtgaaccacgccaaagggttgcctgactcgtttcataagcctgcctccgatccgggctct

SEQ ID NO: 17034 - DNA, 1602 bp, synthetic construct
  misc_feature 1..1602: note = source = /note="Description of Artificial Sequence: Synthetic coding sequence"
  source 1..1602: mol_type = other DNA
atggctaccgctctgatggccgtggtactgcgggcagccgctgtggcgcccagactccggggaagaggcggcaccggaggtgcaaggaggctgtcgtgcggggcccggagaagagccgcacgcggcacttcaccaggcagacgattaagcaccgcctggagccagccccagccaccaccagaagagtatgcaggggctgacgacgtgtctcaaagcccggtggctgaggagccaagttgggtgcccagcccaaggccacccgtcccgcacgaatcacccgagccccccagcgggcgatccttggtccagcgggatatccaggctttcctcaaccagtgtggtgctagcccgggggaagctcgccattggcttacacaattccaaacctgccatcactccgccgataaaccttttgccgtgattgaagtcgacgaggaggtgctaaaatgccagcaaggcgttagttctctggcattcgcgctcgcttttttgcagagaatggatatgaaaccgttggtggtactcgggctgcctgcacccaccgcaccctcggggtgtctaagcttctgggaagctaaggcacaattagccaagtcctgcaaagtgctggtggacgccttacggcacaacgctgccgccgccgttcccttctttggaggcggcagcgtgctaagggcggccgaacccgcgccacatgcatcatacggcggaatcgtgtccgttgaaaccgatctactgcagtggtgcctcgaatccggaagcatcccaatactgtgccctataggggagacagccgcaagacgaagcgtgcttcttgatagcttggaagtgaccgcaagcctggccaaggctctgcggcctacgaagatcatctttctcaataacacgggcggcctgcgtgactctagccacaaagtgctctcaaacgtgaatctgccagcagatctagatctggtctgtaacgctgagtgggtctccacaaaagagcggcagcagatgcggttaattgtagacgtgctctcaaggctgccccaccatagtagtgccgtgattaccgctgcgagcactctgttgacagaattgttctccaacaaagggagcgggactttgttcaagaacgccgagcggatgcttcgggtgaggtcgctggataagttagatcagggccggctggtcgaccttgtgaatgccagttttggtaaaaagctgcgggacgattacctggcctctctgcgtccccggttacactctatctacgtgtccgaaggatacaatgccgccgccattttgaccatggagcccgtgctcggggggacgccatatttggacaagtttgttgtgtctagttcccggcagggtcaggggagcgggcagatgttgtgggagtgtctgaggagggacttgcagacactgttctggcgttccagagtgaccaaccctatcaacccttggtactttaaacacagtgatggctcgttctccaataaacagtggatattcttctggtttggactcgctgacatccgggacagctatgaactggtgaatcacgcaaagggcctgcctgactcattccacaagccagccagtgacccaggtagc

SEQ ID NO: 17035 - DNA, 1602 bp, synthetic construct
  misc_feature 1..1602: note = source = /note="Description of Artificial Sequence: Synthetic coding sequence"
  source 1..1602: mol_type = other DNA
atggcaactgcgcttatggccgttgtcctccgcgcggcggccgtggccccgcgactgagaggacgcggagggaccggaggcgcccgcagactgtcgtgtggcgcccggagacgcgcggcacggggtacttcgccgggacgccgactgtccactgcgtggtcacagcctcagcctccaccggaagagtacgccggagcggacgacgtgtcccaatcgcccgttgcggaagaaccgtcgtgggtgccgtccccaagaccccccgtcccgcacgagtcacctgaaccccctagtggacggtcgttggtccagagagacattcaggcctttctcaaccaatgtggtgcgtcccctggagaagcgcggcactggctgacccagttccagacttgccatcatagcgccgacaagccgtttgccgtcatcgaggtggacgaggaagtgctgaagtgccaacagggagtctcaagcctggcgttcgccttggcattcctgcagcggatggacatgaaacctttggtcgtgcttggactgccggccccaaccgccccttccgggtgcctctcattctgggaggcaaaggcacaactggccaagtcatgcaaagtcctcgtggatgcgctccgccacaacgccgctgctgccgtgccatttttcggaggaggatcggtgttgcgggccgcagaacctgccccacatgcttcatacggaggtatcgtgagcgtggaaaccgatctgctccagtggtgcctggagtcagggagcattccgatcctttgcccgatcggagagacggcggcgagacgctcggttctcctggactcgctggaggtcactgcatcactggccaaagccctgcgcccaaccaagatcattttcctcaacaatactggaggattgagggactcatcccataaagtcctgagcaacgtgaacctgccggctgacttggatctcgtctgtaacgcggaatgggtgagcactaaggaacgtcaacagatgcgcctcattgtggatgtgctgtcgcgtctgcctcaccattccagcgccgtgatcactgccgcgtcaactctcctgactgaactgttctcgaataaaggaagcggcacgctgttcaagaatgcagaacgcatgctgcgggtccggtcgctggacaagctggaccagggacgccttgtggacctcgtgaacgcctcatttgggaaaaagctgcgggacgattacctggcgtcccttaggcctaggctgcactcaatctacgtgtcggaaggttacaatgccgcagccatcttgactatggaacctgtccttggaggaaccccgtacttggataagttcgtggtcagttcgtctcggcaaggtcagggatcgggtcaaatgctgtgggaatgcctgcggagggacctgcaaactctgttttggcggtcgcgggtgactaacccgatcaacccttggtacttcaagcattcggatggctccttctcaaataagcagtggatcttcttctggttcggactcgcggacatccgggactcctacgagcttgtgaatcacgccaaggggttgcctgattcatttcacaagccagccagcgacccaggatca

SEQ ID NO: 17036 - DNA, 1602 bp, synthetic construct
  misc_feature 1..1602: note = source = /note="Description of Artificial Sequence: Synthetic coding sequence"
  source 1..1602: mol_type = other DNA
atggctactgctctgatggctgtggtgctgagggcagccgccgtcgccccaaggctgcggggacgcggcggcacagggggggctcggcgcctttcatgtggtgctcgccggcgcgccgctcgcggcacctctccaggacgccgcctcagtacggcgtggtcacagcctcagccgcctcccgaggagtacgcaggagctgatgacgttagccagagtcctgtggccgaggagccttcatgggtgccctccccccggcccccagtgccacatgagtctcctgaacccccgtcaggacggagcctcgttcagagagatatccaggcattcctgaatcagtgcggggcaagtccaggcgaggctcgacactggttgacgcaatttcaaacctgccaccatagcgctgataagcctttcgccgtaatcgaagttgatgaggaggtgctcaagtgccagcagggagtttcgtctcttgcattcgctctggctttcctccaacgcatggacatgaagcctcttgtggtgctgggcctcccagccccgacggcaccttcgggatgcctctccttctgggaggctaaagctcaactagctaagtcatgtaaggtgctcgtggacgccctgcgtcataatgccgccgctgccgtcccattctttggaggtggcagcgtgttgagggctgcagagcccgctccacatgccagttatgggggtatagttagtgtagaaactgatcttttacagtggtgtttggagagtggcagcattcccatcctatgccctatcggcgagaccgccgccagacgctccgtcttgctggactcattagaggttaccgctagtttagcaaaggcgttaagacctacaaaaattatcttcttgaataacacgggaggtttgagagactccagccataaggtgctctcaaacgtgaatctgccggcagacttagatctggtctgcaacgctgagtgggtgagtactaaggagcgccagcagatgaggttgatagtggatgttctctccagactgccccaccattctagtgcagtcattacggcggctagcacactgctgactgagctcttcagtaacaagggctcagggacattgttcaagaatgcagagcgaatgttgcgtgttcggagcttagataaactggaccaggggcgacttgtagatctggtgaatgcatcatttggcaagaagttgcgcgatgattacttggcctcattacgacccaggctgcatagtatctatgttagcgagggctacaatgccgcagctatcctgactatggaaccagtactcgggggaacgccctatctcgataaattcgttgtgagcagctctaggcaggggcaaggaagcggccagatgctgtgggagtgtctgagaagagatctgcagacgttgttttggaggtcccgggtaaccaaccctatcaatccatggtatttcaagcacagtgatggttcattcagcaacaaacagtggatttttttctggtttggcctggctgatatcagagacagctacgaactggttaatcacgccaaggggctgcccgattcttttcacaagcctgctagcgaccccggaagc

SEQ ID NO: 17037 - DNA, 1602 bp, synthetic construct
  misc_feature 1..1602: note = source = /note="Description of Artificial Sequence: Synthetic coding sequence"
  source 1..1602: mol_type = other DNA
atggcgactgctctgatggcagtggtactgcgggcagccgccgtcgccccccgtttgaggggtcgagggggaacaggaggggccaggcggctgagctgcggagccagacgccgcgccgcgcgtggaaccagccccgggcgcaggctctctaccgcatggagtcaaccccagccaccgcccgaggagtacgccggcgccgatgacgtgtcccagtcaccggtagctgaggaacctagctgggtaccttcgccccgcccgcccgtcccacacgaatctcccgaaccgccatctggacgctcgctcgtgcagagggacatccaggctttcctgaatcagtgcggtgcatcgcccggagaggctcgtcattggttgacccaattccagacctgtcaccatagtgcagacaagccctttgccgtgatcgaggtcgacgaggaagtcctgaaatgccaacagggagtctcgtctctggcgttcgctctggcgtttctgcaacgcatggacatgaagccgctggtggttttagggcttcccgccccaacagctccgtcaggctgtctcagtttttgggaggctaaagcccagctcgcgaaaagttgcaaggttttggttgatgccctgcgtcacaacgctgcagctgccgtccctttctttggcggcggcagcgttctgcgagctgccgaaccagctccacatgcatcctacggcggcatcgtttcagttgagacagatctgctgcagtggtgcctcgaatcgggtagcattccgattttgtgccccatcggggaaaccgccgccagaagaagcgtactcctggacagtctggaggtgacagccagcctggccaaagccctgcgtcccacaaagatcatttttctgaataacaccggaggactgcgagatagctcgcataaagtgctatcaaacgttaacctaccggctgacctcgatctcgtctgcaacgcggaatgggtttccacaaaggagaggcagcaaatgcgtctgattgtggatgtgttgtcgcggttgccacaccatagttcggctgttattactgccgcctcaaccctcttgacagagctgttttctaacaaaggatccggcaccctttttaagaacgccgagagaatgctgcgggtgagaagtttggacaagctggatcagggccgactggttgacctggttaacgcctcttttggcaagaagctgagagacgactaccttgccagcttaagaccaaggctgcactccatttatgtgtcagagggctacaacgcagcggctattctgactatggagccagtgctgggcggcacaccctatcttgacaaatttgtagttagctcttcccggcaaggccaagggagtggccaaatgttgtgggaatgcctgagacgggatctccagacgctcttctggcgatctcgggtgaccaacccgattaatccatggtacttcaagcactccgacggatctttcagtaataaacaatggatatttttttggttcggattagctgatatccgcgactcctatgagctcgtcaatcatgcgaaaggactgcccgactcatttcacaaacctgcaagcgaccccggatca

SEQ ID NO: 17038 - DNA, 1602 bp, synthetic construct
  misc_feature 1..1602: note = source = /note="Description of Artificial Sequence: Synthetic coding sequence"
  source 1..1602: mol_type = other DNA
atggccacagccttgatggccgtggttctgcgggcagctgcggtggcgccaagactgcgggggagagggggtacaggcggcgcccgccgactgagctgtggcgctcgacgacgggccgccaggggtactagtcccggacgaagactctctaccgcttggtctcagccccagcctccccccgaggagtacgctggggccgatgacgtatctcaatctccagttgctgaggaaccgtcatgggtgccatccccgcgaccacctgtgccacacgaaagccccgagccacccagcggcagaagcctggtccaacgagacatccaggcatttctgaatcaatgtggcgcgagccccggtgaggcaaggcattggcttactcagttccagacctgccaccactcagctgacaaaccttttgctgtgatagaggtggatgaagaggttctgaagtgccagcagggcgttagcagcttggccttcgccctcgcctttctgcagcgcatggatatgaaaccactggtggtgctggggctgcctgcgccaacagcccctagtggatgcttgtctttctgggaagccaaggctcagctggcaaagagctgcaaggttcttgtagacgcattgaggcacaatgctgcggctgccgtgcccttctttggaggggggagtgtgcttagggccgccgaacctgccccacatgccagttatgggggaattgtgtctgttgaaacagatctcctccaatggtgtctggagagcggatcaattcctattttgtgccctattggggagactgcggctagaaggagcgtattgcttgactctctggaagtcactgcgagtctggccaaagcgctgcggcctaccaaaatcatcttcttgaacaacacaggcggcttgcgggacagttcccataaggtgctgagtaacgtgaacctgcccgctgacctggacttggtctgtaacgctgagtgggttagcacaaaggagagacaacagatgcggctgattgtggacgttctgagccggctgcctcaccacagcagcgctgtgattactgccgcctcaaccctgctgaccgagctgttctccaacaaagggagcggcacgcttttcaagaacgccgaaaggatgctcagagtgcggagcctggataaactcgatcaggggaggctcgtggacctggtgaacgcttcctttgggaagaagctgcgggacgactacctggctagcctgcgaccccgattgcactctatctatgtgagcgaaggttataacgccgcagctatcctgactatggagccagtgcttggaggcactccctatttggacaagttcgtggtgtcaagcagtcgacaaggacaaggaagcgggcaaatgttgtgggaatgccttaggagggacctgcagaccttgttttggagatcccgcgtcacaaacccgattaacccatggtactttaagcacagcgatggttctttctcaaacaaacagtggatctttttttggttcggtctggctgatattcgagacagctacgagcttgtcaaccatgcaaagggattgcccgactcctttcataaacccgccagcgacccgggctcc

SEQ ID NO: 17039 - DNA, 1602 bp, synthetic construct
  misc_feature 1..1602: note = source = /note="Description of Artificial Sequence: Synthetic coding sequence"
  source 1..1602: mol_type = other DNA
atggccaccgcactaatggccgtggttctgagagccgctgctgtggctccacggctgcgcggccggggtggaactggaggagccaggagattaagctgtggtgccagaagacgtgccgccagagggacctcccctgggcgaaggctatcgaccgcgtggtctcaaccgcagcccccccccgaggaatacgcgggcgccgacgatgtttctcagtcaccggttgcagaggagccatcgtgggttcctagccccagaccaccagtgccccacgagtccccagagccccctagtggccgctcgctggttcagagggatattcaggccttcctgaatcagtgtggcgcatctcctggggaggccagacactggcttactcagtttcaaacctgtcaccactctgctgacaagccattcgcggttatagaggttgatgaggaagtactgaagtgccagcaaggtgtctccagcctagcctttgctttagcgtttctccagcgaatggatatgaagcccttagtggttctggggctgcccgcgcccacggccccctcagggtgtttgagcttttgggaagcaaaggcccaacttgcaaaatcatgtaaagtgttggtagacgccctgaggcacaacgcagccgccgctgtgccgttctttgggggcggtagtgtgcttagagccgcggagcctgcgccacacgcctcttatggaggcattgtcagcgttgaaacggatctcctacagtggtgcctggaaagtggatcaatccccattttatgcccaatcggcgaaacagcagccagacgatccgtgcttctcgactcattggaagtcaccgcctcccttgccaaggcgcttagacctaccaaaatcatctttctgaacaatactgggggcctgcgcgattcatctcacaaggtcctctctaatgttaatttgcccgcggatctggatctggtgtgtaacgcggagtgggtttcaactaaagagcggcaacagatgcgcctgattgtggatgtactctcacggctccctcatcacagcagcgcagtcattaccgccgcctccactttgctcacagagctctttagcaataaaggaagcgggactctctttaaaaacgcagagaggatgctgcgggtgagatccctggataaactggatcagggtaggctggtggacctcgtgaatgccagctttgggaaaaagctccgtgatgactacttggctagcctgcgcccgaggcttcactccatatatgtttctgaaggatataacgcagctgctatactaactatggagccagtgctaggaggcacgccctacttggacaaattcgttgtttcctcctccagacaagggcagggctccgggcaaatgttgtgggaatgtctgcggcgggacctgcaaactttgttctggaggtcccgggtgacgaacccaattaacccttggtacttcaaacatagtgacggcagttttagtaataagcagtggatttttttttggttcggcctggcggacatccgggattcctatgaacttgtaaaccatgctaaagggctcccggactcattccacaagcctgcatccgaccctggttcc

SEQ ID NO: 17040 - DNA, 1602 bp, synthetic construct
  misc_feature 1..1602: note = source = /note="Description of Artificial Sequence: Synthetic coding sequence"
  source 1..1602: mol_type = other DNA
atggcaacggcactgatggccgttgtgcttagggccgctgccgtggcccccagactccgcggtaggggcggtactggaggcgccaggcgactgtcttgcggggccaggagacgcgctgcacgaggaaccagtcccggtcggagactctcaacagcatggtctcagccacagcccccgcccgaagagtacgccggggccgacgacgtatcacagagtccggtggctgaagaaccgtcttgggtacctagcccccggcctcctgtgccccatgagagtcccgagccaccttccggcagaagcctggtgcagcgcgacattcaggctttcctgaaccagtgtggggcctcaccaggcgaagctagacattggctgacccaatttcagacttgtcaccatagcgctgataagccatttgccgtgatcgaggttgacgaggaggtgctgaagtgtcagcagggtgtgtcttccctggcctttgcactcgcgttcctgcaacgcatggatatgaaacctcttgtagtgctgggcctgccagctcctacggctccaagcggttgcctgtcattttgggaggccaaagcccagctggcaaagtcttgcaaggtcctcgtagatgccttgcgccacaatgctgcggcagccgttccattctttggcggcgggtctgtcctgcgagccgccgagcccgctcctcacgccagctatggggggatagtgtctgtcgagacagacttgctgcagtggtgtctcgaaagcggttccattcccattctgtgccctataggagagacggcagcccggaggtctgttctgctcgactctcttgaagttaccgcctcccttgccaaggctctcagacctactaaaatcatcttccttaataataccggaggcctcagagattctagtcacaaggtgctttcaaacgtcaatcttccagccgacctggatctggtgtgtaatgccgagtgggtgagcacaaaggagaggcagcagatgaggctcattgtggacgtgctctcaaggctccctcatcatagtagtgctgtgataactgcggcaagcaccctcttgacggagctcttctccaacaagggctcaggaaccctctttaagaacgccgaaagaatgctgcgggtgcgatcactggacaagctggaccaagggaggctcgtcgatctcgtgaatgcttctttcggtaagaagctcagggacgactatctcgctagtttgcgacctagactgcactccatctacgtctctgaggggtacaatgcagctgcaatcctgacgatggaaccggtgctgggaggtacaccatatctcgacaagtttgttgtgagcagctcccggcagggccaggggtcaggccagatgttgtgggagtgcctgaggagagacctccagacacttttctggaggagcagggtgacaaacccaattaatccctggtattttaaacattctgatgggagctttagtaataaacaatggatattcttttggttcgggctggccgatattagggattcttacgaactggtgaatcatgctaaaggcctccctgattcctttcataaacccgctagcgatcctggctcc

SEQ ID NO: 17041 - DNA, 1602 bp, synthetic construct
  misc_feature 1..1602: note = source = /note="Description of Artificial Sequence: Synthetic coding sequence"
  source 1..1602: mol_type = other DNA
atggcaactgcactgatggctgtcgtcctgcgtgcggccgccgtggccccccggctaagagggcggggagggaccggcggcgcccggcgattgagctgcggggccagacgcagggccgcgagaggaacttcccccggacgacgactgtccactgcctggtcacagccacagcccccccctgaggagtacgcgggggccgacgatgtctctcagtcccctgttgctgaagagccttcttgggtgccttctccccgaccccctgtgcctcatgaatcaccagagcctcctagtggacgctccctggtgcaaagggatatccaggcgtttctgaatcagtgtggagcctcgcccggggaggcgcggcactggctgacacagttccagacctgccaccacagcgccgacaaaccctttgctgtcatcgaggtggatgaggaggtgctgaaatgccaacagggtgtctcttcactggcctttgcgttggccttcctgcagcgcatggacatgaaacctcttgtggtgctgggactgccggcaccaaccgctcccagcgggtgtctatcattttgggaagccaaagcgcagcttgccaagtcatgtaaggtcctcgtggacgcactgcgacataatgccgctgccgcagtcccattcttcggcggaggatctgtgctgcgcgcggccgaaccggccccccatgccagttacggaggtattgtatccgtagagacggatttgcttcaatggtgcctcgagagcggtagcattccgatcctgtgtccaattggcgagacggcggcacgccgttctgtactgctggactctttggaggttaccgcttcgctggccaaggcactccgccctaccaagattatcttcttgaacaacacagggggcctccgggattcttcgcacaaggttctgtcaaacgtgaatctgcctgccgacctggatctcgtgtgcaatgccgagtgggttagcacaaaagagcgtcagcagatgcggctgatcgtcgatgtgctcagccggctgccgcaccactcaagcgccgtgattacagcggcctctaccttactgaccgagctgttttccaacaagggatcaggtacactgtttaagaatgcggagcggatgctaagggtgcgttctctagataagctagatcaaggccgtttagttgatctcgtaaatgctagtttcggaaagaagcttcgtgatgactacctagccagcctccgcccgagactgcattcaatttacgtgtctgaaggttataatgcggcggctatcttgactatggaacctgtgttaggggggacaccctacttggacaaattcgtggtcagcagcagccggcagggtcaggggtccgggcagatgctttgggaatgccttagacgagatctccagaccctgttttggcgatctcgggttacaaatcccatcaacccatggtattttaaacacagcgacgggtctttttctaataaacagtggattttcttttggtttggactagcagacatcagggattcttatgagttggttaaccacgctaaaggactccccgatagttttcacaagcccgcgtcagatcccgggtcg

SEQ ID NO: 17042 - DNA, 1602 bp, synthetic construct
  misc_feature 1..1602: note = source = /note="Description of Artificial Sequence: Synthetic coding sequence"
  source 1..1602: mol_type = other DNA
atggcgactgctctcatggccgtggttctccgtgctgcggctgtagcaccacgcctgagaggacgaggtggtacaggcggcgcacggagattgagctgtggcgccaggcgccgtgctgcgcgaggaacgtccccaggacgcaggctcagtacagcctggtcacaaccccagccgcctcccgaagaatacgctggcgccgatgatgttagccaatcccccgtcgcagaagaaccctcttgggtcccgtctccgcgacctcctgtgccacacgaatctcccgaaccacccagcggcagatctctcgttcagcgggatattcaggccttcctgaaccagtgcggggcctcccccggcgaagcccgccactggctcactcagttccagacctgccatcactccgcggacaaacccttcgctgtgattgaagtggacgaggaagtactgaagtgtcagcagggcgtctcctctctggcattcgccctggctttcctgcagaggatggacatgaagcctctagtggtgctaggtctgcccgctccgacagcgccgagcggatgcctttctttctgggaggcaaaagctcaattagcaaaatcctgtaaagtgttggttgacgccttaaggcataacgccgccgccgcagtgccattttttggcggcggcagtgtactccgcgcggcagaacccgcccctcacgcatcttatggaggcatcgttagcgttgaaacagacctactgcaatggtgtttagagagcgggagtattccgatcctgtgtcccatcggtgagaccgctgcacgacggagtgtgttgctggattcattagaggtcacagccagtctggcaaaggcgctccgaccaacgaagatcattttcctgaacaataccggaggtctgcgggactctagccataaagtcttgagtaacgtaaatctgcccgctgacctggacctcgtatgcaacgcggagtgggtctcgactaaggaaaggcaacaaatgaggctgatagttgatgttctctcacgcctacctcaccacagttccgccgtcattacagccgcctcgactttgttaaccgaactgttctccaacaaagggtcaggcacgctcttcaagaatgccgagagaatgctgcgagtgcgctcactggataagcttgaccagggtcgcctcgtcgacctggtcaatgcatcatttggaaaaaaactgcgggacgattatcttgcatcactacggcccagactacacagtatttatgtctcggaggggtataatgcagccgccattttgaccatggagcccgttctaggggggaccccttatttggataaatttgttgtatcaagttcgaggcagggtcaggggtctggtcaaatgctgtgggagtgtctgaggagagatctgcagaccttgttttggcgcagtagggtcaccaaccctatcaatccttggtatttcaagcactctgacgggtcgttcagtaataaacagtggatctttttttggttcggactggccgatatacgcgactcctatgagctggttaatcacgctaaaggcttgcccgatagtttccataaaccggcctcagatcctggctca

SEQ ID NO: 17043 - DNA, 1602 bp, synthetic construct
  misc_feature 1..1602: note = source = /note="Description of Artificial Sequence: Synthetic coding sequence"
  source 1..1602: mol_type = other DNA
atggcgactgcgttgatggcggtggtgctgcgcgccgccgctgtcgcaccccgtctcaggggtcgcggcggcacagggggagcccgtcggcttagttgcggagctcgtagacgcgcggctcgcggcacctctcctggtcggcggctcagcactgcctggagtcagccacagccacccccagaggagtacgctggagctgacgacgtcagccagtctcctgttgccgaagagccgtcctgggtcccttccccccgtccgccagtccctcacgagagccctgagccccccagcggccgctcccttgtccaacgggacattcaggccttcctcaaccagtgtggcgcatcgccgggagaagctcgccactggctgacccagtttcagacctgtcatcacagtgcggacaagccgtttgcagtaattgaggtcgacgaagaggtcctaaagtgccaacagggtgtttcttccttggcattcgccctggctttcttgcagcgcatggacatgaagcccctcgtcgtcctcggcctccccgcgccgaccgccccctcgggctgcctgtctttctgggaggccaaggcccagctcgccaagtcgtgcaaggtcctcgtggatgcgctgaggcacaatgccgccgccgccgtccctttctttggtgggggatctgtgctgcgcgccgcggagccggccccgcacgcttcctacggtggtatcgtgtccgtcgaaactgatctgctgcagtggtgcctcgaatctggctccatccctatcctctgccccattggcgagaccgcggctcgtcgctccgtgctgctcgattcacttgaagttaccgccagcctggccaaggctttgcgccccaccaagatcatctttctcaacaataccggcggcttgcgcgactcatcccataaagtgctctccaacgttaacctccctgctgaccttgatttagtctgcaacgcagagtgggtgtcgactaaggagcgtcagcaaatgcgtctgatcgtcgacgtactgagcaggctgcctcatcattcttccgccgtaatcaccgccgcctcgaccctccttaccgagctgttctcaaacaagggctccggtaccctgttcaagaatgccgaacgcatgctccgggtgcgttccctggacaaactcgatcaagggcggctggtcgatttagttaacgcctccttcggcaagaagttgcgtgatgattacctcgcctcgctccgcccccgcctgcactcgatttacgtgtctgaaggatacaacgcggctgccatactcactatggaaccggtgctggggggtactccctatctggacaagttcgtcgtaagttctagccggcaagggcagggatccggccagatgctttgggagtgtctcagacgtgacctccaaaccttattctggagatcccgtgtcactaatccaatcaacccgtggtactttaagcattccgacggcagtttctccaacaagcagtggatcttcttttggttcggcctggcagatattcgtgattcgtatgagctggtcaatcatgccaagggcctgcctgactcatttcataagcccgcaagcgaccctgggtcc

SEQ ID NO: 17044 - DNA, 1602 bp, synthetic construct
  misc_feature 1..1602: note = source = /note="Description of Artificial Sequence: Synthetic coding sequence"
  source 1..1602: mol_type = other DNA
atggcaaccgcactgatggcagtggtgctgcgcgcggcagccgtggcaccgagactgcggggacgcgggggcaccggcggtgccagacgcctctcgtgtggcgcaagaagaagagctgcgagaggaacttcgccaggccgccgcctgtcgactgcctggagccaaccgcagccacccccagaagaatacgcaggagcggacgatgtgagccagtcccctgtggctgaggaaccaagctgggtcccctccccaagacctcctgtgccacatgagagccctgagcccccttcaggaagatcacttgtacaacgcgatattcaagcatttctgaatcagtgcggcgcgtccccaggtgaagcgaggcattggcttactcagtttcaaacctgccatcattccgcagacaagccgtttgctgtgattgaagtggacgaagaagtcctgaagtgtcagcagggcgtctcgtccctggcatttgctcttgcctttcttcagcgaatggacatgaaacctcttgtcgtgctcggacttcctgcaccaactgctccatccgggtgcctgagcttttgggaggccaaagcgcagcttgccaaatcatgtaaagtgctggtcgatgcactgcgccacaacgcggccgccgccgtcccatttttcgggggaggctcggtcctcagagcagcagagcctgcaccccatgcgtcgtacggcggaatagtgagcgtggaaaccgatctgctgcaatggtgtctcgagagcggctctatacctatcctctgccctattggtgaaacggcggcaaggcgatccgtccttcttgatagcctggaagtcaccgcaagcctggccaaggcactccgacccaccaagattatcttccttaacaacaccggtggacttagggattcctctcacaaagtcctcagcaacgtgaacctcccagcagaccttgacctcgtgtgtaacgcagaatgggtgagcacgaaggagagacaacaaatgcggcttattgtcgatgtgctctcgcgcttgccccatcatagctccgcagtgatcaccgcggcctcaaccctcctgactgaactgttttcgaataagggatcggggactctctttaagaacgcggaaagaatgcttcgggtccgatcccttgacaagctggatcaaggacgtcttgtggatttggtcaacgccagcttcggaaaaaagttgagagatgactatctcgctagccttaggccgagactccattctatctatgtgagcgagggttacaacgcggctgcaattcttactatggagcctgttctgggaggtaccccttacctcgataagttcgtggtgtcgtctagccggcaaggacaaggttccggtcagatgctctgggaatgtttgcgtcgagacttgcagacgctgttttggcgcagccgtgtgactaaccctattaacccatggtactttaaacactcagacggctcgttcagcaacaagcaatggattttcttctggttcggacttgcagatatcagagattcttacgagcttgtgaaccatgcaaaggggctgcccgattcctttcataagccagcatccgacccaggttcg

SEQ ID NO: 17045 - DNA, 1602 bp, synthetic construct
  misc_feature 1..1602: note = source = /note="Description of Artificial Sequence: Synthetic coding sequence"
  source 1..1602: mol_type = other DNA
atggctaccgccctgatggccgtggtgcttagagcagcagcagtggcccctcggctgcgcggcagaggtggcaccggaggcgcaaggagactgtcctgtggtgctcggcgccgcgctgcacggggcacttcccccggtaggcggctctcaacagcatggtcacagccccagccaccacccgaagagtatgccggcgcggatgatgtatcgcagagtcctgtggcagaagagccctcctgggtgccttcgccccgtcctcctgtgcctcacgagagtccagagccaccatctggccggagcctcgttcagcgtgatatccaagccttccttaaccagtgcggcgcctcccctggtgaggccaggcactggctaactcaatttcagacctgccaccattccgcagacaagccgttcgccgtgatcgaggtcgatgaggaggtgttaaagtgtcagcagggggtctcctccttagcgttcgccctagcgtttctgcaaagaatggatatgaagcctctcgtggtgttagggttaccagcccccacagctcccagtggctgtctcagtttttgggaggctaaagctcagctcgctaaatcctgcaaagtgcttgtggacgcgttaagacacaacgcagccgcagctgttccgttcttcggcgggggctcagtgctgagggccgccgaaccagctccccacgcgagttatggtgggatcgtcagcgtggagaccgatctcctgcaatggtgcttagagagcggaagcatcccgatcctgtgcccaatcggcgaaacagcggcgaggagatcagtcctgctggactcgctggaggtcaccgcgtcgttggcgaaggctctacgtcctactaaaatcattttcctgaacaacacaggaggattgcgcgacagctcccacaaggtactcagcaacgtaaacttgcctgccgatctcgatctggtatgtaacgccgaatgggtgagcacgaaggagcgtcaacagatgcggctaatcgtggatgtgctctcccgcttaccccatcactcgtcagcagtgattacagcagcaagtacattactgactgagctgttcagtaataagggcagcgggaccctatttaagaacgcagagaggatgttgcgcgtaaggagtcttgataagttggatcagggaagactcgtcgatctggtgaacgcaagctttgggaagaaactacgagatgactatctcgctagcctgaggccgagacttcacagcatttatgtgtccgaaggctacaatgccgccgctattttgaccatggagcccgtattgggcggtaccccgtacctcgacaagtttgtcgtgagtagctcccggcaggggcagggctcagggcagatgctgtgggagtgccttcgtcgggacttgcagacacttttttggcggagtcgagtcacgaaccctattaacccgtggtattttaagcattcggatgggtccttctccaacaagcagtggatatttttttggtttggcctggctgatatcagagattcatacgaactggtcaaccatgctaaaggtctacccgactctttccacaagccggcttcggaccctggctca

SEQ ID NO: 17046 - DNA, 1602 bp, synthetic construct
  misc_feature 1..1602: note = source = /note="Description of Artificial Sequence: Synthetic coding sequence"
  source 1..1602: mol_type = other DNA
atggccaccgcgctgatggcagtggtgcttcgggccgctgcagtggcaccgcggctgcggggacgtggaggaacgggtggggctcgccggctgtcatgcggagcccgccggcgcgcagccagagggacctccccagggagacgtctctccactgcctggtcgcagccccagccgccgccagaagagtacgcaggcgctgacgacgtctcacagtccccggtggccgaagagccttcctgggtgccgagcccccgcccgcccgtgccacacgagtcacctgagccgccgagcggccgcagcctcgtccagcgggatatccaggcttttctgaatcagtgcggtgcatcgccaggtgaagcgagacactggctcactcaattccaaacttgccaccacagcgcggacaagccatttgctgtgatcgaagtcgatgaggaggtgctgaagtgtcagcaaggggtttcatcactggcgttcgcattggcgttcctgcaacgcatggatatgaagcccctggtggtcctcggattgccggccccaactgctccatcaggatgcctctcgttctgggaagcaaaagcgcaactcgcgaagtcatgtaaggtcctcgtcgacgcgttgcgccataacgcagccgcagccgtgccgtttttcggagggggaagcgtgctgcgcgcggccgaacccgctccgcatgcgtcgtacggcggaattgtgagcgtcgagactgatttgctccagtggtgtttggaatcgggatcgattccgatcctctgtccgatcggagaaacggccgcccggcgctccgtcctgctggactcgctggaagtgaccgcctccctcgcaaaagcgcttagaccaaccaaaatcatcttcctcaacaacacgggcggactgagagactcgtctcataaggtgctctccaacgtgaacctcccggccgatctcgacctggtgtgtaacgccgaatgggtatccactaaggagcggcaacagatgcgcctgatcgtggacgtgttgtcgaggttgccgcatcattcgtccgccgtcatcactgcggcctccacgctgctgaccgaattgttctcaaacaagggtagcgggaccttgtttaagaatgccgaacgcatgctgcgggtgagatccctggataagctggatcaaggtagactggtggacctggtgaacgcctctttcggaaagaaactgcgcgatgattatctggccagtctccggccacggctccactcaatctacgtctcggagggttacaacgcagcggccatcctgactatggagcccgtcctgggcgggactccttacctggacaaatttgtggtatcatcctcccgccaggggcaggggtcgggccagatgctgtgggaatgcctgcggagagatctccaaaccctgttttggcgatcgagagtcaccaatccgattaacccttggtacttcaagcactctgacggatcattttccaacaaacagtggatctttttctggtttggactggccgacatcagagattcatacgagcttgtgaatcacgcaaagggacttccggacagcttccacaagccagcctccgaccctgggtca

SEQ ID NO: 17047 - DNA, 1602 bp, synthetic construct
  misc_feature 1..1602: note = source = /note="Description of Artificial Sequence: Synthetic coding sequence"
  source 1..1602: mol_type = other DNA
atggccactgcccttatggcggtggtgttgcgtgcagccgccgtggctcctaggctacgaggccgcggcggaaccggcggtgcccggcgcctgtcttgcggggcacgtcgccgggccgccaggggaactagcccaggcaggcgcctgagcacagcgtggtcgcagccccaacctccgccagaggaatatgctggtgcagatgatgtgagccagtctcctgttgcagaggagcccagctgggttccaagcccccggcccccagtgcctcatgagagcccagaacctccctcaggccggtctctcgtgcagcgggacatacaagcatttctcaaccaatgtggagcctcccctggagaagcccggcactggctcacacagttccagacatgccatcactcagccgacaaacccttcgccgtaatagaagtagacgaggaagtgctgaagtgccaacaaggggtgtcaagcctggcgtttgcactggccttcctacagaggatggacatgaagcctttagtagttctgggcctgcctgctccaaccgccccttctggatgtcttagcttctgggaagcaaaggctcaactcgcaaagtcatgcaaggtcttggtggacgcacttcgccacaatgccgccgccgccgtgccattcttcggcggtgggagtgtcctccgagcagcagaaccagcaccccacgcttcatatggcggcattgtgtcagttgaaaccgacctcctgcagtggtgtctggagagtggaagcatccctatactgtgccccataggagaaaccgccgcccgccgctctgttctgctcgattctctggaggtgacagctagcctcgctaaggcccttcgccccactaagatcatttttttgaacaacactggtggccttcgcgatagctcccacaaagtattgagtaatgtcaacctccctgcagacctggacctcgtgtgtaacgccgagtgggtctctactaaggaacgccaacagatgcgactgattgtggacgtcctgtctcgacttccccatcactcatctgcggttatcacagccgccagtacacttctgacagagctgttcagcaacaaagggtcaggaaccctgtttaagaacgccgaacgaatgttaagggtcaggagcttggataaactggaccagggacgcctggtggatctcgtcaatgcctctttcgggaaaaagctgagagatgattacctggcatctcttaggcctcgattgcatagtatctacgtaagtgaaggatacaacgccgcggctatcctcaccatggaacccgtcttaggcggtacaccctatttagataaattcgtagtatcttcgtccagacaggggcagggcagcggccagatgctttgggaatgcctccgcagagatctgcagaccctcttttggcgttccagagtaacaaaccccatcaatccatggtattttaaacatagcgatgggagttttagcaataaacagtggatttttttctggtttggcctggcggacattcgcgactcctacgaattggtcaaccacgcgaaaggcctgcctgattctttccataaaccagcgtctgatcccgggagc

SEQ ID NO: 17048 - DNA, 1602 bp, synthetic construct
  misc_feature 1..1602: note = source = /note="Description of Artificial Sequence: Synthetic coding sequence"
  source 1..1602: mol_type = other DNA
atggctactgcgctgatggcagtggtgctcagagccgcagccgtggcacccagactgagagggcgaggcggtactgggggggcgcggagactcagctgtggagctcgaaggcgcgcagcccggggtactagcccgggccggcgcctgagcaccgcatggagtcagccacagccccctccggaggaatacgccggagcagacgacgttagccagtcccctgtagctgaggaacctagctgggtgccctctccaaggccaccagttccacacgaaagccctgagcctccttccggtcgatccctggtgcagagagatatccaggcttttttgaatcagtgtggggcctccccgggcgaggctagacactggctgacacagtttcaaacatgccaccactcagctgataagcccttcgccgtgatcgaagtggatgaagaggtgctcaaatgtcagcagggagtgtcttctctcgcattcgccctcgccttcttgcagcgaatggacatgaagcctctggttgttctgggcttgcccgcgccgactgcaccttccggctgcctgtctttctgggaagctaaggcacagctggccaaatcctgcaaggtgcttgtcgatgccctgcggcacaacgctgccgctgctgtaccattcttcggaggcggcagcgtcttgagagccgccgagccggctcctcacgcttcatacggtggcatagtgagcgtggaaacggatttgctgcaatggtgcctcgaatcagggtcaatccctatcctctgccctattggcgagacggccgcacgccgatccgtcctcctggatagcctggaggtgacggcgtcactggctaaggcactccgccccaccaaaatcattttccttaacaatactggcggtctgagggacagttctcacaaggtcttgtccaacgtgaatttgccagccgaccttgacctggtttgcaacgcagaatgggtcagcactaaggaaaggcagcaaatgaggctgattgtggacgtccttagtcgactgccccatcatagctcagcagtgataacggcagctagtacactgctgacagagcttttttctaataaagggagcgggacactcttcaagaacgccgaaaggatgctgcgggtccgcagtctcgacaaactggaccagggcaggctggttgacttggtcaacgcgagtttcggcaagaaactgcgggatgattaccttgcctccttgcgcccccggctgcacagcatttacgtctctgagggatacaatgccgccgctattcttaccatggaacctgttttgggaggtaccccctacctcgataagttcgtggtaagctcttccagacagggccagggctcagggcaaatgctgtgggagtgcctccgcagggatctgcagacattgttttggcgaagccgggtgacaaatcccatcaacccctggtatttcaagcactctgacggaagcttctccaataaacagtggatttttttctggttcggcctggccgatattagggacagctacgagcttgtaaatcacgctaaagggctccctgactcttttcacaaacccgcttctgaccccggatct

SEQ ID NO: 17049 - DNA, 1602 bp, synthetic construct
  misc_feature 1..1602: note = source = /note="Description of Artificial Sequence: Synthetic coding sequence"
  source 1..1602: mol_type = other DNA
atggcaacggcccttatggctgtcgttctgcgcgctgccgctgtcgcgccgcgtctgagagggcgcggtggaaccgggggagcgcggcggctctcttgcggcgcacggagaagggctgctagaggtacgtcacctggccgaagattaagcacagcctggtctcaacctcaaccgccaccagaggaatacgcaggcgctgatgatgtatctcaaagcccagttgcagaagaaccgagctgggttccgtcaccgcgtccgccggtccctcacgaaagcccggagccaccttcaggccgcagcttggtacaacgggatatccaagcgttcctcaaccaatgcggtgcatccccgggagaagcgagacattggttgacgcaatttcaaacctgccaccatagcgcggataagccgttcgcggtaattgaagtagatgaagaggtgctgaaatgccagcaaggtgtatcatcattggcgtttgcgcttgcgtttctacaacgcatggacatgaagccgctggtcgtgctaggtttgccggcaccgacggcgccgtcaggctgtctttcattttgggaagcaaaagcccagctagccaaaagctgcaaggtcctggtagatgccttacgtcataatgcagcagccgcggtcccgttctttggaggtggaagtgtccttcgcgctgcggaacctgctccgcacgcatcgtatggcggaatcgtctccgtagaaacagatttacttcagtggtgcctggagagcggtagcattccaattctatgtccgataggagaaactgccgcaagacgttctgttctgcttgactcactggaagtcacggcttcattagctaaagcacttcggccaacaaaaattatctttttaaacaacacagggggccttcgtgattccagccacaaagtcttgtcaaatgttaacctacctgccgacctagacctggtgtgcaatgccgaatgggtatctaccaaagagcgtcagcaaatgcgcctgattgttgatgtactctcacgcctgcctcaccattcatctgccgtaattacagcagcaagcacattacttacagaactatttagcaataagggttctggtacgctttttaaaaacgccgagcggatgctgagagtccgatctcttgataagttagatcaaggaagacttgttgacctagtcaatgcaagctttggaaaaaaactgcgggatgactatctcgcatcgttaagaccgcgcttgcatagcatttatgtctcggagggttataatgcagctgctatcctcaccatggaacctgtacttggaggcactccttatcttgacaagttcgtagtttctagctctagacaaggtcagggcagcggtcagatgttgtgggaatgtcttcgtcgtgacttacaaaccctgttctggcgtagccgtgtgacaaatccaattaatccgtggtactttaaacattctgatgggtctttttctaataaacagtggatttttttttggtttggacttgcagatatccgcgatagctacgagcttgtcaaccatgcgaaaggacttcctgattctttccataaacctgcttctgatccgggttct

SEQ ID NO: 17050 - DNA, 1602 bp, synthetic construct
  misc_feature 1..1602: note = source = /note="Description of Artificial Sequence: Synthetic coding sequence"
  source 1..1602: mol_type = other DNA
atggctacagctttaatggccgttgtgctcagggctgccgccgtcgccccccggctgagggggaggggaggaaccggcggagcaagacgtctttcctgcggcgctaggagacgggccgccagggggacaagcccaggaaggcgcttatccaccgcatggagtcagcctcagcctccgcctgaggaatacgcaggcgccgatgacgtgagccagagtcccgtggctgaggagccaagctgggtgccgtccccacggcccccagtgccacacgagtctcctgagcccccttccggaaggtctctggtgcagagggacattcaggcatttctgaaccagtgcggagctagcccaggtgaggctaggcactggttgacccagtttcagacttgccaccatagcgcagacaaaccgttcgcagtgattgaagtcgacgaggaggtgctcaagtgtcagcaaggtgtgtctagtctggctttcgccctcgccttcctgcaaaggatggacatgaagcctctcgtagtcttgggactgcccgcgcccactgctccgagcggctgcctgtctttctgggaggcaaaagctcaactggcaaaaagctgcaaggtcttggtcgatgcactgcggcacaacgctgcagcagctgtgccttttttcggaggtggcagcgtgctgagagctgcagaaccagctccgcatgcaagctatggcggaatagttagcgtggagactgacctgttgcagtggtgcctggagagcggttctatcccaattttgtgtcctatcggagagacggctgctagaagatccgtgcttctcgactccctggaagttaccgcatctctggccaaggcgttacgccccacaaaaatcattttcctcaataacactggtggcctgagagattcatcacataaagtcctctctaatgtcaacttgccagcagatctcgatctggtgtgcaacgctgagtgggtcagtactaaggaaagacagcaaatgcgactgattgtggacgtcctgagccgattgccacaccatagtagtgcagtgataacagcagctagtactctgttgacagagctgttttctaataagggcagcggtacacttttcaagaacgctgaacgcatgctgcgcgtgcgcagcctggacaagctagaccaaggccggctggtggaccttgtcaacgcttctttcggaaaaaagctcagggatgattaccttgcctcattgcggcctagacttcacagcatctatgtgagtgagggatataatgccgcggcgatcctgactatggagcccgtcctgggtggaaccccatacctagataaatttgtggttagttccagcaggcaaggccagggctctggccagatgttgtgggaatgcttaaggagagatctgcagacactgttctggaggagccgcgtgaccaatccaattaacccctggtatttcaaacatagcgatgggagcttttctaacaagcaatggatcttcttttggttcggccttgcggatatcagggattcctacgagttagtcaaccacgcaaagggattgccggactcttttcacaagcctgccagcgacccaggcagc

SEQ ID NO: 17051 - DNA, 1602 bp, synthetic construct
  misc_feature 1..1602: note = source = /note="Description of Artificial Sequence: Synthetic coding sequence"
  source 1..1602: mol_type = other DNA
atggccacagccctgatggccgttgtgcttagggctgctgccgtggcaccaaggcttcggggaagggggggaaccggcggcgccaggcggttgtcatgcggtgctcgaaggcgcgccgctcgtggtaccagccccggtaggaggctgagtactgcttggagtcagccgcaaccgccccccgaggaatatgccggagctgacgacgtcagtcaatcccctgttgcagaagaacctagctgggtcccttcaccaagaccaccagtgcctcatgagagcccagagcccccttcgggccgaagcctcgtgcaaagagacatccaggcatttcttaaccagtgcggtgctagtccaggggaggcccgacattggctgacccagtttcaaacatgccatcatagcgctgacaaaccatttgctgtcatcgaggttgacgaagaggtgcttaaatgtcaacaaggcgtgagctctctcgcttttgcacttgccttcctgcaaaggatggatatgaaaccattggtagtcttgggcctgcctgcaccaacggctccatcaggttgtctgtccttttgggaagcgaaagcacagctggccaagagctgcaaggtcctcgtagacgctctgaggcacaacgctgccgcggctgtgccttttttcgggggaggttctgtgctgagagccgctgaaccagcaccccacgcctcctatggagggatcgtctctgtggagactgatttgctccaatggtgcctggaatccggaagcattccaatactctgccccatcggagaaaccgcagcacgccgctcagtgttgttggactctctggaagttactgctagccttgcgaaagcactccgtcctacgaagattatctttcttaacaacacgggaggcctcagggattcaagccacaaggtgttgagcaacgttaacctccctgctgatctggacctcgtgtgcaatgcagagtgggtgagtactaaggagagacaacagatgagactgatcgtcgatgtgcttagccggctcccccatcacagttcagccgtgattaccgcggcctctacactgcttactgaactgttttccaacaagggatcagggacactgtttaaaaatgcagagcgcatgctgagagtccggtccctggataaactcgaccagggacggttggttgatctggtcaacgcaagcttcggaaaaaagctgagggatgattacctggcctcactgagaccacggctgcacagcatttacgtcagcgagggctataatgctgcagccatcctgactatggaaccagttttaggaggaactccttacctggacaagtttgtagtgagcagctctaggcagggacagggcagcgggcaaatgctgtgggaatgccttagacgggatctgcagaccctgttttggaggtctagagtgacgaatcccatcaatccatggtatttcaaacatagtgatggcagctttagcaacaaacaatggatctttttctggttcggccttgcagatatccgggattcttatgaactggtgaatcatgccaaggggcttcccgactcatttcacaaaccagctagcgaccctggctca

SEQ ID NO: 17052 - DNA, 1602 bp, synthetic construct
  misc_feature 1..1602: note = source = /note="Description of Artificial Sequence: Synthetic coding sequence"
  source 1..1602: mol_type = other DNA
atggccactgcgcttatggcggtggtccttcgggcggccgccgttgcacctcgcctgcgaggacgtggaggaactggcggtgcgagaaggctgtcatgtggtgctcggagaagagcagccagaggaacttcgccaggtcggcggctttcgactgcatggtcacaacctcaacctccacccgaagaatatgctggggcagatgatgtgtcgcaatcgccagtcgccgaagaaccctcttgggtgccgtcgccaaggccaccggtgcctcatgagtcccctgagcctccttccggaagatcattggtccagcgtgatatccaagccttcttgaaccagtgtggtgcgagccctggagaagcccgccattggcttactcagttccagacctgtcatcattccgccgataagccatttgcggtgatagaagtggacgaagaggtcctgaagtgtcaacaaggcgtgagctcgttggcctttgcgctggcgttcctgcagcgcatggacatgaagccgctggtggtcttgggtctgcctgcccccactgcaccatcgggatgtctttcgttttgggaagcaaaggcgcagcttgcaaaatcgtgtaaggtcctggtcgatgctctccgccacaacgctgcagcggcagtgccttttttcgggggcggatcagtccttagagctgctgagcctgcaccgcacgcaagctacggaggaattgtgtccgtggagactgaccttctccagtggtgtcttgaatcggggagcattcctatcctttgtccaattggtgaaaccgcagctcgacggagcgtgttgcttgatagcctcgaagtgactgcttccctggccaaagcgctcagaccaactaagattatcttcctgaacaataccggcggtctgagagacagctcacacaaagtcctttcaaacgtgaatctgccggccgacctggaccttgtctgtaatgcagagtgggtgagcaccaaagaacgccagcagatgaggttgatcgtcgacgtgctctcgaggcttcctcatcattccagcgccgtgattacggcagcctccactcttctcactgagctgttctcgaataaaggttccggaacgctctttaagaatgcagaaaggatgcttagagtgagatcgctcgacaaacttgaccaaggtcgactcgtggatctggtgaacgcctcatttggtaaaaagctgcgagatgattaccttgcgtcgcttcggccccggctgcattcgatttatgtgagcgaagggtacaacgcagcagccatcctcaccatggagcctgtgctcggtggcactccatacctggacaagtttgtggtgtcatccagccgtcaggggcagggttccggacagatgctgtgggaatgcctgcgtagagatctgcaaactcttttctggaggtcgcgggtcaccaacccaatcaatccgtggtactttaagcatagcgatggaagtttctcgaataagcaatggatattcttttggtttggtcttgcggacatcagggattcctacgaacttgtgaaccatgccaagggactccctgattcctttcataagcctgcatcggatccaggatca

SEQ ID NO: 17053 - DNA, 1602 bp, synthetic construct
  misc_feature 1..1602: note = source = /note="Description of Artificial Sequence: Synthetic coding sequence"
  source 1..1602: mol_type = other DNA
atggccactgcattgatggccgtggtactgcgcgccgccgctgtcgctccaaggcttagaggtcgggggggcacagggggagctagacgcctgtcatgcggagccagaagacgcgctgccagagggactagtcccggtagaaggctctctaccgcatggagccagccgcagccccctccagaagagtacgccggtgctgacgatgtctcccagtcaccagtggcagaggaaccaagctgggtcccatcccccaggccccccgttcctcacgaaagccccgaaccccctagtgggaggagtctcgtgcagcgcgatatacaagcctttcttaaccagtgtggggcttcccctggagaggcacggcactggctcacccagttccagacttgccatcactccgccgataagcccttcgccgtgatagaggtggatgaggaggtgttgaagtgtcagcaaggagtgagtagcctggcttttgcactggcttttctccaaaggatggacatgaaacctttggtggtgttgggcctccctgcccccaccgcaccatccggttgcttatccttctgggaggccaaggctcagctagccaagagttgtaaggtgctggtggacgctttacgccataatgcagccgcagcggtgccgtttttcgggggaggtagcgtgcttcgcgcagcagagcccgctcctcacgcatcttacggaggaatcgtgtctgtggaaaccgatcttctgcagtggtgtttggagagcggctccattccgattctctgtcctattggcgagacagctgctagacgcagcgtcctcctggactctctggaggtcactgcatctctcgctaaagcgctacgcccaaccaaaatcatcttcctaaataatacaggggggttacgcgatagttcacacaaagtgctgtctaacgtaaacttacccgccgacttagacctggtgtgtaatgcagagtgggtatcgacaaaggagcgtcagcagatgagactgattgtggacgtgctttccaggctgccacatcacagttccgcagtgatcactgccgcctctactctcctaacggagctcttttcgaataagggtagcggaactctgttcaagaatgctgaacgtatgctaagagttagaagtttggacaagctggatcaaggacggttggtggacttggtgaacgcctcatttggcaaaaaattgagagacgactacctcgcctccttgcggccacgcctgcattcgatttacgtgagtgagggttacaatgccgccgcaatcttaactatggaacctgtcctgggaggcactccctatctggataaatttgtggtgtcttcaagcaggcaaggccagggatccggacagatgctgtgggagtgcctgcgtcgggatctacagacacttttttggagatctcgagttacaaatcccataaacccatggtactttaaacatagtgatggtagctttagtaacaaacagtggatcttcttctggttcggcttagccgatatcagggacagctatgagctagttaatcacgctaagggccttcccgatagcttccataaaccggccagtgatcctggtagc

SEQ ID NO: 17054 - DNA, 1602 bp, synthetic construct
  misc_feature 1..1602: note = source = /note="Description of Artificial Sequence: Synthetic coding sequence"
  source 1..1602: mol_type = other DNA
atggccacagcattgatggcagtggtgctccgagccgctgccgtagctccccgcctccgtggtcgaggcggtactggtggggctaggcggctcagttgcggagcacgacggagagctgccagaggaaccagcccaggacgccggctgtcaacagcttggtcgcagccccagcccccccctgaggagtatgccggggctgacgacgtgagtcagtccccagtcgctgaggagcctagttgggtcccgtccccaaggccccctgtaccccacgagtcccctgaacccccaagcggccgatctcttgttcaacgggacattcaggccttcctcaaccagtgcggcgcctctccaggagaggcccgccactggcttactcagttccaaacctgccatcactccgcggacaaacccttcgcggttatagaggtagacgaggaggttctgaagtgtcagcagggtgtcagctccctcgctttcgctctcgcctttctgcagcgcatggatatgaagcctcttgtggtgttaggcctccccgcccctaccgccccctcaggatgcctgtctttttgggaagccaaagcccagctggccaaaagttgtaaggttcttgtggatgcattgaggcataacgcggccgctgcggtacccttttttggtggcggctccgtgctgagggctgcagaaccagctcctcatgccagctacgggggaatcgtgtcagtcgaaaccgacctactccagtggtgtctcgaatccggcagtatacctattctctgtcctataggcgagactgcagctcgcagatctgtgctcctggattctttggaggtgaccgccagcctggccaaagctcttcggccgactaagataattttcctcaacaacacaggggggctgagggatagttctcacaaggtgctgagtaatgtaaatctgcctgccgacctcgatctggtgtgcaacgccgagtgggtgtccactaaggagagacaacagatgagactgatcgttgatgtcctgtctcgccttccccatcattcttcagctgtgattaccgcagcctccacgctcctaacggaattgttcagcaacaagggatctggcactctctttaaaaatgctgagcggatgctcagagttcgctcgctcgataaactggaccagggccgacttgtcgatctagtgaatgcgtcctttggcaaaaaactaagagatgactatcttgcgtccctgagaccgaggttacattctatttatgtctctgagggctataatgccgcagcaattctgaccatggagcccgttctcggaggtacgccgtatctggataagttcgtggtgagctctagtcggcaggggcagggctctgggcagatgttatgggaatgcctgaggcgtgacctgcagacactcttttggcggagcagggtgactaaccctatcaatccctggtattttaagcatagcgatgggagtttttccaataagcagtggatctttttttggttcggcttagccgatattagggacagttatgagctagtaaatcatgctaaggggctacctgactcctttcacaagccggccagtgacccagggtcc

SEQ ID NO: 17055 - DNA, 1602 bp, synthetic construct
  misc_feature 1..1602: note = source = /note="Description of Artificial Sequence: Synthetic coding sequence"
  source 1..1602: mol_type = other DNA
atggccacggcgctgatggctgtggtgctgcgggccgcggcggtggcccctcggcttcgggggaggggtggcaccggaggcgcacgccggctgagttgcggggcaaggcggagagcagcccgtggcacttcaccaggaaggcgcctgtcgacggcatggtcgcaacctcagcctccccctgaagagtacgctggagcagatgatgtgtcccagtccccggtggccgaggagccatcatgggtgccctcccctagacctcccgtgccacacgagtcgcctgaaccaccctcggggagaagccttgtgcagcgagacattcaagcatttctgaatcagtgcggtgcctcccctggtgaagctcggcattggctgacccaatttcaaacctgccaccactctgcagacaaacctttcgcggtgatcgaagtcgatgaagaagtgctgaagtgccagcaaggagtttcgtcgctcgcatttgcactggcatttctgcaacggatggatatgaaaccactcgtggttctgggactccctgccccaactgccccgtcggggtgcctgtcgttttgggaggctaaagcgcaacttgcaaagtcgtgcaaggtccttgtggatgcactccgtcataatgcagcagcagcggtgcctttctttggaggaggttccgtgctgagagcggcagaaccagcaccccacgcatcgtacggaggtatagtctccgtggagactgacttgctgcaatggtgcctcgaatccggatcaattccgattctttgccccattggtgagactgcggcaaggagatccgtgctcctggattcactggaggtcaccgcatcgctcgctaaggcactcaggccaactaagatcattttcttgaacaacactgggggactcagagattcatcgcataaagtcctctccaacgtgaaccttccagcagatcttgacttggtgtgtaacgcagaatgggtttccaccaaggaaaggcagcagatgcggctgattgtggatgttctttcaagacttcctcaccattcatccgccgtgatcactgcagcaagcaccctgctcaccgagctctttagcaataaaggatccggcaccctgtttaagaacgccgagaggatgctgagagttaggtcgctcgacaagctggatcagggacggctcgtggacctggtgaatgcatccttcggtaagaagctcagagatgactatctggcttccttgcgaccacggttgcactccatctacgtgagcgaaggttacaatgctgcagcaatacttaccatggaaccagtgttgggtgggaccccttaccttgataagtttgtcgtgtcatcctctaggcagggccaaggatcaggccaaatgctctgggaatgtctgcgcagggatctgcaaaccctgttctggcgctccagagtgactaatcctatcaacccatggtactttaaacacagcgatggttcattttcaaacaagcagtggattttcttttggtttggccttgcagacattcgcgactcgtacgaattggtgaatcatgccaaaggtctgcccgactccttccataaacctgcgtccgaccccggtagc

SEQ ID NO: 17056 - DNA, 1602 bp, synthetic construct
  misc_feature 1..1602: note = source = /note="Description of Artificial Sequence: Synthetic coding sequence"
  source 1..1602: mol_type = other DNA
atggccactgcattgatggcagtcgttctgagagcggctgcagtggccccaaggcttcgcggaaggggtggaaccgggggtgcacggagactttcgtgtggagccaggaggcgcgctgcacgaggaacttcaccaggtagacggttgtcaacggcatggagtcaaccccaacctcctcctgaggagtacgcaggggccgacgacgtcagccagtcccctgtggccgaagaaccatcatgggtgcctagccccaggccccccgtccctcatgaatcgcctgagccaccttcgggtagatcgctcgtccagagagacattcaggcctttcttaaccaatgtggcgcatccccaggtgaagcaagacattggcttacccagttccagacctgccaccactcagccgacaagccctttgccgtcatcgaggtggacgaagaagtgcttaaatgtcagcagggtgtgtcgtcccttgcattcgccctcgcatttcttcagcggatggatatgaagccgctcgtcgtgctgggactccctgcaccaaccgccccatcgggatgcctgtcgttctgggaggccaaagcacaactggcaaaatcctgtaaagtccttgtcgatgcacttcgccataatgccgcagcagcagtgcccttctttggtggcggatcagtgctccgggcggcagaaccggcccctcatgccagctacggaggtattgtctccgtggaaaccgatcttctgcagtggtgccttgaaagcggcagcattcccattctctgtccaattggcgaaactgcagcgcgccgctcggtgctgcttgattcgcttgaagtgaccgcatcgcttgccaaggcgctgcggcccaccaagatcatatttctgaacaacaccggtggacttagggattccagccataaagtgctctcgaatgtgaatttgcccgccgatctggatctcgtgtgcaacgccgaatgggtaagcaccaaggagagacaacaaatgcgtttgatcgtcgacgtgctgtcgaggttgccacatcattcttccgccgtgattacggcggcctccaccctcttgaccgagctgtttagcaacaagggatccgggaccctgtttaagaatgccgaacgcatgcttcgcgtgcgtagcctggacaagctggaccaaggtcggctggtggatctcgtcaatgcatcttttggcaagaaactgcgcgatgactaccttgcatcgctgcggccgaggctccattcaatctacgtctcggaaggatacaacgccgccgcaattcttaccatggaaccagtgcttggaggtaccccttacctggacaagtttgttgtcagctcgagccggcaaggtcaaggatccgggcagatgctgtgggaatgcctgagacgagatcttcagactctgttttggcgctcccgggtcaccaaccctataaacccatggtatttcaaacatagcgacggatcattctctaacaagcagtggatctttttctggtttgggctcgcagacattcgggattcttacgagcttgtcaatcacgccaagggccttcctgattccttccataagcctgcctcagatccaggttcg

SEQ ID NO: 17057 - DNA, 1602 bp, synthetic construct; identical to SEQ ID NO: 17042
  misc_feature 1..1602: note = source = /note="Description of Artificial Sequence: Synthetic coding sequence"
  source 1..1602: mol_type = other DNA

SEQ ID NO: 17058 - DNA, 1602 bp, synthetic construct
  misc_feature 1..1602: note = source = /note="Description of Artificial Sequence: Synthetic coding sequence"
  source 1..1602: mol_type = other DNA
atggccaccgccttgatggcggtggtccttcgagcagcagcggtggcacctaggctccgcggtcgcggaggtactggtggagcacggcgtctgtcatgtggcgctcgacggcgggccgcgcggggaacctcacccgggaggcggctctccactgcttggtcacaaccgcaaccacccccagaagaatacgcgggagccgatgatgtatctcagtcccctgtcgccgaggagccctcttgggtcccatcccctcgacctccggtgccccacgagtcgcctgaaccgccgtctggtaggtcgcttgtgcagagagacatacaggcattcctgaaccagtgcggcgcttcccctggtgaggcgagacattggctcacccagttccagacttgccaccactcagccgataagccgttcgctgtaatcgaggtcgatgaagaggtgctgaaatgtcagcaaggcgtctcgtcactcgccttcgctctggcgttcctccaacggatggatatgaaaccgctggtggtgcttggactgcccgcccctacggcgccgtccggatgtttgtcgttttgggaagcaaaagcccaactggcaaagtcgtgcaaggtgctggtcgatgctctcagacataacgctgcggcggccgtgccgttctttggcggcgggagcgttctgcgcgctgcggaacccgccccacacgcatcctacgggggaatcgtctcagtggagactgaccttctccaatggtgcctggagagtgggagcatcccaatcttgtgcccaatcggagagacggcggcgcggcggagcgtgctgctcgactcactggaggtcactgcttccctggccaaggccctccgcccgaccaaaatcatcttcctgaataacacggggggtcttagggattcctcccacaaagttctctcgaatgtcaatctgccggccgacctggatctcgtgtgcaacgctgaatgggtgtcgaccaaggaacgccagcaaatgcgcctcatcgtcgacgtgcttagcaggttgccgcaccattcgtccgcggtgattactgcggcctcgactctgttgactgaactgttttcgaacaagggaagcggaaccctgttcaagaacgcggaacgaatgctgcgggtccgcagcctggacaagctggaccagggacgtctcgtggacctggttaatgcttcgttcggcaagaagttgcgggacgattacctggcaagcctcagacctcgcctgcattcgatctacgtatctgaaggatacaatgccgccgcgatcctgaccatggaaccggtgctcggagggaccccgtacctcgacaagttcgtggtcagctcctcacgccagggccaagggagcggccagatgctgtgggagtgccttcgccgggacttgcagaccctcttctggagaagccgggtgaccaacccaattaacccgtggtactttaagcactcggacggttccttctcaaataagcagtggattttcttttggtttggtttggccgacatcagagatagctatgaactggtcaaccacgctaaaggcctcccggacagcttccataagccagcatcggatcctggatct

SEQ ID NO: 17059 - DNA, 1602 bp, synthetic construct
  misc_feature 1..1602: note = source = /note="Description of Artificial Sequence: Synthetic coding sequence"
  source 1..1602: mol_type = other DNA
atggcaaccgcactcatggcagtggtccttagggcggcagcggttgcccctagacttagaggacgaggcggaactggaggagcaagaaggctttcgtgtggagcacggcgaagagccgcacgcggaacctcgccagggaggaggctttccactgcctggtcacagccacaaccaccccctgaggaatacgccggagccgacgacgtctcgcaatcgcctgtggcagaggaaccttcttgggtcccctcgccaaggccacccgtgcctcacgaatccccagagccaccttcagggcggtcactcgtgcagcgcgatatacaagccttcttgaaccaatgcggtgcttccccaggagaagcaagacattggcttacccagttccagacctgtcatcattcggcagataagccatttgccgtgattgaagtcgacgaggaagtgcttaagtgccagcagggggtcagctcactcgcatttgcactggcatttctgcaaagaatggatatgaagcctctggtcgtcctcggactccctgcaccgactgcgccctcggggtgtctctcattttgggaggcgaaggcgcaactggctaagtcctgtaaggtgctcgtggacgcgcttcggcacaacgctgccgcagccgtcccattcttcggtggtggaagcgtcttgagagcagccgaacctgcgccacatgcaagctacggcggtatcgtgtcggtggagactgacttgctgcagtggtgccttgaatcgggctccatccctattctctgccctattggtgagactgcagcaagaagatcggtgctcctggattccctggaggttaccgcatctctcgcaaaggccctcagaccaaccaagattatcttcctgaataacacggggggactgcgggactccagccacaaagtcttgtcgaatgtgaatctgcctgcggatctggatctcgtgtgtaacgccgagtgggtgtcgactaaggaacggcagcaaatgcggctgattgtggacgtgctgtctcgtctgcctcatcattccagcgctgtgattacggcggcatcgaccctgttgaccgaactgttttctaacaagggctcaggtaccctctttaagaacgcagagagaatgctcagagtccgctcgctggataaactggatcagggtcgactggtcgatcttgtgaatgcatcgttcgggaagaaactccgtgacgattacctcgcatccctccgacctagactgcactccatttacgtgtccgaggggtataacgccgcagcaattctgacgatggaaccggtgctgggcggtactccatacttggataagtttgtcgtttccagctcccgtcagggtcagggctcggggcaaatgctttgggaatgcctgcgacgggacctgcagactctgttctggagatcgcgtgtgaccaatcctatcaacccttggtacttcaagcatagcgacgggtcgttttcgaataaacaatggatctttttctggttcggtcttgctgacattcgcgattcgtacgagcttgtcaaccatgcaaagggactgcctgatagctttcataagcctgcatcggatccaggctcg

SEQ ID NO: 17060 - DNA, 1602 bp, synthetic construct
  misc_feature 1..1602: note = source = /note="Description of Artificial Sequence: Synthetic coding sequence"
  source 1..1602: mol_type = other DNA
atggcaaccgccctgatggctgtcgtgctccgtgcggccgctgtggcacctagacttagaggaagaggcggaactggaggggcccgccgactctcgtgtggggctcggagaagagcagccagaggaacctcaccaggaaggagactgtccaccgcttggagccaaccccagccacctccagaggaatacgcaggcgcagacgatgtgtcccagtcgcccgtggcagaggaaccatcatgggtgccaagccctaggccgccagttccacatgagtctccagaacctccttctggacggtcgctcgtgcaaagggatatccaagcatttctgaatcaatgcggggcatccccgggagaagcaagacactggctcacgcagtttcaaacgtgccaccactccgcggacaagcctttcgcagtgatagaggttgatgaagaggttctgaagtgtcaacagggggtgtcctcgctggcattcgcactcgccttcctccaacgcatggatatgaagccgttggtcgtcctcggtttgcctgcgcctaccgccccgtcagggtgtctctcgttttgggaagcaaaggcccaactggcaaaatcatgcaaggttctggtggatgccctgaggcataacgcggcagcggccgtgccgttttttgggggagggtcagttctgcgggcggccgaaccagcccctcatgcgtcttacggtggtattgtgtccgtggaaactgatcttctgcagtggtgtctcgaatcgggaagcatccctattctttgtccgattggagaaaccgcagcccgaagatcagtgctgcttgactctctggaggtgactgcatcattggcgaaggcacttagaccaacgaaaatcatctttctgaacaataccgggggtctgcgggactccagccacaaagtgttgtccaatgtcaacctgcccgcagatctggatcttgtgtgcaatgctgaatgggtgagcactaaggagcgccagcagatgcgacttatcgtggatgtgttgagccggctgccacatcactcatcagcagtcatcaccgcagcatcgactctcctgaccgaactctttagcaacaagggctccggtaccctgttcaaaaacgcagaaaggatgctgcgcgtccgtagccttgacaaactggaccagggaagattggtggatcttgtgaatgcgtcatttgggaagaagctgcgtgatgattacctggcctcgctgcggccacggcttcactccatttacgtgtccgaaggttacaacgcagcagcaattctgactatggaacctgtccttggcggtaccccctacctggataagtttgtcgtgagcagctcaaggcagggtcaagggagcggtcaaatgctgtgggagtgtctgagacgcgaccttcaaactctgttttggagatcgcgagtgactaaccccattaacccttggtatttcaaacatagcgatggatcattttcgaacaagcaatggattttcttttggtttggacttgctgatataagagattcctacgagttggtgaatcatgcaaaggggctgccagactccttccataagccggcaagcgaccccggtagc

SEQ ID NO: 17061 - DNA, 1602 bp, synthetic construct
  misc_feature 1..1602: note = source = /note="Description of Artificial Sequence: Synthetic coding sequence"
  source 1..1602: mol_type = other DNA
atggcaactgcccttatggcagttgtgctgagggccgctgcggtggccccgcgcctacgtggaaggggcgggactggtggagctaggagattgagctgcggcgcacgccggcgcgcagctcgtggtacctccccagggcggcgtctatccacagcatggtcacaaccccaacctccgcccgaggaatacgcaggtgcagacgacgtctcacagagtcccgtagccgaggagcccagctgggtacccagtcctagacccccagtgcctcatgagtctccagaacccccatccgggagatctctcgtacagcgggatattcaggcttttctcaaccagtgcggcgcaagtccgggagaggcacggcactggttgacgcaatttcagacgtgccaccatagcgctgataagccattcgcagtcatcgaggtagacgaggaagtcctgaaatgtcagcagggtgtttcctcactggccttcgcattagctttcctccagaggatggatatgaaacccctggttgttctcggcctgcctgccccgaccgcccctagcggatgtctgtcattctgggaagcgaaggcccagcttgcaaaatcatgtaaggtactagtcgatgccctccggcacaacgctgctgctgcagtgccctttttcggaggcggctctgtgctgagggctgcagagccagcccctcacgcgagttatggaggaatcgtatctgtcgagacagacctgttgcagtggtgtctggagagcggatcaatccctattctgtgccccataggggaaaccgcggcccggcggagtgtgctgctagacagcctggaggtgacagcttctctggctaaagctctgcggccaaccaagatcatattcctgaataacacgggcggcttgcgcgactcctcccacaaagtcctgagcaatgtcaacctccctgccgatctcgatttggtgtgcaacgctgaatgggtgagcacaaaggaaaggcagcaaatgagactcattgtagacgtgcttagcagacttccccaccatagttccgcagtgatcactgcagcctccaccttactaaccgaactattcagcaacaaaggttctggtaccctgttcaagaatgccgagaggatgctgcgcgtgcggtccctggataaactagaccagggcagattggtggatctcgtgaacgccagctttggaaagaagcttcgggatgactatctcgcaagcctgcgtccaaggctgcactcaatatacgtatccgagggctacaacgctgcagcgattctgactatggaacctgtactaggcggtaccccatatctggacaaattcgttgtgtccagtagtcggcaggggcagggcagcggacagatgctgtgggaatgcctcaggcgcgaccttcagactctgttttggcggagtagggtgactaatcccatcaatccttggtattttaagcactccgacggaagcttctctaataagcagtggatatttttttggttcggattagctgacatcagggacagctatgagctggtgaaccatgccaagggcctgcctgatagtttccacaaacctgcctccgacccaggctcg

SEQ ID NO: 17062 - DNA, 1602 bp, synthetic construct
  misc_feature 1..1602: note = source = /note="Description of Artificial Sequence: Synthetic coding sequence"
  source 1..1602: mol_type = other DNA
atggctaccgcgttgatggcagtcgtgctgcgggccgcagccgtggcacccaggcttaggggacgaggtggcactggtggtgcaagacgactctcctgtggtgcccgccgacgagccgcaaggggaacgagccctggtagacgactgagcactgcatggagccagcctcagccacctccagaggaatacgccggcgcagatgatgtgagccagtcgcccgtcgcagaggagccatcctgggtgcctagccccaggccgcctgtgccacatgaatccccggagccaccaagcgggcgcagcctggtgcaacgcgatatccaagcatttctcaatcaatgcggtgcgtctccaggagaagcccggcattggctgactcaatttcagacgtgccatcactcagccgataagccttttgctgtgatagaagtcgatgaagaggtgctgaagtgccaacaaggggtgtcgtcactggcatttgcactggcatttctgcaaaggatggacatgaagcccctcgtggtccttggactgcctgcaccaacggcgccatccggatgcctgtccttctgggaagccaaagcacagttggcaaaatcatgtaaggtcctggtggatgcattgagacacaatgcggcagcggcggtcccttttttcggtggcggatcagtgctccgggcggcagaaccggcacctcatgcgtcctacggtgggattgtctccgttgagacggatctgctgcagtggtgtctcgaatcaggttcgataccgattctttgccccattggcgagacggcagcacgtcgatctgtccttctcgactcgctggaggttaccgctagcctggctaaggcccttcgaccaactaagataatcttcctcaacaacactgggggacttagggattcaagccacaaggtgctttccaacgttaacctgccggcagacctggatttggtctgtaacgcagaatgggtgtcaaccaaggaacggcaacagatgaggctgattgtggacgtgttgtccagactcccacatcattcgtcggccgtgattaccgcggcgtcgactcttctgaccgaactgttcagcaacaagggatctggtactcttttcaaaaacgcagaaagaatgcttcgtgtgcgaagcctcgataaacttgatcagggtagactcgtcgatctggtcaatgcatcctttggaaagaaacttagagacgactaccttgcgtcgctccgtcctaggcttcattcaatttacgtctcggagggctacaacgcagcagcaattctcaccatggaacccgtccttggaggtaccccttacctcgacaaattcgtggtgtcaagctcaaggcaaggacagggttcgggacagatgctctgggaatgccttcggagagatttgcagacgcttttttggcgatcacgggtgactaatcccattaatccatggtactttaagcattcggatggctccttttcaaataagcaatggatctttttctggttcggattggcggacatacgggactcgtacgaactggtgaaccacgcaaaggggcttccagatagcttccacaagcccgcctccgatcccggctcc

SEQ ID NO: 17063 - DNA, 1602 bp, synthetic construct
  misc_feature 1..1602: note = source = /note="Description of Artificial Sequence: Synthetic coding sequence"
  source 1..1602: mol_type = other DNA
atggctaccgcactgatggccgttgtcttgcgtgcagccgcggtggcgccccgcctccgagggcggggaggaactggaggagcaagacggctgtcatgtggagctcgacgccgagcagcaagaggcacctcacctggcagacgactgtcaaccgcgtggtcccaaccccagccaccgcccgaagaatacgctggagcggatgatgtgtcgcagtccccagtcgcagaagaaccatcctgggttccttcacctagacctccagtgccacacgaatccccagagccaccctccggaaggagcctggtccaaagggatatccaggcctttcttaaccaatgtggggccagccccggagaggcacgccattggctcactcaatttcaaacctgccaccactccgcggataagccctttgcggtgatcgaagtcgatgaagaagtcctgaagtgtcaacagggcgtgagctcgctggcttttgctcttgcttttcttcagagaatggacatgaagccactggtcgtgttgggactccctgcaccaactgcgcccagcggctgcctttccttttgggaagcaaaggcacagcttgccaaatcgtgtaaggtgctggtcgatgccctgcggcataacgcagcagcagccgtgccattcttcggcggaggttcagtgctgagagcagcagagcctgcaccgcatgcatcttacggtggcatcgtctcggtggagactgatctgctgcagtggtgccttgaatcagggtcaattccaatcctctgtcccattggtgaaaccgctgcacgcagatcggtgctgctggacagcctcgaggtgacggcctcgctggccaaggcactgcgacccaccaaaatcatttttctgaataacaccggaggtttgcgggactcgtcgcataaagtgctctcaaacgtcaatcttccagcagaccttgatttggtgtgtaatgcagaatgggtgtccaccaaggaacgccaacaaatgcggctcattgtggatgtcctgtcccggttgccccatcattcctcagcagtcatcactgcagctagcactttgctcaccgagctgttttcaaacaagggatccggaacgctcttcaagaacgcagaaagaatgctgcgggtcagatccctggataaacttgaccaagggcggcttgttgacctggtgaacgcttcgttcggaaagaaacttcgggatgactacctcgcatcgcttcgcccaagactgcactccatttacgtgtcagaaggctacaatgcagccgcaattctgactatggagcctgtgcttggagggaccccgtaccttgacaaattcgtggtgtcgagctcacggcaaggtcagggatcaggacagatgctttgggagtgccttaggagagacttgcagacgctgttttggcgttcgcgggtcaccaatccaatcaatccttggtactttaagcactcagacggatccttttccaacaagcaatggatcttcttttggttcggtcttgcggatatacgcgactcatacgaacttgtgaaccatgcaaagggactgcctgatagctttcataaaccagcatccgatccggggagc

SEQ ID NO: 17064 - DNA, 1602 bp, synthetic construct
  misc_feature 1..1602: note = source = /note="Description of Artificial Sequence: Synthetic coding sequence"
  source 1..1602: mol_type = other DNA
atggcaaccgctctgatggcagtggtgctcagggctgccgctgttgcaccccggctgcgggggagaggcggcacgggaggggctagacgcctctcttgcggcgcgcgccgaagagcggccagaggaacctctcctggtcggaggctcagtacagcgtggtcacagccccagccacctcctgaggagtacgcgggcgccgacgatgtgtctcagtcacccgtggccgaggagccttcctgggtgccctcaccgcgcccaccagtcccccacgagagtccagaacccccaagcggacgatctttagttcaaagggacatccaggccttcctgaaccaatgtggagcctctccaggcgaagcccggcactggttgacccagttccagacttgtcaccatagcgctgacaagccatttgctgtgattgaggtcgatgaggaggtgctgaagtgccagcagggagtgtcatccctggcctttgcccttgctttcctgcagcgaatggatatgaagccactagttgtgttaggccttcctgctcccaccgcacctagcggttgtctgtctttctgggaagctaaagctcaactggcgaagagctgcaaagtcctggtggacgctctcaggcataacgccgcggccgccgtcccattctttgggggcggctctgtgctgcgcgctgctgaacctgcgccccacgcttcttacggcggcatagtcagcgtggagactgatctattgcagtggtgtctcgaatccggttctatacccatcctttgtcccattggcgaaaccgctgcgcgcaggtctgtcttgctggactctttagaggtaacggcaagcttggcaaaggcattaagacccacaaagataatctttcttaacaataccggggggctcagggatagctcccataaagtgctgtccaatgtcaatctgcccgccgacctggatctggtctgcaatgctgagtgggtcagcactaaggagaggcagcagatgcggctgattgtggacgtgctgtcacgcctgcctcaccatagctccgccgttatcacggcagcaagtaccctgctgactgaactatttagtaacaagggatctggcactctgtttaaaaatgctgagagaatgctgcgcgtgaggagtctagataagttagaccagggacggctggttgacctcgtgaatgcatcctttggcaagaaattacgcgatgactaccttgcctccttgaggccccgcctgcacagtatttacgtcagcgagggctacaatgctgcagccattctcacaatggagccggtcctggggggaactccttacctagataaattcgttgtatcctcttctcgtcaggggcagggcagcggccaaatgttatgggaatgtctccgcagggacttgcagacgctgttttggaggtctcgggtcaccaacccaattaacccctggtacttcaagcacagtgacggtagcttttcgaacaagcagtggatatttttctggttcggactagcggacatccgggatagctatgaactcgtgaatcacgcaaaaggtctgcccgactctttccataaacccgcttctgacccagggtca

SEQ ID NO: 17065 - DNA, 1602 bp, synthetic construct
  misc_feature 1..1602: note = source = /note="Description of Artificial Sequence: Synthetic coding sequence"
  source 1..1602: mol_type = other DNA
atggcaacagcactgatggcagtggtgttacgggccgcagctgttgccccacgccttagagggcgagggggaactgggggagctcggcgattatcttgtggggcccgacggagagcagcacgagggacttcacctgggcgacgcttatccacagcatggtctcagccacagccccccccagaagaatatgccggggctgatgatgtctcacagtcacccgtagcagaagaaccctcttgggtaccctctccaagacctcctgtcccacatgagagtcccgaaccaccttccggaagaagtctggtgcaacgagatatacaggcttttctcaaccagtgcggagcctcccccggagaagccaggcactggctaacacagtttcagacatgccaccactcagcggataaaccctttgccgtaattgaggtggatgaggaagtactcaaatgtcagcagggggttagtagtcttgccttcgctctggcctttttacaacggatggatatgaaaccacttgtggttcttgggctacctgccccaactgcaccctcagggtgtctcagtttttgggaagcaaaagcccagctggctaaaagttgcaaagtgctcgtggatgctctcagacacaacgccgctgcagctgtcccattttttgggggagggtccgtactgagagccgccgagccagctccccacgcctcttatggggggatagtgtccgtggaaactgatctactccagtggtgcctcgaatctgggtctattccaatcctatgcccaattggggaaacagccgcacgacgctcggtgttactggattctcttgaagtcacagcctctctggccaaagccctgagacctacgaaaataatatttctaaataatactggaggactgcgcgactcttcacacaaagttctatctaatgtcaaccttcctgctgatctagatctggtgtgtaatgctgaatgggtctccacaaaagaacgccagcagatgcggctgatagtggatgtactttcgagactgcctcatcattcttccgctgttattacagccgccagtacactcctaactgagttgttttccaacaagggatcagggacgctgtttaaaaacgcagaacggatgctgagagtgcggagtctcgacaaactcgatcagggaagattagtagatctcgtcaatgccagtttcgggaaaaagttgcgcgacgattatttagcatcgcttcgaccccgcctccactccatctatgtctcagaaggatataacgctgccgcaatacttacaatggaacctgtcctgggagggacaccatacttggataaatttgtggtgtcatcgtcacgacagggacagggatctggacagatgctttgggagtgtttacggagagatctccagacattattctggcggagtcgggtaactaaccctattaatccttggtattttaagcactccgatggatctttcagtaataaacagtggatattcttttggttcggactcgccgatatacgggattcctacgaacttgtgaaccatgcaaaagggctacccgattccttccataaaccagcatcagatccaggaagt

SEQ ID NO: 17066 - DNA, 1602 bp, synthetic construct
  misc_feature 1..1602: note = source = /note="Description of Artificial Sequence: Synthetic coding sequence"
  source 1..1602: mol_type = other DNA
atggcaactgcacttatggcggtggtgcttcgagcagccgcggtggcaccccgtttgcgcggaagagggggaactggtggtgcccggcgattgtcctgtggagccagacggagggcagctcgcggtacttcgcctggcaggcggctcagcactgcatggtcacaaccacaacctccaccagaggagtatgccggggcagatgatgtctcacaatcgcctgtcgcagaggaacctagctgggtgccaagcccccggcctcccgtcccacatgaatctcctgagcctccttccggaagatccctggtgcagcgggatattcaagcgtttctgaaccaatgcggcgcatcgcccggagaagcaaggcactggctgacccagttccaaacctgtcatcatagcgcagataaaccgttcgcggtgatcgaagtggatgaagaagtgctgaagtgccaacaaggcgtgtcatccctggcctttgcccttgccttcttgcagcgcatggacatgaaaccacttgtcgtgctcggcctgcctgcaccaaccgccccatcaggatgcctgtcgttttgggaggcaaaggcgcaacttgcaaagtcatgtaaggtcctcgttgacgccctgcgtcataatgccgcagctgccgtcccttttttcgggggtgggtcagtcctgcgggccgcagagccagcacctcacgcgagctacggaggaatagtgagcgttgaaaccgacttgcttcaatggtgtcttgaatccggatccattccaatactttgccctataggcgaaaccgcagcacgacgaagcgttctgctcgatagcctggaggtgaccgcatccctcgctaaggccctgcggcccaccaagatcatattccttaacaacactggaggactgcgtgatagctcccataaggtgctgtcgaatgtgaacttgcctgccgaccttgaccttgtgtgtaacgccgaatgggtatccaccaaagaaagacagcaaatgcggctgatcgtggatgtgctctcacggctgcctcatcattccagcgcagtgattacggcggcttctactctgctgactgaactgttttccaacaaaggttccggcacgctgtttaagaatgcagaaaggatgctgcgagtccggtcgcttgataaactggatcaaggtcgcctcgtggatctggtcaacgcctcgtttggaaagaagctgagagacgactacctcgcatcgcttagaccccggcttcattcgatttacgtgagcgaggggtacaatgccgcggcaattctcaccatggagcccgtcctggggggcaccccttaccttgataagtttgtggtttcgagctccaggcaagggcagggttcgggtcaaatgctgtgggaatgcttgcgacgggacctgcagactctgttttggagatccagagtgacgaatcccatcaacccttggtacttcaagcacagcgacggttccttttcgaacaagcagtggattttcttttggtttggtcttgccgatatccgcgactcatatgaactggtgaaccatgcaaaagggctgccggattcatttcacaagccggcatcggatccaggaagc

SEQ ID NO: 17067 - DNA, 1602 bp, synthetic construct
  misc_feature 1..1602: note = source = /note="Description of Artificial Sequence: Synthetic coding sequence"
  source 1..1602: mol_type = other DNA
atggctaccgctctaatggcagtggttttgcgcgcagccgccgtcgctcctcgtcttaggggtcgaggaggcacaggtggggcacgccggttgagttgtggcgcacgacgtagggccgctaggggaacttcaccagggcgtagactgtcaactgcgtggtcccagcctcagcctccgccagaggaatatgctggagctgacgatgtgtcccagtccccggtggctgaggaaccaagctgggtaccctcgcctagacctcccgtcccgcatgaaagccccgagccgccctctgggagatccttggtgcaaagagacatccaagcattcttgaatcagtgcggagcctcaccaggagaggctaggcactggttaacacaatttcagacctgtcaccactctgccgacaaaccattcgcggtgatcgaagtggatgaagaggttcttaagtgccagcagggggtgagcagtctggcgttcgcactcgcctttctgcagaggatggacatgaagccgctggtggtgctgggactgccagcgccaactgccccatccgggtgcctgtccttctgggaggccaaggcccagctggccaagagttgcaaagtgctggtggatgctctgcgacacaacgcggccgcagcggtgcccttctttgggggaggctctgtgctgcgggcagctgagcccgccccacacgcttcatacggagggattgtctccgttgagaccgatttgctgcaatggtgcttggaatccggtagtatccccattttatgccccatcggagaaactgccgctagacgatccgtccttttggacagcctcgaggtcaccgcctccttagccaaggctctgcgcccaactaagataatcttccttaacaacacgggtggcctgcgggactccagccacaaagtgcttagcaacgtgaacctgccggcagatttagatctggtctgtaatgcggagtgggttagtaccaaagagagacagcaaatgagactgatcgtggacgtgctgagtaggctgcctcatcactcctccgcagtgataaccgcagccagcaccttgctcacagaattgttttccaataagggaagcggcacattatttaagaacgcagaacgaatgctccgtgtgcgctctcttgataagctcgatcaggggagattagtagatctagtaaatgcctcatttgggaaaaaactcagggatgactatctcgcttctctccgacccaggctacactcgatttacgtgagcgaagggtataacgcggccgccatcttaaccatggagccagtgctcggtggcacgccatacttggataagttcgtggtcagcagtagcagacaggggcaaggaagtgggcagatgctatgggagtgtctgcgaagggatctgcagactctcttttggaggagccgggttactaatccgatcaacccttggtacttcaaacattctgatggcagctttagcaacaaacaatggattttcttctggttcggtcttgctgacatccgggatagttacgagctggtgaaccatgccaagggactccccgattctttccacaaacctgcaagtgacccaggtagc

SEQ ID NO: 17068 - DNA, 1602 bp, synthetic construct
  misc_feature 1..1602: note = source = /note="Description of Artificial Sequence: Synthetic coding sequence"
  source 1..1602: mol_type = other DNA
atggccacagccctgatggcagttgtgctgcgggcagcagccgtcgctccgcgattaagggggcgtggcggcacggggggcgccaggcgcctgtcatgtggagctagacgacgtgcggcgcgcgggacatctcccggccgtcgccttagcacagcttggagtcagccccagcctcccccagaggagtacgccggcgccgacgatgtaagccaatctcctgttgcggaagaaccaagttgggttccctccccgaggcctccagtgcctcatgaaagcccagaaccgccctctggtcgttcactggtgcaacgggacattcaggcattcttgaaccagtgcggagcctccccgggggaagcccgacactggttaacccagttccaaacatgtcaccattcagccgataagccctttgcagtgattgaggtcgacgaagaggtcctcaagtgccagcagggggtttcatctctagccttcgcccttgcgttcctgcagagaatggacatgaaaccactggtcgtcctgggcttgcccgcccctacagctccctccggttgtctgagtttctgggaagccaaggcccagcttgccaagtcttgtaaggttcttgtcgatgctttgcggcacaacgctgcagctgcggttcccttcttcggcggcggatccgtgctccgggcggccgaacccgctcctcacgccagctacggagggatagtaagcgtcgagacagacttgttacagtggtgcttagagagcggaagcatcccaatcttatgccccattggagagaccgcagcgagacgcagcgtcctgcttgattctctggaggtaaccgcttcactggccaaagctttgagacccacaaaaataatctttctcaacaacaccggcggactgcgagatagcagccataaggtgctgtctaatgtcaatctaccggcggacctggacctggtttgcaacgcggagtgggtgtcaactaaagaaaggcagcagatgcgactaatcgtcgacgtgttaagccgattgccacatcactcatccgctgtcatcaccgccgcctcgacactcctgaccgagctgtttagcaataaggggtccgggaccctcttcaaaaacgctgagagaatgctcagagtgcggtccctagataagctggaccagggaaggctggtagacctggtcaacgccagcttcggaaaaaaactgagagatgactacctcgcttcccttcgacctcgtctgcactctatctacgtcagtgaaggatacaatgccgcagccattcttacaatggagcctgttctgggaggaactccgtacctcgataagttcgtggtgtcaagttcccggcaaggacagggcagcgggcagatgctgtgggagtgcctgaggagagatctgcagactctgttttggcggagcagggtgacaaatcccatcaatccctggtactttaaacacagcgatggctcctttagtaataaacagtggatctttttctggtttgggctggctgacatacgcgatagctacgagctggtgaatcacgcgaaggggctcccagattcttttcacaaacccgcttcagatccaggcagc

SEQ ID NO: 17069 - DNA, 1602 bp, synthetic construct
  misc_feature 1..1602: note = source = /note="Description of Artificial Sequence: Synthetic coding sequence"
  source 1..1602: mol_type = other DNA
atggctactgctctgatggctgtggtcctgagagcggcagcagtggcgcctaggctcagaggaaggggtggaactggaggtgcccgccgactttcatgcggggcgagacgccgtgcggctagaggtacctcacctggaaggcgtcttagcaccgcgtggtcccagccacaaccgcccccagaagaatacgccggagccgatgacgtgtcgcaatccccggtggcagaggagccatcctgggtcccatcgcctcgaccacctgtccctcacgaatcccccgagcctccgtctggacgcagccttgtccaacgggatattcaagcattcctgaatcagtgcggtgcatcacctggcgaagcaagacactggctgactcagttccagacctgtcatcacagcgcagacaagccgtttgcagtgattgaggtcgatgaggaagtccttaagtgtcaacagggagtatcctcgctggcttttgcacttgcatttctgcaacgaatggatatgaaacctctcgtcgtgcttggacttccagcacctacggcgccatcaggatgcctgtccttttgggaggcaaaagctcaactggcgaagtcatgtaaagtgctggtggacgcattgcgacataatgccgcagctgctgtgccgttttttggaggcggatccgtgcttagagcagcagagccggcccctcacgcatcctatggtggtatcgtctcggtggaaaccgatctgctgcaatggtgcctggagtccggtagcattcctatcctgtgtcctattggcgaaaccgcggccagaagaagcgtccttctggactcccttgaagtcactgcaagccttgcaaaggctctgcgccccactaagatcatcttccttaacaataccggtgggctgcgtgattcatcacataaggtcttgagcaacgtgaaccttccagcagacctcgacctcgtctgtaatgcagaatgggtgtccaccaaggagcggcaacagatgcggcttattgtggatgtcctcagtagactgcctcatcatagctcagcagtgataactgcagcatcaacgctgctcactgaacttttttccaacaagggatcgggtaccctctttaagaatgctgaacgcatgctgagggtcagatcgcttgataaactggaccaggggcgcttggtggatctggtcaatgcatcgtttggtaagaaacttcgggatgactaccttgcctcgctcagacctcgcctccattccatctacgtgtccgagggatacaacgcagccgcaatattgaccatggaaccagtgctcggtggtacgccttacttggacaagtttgtggtttcctccagtcgtcaggggcagggatccggacaaatgctgtgggaatgtctgcgcagggaccttcagaccctgttttggagaagccgagtaaccaacccaattaacccctggtactttaagcactccgatggatccttttcaaataagcaatggattttcttctggttcggactcgcagacataagggattcgtatgagctggtgaaccatgctaaggggctgcctgattcttttcacaaacctgcctcggatccaggatcc

SEQ ID NO: 17070 - DNA, 1602 bp, synthetic construct
  misc_feature 1..1602: note = source = /note="Description of Artificial Sequence: Synthetic coding sequence"
  source 1..1602: mol_type = other DNA
atggcaaccgcgctcatggccgtcgtcctccgcgcggccgccgtggctccaagactgcgaggcaggggaggaaccggaggagctcgcagactttcctgtggcgccagacggcgggccgcccgcggcacctcacccggacgccggctgtctacggcatggagccaacctcagcctccacctgaggagtacgctggagcggatgatgtgtcccagagcccggtggccgaggagccgtcctgggtgccctcgcctagaccgccggtgccacatgaatcaccagaacccccttcagggcgctcgctggtgcaacgcgacatccaagcattcttgaatcagtgtggtgcgtcgcctggagaggcgagacactggctcactcagttccaaacctgccaccattcggcggataaaccgttcgccgtgatcgaagttgatgaggaagtgctgaagtgccagcaaggggtgtcgtcactggcctttgccttggccttcctccagagaatggatatgaagcccctcgtggtgctcggactccccgcacctaccgctccgagcggatgcctgagcttctgggaagcgaaagcacaactggcgaagagctgcaaggtgcttgtcgacgcgctgagacacaatgcggccgccgccgtgcctttcttcggaggcggatcggtccttcgggccgcggagccggccccacacgcgtcctacggtggaatcgtgtccgtggagactgacctgctgcagtggtgcctggagtctggcagcattccaatcctttgccctatcggcgaaacggcggcacgccgctccgtgctgctggattcccttgaggtgacggcttcgctcgcgaaagctctgcgaccgaccaagatcatcttcctcaataacaccggaggactgcgggactcatcccacaaggtgctgtccaatgtgaaccttccggcagacctggacctggtgtgcaacgccgaatgggtgtccacgaaagagaggcaacagatgcgccttatcgtggacgtgctcagccgcttgcctcatcactcatcggcagtcatcactgcggcgtcaaccctcctcaccgaacttttctccaacaagggatcgggaacccttttcaagaacgcagaacgcatgctgcgcgtgcgctcgctggacaagctggatcagggacgactggtcgacctggttaacgcgtcattcggaaagaagctcagagacgactacctggcctcgctccgccctcgcctccactcaatctacgtgagcgagggatataacgccgctgccattctgactatggaaccggtcctcggaggcactccgtacctcgacaagttcgtcgtctcgtcctcccgccaaggacagggatcaggacagatgctgtgggagtgcctgcggcgcgacctccagaccctgttttggcgcagccgggtcacgaaccctatcaatccatggtactttaaacattcggacgggagcttctctaacaaacaatggatcttcttttggttcggactcgccgatatccgggattcatacgaactggtcaaccatgccaagggcctgccggacagctttcacaaaccggcctcagatccaggctca

SEQ ID NO: 17071 - DNA, 1602 bp, synthetic construct
  misc_feature 1..1602: note = source = /note="Description of Artificial Sequence: Synthetic coding sequence"
  source 1..1602: mol_type = other DNA
atggccacggccctgatggccgtagtattgagagccgcagctgtggcccctagactgagaggccggggcgggacaggcggtgctaggaggttaagttgcggtgcacgaagacgcgcggctcgcggcacttctcctggcagaagactgagtaccgcatggtcccaacctcaacctccccccgaagagtacgctggggctgatgatgtgtcacagtcaccggtggccgaggagcctagctgggtgccgagcccgcggccacccgtgcctcatgagtctcctgagcctccctccggacgatcactcgtgcagcgcgacatccaggccttcctgaatcagtgcggggcatcacctggcgaggcccggcactggctgacacagtttcagacctgccaccacagcgcagacaagccgttcgccgtcatcgaagtggatgaagaggtgctgaaatgccagcagggcgtgtcttccttggcgttcgccctcgcctttctgcagcgcatggacatgaaacctctcgtggttctgggattgccagcccccactgccccctctggatgcttaagcttttgggaggcaaaagcccagctggctaagtcctgcaaggtgttggttgacgccctgcgccataacgctgcagccgcagtgccattcttcgggggcgggtcggtgctgcgggccgccgagccagccccccatgccagttatgggggcatagtgtcagtggaaacagacctccttcaatggtgtttggaatccggctcaatacctatcttgtgtccgatcggtgaaaccgctgcgcgccgaagtgttctgcttgattcactcgaggtgacagcaagtctcgcaaaagctctgcgacctacaaagatcattttcttaaacaatactggtggcctccgcgattcaagccataaggttttgagcaatgtaaatctgcccgctgatttagatctggtgtgcaatgctgagtgggtctccaccaaagagagacagcaaatgcgactaattgttgatgtcctctccaggctgccgcatcattccagcgctgtcattacagctgcttctactcttctgactgaactcttttcaaataagggctccgggactctattcaagaatgccgaaaggatgcttagggtccggagcctggataaacttgaccaggggcgactggtagacctggtaaatgcatctttcggcaagaaactccgcgatgattacctagcttccctccgtcctagactgcactccatttatgtgtcagagggatacaatgccgccgcaatcctgaccatggagcctgtgctgggcggaactccctacctggataagtttgtcgtaagctccagtaggcagggccagggctccggacagatgctgtgggaatgcctgaggagagatctgcagactctgttctggcggtctcgcgttacaaatcccatcaatccatggtactttaaacatagcgacggctctttttcgaataagcagtggatcttcttttggttcgggctcgcggatatccgtgacagctacgagctcgtgaatcatgccaaagggctaccagatagcttccacaagccagcgtccgaccccggatct

SEQ ID NO: 17072 - DNA, 1602 bp, synthetic construct
  misc_feature 1..1602: note = source = /note="Description of Artificial Sequence: Synthetic coding sequence"
  source 1..1602: mol_type = other DNA
atggctaccgccctgatggccgtcgtcttgcgtgcagcagccgttgccccgcgcctgcgaggcagaggtggaactggcggcgctcgtagactgtcatgcggcgcacgacgcagagccgctagaggcacctcccccggacgacgcttatctacggcgtggagccaaccccagcccccgcccgaggaatacgctggggctgatgatgtatcccagtctcccgtcgccgaggagccgtcctgggtgccatctccaagaccaccagtacctcatgagtcacccgagccaccaagtgggcgatccctcgttcagcgggacatccaggcttttctgaatcagtgcggagcaagccctggcgaagcacggcactggttaactcagtttcaaacctgccatcatagtgctgataagcccttcgctgtgatcgaggtggacgaggaggttctgaaatgtcagcaaggggtctcctccctggcattcgccctggcctttcttcagcggatggatatgaaaccactcgtagtcttaggactgccagctcccacggccccatcaggttgtctctcattctgggaggctaaggctcagctcgcaaagtcatgcaaggtcctcgtggatgcgctgcggcacaatgcggctgctgcggtgccgttttttggtggaggttctgttctgagagctgctgagcctgcaccgcacgcctcttatggtggaattgtgtccgtggagacggacctcctgcagtggtgcctcgagtcaggaagtatccctattttgtgcccgatcggcgagactgcagccagaagatccgtgctgttggattccctcgaggtgactgcctccctggccaaggctctgcgcccaaccaagattattttcctgaataatactggcggactgagggatagctctcataaggtcctgagtaatgtgaatttaccagccgacctggatctcgtgtgcaacgccgagtgggtatccacaaaggagaggcagcaaatgcggctgatagtggacgttcttagccggcttccccaccatagtagcgcggttattactgctgcatcaacattactgaccgaactattcagtaacaagggttctggaaccttgttcaagaatgcagagcgaatgctcagggttagatccctggacaaactggaccagggtaggctcgttgacttggtcaatgcctccttcggaaagaagcttagggatgactacctggccagcttgaggcccagactgcacagcatttatgtctctgaaggctacaatgcagccgcgatactcactatggagccggttttaggaggaacaccttaccttgacaagttcgtggtgagcagctcccggcagggtcagggtagcggccaaatgctttgggaatgtctgaggagagatctccagaccctgttctggaggagccgggtcacgaaccctatcaatccatggtactttaaacacagcgatggaagcttttcaaataagcagtggatcttcttctggtttggcttggcagatattagggactcgtatgaactcgtgaaccatgcaaagggcctgcccgactctttccataaaccggcctctgatcccgggtcc

SEQ ID NO: 17073 - DNA, 1602 bp, synthetic construct
  misc_feature 1..1602: note = source = /note="Description of Artificial Sequence: Synthetic coding sequence"
  source 1..1602: mol_type = other DNA
atggccactgccctcatggctgttgtactgagggcggcagcggtggccccccgcctgagggggagagggggcactggcggcgcgcggcgattaagctgcggagctcggcgacgagccgcgaggggcacttccccaggaaggcgactgtctacagcatggagccaaccgcaaccaccccctgaagagtatgccggtgcggatgatgtgtctcagtcaccagtggccgaggaacccagctgggttccgtcccctcgtcctcccgtgcctcacgaatcgcctgagcctccttccggccgcagtttggtgcagagggacatccaggccttcctaaatcagtgcggtgcgtcacctggcgaagcccggcattggctgacccaatttcagacctgtcaccatagcgcagacaagcctttcgcggtcatcgaggtggacgaggaggtgctcaaatgccaacagggtgtatcctccctggcctttgcacttgctttcctgcaaagaatggacatgaagcctctggtggtcctgggcctccccgcccccaccgcgccttccgggtgcctgtcattttgggaagctaaggcacagttggcaaaatcttgtaaagttctcgtcgacgccctgcgtcacaacgcagccgctgccgtgcccttcttcggcggaggctctgtcttacgcgcggcggagccagctccccacgcttcgtacggcggtattgtcagcgttgaaacggatctattacaatggtgcctggagtctgggagcataccgatcttgtgcccaatcggcgaaactgcagcaaggaggtctgtcctcctcgactctcttgaagtcaccgcaagcctggcgaaagctctgagaccaaccaaaataatctttctgaataacacaggcggactgagagattcaagtcataaagtactttccaacgtgaatttgccggctgatctcgacctggtctgtaacgccgagtgggtatccaccaaagagcgccaacagatgcgcctgattgtagacgtactgtcgaggctaccccatcacagctcagctgtaattaccgccgcttccaccttactcaccgagctcttttctaacaagggatcggggaccctttttaagaacgctgagagaatgttgcgggtacgtagcctggataaattggatcagggtcggctggtggatctggtcaatgccagtttcgggaaaaagcttagggatgattatctagcgagcctcagaccacgactgcatagcatctatgtgtctgagggatataacgctgccgcaattttaacaatggaaccagtgctaggcggtacaccgtacctggacaagtttgtggtaagcagtagccgccagggccaaggaagtggccagatgttgtgggagtgcctgcgaagagaccttcagaccctgttctggcgctcgcgggttactaacccaatcaacccctggtacttcaagcacagtgatgggtctttcagcaacaagcagtggatattcttctggtttggactggccgacattcgggactcatacgaattggtgaatcacgcgaaggggcttcccgattcctttcataagcctgcctcggacccaggatcc

SEQ ID NO: 17074 - DNA, 1602 bp, synthetic construct
  misc_feature 1..1602: note = source = /note="Description of Artificial Sequence: Synthetic coding sequence"
  source 1..1602: mol_type = other DNA
atggcgactgcattgatggctgtggttctccgtgccgctgcagttgcgccacgtttgcgtggaagaggaggtaccgggggcgctcgtcggctgtcgtgcggagcccgtcgacgcgcggcacggggaacgtctcctggacgtcgcctcagtacagcatggtcgcaaccccaaccgccgccggaggaatatgcaggtgcagacgacgtgtctcaatctcctgttgcggaagaaccgagttgggttccaagtccccgtccacctgttccacacgaaagcccagaaccaccaagcggacgttcccttgtgcaacgagacatccaggcttttcttaatcaatgcggtgccagtccgggagaagctcgtcattggcttacacaatttcaaacttgccatcacagtgctgataaaccatttgccgtcattgaggtggatgaagaagttctcaaatgtcagcaaggagtgtcctcactcgcatttgcactggctttccttcaaagaatggatatgaaaccgttggttgtattgggacttccagcaccaacagcaccatctgggtgtctctccttttgggaagctaaggctcagttggcaaaatcgtgcaaggtcttggtagacgcgctgcgacacaatgcggctgcggcggtgccattttttggggggggatcggtgttgagggcagcggagccagcaccccacgcatcgtacggtggaattgtttctgtagagactgatttgctccagtggtgcctggagtcaggaagtatcccaatcctttgcccaataggtgagaccgcagccagaaggtcggttttgctggactctttggaggtaactgcctcactggcgaaagccttacgtccaactaaaattatcttcctgaataacactggtggattgagagattcctctcacaaggttctttccaacgtgaatttgccagcagacctagatttggtctgtaacgccgagtgggtttcgacaaaagaaagacaacaaatgaggcttattgtcgatgtcctatcgcgacttccgcaccactctagcgcagtcatcacggctgcatcgacacttcttacggaactcttttctaataaaggaagtgggactttgtttaagaatgcggagagaatgttgcgggtcagatcattggataaattggatcaaggaagactcgtcgatttggtcaatgcttcgttcggaaagaaacttagagatgattatcttgcatcgcttaggccgcggctccattcaatatacgtttcagaaggatataacgctgctgcaattttaacaatggagccagtcctcgggggaactccttacctcgataaattcgtagtgtcttcctcaagacaaggacagggatccggacagatgttgtgggagtgtttgcgtcgagacttacaaacactattctggagatctcgggttactaaccctataaatccgtggtattttaaacatagcgacggatcgttcagcaataaacaatggatttttttctggttcggacttgccgacattcgagactcttatgaactcgtgaaccatgctaaagggcttcctgattcgttccataaacctgcgtccgacccaggatca

SEQ ID NO: 17075 - DNA, 1602 bp, synthetic construct
  misc_feature 1..1602: note = source = /note="Description of Artificial Sequence: Synthetic coding sequence"
  source 1..1602: mol_type = other DNA
atggcgaccgccctgatggccgtggtcctgcgcgcagcggcagtcgctcctcgcttgagaggcagaggaggaactggcggagcccggagactgtcgtgcggagcacggcgtagagccgcgcgcgggacctccccggggcgccgactttcgaccgcctggtcgcaaccccagccgccgccggaagagtacgcaggagccgacgacgtgtcacagtctcccgtcgctgaggagccctcttgggtgccttccccacgcccgccagtcccacacgaaagcccagaacccccgtcgggaagatcgctcgtgcagagagatatccaagcattcctgaatcagtgcggcgcctccccgggagaagctcgccactggctgactcaatttcagacttgccatcattccgcggacaaaccattcgctgtgatcgaggtcgacgaagaggtcctcaagtgccagcagggcgtgtcatcgcttgcgttcgcccttgcttttctgcagcggatggacatgaagcccctcgtggtgctgggactgccggcgccaactgcgccgagcgggtgcctttcattctgggaggcaaaggcccagctcgccaagtcgtgtaaggtgctcgtggacgccctcagacacaacgccgccgccgcggtcccattctttggaggaggctccgtcctgcgtgctgcagagccggcaccgcacgccagctacggaggcatcgtgtcggtggaaactgacctcctgcagtggtgcctggagtcaggaagcatccctatcctgtgccctatcggagagactgccgcccggcgctcggtgctgcttgattcgctcgaagtgaccgcgtcgctggcgaaagcgcttcggccgacgaagatcattttcctcaacaacaccggcggtctgagagattcgtcgcacaaagtcctcagcaatgtgaacctgccggctgacctggacctggtctgtaacgctgagtgggtgagcacgaaagagcgccagcagatgagacttatcgtggacgtgctgtcgcgtctgcctcaccattcgtccgctgtcatcactgcagccagcaccctgctcactgagctgttctccaacaagggatcagggactctgttcaagaacgctgagcgcatgctccgcgtgcggagcctcgacaagctggaccagggccggctcgtggatctggtgaacgccagctttggcaagaagctgcgcgacgattaccttgcttcgttgcgcccacgcctgcattcaatctacgtgagcgaagggtataacgcagccgcaatcctgacgatggaaccagtgctcgggggaaccccgtacttggacaaattcgtggtttcatcgtcccggcaggggcagggatcaggacaaatgctgtgggagtgcctgagaagggacctccagacgctgttttggcggagcagagtgactaaccctatcaatccgtggtacttcaagcattcagacggatcgttctccaataagcagtggatctttttctggtttggattggccgatatccgggactcctacgagctcgtcaaccacgcgaagggtttgccggattcatttcacaagcctgcatccgatccaggcagc

SEQ ID NO: 17076 - DNA, 1602 bp, synthetic construct
  misc_feature 1..1602: note = source = /note="Description of Artificial Sequence: Synthetic coding sequence"
  source 1..1602: mol_type = other DNA
atggcgactgcacttatggcagtcgtgctgagagctgccgccgtggcgccccggctgcgagggcggggcggcaccggaggagcccgcagactgtcttgcggagcccgccggagggccgcacgcggcaccagcccgggacggcgcctgagcaccgcctggtcccagccgcaaccaccgccagaggagtacgctggcgcggacgatgtgagccaatccccagtggcagaagagccctcgtgggtgccgtcccctcggccgcctgtgcctcatgagtccccagaaccacccagcgggcgctccctggtgcagagagacatccaggcctttctgaaccagtgcggtgcttctccgggagaggcgagacactggctgactcaatttcagacgtgccaccactcagccgacaagccattcgcggtcatcgaagtggacgaggaggtcctgaaatgccagcagggggtgtcatcactcgccttcgccctggccttcctccagcggatggatatgaaaccgctggtcgttctgggcctccccgccccgaccgccccgtctggctgcctgtcgttctgggaagcaaaagcacagctggcgaaatcctgtaaagtgctggtggatgcgctgcggcataatgcggcggcagccgtgccatttttcgggggcggaagcgttcttcgagccgcggagccagcgcctcatgcctcatacggaggcatcgtgtcggtcgaaactgacttgctgcagtggtgcctggaatccggatcaatccctattctttgcccgatcggagaaactgcggccaggcgctcagttctgctggattccctcgaagtcactgcgtctcttgcaaaggcattgcggcctaccaaaatcattttcctcaataacacgggtgggcttcgcgatagcagccacaaggtgctttcgaatgtgaatcttccggcggacctcgatctggtatgcaacgcggaatgggtgtccaccaaggagcggcaacaaatgagactgatcgtcgatgtcttgagcaggcttccgcaccactcatcggccgttatcaccgcggcatcaactttgctcaccgaactgttcagcaataaagggtcaggcactttgttcaagaacgcggagaggatgctcagagtgagatccctggacaagctggatcaggggcgccttgtggacctcgtgaatgcctcattcgggaaaaagttgcgggatgattacttggcgtcgctgcgccctcgtctccactcgatttacgtgtcggaaggctacaatgcagcagcaatcctcaccatggaacctgtcctcggaggcaccccatacctggacaaattcgtggtgtcatccagcagacaaggacagggctcgggtcagatgctgtgggagtgtctcaggcgggacctgcagacgttgttctggcggtcgagagtgactaatcccatcaacccttggtactttaagcacagtgacggctcgttctcaaacaagcaatggatcttcttctggttcgggctcgcagacatccgggactcctacgaactggtgaaccatgccaagggcctcccagatagcttccacaagccagcatcagacccgggatca

SEQ ID NO: 17077 - DNA, 1602 bp, synthetic construct
  misc_feature 1..1602: note = source = /note="Description of Artificial Sequence: Synthetic coding sequence"
  source 1..1602: mol_type = other DNA
atggctaccgccttgatggccgtcgtgctgcgggctgccgccgtggcccctagactgcgcggacgcggggggaccggtggagcgagacggctgtcctgcggagccagaaggcgggccgcgcgcggaacgtcaccgggccggcggctgtcaaccgcgtggtcacagcctcaaccaccgcctgaggaatacgcaggcgcggatgacgtctcccagtccccagtcgccgaggagccgtcctgggtgccgtccccaaggcccccggtgccacacgaatcacctgaaccgccgtcgggacgatccctggtgcagagagatattcaggcattcctgaaccagtgtggagccagtccaggtgaagctcgccactggctgactcagttccaaacttgccatcacagcgcggacaaaccgttcgctgtgatcgaggtggacgaagaggtgctgaagtgccagcagggagtgtcctccctcgcttttgccctggccttccttcagcgtatggatatgaagccactggttgttctggggttgccagcacctaccgcaccgagcgggtgcttgtcattttgggaagccaaggcgcagctggcaaagtcctgcaaggttctggttgacgcgctgcggcacaacgccgcagcagccgtgccgttttttggaggtggtagcgtccttagagcggccgagcccgcaccacatgcgtcctacgggggaattgtgtcggttgagacggaccttctccaatggtgtctggaatccggatcaatcccgattttgtgcccgatcggagaaaccgctgccagacggtcggttctgcttgatagcctcgaggtgacggcatccctggcgaaggcgctgcgccctactaagatcatctttctgaacaacaccggcggactgagggattcgtcgcataaggtcttgtccaatgtgaacctccccgctgaccttgacctggtgtgcaatgcggagtgggtcagtaccaaggaaagacagcaaatgagactgattgtggatgtgctgtcaagactgccgcatcactcctcggccgtgatcaccgctgcctccaccctcttgaccgagctgttctcgaacaagggaagcgggaccctcttcaaaaacgcagaacgcatgctcagagttagatccctggacaagctggaccaaggtagacttgtggacctcgtgaacgcttccttcggaaaaaagctccgcgatgattacctggcctcactccgcccgagactgcattccatttacgtgtccgagggctacaacgccgcggcgatcctgactatggagcctgtgctcggcgggactccttatcttgacaagttcgtcgtgtcgtcgagccggcagggtcaaggatcagggcagatgctgtgggaatgcctccggcgggaccttcagactttgttctggcgctctagggttactaatccgatcaatccctggtacttcaagcactcagacggcagctttagcaacaaacagtggatctttttctggttcggcctcgcggacatccgcgattcctacgagctggtcaaccacgccaagggattgcctgacagcttccataagccagcttccgatccaggctct

SEQ ID NO: 17078 - DNA, 1602 bp, synthetic construct
  misc_feature 1..1602: note = source = /note="Description of Artificial Sequence: Synthetic coding sequence"
  source 1..1602: mol_type = other DNA
atggctactgcattgatggccgtggtgctgagggcagccgccgtggctccccgcctacgtggaagaggcggtaccggtggggcgagaaggctgtcctgtggagctaggcgacgggcagcccgcgggacaagcccgggcaggaggttgtccaccgcatggtcccagccacagcctcctccagaagaatacgccggggccgatgacgtctctcaatcccccgtggccgaagagcccagctgggtgcccagccccaggcctcccgtgcctcatgagtcaccagaaccgccctctggtcggagtcttgtgcaaagagatatacaggcatttctgaaccaatgtggtgcctcccctggggaggctaggcactggcttacacagttccagacatgccatcactccgccgacaaaccatttgccgtaatcgaagtcgacgaggaggtgctcaaatgtcaacagggggtgtcttctttagctttcgccctagctttcctccaacgtatggacatgaagcccttagtggtcttaggcctccctgccccaacggcacccagcgggtgcctgtccttctgggaggccaaagcacagctggccaaaagttgtaaggtcctggtcgatgctctacggcacaatgccgctgcagcagtgccgtttttcggggggggtagcgttttgagggcagccgagcccgccccacacgcgagctacggggggatcgtgtctgtcgagaccgatctcctacagtggtgtctggaatccggaagcatccctatactgtgcccaatcggtgaaacagccgcgcggcggagcgtgctgctggactcccttgaagtcaccgcaagcctggcgaaggcattgcggcccaccaagatcattttcctcaacaacacaggaggcctgcgcgacagctcccacaaagtattatctaatgtgaacttgccagctgaccttgatctcgtgtgtaatgcagagtgggtctctacaaaagagagacagcagatgagactgatcgttgatgtgctgagtcggttgccccaccatagttccgctgtgatcaccgctgcgtctacgctgctaacagagctgttttccaataaggggtccggcaccttgtttaaaaacgcggaacggatgctcagggtacgcagtcttgataaactagaccaaggaaggctcgttgatctcgtaaacgccagctttggaaagaagcttagagatgattacttggctagtttgcggccaaggttgcactcaatctatgtgagcgagggatataatgcggccgctatcctaaccatggaacctgtgctcggcggcactccctacttggacaaattcgtggtgtcaagctctaggcagggtcaagggtcggggcagatgttgtgggaatgtctaaggagagacctgcagacactgttttggcgcagtcgagtcactaatccgattaatccatggtattttaaacatagcgatggatcattttcgaataagcagtggatatttttctggttcggcttagctgatattagagacagctatgaactggtcaaccacgccaaagggcttccggattcattccacaagccagcctccgatccaggcagc

SEQ ID NO: 17079 - DNA, 1602 bp, synthetic construct
  misc_feature 1..1602: note = source = /note="Description of Artificial Sequence: Synthetic coding sequence"
  source 1..1602: mol_type = other DNA
atggcaacagccctgatggcagtggtgttgcgggccgcggccgtggccccgcgcctgcgagggcgcggaggaaccggtggagcacgccgtttgagctgcggtgccaggcgacgcgcggcccgtgggacttcaccaggccgccgtctgagcacagcttggtctcagccgcagcctccgcctgaggagtacgctggtgcagacgacgtgtcgcaatcaccggtcgctgaagaacctagctgggtccctagcccacgcccgccagtcccacacgagagtcctgagcccccgtcgggtcgcagcctggtgcagcgcgatattcaggccttcctgaaccaatgtggtgcaagccctggcgaggctcgccactggctgactcagttccagacttgccaccacagcgccgacaagccgttcgcagtcatcgaagttgacgaggaggtgctgaaatgtcagcagggagtgtctagcctggcttttgcactggcgtttctacagcgtatggacatgaagccattggtggtcctgggtttgcctgcgccgaccgcacctagcggttgcctcagcttttgggaagcaaaggctcagctggcgaaaagctgcaaggtccttgttgacgctctgcggcacaacgccgcggccgcagtccctttcttcgggggtggctcagttctgcgcgcggcggaaccagcgccgcacgcgagctacggtggtatcgttagtgtagagactgatctgcttcaatggtgtctggaaagcggttccattccgattctgtgtccgatcggcgagaccgcggcacgcaggtcagtcttactggattctttagaggtgactgcgagcctggcgaaagcactgcgcccgactaaaatcattttcctgaataacaccggtggcctacgcgacagcagccataaggtcctgtccaatgttaacctgcctgccgacctggacctggtgtgtaacgccgagtgggttagtacgaaggagagacaacagatgcgcttgatcgtggacgttctctcccgcctgccacatcacagcagcgcagtgataacggccgccagcaccctgttgacggagctgttcagcaataaaggatccgggaccctcttcaaaaacgcggagcgcatgctgcgtgtacgttcattagacaaactggatcaaggtcgcttggtggatttggttaatgcctcctttgggaagaaactgcgcgatgactatctggccagccttcggccgcgactgcatagcatttacgtgtcagagggttataacgccgcagctatcctgaccatggagccagtcctgggcgggaccccgtatcttgacaaatttgtggtgagcagctctcgacagggccaaggctcaggccagatgctgtgggagtgcctcaggagagacttacaaaccctgttctggcgcagccgcgtaacaaacccaatcaatccgtggtattttaaacatagcgatggcagcttcagcaacaagcagtggatctttttctggttcggtctggccgatatccgtgactcctatgagctggtgaatcacgcgaagggtctgccagactccttccacaaacctgccagcgacccaggtagc

SEQ ID NO: 17080 - DNA, 1602 bp, synthetic construct
  misc_feature 1..1602: note = source = /note="Description of Artificial Sequence: Synthetic coding sequence"
  source 1..1602: mol_type = other DNA
atggctacagccctgatggccgtggtgttaagagccgctgccgtggctcctaggttgcgtggacgagggggaacaggaggagcgaggaggctaagttgtggagcgcgcagaagagcggcccgaggaacgtcccccgggcgacgtctaagtactgcgtggtcacagccccagcccccgcccgaagaatatgcaggagctgatgatgtatcacagtcaccagtcgcagaagaaccctcatgggtgccctctcctagaccccctgtgccccacgaatcccccgaaccgccctcagggcgatccttggtgcagagagacatacaggcttttctgaatcagtgcggagcatcccccggggaagccaggcattggttaacacagttccagacttgtcaccactccgccgataaaccatttgccgtgattgaagtagatgaagaagtgcttaaatgtcaacagggagtttcttctcttgctttcgctctggcatttcttcagagaatggatatgaaacctctagtagtcctggggcttcctgcgcccacagccccctctggatgcctatctttttgggaagccaaagctcagctggcaaaatcctgtaaagttctcgtggatgctctacgccacaatgccgccgccgccgtgcctttcttcggggggggatctgttctgcgagccgctgaacccgcccctcatgcttcttacggaggaatcgtgtccgttgaaactgatctgctccagtggtgtctcgaatccgggtctattcctatcctctgtcctattggagagacagccgcccgccggtccgttctgcttgactctcttgaagtgacagcaagtttggccaaagccctccggcccacaaagataatcttcttaaacaatacaggagggttacgcgattcgtcgcataaagtgctgagtaatgtaaatcttcctgcagatctcgatctcgtgtgcaatgctgaatgggtctctacaaaagaaaggcagcagatgaggctaatagtggatgtgctcagtcgattgccccatcacagttctgcagtaatcacagccgcatcaacactcctcacagaactcttttccaataaaggatctgggacactattcaaaaatgctgaacgcatgcttcgcgtgcgttcactagataaactcgatcaggggaggctcgtagatttggtgaacgcctccttcggaaagaagttaagagacgattatctggcctccctcaggcctcggctgcattcaatatatgtatctgaaggatataacgccgctgctatcttgactatggaaccagttctcggggggacaccatatttggacaagtttgtggtgtcttcttcacgacaggggcaggggtccggacagatgctctgggaatgtctgaggcgcgatctccagactcttttttggcggtctagggtgactaaccccataaatccttggtacttcaaacattcagatggaagtttctcaaataaacagtggatcttcttctggtttgggctggcagatatacgcgactcttacgagctagtgaatcatgcgaaagggctccctgatagtttccacaaaccagcaagtgatccagggtcc

SEQ ID NO: 17081 - DNA, 1602 bp, synthetic construct
  misc_feature 1..1602: note = source = /note="Description of Artificial Sequence: Synthetic coding sequence"
  source 1..1602: mol_type = other DNA
atggctactgcgctgatggccgtcgtgctgcgcgctgctgctgtggccccgcgactgcgcgggaggggaggcacgggaggagccagacggctgagctgtggtgcccggcgcagagcggcccgaggaacttcgccgggcagacgcctctcaaccgcctggagccagcctcagcccccgcctgaagagtacgcgggcgccgacgatgtgtcccaaagcccggtcgccgaagagccgagctgggtcccatcgcccagaccgcctgtcccacatgagtcgcctgagccaccctctggacgctcgctggtgcaacgggacatccaggctttcctgaatcagtgcggagcgtcgccgggagaggcccggcattggcttacgcagttccagacttgtcaccactcggctgacaaaccgtttgcagtcatcgaggtggatgaagaagtcctgaagtgtcagcaaggagtcagttccctggccttcgccctggcgttcttgcagaggatggacatgaagcccctcgtggtgctcggactgccggctcctactgccccgtccggatgcctctcattctgggaggcgaaagcgcagctcgctaagtcatgcaaggtgctcgtggatgccctgcgacataatgcggcggccgcagtgccattcttcggaggaggctccgtgctgagggctgccgagcctgccccccacgcctcgtacgggggaattgtgagcgtggagactgacttgctgcagtggtgcctggagtcagggtcgatcccaatcttgtgtccgattggagaaaccgcagcaagacgctccgtgctcctcgatagcctggaagtgactgcatccctggcgaaagcgcttcgccctactaagattatctttctcaataacactggaggactgcgcgattcctcgcacaaagtgctctcgaatgtcaacctgcccgccgacctggacctcgtctgcaatgcggaatgggtttccaccaaggaaagacagcaaatgaggctgatcgtcgatgtcttgtccagactgccgcaccattcatccgcagtgatcaccgccgcgtcaactctcctgacggagctcttctccaataagggatccggcaccctgtttaagaacgccgaacgcatgctccgcgtccgttcgctggacaagctcgaccagggtaggctcgtggatctggtcaacgcatccttcgggaaaaagctcagagacgactacctggcctccctgcgcccccggctgcactcaatctacgtgagcgaaggatacaatgccgcggcaatcctcaccatggaacctgtcctgggaggaaccccatacctggacaaattcgttgtctcgtcatcaagacaaggacagggaagcggtcagatgctgtgggaatgtctgagaagagacttgcagactctcttctggcgctcacgtgtgactaacccgatcaacccttggtacttcaagcactcggatggatccttttccaacaagcaatggatcttcttctggttcgggctggccgacatccgagactcctacgaattggtgaatcacgctaaaggtctgccggattctttccacaagccggcttccgacccaggctcc

SEQ ID NO: 17082 - DNA, 1602 bp, synthetic construct
  misc_feature 1..1602: note = source = /note="Description of Artificial Sequence: Synthetic coding sequence"
  source 1..1602: mol_type = other DNA
atggcaactgctctcatggccgtggtgctccgcgcagcggctgtcgccccaaggctccgggggagggggggaactggaggagcaagacgccttagttgtggggcacgccgaagggcggcgaggggaacctctccagggcgaaggctcagtaccgcgtggtcgcagccacaacctcctcccgaggaatacgctggggctgacgatgtctcgcagtcaccagtcgcagaagagccctcttgggtaccgtctccccgcccccctgtgccccatgagagcccggagcccccctcaggccgatccttggtacagagggacatccaggcatttctgaatcagtgcggggccagcccaggtgaggctcggcactggcttacgcaattccagacctgccaccacagcgctgacaaaccattcgccgtcattgaagtggatgaggaagtgttgaaatgtcagcaaggagttagctctctggccttcgctttagccttcctccagcgcatggatatgaaacccctcgtggtgttggggttacctgccccgaccgccccgtcgggctgtctttcattctgggaagctaaggctcagctagccaagtcatgtaaagtgctggtagatgccctaagacataacgcagccgctgctgtgccgttttttgggggaggcagcgtgctcagagcggcagagcccgcaccacacgcctcttacggagggatcgtcagtgtggagacagaccttctgcagtggtgtctggagtccggctctatccccattctctgccccatcggtgagactgcggctcggaggtcagttttgctggattccttagaggttactgcttctcttgccaaggcacttagacctacaaagattatattccttaataacactggaggtctaagggactcttcgcacaaggttctttctaacgtgaacctgcctgctgacctggacctggtgtgcaacgccgagtgggtgagtacgaaggagcgtcaacaaatgcgccttatcgtcgatgtcctgagcaggctaccacatcacagttctgcggttatcaccgcagcttcaacactgctgactgagctgtttagcaataaaggcagcggaacattattcaagaatgctgagcgtatgctgcgcgtaaggtctttagataagctggaccagggaagactggtcgacttagtcaatgcatctttcggaaagaagctgcgagatgattacctcgcttctctgagaccccgactccactctatttacgtgagcgaggggtataacgccgcagccatcctaaccatggagcccgtattgggcgggactccctatctggacaagtttgtggttagttcttctcgtcaagggcaggggagtgggcagatgctatgggaatgcttgaggagagatctccaaacattattctggcgatctcgtgtgaccaacccgataaacccctggtacttcaagcattcggacggatcatttagcaataagcaatggattttcttttggtttggacttgctgatattcgagactcatacgagcttgtgaatcacgctaagggcttgccagactctttccataaacctgcgtcggacccagggagt

SEQ ID NO: 17083 - DNA, 1602 bp, synthetic construct
  misc_feature 1..1602: note = source = /note="Description of Artificial Sequence: Synthetic coding sequence"
  source 1..1602: mol_type = other DNA
atggcgacggcgctgatggcggtggtccttagagcagccgctgtcgcaccaagactccgggggcggggaggaaccgggggcgcgcggaggctgtcatgtggagcccggcggagagcagccaggggcacctcaccagggcggcgcctgtccactgcctggtcacagccgcagccgccacctgaggaatacgcgggagccgatgatgtgtctcaatcaccagttgcagaggaaccgagctgggtgccaagccctcgcccaccagtcccgcatgaatcgccggagcccccatccggaagatcgctcgtgcagcgggatatccaggcttttctgaaccagtgcggagcgtctccgggagaagcccgacactggctgactcagttccagacctgccatcactcggcggataagccgttcgcggttattgaggtggatgaagaggtgctgaaatgccagcaaggcgtgtcgtcgctggccttcgcactcgcgtttttgcagcgcatggacatgaaaccattggtggttctgggactccccgccccgacggccccgtcgggctgcctctcgttttgggaggcaaaggcgcaactggccaagtcgtgcaaagtgctggtggacgccctgcggcataacgcagccgcagcagtcccgttctttggaggaggatcggtgctgagagccgccgagcccgctccacatgccagctacggaggaatcgtgagcgtggaaactgatttgctgcagtggtgcctggagtcaggatccataccgatcctgtgcccgatcggtgagactgccgcgaggcgatccgtgctgttggacagcctggaggtgaccgcgtcactcgcaaaggcacttcggcctaccaagattatcttcctgaataacaccggcggtctgcgcgattcgtcccacaaggtcctgagcaatgttaatctcccggccgacctggatctggtgtgcaatgccgaatgggtgtcgaccaaggaacggcagcagatgagactgatcgtggatgtgttgtcgcggctgccgcaccactcgtcagccgtgatcactgcagcttcgacgctcctgacggaactcttctcgaataagggctcggggacgctcttcaaaaacgcggaacgcatgcttcgggtgcggtccttggataagctggatcaaggcagactggtcgacctggtgaatgcctcctttggcaagaagctgcgggacgactaccttgcatcattgcgcccaaggctccacagcatttacgtctcagaaggatacaacgctgcggccattctgaccatggagcctgtgcttggcgggactccgtacctggacaagttcgtggtttcatcgtcgcgccaaggacaaggctccggccaaatgttgtgggagtgcctgcgccgggacctgcagaccctgttttggaggagcagagtcactaacccgatcaacccctggtactttaagcattccgacgggtcgttctccaacaagcagtggatctttttctggttcggacttgcggatattcgcgattcatacgagctcgtgaaccacgctaaggggctgcctgactcgttccacaagccggccagcgatccgggttcg

SEQ ID NO: 17084 - DNA, 1602 bp, synthetic construct
  misc_feature 1..1602: note = source = /note="Description of Artificial Sequence: Synthetic coding sequence"
  source 1..1602: mol_type = other DNA
atggccaccgccctgatggccgttgtgctgcgcgcggccgccgtggctccccgcctgcgaggtcgtggtggcaccgggggtgcccgccggctgtcgtgtggtgcgcgtcgccgggccgctaggggcacaagtccgggccgtcgattgagtactgcgtggtcgcagcctcagccccccccagaagagtacgcaggcgccgacgacgtgtcccagtccccagtggccgaggagccgagttgggtgccgagcccccgcccgcccgtgccgcacgagtcccctgagccgccatcgggacgttcgctcgtgcagcgcgatattcaggcttttttgaaccagtgcggagcatcgccaggggaggcccgccactggctgacacagttccaaacatgtcatcattcggccgacaagcctttcgccgtgattgaggttgatgaggaggtgctgaagtgccagcagggtgtctcctccttggcattcgcgttggcttttctgcagcgaatggatatgaagccccttgtggtgttgggtctgccggcccccacggctccgtctggctgtctgtcgttttgggaagccaaggcccagttggcgaagtcatgcaaggtacttgtcgatgccctacgccataacgccgccgccgccgtcccatttttcggtggcggcagtgttttgcgggcggctgaacccgctccacatgcttcctacggcggaattgtctccgtggaaactgatctcttacagtggtgcttggagagtggcagtattcccatactctgccctattggtgagaccgctgccagacggagcgtgctgctcgacagtctcgaggtgacagcctcgctagccaaggccttgcggccgaccaaaataatttttctcaacaatacgggaggcctacgagactcaagtcacaaggtcctgtccaacgtgaatctgcccgcggatttagatctggtatgcaacgccgagtgggtgagtacaaaggagcgccagcagatgaggcttatagtggatgtgctgtcccggctgcctcatcattcgagtgcggtgattaccgctgcaagcaccctgctgaccgagctcttttccaacaagggctccggcaccctgtttaagaacgccgagcgcatgctccgcgtgcgcagtctggataagctggatcaaggccggttggttgacctcgtaaacgcctcatttggcaagaagctgagggatgactacctagcgagcctgcgcccccggctgcatagcatctatgtgagcgaaggctacaacgctgctgctattttgaccatggagccagttttaggcggcacaccatatctggacaagtttgtggtctccagttccagacagggccagggatccgggcagatgctctgggagtgcctccgccgtgatctccagactctcttctggcgatctcgggtcacaaaccctataaatccatggtatttcaaacactccgatggtagcttctccaacaagcaatggatctttttttggtttggtctggctgacattagggactcctatgaactggttaaccacgctaagggcctcccagattcttttcacaaaccagcttcggacccaggaagc

SEQ ID NO: 17085 - DNA, 1602 bp, synthetic construct
  misc_feature 1..1602: note = source = /note="Description of Artificial Sequence: Synthetic coding sequence"
  source 1..1602: mol_type = other DNA
atggctacagctctcatggccgtggtcctgcgcgcggcagcagtggctcctaggcttcgcggacgaggcggaactggtggagcccgccgcttgagctgcggcgctcgcagacgggccgcccgcgggacatctcccgggcgacgcctgtccacagcgtggagtcagccgcaacctcctcccgaagaatacgccggcgccgacgatgtatcacagtctccagtggcggaggagccatcctgggtgcccagccctcgaccccctgtaccgcacgaatcccccgaacccccatcgggccgctcccttgtccagcgcgatatccaagcttttctaaatcagtgcggagccagcccgggggaggcgcggcactggttgacacaattccagacatgtcatcatagcgcagacaaacccttcgctgtgatcgaggtggatgaggaagtgctgaagtgccagcagggagtgtctagcttagctttcgctctggcgtttctacaaaggatggacatgaaaccattggtcgtgttgggattgccagcaccgaccgctcctagtggttgcctgtcattttgggaggcaaaggcacagctggccaaatcttgtaaagttctcgtagacgcccttagacataatgcagctgctgcggtccccttcttcggcggaggctccgtactgcgggccgccgagccagccccccatgcctcttatgggggtatcgtgtctgtggagaccgatctgttacagtggtgtttagagtccggctccatcccaattctgtgtcccatcggcgagacagccgctagaaggagcgttttattggacagtctggaagtgaccgcaagtctcgcaaaggccctgagacctacaaagatcattttcctcaataacactggagggctgcgggattcgtctcataaggtcctgagcaacgtgaacctgcctgcagatctggatctggtctgcaatgctgagtgggtcagtaccaaggagcggcaacagatgaggctcatcgtagacgtgctgagccgccttcctcaccactcttctgcggtgatcaccgcggcaagtacactcctgacagagctgttttctaacaagggcagcggaacactcttcaaaaatgccgaaagaatgctacgtgtgcggtcgttggacaaattggatcaggggcggctggtggatttggtgaacgcatccttcgggaagaaattgcgcgatgattacttggcttctctgagaccgcggctgcactccatatatgtgagtgaaggttataacgcagctgctatcttgactatggaaccggtgctcggcggaaccccatatttagacaaattcgtggtctccagctcacggcaggggcagggcagcggacagatgctctgggagtgtctgaggagggatctccagacattgttctggcggagtagagtgaccaaccccataaacccgtggtatttcaagcatagtgacggatctttcagtaacaagcagtggatctttttttggtttgggcttgccgatattagggattcctacgagctcgttaaccacgccaagggactccctgactcttttcacaagccagcatctgaccccggctcc

SEQ ID NO: 17086 - DNA, 1602 bp, synthetic construct
  misc_feature 1..1602: note = source = /note="Description of Artificial Sequence: Synthetic coding sequence"
  source 1..1602: mol_type = other DNA
atggcaacggctcttatggcagtcgtactcagggcggccgccgtggcacctcggctgaggggtagaggaggtaccggcggtgccagacgccttagctgcggagcacggcgccgggcagcaagagggaccagccctggaaggcgcctttcaaccgcctggtcccaacctcagcccccacctgaagagtacgcgggagcagatgacgtgagccagtcgcctgtggcagaagagcctagctgggtccctagcccccggcccccggtcccccacgaaagccctgaacctccttcggggcggtcgcttgtgcaacgtgacatccaggcttttctgaatcaatgcggagcatcgccaggagaagccaggcactggctgactcaatttcaaacttgtcatcattcagctgataaaccattcgctgtcatagaagtggacgaggaagtgctcaagtgtcaacaaggagtgtcgagcctggcattcgccctcgccttcttgcaacggatggatatgaagccgctggtggtgctgggacttcctgcacctaccgcaccatcgggctgtctttccttctgggaggcgaaggcccaacttgcaaagtcttgcaaggtcctggtggatgccctcaggcataacgcggccgccgcagtgccctttttcggaggtggttcggtgctgcgtgcagcagaaccagcaccacacgcgtcctatggtggaatcgtatcggttgaaactgatctgctgcaatggtgccttgagtcggggtcgataccaattctctgcccaattggagaaactgccgcccggcggtccgtgctgctggactcgctcgaagtgactgccagcttggcaaaagcactgcgacccaccaagatcatttttctgaacaacaccggcggactccgtgattcatcgcataaggtcctttccaatgtcaacctgcccgcagatctcgatttggtctgtaacgcagagtgggtatcaaccaaggagcggcagcagatgcgccttattgtcgatgttttgtcgcgtctgccacatcacagctccgcggtcatcaccgcagcatcaacgctgctcactgagctcttttcgaataagggctccggcactctcttcaagaacgcggagcgaatgctgagagtgcgttctctcgacaaactggatcagggtcgactggtggatctggttaacgccagttttggtaaaaagctgagggacgattaccttgcaagtctgcgcccaaggcttcactcgatttacgtgagcgaaggatacaacgccgcagccatcctgacgatggaaccagtgctggggggaaccccataccttgataagttcgtcgtgtcctcgagcagacaagggcaagggtctggtcaaatgttgtgggaatgcttgcgaagggatctgcagacgctgttttggagaagcagagtgactaacccaatcaatccttggtacttcaagcattcagatggttcattttccaataagcaatggattttcttttggtttgggctcgccgacattagagattcgtacgaactggtcaaccacgcaaaaggtttgcccgacagctttcataagccggcatcggaccccggatcc

SEQ ID NO: 17087 - DNA, 1602 bp, synthetic construct
  misc_feature 1..1602: note = source = /note="Description of Artificial Sequence: Synthetic coding sequence"
  source 1..1602: mol_type = other DNA
atggccactgccctgatggccgtggtgctgagggcagccgccgtggccccaagacttcgtggtcgcggtggaacgggtggcgcacggagactgtcatgtggagcacgtcggcgggctgcaagagggacttcgcctggacgccgcctgagcactgcctggagccagccccaacctccacctgaggagtacgcgggagcagatgacgtgtcgcagtccccagtagccgaagaaccttcttgggtgccatcgccaaggcctcctgtgccacacgagagcccggaacctccttcagggcgtagcctggtgcaaagagatattcaggcctttctgaaccaatgcggggcatcgcccggagaagcccgccattggttgactcaatttcaaacctgccaccattccgcagacaagccattcgcggtgatcgaagtggatgaagaggtccttaagtgtcaacagggtgtgtcgtcgcttgcctttgctcttgcgttcctccaacgtatggacatgaagcccctcgtggtgcttggtctgcctgcaccgaccgcaccttcaggatgtctttcattttgggaagcaaaagcacagcttgcgaagtcgtgcaaagtcctggtggatgccctgcggcacaacgcagcagctgcggtgcccttttttggtgggggaagcgtcctcagggcggccgaacccgcgcctcacgcctcatatggaggtattgtttccgtcgaaactgatctgctccagtggtgcctggaatcagggtccattccgattctgtgtccaatcggggaaactgcagcccgcagatccgtgctgcttgattcgcttgaagttaccgcctccctggccaaagcactccgccccaccaaaatcattttcctgaataacaccgggggcctccgtgattccagccacaaggtcctttccaacgtcaaccttcccgcggacctggatctcgtctgcaatgcagaatgggtgtccactaaggaaaggcagcaaatgcgcctgatagtggatgtgcttagcagacttccccatcattcctcggcagtcatcaccgcagcgagcacccttctgactgagctgttttcgaacaagggatcagggaccctcttcaagaatgcagaacggatgctccgggtgagatcactggacaagctggatcaaggtagattggtggatctggtgaatgcatcgttcgggaagaaactgcgggatgattacctggccagcctgcggccacgccttcactccatttacgtctctgaagggtacaatgcagcagccattcttaccatggagccagttctcggaggaaccccatacctcgataagtttgtggtgtcctcatcgagacagggtcaagggtctggccagatgctctgggaatgccttcgccgcgatctgcagactctgttctggcggtcgagagtgaccaaccccatcaatccctggtactttaaacattctgacggctcattttcgaataaacaatggatcttcttttggtttggccttgccgatattcgggactcctacgagcttgtgaatcatgccaagggactccctgattcattccataagccagcatcagacccaggcagc

SEQ ID NO: 17088 - DNA, 1602 bp, synthetic construct
  misc_feature 1..1602: note = source = /note="Description of Artificial Sequence: Synthetic coding sequence"
  source 1..1602: mol_type = other DNA
atggctactgcactgatggcggtggtcctgcgggctgcggcagttgctccccgactgagaggaaggggcggcacagggggtgcgagacgcctgagttgcggggcccggaggagggccgcaagaggcacaagtcctggacgacgactaagcaccgcctggtctcagcctcaacctcctcctgaggagtatgcaggggctgacgatgtttcccaaagccccgtggctgaggagccaagttgggtgccgagcccacggccaccggttccccatgagtctcctgaaccaccctctggcagatcactggtgcaacgagatatccaggccttcctgaatcagtgtggagcttctcctggcgaagctcgccactggctgacacagtttcagacatgccaccattctgcagacaaaccattcgcagtaatcgaagtggacgaagaagtcctgaagtgccagcaaggagtgtcaagcttagcctttgcactcgcattcctgcagcggatggatatgaagccgcttgtcgtgctggggctgcccgctccaacggctccatccggttgcctgagtttttgggaggcaaaagctcaactggccaaatcctgtaaagttctggtcgacgccctgcgccataacgccgcggccgccgttccgttttttggtggcggctcagttttgagggcggcagagccagccccacacgcatcgtacgggggaatcgtatccgtggaaacagatctcctccaatggtgccttgagagcggctcaattcccatactatgtcctataggcgagacagccgcccgacgctccgtcctcctagactcacttgaggtgacagccagtctagcaaaggcactgaggccaaccaagatcattttcctcaacaacacagggggccttagggattccagccacaaggttttgagcaacgtcaacctccctgctgacttagaccttgtttgcaatgctgaatgggtgtccactaaggagcgccagcagatgcggctgatcgttgacgtgctttcccgcctgccacaccacagcagcgccgtgatcacggcagcctctacactgctgacagagctgttctctaacaagggaagcggcaccctatttaaaaacgcggaaaggatgttgagagtgcgatccctggacaaattggaccaggggcggctggtggaccttgttaatgcttccttcggcaaaaagctccgggacgactatctcgcttcgctccggccacgcctccacagtatttatgtatcagaaggctacaatgcggcagcgattctgaccatggagcctgtcctaggggggaccccgtacctggacaaattcgtggttagcagctccaggcagggccaaggctcagggcaaatgctgtgggagtgtctccgccgcgatcttcagacactgttttggcggagtagggtaaccaaccccataaatccgtggtattttaaacattctgatgggagcttcagtaacaagcagtggatttttttttggttcggactggctgacatcagggacagctatgagctggtcaaccacgcgaagggtctccctgattcatttcacaagcctgcgtcagatcctggcagc

SEQ ID NO: 17089 - DNA, 1602 bp, synthetic construct
  misc_feature 1..1602: note = source = /note="Description of Artificial Sequence: Synthetic coding sequence"
  source 1..1602: mol_type = other DNA
atggcgaccgcgctgatggcggtggtgctcagggccgcggccgtcgcaccgagactgcgcggaagaggaggaaccggaggagcccggagacttagctgcggagctagacggcgcgccgccagaggaacctcgccgggacggcgcctgtcaactgcatggagccaaccccagccgccaccggaagaatacgctggagcagacgacgtttcgcagtcgccggtggcagaggaaccatcatgggtgccatccccccgcccaccggtgccgcacgaatcgcctgaaccgccgagcggcagatctctcgtgcaaagagacatccaggcgttccttaaccaatgcggagcttccccgggagaagcacggcactggctgactcagttccagacgtgccaccattctgcggacaaacctttcgccgtgatcgaagtcgacgaagaagttttgaagtgccagcaaggagtttcctcactggctttcgcactggccttcctgcaacggatggacatgaagcctcttgtggtgcttggactgccagcgccaaccgcaccttcgggatgtctgtccttttgggaggcaaaggcccaactggcgaagtcgtgtaaagtgctcgtggacgcccttcgccataacgcggccgctgcggtcccgttcttcggcgggggctcagtgttgcgggcagccgaaccggcaccgcacgcaagctacggcggaatcgtgtcggtcgaaaccgacctgctgcagtggtgcctcgagtcggggtccatcccaatcctgtgccccataggagagactgcggcccgccgctcagtcctcctcgattccctcgaggtgaccgccagcctggcgaaggcgctgcgcccgactaagatcatcttcctcaacaacaccggcggcctccgcgatagctcacataaagtgctgagcaatgtgaacctccctgccgatttggacctggtgtgtaacgcggaatgggtgtcaacgaaagaacggcagcagatgagactcatcgtcgatgtcctgtccagactcccccaccattcgtctgccgtgattactgcagcctcgaccttgctgactgaactgttctcaaacaagggctccggtactctgtttaagaacgcagaaagaatgctgagggtgagatcactggataagctggatcagggacgcctggtggacctggtgaatgcatcgttcggtaagaaacttagggatgactacctggcgagcctgcgaccgcggctccacagcatctacgtctcggagggatacaatgcggccgctatcctcactatggagccggtgctggggggcactccatatctggacaagttcgtcgtctcatcttctcgccaaggtcagggttcaggtcagatgctgtgggagtgcctgcgccgggatctccaaaccttgttctggcggagccgggtcaccaacccaatcaatccttggtacttcaaacattccgacggctcattttccaataagcagtggatcttcttctggtttggactggccgacattagagatagctacgagctggtcaaccacgccaagggactcccggacagcttccacaagccggcctccgatccggggtcg

SEQ ID NO: 17090 - DNA, 1602 bp, synthetic construct
  misc_feature 1..1602: note = source = /note="Description of Artificial Sequence: Synthetic coding sequence"
  source 1..1602: mol_type = other DNA
atggcaacggctctgatggctgtcgtgcttagagcagcagccgtggcacctcgcctccgcggcagaggtggaaccgggggtgcacggcgcctcagctgtggggcacgtcggcgggcagcaaggggcacctcccctggacgtcggctttcgaccgcctggtcacaacctcagcctcctcctgaggaatacgcaggggctgatgatgtgtcgcaatcgcctgttgccgaagagccctcgtgggtgccttcacccagacctcccgtgccccatgaaagccccgaaccaccatcgggtcggagcttggtgcaacgagatatacaggcattccttaatcagtgtggggcctccccaggcgaggccaggcactggcttacgcaatttcaaacctgccatcattctgcggataagccatttgcagtgattgaggtggatgaagaggtgcttaaatgtcagcagggggtgtcctccctcgcatttgccctcgcatttcttcaacgcatggacatgaagccccttgtcgtcctcggtctgccggcgccaaccgcaccgtccggatgtctgtccttttgggaggccaaggcgcaacttgccaagtcctgtaaggtgctggtggacgcactgagacacaacgcagctgcggccgtgccctttttcggagggggaagcgtccttcgtgctgccgaacctgccccccatgccagctacggaggaatagtgagcgtggaaacggacctcctccaatggtgtctcgaatcgggatcgattccgattctttgtcctatcggggaaacggctgctaggcgctctgtgttgcttgattccctcgaagttactgcatcactcgctaaggcacttcgccctactaagattatctttcttaacaataccgggggactccgggattcatcgcataaagtgctgtcgaatgtgaacctcccagcagatctcgatttggtgtgcaatgcggaatgggtgtcgactaaagaaagacagcaaatgcggcttatcgtggacgtgctgtcacgacttccccatcatagcagcgcagtgattactgccgcctccacccttcttacggaactgttctccaataaaggttcaggtactcttttcaagaacgcagagaggatgctgagagtccgttctctggacaaacttgaccaaggacggttggtggatctggtgaacgcgtcatttggtaaaaagctcagagatgactaccttgcttcgctcagaccaagattgcattcgatatacgtgtccgaaggatacaatgcagccgcgattctgactatggagccggtgctcggaggtactccatacctcgacaagtttgtcgtgtcctcctcgcgacagggtcaaggatccggacaaatgctgtgggaatgccttagacgcgatcttcagaccttgttttggaggtcaagagtgaccaatcctatcaatccatggtactttaaacacagcgatggctcgttctcaaacaagcaatggatattcttttggttcggactggccgacatccgtgatagctacgagctggtgaatcatgctaaggggcttccagattcgttccacaagcctgcttccgaccccgggtct

SEQ ID NO: 17091 - DNA, 1602 bp, synthetic construct
  misc_feature 1..1602: note = source = /note="Description of Artificial Sequence: Synthetic coding sequence"
  source 1..1602: mol_type = other DNA
atggcgacagcacttatggcggtggttctgcgggccgcggctgtcgccccacggcttcgtggtcgcggcggcaccggaggcgcccgacggctgtcttgcggggccaggagaagggctgctagaggcacctcccctggacggcgcctgagcaccgcgtggagtcagcctcagccgccccccgaagagtacgccggggccgacgacgtgtcccaaagtccagtcgctgaagaaccatcctgggttcccagtccacggcccccagtgcctcacgagtctcccgagcctccaagcgggcggtcgctcgtgcaaagagacattcaggcattcctgaatcaatgtggcgccagtcccggagaagcccgccactggcttacacagttccagacctgccatcattctgcggacaaaccctttgcagtgatcgaagtcgacgaggaggtcctgaaatgccagcaaggggtaagcagcctggcatttgccctggcgtttcttcagagaatggacatgaaaccactggtcgtcctcgggctgccggccccaacagcaccaagcggctgtctgtcattctgggaggccaaggctcagcttgcaaagagttgcaaggtactggtcgacgcactccgccacaatgccgccgcagccgtgccattctttggggggggatccgtgctcagggccgctgagcctgccccacacgcttcatacgggggaatcgtgtctgtggagacggaccttctccagtggtgcttagagtctgggtccattcccattctgtgtcctatcggagaaactgctgccagacgatctgttttgttggactccttggaggtgactgcatcattggccaaggccctaaggccgacgaagattatctttctgaataacaccggcggcctgagggacagttctcacaaagtgctttccaatgtgaacttgcccgctgatttggacttggtgtgtaacgctgaatgggtctctaccaaggagcgccagcagatgaggctcattgtggatgttctctcacggttgccccaccactcctcagcagtcatcaccgctgccagtactttgctgacggaattgtttagtaacaaaggatcgggcacactttttaaaaatgctgagaggatgctccgggttagatctcttgataaattggaccaggggaggctggtagacctcgtgaatgcctcctttggaaaaaagctaagagatgactacctggcctcattaagaccacgtctgcatagcatttacgtgagcgaggggtacaatgccgcagcaatcttgaccatggaacctgtgctggggggaacaccttatttagacaagtttgtggtaagcagttcaaggcagggccaaggttcaggtcagatgctgtgggaatgtctaaggcgagatctgcagaccttattctggcggagcagggtgaccaaccctataaatccatggtatttcaaacattcggacggatcttttagcaacaagcaatggatcttcttctggtttggattggctgacattcgcgatagttatgaactggtgaaccacgccaaggggctccctgactcttttcacaagcctgccagcgatcccggtagt

SEQ ID NO: 17092 - DNA, 1602 bp, synthetic construct
  misc_feature 1..1602: note = source = /note="Description of Artificial Sequence: Synthetic coding sequence"
  source 1..1602: mol_type = other DNA
atggccacagctctgatggcagtggtactgagggccgcagctgtggctccccgcctgagaggcaggggaggcacaggtggtgctaggcgtcttagctgcggagcccgtcgccgtgcagcacgcggaacctcccctggacgcaggttgtctaccgcttggtctcagccccagcctcctcccgaagagtacgccggcgcagacgacgtatcccaatccccagtggcagaggaaccaagctgggtcccttctccccgtcccccagtcccccacgagtcaccagagccaccttccggtcgtagcttggtgcagcgtgacatccaagcattcctcaatcagtgtggagcctcacccggtgaagctcgccactggctgactcagtttcagacctgtcaccacagcgccgataaaccctttgctgtcattgaagttgatgaagaggtcctgaaatgccaacagggtgtgtccagcctggcattcgcactggcttttctgcaaaggatggacatgaaaccactggtcgtgttgggactccctgcccctacagcaccatctggctgcctcagtttctgggaagccaaggctcagctggccaagtcatgcaaggtactggtggatgctcttagacacaatgccgcagccgcagtgccattttttggaggtggttctgttctccgcgccgcagaacctgcccctcatgcatcctacggtggcatcgtttccgtcgaaaccgacctgctccagtggtgtctggagtctggtagcatcccaatattgtgtcccatcggcgagactgccgcacgcagaagcgtcttgctggacagcctggaggtcacagcttctctggctaaggctctgagacctactaaaatcatcttcctcaacaatacaggcggcctccgtgattctagtcacaaggttctgtctaatgtgaacctcccagccgacttggatcttgtttgtaacgctgagtgggtctccactaaggagcgccagcagatgagactgatcgtggacgttttgtcaaggttgccccaccactcttccgctgtgatcacagctgcaagcactcttctgaccgaactcttttctaataaaggctccggcacactgttcaaaaacgcagaaagaatgctgcgcgtgaggtctcttgataagctggatcagggtcgcctggtagatttggtaaacgctagctttggaaaaaaactgagggacgattaccttgcctcactgcgtccacgtctccactccatttacgtgagtgagggctacaatgctgctgcaattttgaccatggaacccgtgctcggaggtacaccttaccttgataagttcgtagtgagctcatctcgccagggacaaggatctggtcagatgctctgggaatgtttgcgcagagacttgcagactttgttctggagatccagagtaacaaaccccatcaatccctggtacttcaagcacagtgacggttccttttcaaacaagcagtggatattcttctggttcggactcgcagacataagagacagttatgagctcgttaaccacgcaaagggtctgcctgactcctttcacaagcctgcttccgatcctggctcc

SEQ ID NO: 17093 - DNA, 1602 bp, synthetic construct
  misc_feature 1..1602: note = source = /note="Description of Artificial Sequence: Synthetic coding sequence"
  source 1..1602: mol_type = other DNA
atggccacagcactaatggccgttgtcctaagggcagctgctgttgcccctcgcttacgcggtaggggcgggacaggtggtgcccgaaggttgtcctgcggcgcgcgtcgccgtgctgcacggggaacctcccccggacgcaggttgtcaaccgcttggtcccaacctcagcctccccctgaagagtacgccggcgctgacgatgtctcgcagtctcccgtggctgaggaacccagctgggtgccgagcccaagacctcccgtgccccatgagagccccgaaccaccaagtggcaggagccttgttcagagggatattcaggcctttctcaaccaatgcggcgcctcgccaggtgaggcaagacactggctcacgcagttccaaacctgtcatcacagcgccgataagccgtttgccgtgatcgaagtcgatgaagaggtgctgaaatgtcagcagggagtgagctctctggcatttgctttagcgtttcttcagcgaatggatatgaaacccctcgttgttctgggactgccagccccaacagcaccttccggctgcctgtcattttgggaagctaaagcccaactggcgaagtcttgcaaagtattggtagatgctctgaggcataacgccgctgcagcagtcccttttttcggaggaggaagcgtgctgagggccgcggaaccggcgccacacgcaagctatggcggtatagtgagtgtcgagacagatctgttgcagtggtgcctggaaagcgggtccatcccaatcctgtgccccataggtgagaccgcagcgcgtagatctgtactgctggactctttagaagtcaccgcgtcactggccaaagctctcagacctaccaagataatattcttgaataatactggtggtctgagagatagcagtcacaaagtcctcagcaacgtaaacctcccggctgacctggaccttgtgtgtaatgccgaatgggtgtcaacaaaggaaaggcagcagatgaggctgattgttgatgtgttgagtagacttccgcatcacagctccgccgtgattacagctgccagtacacttctgaccgagctgttctctaacaaggggtctggcactctgttcaagaatgccgaaagaatgttgcgcgtgcgttccctcgacaaactggatcaagggagactggtagatctggtgaatgctagctttggaaagaaattacgggacgactacctggcaagtctccggcctaggttacactcgatttatgtttcggaggggtataacgccgccgccatcctgaccatggagccagtcctcggaggaacgccctaccttgataagtttgtggtgagcagctctcgacagggccagggctccggccagatgttgtgggagtgcctcaggcgggatctacagaccctcttttggagatcaagggttacgaatcctatcaatccttggtattttaaacacagtgacggatcctttagtaataaacaatggatctttttttggttcggactagccgacatccgagatagctacgaactcgttaatcacgccaaagggctgcccgacagctttcacaagcccgcctcggatcccgggtcc

SEQ ID NO: 17094 - DNA, 1602 bp, synthetic construct
  misc_feature 1..1602: note = source = /note="Description of Artificial Sequence: Synthetic coding sequence"
  source 1..1602: mol_type = other DNA
atggccaccgcacttatggcggtcgtgttgcgagccgcagccgtcgcaccgagactccgaggccggggtggcaccggaggtgcgaggaggctcagctgtggagctagaagaagggctgccagaggcacctcgccgggtagacgcctctctaccgcttggtcgcagccacagccgccgcccgaggagtacgccggagcggacgatgtgtcacaatcgccagtggcagaagaaccttcgtgggtcccttccccaaggccgccggtgccgcatgaatcgcctgaaccacccagcggacggagcctggtccaacgggacatccaagcgtttctgaaccaatgcggggcctcaccaggagaggccagacattggttgacccagttccaaacttgccaccactcagccgacaagcctttcgcggtgattgaagtggatgaagaggtgttgaaatgccaacagggggtttccagcctcgcattcgctctggcctttctgcaaaggatggatatgaaaccacttgtggtgctcggactgccagctcccactgccccgtcagggtgtctgagcttttgggaagccaaggcacaactggctaaatcctgcaaggtcctcgttgacgctctgagacacaacgcggcagccgccgtccccttctttggaggaggttcagtgcttcgggcagcggaaccagccccgcacgcctcctacggtggaatagtgtcagtcgagactgacctgctgcagtggtgcctggaatccggatctatcccaatcctctgtccgattggggaaactgccgcacggcggtcagtccttctggactccttggaggtgactgcttctctggcaaaggcgctcagaccgactaagatcatttttctgaacaacacgggcggacttcgcgactcatcccacaaggtcctgagcaatgtgaatctccctgccgacctcgatctggtctgtaacgcggagtgggtgagcacgaaggaacggcaacaaatgagactgattgtggacgtgctgtccagactgcctcatcacagttcagccgtgatcaccgccgcgtccaccctgcttaccgagctcttctcgaacaagggtagcggcacgctgttcaagaatgccgaacggatgctgagggtgcgctccctggataagctggaccagggaaggctggtggatctggtaaatgcgtcgtttggaaagaagctcagagacgactacctggcgtcactgcggccacgcctgcactcgatctacgtgtcagaggggtacaatgctgcagccatccttaccatggagccggtcctgggcgggaccccctacctggacaaattcgtcgtgtctagctcccggcagggccaggggtcaggccagatgctctgggagtgtctgcggcgggatctccagactctgttctggagatcgcgggtgaccaatccgatcaacccgtggtactttaagcactccgatggatcgttctccaacaagcaatggattttcttttggttcggattggcggatatcagggacagctacgaactcgtgaatcacgctaagggactgccagactcgttccacaagccagcgtcggatccgggttcc

SEQ ID NO: 17095 - DNA, 1602 bp, synthetic construct
  misc_feature 1..1602: note = source = /note="Description of Artificial Sequence: Synthetic coding sequence"
  source 1..1602: mol_type = other DNA
atggcgaccgccctgatggccgtggtgctgagggctgcagccgtcgcaccacggctgcggggacggggtggcacaggaggtgccagaaggctctcttgcggggccaggcgaagggccgccagaggcaccagcccgggtcgtcgtctgagtaccgcctggtcccagccgcagccgccacccgaagaatatgcaggggcggacgacgtgagccagagcccggtggccgaggagccctcctgggtcccttcacctcgccccccagtcccgcatgagagccctgagcctccttcgggaagatcactcgtgcagcgggacatacaggccttcttgaatcaatgtggggcatcgcctggtgaagcacgacactggctcacacagttccaaacctgtcaccatagcgctgataagcccttcgcggtgatcgaggtggacgaagaagtcctgaagtgccagcagggcgtgtcaagtctagcattcgctttagcttttttacagcggatggacatgaagccgctggtggtgctcggtctgcccgcaccaaccgccccctcggggtgcctcagcttctgggaagctaaggcacaactcgccaaatcttgtaaggtcctggtggatgccctgcgtcacaatgccgccgctgcggtgcctttcttcggcggcgggtccgtcttaagggccgctgagcctgctccacatgctagctatggtggcattgtttccgtcgagactgatcttctccagtggtgtttggagagcggctccattcccatactgtgccctattggtgagaccgctgcgcggcgctccgtgctcctcgactcattggaggtcactgccagtctagcaaaagccctgcggcccaccaaaatcattttcctgaacaataccggcggcttaagagatagctcgcacaaagtcttgtccaacgtcaacctgcctgcagacctggacctggtctgtaacgctgagtgggtttccacaaaggaacgccagcagatgcgcctgatcgtcgacgtactgagccggctgccacaccactcatctgctgtcatcaccgcagcttcgacgcttctaaccgagctcttctctaacaagggaagtggtacgctttttaaaaacgccgaaaggatgttgagagtgaggtcgctagataagctagatcagggacggttggtggatttagtcaacgcgtccttcggtaagaaacttcgcgatgactaccttgcttcgcttagacccaggctgcattcgatttacgtgagcgaaggctataatgcggccgctatcctgaccatggaacccgtcctgggtgggacaccctacctcgacaaattcgtcgtctcatctagccggcagggacagggaagcggacagatgctgtgggaatgcctgcggcgggacctccagacgttgttctggaggtcgcgggtcactaatccaattaatccctggtattttaaacattccgatggctcattcagtaataaacaatggattttcttttggttcggtctcgctgatatccgtgatagctatgagcttgtgaatcacgctaaggggctgccggattctttccacaaaccggctagcgaccctggctca

SEQ ID NO: 17096 - DNA, 1602 bp, synthetic construct
  misc_feature 1..1602: note = source = /note="Description of Artificial Sequence: Synthetic coding sequence"
  source 1..1602: mol_type = other DNA
atggcgaccgcactgatggcggtcgtgctccgggctgctgccgtggccccgaggcttcggggccggggaggcactggaggagcgcgccgcctgagctgtggtgccaggcgccgcgcagcccgcggaacgtcgccaggccggcggctctcaactgcatggtcgcaaccgcagccaccaccagaagaatacgcgggagccgatgacgtgtcccagtccccggtcgccgaagaaccaagctgggtcccctcacccagacctccggtgccgcacgagagcccggagccgccatccggaagatctttggtccagagagacatccaagcgttccttaaccaatgcggagcatcccctggagaggcacgccactggttgactcagttccaaacctgccaccactccgcagacaaaccattcgccgttatcgaagtggacgaggaggtgctcaagtgccagcagggcgtgtcctcactcgccttcgccctggcttttctccagagaatggacatgaagccgctggtggtgctgggcttgcccgcccccactgcaccgtccggttgcctgtcgttttgggaagccaaagcacagctggcaaaatcctgcaaggtgcttgtggatgctctgcgccacaacgccgcggcagcagtgccgttttttgggggtggctccgtcctgcgcgcagccgaacctgcgccgcacgcctcttacgggggaatcgtgtccgtggaaaccgatctgttgcaatggtgcctggagtcggggagcatccctatcctgtgtcccatcggagagactgcagcgcgccgctcagtcctcctggactcgctcgaggtgaccgcctcgctggccaaggccctccggcccacgaagatcatattcctgaacaacactggaggactgcgcgactcatcgcacaaggtactcagcaatgtgaatctccccgcagacctggatctggtttgcaatgcggagtgggtgtcaactaaggagaggcaacaaatgcggctcatagtggacgttctgagccggttgccacaccattcgagcgccgtgatcaccgcagctagcaccctgcttactgaactgttttcgaacaaaggatcgggaaccttgttcaagaatgcggagcgcatgctccgcgtgagaagccttgataagttggaccagggacggctcgtggacctggtcaacgcctcgttcgggaagaagctgcgtgacgactaccttgcctcgttgcgcccaaggctccattcaatctacgtgtcggagggttacaacgccgcagcaatccttactatggaaccggtgctgggtggcaccccgtacctggacaaattcgtcgtgtcatcatcccgtcagggccaggggtccggacagatgctctgggagtgcctgcgccgggacctccagacgctgttctggcggtcccgcgtcactaatccaatcaacccatggtactttaagcattcggatggctcgtttagcaacaagcaatggatcttcttctggttcggcctggcggatatccgggatagctacgaactggtgaaccatgcaaagggcctgccagatagcttccataaaccggcgagcgaccctggatca

SEQ ID NO: 17097 - DNA, 1602 bp, synthetic construct
  misc_feature 1..1602: note = source = /note="Description of Artificial Sequence: Synthetic coding sequence"
  source 1..1602: mol_type = other DNA
atggcaaccgctctgatggcggtggtgctgcgcgccgccgcagtggccccaaggctgcgcgggagaggcggaactggtggagcgcggagactttcctgtggtgcgaggcggcgggccgcccggggaacttcgccaggtcggcggctgtccactgcgtggagccaacctcagcctccgcctgaggagtacgcaggagctgacgacgtgtcccagagccctgtggcagaggagccgtcgtgggtcccatcccccagacccccggtcccacacgaaagcccggagcctccctcgggacgcagcctggtgcaaagggatatccaggcattccttaatcagtgcggcgctagcccgggagaagctcggcactggctgacccagttccagacttgtcatcattccgccgacaaaccgttcgccgtgattgaagtggacgaggaagtcctgaagtgccagcagggagtgtcaagcctggcgttcgccctggctttcctgcagcgcatggacatgaaaccgcttgtcgtcctcggcctgccagccccgaccgccccatcggggtgtctctcattctgggaagcaaaggcgcaactggccaaatcgtgcaaggtgctggtggacgctctgcgccacaatgcggccgcagcggtcccattctttggcggcggttctgtactgcgcgccgcggagccggccccccacgctagctatggaggaatcgtgagcgtggagactgacttgcttcagtggtgtctggaatccggcagcatcccgattctctgccctatcggagaaaccgcggctagacgcagcgtgctgctggactcgttggaagtgaccgcctcgttggctaaggcactccgcccgactaagatcatcttcctcaacaacactggaggactgcgcgattcatcacataaagtgttgtcaaatgtgaacctcccagcagacctggatctggtctgtaatgcagaatgggtttccaccaaggaacggcaacagatgcgcctcatcgtggacgtgctgtcccgccttccacatcactcctccgcagtgatcacggccgcgtccactctgcttactgagctcttctcgaacaagggatcaggtacgctgttcaaaaacgcagagcggatgttgcgagtgcggtcactggacaagctcgatcagggaagattggtcgacctcgtgaacgcctctttcgggaaaaagctgagagacgattacctcgcctccctgcggccgcggctgcattccatttacgtctccgaaggctacaatgccgccgcgatccttaccatggagcccgtgctcggaggaaccccctatctcgataaattcgtggtcagctcctcccggcaggggcagggatccggtcaaatgctctgggaatgccttcgccgggacctccagacgctgttttggcgcagcagagtgacgaaccccattaacccatggtacttcaaacattcagacggatcgttttcgaacaaacaatggatcttcttctggttcggactggccgacatacgcgattcgtacgagttggtgaaccacgctaagggactccctgattcgtttcacaagccggcctcagacccaggctcc

SEQ ID NO: 17098 - DNA, 1602 bp, synthetic construct
  misc_feature 1..1602: note = source = /note="Description of Artificial Sequence: Synthetic coding sequence"
  source 1..1602: mol_type = other DNA
atggccactgcactgatggccgtggtgctgcgtgcagcagcagtggcgccaagactgaggggccgtgggggaactggtggagcccggagactttcgtgtggtgccagacgtcgagctgcgcgcggtacctctccagggcggcgcctgtcaactgcgtggtcgcaaccccagcctcctccggaagaatacgccggagcagatgatgtatcccaatccccggtggcagaggagccatcatgggtcccgtcaccgcgcccacctgtgccacatgaaagcccagagccaccatccggaagatcacttgtccaacgcgatattcaagcatttctgaaccagtgtggtgcatcccccggggaagcgagacattggcttactcaatttcaaacctgccatcatagcgctgataaaccttttgcagtcattgaagtggacgaagaggtgcttaagtgtcaacagggcgtgtcgagcctggcttttgcactggcatttctgcaacggatggacatgaaacctctggtggtgctgggactcccagcacctaccgccccaagcggctgcctctcattttgggaagccaaggcgcagcttgcaaagtcctgcaaagtgctggtggatgcattgcggcacaacgccgcagctgctgtcccgtttttcggcggggggtcggtcctgcgtgcagctgaacctgctcctcacgcatcgtacggtggaatcgtgtcagtggaaaccgacttgctgcagtggtgtttggagtccgggtcaatccccatcttgtgtcctatcggcgaaactgcagctaggagatccgtgcttctcgactcgctcgaagtgaccgcgtcactggcaaaggcacttagaccgactaaaatcatttttctcaataacactggagggctgagggatagctcccacaaggtcctgagcaatgtcaaccttcctgccgatcttgaccttgtatgcaacgctgaatgggtgagcaccaaggagagacaacaaatgcgcctgatcgtcgacgtgctgtcgaggcttccacatcattcgagcgctgtcattacggccgcctcgactctgctcactgaactgttttcaaataaggggagcggcaccctgtttaagaacgccgaaagaatgctgcgagttcgatcccttgataaacttgatcaaggacgcctggtcgatctggtcaacgcgtcgtttggaaagaaactcagagatgattacctggcatcgttgcgtccgcggctgcactcaatctatgtgtccgaggggtacaatgcagccgcaattttgaccatggaacccgtgcttggcggaacgccatacctggacaagttcgtggtgtcgtctagcagacaaggacaggggtcaggccagatgctttgggagtgtcttaggagagatcttcaaaccctgttttggaggtcgcgagtgaccaaccctatcaatccttggtacttcaagcattcagatggctcgttctcgaataagcagtggattttcttctggtttggtcttgccgacataagggatagctacgaacttgttaaccatgcaaagggcctgccggactcctttcacaaacctgctagcgaccccggctcg

SEQ ID NO: 17099 - DNA, 1602 bp, synthetic construct
  misc_feature 1..1602: note = source = /note="Description of Artificial Sequence: Synthetic coding sequence"
  source 1..1602: mol_type = other DNA
atggcaacggctctgatggcggtcgtcctgcgcgctgcggcggtggcaccccgtctgaggggtagaggcggcacgggcggcgcccggcggctgtcgtgtggtgccaggcgacgggcggcaagggggacatctcccgggaggcggctgtcgaccgcctggagccagccgcagccacctccagaggaatacgccggtgctgacgacgtctcacaaagtcccgtggccgaagagccatcttgggttccttcccctcggcccccggttcctcatgaaagtccggagcccccttctggccgttccctggttcagagagacatacaagcattcctgaatcagtgcggcgcgagccctggggaggctcggcactggttaacccagtttcagacatgtcatcattccgcggataagccttttgcagtgatcgaagtggatgaggaggtgctgaaatgccagcagggcgtttcttcgttggccttcgcactcgcgtttctccaaagaatggacatgaaaccacttgtggtccttggactgccggcaccaactgccccaagcggttgccttagtttttgggaggccaaagcacagttggccaagtcatgtaaagtccttgtcgacgccttaagacacaatgcagctgccgctgttcccttctttggtgggggctccgttctccgcgccgcagaacctgcccctcatgcgagttatggaggaatcgtcagcgtggaaacagacctgcttcagtggtgtcttgaaagtgggtctattcctatactttgtccaataggggagactgctgccagaagatcagtgcttttggacagcctggaggtgactgcctctttggcgaaagcccttaggcctaccaagattatattcctgaacaatacgggtggccttcgggacagctcccacaaggtcctgtcaaatgtcaacctcccagccgatctcgatctggtatgcaacgcagagtgggtgagtacaaaggagaggcagcagatgaggctgatagtagacgttctcagccggttgccacaccattcatcagcggttatcacggcagcaagcactctgctgaccgagttattttctaacaaaggaagcgggacactgttcaaaaatgcagaaaggatgctgagggtgcggtctttggacaagttagatcaagggcggctggtggatttggtgaatgcttcatttgggaaaaagctgagggatgattacctggcaagtttgcgcccccgactacattccatatacgtgtctgaggggtataacgccgcggcaatactgacaatggaaccggtcctgggggggaccccctatctagacaaattcgtcgtcagttcttcaaggcaggggcagggatcaggccagatgctctgggagtgtctccggagggatctccaaactctcttttggcgatctagagttacgaatccaatcaatccatggtactttaagcattctgatggcagcttctcgaacaaacagtggatattcttttggtttggcttggcagacatccgggattcgtatgaacttgtgaatcacgctaagggactgcccgacagtttccataaaccggcctctgatcccgggtca

SEQ ID NO: 17100 - DNA, 1602 bp, synthetic construct
  misc_feature 1..1602: note = source = /note="Description of Artificial Sequence: Synthetic coding sequence"
  source 1..1602: mol_type = other DNA
atggccactgctcttatggccgtggtcctccgggccgccgcagtggctccgcggcttaggggtagaggaggcaccggaggagcaaggaggctcagctgtggggcgcgccgaagggcagcacggggtacttcgcccgggagacggttgtcgactgcctggagccagccccaacctccacccgaggagtacgcaggagcagatgacgtgtctcaaagcccagttgcggaagaaccatcctgggtcccatcccctagacctcctgtcccacatgaaagccctgagccgccctccggacgatcccttgtgcaacgcgacattcaggcatttctgaaccaatgcggtgcatccccgggagaggcacggcattggcttactcaatttcaaacctgtcaccactcggcggataagccttttgcagtgattgaggtggacgaggaggtgcttaagtgccaacagggtgtctcatccctggcttttgcgctcgcattcctgcagcgtatggatatgaaaccattggtggtgttgggacttccagcccccacggcgccatccgggtgtctttccttttgggaagccaaggcgcagctggcgaaatcatgcaaggtgctggtggacgcactgcgccacaacgccgccgcagccgtgcccttttttggaggcggatcggtgctgcgcgcggcagaaccagctccacacgcctcgtacgggggaattgtgtcagtggagactgatctgcttcagtggtgtcttgaatccggatcgatcccaattctctgccctatcggggaaactgctgcaaggagatccgtccttcttgattcgcttgaagtgaccgcatccctcgcaaaggctctccgtcccactaagattatcttcctcaacaacaccggaggcctgagagactctagccataaggtgctgtcaaacgtgaatctccctgcagacctggaccttgtgtgtaatgcagaatgggtgtcaaccaaggaacgacaacagatgagacttattgtcgacgtgctctccaggctgccccatcattcctcggcagtgattactgcagcatcaactcttctcaccgagctcttctcaaataagggatctggcactctgtttaagaatgcagaacgcatgctgagagtcaggtcgcttgataaactggatcagggaagattggtggacctggtgaacgcttctttcggaaaaaagctgagggatgactacctggcatcattgaggccccgcctccatagcatctatgtctcagagggttacaacgcagcagctatactgaccatggagcctgtgctcggtggcactccatacctggataagttcgtggtgtccagcagccggcaaggtcaaggttcgggacaaatgctctgggaatgtttgcgccgagatctgcagacgttgttctggcgctcccgggtgacgaaccctattaacccttggtacttcaagcacagcgatggatcgttttcaaacaagcaatggatattcttctggtttggcctcgctgatatccgcgatagctacgagttggtgaaccatgcaaagggcctcccagactccttccataagccggctagcgatcccggaagt

SEQ ID NO: 17101 - DNA, 1602 bp, synthetic construct
  misc_feature 1..1602: note = source = /note="Description of Artificial Sequence: Synthetic coding sequence"
  source 1..1602: mol_type = other DNA
atggctactgccctgatggccgtggtcttaagggcagcagccgtggcccctaggctacggggccgagggggcacaggaggcgcacgccggctaagttgcggcgcccgaagacgcgcagctagggggacttctcctggccggaggctatccacagcctggtcccagccacagccgccaccggaagaatacgccggagcggatgatgtgagccaaagtccagtggctgaagagccaagttgggtgcccagcccccgtccgcccgtgccccacgaaagccctgagcccccttctgggcgatctctggtgcagcgagacatccaagcttttctgaaccagtgcggggcatctcccggagaggcacggcactggctcacacagttccagacttgccatcactccgccgacaagccatttgctgttatagaggtggacgaggaggtcctaaaatgtcagcaaggagtgtcttctctcgcatttgcgttagcattcctgcagaggatggatatgaagcccctcgtcgtactgggactgcccgcacccactgccccctctgggtgtctctctttttgggaagcgaaggcccaattggcaaagagctgcaaggttcttgtggacgccttgcggcacaatgccgccgctgccgtcccgttcttcggcggaggaagtgtgctgcgtgccgcagaacccgccccccacgcctcatatgggggtatagtgtcagtggagactgatctcttgcagtggtgtctagaatctggttcaatcccaatcttatgcccgattggggagactgctgccagaaggtcagtactgctagacagcctggaggtgactgcctctctcgcgaaggcgctgaggccgaccaaaatcatcttcctaaacaataccgggggccttcgcgacagttctcacaaagttctctccaacgtaaacttgccggccgatttagatctcgtgtgcaacgctgaatgggtgtcaaccaaagagcgccagcaaatgcgcctgattgtcgatgtactctcaagactgccccatcactcatctgctgtaattaccgcggcgtctactctgctgacggagcttttctctaataaaggctcaggcacactatttaagaacgccgagcgaatgctcagggttcgaagcctggacaagttggatcaaggtcgtcttgtggatttagtgaacgcttccttcggcaagaagttgcgggacgactatcttgcctcacttagaccccggctgcattccatttatgtatctgaagggtacaacgccgctgcaatcctgactatggaacccgtgctgggaggcacaccttacctagataagttcgtggtgtcaagtagccggcagggccaagggtctggccagatgctgtgggaatgcctgcggcgcgatctgcagacgttgttttggcgctcccgtgtgacaaaccctataaacccctggtacttcaagcatagtgacggctcctttagtaacaagcagtggatattcttttggtttggccttgccgatattagggactcttacgagctggtgaatcacgctaaagggttaccagattctttccataagcctgcctccgatcccgggtct

SEQ ID NO: 17102 - DNA, 1602 bp, synthetic construct
  misc_feature 1..1602: note = source = /note="Description of Artificial Sequence: Synthetic coding sequence"
  source 1..1602: mol_type = other DNA
atggccactgccctcatggcggtggtgctgcgtgcggcggcagtcgcccctcgcttgcggggaagaggaggaactgggggcgctaggagactgtcgtgcggggcacggcgccgggcagctcgaggtacttcgccaggaaggagactctccaccgcctggtcccagcctcagcccccgccggaagagtacgctggagccgacgacgtttcacaatcacctgttgcagaggagccatcgtgggttccatcgccgcgcccgccggtgccccatgaatcgccggaaccgccaagcggacgctccctcgtgcaacgcgacattcaggcgttccttaaccaatgcggagcctccccgggtgaagcacggcattggctcactcaattccagacttgtcaccactcggcggataagccattcgcagtgatcgaggtggacgaggaggtgctgaagtgccagcaaggcgtgtcgtccctggccttcgcgctggcattcctgcaacgcatggatatgaagccactcgtcgtgcttggactgccggctccaacggcgccttcgggctgtttgtcgttctgggaggctaaggcacagcttgccaagtcttgcaaagtgctcgtggatgccttgagacacaacgctgccgcagctgtgcctttcttcggcggcggaagcgtgctgagagctgccgaaccggcaccgcacgcttcgtacggtggaatcgtgtccgtggaaaccgacctgctgcaatggtgcctcgagagcggaagcatcccgatcctctgcccgatcggtgaaaccgcggcgcgtcgctcagtgttgcttgacagcctcgaagttaccgcctctttggcgaaggcgctgaggccgaccaaaatcatttttctgaacaacaccgggggactccgcgactctagccataaggtcttgtccaatgtgaatctccccgccgatctggacctggtgtgcaacgcggaatgggtcagcaccaaggaacgacagcagatgcggctgattgtggacgtgctttcgcgcttgcctcaccactccagcgcagtgattactgctgcctccactctccttaccgaacttttctcaaataaggggtcggggacgctgtttaagaacgcggagcgcatgctccgtgtgaggtcacttgataagctggatcagggcagattggtggatctggtcaacgcgtcgttcggaaagaaactgcgggatgactacttggcgagcctgcgcccccggctccattctatctacgtttcagaaggatacaatgccgccgccatcctgactatggaaccagtcctgggcggcacgccttacctcgacaaatttgtggtttcctcatcccgacaaggccagggctccggacagatgctttgggagtgtctgcggcgggacctccagaccctgttctggcgcagcagggtcacgaaccctatcaacccgtggtactttaaacactccgatggatcattctcgaataagcagtggatcttcttttggtttggactcgctgacatccgagactcatatgagctcgtcaatcatgccaaagggctgcccgactcattccacaagcccgcttccgacccaggttca

SEQ ID NO: 17103 - DNA, 1602 bp, synthetic construct
  misc_feature 1..1602: note = source = /note="Description of Artificial Sequence: Synthetic coding sequence"
  source 1..1602: mol_type = other DNA
atggcgactgctctcatggcagtcgtcctgagagccgccgctgtggcaccacgactgagagggcgaggtggcacagggggagctagaaggctgtcttgtggtgccaggcgtagggccgccaggggcacaagccctgggagacggctgtccaccgcatggagtcagccccaaccccctccagaagaatacgccggcgccgatgatgtcagccaaagtcccgtggctgaggaacccagctgggtcccgtctccaaggcctccagttccccatgaatctcccgaaccaccatccggaagaagtcttgtgcagcgtgacattcaggcgtttctcaaccaatgcggagctagcccgggtgaggcaaggcactggctgacacagtttcagacctgtcaccatagcgctgataaacccttcgccgttatcgaggttgacgaagaagtgttaaagtgtcagcaaggtgtctcgtcacttgccttcgccctagcatttctacaacggatggacatgaagccgctcgtggtcttgggactgcccgccccaacagcccctagcggttgtctttctttttgggaggcgaaggcccagctggctaagtcttgtaaagtgcttgtcgatgcattgcgccataatgctgccgccgctgtccccttcttcggaggaggcagcgtcctacgtgccgcggagcctgcgccacacgcatcctacggagggatcgtctcagtcgaaaccgatctgctgcagtggtgtttagaatcgggatcaatacctatcctgtgtccaatcggagaaaccgccgcgaggcgctccgtacttctggattccctggaggtgacagcttctctcgccaaagctctgagaccaacaaagatcattttcctaaacaatacagggggactgagggattcaagccataaagtgctgtccaatgtgaatttgcctgccgacttggacttggtgtgtaacgcagaatgggtcagtacaaaggagaggcagcagatgagactgatcgtcgatgtcttatctagattgccccaccactcctcggctgtgatcacagcagcttccaccctgctaacagaactgttctccaataaaggctcaggcaccctgtttaaaaacgctgaaaggatgctgcgagttcgtagcctggataagctcgatcagggtcgattagtagacttggttaacgcgagctttgggaaaaaattgcgagatgattatctagcttctctgaggccacggttgcacagcatctacgtgtctgagggatataatgctgctgctatcctgacaatggagccagttctgggcggtaccccttacctcgacaagtttgtggtttctagttcgagacagggtcagggttctgggcagatgctatgggaatgccttagacgcgacttgcagacgctcttctggaggagcagagtcaccaaccctattaacccctggtattttaaacactctgacggaagcttttcgaacaagcagtggatcttcttctggtttggcttggccgacatacgggactcgtacgagttggtgaaccacgccaaaggccttcctgattcctttcacaagcccgcttctgatcccggctca

SEQ ID NO: 17104 - DNA, 1602 bp, synthetic construct
  misc_feature 1..1602: note = source = /note="Description of Artificial Sequence: Synthetic coding sequence"
  source 1..1602: mol_type = other DNA
atggctacggccctgatggccgtggtgttgcgcgcggccgccgttgcaccaagactgcgcggccggggcggcacgggaggtgcgcggcgcctgtcgtgtggcgcccggcgcagggcagctcgcggaacctccccgggtcgcagactgtcaaccgcatggagccagccgcagcctcctccggaagaatacgccggagccgacgacgtgagccagagcccggtggccgaagaaccaagctgggtgccttccccacggccgcctgtgccgcacgaatcaccagagcctccctcaggacggtccctggtgcagcgcgatatccaggcgttcctcaatcagtgcggagcgagcccgggagaggcgcgccattggctcactcagttccagacctgccaccattcggcagacaagccgttcgccgttatcgaggtggatgaagaagtgctgaaatgccaacaaggcgtctcctcgctcgcgttcgccctggcgtttctgcaaagaatggatatgaagccgctggtcgtcctgggacttcccgcaccaactgccccgtccggatgcctgtccttctgggaggcaaaggcacaactcgcgaagagctgcaaggtcctggtcgacgctctcagacacaatgccgccgccgcagtcccgttttttggcggagggtcggtcctgcgagcggctgagccagcccctcacgcctcatacgggggaattgtgtcggtcgaaactgacctgctccagtggtgcctggagagcgggtccatcccaatcctgtgtccgatcggcgaaaccgccgcccgtagaagcgttctgctggattcactcgaagtgactgcctcattggctaaggcgctgcgcccaactaagatcatcttcctgaacaacaccggaggcctgcgcgattcgtcacacaaagtgttgtcgaatgtgaatctgcccgcggacctcgacctggtgtgcaacgcagagtgggtgtcaactaaagaaaggcaacaaatgaggctgatcgtggacgtcctttcgcggctcccacaccacagctcagctgtcatcactgcggccagtacgttgctcaccgagctcttttccaataagggtagcggtaccctgtttaagaacgctgagcgaatgctccgcgtgcgctcgttggacaagctggatcaaggacggctcgtcgaccttgtgaacgcgtcgttcggtaaaaagctccgggacgattacttggcctcgctgcggccgagacttcattccatctacgtgtcggaggggtacaacgctgcagccattctgactatggaacccgtgctcggaggaaccccgtatttggacaaattcgtcgtgtctagctcccgccagggacagggatccgggcagatgctgtgggaatgtctccggcgggatcttcaaaccctgttctggagatcgagagtgaccaatcccattaacccgtggtacttcaagcattccgacggatctttctcgaacaagcagtggatctttttctggttcgggcttgctgacatcagggattcctacgagctggtgaaccacgcaaagggactcccggattccttccataaacctgcttcggacccaggcagc

SEQ ID NO: 17105 - DNA, 1602 bp, synthetic construct
  misc_feature 1..1602: note = source = /note="Description of Artificial Sequence: Synthetic coding sequence"
  source 1..1602: mol_type = other DNA
atggctactgctctaatggcggtagtgctgagggctgctgctgttgcaccgcgactgcggggacgaggcggaaccggcggcgcaaggagattgagttgtggagcccgaaggcgcgccgcgcgtgggaccagccccggccggcggctgtcaacagcttggtcccagccgcaaccacctccggaagagtacgctggagctgatgatgtcagccagtctcccgttgccgaagagccttcttgggttccgagtcctcgcccacccgtgcctcatgagtcccccgaacccccttctggaagaagtttggtacagcgcgacatccaagccttcctaaaccaatgtggggccagtccaggcgaggctcgacattggctcacccagttccagacgtgtcaccactctgccgataagccctttgccgttatcgaggttgacgaggaagtcctcaagtgccagcagggtgtgagcagtctggctttcgccttggccttcttgcagcggatggacatgaagcccctcgtggtgctgggattgcccgcccccacggcaccaagcgggtgcctgagtttttgggaggccaaggcccagctggctaaatcgtgtaaggtactcgtggacgcactacggcacaacgctgcagccgcagtgccattcttcgggggcgggtctgtgttgcgggctgctgagccagcaccacacgcaagctacggaggaattgtctctgtggagactgacctgctgcagtggtgcctagaatctggaagcatcccaatcttgtgcccaattggagaaaccgccgctcgacggtctgtgctcttagactctctggaggttacagcaagcttggctaaggcgctgcgacctaccaagatcatcttcctcaacaacactggcggcttgcgggactctagtcacaaagtgctgtcaaacgtgaatttgcccgcagacctcgacttggtctgcaatgccgaatgggtgagtacaaaagagagacaacagatgcggctgatagtggatgtgctgagccgattgccccaccactcttcagccgttatcaccgccgcctctactcttcttacggaactcttttctaataaaggcagcggcaccctcttcaagaatgctgagagaatgctcagagtgaggagtctggataagctagaccagggaaggttagtagacttggttaacgcttcgttcgggaaaaagctgagagatgattacctggccagcctcaggccccgactgcatagcatttatgtttccgaaggctacaatgcagctgcgatactgacaatggaaccagtgcttggagggacaccctatctggacaagttcgttgtcagtagctcacgacagggacagggctccggtcagatgctgtgggagtgcctacggagagacctccagaccctgttctggcgctccagggttacgaaccctatcaacccttggtacttcaaacacagcgatggtagttttagtaacaagcagtggatctttttctggtttggcctcgcagacattagggactcttacgagctcgtgaatcatgctaaaggtcttcccgattccttccacaagccagcctccgatcccggtagt

SEQ ID NO: 17106 - DNA, 1602 bp, synthetic construct
  misc_feature 1..1602: note = source = /note="Description of Artificial Sequence: Synthetic coding sequence"
  source 1..1602: mol_type = other DNA
atggcgactgctttaatggctgtggtcctgagggcagctgccgttgcacctaggttgagaggaagaggtggcactggaggtgcaagaaggctcagctgtggagcgagaagacgtgctgcgaggggtacttctccaggccggaggttgtctaccgcgtggtcacagcctcagccccctccagaggaatacgcaggggctgatgacgtctcacagagccccgtggccgaagaaccctcatgggtgcccagtcctcggccccccgttccacacgagagtcccgagccgccatcaggacggtcgctagttcagcgcgacatccaggctttcctgaatcagtgcggcgcatcccctggggaagccaggcactggctgactcaattccagacatgtcaccatagtgcagacaagccattcgccgtcatcgaggttgatgaggaagtgttgaagtgtcagcagggagtcagctcactggctttcgcccttgccttcttgcagcgcatggacatgaaaccactggttgtcttgggcctgcccgctccgactgcccccagtggatgcctttccttttgggaggcaaaggcacagctggctaaatcctgcaaggtcctcgtggacgccttgaggcacaatgccgcagccgccgtgcccttcttcggcggaggctccgtgctaagagccgccgagccagcccctcatgctagttatggcggtatagtgtccgtcgaaacagatctgttacagtggtgtttagagtccggtagtattcctatactttgcccaatcggcgaaaccgccgctaggagatcggtcttacttgactccctggaagttactgcctccttggccaaagcccttaggcccaccaagataatcttcctgaacaatacgggaggcttaagggatagcagccataaagtgctgtcaaacgtgaacctgcccgctgacctggacctagtgtgcaatgcagaatgggtaagcacaaaagagaggcaacagatgcgccttattgtggatgtactttctcggcttccacaccattccagtgccgtcattaccgcggcctctacccttctgacagagttgttctctaataagggaagcggtaccctcttcaaaaatgcagagcggatgttaagagttagaagtctggacaaattggaccaaggccgactggtcgatctagtcaacgcttcatttgggaaaaaactccgagacgattatcttgcatccctgcgacctagactacactcgatttacgtgtcagaaggatataatgcagccgcaattctgacgatggagccagtgctcgggggtaccccctacctggacaagtttgtcgtctcttcctcccgccagggccaaggcagtggccagatgctctgggagtgtctcagaagggatcttcaaaccttattttggcgaagcagggtgactaaccctatcaacccatggtatttcaaacacagcgatgggtccttctccaacaaacaatggatcttcttttggttcggactggctgacattagagactcatacgaactggtgaaccatgctaagggccttcctgatagcttccacaagcctgcaagtgatccaggctca

SEQ ID NO: 17107 - DNA, 1602 bp, synthetic construct
  misc_feature 1..1602: note = source = /note="Description of Artificial Sequence: Synthetic coding sequence"
  source 1..1602: mol_type = other DNA
atggcgacagcattgatggcagtggttctgcgcgctgctgccgttgctccaaggctgcgtggaagaggcggtacgggcggtgcgcggaggctttcttgcggagcccggcgaagagcggcacggggcacctcgccagggcgacgactcagtaccgcatggagtcagcctcagccccctcccgaagaatacgccggagcagacgatgtttcgcagtcacccgtggctgaagaaccatcatgggtgccgagtccccgtcccccagttccacacgagtctccagagccaccaagcggtcggagcctggtacaaagggacattcaggccttcttgaatcaatgcggcgcttctccaggagaggcacgacactggctcacccagtttcaaacgtgtcaccattccgcggataagccgttcgcagtcatcgaggtggacgaggaagttctgaaatgtcagcagggggtgagtagtctagcttttgctttggctttcttgcaaaggatggatatgaaacctctggtggtgctcggcctgcccgcacctacagcaccttcagggtgtctatctttttgggaagctaaggctcagctggccaagagttgcaaagtgctggtggatgcactacggcacaacgccgccgccgccgtgccattcttcgggggtgggagcgtcctccgtgctgcggaacccgcgccccatgcatcctatggcggcattgtttcagtcgagaccgatctgctgcaatggtgtctcgagtcaggtagcatccccattctgtgtccgatcggagaaaccgccgctaggcggagcgtcctgctcgacagcctcgaggtaaccgcttcacttgcaaaggctcttcggcctacgaaaatcatcttcctgaacaacactggaggtctccgcgactcttctcataaggttttgagcaacgtgaatctccccgctgacctggacttggtttgtaacgccgagtgggtcagcaccaaggagcgccaacaaatgagactcattgtcgacgtcctgagtcggctcccgcaccacagctccgccgtgataaccgctgcgtctaccttgttgacagagctttttagcaataagggctctggcacactgtttaaaaatgccgaacggatgttgcgcgtgagatctctggataagttggatcaaggaagactggtcgatcttgtaaacgcatcattcggcaaaaaactgagagatgattacctcgcctcactgaggccaaggcttcacagcatctatgtctccgaaggttataacgccgccgcaatcctgactatggaacccgttctcggtggaacaccatatctggacaaattcgtggtgagttcatctaggcagggccaggggtccggccagatgctgtgggagtgcctgaggcgcgatttacagacccttttttggaggagcagagtcactaatcctatcaacccatggtactttaagcactctgatggatccttttccaacaagcagtggatctttttctggttcggtctggctgacatccgagattcttatgagttagtcaaccacgctaaaggcctaccagactccttccataaacccgcatccgatccgggctct

SEQ ID NO: 17108 - DNA, 1602 bp, synthetic construct
  misc_feature 1..1602: note = source = /note="Description of Artificial Sequence: Synthetic coding sequence"
  source 1..1602: mol_type = other DNA
atggcaacagccctgatggcagtcgtactgagggctgctgctgttgcaccccggctcaggggccggggcggaactgggggtgcgagacgcctgtcctgcggcgcacggagacgcgcggctcgcggtactagccccggacggagactaagtactgcttggagccagccacaacccccacccgaggagtatgccggtgccgatgacgtctcccagagccctgtggctgaggaacctagttgggtcccctcaccccgacccccagtgccgcacgagagcccagagccaccttcaggacggtctctggtgcagcgcgatatccaggcttttcttaaccagtgcggggcatcgccaggcgaggctcgccactggctcacgcagttccagacctgtcatcattctgcagataagccatttgctgtgatagaggtagacgaggaagtgctcaagtgtcagcagggcgtgtcaagtctggcattcgctctggcattcctgcaacgcatggacatgaagccactcgtggttctggggctgccagctcctacagcaccttctggctgtctttccttctgggaagctaaagctcagcttgcgaaatcatgtaaagtcctggtggatgctttgaggcataacgctgctgctgccgtgccttttttcggggggggtagtgtactgcgggcagccgaacccgctcctcacgcctcttacggaggaatagtttcagtggaaactgatctgctccaatggtgcttggaaagcggatcgatccctattctgtgccctatcggagagacagcggcaagaagatccgtgttgctcgactcgctggaagtcacagccagcctggcaaaggcacttcggcccaccaagatcatcttcctgaacaacaccggcggactgagggattcatcacacaaagtgctctctaacgtcaatcttcccgctgatctggacctggtatgcaacgccgagtgggtatcaaccaaggagcgtcaacagatgagactgatcgtcgatgtactgagtcgccttccccaccatagctccgcagtgataacagctgcttcgaccttactgaccgagctgtttagcaacaagggatctggcactctgtttaaaaacgcagaaaggatgttgagagtcagatcactcgataagctcgatcaaggacggttagtcgacctagtgaatgcttcattcggaaagaagttgagggacgactacctggctagtttgagacccagactgcattccatctacgtcagcgagggctataacgccgccgcaatcctcaccatggagcccgtcctcggtggcaccccttacctcgataaattcgtggtatcatcttctaggcagggccaaggaagcggccagatgctttgggaatgtctgaggcgtgatcttcaaacgctcttctggagaagccgcgttacaaatccaatcaacccttggtactttaaacactcggatggaagctttagtaataagcaatggatctttttttggtttggtctcgctgacatcagggattcatacgagcttgtcaaccacgcgaagggccttcccgactcattccacaaaccagcctctgaccccggctct

SEQ ID NO: 17109 - DNA, 1602 bp, synthetic construct
  misc_feature 1..1602: note = source = /note="Description of Artificial Sequence: Synthetic coding sequence"
  source 1..1602: mol_type = other DNA
atggcgacggcgctaatggcggttgtactacgagcggcggcggtagcgccgcgtttacgtggtcgaggtggtacgggtggtgcgcgtcgtttatcgtgtggtgcgcgtcgtcgagcggcgcgaggtacgtcgccgggtcgtcgactatcgacggcgtggtcgcaaccgcaaccgccgccggaagaatatgcgggtgcggatgatgtttcgcaatcgccggttgcggaagaaccgtcgtgggttccgtcgccgcgtccgccggtaccgcatgaatcgccggaaccgccgtcgggtcgttcgctagttcaacgtgatatacaagcgtttctaaatcaatgtggtgcgtcgccgggtgaagcgcgtcattggttaacgcaatttcaaacgtgtcatcattcggcggataaaccgtttgcggtaatagaagtagatgaagaagtactaaaatgtcaacaaggtgtatcgtcgctagcgtttgcgctagcgtttctacaacgaatggatatgaaaccgttagtagtattaggtctaccggcgccgacggcgccgtcgggttgtttatcgttttgggaagcgaaagcgcaattagcgaaatcgtgtaaagtattagttgatgcgttacgacataatgcggcggcggcggtaccgttttttggtggtggttcggttttacgtgcggcggaaccggcgccgcatgcgtcgtatggtggtatagtatcggtagaaacggatctactacaatggtgtttagaatcgggttcgataccgatattatgtccgataggtgaaacggcggcgcgtcgatcggtattattagattcgttagaagtaacggcgtcgctagcgaaagcgctacgaccgacgaaaataatatttttaaataatacgggtggtttacgtgattcgtcgcataaagtattatcgaatgttaatttaccggcggatttagatttagtatgtaatgcggaatgggtatcgacgaaagaacgtcaacaaatgcgactaatagtagatgtattatcgcgtttaccgcatcattcgtcggcggttataacggcggcgtcgacgctattaacggaattattttcgaataaaggttcgggtacgttatttaaaaatgcggaacgaatgctacgtgttcgttcgttagataaattagatcaaggtcgtttagtagatctagttaatgcgtcgtttggtaaaaaactacgtgatgattatttagcgtcgttacgtccgcgtttacattcgatatatgtatcggaaggttataatgcggcggcgatattaacgatggaaccggttctaggtggtacgccgtatttagataaatttgtagtttcgtcgtcgcgtcaaggtcaaggttcgggtcaaatgctatgggaatgtctacgtcgtgatttacaaacgctattttggcgttcgcgtgttacgaatccgataaatccgtggtattttaaacattcggatggttcgttttcgaataaacaatggatatttttttggtttggtctagcggatatacgagattcgtatgaattagtaaatcatgcgaaaggtctaccggattcgtttcataaaccggcgtcggatccgggttcg

SEQ ID NO: 17110 - DNA, 1602 bp, synthetic construct
  misc_feature 1..1602: note = source = /note="Description of Artificial Sequence: Synthetic coding sequence"
  source 1..1602: mol_type = other DNA
atggcaaccgccctgatggccgttgtcctcagggccgccgctgtggcacctaggcttaggggccgcgggggaactgggggcgcccgccggttgagctgcggggcgagacgaagggcggctaggggtacaagtcctggtcgccgattaagcaccgcatggtcacaaccccagcccccccccgaagagtacgccggtgccgacgatgtgtctcaaagtcctgtggccgaagaaccctcctgggttccttctcctcggccccctgtgcctcacgaatccccagagcctccgtctgggaggagtcttgttcagcgagacatccaggcttttctgaatcagtgcggggcctccccgggggaggctaggcattggcttacgcaattccagacttgtcaccattccgccgataaaccattcgcagtgatcgaggtagacgaggaggtcctgaagtgtcagcagggggtttcttccctggccttcgcgttggcattcctccagcggatggacatgaaacctctcgtcgtcttagggctcccagcccccactgcgccttcgggctgtcttagtttctgggaggcaaaagcacagctcgccaaatcatgcaaggttctcgtcgatgcactgcgccacaatgccgcggctgctgtccccttttttggaggagggagcgtcctgagggctgctgagccggccccccacgcaagttatggaggtattgttagtgtcgagaccgatctcctccagtggtgccttgaatccggctccattcctatactctgtccaatcggagagactgcggcacgcagatctgtgctccttgattctctagaggtgacagcttctctggcaaaagcacttagaccaactaagatcattttcctcaacaatacaggagggctccgagatagctcacataaggtcctgagcaacgtcaacctccccgcagatcttgacctggtatgtaacgctgaatgggtatcaaccaaagagagacagcagatgcgtttgatcgtggatgtgctatccaggctgcctcatcacagcagtgccgtgattaccgctgcatccaccctactcaccgaactcttttcaaacaagggttccggaaccctgttcaagaacgctgaaaggatgttacgtgtgagatcccttgataagctcgatcaggggagactcgttgatttggtgaatgctagctttggaaagaagctaagagatgattacctcgcgtcactcaggcctcggttacattctatttacgtgtcggaaggttacaatgctgccgctatactgaccatggaaccagtgctggggggaacaccgtatttggacaaatttgtggtgagttcaagtcggcagggacaaggctccggccagatgttatgggagtgcctcaggagagatctgcagacgttgttctggcggtctagagtgactaatcctattaatccgtggtactttaagcactctgacgggtcctttagcaataagcagtggatcttcttctggtttggactagccgacatccgcgacagctacgaattggtaaaccacgccaaagggttgcccgactcctttcataaaccagcctccgacccaggctcg

SEQ ID NO: 17111 - DNA, 1602 bp, synthetic construct
  misc_feature 1..1602: note = source = /note="Description of Artificial Sequence: Synthetic coding sequence"
  source 1..1602: mol_type = other DNA
atggccacagcactgatggccgtggttttgagggccgcagctgtggcgcctagactacgcgggcgggggggcacaggcggggcaagacggttgtcctgcggagcacggcgccgcgcagcacgcggcacttcgccaggccggcggctttctacagcatggtcacagcctcaacctccgccagaagaatatgctggtgccgacgatgtgagccagtcacctgtggccgaggaaccaagttgggtgccatcgcccagaccccctgtgcctcacgaatctccagaaccaccctcgggccggagtttagttcagcgcgacattcaagcattcctgaaccagtgtggcgcatctccaggagaggcaagacactggctgacccagtttcagacctgccaccactccgctgataagccttttgcagtgatagaagttgacgaagaagttctgaaatgccagcaaggggtgtcttcacttgctttcgcactcgcttttcttcaaagaatggatatgaaaccactggtcgtgttaggactgccagcaccaaccgcaccatcgggttgtctctcattctgggaggctaaggcacagctggccaagtcttgtaaggtcctcgtcgacgcactgcggcacaatgccgcagctgcagttccctttttcggtggagggtcagtgcttcgcgccgccgagccagccccacacgcttcctacggcggaatagtgtctgtggaaactgacctgctccagtggtgtttggagagtggctccataccaatactgtgtccaatcggagagactgccgcacgcagaagcgtcctgctcgacagcctggaggtcaccgccagtctggctaaagcactcaggcccactaaaatcatcttcttgaataacacgggcggcctcagagatagcagtcataaggtgctgtcaaacgtcaatctgcccgccgacctggatctggtttgtaacgcggagtgggtttctaccaaagaacggcagcagatgcgactgatagtcgatgtgctgtcgagactgccccaccatagcagcgcagtaataacagccgccagtacccttctcacagaactgttctcaaacaaggggtcaggcaccctgtttaaaaacgcagaacggatgctgagagtgagatctctggataaattggaccagggccggttggtggatcttgtcaacgcaagcttcggaaagaaactacgggatgattacctcgcgagtctgcggccccggcttcattccatctatgtctctgaggggtataatgccgctgcaatactgaccatggaaccagtgctcggaggcacaccttacctcgataagtttgtggtctcctcctcacgacaaggacagggttccggacagatgttgtgggagtgcctgcgcagggatcttcagacccttttctggcgatccagggtgactaatcccataaacccatggtacttcaaacactccgatggatctttttccaacaagcaatggatattcttctggttcggattggcagatatacgcgatagctatgaacttgtgaatcatgctaagggattacctgattcttttcacaagccagccagcgacccaggctca

SEQ ID NO: 17112 - DNA, 1602 bp, synthetic construct
  misc_feature 1..1602: note = source = /note="Description of Artificial Sequence: Synthetic coding sequence"
  source 1..1602: mol_type = other DNA
atggccacagccttgatggctgttgtactgcgggccgcagcggtggccccacggctgaggggtagaggaggtaccggaggggctcgccgtctgagttgtggagcacgcaggagggccgctagaggcacaagccctggaagacggctgagcacagcttggagtcagcctcagcccccgccagaggaatacgccggcgcagatgacgtctcccagagcccggtggctgaggaaccctcttgggtcccaagcccccggcctccggtgccacatgagtcccctgaaccgcctagtggccgtagcctagtacagcgggatatccaggcgttcctgaaccagtgtggcgcgtctcctggcgaagcacgacactggttgacacagttccaaacatgtcaccattcagcagacaagcccttcgcagttatcgaagtcgacgaagaagtgttgaagtgtcagcagggcgtgtctagcctggcatttgccctggcttttcttcagaggatggacatgaaaccgctcgtggtgcttggccttccagctcccactgccccctcaggatgcctgagcttctgggaggctaaggcccagctggcaaagagctgtaaagtcctggtggatgctctcagacacaatgcagccgctgctgtgcctttttttggtggtggatctgtgctgagggcagctgagcctgccccccacgcctcttacggaggaatcgtgagcgtcgagacggatcttctgcagtggtgtctcgaatcaggctccatccccatcttatgccccattggagagaccgctgctcgacggtcagtcttgctcgactcccttgaggttaccgcctcactggcaaaggccctgcgccctacgaaaataatctttctgaataacaccggcggactccgcgatagttcacataaggtactttccaatgtgaacttgcctgctgacttggacttagtgtgcaacgcggagtgggttagcacaaaggagcgtcagcagatgcggctcatcgtcgacgtgctttcacgcttgcctcatcactccagcgccgtcattaccgctgccagcaccttgctaaccgagctttttagtaacaaagggtccggaaccctgttcaagaatgccgaacggatgctgagggtgcggtccttggataagcttgatcaaggccgcttggtggatttggtcaatgcgtcatttgggaaaaagctgagggacgactatctggcgtctcttaggcctcgtctgcatagcatctacgtgtcggagggttacaacgcggccgcgatcctgaccatggagccagttttgggagggactccttacctagacaaatttgtggtctctagttcacgacagggccagggctctgggcaaatgttgtgggaatgtctgaggcgggacctgcaaactctgttctggaggagcagagtgacaaatcctatcaatccttggtacttcaagcactctgacggcagctttagcaataaacagtggatttttttctggttcggactggcagacatacgagactcttatgaacttgtgaatcacgccaaaggcctgcccgattctttccataaaccagcctccgacccaggaagt

SEQ ID NO: 17113 - DNA, 1602 bp, synthetic construct
  misc_feature 1..1602: note = source = /note="Description of Artificial Sequence: Synthetic coding sequence"
  source 1..1602: mol_type = other DNA
atggctacagccctgatggccgtcgtgcttcgagccgccgccgtggcgcctaggctgcgcggtcggggggggaccggaggggcacggcggttatcctgtggcgcccggagacgggccgcaagaggcaccagtcccggcagaaggttgtccactgcatggtcacagcctcagcctcctcccgaagaatatgcgggagcggatgacgtctcccagagccccgtagctgaagagcctagctgggtaccctccccccgccctcccgtgccccatgagtcccccgagccccctagcggacggtctttagtgcagagggatattcaggcgttcctgaatcagtgcggcgccagtcctggtgaggctagacattggctgacccagttccaaacatgtcatcactcggccgacaaacctttcgcagtgatcgaggtggatgaagaggtcctgaaatgtcagcagggcgttagcagcctggccttcgctctggcgttcttgcaaaggatggatatgaagccattggtagtgctcggtctcccagcaccaacagctccctcaggctgtctgtccttctgggaggcgaaagctcaactcgcgaaatcttgcaaagtacttgtcgacgcccttaggcacaacgcagctgctgcggtcccctttttcggtggcggaagcgtgctgcgtgccgccgaacctgccccacacgctagctacggtgggatcgtttccgtcgaaaccgatttgttgcagtggtgcttggaaagtgggtctattccaatactttgccctataggtgagacagcagcacgcaggagcgtgctgctagactctctggaggtcaccgcgagtctggccaaagctctgagacccactaaaataatcttccttaataatactgggggcctgagagacagctctcataaggtcctgtcgaatgtcaacctgccagccgatttggatctggtgtgtaatgccgaatgggtgtccaccaaggagcggcagcagatgcgcctaattgtggacgttctctcacgactcccacaccatagttccgccgtaatcaccgcagcctccacactgttgacggagttattttcaaataagggaagcggcaccctttttaaaaatgcggagcggatgctcagagtgcgatcattagacaaactcgaccagggtcgtcttgtggatcttgtgaatgcgagctttgggaagaagctccgggacgattacctggcatcattgcgcccccggctgcatagcatttacgtgtccgagggctacaacgcagctgccattctcacaatggagccagtgctaggaggaacgccctatctggacaaatttgtcgtttcatcttcaagacagggacaagggtccgggcagatgctctgggagtgtctgagacgcgatttgcagacgcttttctggcgaagccgggtcacaaaccccattaacccatggtactttaaacatagtgacggcagtttttccaacaagcaatggattttcttttggtttggattggcggacatcagggactcttatgagctggtcaaccatgccaaggggttgccagatagcttccacaagccagcttctgatcccggctca

SEQ ID NO: 17114 - DNA, 1602 bp, synthetic construct
  misc_feature 1..1602: note = source = /note="Description of Artificial Sequence: Synthetic coding sequence"
  source 1..1602: mol_type = other DNA
atggccactgcactgatggctgtagtcctgcgagccgccgccgtggcacctcggctgcgcggaagagggggcaccggtggtgcccggagactaagctgcggtgcccggcggcgagctgcgaggggcacatccccagggcgccgactcagcaccgcctggagtcaacctcagccccctccagaggaatacgccggtgccgacgatgtatcccagtcaccggtggctgaagaaccatcgtgggttccctcacctagaccccccgtcccccatgagagtcccgagccgccctctggtcgctccctcgtccaacgcgatattcaggcgtttcttaatcagtgcggcgcttccccaggagaggctagacattggctgacacagtttcagacatgccatcattctgctgataagccatttgccgttatagaagtagatgaagaagtcctcaagtgtcaacaaggcgtgagctcattagcattcgctttagctttcctccagcggatggacatgaaacccctggttgttctggggctccctgcccctaccgctccctctggctgtctgtccttttgggaggctaaagcccagctagccaagtcatgcaaagtcctggtggacgctctcaggcacaatgctgcggcagccgttcccttttttggaggcggctcagttctgcgcgccgctgaaccggctccccacgccagctatggcggcatcgtctctgtggagacggacctgctccagtggtgtctggagtcaggatccatcccaatcttgtgccctattggcgaaacggcagctagacggagcgtcctgttggattcactcgaagttaccgcaagtttggccaaggcactgaggccaacaaaaattatattccttaataataccggaggacttcgcgactcctcacacaaagttctctccaacgtaaatcttccagccgacctggatctcgtctgcaatgcggagtgggtctcgaccaaagagcggcagcaaatgcgccttattgtggatgtcctttctcggctgccacaccactcaagtgcagtcatcaccgccgcaagcacactgctgacagaactcttctccaataaaggcagtgggactctgttcaagaacgcagaaaggatgctccgtgtccggagtctagataagctagaccagggaagactggtagatctggttaacgcttcttttggtaagaagttacgtgacgattatctggcttctctgcgacctcggctgcattcgatctacgtgtccgagggatacaatgcagcagcgattctgaccatggaacctgtgctcggcggcacaccatatctcgacaaattcgtggtctcttccagtagacagggacagggctcgggccaaatgttgtgggaatgcttacggagggatctccagacactcttttggcgcagtcgggtcacaaaccctattaatccatggtatttcaagcactccgatggaagcttcagcaataagcagtggatttttttttggtttggcctggcggatattcgcgatagttatgagctggtgaaccatgccaaaggcttgcccgactcctttcataaacccgcctcagaccctggttct

SEQ ID NO: 17115 - DNA, 1602 bp, synthetic construct
  misc_feature 1..1602: note = source = /note="Description of Artificial Sequence: Synthetic coding sequence"
  source 1..1602: mol_type = other DNA
atggctacagctcttatggccgtcgtgctgagggccgccgccgtagcacctaggttgcgcggaagaggcggaacaggcggtgcgaggaggctttcctgcggagcaagaaggagggccgcgagaggcacatcccctggccggcgattaagcaccgcgtggtcccagccccaaccaccacctgaagagtacgcgggggcggacgatgtcagtcagtcgcccgttgccgaagagccgtcgtgggtgccgtctccccggccaccagtaccgcatgagtcccccgaacctccaagtggacggagcttggtgcaaagggatatccaagctttcctgaatcagtgtggtgccagccccggggaagctagacactggctgacccagttccagacatgccaccattctgctgacaagccgtttgctgtgatcgaggtggacgaagaagtgctgaagtgccagcaaggggtatcctccctggcatttgccctggcctttttgcaacggatggacatgaaaccactcgtcgtgctgggccttcccgctccaactgccccttcaggctgcctgagtttctgggaggccaaagcacaattggctaaatcatgtaaagtcctggtggatgcattacgccataatgcggccgccgccgtgcctttctttggtggcggctccgtccttcgagctgctgagcctgctccgcatgcctcatatggcgggattgttagtgtcgaaacggatttactccagtggtgcctggagtccggctctattccaatcctgtgtccaatcggagagacagccgctcgcagatcagtcttactggatagcctcgaggtgactgcgtcactggccaaggccctgaggcccacgaaaatcattttcctgaacaacacgggcgggctgcgcgacagctcccacaaagtactgagtaacgtgaatctcccagcagacctcgacctggtgtgcaacgctgagtgggtctcgacaaaggagaggcagcagatgcgtctgattgtcgacgttctatcccgcctgccgcatcacagcagcgcggtgattaccgcggcatccaccctcttgaccgagctcttctcaaacaaggggtcgggaacgcttttcaagaacgcagagcgcatgcttagggtgagaagtctggacaagctcgatcagggtcgccttgtagacctagtcaacgcatcattcggcaagaagctgagagatgactacttggccagtctcaggcctaggctacattccatctacgtgagtgagggctacaacgcagcagctatcctgactatggagccagtcctgggtggaacaccctatctggataaatttgtagtgtcttccagtaggcagggtcagggctctggccagatgctctgggaatgcttgagaagggacttacagacactgttctggaggagccgagttaccaatcctatcaatccgtggtattttaagcatagtgatggaagcttcagtaataagcagtggatcttcttttggttcgggctggccgatataagggactcctatgagctggtgaaccatgctaagggcctcccagattcgtttcataagcccgcctcagatccggggtca

SEQ ID NO: 17116 - DNA, 1602 bp, synthetic construct
  misc_feature 1..1602: note = source = /note="Description of Artificial Sequence: Synthetic coding sequence"
  source 1..1602: mol_type = other DNA
atggcaaccgccttgatggctgttgtcctacgcgccgctgctgtggcccctcgtttgagaggacgcggcggaactggcggagccaggcgattgagctgcggggcccggcgacgggccgccaggggcacgtcaccaggccgaagactgagtactgcatggagccagccccagccaccaccagaggaatacgcaggcgctgacgacgtgtctcagagccctgtggcagaggagcccagctgggtcccgtctccacgtccaccggtgccccacgagtcaccagagccccccagcggacgcagcctggtacagcgcgacattcaggctttcctaaaccagtgtggcgcttcccccggggaggccagacattggcttacccagttccagacttgccaccatagcgccgataagccattcgcagtgattgaggtcgacgaggaagtgctaaaatgccagcagggggtgtcatcactagctttcgcactggcttttctgcagcgcatggacatgaagcctcttgtcgtgctgggactacccgcccctaccgctccgagtggctgcctgagtttttgggaagctaaggcgcagctagcgaagagctgtaaggtactagtggacgctctgagacataacgcagcagccgcagtccctttcttcggcgggggatccgtgctccgcgccgcagaacctgcaccccacgcttcctatggaggtatcgttagtgttgaaacagatctgctgcagtggtgcctcgaatctggatccattcctatcctgtgcccaatcggcgagaccgccgcccggagatccgtgcttctggactcattagaggtgacggctagtctggccaaagcactcagacctactaaaattatttttttgaacaacacgggggggttaagggattcctcacacaaggtgttatccaatgtaaacctaccagccgatctggatctcgtgtgcaacgcagaatgggtgtcgacgaaagagcggcagcagatgcggctgatcgttgatgtgctgagcagactcccccaccattcgagcgctgttattacagctgcatccacgctgctgacagagcttttctccaacaagggcagcggtactttatttaaaaatgcagagcgcatgttacgagtgagatccctggacaagctggaccaggggaggctggtcgacctggtgaatgcctccttcgggaagaagttgcgagatgactatctggcatccttgcgtcctaggctgcactcaatatacgtctctgagggttacaatgccgcggccattctcaccatggaacctgtgttgggcggtacaccttacctcgataagttcgtcgtatcctcttcaaggcagggccagggctccggacagatgctgtgggaatgcctccggcgtgacctccagaccctgttctggcggtcaagagtgaccaaccccatcaatccttggtatttcaaacattcagacggatctttcagcaacaagcaatggatatttttttggttcggactagcagatattagagactcatacgagttagtgaatcatgctaagggccttccagactcgttccataaacctgccagtgaccccggctcc

SEQ ID NO: 17117 - DNA, 1602 bp, synthetic construct
  misc_feature 1..1602: note = source = /note="Description of Artificial Sequence: Synthetic coding sequence"
  source 1..1602: mol_type = other DNA
atggcgacagcgctcatggctgtcgttctcagggccgctgctgtggccccaaggctgaggggccgtggcgggacaggcggggcgcggagactgtcctgcggggcccgccgtcgcgccgcaaggggcacgtcccctggccgcagactttcaacggcttggagccagccacaacctcccccagaggaatatgctggagctgatgacgtgtctcaatctccagtggctgaggaacccagttgggtccccagccccagaccacctgttcctcacgaaagccccgaacccccgtccggaaggagcttggttcagcgcgatatccaggcctttttaaaccagtgcggcgcgtcgccaggcgaggcacgccattggctcacacaattccagacttgtcatcactctgcggataagccctttgctgtgatcgaggttgatgaggaagtgctcaagtgccaacagggtgtctcctcattggcttttgccttagctttcctgcaaagaatggacatgaagccattagtggttttggggctcccagccccaaccgcgccatcagggtgtctgagtttctgggaagctaaagcccagttggcaaaatcctgcaaggtgcttgtagacgccctccggcataatgcagctgctgccgttccttttttcggagggggcagcgttttgcgggccgccgaacccgcgccccacgcctcatacggagggattgtgtcggtcgaaactgatctgctgcagtggtgcctcgagtctggcagcatccccattctgtgtccaatcggcgagaccgcagcccgccggagcgtgcttctggatagcttagaagttacggcaagcctagcaaaagcactcaggcccaccaagataatttttttgaacaatactggtggccttagagactcaagtcacaaggttcttagcaatgtgaatctgccggctgacttggatctcgtatgcaacgccgaatgggttagcacgaaggagcgacagcagatgcgactgattgtggacgtgctctcccggctgcctcatcatagttctgccgtaatcaccgcagcttctacccttctcaccgaactgttttccaacaaaggatctggtaccctgttcaagaacgctgagcgtatgttgcgagtgcggagcctggacaagctcgaccaaggacgactcgtcgacctcgtaaacgcaagttttggtaaaaaactgcgagacgactatttggcatctttacgccctcggctccacagtatttacgtatccgagggatacaatgcggctgctatcctgactatggagcccgtgttgggcgggacgccttatttggacaagtttgttgttagcagctcccggcaggggcagggttccggacagatgctttgggagtgtcttagaagagatctccagacgcttttttggaggtccagagttaccaatcccatcaatccctggtattttaaacatagtgatgggtctttctctaataagcagtggatttttttttggttcggcctggccgatatccgcgactcttatgagttagtgaaccatgcaaaggggctgcctgattcttttcacaagcccgcaagcgatcctggctct

SEQ ID NO: 17118 - DNA, 1602 bp, synthetic construct
  misc_feature 1..1602: note = source = /note="Description of Artificial Sequence: Synthetic coding sequence"
  source 1..1602: mol_type = other DNA
atggctactgcactgatggcggtggtgttgagagcagcggctgtcgcaccgcgcctccgcggacgcggcggcactgggggcgcccggcgcctgtcctgcggggcccggcgtcgagctgctcgcggaacctcccccggtcgccgcctgtctaccgcctggtctcaaccacagcccccccccgaggaatatgccggagccgacgatgtcagtcagtctccagtagcggaggagccttcctgggtgccttctccacgaccccccgtaccacatgaaagtcccgaaccaccaagtgggcgtagcctggtccagcgcgatatccaggcattcttgaatcaatgcggcgcttcaccaggggaagcgaggcactggctcacccagttccagacttgtcatcacagcgcagataaaccatttgctgtgatcgaggtcgacgaagaggtacttaagtgccagcagggcgtttcttcacttgcattcgctttagcatttttgcaaaggatggatatgaagcctctggttgttctggggttgccagcccccacagcccccagcggatgcctctctttctgggaggcaaaagctcagcttgccaagagctgcaaagttctcgttgacgccctccggcataacgcagcggccgccgtcccgttctttggaggcggtagcgtcctacgggctgccgagcccgcaccacatgccagttatggaggaattgtctccgtggaaactgaccttctacagtggtgcttggagagcggttctatcccaattctttgtccaatcggggagacagcagcaagaagatccgtgctacttgattctctagaagtaacagcctcccttgccaaagctcttcgcccaaccaaaataatatttctgaataacacaggcggacttcgtgattcaagccataaagttctgtcaaacgtgaacctgccggcagatctagatctggtgtgtaacgccgagtgggtcagcacgaaagagagacagcaaatgagacttatagtggatgtcttatcaaggctcccccatcacagctcagcagtcattaccgcagcgagtacgctattgacagagctctttagcaataagggttctggtaccctgtttaagaacgccgaacggatgttgcgtgttagatccctcgacaaactggaccagggacggctcgtagacctggtgaacgctagttttggaaagaagttgagggatgattacctagcctccctgcggccccggctacacagcatctacgtgagcgagggctacaacgcggctgccattcttaccatggagcctgtactggggggtacaccctacctggacaagttcgtggtctcctcaagcagacagggccaagggagcggtcagatgttgtgggagtgcctgcgaagggatctgcagactctgttttggaggagcagggtgacaaaccctatcaacccgtggtatttcaagcacagcgatgggtctttctcaaataagcagtggatctttttctggtttggcttagcggacattcgtgactcctatgagctggtgaaccacgcgaagggccttcccgactccttccataaaccagccagtgaccccgggtct

SEQ ID NO: 17119 - DNA, 1602 bp, synthetic construct
  misc_feature 1..1602: note = source = /note="Description of Artificial Sequence: Synthetic coding sequence"
  source 1..1602: mol_type = other DNA
atggccactgcgctgatggccgtcgtcttgagagccgccgccgtagctccaagactgcggggccgtgggggcaccggaggagccagacggctgtcctgtggagcacggcgacgcgcagctagaggtacctcccctggccgtcgcctaagcacggcctggtcacagccgcagcccccgccagaagaatacgcgggcgccgacgacgtctctcagtctccggtcgcggaagagccctcctgggttccatctcctcgcccgccggtgccccatgagagcccggaaccgccatctggtcgcagcctggttcagcgtgacatccaagcatttctgaaccagtgcggcgctagtcccggcgaggcccgccattggctaacgcagttccagacgtgccaccacagcgcggacaagcctttcgccgtcatcgaggtggatgaggaggtcctgaagtgccaacaaggagttagctcgctcgctttcgccttggcttttctgcagcgtatggacatgaagcccctggttgtccttgggcttcctgccccgaccgccccgagcggttgcttgtcgttctgggaagctaaggctcagctcgccaagagctgcaaggtcctggtcgacgccctgcgacacaacgcagctgctgccgtccccttttttggaggcggatctgttcttcgcgcggccgaaccggctccccacgcttcgtacggcggtatcgtatcagttgagaccgacttgctgcagtggtgcctcgagtccggctccatcccgatactgtgcccgatcggtgagacagccgcccgtcggtccgtccttcttgactccctcgaagtcactgcgagcttggccaaggctctgcgccccaccaagatcatcttcctgaacaacacgggtggcctgcgtgattcctctcacaaagtgctttccaatgttaacctgccggcggatctggacctcgtgtgcaacgcggaatgggtttccaccaaggagcgtcaacaaatgcgtctgattgtcgacgttctctcacgactgccacatcactcatccgcggtcattacggctgcttcgacgctgctgaccgaactcttctccaacaaaggttccggcactttgttcaagaacgccgaacgcatgctgcgggtcagatcgctcgacaaactggatcagggcaggttggtggatcttgtcaacgcttccttcggcaagaaactgcgggatgactacctcgcttccttgcgtcctcggctgcacagtatctacgtgtcggaaggatataacgcggccgcgatcctcaccatggagcccgttcttggcggtactccctatttggataaattcgtcgtctcttcttcaagacagggccagggcagcgggcagatgctgtgggagtgccttagacgtgaccttcagactttattctggcgctcccgtgtcaccaacccgatcaacccctggtacttcaagcatagtgatggctcgttcagcaacaaacagtggatcttcttctggttcggtctggcggatattcgcgatagttacgagttggtgaaccacgcgaaaggcctgcctgattcgttccacaagccggcctctgatcctggctct

SEQ ID NO: 17120 - DNA, 1602 bp, synthetic construct
  misc_feature 1..1602: note = source = /note="Description of Artificial Sequence: Synthetic coding sequence"
  source 1..1602: mol_type = other DNA
atggcaacagccctcatggctgtggttttacgggctgctgccgtagcgccccggttgaggggccgcgggggtaccgggggtgctaggcggctgtcctgtggcgccagacgccgggctgcgcggggcacctcgcctgggcgtcggctgagtaccgcctggtctcagcctcagccccccccagaggaatatgccggcgccgacgatgtgagtcaatctcctgttgctgaggaaccctcatgggtcccatcacctcgcccaccagtcccgcacgagagccctgaacctccatctgggcgttcccttgtgcagagagacattcaggcattccttaaccagtgtggcgcctcccctggcgaagcccgtcactggctgactcagttccagacatgtcaccacagtgcagataaacccttcgccgtaatcgaggtcgacgaggaagtacttaagtgccagcaaggagtctcctccctggcgtttgcactggcctttcttcagaggatggacatgaaacccctggtcgtcctcgggcttcctgcgcctacagccccgtccgggtgcctgtctttttgggaggccaaggcccagctcgccaagagctgcaaggtgcttgtggacgccttgcgtcataatgccgccgctgccgtccccttttttggtggcgggtccgtcttgcgggccgctgagcctgctccgcatgccagttacggcggcattgtgtccgttgagacagatcttctacaatggtgtctggaatctggatcaatccctattctgtgtcccattggggagaccgcggcgagaaggtctgtgttactggactctctggaagtgacggccagtctcgcaaaggctttgcgacccaccaagataatctttctgaataatactggggggctgagggactcaagccacaaagtgctcagcaacgtcaacctccctgccgacctggatttggtgtgcaatgccgaatgggtgtctactaaggaacgtcagcagatgcgcctgattgtggatgtgctgagccgcctgcctcatcactccagtgccgtgattaccgctgctagtacactccttacagaactcttttcaaataaaggcagcggtacactctttaagaacgccgaacgaatgctccgcgtccgtagcctggacaagcttgatcaggggaggcttgttgatttggtgaatgccagctttggcaagaaattgagagatgactacttggcatccctccggccgagactacacagcatttatgtcagcgaggggtacaacgccgcggctattctcacaatggagccagtcctgggcggaaccccatacttggacaagttcgtggtatcaagcagtaggcagggtcagggcagcggacagatgttatgggagtgcttgagaagggatctgcaaactctcttttggcgttctagggtcactaacccgatcaacccgtggtattttaagcactccgacggctcttttagcaataagcagtggattttcttctggtttggacttgcagacattcgcgacagctacgaattagtcaaccatgcaaaaggcctacctgacagtttccacaagcctgcctctgatcctggctca

SEQ ID NO: 17121 - DNA, 1602 bp, synthetic construct
  misc_feature 1..1602: note = source = /note="Description of Artificial Sequence: Synthetic coding sequence"
  source 1..1602: mol_type = other DNA
atggccacagcgctgatggctgttgttctgcgcgccgcagccgtcgcacctaggttgcgggggcgggggggaactggaggggccagaaggctttcttgtggggcccggcggagagcggctagggggacatcccctggacggcggctctctactgcttggtcccagccgcagccaccccctgaagaatatgctggggcagatgatgtttcacagagtcctgtggccgaagaacccagttgggtcccatctccccggccccctgtgccacacgaatcacctgaaccccccagtgggcggtcactcgttcagcgggatatacaggcattcttaaaccagtgtggagcgtctcccggagaagcgcgccattggctgacacagtttcaaacttgccaccactccgctgataaacccttcgctgtcattgaggttgatgaagaagtactcaaatgtcagcagggggtttcttctttagctttcgctttagcctttctacagcggatggatatgaagccccttgttgtcttggggctcccagcgcctacagctccttcgggatgtctctctttctgggaagccaaagcacaactagccaaatcctgtaaagtgctcgtagacgccctcaggcataacgcagccgccgccgtgccctttttcggaggagggtccgtacttagggccgccgaacctgcgccccacgcgtcctatgggggaatagtttcagtggaaacagacctcctccagtggtgtctcgagtctgggagtatccccatcctctgccccatcggagaaacagctgcccggagaagtgtcctcctcgactcacttgaagtaacagcctcactcgcaaaagccctgcggccaactaaaattatcttcttaaataacacaggggggctccgggactccagtcacaaggtcctatctaacgtgaatcttccagctgatctggatctcgtctgcaacgcagaatgggtgagtactaaggaacgccagcaaatgagactcatagtggatgtgctgagtcgacttccccatcactcctctgcagtgatcacagcagcttccacactcctcacagaactcttctccaataaagggtcaggaacactcttcaaaaacgccgaacggatgttacgcgtcaggtcactcgataaattagatcagggaagactggtagatcttgtgaacgctagtttcggaaaaaaactcagagatgattatctggccagtttgaggcctaggctgcactctatatatgtgtctgaagggtacaacgccgcagcaattcttactatggaacccgtgttaggaggaactccctatctagataagtttgttgtctcttcttcacggcagggacaggggtccggacagatgctgtgggaatgccttagaagggatctacagactctcttttggaggtcccgcgtgactaaccctataaatccttggtacttcaaacatagtgatgggtctttctccaacaagcagtggatattcttttggttcgggcttgcggatatccgagactcctacgagttggtgaatcacgccaagggactccctgattccttccacaagcccgcctccgatcccgggtcc

SEQ ID NO: 17122 - DNA, 1602 bp, synthetic construct
  misc_feature 1..1602: note = source = /note="Description of Artificial Sequence: Synthetic coding sequence"
  source 1..1602: mol_type = other DNA
atggctactgcgctgatggcagtggtcctgagggccgctgcagtggctccacgtctgagaggcagagggggcactggaggcgcccgtagactgtcttgtggcgcccggcgtcgcgccgctagaggtacaagcccaggacgccgccttagcacggcttggtctcaaccacaaccaccacctgaggagtacgctggagctgatgacgtgtcacagtcccccgtcgctgaggaaccatcttgggttccaagccctagacccccagttcctcatgaaagccccgagccacccagcgggagatcactcgtccagcgcgatattcaagcctttctcaaccaatgtggcgcctctcccggagaagctagacattggctcactcagtttcagacatgtcaccacagtgctgacaagccgttcgcagtgattgaagtggacgaagaagtactcaagtgtcagcagggggtgagcagcctggcatttgctcttgcctttctccaaaggatggatatgaaacctctggtggttctggggttaccagcacctaccgcaccttcaggctgcctcagcttttgggaagccaaggcacagctggctaagagctgtaaagtgctggtggatgctctcaggcacaatgccgcagctgctgtgccattcttcggcggcggaagcgtcctcagagccgccgaacctgctcctcacgccagctatggcggcatagtctctgtggaaaccgatctgctccagtggtgcttggagagcggatctatccccatcttgtgcccaatcggcgaaacagcagctagaagatctgttcttcttgatagcctggaagtcaccgcttcactcgctaaagccctcaggccaacaaaaatcatcttcctgaacaacacaggtggcctgagggactcatctcataaggtcctgtccaacgtgaacctgcctgctgatcttgacctggtgtgtaacgcagaatgggtgtccactaaagaacgtcagcagatgaggctgatagtggacgtgttgtcacgcctcccgcaccatagctcggcggtaattaccgcggcttctaccctgctgaccgagctgttcagcaacaaggggagcggaaccctgttcaagaatgcagaaagaatgctaagggtgaggagcctggacaagcttgaccaagggcgtttagttgacctggtgaacgctagtttcggcaaaaagctgagagatgactatttggctagccttcggcctcgcttgcactcaatatatgtatccgagggatacaatgccgccgctatcctgaccatggaacccgtgctcggcggaactccatacttggacaaattcgtcgttagtagctccaggcaaggccaagggagcggacagatgttgtgggagtgtctccgcagggatctgcaaactctgttttggagaagtagggttacaaaccccattaacccttggtacttcaaacacagcgacgggagcttcagcaacaaacaatggatcttcttctggtttggattagctgatattagagacagctacgaactagtaaatcacgcaaagggattacccgattcttttcataagccagctagcgatccaggcagt

SEQ ID NO: 17123 - DNA, 1602 bp, synthetic construct
  misc_feature 1..1602: note = source = /note="Description of Artificial Sequence: Synthetic coding sequence"
  source 1..1602: mol_type = other DNA
atggctacggctctcatggcagtggtgctgagggcagccgctgttgccccccggcttcggggccgaggtgggacaggaggggcgcggaggctgagctgcggcgctcgtaggcgagcagcgagaggtacttcccctggaagaagactctctaccgcatggtcacagccacagccgcccccagaggaatatgctggggcagatgacgtgtctcagtcgccagtcgccgaagagcctagttgggtgccaagtcctcgcccacctgtccctcacgagtctccagagccacccagcggcaggtcacttgttcagcgcgatatccaggctttcctgaaccagtgtggggcatctcctggtgaggctcgtcactggttgactcagtttcagacttgtcaccactcagcagataaacccttcgctgttatcgaggtagacgaggaggtgctgaaatgccagcagggcgtgtcttcattggcctttgccttggcattcttgcagcgcatggatatgaaaccactggtagtgttgggcctgcctgctccgactgccccgagcggctgcttaagtttctgggaagcgaaagctcaattggccaagtcctgcaaagtgttggttgacgctcttcggcacaatgcagctgcggctgtcccgttttttgggggaggcagcgttctgagagccgccgagccagcacctcatgctagttatggcggtatcgtctctgtggagactgacctgttgcagtggtgtctggagtcgggcagcatcccaattctgtgccctataggcgagacagcggctcgccgctcggtgctcttggatagcctcgaagtgaccgcctccttagccaaagccttgaggcccacgaagataatcttcctgaataacactggtggcctcagggattcgtctcacaaggtgctctcaaatgtaaacctgccagcagacctggacctggtgtgtaatgcagaatgggtaagcaccaaagagcgccagcagatgcggttaattgtggacgtgctgagccgccttccccaccattcgagcgccgtgataactgccgctagcacattgcttaccgaactgttcagcaacaaaggctcagggaccttattcaagaacgcagagcggatgcttcgcgttagatccctggacaagctggaccagggaagactcgttgacctcgtgaacgcctcatttgggaaaaagctccgcgacgactatctggcttccttgcggccgagactgcactctatttacgtgagtgagggatacaatgcggctgctatcctgactatggagcccgtgcttggcggaacaccttacttagacaaatttgtggtatcaagttcccggcaggggcagggctccggccagatgctctgggagtgtctgaggagagatttgcagacgctcttctggagatcgagggtgactaatccgatcaacccctggtactttaagcacagcgacggtagcttctccaacaaacagtggatttttttttggtttggactcgccgacatacgcgactcatacgagcttgtgaaccatgccaagggcttgcccgattccttccacaaaccagcctcggaccctgggtca

SEQ ID NO: 17124 - DNA, 1602 bp, synthetic construct
  misc_feature 1..1602: note = source = /note="Description of Artificial Sequence: Synthetic coding sequence"
  source 1..1602: mol_type = other DNA
atggcaactgctctcatggccgtggtactccgggccgccgcagtggccccgcgcctgcgaggcaggggaggcacaggcggcgctaggcgtttgtcgtgtggggcccggagacgcgccgccaggggcacctcaccgggtcgaagactcagcacagcctggtcccagccacagccaccccccgaggagtatgcgggcgctgacgacgtgagtcaatccccagtcgctgaagaaccgtcctgggtcccatcgcctcgcccaccagtgcctcacgagtccccagaacctccgagtggtcggtccctcgtccaaagggacattcaggcgttcctgaaccagtgtggagcttcgccaggcgaagcccggcattggctgacgcagttccagacctgtcatcacagcgcagacaaaccatttgccgtcatcgaggtcgacgaggaggtgctaaagtgtcagcagggtgtttcctccctggcatttgctctggccttcctgcagagaatggacatgaaacccctcgttgtactggggctgcctgcccccacggcaccaagtggctgtctgagcttttgggaggcaaaggcgcagctggctaaatcctgcaaggttttagttgatgccctgaggcataacgctgccgctgcagtacccttttttggcggaggctcagtgctgagagccgccgagccagccccccatgccagctatggaggtatcgtgagcgtggaaaccgacttactccagtggtgtctggagagtggttcaatccctatactttgtccgatcggggagactgccgctcgtcgtagcgttctgctggatagtctcgaagtgacagcctccctggctaaagctctgcggcccacgaagataattttccttaacaatacgggtggcctgcgcgatagttcccataaggtgctgtcaaacgtgaacctcccagccgatctcgacctggtttgtaacgccgagtgggtgtcaactaaagagcgacaacagatgcgactgatcgtggatgttctgtctaggctgccgcaccatagtagtgccgtgattaccgccgccagcaccctgctgacagagctgtttagcaacaaggggagtggcaccctgtttaaaaacgcggaacgcatgctgcgggtgagatccctggacaaattggatcagggacgcctggtggacctggtaaacgcttcattcggtaaaaaactcagggatgactatctcgcctccctccggccccgcctgcactccatctacgtctccgaggggtacaatgcagccgctatactcaccatggaaccggtcctagggggtacaccgtacttggataagttcgtggtttcatccagcagacaagggcaaggctctggacagatgttgtgggagtgcctgaggcgggatctgcagacactgttctggagatcccgagtgaccaatcctatcaacccctggtactttaagcattcagatggttctttcagcaataaacagtggatctttttttggttcggactggcggacatacgggacagttatgagctggtgaaccatgccaagggtctgcctgatagtttccacaagcctgccagcgatcctggcagc

SEQ ID NO: 17125 - DNA, 1602 bp, synthetic construct
  misc_feature 1..1602: note = source = /note="Description of Artificial Sequence: Synthetic coding sequence"
  source 1..1602: mol_type = other DNA
atggcgactgctctaatggcagtggtgctacgggctgctgccgtggccccccgtctccgaggacggggaggaaccggcggcgccagacgtctctcgtgcggcgccagacgccgtgccgcgcgtggcacaagccccgggcgccgactgagcaccgcctggtctcaaccgcagccgcctccagaagaatatgcgggggcagatgatgtctcgcagtcgccagtcgccgaggagccctcatgggtcccgagcccgcgtccccctgtaccccatgagagcccagaacctccgtcgggtcgttccctggtgcagcgggacatacaagccttccttaatcagtgcggtgcctccccaggcgaggctcgccactggctcacgcaatttcagacttgccatcattctgccgacaaaccatttgccgtaattgaagtggatgaggaggtgttaaaatgccagcaaggcgtaagcagtctcgcgttcgccctcgccttcctgcaacgcatggacatgaagccactggtggtgctcggactaccagcacccaccgcgccctccggctgcctttccttttgggaggccaaagcacagttagccaagtcgtgcaaagtgttggtggatgcattaagacacaatgccgccgccgcggtgcccttcttcggcggcggttcggtgctgagagcagccgaacccgctccacacgcctcttatggaggtatcgtctctgtcgagactgatttgctgcagtggtgcctcgagagcggttcaatacccatcctgtgcccgatcggggagaccgcagcacgccgttcagtccttctagattccctggaggttaccgctagccttgctaaagcattgcgccccacgaaaataattttcttgaacaatacaggaggattgcgggacagttcgcataaggttttgagtaatgtcaacttgccggccgacctggatctcgtatgtaatgcggagtgggtgagcaccaaggagcgacagcagatgcgtctgatagtcgacgtgctgagccgactgccacaccattccagcgctgtcatcaccgcggcctccactttactgaccgagctattcagcaacaagggaagcggtaccctctttaagaatgcagagcgtatgcttcgagttcggtcgctggacaaactcgatcagggacggctggttgacttggtgaatgcttcgttcggcaaaaaactccgcgatgactacctggcgagcctgcggccccgcctccattcgatctatgtgtcggaaggctacaatgcagcggctatcctgactatggaacccgtcttgggtggaacgccctacctggataagtttgtggtgagtagcagcagacagggacaaggaagtggccagatgctgtgggagtgtttgcgccgggatttacaaaccctgttctggcgcagccgggtgaccaaccccattaatccctggtacttcaagcattcagatgggtctttcagtaacaagcagtggatttttttctggtttggccttgcggatatccgagattcctacgaactagtgaaccacgccaagggactgccagattcatttcacaagccagcatcggacccaggctct

SEQ ID NO: 17126 - DNA, 1602 bp, synthetic construct
  misc_feature 1..1602: note = source = /note="Description of Artificial Sequence: Synthetic coding sequence"
  source 1..1602: mol_type = other DNA
atggctaccgcattgatggccgtagtgctccgtgctgccgctgtggctcccagacttagaggtcgcggcggcacaggcggagcacgtcgtctttcttgcggcgctcgccgccgtgctgcaaggggcacaagtcctggtcgcaggctgtcaacagcctggtctcaacctcagcctcctcccgaagagtacgccggagccgatgatgtttcccagagccccgtggctgaagagccctcttgggtccccagcccacgtccccccgtgcctcacgagtcccctgaacctccttctggtagatcattggtgcagcgtgacatccaggccttcttgaaccagtgtggcgcttccccaggtgaggcaagacactggcttacacaattccaaacttgccaccactctgctgataagcctttcgctgttatcgaagtggacgaagaagtccttaagtgtcaacagggagtctcttctctcgccttcgcccttgcattcctgcagagaatggacatgaaaccactcgtcgtcctgggcttgcccgccccaactgctccttccggttgtttgtccttctgggaagctaaagctcagctcgctaagtcctgcaaggttctcgtggatgccctgcgccacaacgccgccgcagcagttcccttttttggcggcggttccgttttgagagccgctgagccagcacctcacgcttcttacggaggaattgtttctgtcgagacagatctgctgcaatggtgcctcgagtcaggctctatccccatcctgtgccctatcggagaaactgccgcccgtcgttccgtgcttctggactcactcgaggtgacagcatctttggctaaagccctgaggcctacaaagatcatcttccttaataatacaggcggccttcgcgatagctcccacaaggttctctcaaatgtgaatctgccagctgacctggacctggtctgtaatgccgagtgggtgagtactaaagaaagacagcaaatgcgcttgatcgtggatgtactgtctaggctccctcaccacagttccgctgtcatcactgccgcatctaccctgctgaccgaactgttctctaataagggcagcggcactctctttaagaacgcagagcgtatgttgcgcgttagaagcctggacaagttggatcaaggtcgtctggtagacctggtgaacgctagttttggcaaaaagctgcgtgacgattacctggccagcctccgcccccgtcttcattctatctatgtcagtgagggatataacgctgccgccatcctgactatggagcccgtcttgggaggcaccccttatctggacaaattcgtggttagtagcagtcgccagggacagggcagcggacagatgctgtgggaatgtctgcgcagggacctgcaaacacttttctggcgttcccgtgtgactaacccaatcaacccctggtatttcaagcatagcgatggttctttttctaacaaacagtggatcttcttctggtttggattggccgacatcagagattcctacgaactggtcaaccacgctaaaggtcttcctgactccttccacaagcccgccagcgatcccggaagc

SEQ ID NO: 17127 - DNA, 1602 bp, synthetic construct
  misc_feature 1..1602: note = source = /note="Description of Artificial Sequence: Synthetic coding sequence"
  source 1..1602: mol_type = other DNA
atggccacagcactcatggcggtcgtcctgcgggcagctgcagtggctccccgcttgagaggaagaggaggcactggtggcgcccggcggctgtcttgtggagcacggagaagagctgcacgagggacttctcccggcaggagactctctactgcatggagccagccccaacctcctcccgaagaatatgcgggagcggacgatgtgagccagtctcctgtcgcagaagaacctagttgggtacctagccccagacctcccgtgccccacgagtcccccgagccgccttctgggcggtcactggtgcaaagagacatccaggcattcctgaaccagtgcggcgcatcaccaggcgaagcacgacactggctgacccagttccagacctgtcatcacagtgctgacaagccttttgccgtgatcgaggtagacgaagaagtgctcaaatgccagcagggcgtgagcagcctggcgtttgcccttgcgttcctgcaacgcatggatatgaagcctcttgtcgtgctcggactgcccgcgccgaccgcccccagcgggtgcctgtccttttgggaggctaaagcccaacttgctaagtcctgcaaagttctggtggatgcactccgtcacaacgccgcggctgcagttccattttttggggggggatcagtactgcgcgcagctgagcccgccccccatgcgagctacggcggaatagtgtccgtggagaccgacctgctgcagtggtgccttgagagtgggagcatcccaatactgtgccccattggagagaccgctgcccggcgttccgttcttcttgacagcctggaggtcacggcttcactggccaaggctctgcgtcccacaaagatcatctttctgaacaacactggtggcctgcgggattcttctcacaaagtgctgagcaacgttaacctgcctgcagacctggatctggtttgcaacgccgagtgggtgagcaccaaggaaagacagcaaatgaggctgatcgttgatgttttgagcagactgccacaccattcgagcgcggtgatcactgccgcgtcaacactgttaacggaactattctccaataaggggtctggcaccctgtttaaaaatgctgaacggatgttgagggttcgttccctggacaaactggaccagggtcggctggtggatctggtaaatgcatccttcggcaaaaaactgagggatgattatctggcatccctacggcctaggctgcactctatctatgtttcagagggttacaatgctgcagccattctgaccatggaacctgtattaggaggaaccccgtatctcgacaaatttgtagtttcatcatctcgccagggccaaggatcaggccagatgctgtgggagtgtctgagacgcgacctgcaaaccctgttttggagaagccgcgtgactaatccaataaacccttggtatttcaagcatagcgacggcagcttctcaaataaacagtggatttttttttggtttgggctggctgacattagagattcctacgagcttgtgaatcatgccaaaggccttcccgattccttccacaagcctgctagtgacccgggaagc

SEQ ID NO: 17128 - DNA, 1602 bp, synthetic construct
  misc_feature 1..1602: note = source = /note="Description of Artificial Sequence: Synthetic coding sequence"
  source 1..1602: mol_type = other DNA
atggcaaccgctctgatggctgtggtcctgagagccgcggcagtggcaccacgacttcgaggacgtggaggcaccggaggcgcgcgtagactgtcttgtggggccaggaggcgtgccgcccgaggcacaagtcctgggaggaggcttagcactgcttggtcacaaccacagcctccacccgaggagtacgcaggcgccgacgacgtttcacaatcaccggtggcggaggaaccctcatgggtgccgagcccgcgcccccctgtgcctcatgaatcccctgagccccccagtgggaggtcattggtccagcgtgatatccaggcattccttaatcaatgcggcgcttcgcctggtgaggccaggcattggctcactcaattccaaacctgccatcattcggctgacaaacccttcgccgtgattgaggtcgatgaggaagtgcttaaatgtcagcagggagtttccagcctggctttcgccctggcattcttgcagcgcatggacatgaaacccctggtcgtcctcgggcttcctgcacctacagctccctctggatgtctctccttctgggaggcaaaagctcaactcgccaagtcttgcaaggtcctggttgacgcactgcggcacaatgccgctgcagctgtaccattttttggaggtggatctgtcctcagggcagctgagccggctccacacgcttcctatgggggaatcgtctctgttgagactgacctcctccagtggtgcctggagagtggaagcattcccatcttgtgtcccataggggaaactgccgcgagacgtagcgtgctcctcgattccttggaggtgaccgcttcactggcaaaagccctgcgtcctaccaaaataatattcctaaataataccgggggtctccgcgatagttcacataaggtcttatcgaatgtgaaccttccagccgatctggacctggtttgcaatgcggaatgggtgtccactaaggaaaggcaacagatgaggctgatagtggacgttctgtcaaggttaccacaccattcaagcgctgttatcacggcagcttcaacccttctcactgaactcttctccaacaagggctccggcacattattcaagaatgccgaacgaatgctccgggtccgatcactagacaagctggatcagggtaggctagtcgaccttgtgaatgcgtccttcggaaagaaacttagggatgactatctggccagcctgcgaccgcgtcttcattcgatctacgtcagcgaaggttacaatgccgcagcgatcctgaccatggaacccgtgctcggcggtacaccttatcttgacaagttcgtggtcagctctagtagacagggtcaggggagtggccagatgctgtgggaatgtctgagaagggatctgcagaccctgttctggagaagtagagtgaccaatcccatcaacccgtggtatttcaagcacagtgatggctcatttagcaacaaacagtggatatttttctggtttggactcgccgatattagggactcctatgaattagtgaaccatgcaaagggactgcccgactctttccacaagcccgcctcagaccctgggtcc

SEQ ID NO: 17129 - DNA, 1602 bp, synthetic construct
  misc_feature 1..1602: note = source = /note="Description of Artificial Sequence: Synthetic coding sequence"
  source 1..1602: mol_type = other DNA
atggcgaccgctctgatggctgtggtcctccgtgccgcggccgttgcgccacggttgagaggaagaggtggcactggtggagcacggcggctgtcgtgtggggctcggagacgggccgccaggggaacgtcccctggtcgccggttgtcgaccgcgtggagtcagccgcagccgccccctgaagagtatgccggggctgacgatgtgtcccagtcgccggtcgcggaagaaccatcctgggttccgtcgcctagacctccggtgccacacgaatcgccagagccgccctctggaaggtccctcgtgcaacgcgatatccaagccttcctgaaccagtgcggcgcctccccaggagaggccaggcactggctgacccagttccagacttgtcaccatagcgccgataaaccatttgccgtgattgaagtggacgaggaggtgctgaaatgccagcagggagtctcttcactggcgtttgctctggcattcctgcaacgcatggatatgaagccgctggtggtcctgggcttgccagcaccaaccgccccgagcggatgcctgtccttctgggaagcgaaggcacaacttgccaagtcgtgcaaggtcctcgtggatgccttgaggcataacgccgccgctgcggtcccgttcttcggaggaggaagcgtcttgagagcggcagagccagcaccgcatgcgtcatacggtggcatcgtgtcagtggagactgacctgcttcagtggtgcctcgagtcgggatcaatcccgatcctctgcccgatcggagagacggccgctcgccggtcagtgctgctcgactcgctggaagtgacggcaagcctggctaaggccctgcgaccaaccaaaatcattttccttaataacaccggggggctccgggattcctcacataaggtcctgtccaatgttaaccttcctgcggatctggatcttgtctgtaacgccgaatgggtgagcactaaggaacgccaacagatgcgcctcatcgtggatgtgctgtctcgcctcccgcaccactcaagcgcagtaatcactgccgcctcgaccctgcttaccgaactgttttcgaacaaaggctccggaaccctctttaagaatgcagaacgcatgcttcgggtgagatccctggacaagttggaccaaggacgcctcgtcgacttggtgaacgctagcttcggaaagaagctcagagacgactacctggcctcactgcgcccgcgcctccactcgatctacgtgtccgagggctacaatgccgcagcaattctcactatggagccggtgctgggaggcactccgtacctggacaaattcgtggtgtcaagctcgcggcagggacaagggagcgggcagatgctgtgggaatgcctccggcgcgacctccagaccctgttctggcgatccagagtgactaatcccatcaacccctggtacttcaagcactcggacggaagtttctcgaacaagcaatggatctttttctggtttggcctcgctgacatccgcgattcctacgaactggtcaatcatgcgaaaggtctgcctgacagcttccacaagcctgcgtccgaccccggcagc

SEQ ID NO: 17130 - DNA, 1602 bp, synthetic construct
  misc_feature 1..1602: note = source = /note="Description of Artificial Sequence: Synthetic coding sequence"
  source 1..1602: mol_type = other DNA
atggccacagcactgatggccgtagtgctgcgcgctgccgcagtggcacctcgcctgcggggaaggggaggaacaggaggcgcaaggcgactgagctgcggggcccggcgaagggctgcacgcgggaccagcccagggcgccggctgagcaccgcgtggagccagccccagcccccccctgaagaatatgccggcgcggacgatgtttcacagtcccccgtggctgaggaacccagctgggttccatcccccagaccgcccgtcccacacgagagtccagaaccacctagtgggaggtctcttgtgcaaagggacatccaggcgttccttaatcagtgtggcgccagccccggcgaggcacgccactggctcacccaattccagacctgtcatcacagtgctgacaagccttttgcagtgatcgaggtggatgaggaagtgctcaaatgccagcagggagtcagcagtttggcctttgcgcttgcttttcttcaacgcatggacatgaagccactggtggtgctggggctgcccgcacccaccgctccctcaggctgcctgagcttttgggaggctaaggcacagctggcaaagtcttgcaaagttctggtagacgctcttagacataacgccgcagcagccgttccattcttcggaggggggtctgtcctgagggctgctgagcctgccccgcacgcttcctacggtggaatcgtatctgtggagaccgatctgctccagtggtgcctcgagagcggatccattccaattttatgtccaatcggggagacagccgccaggcgcagcgtgttactggactcactcgaggtcacggcctcgcttgccaaggctctgaggccaactaagattatcttcctgaataataccgggggcttaagggactcttcgcacaaagtcttatccaacgtaaacctacctgctgacttagaccttgtttgcaacgcggagtgggtttctacaaaggaacgccagcaaatgcgactaatcgtggacgtcttgagtcggttgccccaccactcatccgcggtgatcactgctgcctccactctgctgactgaattattcagtaacaaaggcagcggcactctcttcaagaatgctgagcggatgttgcgggttcgctctctcgacaagttggatcaggggcggctggtggatttggtgaacgcttcatttggaaagaaactgagagatgattacttagcctcattgagacctcggttgcatagcatctacgtcagtgagggttataacgccgctgcgatactcaccatggagccggtgcttggcggcaccccttacctggacaaattcgtggtgtcttccagccggcagggccaggggagcggccaaatgctctgggaatgtctgagacgggacttgcagacactgttttggcgcagtcgggtgacaaacccaatcaatccgtggtatttcaagcacagcgatggctccttttccaataaacaatggattttcttctggttcggccttgccgatatacgcgattcttacgaactggtcaatcacgctaagggactccctgattcattccacaagcccgctagcgaccctgggagt

SEQ ID NO: 17131 - DNA, 1602 bp, synthetic construct
  misc_feature 1..1602: note = source = /note="Description of Artificial Sequence: Synthetic coding sequence"
  source 1..1602: mol_type = other DNA
atggccacggccttgatggccgtggtactgagagctgccgcggtagctcctcgcttgagaggaaggggcggaaccgggggagcaagacggcttagctgcggggcccgaaggcgagctgctagaggtacctcccctggacggcggctgagcactgcttggtcacagccccagccgccacccgaagagtacgccggcgccgatgatgtctcacagtcccccgtggcggaggaaccctcttgggtaccctccccacgtcccccagttccccatgagtcacccgaaccgccatctgggaggagcttagtccagcgagatatccaggccttcttaaatcagtgtggggcctccccaggcgaagccaggcactggctgactcagttccaaacttgccaccactctgctgataaaccattcgccgtgatagaggtcgacgaggaggtgctcaagtgccaacagggcgtgtcctcactggcattcgcactagcattcctgcagaggatggacatgaagcctctggtggttcttggcctccctgccccaacagccccttccgggtgtctgagcttctgggaagccaaagcccagctggccaaatcatgtaaggtcctcgtggacgccttgcggcataatgctgccgccgcggtgcccttctttggaggcggctctgtgctgagagcagcagagcccgctcctcacgctagctatggaggaatcgtcagcgtggaaactgacctgctgcaatggtgcctagagtctggaagcatccctattctgtgccccatcggcgagacagcagctagaaggtctgtgctgctggactccctggaggtcacggcctccctcgcaaaagcgctcaggcctacgaagatcattttcctgaataatactggcggtcttagagattcctcacacaaagtgctgtccaacgtgaacctgcccgcggatctggatctggtgtgtaacgccgaatgggtgtcgactaaggaaagacagcagatgagactgatcgtggatgttctgtctagacttccccaccatagtagcgccgtgatcactgcagcttccacactgttaactgagctgttctccaacaaggggtccggaaccctgttcaagaacgcggagcggatgctgagagtgagatctctggataagctggaccagggccggctggtagatctcgtgaatgcgtcattcggaaaaaaactgcgggacgactacctcgccagcctgaggcctagattacattccatctacgtatcggaaggatacaatgccgccgctattttaaccatggagcctgtgctgggcggaactccctacttggacaaattcgttgtcagctcttcccggcaggggcagggaagtggacagatgctctgggagtgtctgagacgcgatttgcagacactgttttggaggtcgcgcgttacaaatccaatcaacccatggtacttcaaacactcggacgggagcttcagcaataagcagtggatttttttttggttcggcttagcggacatccgggactcatacgagctcgtgaaccatgctaagggactccccgactcttttcataagcctgcaagcgaccccggctcc

SEQ ID NO: 17132 - DNA, 1602 bp, synthetic construct
  misc_feature 1..1602: note = source = /note="Description of Artificial Sequence: Synthetic coding sequence"
  source 1..1602: mol_type = other DNA
atggccaccgcgctcatggccgtcgtgctcagagccgctgccgttgctccaagactgaggggccggggaggcacaggcggtgcccggagactaagctgcggggcgcggcggcgcgccgctagaggaacttcaccagggcggcggctcagcaccgcatggtcccagccacagcctccaccagaagaatatgccggtgccgacgatgtgtcgcagtcccccgtggcagaggagcctagctgggtgcccagccctcgcccccccgtgccacatgagagccctgagcctccaagcggacggtccttggtacagcgagatatccaggcctttcttaaccaatgcggagcaagccctggagaggccagacattggctcactcaattccagacgtgccatcacagtgccgacaaaccgttcgcggtcatcgaggtcgatgaggaggtcttgaaatgccagcagggtgtgagcagtctcgccttcgcactagcttttctccaacgcatggacatgaagccactggtggttctgggactccctgcccctacagccccctctggttgtctgtcattctgggaagccaaggcgcaactggccaagagctgtaaggtccttgtagacgccttacgtcacaacgccgctgctgcggttccattcttcggtgggggtagtgtgctgcgggcggcggaacccgcgcctcatgcttcttatggcggcatcgtcagcgtggagaccgaccttctgcagtggtgtctcgagtccggatctatccctattctgtgtcccatcggcgaaactgctgcccgtcgctccgtgcttttagatagcctggaggtgaccgcaagcctcgctaaagcgctgcgccctaccaagattatctttttgaataatacgggagggctgcgggattcttcgcacaaagtcctcagcaatgtgaatctccctgcggatctggatctggtgtgcaatgctgagtgggtgtcaactaaggagaggcagcagatgcgcctgattgtagacgtcttgtcgagactgccccaccatagctctgccgtgatcactgccgcaagtacattgctgacagagctatttagtaataagggtagcggcacccttttcaagaacgcagagcgcatgctcagagttcgcagcctggacaagctggaccagggccgcctggttgacctcgtgaatgcttcttttggaaagaagctaagagacgactacctcgctagcctgaggcccaggctgcactcaatatacgtgagtgagggatacaatgccgctgcgattcttaccatggagcctgtgcttggaggtactccatacctggataagttcgttgtgtccagctcgagacagggacagggcagcggacagatgctgtgggagtgtttgcggagggatctgcagaccctgttctggaggtccagagttaccaacccaatcaatccatggtacttcaagcactccgacggttctttcagcaacaagcagtggatttttttctggtttggcctggctgacatcagagattcctatgagctggttaatcacgccaaggggctgcctgatagcttccataaacctgcctcggacccagggtca

SEQ ID NO: 17133 - DNA, 1602 bp, synthetic construct
  misc_feature 1..1602: note = source = /note="Description of Artificial Sequence: Synthetic coding sequence"
  source 1..1602: mol_type = other DNA
atggcaacagcactgatggcagttgtgttacgagcggcggctgtcgcaccaagactccggggcaggggtgggactggcggggctaggcgtctgagctgcggagcacggcggcgcgcagccagaggaacctcccccgggcgtaggttgtccacagcttggtcacagccccagccgcccccggaggaatacgctggggccgacgatgtctctcagtctccagtcgcggaggaacctagctgggtcccatcacccaggccccccgtgccacacgaatcacccgaacccccctctggccggagcctggtacagcgcgatatacaggcgttcttaaatcagtgcggggccagtccaggcgaggcccgtcattggcttacccagttccaaacgtgtcatcattcagccgataaacccttcgcagtgattgaagttgatgaggaagtccttaagtgccagcagggcgtcagttccctagcttttgccctcgcatttttgcaaagaatggacatgaagccactggtggtcctgggcttgcccgcacctacggcaccgtccggctgtctgtcattctgggaagcgaaggcgcagctggcaaaatcttgcaaagtacttgtggacgctctgcggcacaacgcagctgcggcggtgccttttttcgggggcggctccgtcctccgcgctgcagagccggctccccatgcaagttacgggggaattgtgagcgttgaaaccgatctcctccagtggtgcttggagtctggatctatccctattctgtgccctatcggcgaaaccgctgccagaagaagcgtgttgctcgactctttggaagtgaccgcatccctggcgaaggctctaagacccaccaagatcatcttcctcaacaacaccggtggactgagggattccagccacaaagtgttgagcaatgttaacctacccgcggacttggacctggtgtgtaacgcagaatgggtttctaccaaggagcgccaacagatgaggctcattgttgacgtactgtctcgactgcctcatcactcttccgctgttatcaccgcggccagtaccctactcacagagctgttctctaacaagggctctggcaccctgtttaaaaacgccgagaggatgttacgcgtgcgttcactagacaagctggatcagggcagactcgtggacctggtcaacgcatcctttgggaagaagctgagggacgactatctcgcctctttaaggcctcggctgcactctatctatgtgagcgaaggatacaatgcagccgctatcttgacaatggaaccagtactgggtggcacaccctacctcgacaagttcgtggtctcctcttctcggcagggccagggatctggccagatgctatgggaatgcctgcggcgggatctgcagactctattctggcgctctagagtgaccaaccccattaatccctggtactttaagcacagtgacgggtcctttagtaacaaacagtggattttcttctggttcggcctggcggatatcagagatagctacgagctcgtgaaccatgctaagggactgcccgactctttccacaaaccagccagtgatccaggttct

SEQ ID NO: 17134 - DNA, 1602 bp, synthetic construct
  misc_feature 1..1602: note = source = /note="Description of Artificial Sequence: Synthetic coding sequence"
  source 1..1602: mol_type = other DNA
atggccacagcactaatggccgtcgtcctcagggctgcagcagttgcacccagattgaggggaagaggggggactggaggtgctagacgcctttcgtgcggagctcgccgaagggctgctcggggaacatcgccaggccgacggttgagcactgcatggtcgcagcctcagccgccccctgaggagtacgccggagctgacgatgtgtcccagagtcccgtggctgaagagccatcatgggtgccttcgccccgaccacccgtcccgcacgagagcccagaacccccgtctgggagatcactcgtgcagagggacatccaagcctttttaaaccagtgtggcgcctctccgggagaggctcgccactggctgacccaattccagacctgccatcactcagccgacaagccttttgccgttatcgaagttgacgaggaggtgttgaaatgccaacagggggttagtagcttggctttcgctctcgcattcctccagcggatggacatgaagccactggtagtgttaggcttgccggcccctaccgccccgagtggctgtctgtccttttgggaggccaaagcccagttagcaaagtcttgcaaagtgctagtggatgcgctgcggcataacgcagctgcagccgttccctttttcggaggcggtagtgtgctacgcgcggctgaaccagcaccgcacgcatcttacggtggaatagtgagcgtggagactgatctgctccagtggtgcctggaatccgggtcgattccaatcttgtgccccattggagagacagccgcccgcaggtccgtgctactcgacagcctagaggttacagctagcctcgccaaagccctgcgaccaactaaaattatcttcctaaataatactggaggcctccgcgactcctctcacaaagtcctttccaacgtcaatctacctgctgacctggatcttgtgtgtaatgccgaatgggtgtctacaaaggagagacaacagatgaggctcatcgtggacgtgctgtcacgccttcctcaccactccagtgctgttattaccgctgccagtacactgctgaccgaattgtttagcaacaagggctcagggacactgttcaagaacgcggagaggatgctgcgcgtgaggagtctggataaactcgatcaaggtagactcgtggacctcgtaaatgcctcctttggtaagaagctacgggacgattatttggcatctctgaggccgagattacactcgatttacgtaagcgagggctataatgccgcggcgatcctgactatggaaccggtcttaggagggactccctacctcgacaagttcgtggtgagctcttcccgccaggggcaaggctcgggacaaatgctctgggaatgcctcagacgagatcttcagacgctattttggaggtcccgcgttactaaccctataaacccctggtactttaagcactctgacggctccttttccaacaaacagtggatctttttctggttcgggttggcggacatccgggacagctacgagctagtgaatcacgcaaagggactgcccgatagcttccataaaccagcttctgatcctgggagt

SEQ ID NO: 17135 - DNA, 1602 bp, synthetic construct
  misc_feature 1..1602: note = source = /note="Description of Artificial Sequence: Synthetic coding sequence"
  source 1..1602: mol_type = other DNA
atggccactgcactaatggccgtggtgctgagagctgccgcggtggccccaaggctgagaggcaggggcggcacaggcggcgctaggcggctgtcttgcggtgccagaaggcgcgcagctcgtggtaccagtcctggacgaagattaagcaccgcctggtctcagcctcagcctcccccggaggagtacgccggggcggacgacgtgtcccagtcccctgtggcagaggaacccagttgggtccccagtcctagaccgcctgtgcctcacgaatctcccgagccacctagtggaagatccttagtacagcgggatatacaggccttcttaaaccaatgtggcgcctcaccaggggaggccaggcactggctcacccagttccagacgtgtcaccactctgccgacaagccattcgctgtcatcgaggttgatgaagaggtgcttaaatgtcaacaaggagtgtcaagtctggcctttgctctggcattcctccaacgcatggacatgaaacccctcgtggtgcttgggctacctgcccctaccgcgcccagcggctgccttagcttctgggaggctaaggcccagcttgccaagtcctgcaaggttcttgtggacgctttgcgacataatgctgccgccgctgtgcctttttttggcggtggttctgtgctaagggccgcagagccggcgcctcacgcatcatacggcggtattgtgtctgttgagaccgacttattacagtggtgtttggagtccgggagcatacctattctctgtcccattggggagaccgcggcacggcgctccgtgctcctggattctcttgaagtgacagcgtcactcgctaaagccctgcgtccaaccaaaattatctttctcaataacaccggaggactgagggacagttctcacaaggtgctgagtaatgtcaacttgcctgcggatctggatcttgtctgtaacgcagagtgggtatcaaccaaggagcgtcagcaaatgagacttatcgtcgatgtcctaagtcgattaccacatcattcctcagccgtgatcacagcagctagcaccctgcttactgaactgttttctaacaagggcagcgggactttgtttaaaaacgcggagcgcatgctcagggtgcgttccctggacaagctcgatcaaggacgcctcgttgacctcgtcaacgcctcattcggcaaaaagctgagagacgactacctggccagccttcgccctcgtcttcactcaatctacgtgtcagagggctacaacgcggctgctatcttgacaatggagccagtcctgggggggacaccatatctcgacaaatttgtagttagcagctcaagacagggtcagggcagtggacagatgttatgggaatgcctccggcgggatctgcaaaccctcttctggaggagccgggtgacaaatccgatcaacccttggtacttcaagcattctgacggaagcttctccaacaagcagtggattttcttctggttcggcctggccgatatccgggatagctacgaactcgtgaatcatgccaaggggttacctgattcattccataaacccgctagtgaccctgggtca

SEQ ID NO: 17136 - DNA, 1602 bp, synthetic construct
  misc_feature 1..1602: note = source = /note="Description of Artificial Sequence: Synthetic coding sequence"
  source 1..1602: mol_type = other DNA
atggccactgccctcatggcagtcgtcttgcgggcggccgccgtcgccccaaggcttcgaggccggggtgggaccgggggcgccagaaggctgtcttgtggggccaggagaagagcagctcggggtacctctcccggtagaaggctgtctaccgcttggagtcagccacaacccccaccagaggaatacgccggcgcggacgatgtatcacagagtccggtagcggaggaaccctcttgggtgccatctcctcgaccccccgttccccacgaaagtcccgagcctccctccggccggtctctggttcagcgagatattcaagcctttttaaaccagtgtggcgcctctccgggagaagcaaggcactggctcacccagtttcagacgtgtcatcacagtgctgataaaccattcgcagtcattgaagtcgacgaggaggtgctgaaatgtcagcagggagtgtccagcctagcatttgctctcgccttcctacaaagaatggacatgaaaccattagtggtacttggccttcctgcccctaccgccccgagtgggtgtctgtcgttctgggaagccaaagcccagctggcaaagagttgcaaagtacttgtcgatgccctgaggcacaatgcggcggcggctgtgcccttctttggagggggaagcgtcctgcgtgctgcggagcctgctccccacgccagttatgggggaatcgtttctgtcgagacagatctcttgcagtggtgtctcgagtccggttctatcccaattttgtgcccgatcggcgagacagccgctagacggtcagtcctgctagactctttggaggttacagccagcctcgcgaaagctctcagaccaaccaaaattattttcctcaataacaccggggggctccgggactcctcacacaaagtgctgagcaacgtgaacttgcctgcagatcttgacctcgtgtgtaatgcagaatgggtgtcaaccaaggagaggcaacagatgcggctgattgtagatgttttatccagactgcctcaccattcttcagcagtgattacagccgcctcaactctactgactgagctgttttctaacaaaggcagcgggacactgtttaagaatgcagagcgcatgctgcgtgtgaggtctctggataagctggaccaggggcgcctcgttgatctcgtcaacgcaagctttgggaagaaactgcgagatgattatctcgcgtctctgcgaccgagactccactcgatatacgttagcgagggatataatgccgcagctatcctcactatggagccagtgttaggaggcactccgtatcttgacaaattcgtggtgtcttcatctcgacagggacaaggcagtggtcaaatgctgtgggagtgcctcagaagggatctacagacattgttctggagatctcgagtaactaaccctataaacccctggtacttcaagcacagcgatgggtcattttcgaacaagcagtggatatttttctggtttggcttggcagacattcgcgacagctacgagctggtgaatcacgctaagggcctccccgacagcttccataagcctgcttctgacccaggctca

SEQ ID NO: 17137 - DNA, 1602 bp, synthetic construct
  misc_feature 1..1602: note = source = /note="Description of Artificial Sequence: Synthetic coding sequence"
  source 1..1602: mol_type = other DNA
atggcaacggcgctgatggctgttgtactgcgcgcggcagcggttgcccctagattgcgaggccgtggcggaacgggtggggccagacgcctcagctgcggagccagaaggcgagctgcgcgtggaaccagcccaggtcgccgtctgtcaaccgcatggagccagccacaacctccgcctgaagagtatgccggtgcggatgacgtgagccagtcccctgttgccgaggaaccaagctgggtaccttccccgaggcctccggtccctcatgagtccccagagcctccaagtggcaggagtctggttcagcgcgatatacaagcttttctgaatcagtgtggagcttccccaggcgaagcccgtcactggttgacccaattccagacgtgtcatcattcagcggataaaccttttgccgtcatcgaagtggacgaggaggtcttgaaatgccagcaaggtgtgagcagcctcgccttcgcgctagctttcctgcagcgcatggacatgaaaccattggtcgttctgggcctgcctgctccaacagccccatctggttgcctgtccttctgggaagcaaaagctcagttagcaaaatcatgtaaggttttggtggacgccctgcgtcacaatgctgcggctgcagtcccattctttggcggtggttcagttctgcgtgcagctgaaccggcgccgcatgcgtcgtatggtggcatcgtcagtgtggaaaccgacttgctgcaatggtgccttgaatccggaagcatcccgatcctgtgtcccatcggcgaaaccgcggctcggcgcagcgtactgttggatagcctggaggttacggcaagccttgcaaaggcactgcgaccgaccaagattatttttctgaacaatacgggtggtctgcgtgactcctctcataaagtgctgagcaacgtaaacctgcctgctgaccttgatctggtgtgtaacgctgaatgggtctccaccaaggaacgccagcagatgagattgatcgttgatgtgctgtcccgactgcctcaccatagcagcgcggtaatcactgctgcttccacgctgctgactgaactgttcagcaataagggttccgggaccctgtttaagaacgcagaacgcatgctgcgggtacggagcctggataaactggatcagggtcgcttggttgacctggtgaacgcctcgttcgggaaaaagctgcgagacgactatctcgctagtcttcgccctcggctccacagtatttacgtgagcgagggttataacgcagcggccatactcaccatggaaccggtgctgggtggtaccccatacctggacaagtttgttgttagttcgtcccgtcaaggccagggcagcggccagatgctgtgggagtgcctgcgccgtgacctccaaaccctcttctggcgctctcgagtcacgaacccaataaatccttggtacttcaagcactcagacggatccttttcgaataagcagtggattttcttctggttcggcctggcggatataagagactcttacgaattagttaaccatgccaagggtctgccggattcgttccacaagcctgccagcgatccaggtagc

SEQ ID NO: 17138 - DNA, 1602 bp, synthetic construct
  misc_feature 1..1602: note = source = /note="Description of Artificial Sequence: Synthetic coding sequence"
  source 1..1602: mol_type = other DNA
atggctaccgcgctaatggctgtagtgctgagagccgcggctgttgccccacgcttgaggggccgcggggggaccggaggagcccggcgactgtcttgcggcgcccgaaggcgggccgcgcgaggaacttccccagggcggcgcctctcaacggcctggagccaaccccaaccacctccagaagaatacgcaggcgcggacgatgtgagccagagtccggtagccgaggagccctcatgggtgccttcccctcgtcccccggtgccacacgaatcacctgaaccaccaagtgggagaagcctggttcagagggacatccaggcattccttaaccagtgtggggcttctcctggagaagctcgacactggctgacccagttccagacgtgccaccattcagcagataagccattcgcagtgatcgaagttgatgaggaagtgctgaagtgccagcagggcgtttccagcctcgcatttgccctagcttttttacaacgtatggacatgaaacctctagtggtactaggccttcccgcccccacggccccgtcaggatgcctaagtttctgggaagcaaaggctcagctggcgaagtcttgcaaggtgctggtggatgcccttcgccacaatgccgcagctgcagttccgttctttggtggaggctccgtgctacgggctgctgagccggccccacacgcgtcttacggggggatcgtaagtgtggagacagacctcctacagtggtgcttggaatctggaagcattccgatactgtgcccgataggggagacagccgcacgcaggagcgtgcttttggattccctcgaagttacagccagcttggccaaggccctaaggcctacaaagataatatttctgaataatactggcgggctgcgcgacagctcgcataaggtactatctaatgtgaacctgccggcggatctggacttggtgtgcaatgccgaatgggtatcgaccaaagagagacagcagatgcgattgatcgtagatgttctgagcaggcttccacaccatagttctgcggtgatcacggccgcctcaaccttattgaccgaactcttctcaaataagggcagtggtacattattcaaaaatgccgaaaggatgctgcgcgtgagaagtcttgacaaattggaccaagggcgcctggtggacttggtaaatgcctcatttgggaagaagctgagagatgactacctggcctctttacggccaagactgcactctatctacgtcagtgaagggtataacgcggccgctatcttgactatggagcctgtgctaggaggcaccccctatctggacaagttcgtggtgagcagctcacgccagggccagggaagcggacagatgctgtgggagtgtctccgccgcgatctgcagactctgttctggcgaagcagagtgactaaccctataaatccatggtattttaaacacagcgatggtagtttctcaaacaaacagtggattttcttttggtttggcctggcagatattcgggattcttatgaactggtcaaccacgccaaagggttgccggattcatttcacaaacctgccagtgaccccgggagt

SEQ ID NO: 17139 - DNA, 1602 bp, synthetic construct
  misc_feature 1..1602: note = source = /note="Description of Artificial Sequence: Synthetic coding sequence"
  source 1..1602: mol_type = other DNA
atggcaactgcattaatggcagtagtactccgagctgcagctgttgctccaaggttaagaggaagaggaggaacaggaggtgctagaagattaagttgtggagctagacgtagagctgcaagaggaactagtcctggtagaagattatctacagcttggtcacaacctcaaccaccacctgaagaatatgctggtgctgatgatgtaagtcagtcacctgttgcagaagagccatcatgggttccaagtcctagacctccagttccacacgaatctccagaaccacctagtggtagatcattggttcaaagagatattcaagcatttcttaatcaatgtggagcatccccaggagaagcaagacattggttaactcaatttcaaacttgtcatcattcagcagataaaccattcgctgtaattgaagttgatgaagaagttttaaagtgtcaacaaggagttagtagtctagcttttgcacttgcatttttgcaaagaatggatatgaaaccacttgtggtattaggattaccagctccaacagcaccaagcgggtgtctctcattttgggaagctaaagctcaattagcaaaatcttgtaaagtcttagttgatgcattaagacataatgctgctgctgctgttccatttttcggaggaggatcagtgcttagagctgctgaacctgctccacatgcttcatatggaggtatagtatcagtagaaacagaccttttacaatggtgtttggaatcaggatctattccaatactttgtcctattggagaaacagctgctagacgatcagtattattagattcattagaagttacagcatctttagctaaagcattaagaccaacaaaaattatttttctcaataatacaggaggattaagagatagttcacataaagtacttagtaatgttaatcttccagctgatcttgatttggtatgtaatgcagaatgggtttcaacaaaagaacgacaacaaatgagattaatagtagatgttctttcacgtcttccacatcattcatcagctgttattacagcagcatcaacacttttaactgaattattttcaaataaaggaagtggaacactttttaaaaatgccgaaagaatgcttagagttagatcacttgataaattagatcaaggtagacttgttgatttagttaacgcatcatttggaaagaaacttagagacgactatttagcttctctaagaccaagattacattccatatatgtatcagaaggatataacgcagcagctattttaacaatggagccagttcttggtggtactccatatttagataaatttgttgtttcttcatcaagacaaggacaaggatcaggacaaatgttatgggagtgtctaagaagagatttacaaacattattttggagatcaagagtaactaatcctataaacccatggtatttcaaacattcagatggatctttttcaaataagcaatggatttttttttggtttggtcttgctgatattagagattcttatgaattagttaatcatgctaaaggtttgccagattctttccataaaccagcttcagatcctggatca

SEQ ID NO: 17140 - DNA, 1602 bp, synthetic construct
  misc_feature 1..1602: note = source = /note="Description of Artificial Sequence: Synthetic coding sequence"
  source 1..1602: mol_type = other DNA
atggccactgcactgatggcggttgtcctccgggccgcagcagttgcccctagacttcgcgggaggggagggacggggggtgcccgccgcctgtcctgtggcgcccggcgacgcgcagcgagaggcacgagcccagggcgccggctctcaactgcctggtcgcaaccccaacccccacctgaggagtatgctggggctgatgatgtgagccagagcccagttgccgaagagccgtcatgggtcccatctccccggcctcctgtgccccacgagtctcctgagccacctagcggccgttccctggtgcagagggacatacaggcctttctcaatcaatgcggagcatccccgggtgaagctcggcattggcttacccagttccagacttgtcatcattccgccgataagccattcgccgtgatcgaggtggacgaggaggtcctgaagtgtcagcagggcgtgagctctcttgcatttgcactggccttcctgcagcggatggatatgaagcctctggtggtgctcggcttaccagccccaacggctccttcagggtgcctgtctttctgggaggccaaggcacagctggccaagtcttgtaaagtgctggtggacgcgttaagacacaatgccgctgctgcagtgcccttctttgggggtggaagtgtgttacgtgctgctgaaccagctcctcacgcctcttatggaggcattgtgtccgtggagaccgacctgctccagtggtgtctagaaagcggaagtatccccatcctctgtccgataggagagactgctgcacggcgatccgtactgttagacagcctggaagtgacagcttctctggctaaggcactacgcccaacaaaaattatcttcctgaataatactggcggtctgagagacagctcacataaggtcttgtcaaatgtgaacctgccagccgaccttgacctggtatgtaatgccgagtgggtgtccacaaaagaaaggcagcaaatgcggctgattgtcgacgtgctatctagactcccccaccacagctcggctgtgatcaccgctgcgtccacattactgacggaactttttagcaataagggttcagggactctttttaaaaatgccgaacgaatgctgcgcgtcagatcccttgacaagctggaccaaggccgcttagttgacctggtcaacgcgtcatttgggaagaaactgcgcgacgactacctggcctcacttcgtcccagactccactcaatctatgtgtccgaaggatacaacgctgctgccatcctgacaatggagcctgtcctaggtggcactccatacttggacaaattcgttgtctctagcagtcggcagggccagggatccggacagatgctctgggaatgtctcagacgggatttacagacacttttttggcgaagcagagtgacaaatcccatcaacccttggtattttaagcactctgatgggagtttttcaaataaacagtggattttcttctggttcgggttggccgacatcagagatagttacgagctggtcaatcacgccaaaggcctgcctgactcgtttcacaaacctgctagcgatcctggatcc

SEQ ID NO: 17141 - DNA, 1602 bp, synthetic construct
  misc_feature 1..1602: note = source = /note="Description of Artificial Sequence: Synthetic coding sequence"
  source 1..1602: mol_type = other DNA
atggcaactgcccttatggcagtagttctgagggctgccgcagttgctccaaggctgcgcggccgcggcggtactggcggtgctcgccgcctgagttgtggtgcccgcaggagagctgcacgcggcacctcccctggccgcaggttgtcaacggcatggtctcagccacagccaccccccgaagagtacgcgggagctgatgatgtgtcacagtcacccgtcgccgaagagccctcctgggtcccgagtccccgcccaccagtcccacacgaaagccctgagcctccatctggaagaagtttggtccagagggatattcaggccttccttaatcagtgtggtgcctctccgggcgaggcgaggcactggctgactcagtttcagacttgtcaccattctgctgacaagccgttcgcagttatcgaagttgatgaggaggtcctcaagtgccagcagggcgtctcatcactcgccttcgcacttgcgttccttcaaaggatggacatgaagccacttgttgttctcggtctccccgcacccacagccccttccggctgccttagtttctgggaggctaaggcgcaattggctaaaagctgtaaagtcctcgttgacgctctgaggcacaatgccgccgctgcagttccttttttcggaggaggttccgtgctcagagccgctgaaccagccccccatgcaagctatggaggaattgtcagtgtggagacggatcttctgcaatggtgcctggagtctggcagtattcccatcctgtgcccgattggagaaacggcagctcgccgctccgttttgctggactccctggaagtgactgcatcattggccaaagctcttcgcccgactaagataatcttcttgaacaacaccggaggtctgagggactcatcacacaaggtcctctccaacgtcaatcttccagccgatctggacctcgtttgcaatgcggaatgggtctctactaaggaacgccagcaaatgaggttgatcgttgacgtgctgagtcgcttgcctcatcattccagtgccgtcatcacagcggcctccactctgctcactgagctcttcagcaacaagggcagtggcaccctgtttaagaacgcagagcgcatgctcagggtaaggtcacttgataaactggatcaaggtcgcctggtggacttggtcaacgctagtttcggaaagaagctccgcgatgactatctggcctccctgagaccacgcttgcactctatctatgtctcagaaggatacaacgctgcagctatcctgactatggagcccgtgctgggcggaaccccttacctggacaagtttgttgtttcctcttctcgccagggccagggcagcggccaaatgctctgggaatgccttaggagggacctccagacacttttctggaggtcaagagttaccaacccgataaacccgtggtacttcaaacactctgacggatcattcagcaacaagcaatggatcttcttctggtttggcctggctgatatcagagatagttacgagttggtcaatcacgcaaaaggtctccccgactccttccacaagcctgcaagtgacccgggaagc

SEQ ID NO: 17142 - DNA, 1602 bp, synthetic construct
  misc_feature 1..1602: note = source = /note="Description of Artificial Sequence: Synthetic coding sequence"
  source 1..1602: mol_type = other DNA
atggccaccgccctcatggcggtggtccttagggccgccgccgtcgcaccccggcttaggggccgggggggaacaggcggggcccgacgccttagctgtggggctagacggcgcgctgctcggggcacatcccctggacggaggctgtctacagcctggagccaaccccagccccctccagaagagtacgctggcgctgacgacgtctcccagagcccagtggccgaagaaccaagctgggtgccctctccaaggcccccagtaccgcacgagtctcctgagccacccagtgggcgatccctggtgcagagggacattcaggctttcctcaaccagtgtggagcatctcctggagaggctagacactggctgacccagtttcagacctgtcaccacagtgccgacaagcccttcgccgtgatcgaagtggacgaagaagtactgaagtgtcagcagggcgtgtcttctctggccttcgccctggcattcctgcagcgcatggatatgaagcctcttgtcgtgcttgggcttcctgccccaaccgcaccaagcgggtgcctgagtttttgggaagctaaggctcagctggctaaatcctgtaaagtcctggtggacgccctcagacataatgcagccgcagctgtcccatttttcggcggaggcagcgtgctgcgggctgcggagccggcaccacacgcgagttacggaggtatcgtctccgtggagaccgacctcctgcagtggtgtctcgaatcaggctccattccgattctgtgccctattggtgaaaccgctgcaaggcgatctgtgctgctggattccctggaggtgacagctagcctggccaaagctctgagaccaactaagatcatattcctgaataatactggcggattgagagactcatcccataaggtgctgtctaatgtgaatctgcccgcggatctcgatctcgtgtgtaacgcagagtgggtttctacaaaggagaggcaacaaatgagacttattgtggatgtcctctcaaggctgcctcatcacagcagtgccgtcattactgcggcctctacactcctgacggagctcttcagcaataaggggagtgggaccctcttcaagaatgctgagagaatgcttcgggtccggtccctcgacaaacttgaccaggggcgcctggtggatctggtgaacgctagctttggtaaaaaactgagagatgattacctcgcatccttgcggccgcgcctgcactcaatatatgtctctgaagggtacaatgcagccgccatccttaccatggaaccagtgctcggcggcacaccttacctggacaagtttgtggtcagcagttcccgacagggtcaaggcagcgggcaaatgctttgggagtgcctccggcgagatctgcaaaccctgttctggcggtcacgagtgactaatccaattaatccatggtactttaagcatagcgacggatccttctccaataagcagtggatcttcttctggttcggcctggcagatatccgagactcttatgagctggtaaaccatgctaaaggcctgccagattccttccataaacccgcttcagatcctggatca

SEQ ID NO: 17143 - DNA, 1602 bp, synthetic construct
  misc_feature 1..1602: note = source = /note="Description of Artificial Sequence: Synthetic coding sequence"
  source 1..1602: mol_type = other DNA
atggcaaccgcattaatggctgtcgtccttagagctgcagcggttgcccccagactgcgcggacgtggcggtacaggcggagctcggcgtctatcatgcggtgcccgcagacgagctgcacgaggaacatcaccaggacgacggctcagcaccgcttggtctcaaccacaacctccgcctgaagaatacgctggtgcagatgacgtgtcacaatcgcctgtggcagaagagccatcatgggtcccttcaccgcggccaccagttccacatgagtcacctgaaccaccgtccggtcgctcccttgtccaacgtgacatacaggcatttctcaaccaatgcggagcttcaccgggagaggccagacattggttgacgcagttccaaacgtgtcatcatagtgcagataaacctttcgcagttatagaagttgacgaagaggtcctaaaatgtcaacagggtgtgtcaagccttgcattcgccttagcattccttcaaagaatggatatgaagcctcttgtcgttcttggattgccagctccaacagcaccgagtggttgtctttcattttgggaagcaaaagcgcaattggcgaagtcatgtaaagttcttgtcgatgcgttgcgacataatgcagccgccgccgtaccattctttggaggaggaagtgtcttacgtgcagcagaaccagcacctcacgcatcctatggaggcatcgtatcagttgagacagatctgctgcaatggtgtttagaatctggatcaattcctatcctttgtccaataggagagactgctgctcgtagaagcgttttgttggattcacttgaagtcactgcttctcttgctaaggctttacgaccgactaaaatcatttttcttaataatacgggaggactgcgagactcctctcacaaagtgctttcgaatgtaaacttgcccgcagatttagatttggtgtgcaatgcggaatgggtttcaacgaaggagcgccaacaaatgcgtttaatcgttgacgtcttgtctcgcttaccacatcatagctctgcggtcataacagctgctagcacactcctgacagagctgttttcaaacaaaggctctggaactctattcaaaaatgctgaacggatgcttcgagttcgatctttggataagctggaccaaggaagactcgttgatctggttaacgcttctttcggcaaaaaactacgtgatgattatctagcatcactacgtccaagattgcactcgatctacgtgtcggaaggatataatgctgccgccatactgacaatggaaccagtgcttggcggaacaccttatctggacaaatttgtcgtctcctcttcccgtcaaggacaaggttctgggcagatgttgtgggagtgcctgagaagagaccttcaaacgctcttttggcgttcgcgtgtgaccaatccaatcaacccatggtactttaaacactctgacggatctttttcgaataaacaatggatcttcttctggttcggtcttgcagatattcgagactcttacgagttggttaaccatgctaaagggttgccagattccttccataaaccagcttctgacccgggctca

SEQ ID NO: 17144 - DNA, 1602 bp, synthetic construct
  misc_feature 1..1602: note = source = /note="Description of Artificial Sequence: Synthetic coding sequence"
  source 1..1602: mol_type = other DNA
atggccactgctctgatggccgtggtattaagagctgccgcagtggcccctagactcagaggacgagggggcaccggtggcgcaagaaggttatcctgcggggccaggcgcagggctgctaggggcactagcccaggacgtagactctccactgcttggtcccagccacagccacccccagaggaatacgccggggccgacgatgtctctcagagtcccgtggctgaagaaccatcctgggttccttctcccagacctcccgttcctcacgaaagtcctgagccaccatctggcagatccctggtccagagggatattcaagcctttcttaaccagtgcggcgcttcccccggtgaggctcgccactggctaacacagttccagacctgtcatcattccgctgataagccttttgcagtcatagaggttgacgaggaagtattgaagtgtcaacagggcgtaagctctctggccttcgctcttgccttcctgcagaggatggatatgaaaccactggtggttctggggctgcctgcccccactgctcccagcggttgtctgtcattctgggaagccaaggctcaactggctaagtcctgcaaggttctggtcgacgcactgagacacaatgcagccgctgctgtcccttttttcggcggaggcagcgtcctgagagctgctgagcctgctccccatgcttcatacggaggaatagtaagtgtggagaccgatctccttcagtggtgcctggaatcaggaagcatccctattttatgccctatcggcgaaaccgcagcccgcagatccgttctgctagatagcctggaagtcacagcaagcctggctaaagcattgcggccaaccaaaatcatctttctaaataacacaggtggcctgcgcgactccagtcacaaggtcctctccaacgtaaacctgcccgcagatctcgacctggtttgtaacgcagaatgggtttccactaaggaaagacagcagatgcggctgatagtggatgtgttgagtcgactgccccatcattcttccgctgtcataacagcagccagcactcttctcacagagctgtttagcaacaagggttccgggactctgttcaagaatgccgagagaatgctgagggtgcgctctctagacaaactggatcaggggagactagtggacctggtgaatgcttcctttggcaagaagctacgggacgactatctggctagcctacgaccccgcctgcactcaatttatgtgtccgaaggatataatgccgccgccattctaaccatggaaccagtcctgggaggaaccccatatctggacaagttcgtggttagtagttctcgtcaggggcaggggagtgggcagatgctgtgggaatgcttgcgacgtgacctccagaccctcttttggcgctcaagggtgaccaaccccatcaacccctggtactttaaacacagcgatggcagtttttctaataagcagtggatcttcttctggttcgggctggcagacatccgggacagttatgagctggtcaaccacgccaagggcctgcctgattccttccataagcctgcctctgatcccggaagt

SEQ ID NO: 17145 - DNA, 1602 bp, synthetic construct
  misc_feature 1..1602: note = source = /note="Description of Artificial Sequence: Synthetic coding sequence"
  source 1..1602: mol_type = other DNA
atggccacggcactgatggcagtggtgttgagagcggccgcagtggcgcccagactgagggggcgtgggggaacgggcggcgcccgccggctctcctgcggcgccaggcggagggcagcaagaggtacttcccctgggagaagactgagcacagcctggtcccaacctcagccgccccccgaggagtacgctggggctgatgatgtctcccagtcccctgttgcggaggagccaagctgggtgcctagtccacggccccctgtgcctcacgagagccctgaacccccttctggcagaagccttgtgcagagagatatccaggcgtttctcaaccagtgcggggcctcccccggagaggcaagacactggctgacccagtttcagacatgccatcacagcgccgataaaccatttgctgtcatagaggtggacgaagaagtgctcaagtgtcagcagggtgtgtcatctttagcttttgcactggcgtttctgcaacggatggacatgaagccattggttgtgctcggactacctgcccccaccgccccaagtggctgcctatcgttttgggaggcaaaagcgcagcttgctaagtcatgcaaagtgctggtggatgccctgcgccataacgctgcggctgctgttcccttttttgggggagggtcagtgctccgtgcagcggaacccgcccctcacgcttcgtacggtgggatcgttagcgtcgagactgacctccttcagtggtgtcttgaatccggctccatccccatactttgcccgattggtgagacagcagcccgtcggtcagtcctcctcgactcgctggaagtaaccgcctccctcgccaaagcgcttaggcctactaagatcatcttcctgaataatactggagggctccgagacagctcccacaaggtgctgtctaatgttaacctccctgccgacctcgacctggtctgcaatgccgagtgggtcagtaccaaagagaggcagcagatgcgattaatcgtggacgtgctcagccggcttcctcatcacagtagcgctgtgatcaccgccgcttctactctgctcaccgaattgtttagcaacaagggctcaggaacactgttcaagaatgctgagcgcatgctgagagttcggagtcttgataagttagaccaggggcgcttggtcgatctggttaacgcgtcctttggaaaaaagctgcgggacgattatctcgcatccttgcggccccggttgcacagcatctacgtgagtgaggggtataacgcggctgctatcctgactatggaacctgtgctaggaggaaccccataccttgacaaatttgtcgtgtcttcctcaagacagggacagggttcaggccaaatgctttgggagtgcctccgacgggatctccaaaccctcttttggcgcagccgcgttacaaatcccatcaatccttggtattttaagcattcggacggctctttctccaataagcagtggatcttcttttggttcgggctggcggacataagggattcatacgaactcgtcaatcacgcaaaaggtctgcctgattctttccataagccagcctccgatccaggtagt

SEQ ID NO: 17146 - DNA, 1602 bp, synthetic construct; identical to SEQ ID NO: 17134
  misc_feature 1..1602: note = source = /note="Description of Artificial Sequence: Synthetic coding sequence"
  source 1..1602: mol_type = other DNA

SEQ ID NO: 17147 - DNA, 1602 bp, synthetic construct
  misc_feature 1..1602: note = source = /note="Description of Artificial Sequence: Synthetic coding sequence"
  source 1..1602: mol_type = other DNA
atggccacagcactaatggctgtcgtcttgcgagcagcagccgtggcccctaggttaagaggacgggggggaactggaggagcccgcaggttgtcctgcggggccagacggcgggctgctaggggaacttcccccgggaggcgactgtcaacagcttggagtcagcctcagccacctccagaggagtatgctggggcggatgatgtttcgcagtctcccgtggctgaggaaccctcatgggtgccctcaccgaggccccccgtgcctcacgaatctcctgagcctccctctgggaggtctctggtgcagagggatatccaggcctttttaaatcagtgtggggcctccccaggggaagctcgacattggttaactcagttccagacttgccaccattctgcagataaaccatttgcagtaattgaagtcgatgaagaggtccttaaatgtcagcaaggagtatctagtcttgcatttgcattggcatttctgcagaggatggatatgaagccactcgtggtgttgggactgccagcccctacagccccatccggatgtctctccttttgggaagcaaaagcccagttagcaaagagttgtaaggtgctggttgatgctttgaggcataacgcagcggctgctgtgccattctttgggggaggatccgttcttagggcggctgaaccagctccacacgcatcttatggaggaatcgtttcagtcgaaactgatctcctgcagtggtgcctagaatctggaagtatccctatcctatgtcctatcggggaaacagctgcaagacggagtgtcttgcttgattccctcgaagtcactgcctcacttgccaaagcactaaggccaacaaaaattatcttccttaataacactggaggactccgggatagttctcacaaggtactgtccaacgtgaatttgccggctgatttggacttggtgtgcaatgctgaatgggtttctacaaaagagcgccagcagatgcggcttattgtagatgtcctctctcgactcccacaccatagttcagccgtgatcacggctgcatctactcttcttactgaactcttttctaacaaaggaagtgggacattattcaaaaacgccgaaaggatgttacgggtgcggtcgctcgataaattggatcagggaaggctagtggatcttgtcaatgcaagttttgggaaaaaactgcgggatgattatctggcctctctcaggccacggctacactctatatatgtgtctgaaggatacaacgccgctgctatactgacaatggaacccgtgctgggagggacgccctatttagataaatttgtggtctcctcttctcgccaggggcaggggtccgggcagatgctctgggaatgtcttcggcgggatctacagactcttttttggagaagtcgggtcacgaatcctattaatccttggtatttcaaacattccgacggatccttttctaataagcaatggatatttttttggttcgggctggcagacatacgggattcatatgaactagtcaaccacgctaagggactccctgactcatttcataaacctgccagtgatcccggatcc

SEQ ID NO: 17148 - DNA, 1602 bp, synthetic construct
  misc_feature 1..1602: note = source = /note="Description of Artificial Sequence: Synthetic coding sequence"
  source 1..1602: mol_type = other DNA
atggccacagcattgatggccgttgtgctgagggcggcggctgtagctccaaggctgaggggacgggggggcactggtggcgcaagacggctctcatgtggagccagacgcagggctgcccggggtacttctccaggcaggcggctctcaaccgcctggtcccagccccagcctccgcctgaagagtatgctggcgcagatgacgtaagccaatcacctgttgcggaagaaccaagctgggtgccatctccaagaccacctgtgccccacgaaagcccggaaccgccgagtggtcggtccttggtgcagcgcgacatccaggcatttctgaatcagtgcggagcctctcctggcgaagctaggcactggctgactcagttccaaacttgtcaccatagcgccgacaaacccttcgccgtgatcgaagttgacgaggaggtgctgaaatgccagcaaggagtgagctccctcgccttcgcactggcttttctccaacgaatggatatgaagcccctcgttgtcctcggacttccggcacctacagctccgagcggatgtttgagcttttgggaggcgaaggcccaactggccaagtcctgcaaggtgttggtagacgcactcaggcacaatgccgcggccgccgtgccgttctttggaggtgggagcgtgcttcgggccgccgaaccggctccacatgcctcatacggtggcatcgtcagcgtagagacagacctgctgcagtggtgtctggagtctggaagcatccctatcctctgtccaattggagagacagccgcacgccgctctgttcttttggatagccttgaagtgacggccagtctcgcgaaagctctgaggcccacaaaaatcatctttcttaataacaccggcggtctgagggactctagtcataaagtactgtccaacgtgaatctgccagcggacctcgacctggtatgtaacgcagaatgggtcagcacaaaggagcggcagcagatgcggctgatcgtcgacgtgttgtcccggctgccacatcatagctctgccgtgataaccgcagcatccacgctgctcactgagctgttctccaataagggatccgggacgcttttcaaaaacgccgagagaatgcttcgcgttaggtccctcgacaagctggatcaaggacgactcgtggatctcgtgaacgcctctttcggcaagaagctgcgggatgattacctggccagcctcaggccgaggttgcatagtatctatgtgtcagagggctataacgctgctgcaatactcactatggaacctgtcctcggtgggaccccatacctcgacaagtttgtagtctccagctctcggcaggggcagggatccggtcagatgctgtgggagtgtctgaggcgcgacctgcagaccttgttctggcggtcccgggtgacaaacccaattaacccctggtactttaaacattccgacggttcattcagtaataaacaatggatcttcttctggttcggcctggcagacatacgggatagctacgagttggtgaatcacgcgaagggattgccagacagcttccacaaaccagctagtgacccaggatca

SEQ ID NO: 17149 - DNA, 1602 bp, synthetic construct
  misc_feature 1..1602: note = source = /note="Description of Artificial Sequence: Synthetic coding sequence"
  source 1..1602: mol_type = other DNA
atggcgaccgcccttatggccgtcgtgctccgcgccgcggctgtggctcctaggctgcgcggccgcggcgggactgggggcgccaggcgcctctcctgtggggccagacgcagagctgcaagaggcactagccccggaaggcgcctcagtacggcttggtcccagcctcaacccccgcccgaggaatacgcgggtgcagacgacgtgtcccagagcccagtggctgaggagccttcttgggtgcctagcccgcgaccccccgttccgcacgagtctcctgaacccccttccggtcggagccttgtccagagagacatacaagctttcctgaaccaatgcggggccagccctggagaggctcggcattggctgactcaattccagacttgccaccatagcgccgacaaaccgttcgctgtcattgaagtcgacgaagaggtgctgaagtgtcagcagggagtaagctccttggcctttgctcttgccttccttcagcgcatggatatgaagccactggtcgtactgggactgcctgctccaactgctccatccgggtgcctgtctttctgggaagcaaaggcccagcttgcgaaatcatgcaaggttttggtcgatgccctgcggcataatgccgctgccgccgtacctttcttcggaggcggatcagtcctgagagccgcggaaccggctccgcacgcctcctacggtggtatagtgagtgtcgagacggacctcttgcagtggtgcctggagtccggcagtatacccatactctgcccaatcggcgagacggcagcccggcgcagcgtgctgttggattctctcgaggtgacagccagtctggccaaagctctcaggccaacaaagattatctttcttaataacaccggcgggctgagagattcatcacataaagtgttgagcaacgtgaacctgcccgcggatctggatctggtctgcaatgcagagtgggtgagtaccaaagagagacagcagatgagactcatcgtggatgtgctctctcgcctcccacatcatagcagtgccgtgataactgctgcatctacattgctcacagagcttttcagtaataaaggcagtgggacgctgttcaaaaacgcagagcgaatgcttcgagtccggtccctggacaagctggaccaaggaagactcgtcgacctggttaatgcctccttcggtaaaaagctcagggatgactatctggcctctctgaggcctaggctgcattccatctatgtgagcgagggttataacgccgccgctatactcaccatggaacccgtgctgggagggacaccatatttggataagtttgttgtatcctctagtcgccagggccaggggagcggacagatgctgtgggaatgcctgagaagagacctccagacattgttttggcggagccgagtaaccaatcctattaatccctggtacttcaagcactccgatggatcattctctaataagcagtggatatttttttggttcggcctggccgacattagggatagttatgaactggtcaaccacgcaaaggggctgccagactccttccataagccagcatctgatcctggaagt

SEQ ID NO: 17150 - DNA, 1602 bp, synthetic construct
  misc_feature 1..1602: note = source = /note="Description of Artificial Sequence: Synthetic coding sequence"
  source 1..1602: mol_type = other DNA
atggctaccgcccttatggccgtcgtgctaagggctgccgcagtggctcccaggctccgaggtagggggggcaccggaggtgctcgtagattgtcatgcggtgctaggcggcgtgctgcaagaggtacctctcccggacgcagattaagtacagcttggtctcaaccacagccccctcccgaggagtatgcaggtgcggacgatgtttctcaatcccctgtagcagaggagccttcttgggtgccatcgcctagaccaccggttccccatgagtcgccagaaccaccttcaggtcgaagtttggtgcaacgcgatatacaggcattccttaaccaatgcggtgcatccccgggtgaagcaaggcattggttaacacaatttcaaacctgtcatcactcagcagataaacctttcgcggttattgaggtggatgaagaggtcttgaaatgccaacaaggtgttagctctctagcattcgcccttgcctttcttcaaagaatggatatgaaacctcttgttgtcttaggacttcctgctcccactgctccttcgggttgccttagtttctgggaggctaaggcccaattggcgaagtcttgtaaagtcctagttgacgctttgcgacataatgcagctgctgcagtgcccttttttggaggtggttctgttctccgtgccgctgagccagctccccatgcgagctatggtggaattgttagtgtggaaactgatctcctccagtggtgtctcgaatcaggttcgattccaatactttgccccattggagaaacggcagcccgacgtagcgtgcttcttgattctctggaagtaacggccagccttgccaaagccctgcggcctaccaagatcatctttctgaacaatacgggtggattaagagattctagccataaggtcctgagcaacgttaatcttccagctgatctcgacttagtttgcaatgctgagtgggtttcaacaaaggagcgacagcagatgagactaattgttgatgtgttgagcaggctaccacatcactcatcagctgttattactgctgcttctaccctgctaaccgagttgttctccaataagggatcaggaacattgtttaagaacgcagaaaggatgttgagagtgcgctcacttgacaaattagaccaaggacggcttgtcgatcttgtgaacgcttcctttgggaagaaactaagagatgactacttggcttctcttcgtcctcggctgcatagcatctatgtttctgagggatacaacgcagcagccattctcacaatggaaccagttcttggagggactccatatctggataagttcgtagtcagtagttcaaggcagggacagggatctggacaaatgttgtgggagtgtctgaggcgagatctccaaactctattttggcggtcccgtgttactaatccaattaacccttggtattttaaacacagtgatggttcctttagtaacaagcagtggattttcttttggtttggattagctgatatcagagactcttatgaactcgttaatcatgccaagggacttccagattcattccacaaacctgcttcagatcctggctcc

SEQ ID NO: 17151 - DNA, 1602 bp, synthetic construct
  misc_feature 1..1602: note = source = /note="Description of Artificial Sequence: Synthetic coding sequence"
  source 1..1602: mol_type = other DNA
atggcgacagcactgatggcggtcgtattgagggccgctgctgtggcccctcgtctgcgaggacgtggcggcacgggcggagccaggcggttgagttgcggcgcgcgccgtagagctgcacgtgggacaagtcccggcagaaggctgtctactgcgtggtcccaacctcagcctcctccagaggaatatgcaggtgcggacgatgtttcacaaagccctgtggctgaagaaccttcatgggtaccttccccacggccgccggtgccgcacgagagtcctgaacctcctagcgggcgaagcctggttcaaagggatattcaggcgtttcttaatcagtgtggggcatcgcctggcgaagccagacattggcttacacaatttcagacatgtcatcattccgcagacaaaccctttgcagtgattgaagtcgatgaggaagtgttaaagtgtcagcagggagtgtctagccttgccttcgcattggcgttccttcaaagaatggacatgaagccgctcgtagtgttgggtttgccggcaccgacagccccgagcggatgtctgtctttctgggaagcaaaagcccaattagcgaaatcgtgtaaagttttggtagatgctttacgccacaacgcagccgctgccgttccgtttttcggaggtggatcagttttgagagcagctgaaccggcgccccatgcttcatatggggggatcgtttctgttgagactgacttgctccagtggtgcttggagtctggatcaattcctatcctgtgcccgattggtgaaacggcggcccgtcggagcgtgctgctggactcactggaagtaacagcttctctggctaaagcgcttcgccctactaagattatatttctaaataacacgggtggtttacgggattccagccataaggttctaagcaacgttaacctgcctgcggacctcgacctggtgtgcaacgccgaatgggtctcaacaaaggaacgccagcagatgcgcctgatcgttgacgtactgtcacgactgccgcaccacagtagtgcagttataacggcggcctctacgctgctgacagaactcttcagtaataaaggcagcgggactcttttcaagaacgccgaaagaatgttaagagtgagatccctggataaacttgatcaaggccggttggttgatttggtgaacgcatcttttggcaaaaaactgagagatgattatctggcctcccttagaccgaggctgcatagtatttatgtgagtgaaggatataatgccgcggcaattcttacgatggaacctgtgcttgggggtactccttatttagacaaatttgtcgtgtctagctctagacagggccaaggctctgggcaaatgttgtgggagtgtttaagaagggacctgcagacactgttctggcgaagtagagtgacgaacccgattaacccatggtattttaagcattcagatggcagtttttcgaacaaacaatggatttttttctggttcggactcgccgatattcgcgatagctatgagctagtaaaccatgcgaaaggcctaccagatagctttcataaacctgcgagtgacccggggtca

SEQ ID NO: 17152 - DNA, 1602 bp, synthetic construct
  misc_feature 1..1602: note = source = /note="Description of Artificial Sequence: Synthetic coding sequence"
  source 1..1602: mol_type = other DNA
atggccacagccctgatggccgtcgtcctgagagctgcagcggtcgcaccccgtttgcggggacggggaggcaccggtggggcaaggagacttagttgcggtgctaggcgcagagcagcacgcggcaccagtccaggaaggcggctgagtaccgcctggtcccagccacaaccaccgcccgaggaatatgctggtgcagatgacgtctcccagagtccagtggcagaggagcccagctgggtaccctcacctcgcccccctgttccccacgagagtcccgagccgccaagcggtcggagcttggtacagagagacatacaggcatttctgaatcaatgcggtgcctcccctggcgaggcccggcattggctaacccagttccagacatgccaccacagcgcagacaagccattcgccgtcatcgaggtcgacgaggaagtcctgaaatgtcagcagggcgtcagcagcttggcctttgccctggcctttctgcagcgcatggatatgaagcctctggtggtgctggggctgccggcacctactgctccatccggatgtttgagcttttgggaagcaaaggctcagttagcaaagtcatgtaaggtgcttgttgatgccctacgccacaatgccgccgctgctgtccccttttttggggggggatctgtgcttagagccgctgaacccgcaccccatgctagttacggcggcattgtcagtgtggaaaccgacctactgcagtggtgtctcgagtccggtagtatcccaatattgtgcccgattggagaaacagcagcccgtcgctcagtcctgctggattctttggaagttacagcgtctctcgccaaagcgcttaggcccactaagatcatattcctaaataataccggcggccttcgggattcctcccataaggttctgtccaacgttaatttgcccgccgacctggacttggtatgcaacgcagagtgggtgagcaccaaggagagacaacagatgcggctcattgtagatgtactgagccgtctgccccaccactcttcagcagttataacagcagcgtccactctgctgacagagcttttttccaataaaggtagcggtaccctgttcaaaaatgccgaacgcatgctaagggtgaggtcgctggacaaactggatcagggccggttagtggatttggtcaatgcttcttttggaaagaagctgcgggacgactacctcgcctctctgagacctagattgcacagtatctatgtatcggaaggatacaatgcagcagccatcctgactatggaaccagtgctgggtggtacaccctaccttgataagttcgttgtctcttcttcccgacaaggtcagggatcaggacagatgctgtgggaatgtctacggcgcgatcttcagaccttattctggaggagccgggtgaccaatcctattaatccatggtacttcaagcactctgacggctctttctccaataaacaatggatctttttttggtttggcctggcggatattcgggactcttatgagctagtcaaccatgccaagggtctaccagacagcttccacaagcccgcctccgaccctggttcc

SEQ ID NO: 17153 - DNA, 1602 bp, synthetic construct
  misc_feature 1..1602: note = source = /note="Description of Artificial Sequence: Synthetic coding sequence"
  source 1..1602: mol_type = other DNA
atggccactgcgttgatggcggtggtgctgcgggccgctgctgtagcaccacgcttgagaggccgcgggggaacaggcggcgccaggcggctttcctgcggagcccgaaggagagccgctcgagggacatccccagggagaagactgagcactgcatggtcgcagccacagcctcccccggaggagtatgcaggggccgacgacgtctctcagtccccggtggccgaagaaccttcatgggtgccaagccccagaccaccggtaccccacgagtctcctgaaccccctagcgggagaagtctggtgcaacgggacattcaggcattcttgaatcagtgtggcgccagtccaggtgaggccaggcactggctcactcagtttcagacatgccatcactcagcggacaagccatttgctgttatcgaagttgatgaggaggtcctgaaatgccagcagggcgtgtcctctttggcgtttgccctcgcgtttctgcagagaatggacatgaaacccctcgtcgttctgggccttccggcacccaccgcccccagtggatgcctgagcttctgggaggccaaggcgcaacttgcaaagtcctgtaaagtgcttgtagacgcactgcgccataatgcagcagccgcagtgccctttttcggcgggggaagcgtgctgcgagcagctgagcctgccccacatgcctcttatggcgggatcgtgagcgtcgaaactgaccttctgcagtggtgtctcgaaagcgggagtattcctattctctgcccaatcggcgagactgcggcccggcgaagcgtgctcctggattcactagaggttacagcttccttagccaaggcacttcggcccaccaagattatcttcttaaacaatacagggggcctgagggactcaagccacaaggtgctttcaaacgttaacctccccgccgatctggatctggtatgtaacgcggaatgggtgagtactaaagaacgccagcagatgcggttgattgtagacgtgctgagcagactcccccaccactcatcagccgtgataaccgccgcaagcaccctcctcacagagctcttttctaacaaaggatctgggactttgtttaaaaacgctgaaagaatgctacgagtgcgaagtctcgataagctagaccaggggcggttagttgacttagtcaatgcatctttcggcaaaaagttacgcgacgactatctggcgtcactgaggccacgcttgcattctatctacgtgtccgagggctacaacgctgctgcaatcctgacaatggagcccgtgttgggcggaaccccttatctcgataaatttgtggtgagtagcagcaggcaagggcaaggaagtggtcagatgctgtgggagtgtctcagaagggatcttcagaccttattctggagaagtagagtgacaaatccaattaacccgtggtactttaagcactccgatggttcgttttctaacaagcaatggatctttttttggtttggcctcgcagacattcgagacagctacgagcttgtgaatcacgcaaaaggtctccctgattccttccataaaccggcctctgaccccggtagc

SEQ ID NO: 17154 - DNA, 1602 bp, synthetic construct
  misc_feature 1..1602: note = source = /note="Description of Artificial Sequence: Synthetic coding sequence"
  source 1..1602: mol_type = other DNA
atggccaccgcacttatggccgttgtactgcgggccgccgctgtggctccgcggcttcggggccgtggggggactgggggcgcgcgtcgacttagctgtggcgcacgtcgcagggcggcccgcggcacatctcccggtcgtcgtttgtccacagcctggtcacaaccccagccgccccccgaggagtatgctggagcagacgatgtatcgcagagcccagtggctgaagaaccttcatgggtgccttccccccggcctcccgtgccacacgaatccccagaacctccaagtggccggtcactcgtacaacgggatattcaagcatttctcaatcaatgcggggctagccccggtgaggccaggcattggttgactcagttccagacgtgtcaccactctgccgacaaaccgtttgctgtgatcgaggttgacgaggaggtgcttaaatgccaacaaggtgtgtcatcgctggccttcgctctggccttcctgcagcgtatggatatgaagcccttggttgtcttgggcctccccgctccaactgctccgtctggttgcctttcgttttgggaggctaaggctcaacttgccaaatcatgcaaagttcttgtggatgcccttcggcataacgccgctgcggctgtaccattttttggaggcgggtccgttctccgtgcagcagaaccagcgccacatgcttcttatggaggtatcgtgagcgtggagacggatcttttgcagtggtgtctggagagtggctcgattccaatcctgtgccctattggagagacggcagcgaggcgcagcgtcctcctagactcactggaggtgacagcgagcctagcgaaggcgttgcgccctacaaaaatcattttcttaaacaacacaggcgggctccgcgattcaagtcataaggtgctgtcaaacgtgaatctgcccgctgatctggacctcgtttgcaatgccgaatgggtctctactaaagaacgtcagcaaatgcgccttattgtcgatgtcttatctcgtctacctcaccactcatcggctgttataaccgcggcctccacccttttaaccgagttattcagtaacaagggttctgggaccctgttcaagaacgcggagagaatgttgcgtgtacgcagtcttgacaagttggaccaggggcgtcttgtggatctcgttaatgcctctttcggtaagaaactccgggacgattatctcgcttccctacgaccgcggctacatagcatatacgtgtctgagggttacaacgctgccgcgatattaacaatggagcccgtcctgggaggaaccccctatttggacaaatttgttgttagtagttcccgacaaggacagggatctggccaaatgctgtgggaatgccttcgtagggacctacaaacactcttctggcgttcacgagttaccaatcctatcaacccttggtatttcaagcatagcgatggatccttctcgaacaagcagtggattttcttttggtttggcctggcagatatccgagatagttatgagctcgtgaatcacgcaaagggcctgccggattctttccacaagcctgcaagcgaccccgggagt

SEQ ID NO: 17155 - DNA, 1602 bp, synthetic construct
  misc_feature 1..1602: note = source = /note="Description of Artificial Sequence: Synthetic coding sequence"
  source 1..1602: mol_type = other DNA
atggccaccgccttgatggctgtggtgctccgggccgccgcggtggcacctcgcctcagggggagaggcggcaccggcggtgcccgtcgactgtcctgcggggccagacggcgggctgcccgcgggaccagccctggcagacgtctcagtactgcttggtcccagcctcaaccgcccccggaggaatacgccggcgccgacgacgtgtcgcaaagtcctgtcgcagaagagcctagctgggttccatcaccaaggcccccggtgccccatgaatcacctgagcctccctcaggccgctccctcgtgcagcgcgacattcaagccttcttgaatcagtgcggcgcaagccccggtgaagcccgccactggctgactcagttccagacttgtcaccactcagcagacaaaccttttgctgtgatcgaggtggacgaagaggttctgaaatgtcagcagggcgtgagttctctggcatttgcccttgccttcctacaacggatggatatgaagccattagtcgtgctgggactacctgctcccacagcaccatctggctgcctaagtttctgggaagcaaaagcgcagcttgcaaagtcatgcaaagttttggtggacgccctgagacataatgccgctgcagcagtgccattcttcgggggcgggtctgtgttgcgagccgctgagcctgcgccccacgccagctatggcggtatcgtgagcgtggagaccgacctgcttcagtggtgtttagagtccgggtctattcctattttatgccctatcggcgagacggcagctcgccgaagcgtattattggattctctcgaggttacggcgagcctagcaaaagcactgaggccaaccaaaatcattttcttgaacaacaccgggggactgcgcgatagcagccacaaagtcctctccaacgtcaacctgccagccgacctcgatctcgtctgtaatgctgagtgggtatctacaaaagagcgccaacagatgcggttgatcgtggacgttttatccagactcccccaccacagcagcgccgtaatcacagcggcttctactctcttgactgagctgttctcaaataagggatctggaacattgttcaagaatgccgagcgaatgctgcgggtgaggtccctggataaactcgaccagggaaggcttgtcgacttggtgaacgcatcattcggcaaaaaactaagagatgactatcttgccagcctgaggcctcgcttgcactctatctacgtgtcagaaggatataatgctgccgcaatactcacaatggagcccgtactcggaggtacgccctacctggataagttcgtagtatcttcttcgagacagggacagggaagcgggcagatgctctgggaatgtctgagaagggatctgcagaccctgttctggcgatcccgcgtgacaaatcctattaacccttggtacttcaagcacagcgacgggtcgttctctaataagcagtggatttttttttggttcggcttagcagacataagagactcttacgagctcgtgaaccatgcaaaaggactccctgacagcttccacaagccagcctccgaccctggatca

SEQ ID NO: 17156 - DNA, 1602 bp, synthetic construct
  misc_feature 1..1602: note = source = /note="Description of Artificial Sequence: Synthetic coding sequence"
  source 1..1602: mol_type = other DNA
atggccactgcgctcatggccgttgttctgagggccgccgctgtagcacctcgtctgagaggcaggggcggcactgggggggcacggagactatcctgcggggcaaggcgtcgggcagcccgcggcacctcacccggacgccggctcagcaccgcctggtctcagccgcagcccccacctgaggagtacgcaggtgccgatgatgtgtcgcaaagcccagtggcagaagagccaagctgggtgccctcaccaaggccccccgtccctcacgaaagcccagagccaccttcgggacgatcgctggtgcagcgagatattcaagcatttctgaatcagtgtggtgcaagcccaggagaggcgaggcattggttgactcagttccagacctgccatcactcagccgataaaccctttgccgtgattgaagtagatgaggaggtcctaaaatgccagcagggtgtgagcagtctcgcatttgccctggcattcctgcagagaatggatatgaaaccactggttgtgcttggtctgccggctcccaccgccccttcgggttgtctaagcttctgggaggccaaagctcaactggctaaatcctgtaaagtcctggtggacgccctcagacacaacgctgcagctgccgtccctttctttggcggaggaagtgtcttacgtgctgctgaacccgccccccacgcatcctacggcggcattgtctcagtggaaacagatctcttacagtggtgcttggaatcaggcagtatccccattctttgtcctataggtgaaacggcagctcggagaagcgttctgctagattctctggaagtgactgccagtctggctaaggctctccgcccaacgaagataatcttcctgaataatactggggggctcagggacagtagtcacaaagtgctctcaaatgttaacctgcctgctgacctggaccttgtgtgcaatgcggaatgggtaagtaccaaggagaggcagcagatgcgcctgatcgttgatgttctgagccggctgccgcaccatagttccgccgtcattacagccgcaagcacactgttgactgaactatttagcaacaaggggtccggaaccttgttcaagaatgctgagcgcatgctgcgcgtgaggagtctggataagctggatcaagggcgcctggttgatttggtaaacgcatcgtttggcaaaaagctaagagacgattatttggcctcactgaggcctagactgcactcgatttacgtgagtgaaggttacaatgctgctgccatcctgactatggaacccgtcctggggggcaccccttacctagataagttcgtcgtaagttcgtctaggcagggtcagggcagtgggcagatgctgtgggaatgcctccgacgtgacctgcagacccttttctggaggagtagagtcacgaatcctattaacccttggtattttaaacacagcgatggctctttctctaacaaacagtggatattcttctggtttggcctcgctgatatacgagatagctacgaactggtcaaccacgccaagggcctgcctgatagttttcacaaaccggctagtgatcctggttcc

SEQ ID NO: 17157 - DNA, 1185 bp, synthetic construct
  misc_feature 1..1185: note = source = /note="Description of Artificial Sequence: Synthetic coding sequence"
  source 1..1185: mol_type = other DNA
atgccgggaagatcatgcgtggcgctcgtgctcttggcagccgccgtgtcctgcgccgtcgcacaacacgctccaccttggacggaggactgccggaaatcaacctacccgccgagcggacctacgtacagaggcgccgtcccgtggtacaccattaacttggatctgccaccgtacaagagatggcatgagctgatgctggacaaagccccggtgcttaaagtgatagtgaactcactgaagaatatgatcaataccttcgtgccgtccggaaaaatcatgcaggtggtcgatgagaagctgcctgggttgctgggaaactttccgggtccgttcgaagaagaaatgaagggcatcgctgccgtgactgatatccctctgggtgaaatcatctcctttaacatcttttacgagctcttcacgatctgtacctcgatcgtcgccgaggacaagaagggccatctcatccacggacgcaacatggacttcggagtgttcctgggatggaacattaacaacgatacgtgggtgatcaccgagcagctgaagccgctcaccgtcaatcttgactttcagaggaacaataagactgtgttcaaagctagttccttcgccggctacgtgggaatgctcaccggttttaagccgggattgttttccctgaccctgaatgaacggttctcgatcaatgggggatacctcggcatcttggaatggatcctggggaaaaaagacgtgatgtggatcggatttctgacgcggactgtgttggaaaattccacctcgtacgaagaggccaagaacttgctgactaaaacgaagatcctggctccagcgtatttcatcctggggggaaaccaaagcggcgaagggtgtgtcatcacccgggaccgcaaggagtccctcgacgtgtacgaactggatgccaagcagggacggtggtacgtggtgcaaactaactacgaccggtggaaacacccattctttttggatgatcggcgcactccggccaaaatgtgcctcaaccggacctcgcaagagaacatatctttcgagactatgtacgacgttctgtcaaccaagcccgtgctgaacaagctgactgtctacaccacgctgatcgacgtgactaagggtcagttcgaaacctatctgcgggattgccctgacccatgcatcggatgg

SEQ ID NO: 17158 - DNA, 1185 bp, synthetic construct
  misc_feature 1..1185: note = source = /note="Description of Artificial Sequence: Synthetic coding sequence"
  source 1..1185: mol_type = other DNA
atgccggggcgcagctgcgtggcactggtcctcctggcagcagccgtctcgtgcgccgtggcccaacatgccccaccttggactgaggactgtcggaaaagcacctacccgccatcgggccccacctacagaggcgcagtcccctggtataccatcaatcttgacctgcctccttacaagaggtggcacgaactgatgctggacaaggcccctgtcctgaaggtcattgtgaactccctcaagaatatgatcaacacctttgtcccctcggggaagatcatgcaggtggtggacgaaaaacttccaggcctgctggggaactttccgggcccgttcgaagaagaaatgaagggaatcgccgcagtcaccgacattcctttgggcgaaatcatttcatttaacatcttttacgaactgttcaccatctgcacctcaatcgtggcagaggacaaaaaaggccatctgattcacggacgcaacatggacttcggagtgttcctgggatggaacattaacaacgacacttgggtgatcaccgagcagctgaaaccgctgactgtgaacctggatttccagagaaacaacaagaccgtgttcaaggcgagcagcttcgcaggctatgtcggaatgctcaccggctttaagccgggactcttttcacttacgctgaatgaacgcttctccatcaatggtggttacctgggaattctcgagtggatcctgggtaagaaggatgtgatgtggatcggattcttgacgcgaaccgtgcttgagaacagcaccagctacgaggaagcgaagaacctgctgaccaagaccaagatccttgcacctgcctactttatcctgggaggaaatcaatcgggtgaagggtgcgtgatcactcgcgacagaaaagaatccttggacgtttatgaactcgatgcaaaacagggacggtggtacgtggtgcaaaccaactatgatcgctggaagcacccattcttccttgacgataggcggactccagcaaaaatgtgcttgaacagaacttcgcaggaaaacatctccttcgagactatgtacgacgtgctgtccactaaaccagtgctcaataagctgactgtgtacaccaccctgatcgacgtcactaagggtcagtttgaaacctacctccgcgattgcccggatccgtgcatcggatgg

SEQ ID NO: 17159 - DNA, 1185 bp, synthetic construct
  misc_feature 1..1185: note = source = /note="Description of Artificial Sequence: Synthetic coding sequence"
  source 1..1185: mol_type = other DNA
atgcccggacgcagttgcgtagcccttgtcttgctggccgccgcggtttcctgcgctgtagcgcaacatgccccaccgtggaccgaagactgccgaaagtcaacgtatcccccgagcggcccaacctaccggggcgcggtcccctggtacacaataaatcttgatctgccgccttacaaaagatggcatgagttaatgttggacaaagcgccagtgctcaaggtgatcgtaaattccctgaagaacatgatcaacactttcgttccttcgggcaagattatgcaagtggtagatgagaagctgcccggcctgctgggaaacttccccggacctttcgaagaggagatgaaaggaatcgccgctgtaactgatattccacttggtgagattattagcttcaatatattctacgagctgttcaccatttgcacatcgattgtcgctgaggataagaagggtcatctaatccacggtcgtaacatggattttggtgtctttctgggctggaacataaataatgatacttgggtcatcaccgagcagctcaaacccctgactgttaacttagacttccaacgcaacaataaaactgtgtttaaagccagttccttcgccggatatgtgggaatgctgacgggcttcaagccaggacttttctcccttacactaaacgaacgtttctcgataaacggaggctatctcggtattctcgaatggattctaggcaagaaggatgtgatgtggatcggtttcttgacacgaactgtgctggaaaattccactagctacgaggaagccaagaaccttctgacaaaaacgaagatcctcgcccccgcctacttcatactaggaggaaaccagagcggagagggctgcgtgatcacacgagatcgcaaggaatccctggatgtatatgaactggatgccaagcagggcagatggtacgtggtgcagacaaactacgaccgatggaagcacccattttttctggatgaccgcaggacaccggccaagatgtgccttaataggaccagccaggagaacatctcgttcgagacaatgtacgacgtgctgtccaccaagccagtcttaaacaagctcaccgtttacacgacgctgatcgatgtgaccaagggccagttcgagacctatctgagagactgccccgacccgtgtatcggctgg

SEQ ID NO: 17160 - DNA, 1185 bp, synthetic construct
  misc_feature 1..1185: note = source = /note="Description of Artificial Sequence: Synthetic coding sequence"
  source 1..1185: mol_type = other DNA
atgccgggccgctcatgcgttgctttggtgttgcttgccgcggccgtgtcgtgtgcggtggcacaacatgctccgccgtggaccgaggactgtcggaagagcacctacccgccttccggaccgacctaccggggcgcggtgccgtggtacaccatcaacttggacctgccgccctacaaaaggtggcatgaactgatgctcgataaggccccagttctcaaggtgattgtgaactcactgaaaaacatgatcaatacttttgtgccgtctggaaaaatcatgcaagttgtggatgaaaagctcccgggtctgcttggtaatttccctggacctttcgaagaggagatgaagggaattgccgctgtgactgatatcccgctgggtgagatcatctcctttaacatcttctacgaactgttcaccatctgcacctcaattgtggcggaagataagaagggccacttgatccacggaagaaatatggacttcggagtctttctggggtggaatatcaacaatgacacctgggtgatcaccgagcaattgaaaccactgaccgtgaacctcgactttcaaaggaacaataagacggtgtttaaggcctcgtccttcgccggatacgtgggaatgcttaccggattcaagccgggactgttctcgctgaccctcaacgaacgatttagcataaatgggggataccttgggatcctggaatggatcctgggtaagaaagacgtcatgtggattggcttcctcacccggaccgtgctcgagaacagcacctcttacgaggaagccaaaaatctgcttactaagactaagattctggcaccggcatacttcatcctgggcggaaaccagtcaggcgaaggatgcgtcatcacgcgggaccggaaggaaagcctggacgtctatgaactggatgcaaagcagggaagatggtatgtggttcaaaccaactacgatcggtggaaacacccgtttttcctggacgatcgccgcactccagccaagatgtgccttaatcgcacgtcccaggagaacatctcgttcgaaactatgtacgacgtgctgtccaccaagcctgtgttgaacaagctcactgtgtacacgaccctgatcgacgtgaccaagggacagttcgagacttatctgagggattgcccagacccgtgtatcggatgg

SEQ ID NO: 17161 - DNA, 1185 bp, synthetic construct
  misc_feature 1..1185: note = source = /note="Description of Artificial Sequence: Synthetic coding sequence"
  source 1..1185: mol_type = other DNA
atgccgggaaggtcttgtgtagctctggttctcctggcagcagctgtctcttgtgccgtcgctcagcatgcacccccttggaccgaagactgcagaaagtctacctatccaccgagtggccctacctacagaggcgcagttccatggtacaccatcaacctcgatttgcctccctacaagagatggcacgaactgatgctggataaggcaccagtcctgaaagttatcgtaaacagtctgaagaacatgataaacacattcgtgccctcaggcaagattatgcaggtggtagatgagaagctccccggtctgctcggaaatttccccggccccttcgaagaggaaatgaagggcattgcagccgtgactgacatcccattgggagagattatttcatttaatattttctatgaactgttcactatctgcacctccatagtagctgaggacaagaagggacacctgattcacggcaggaatatggacttcggcgtgtttcttggatggaatatcaacaacgatacttgggtaatcacagagcaattgaagccgctcacggtaaacctcgactttcagcgcaacaacaaaactgtcttcaaagcctcttccttcgccggttacgtaggtatgctgaccggctttaagcctggacttttctctctgactctcaatgaacgcttctccatcaacggaggatatttgggaatcctggagtggatcctgggtaagaaagatgttatgtggatcggattcttgacaagaactgtcttggaaaattctacgagttacgaggaagccaagaatctgctgaccaaaacaaagattttggcgcccgcatacttcatcctgggtggtaatcagagtggtgagggttgtgtcatcactcgcgatcgcaaggagtctcttgacgtctacgagctggacgcaaagcaaggacgctggtatgtcgtgcaaaccaattacgacaggtggaaacaccctttcttcctggatgacaggcgcacccccgccaagatgtgcttgaacaggacctcacaggaaaatattagtttcgaaacgatgtacgacgtgttgtcaaccaagcccgtgctcaataagcttaccgtctacactacgctcatagatgtgactaagggccagtttgaaacgtatctgcgcgattgcccagacccttgcattggatgg

SEQ ID NO: 17162 - DNA, 1185 bp, synthetic construct
  misc_feature 1..1185: note = source = /note="Description of Artificial Sequence: Synthetic coding sequence"
  source 1..1185: mol_type = other DNA
atgccaggcaggagctgtgtggctttggtccttctggcggcggcagtgtcctgtgcagtcgcgcagcatgctcccccctggacagaggattgccgtaaatccacatatcctccgagtggccctacgtatcgcggagctgtaccatggtacactattaatctggatcttccaccatacaagcggtggcatgagctgatgctcgacaaagcgcctgtgctgaaggttatagtcaactctctgaagaatatgataaacacattcgtccccagcggcaagattatgcaggtcgtggacgagaagctgccaggattgttaggtaacttcccgggaccatttgaggaggagatgaaaggcatcgctgccgtcaccgacattcctctgggcgagataatatctttcaatattttctacgagctttttaccatttgtacaagcattgtggctgaggataaaaagggtcatctgatccacgggcgaaacatggatttcggcgtgttcttgggttggaacattaataacgacacgtgggttataacggaacagttaaaacccttgacagtcaatctggactttcagaggaacaacaaaaccgttttcaaagccagttcctttgcaggctacgttggtatgctcacaggcttcaaaccaggcttattcagtttgactctaaatgagagattcagtataaacggcgggtatttgggaatcctggaatggatccttggaaaaaaagacgtgatgtggatcggattcctaacccgcaccgtgctggagaattcaaccagctatgaagaagccaagaatctgctaacaaagactaagattctcgcccctgcgtacttcatcctgggaggaaaccagagtggtgaaggctgcgtgattacgcgggacaggaaagagagcctggacgtgtacgaactcgatgcgaaacagggcagatggtacgtggtgcaaacgaattacgatagatggaagcatcctttcttcctcgatgatcgacgcaccccggctaaaatgtgtttgaatcgaaccagccaggaaaacatcagctttgaaaccatgtatgatgttctgtcgactaaaccggtgctcaacaaactaacagtatatacaacactgatcgatgtgacaaagggacaatttgagacttacttaagggattgtcctgatccgtgtatcggctgg

SEQ ID NO: 17163 - DNA, 1185 bp, synthetic construct
  misc_feature 1..1185: note = source = /note="Description of Artificial Sequence: Synthetic coding sequence"
  source 1..1185: mol_type = other DNA
atgccgggaagatcatgtgtagcactcgttctgctcgctgccgcagtctcatgtgccgtcgcacagcatgcgcccccgtggaccgaagattgcaggaaatccacttaccccccatctggccctacttacaggggagccgtcccgtggtacaccatcaacctggacctgcccccatacaagcgctggcatgagctgatgcttgataaggcacctgtgctgaaagtgatcgtcaatagcctgaaaaacatgattaacaccttcgtgccatccggaaagattatgcaagtggtggacgaaaagctgcctgggcttcttggtaactttccgggtccttttgaagaggagatgaagggaatcgcagcagtgactgatatcccactcggtgaaatcatctcctttaacattttctacgaactttttacgatttgtactagcattgtcgccgaggacaagaagggacatctcattcatggcagaaacatggattttggtgtgtttttgggctggaacattaacaatgatacttgggtgatcactgagcaacttaaaccactcactgtgaaccttgatttccaacggaataacaaaaccgtctttaaagcgtcctcgtttgcaggatacgtcggtatgctgaccggttttaagccaggacttttctcgcttactctgaacgagcgcttttcaattaacggaggatacctcggcatactcgagtggattctgggaaagaaggatgtgatgtggatcggtttcctgacccgaactgtgcttgaaaattctaccagctacgaggaggctaagaacctgctgaccaagaccaaaatcttggcgccagcatactttatactcggtggcaatcaaagcggggagggttgcgtcattaccagggacaggaaggaatctttggatgtgtacgaactcgatgcaaagcaaggtagatggtacgtggtgcaaaccaactacgatcggtggaaacatccttttttcctggatgatcgaagaaccccagctaagatgtgtcttaaccgtacttcgcaggaaaacatttcctttgaaacgatgtacgatgtgttgagcaccaaacctgtgcttaacaagctcactgtctacaccaccctgatcgatgtgactaagggacaattcgaaacctatcttagggactgccccgacccttgtatagggtgg

SEQ ID NO: 17164 - DNA, 1185 bp, synthetic construct
  misc_feature 1..1185: note = source = /note="Description of Artificial Sequence: Synthetic coding sequence"
  source 1..1185: mol_type = other DNA
atgcccgggagatcctgcgtggccctcgtgctgctcgcagcagcagtgtcctgcgctgtagcgcagcacgctccaccctggactgaggattgtcggaagtcaacctaccccccaagtggtccaacatatcgaggagctgtgccctggtataccatcaatctggatttgcctccgtacaagaggtggcatgaacttatgctggacaaggccccagtgctcaaggtgatcgttaacagtctcaaaaacatgattaatacattcgtgccttccggcaagattatgcaggtggtggatgagaagttacctgggttgttggggaactttccaggtcccttcgaggaagaaatgaaaggaatcgcagccgttacagacattcccctgggagagatcatatcctttaatatattctatgaactcttcacaatatgtaccagcatcgtggccgaggataagaagggtcatctgatccacgggaggaatatggacttcggggtctttcttggatggaacatcaacaatgatacttgggtaattacagagcagctgaagcctctgactgttaacttagattttcaaagaaacaataagaccgtgttcaaggccagctcttttgcaggctacgttggaatgcttactggatttaagcccggtctgtttagccttactctcaatgaaagattttccataaacggcggttacttaggaatcctggaatggattttgggtaagaaagatgttatgtggatcggattcctgacccgcactgtgctggagaactccacttcgtatgaggaggccaaaaaccttctgacgaaaactaagatccttgctcctgcctattttatcctggggggaaatcagagtggagagggatgtgtaataaccagggaccgcaaagaaagtctcgacgtctacgagctggacgccaaacaaggcaggtggtatgttgtccagacgaattacgatagatggaagcaccctttcttcttagatgataggcggacccctgcaaagatgtgtctcaatcgaacctctcaggaaaacatctcctttgagaccatgtatgatgtgctgagcactaagcccgtgcttaataaactgaccgtttacactaccctcatcgatgtgacaaagggacaatttgaaacatatctcagggattgccctgatccttgcattggctgg

SEQ ID NO: 17165 - DNA, 1185 bp, synthetic construct
  misc_feature 1..1185: note = source = /note="Description of Artificial Sequence: Synthetic coding sequence"
  source 1..1185: mol_type = other DNA
atgccaggtcggtcctgtgtggcactcgtgttgttggcggcagcagtcagctgcgccgtggctcagcatgcacctccttggactgaggattgtaggaagagcacctacccaccatcggggccgacctaccggggcgccgtgccatggtacacgatcaatcttgaccttcccccttacaagcggtggcacgagctgatgctggacaaggcacccgtgctgaaggtgatcgtgaacagcttgaagaacatgataaacactttcgtcccttcaggtaagataatgcaggtggtggacgaaaagttgcctggcctgcttggaaacttcccaggtccatttgaagaagaaatgaaggggatagcagccgtgaccgatataccccttggagagataatctcctttaacatcttctacgaactttttaccatttgtacttccattgtggcagaagataagaagggtcacctgatccatggacgaaatatggattttggagtctttcttgggtggaacataaacaacgacacctgggtgataaccgagcagctgaaacccctcacggtgaatcttgacttccagagaaataacaagactgtgtttaaagcatcgtcgtttgctggctacgtgggaatgctgactgggtttaaacctgggcttttcagccttacccttaatgaacgcttttcgattaacgggggttacctgggaatacttgagtggatccttggtaagaaggatgtcatgtggatcggatttctgacccggaccgtccttgaaaacagcacctcgtacgaagaggcgaagaatcttctcactaagaccaaaatcctggcccctgcgtactttatactcggagggaaccagtcgggagaaggctgcgttatcacccgtgatcgcaaggaatcactcgatgtgtacgaacttgatgccaaacaaggaagatggtacgtggtccaaaccaactacgatcgctggaagcatccattctttctggacgataggcgcaccccggcaaagatgtgtctcaatcgcactagccaagaaaacatttccttcgaaactatgtacgatgtcctgagcactaagccagtgctcaacaagctgactgtgtacactaccctgattgacgtgaccaagggccaatttgaaacgtacctcagggattgtcccgatccgtgtatcggttgg

SEQ ID NO: 17166 - DNA, 1185 bp, synthetic construct
  misc_feature 1..1185: note = source = /note="Description of Artificial Sequence: Synthetic coding sequence"
  source 1..1185: mol_type = other DNA
atgcccggcagatcatgcgtggcacttgtgcttctggcggcagcagtcagctgcgcggtggcacaacatgcaccaccctggactgaagattgtcggaaatccacctaccccccatccgggcctacctaccggggtgctgtgccctggtacacgatcaatcttgacctgcctccttacaagagatggcatgaattgatgcttgacaaggcccccgtactgaaggtcattgtgaactcactgaagaatatgatcaacacttttgtgcccagcggaaagatcatgcaagtcgtggatgaaaagctgccaggactgcttggaaacttccccggaccatttgaagaggagatgaagggaatcgcagcagtgaccgatattcctcttggagagattatcagctttaacattttctacgagctgtttactatttgtacgtcaatcgttgctgaagataagaaggggcatcttatccacggaaggaatatggactttggtgtgttcctcggttggaacataaacaacgatacctgggtgattacggagcagctcaagccacttaccgtgaacctggatttccaacggaataacaagactgtgtttaaggcaagttctttcgcgggttatgtcggtatgttgactggctttaagcctgggctgttctcgcttactcttaacgaaagattctcgattaacggtggatacctggggattctcgaatggattctggggaagaaagatgtcatgtggattggtttcctgacgcggaccgtccttgaaaacagcactagctacgaagaggcgaagaacctgctgaccaagacgaagattcttgcacctgcctatttcattttgggcggaaatcaatccggggagggttgtgtcatcaccagggatagaaaggaatcactggacgtctacgagttggacgccaaacaaggcaggtggtacgtggtccagactaactacgatcgttggaaacatcccttttttctggacgatcgaaggactccagccaaaatgtgtctgaaccgtacctcacaggaaaacatctccttcgaaaccatgtacgacgtcctttcgactaagccggtgcttaacaagctgactgtgtacaccactcttattgacgtgactaagggacagttcgaaacttatcttagagactgtccagatccttgtataggatgg

SEQ ID NO: 17167 - DNA, 1185 bp, synthetic construct
  misc_feature 1..1185: note = source = /note="Description of Artificial Sequence: Synthetic coding sequence"
  source 1..1185: mol_type = other DNA
atgccaggccggtcttgtgtggctctggttctactggccgcggcggtgtcctgcgccgttgctcagcatgcccccccctggacggaggattgccggaaaagcacataccccccctcggggcccacttatcggggtgcggtaccttggtacaccataaacctagatcttcccccttacaaaagatggcacgaactcatgctagataaagcacctgtactgaaagtcatcgtaaattccctgaagaatatgattaataccttcgtaccgagcggtaagattatgcaggtcgtggatgaaaagctgccgggactcttaggcaattttccaggcccatttgaggaggagatgaaggggatagcagccgtgacggacatcccactaggggagataatctcctttaatatcttttatgaactgttcaccatatgtaccagtatcgtggctgaggataagaagggccacctcattcatggtcgcaatatggatttcggagtcttcctggggtggaacattaacaatgacacatgggtgatcactgagcagctgaaaccactcaccgtcaatcttgatttccagcgcaacaataagactgtgtttaaggcgagctccttcgccggttacgtgggaatgctcacaggctttaagcccggactctttagcctcaccctcaatgaacgcttctcaattaacggtgggtatctcggcatcctggaatggattttgggcaaaaaggatgtgatgtggattggcttcttgacacgcacagtgcttgagaatagcaccagttatgaagaggcaaaaaacttgttgaccaagactaagatccttgcacccgcatacttcattcttggcgggaatcaatcaggcgaaggatgcgtgatcacacgggaccgcaaggaatccctggatgtatacgagctggatgcaaaacaggggcggtggtatgtggtacagaccaactacgatcggtggaagcatccattttttctcgacgatcgccgaacaccagccaagatgtgcctcaatcggacctcccaggagaatatttcattcgaaacaatgtatgacgtgctgagcaccaagcccgtgttgaataagctgactgtctacacaacattaattgatgtaacaaagggccaatttgagacgtacctgcgcgattgcccagatccatgtattgggtgg

SEQ ID NO: 17168 - DNA, 1185 bp, synthetic construct
  misc_feature 1..1185: note = source = /note="Description of Artificial Sequence: Synthetic coding sequence"
  source 1..1185: mol_type = other DNA
atgcccggaagatcgtgtgtggcattagtccttctggccgcggctgtctcctgtgccgtagcgcagcatgcacccccgtggaccgaggattgccgtaaatctacctacccaccctctggcccaacctataggggggcagtcccttggtatacaataaacctggatctacctccatacaagagatggcacgaactcatgctggacaaggctcctgtactcaaagttattgtgaactctctgaagaatatgataaacacgttcgttcctagcggcaaaatcatgcaagtggtggatgaaaagctgccaggcctccttggcaattttccaggcccgtttgaggaggagatgaaaggtatagctgctgtgactgacatacccctcggcgagataatcagttttaacatcttttatgaactcttcacgatctgtactagcattgtggcagaggataagaaggggcaccttattcatggcagaaacatggatttcggcgtcttccttggatggaatatcaataacgatacgtgggtaataaccgaacagctcaagcctctgacagtgaatcttgacttccagaggaacaacaagaccgtgttcaaggccagttctttcgccggctatgtgggcatgcttaccgggttcaagcccggactttttagcctcaccctcaatgaacgttttagtatcaacggtggttatctgggtatactggagtggatactgggtaagaaggacgtgatgtggatcggctttctaacgagaacggttctggagaactctacgagctatgaagaagcaaagaaccttcttactaaaactaaaatcctggcacctgcctattttatcctcggtggcaatcagtcaggcgagggatgtgtcataactagggatcggaaagaatccttggatgtgtatgaattggacgcaaagcagggcaggtggtatgtggttcaaactaactatgacagatggaaacatccgtttttcctagacgaccggagaaccccagcaaagatgtgtctgaataggacctcgcaggagaacatctcgtttgagaccatgtacgatgttttaagcactaagcccgtgctgaacaagctcaccgtttacacgacgctcatcgatgtgacaaagggtcagttcgaaacctacctgcgagactgcccggatccctgcattggttgg

SEQ ID NO: 17169 - DNA, 1185 bp, synthetic construct
  misc_feature 1..1185: note = source = /note="Description of Artificial Sequence: Synthetic coding sequence"
  source 1..1185: mol_type = other DNA
atgccaggccgatcttgtgtggcgcttgttcttcttgctgcagccgtctcatgcgctgtggctcagcatgcccctccgtggacagaggactgtagaaaatcgacataccccccaagcggccctacttatcgcggcgccgtcccctggtatactatcaatttggatcttcccccctacaagcgttggcacgaactgatgctggataaagcccctgtgctaaaggtgatcgttaactctctcaagaacatgatcaatacattcgtgcctagcgggaaaatcatgcaggtggtggatgagaagctcccaggcttgctcgggaacttccccggcccatttgaggaggaaatgaaagggatagccgctgtgacagatattcctctgggcgagatcatttcattcaatattttctacgagctcttcaccatttgtactagcattgttgctgaagataaaaaagggcaccttatccacggccggaatatggatttcggggttttcctgggttggaacatcaacaacgatacatgggtgattactgagcaactgaaaccactgaccgtgaacctcgactttcagagaaataataaaacggtattcaaggccagtagctttgcggggtacgtgggcatgcttaccggttttaaacctggtctcttttctctgaccctgaatgagcggttctccattaacggaggataccttggaatattggagtggatcctggggaaaaaggatgtgatgtggatcggcttcctaacgagaactgtgttggaaaactcgacttcatatgaagaggcaaagaacctgctcaccaaaactaaaatactcgcgccagcttacttcattctgggcgggaaccaatccggcgaagggtgtgtaatcacaagagatcggaaggagagtctcgacgtgtatgagttagacgcgaaacaaggacgctggtatgtggtgcagaccaactatgaccggtggaagcacccattcttcctcgacgacaggcggacccccgccaaaatgtgcctgaatcgaaccagccaggagaatatcagcttcgaaactatgtatgacgttctatctacgaagccagtgctgaacaaacttacagtctacacaacactgattgacgtaacgaaagggcagttcgagacttatctgcgggactgtcctgacccctgcatcggatgg

SEQ ID NO: 17170 - DNA, 1185 bp, synthetic construct
  misc_feature 1..1185: note = source = /note="Description of Artificial Sequence: Synthetic coding sequence"
  source 1..1185: mol_type = other DNA
atgcctggccgttcatgtgttgccctagtgcttctggccgcggccgtctcatgcgcggttgcccaacacgcacccccttggacggaagactgtagaaaatccacataccctccatccggaccaacttatagaggcgctgtgccatggtacacaatcaacctggatttaccgccctataagcggtggcacgagctgatgctggacaaggccccggtcttgaaggtaatcgtgaattctcttaaaaatatgattaacacatttgtgccatcgggcaaaatcatgcaggtggtggacgaaaagctgcccggactcttggggaacttccccgggccctttgaagaagaaatgaaggggatcgctgcagtgacagacatccctcttggcgaaattattagtttcaatattttctacgaactgttcactatctgcacctcaattgtcgcagaggacaagaaagggcacctgattcatggccgaaacatggacttcggagttttcctgggctggaacattaataacgatacatgggtcattacagagcaactcaagcctttgactgtgaacctcgattttcaacggaacaacaagaccgtctttaaggcctccagcttcgcaggatatgtaggcatgctgaccgggtttaaaccaggcctattcagtttgacccttaacgaaaggttttccatcaacggggggtaccttggcatcctggagtggattctaggcaagaaagacgttatgtggataggcttcctgacaaggaccgttctcgagaactccacaagctatgaggaagctaaaaacctcttaactaagacaaagatattggcccctgcctatttcatcttgggaggaaaccagtcaggagagggatgtgtgatcactcgcgatagaaaggagtccctggacgtgtatgagctggatgcaaaacagggaaggtggtacgtggtgcagacaaattacgaccggtggaagcacccattttttttagacgatcgccggactccagccaagatgtgcctgaatcgtaccagccaggaaaacatttcgtttgaaactatgtacgatgtgcttagtactaagcctgtgctgaacaaactcacagtttataccaccctgattgacgtgaccaaaggacaattcgaaacatatctgcgagattgccccgacccatgtataggatgg

SEQ ID NO: 17171 - DNA, 1185 bp, synthetic construct
  misc_feature 1..1185: note = source = /note="Description of Artificial Sequence: Synthetic coding sequence"
  source 1..1185: mol_type = other DNA
atgcctgggagatcctgcgtcgcgttggtgctcttggcagccgctgtgtcatgtgcggtggcacaacacgcaccgccttggactgaggactgtagaaagtcaacttacccaccctcgggaccaacttaccggggagcggtgccttggtacaccattaacctggatctgcccccttacaaacggtggcacgaattgatgctggacaaggcccccgtgcttaaggtgatagtcaatagcctgaagaacatgatcaatacctttgttccatcgggtaagattatgcaggtggtagacgaaaaactgccggggctgctggggaattttccagggccttttgaggaggaaatgaaggggatcgccgccgtaacggatattcctcttggcgaaatcatctcattcaatatcttttacgagctcttcaccatttgcacttctattgtggcagaagataagaaaggtcatcttatccatggaaggaacatggacttcggagtgtttctgggatggaacataaacaatgatacttgggtaattaccgaacaactgaaacctctgacggtgaacctcgattttcagcgaaacaacaagactgttttcaaggcaagctcctttgcaggttacgtgggtatgctgactggattcaaacccggcctgttttcgctgactctgaacgagcggtttagtataaacggagggtatcttggtattctcgaatggatcctgggaaagaaggacgtcatgtggatcggtttccttactagaactgtgcttgaaaatagcacgtcatacgaagaagcaaagaacctcctcacgaaaactaaaatcttggcacccgcgtacttcatccttggtggcaatcaatcgggagagggctgtgtgattactcgcgatcggaaggaatcccttgacgtgtacgaactggatgcaaagcaaggacgttggtacgtggtccagaccaactacgatagatggaaacatccatttttcctggatgatcggcgcacccctgccaaaatgtgcctgaaccgcacgagccaagaaaacatatcttttgaaacgatgtatgatgtcctctccaccaaaccagtgctgaataaacttactgtgtacaccacccttattgacgtgaccaagggacagttcgaaacctacttgagggactgtccagatccctgtataggttgg

SEQ ID NO: 17172 - DNA, 1185 bp, synthetic construct
  misc_feature 1..1185: note = source = /note="Description of Artificial Sequence: Synthetic coding sequence"
  source 1..1185: mol_type = other DNA
atgcccggcagatcctgtgttgcactcgtgctcctggctgctgccgtgtcctgtgcggtcgcccagcacgccccaccttggaccgaggactgccgcaagagcacatatcccccatccgggcccacatatcgaggagccgtcccctggtacaccattaacctggatttgccaccctataaacgatggcacgagctaatgctggacaaagccccagttttgaaggtgatagtcaactctcttaagaacatgatcaacacctttgtgccaagtgggaaaatcatgcaggtcgtggacgagaaactgccaggcttgctcggtaatttcccaggccccttcgaagaagaaatgaagggaatcgcggccgtaacagacattcctcttggggagattatttccttcaacatattctatgagctctttactatctgcacaagcatagtcgctgaagataaaaaaggccatctgattcacgggaggaatatggacttcggcgtctttcttggctggaacatcaacaatgatacatgggtgattacagaacagctgaaaccactgacggtaaatctggactttcagcggaacaacaagactgttttcaaagcttctagctttgcaggatacgtgggcatgctgactgggtttaagccaggtctctttagtctgaccttgaacgaaaggttttccattaacgggggttacctgggaatcctggagtggattctcggtaagaaggacgttatgtggatcgggttcctgacacggacggttctcgaaaattcaaccagttatgaagaggctaagaacttgctaacaaagaccaaaatactggcgccagcctactttatccttggcggtaatcagtccggagagggatgcgtcatcacacgagataggaaggaatctctggatgtgtacgagctcgacgcaaaacagggtcggtggtatgtggtccagaccaactacgacaggtggaagcacccgttcttcctggatgatcggcggaccccagcaaaaatgtgtctgaatagaacatcccaggaaaacatcagctttgagaccatgtacgacgtgcttagtactaagccggtgctcaacaagctgaccgtttataccacattgatcgatgtgaccaaggggcagttcgagacttatttgcgtgattgccctgacccttgtattggatgg

SEQ ID NO: 17173 - DNA, 1185 bp, synthetic construct
  misc_feature 1..1185: note = source = /note="Description of Artificial Sequence: Synthetic coding sequence"
  source 1..1185: mol_type = other DNA
atgccagggaggagctgtgtggcactcgtgttactagccgccgcagtaagctgcgccgtggctcaacatgcccccccatggaccgaggattgcaggaagtcaacctatcctcccagcggacctacataccggggcgctgtcccctggtacacaattaatttggatcttcccccatacaaacgctggcacgagctgatgcttgataaggcacctgttctgaaggtgatcgtaaacagcctgaaaaacatgattaacacgtttgtcccctctggcaaaattatgcaggttgtggacgagaaattgccgggcctactggggaatttccctggaccgttcgaggaggaaatgaagggaattgccgccgtcactgatataccccttggcgagattattagttttaatatcttctatgaactgtttacaatatgtacttccatcgtagccgaagataagaaaggccaccttatccatggcaggaatatggactttggagtgtttttgggatggaatatcaacaacgacacctgggtgattaccgagcagttgaagcctctgaccgtcaatctagattttcagcgcaacaataaaactgtcttcaaggcctcttcgtttgcggggtacgtgggaatgctaaccggttttaagcccggactgtttagtctgaccctcaatgagagatttagtatcaacggcggctatcttggaattctcgaatggatactgggcaagaaggacgtgatgtggatcgggttcttgacccgcacagtactagaaaactccactagctatgaagaggcgaagaatctgctgacaaaaacgaaaatcctggcacctgcctatttcatacttggcggcaatcaatccggtgaggggtgcgtgatcacccgggatcgcaaggagtcattagacgtgtatgagctggacgccaagcagggaagatggtatgtggtgcaaacaaactatgacagatggaaacacccgtttttcttagacgacaggcggactcctgctaaaatgtgcctaaatcgcacatcccaggaaaacatatcatttgaaacgatgtatgatgtgttgtctactaaacctgtcctgaataaactcaccgtgtatactaccctgattgacgtcactaaggggcagtttgaaacctacttgcgggattgtccagacccctgcataggatgg

SEQ ID NO: 17174 - DNA, 1185 bp, synthetic construct
  misc_feature 1..1185: note = source = /note="Description of Artificial Sequence: Synthetic coding sequence"
  source 1..1185: mol_type = other DNA
atgcctgggcgtagctgtgtggcacttgtgctccttgcagccgccgtgtcctgcgcagtggctcaacatgcgccgccctggaccgaagattgtagaaagagcacttaccccccgtccggtccaacgtacagaggcgccgtgccttggtacactatcaacctggaccttcccccttacaagcgttggcatgaactcatgcttgacaaggcaccagtcctgaaggtcatcgtgaactctcttaagaatatgatcaacacctttgtccctagcggaaagattatgcaggtggtggacgaaaaacttcctggactcctgggcaatttccctggaccctttgaagaagagatgaaggggattgcggctgtcacggatataccactgggagaaatcatttcatttaacatcttctacgagctcttcaccatttgtacgagcattgtggcagaggacaaaaaaggccatctcattcacggtcggaatatggatttcggagtgtttttgggatggaacattaacaatgatacctgggtgattaccgaacaactcaaacccctgactgttaacctcgatttccaacgcaataacaaaaccgtgttcaaggcctcctcgtttgcggggtacgtcggtatgctcactggatttaagccaggactgtttagtttgaccctgaatgaacgcttttcgattaacggtggctacttgggaatactggaatggatactcggtaaaaaggacgtaatgtggattggatttcttacccgcaccgtcctggaaaattccacttcgtacgaggaggcaaagaatcttctgacgaaaactaagatactggcccctgcttacttcattctgggaggtaatcaatcgggtgaggggtgcgtgataacgcgagatcggaaggaatcactcgatgtctacgaacttgatgcaaagcaagggagatggtatgtagttcagaccaactacgatagatggaagcacccctttttccttgatgatcgaagaactccagcaaagatgtgccttaaccggacttcccaggagaacataagttttgaaaccatgtacgacgtgctctcgactaagccagtgttgaacaaacttacggtttacaccaccctgatcgacgtgactaagggccagtttgagacttatctgcgggattgtcctgacccgtgtatcggatgg

SEQ ID NO: 17175 - DNA, 1185 bp, synthetic construct
  misc_feature 1..1185: note = source = /note="Description of Artificial Sequence: Synthetic coding sequence"
  source 1..1185: mol_type = other DNA
atgcctgggaggtcgtgcgtcgcactcgtcctccttgctgcggctgtgtcctgcgcagtggcacagcatgccccgccctggactgaggactgcagaaagtcgacctaccccccgtccggaccgacctacagaggagccgttccgtggtacactatcaatctggacctcccgccttacaaacgttggcacgaactcatgttggacaaggccccagtgctgaaggtgatcgtgaattcgctgaagaatatgattaacaccttcgtgccgtcgggaaagatcatgcaagtggtggatgaaaagttgccgggactcctgggaaacttcccaggcccatttgaggaagagatgaaaggcattgccgccgtgacggatattcctctgggagaaatcatctcattcaacatcttctacgaactcttcaccatctgcacttccatcgtggccgaagataagaaaggccaccttatccacggaagaaacatggacttcggcgtgttcttgggctggaatatcaacaacgatacttgggtgatcaccgagcagctgaagccactcaccgtgaacctggattttcaacggaacaacaagactgtctttaaggcctcttctttcgccgggtacgtgggaatgctgaccggattcaaacctggtttgttcagcctgaccctcaacgagcggttttccattaacggaggctaccttggcatcctcgagtggatcttgggcaagaaagacgtgatgtggatcggattcctgacccgaactgtcctggagaactcaacctcctacgaagaggcgaagaacctgctgaccaaaaccaagatcctcgcaccggcgtactttatcctgggaggtaaccagtccggtgaaggctgcgtgatcactcgcgatcgcaaggaatcattggatgtgtacgaacttgacgcaaagcagggacgctggtacgtggtgcagactaactacgatagatggaagcatccatttttcctggatgaccgccggactccggcaaagatgtgcctgaaccgcaccagccaggagaacatctcgttcgaaaccatgtacgatgtgctgtcaactaagccagtcttgaacaagctgactgtgtatactactctgatcgatgtcactaaaggtcagtttgaaacctacctgcgcgactgcccggatccctgcatcggatgg

SEQ ID NO: 17176 - DNA, 1185 bp, synthetic construct
  misc_feature 1..1185: note = source = /note="Description of Artificial Sequence: Synthetic coding sequence"
  source 1..1185: mol_type = other DNA
atgcccggcagaagctgtgtggccctggtgctcctggctgccgcagtgtcctgcgctgtagcccaacacgcacctccatggaccgaggattgtaggaagtccacgtacccaccttcaggccccacgtaccggggggcagtgccttggtacactatcaacctggacctgcccccttacaaacggtggcacgagttgatgctagacaaagccccagtactcaaagttatcgtcaattctttgaaaaacatgataaacacgtttgtaccttctgggaagataatgcaagtggtcgacgagaaactgccagggctgttgggcaacttccctggccccttcgaggaagaaatgaaggggatcgctgccgtaaccgatatccctctgggtgagatcatctcattcaacatattctatgaactgttcaccatttgcacctcaatcgtggcagaggacaaaaaggggcacctgatccatggacggaatatggattttggagtgttcctcggctggaatattaacaacgatacctgggtgatcactgagcagctcaagcccttaaccgtgaatctagactttcagaggaacaataaaaccgtgttcaaggccagttccttcgctggttacgtgggtatgttgacaggattcaaaccaggcctgttcagcttaacactcaatgagagattctccataaatggcggatatctgggtattctggaatggatcctgggaaagaaagatgttatgtggatagggtttttgactaggacggtcttggaaaacagtacttcctacgaggaggctaagaatctactgactaaaaccaaaatcctggctccggcatactttattctcgggggaaaccaaagcggagagggctgtgttatcaccagggaccgtaaggagtcgttagacgtctatgagctggatgcaaagcagggtaggtggtatgtggtgcagacgaactacgaccgttggaagcaccccttttttttggacgatcggcgaacaccagcgaaaatgtgtttaaatcgcacctctcaggagaatatttccttcgagacaatgtatgatgtactatcaaccaagcccgtccttaataagttaactgtctacaccaccctgatagatgtgactaaagggcaatttgaaacctacctgagggactgcccagatccttgtataggctgg

SEQ ID NO: 17177 - DNA, 1185 bp, synthetic construct
  misc_feature 1..1185: note = source = /note="Description of Artificial Sequence: Synthetic coding sequence"
  source 1..1185: mol_type = other DNA
atgcccggaaggagttgcgtcgccttggtgcttctggctgcagccgtgtcgtgcgccgtggcacaacacgctccaccttggacagaggactgcagaaaaagcacataccctccttctggcccaacctaccgcggcgccgtgccctggtataccatcaacctcgatctgccaccctataagaggtggcatgagcttatgctggacaaggcgcctgtgctcaaggtcatcgtgaattccttaaagaacatgatcaatacctttgtcccgtcgggaaaaattatgcaggtcgtcgatgaaaaacttcccggactcctgggcaatttcccaggcccttttgaggaggagatgaaaggtattgcagcagttactgatattcctctcggggagattatctcttttaatattttctatgaattattcactatctgtacatctatcgtggcggaggacaaaaaaggccacctgatccacggtagaaatatggacttcggagtatttctgggatggaacattaacaatgacacctgggtgattaccgaacagctgaagcctctaacagtcaacctcgactttcagcggaataataagacagtttttaaggctagcagttttgctgggtatgtgggtatgctgactggatttaaacccggcctcttttcgctaactctcaatgaaaggttttctattaatggaggatacctcggcatcctggaatggatcttgggcaagaaggacgtgatgtggataggatttctgacccgaactgtcctcgagaattcaacaagctatgaagaggccaaaaacctgctgacaaagaccaagattctagcaccagcctacttcatccttggtgggaaccaatctggagaaggatgcgttataacaagagaccggaaggagtctctggacgtgtacgaactggacgcgaagcaggggcgctggtacgtcgtgcagaccaattacgatagatggaaacatccttttttcctagacgatagacggaccccagccaaaatgtgcctcaatcgtacatcacaggaaaacatcagcttcgaaactatgtatgatgttctttcaacgaaaccagtgctaaacaagctgactgtgtacaccacccttattgatgtgacaaagggtcagtttgagacatacctgcgcgattgtcctgatccgtgtataggttgg

SEQ ID NO: 17178 - DNA, 1185 bp, synthetic construct
  misc_feature 1..1185: note = source = /note="Description of Artificial Sequence: Synthetic coding sequence"
  source 1..1185: mol_type = other DNA
atgcccgggagaagctgtgtcgcccttgtccttctggcggcagcggtgtcgtgcgccgtggcccaacacgcgccaccatggactgaagactgccggaagtccacctaccctccaagcggaccaacctaccgcggggccgtgccgtggtacaccatcaacctcgacctgccgccgtacaagcgctggcacgaactcatgctcgacaaagcccctgtgctgaaggtcatcgtgaactccctgaagaatatgatcaatacgtttgtccctagcggcaaaatcatgcaggtggtcgacgaaaaactgccgggattgctgggaaactttccgggaccgttcgaggaggaaatgaagggcatcgccgctgtgactgacatcccgctcggcgaaataatctcgttcaatatcttttacgaactgttcaccatctgtacttcgatagtcgccgaagataagaagggtcatttgatccacggacgcaacatggacttcggggtgtttcttgggtggaacattaacaacgacacctgggtgatcaccgaacagctgaaaccacttactgtgaacctggatttccagaggaacaataagaccgtcttcaaggcgtcctcctttgcaggctacgtcggcatgcttaccggcttcaagcccggcctcttttcgttgaccctcaatgagcgattcagcatcaatggaggatatctcggcatcctcgaatggattctgggaaagaaggatgtgatgtggatcgggttccttaccaggaccgtcctggaaaattcgaccagctacgaagaggccaaaaacctgctcaccaagactaagatcttggctccagcttacttcattctgggcggcaatcagtccggagaaggttgcgtgatcaccagagatcgcaaggaatcccttgatgtgtacgaactggacgccaagcagggccgctggtacgtggtgcaaactaactacgacagatggaagcacccgttcttcctggacgataggagaaccccggcaaagatgtgtctcaaccgcacttcgcaggaaaacatttctttcgaaaccatgtacgacgtcctgtcaaccaaaccagttctgaacaagctgaccgtgtacactactctcatcgacgtgaccaagggccaattcgagacttacctcagggactgtcctgatccgtgcatcggatgg

SEQ ID NO: 17179 - DNA, 1185 bp, synthetic construct
  misc_feature 1..1185: note = source = /note="Description of Artificial Sequence: Synthetic coding sequence"
  source 1..1185: mol_type = other DNA
atgccgggtcgaagctgtgtggccttggtgctgctcgccgcagccgtgtcttgcgccgtggcacagcatgcgcctccatggaccgaggactgtaggaaatcgacttaccccccatccggtccgacctacaggggagcggtcccctggtacacgattaatcttgacctgccgccgtacaagcgctggcacgaactgatgctcgacaaagcccccgtgctcaaggtgatagtgaattccctgaagaacatgatcaacacgttcgtcccctccggcaagataatgcaagttgtggatgaaaagctcccggggctgttgggcaatttcccgggtccattcgaggaagagatgaagggaatcgccgctgtgactgacatcccgctgggagagatcatatcgttcaatatcttttacgagctgttcactatctgcacctcgatcgtggcagaggacaagaagggccacctcatccacggacgcaacatggatttcggagtgttcctgggatggaacatcaacaacgacacctgggtgattactgagcaactcaagccgttgaccgtgaacctggattttcaacgaaacaacaagaccgtgtttaaagcctccagcttcgccggatacgtgggtatgctgaccggcttcaaaccgggactcttttcactcactctgaatgaacggttctcgattaacggaggatacctgggcatcctcgagtggatcctgggaaagaaagatgtgatgtggatcggatttctcacccggactgtgctggaaaatagcacgtcctacgaagaagctaagaatctgcttaccaaaacgaagatccttgcgccagcgtatttcatccttggtggtaaccagtccggcgaggggtgcgtgatcacccgggatcgcaaggagagcctcgacgtctacgaactcgacgccaaacaagggcgttggtacgtggtccagactaactacgacagatggaagcacccattcttcctcgacgacagacgcaccccagctaagatgtgcctcaaccggacttcgcaggagaatatcagctttgaaaccatgtacgatgtcctctccaccaagcctgtgctgaataagttgacggtctataccactctgatcgacgtcaccaagggacagttcgagacttatctgcgagattgcccggacccgtgcatcggatgg

SEQ ID NO: 17180 - DNA, 1185 bp, synthetic construct
  misc_feature 1..1185: note = source = /note="Description of Artificial Sequence: Synthetic coding sequence"
  source 1..1185: mol_type = other DNA
atgccgggtcgaagctgtgtggcgctggttctgctggctgccgcggtgtcgtgcgcagtggcgcagcacgccccaccgtggacggaagattgtcgcaagtccacgtatccgccaagcggtcctacatacagaggtgcagttccgtggtacaccattaatctggacctgccgccatacaaacgctggcacgagctgatgctggataaggccccggtgctgaaagttatcgttaacagcttgaaaaatatgattaatactttcgtgcctagcggtaagatcatgcaggttgttgatgagaaattaccgggtctgctcggcaatttcccagggccattcgaagaagaaatgaaaggcattgccgctgtgaccgatatccctctgggtgagatcatcagctttaacattttttacgagctgttcacgatatgcacttccattgtggccgaagacaaaaaaggccacctgattcacggacgtaacatggattttggagtcttcctgggttggaacatcaataatgatacatgggttataaccgagcagctgaagccactcaccgttaacctggactttcaacggaacaataaaacggtcttcaaagcctccagctttgctggctatgtgggtatgctgaccggtttcaagccagggctgttcagtttgacccttaatgagcgctttagcatcaacggtggttacctgggtattctggaatggatcctaggtaaaaaggacgttatgtggattggcttcctgacccgcactgttctggaaaacagcaccagctatgaagaagctaagaacctgctgaccaagactaagattctggccccagcttactttattctgggtggcaatcagagcggcgagggctgtgttatcactcgtgatagaaaagaaagcctggatgtgtacgaactggacgcaaagcagggacgctggtacgttgtccaaacgaattacgaccgatggaaacacccattctttttggatgaccgccgcacaccggccaagatgtgtcttaaccgtacttctcaagagaacatctcctttgagaccatgtatgatgttctgtcaacaaagccagttctgaacaaactgaccgtctacacgaccttgattgacgtgaccaaaggacagtttgaaacctacctgcgtgattgcccggatccttgcattggctgg

SEQ ID NO: 17181 - DNA, 1185 bp, synthetic construct
  misc_feature 1..1185: note = source = /note="Description of Artificial Sequence: Synthetic coding sequence"
  source 1..1185: mol_type = other DNA
atgcctggaagatcctgtgtcgccctagtgctgttagcggccgccgtctcttgcgcggtggcgcagcacgcacctccatggacggaggactgtaggaagtctacctacccacccagtggacccacctaccgcggggccgtgccctggtatactatcaaccttgatctgcccccgtacaagagatggcatgagttgatgttagataaggctcctgtgcttaaggttattgtgaattcactgaaaaacatgattaacacctttgtgccctccgggaagattatgcaagttgtggatgaaaagctgcccggccttctcggaaattttcccgggcctttcgaggaagagatgaaaggcatcgcagcagtgactgatatccccctgggtgaaattattagcttcaatatattttacgagctttttaccatatgtacctcaatcgtggcagaggataagaagggccaccttatacatggccgcaatatggattttggagtgtttctgggatggaacatcaataacgacacctgggtgataactgagcagctaaagcctttgaccgtcaatctggacttccagcgcaacaacaaaactgtcttcaaggcctcctccttcgctggttacgttggaatgcttacgggattcaagcctggactgtttagcctcacactgaacgaaaggttctcaataaatggcgggtatctgggcatcctagagtggattctggggaagaaagacgtgatgtggattggctttttaacaagaaccgtgctcgaaaatagcacatcttacgaagaggccaagaatctcctgacgaaaaccaaaatcctcgctcctgcgtacttcattctaggcggcaaccagagcggggagggatgcgtaattacgcgtgaccgtaaagaatctctggacgtctatgagctggatgcaaaacagggacggtggtatgtggtgcagacaaactacgataggtggaagcacccattcttcctggatgataggagaacgcccgcaaaaatgtgcttgaacagaacctctcaggaaaacatctcctttgagacaatgtacgatgtactgtccactaagcccgtgctcaataagttgaccgtgtataccaccctcatcgatgtaacaaaaggacaatttgagacgtacctgcgagactgcccggacccctgcataggctgg

SEQ ID NO: 17182 - DNA, 1185 bp, synthetic construct
  misc_feature 1..1185: note = source = /note="Description of Artificial Sequence: Synthetic coding sequence"
  source 1..1185: mol_type = other DNA
atgcctggccgcagctgcgtcgccttagtgctgttggccgcagccgtgtcctgcgcagtcgctcagcacgcacccccctggactgaagattgtcggaaaagcacttaccctccatcaggccctacctaccgcggcgccgtcccatggtatacaatcaatcttgacttacctccatacaagagatggcacgagctgatgcttgacaaggcacctgtcttgaaggtgatcgtcaacagcctgaaaaacatgattaacacctttgtgccatcagggaagattatgcaagttgttgatgagaaactgcccggtctgttaggcaatttccctggccctttcgaggaggaaatgaaaggcatcgccgctgtcaccgacatccctctgggagaaattataagctttaacatattttacgaactgttcactatatgcacctcaatcgttgcagaagacaaaaagggccacctcatacatggtagaaatatggattttggagtgttcctgggttggaacattaataacgacacatgggtgataaccgaacagctgaagccattaactgtcaacttggactttcagagaaataacaaaactgtgtttaaggcttctagtttcgctggttacgtcggaatgctcaccgggttcaagcctggcttatttagcctgactttgaatgaacgcttcagcatcaacggaggttatctaggcatattggaatggatactgggcaaaaaggacgtcatgtggattggtttccttacaaggactgtccttgaaaatagtaccagctatgaggaggccaagaacttactgaccaagaccaagattctggcccctgcctactttatcctcggcgggaaccagtccggagagggttgtgttatcacccgagaccgtaaagagagcctggacgtgtatgagttagatgctaagcagggacgatggtacgtcgttcagacaaactacgatcgatggaaacacccctttttcctagacgatcggagaacacccgccaaaatgtgtctgaataggactagtcaagagaacataagcttcgagacaatgtacgacgtattatccaccaaaccagtattgaacaagctgactgtatacacaaccctgatcgacgtgacaaaagggcagttcgaaacctacctgcgggattgtcccgacccatgcattggctgg

SEQ ID NO: 17183 - DNA, 1185 bp, synthetic construct
  misc_feature 1..1185: note = source = /note="Description of Artificial Sequence: Synthetic coding sequence"
  source 1..1185: mol_type = other DNA
atgccgggtcgatcgtgtgtagcgttagtattattagcggcggcggtatcgtgtgcggttgcgcaacatgcgccgccgtggacggaagattgtcgtaaatcgacgtatccgccgtcgggtccgacgtatcgaggtgcggttccgtggtatacgataaatttagatttaccgccgtataaacgttggcatgaattaatgttagataaagcgccggttctaaaagtaatagttaattcgttaaaaaatatgataaatacgtttgtaccgtcgggtaaaataatgcaagtagtagatgaaaaactaccgggtctattaggtaattttccgggtccgtttgaagaagaaatgaaaggtatagcggcggtaacggatataccgctaggtgaaataatatcgtttaatatattttatgaattatttacgatatgtacgtcgatagtagcggaagataaaaaaggtcatttaatacatggtcgtaatatggattttggtgtttttctaggttggaatataaataatgatacgtgggttataacggaacaattaaaaccgttaacggtaaatttagattttcaacgtaataataaaacggtatttaaagcgtcgtcgtttgcgggttatgtaggtatgttaacgggttttaaaccgggtttattttcgttaacgttaaatgaacgattttcgataaatggtggttatttaggtatactagaatggatattaggtaaaaaagatgttatgtggataggttttctaacgcgtacggtattagaaaattcgacgtcgtatgaagaagcgaaaaatttactaacgaaaacgaaaatattagcgccggcgtattttatattaggtggtaatcaatcgggtgaaggttgtgtaataacgcgtgatcgaaaagaatcgttagatgtatatgaattagatgcgaaacaaggtcgatggtatgtagtacaaacgaattatgatcgatggaaacatccgttttttttagatgatcgtcgaacgccggcgaaaatgtgtttaaatcgaacgtcgcaagaaaatatatcgtttgaaacgatgtatgatgtattatcgacgaaaccggttttaaataaattaacggtatatacgacgctaatagatgtaacgaaaggtcaatttgaaacgtatttacgtgattgtccggatccgtgtataggttgg

SEQ ID NO: 17184 - DNA, 1185 bp, synthetic construct
  misc_feature 1..1185: note = source = /note="Description of Artificial Sequence: Synthetic coding sequence"
  source 1..1185: mol_type = other DNA
atgcctggccgatcatgtgtggcccttgttcttcttgcagcagcagtgtcatgtgccgtggcccaacatgcaccaccgtggaccgaagattgtcggaagtccacttatcccccttccggacccacttatcggggagcagtgccttggtacacgattaatctcgatcttccaccatacaagcgttggcatgagcttatgctggataaggcacctgttctgaaagtgattgtgaactcactcaaaaacatgataaacacgtttgtgccatcgggtaagatcatgcaggtggtggatgagaagctccctggactgctgggtaactttcctggaccatttgaagaagagatgaaaggtatcgcagctgtgacggacattcctttgggcgagattatctccttcaacatattctacgaactttttaccatttgcacttctattgtggctgaagataagaaggggcatttgattcatggtaggaacatggactttggcgtctttctgggttggaatatcaataacgacacttgggtcattaccgaacagctcaagccccttaccgtcaatctcgattttcagcgaaataacaaaaccgtctttaaggcctcgagcttcgcgggctacgtgggaatgctgaccggcttcaagcctggactcttctcactgaccctgaacgaaaggtttagcattaacggtggctacttggggatcctggagtggattctcggtaagaaggacgtgatgtggattgggttccttacgagaactgtgctcgaaaactcgacttcctacgaggaggcaaagaaccttttgacgaaaaccaagatcctggctcccgcatactttatactggggggcaatcaatcaggcgaagggtgtgtgattaccagagatcgtaaggaatccctggatgtgtacgagctggatgccaaacagggccgttggtatgtcgtgcaaaccaactacgacagatggaagcacccttttttcttggacgatcgccgcactcccgcaaaaatgtgcctcaacagaaccagccaggagaatatctcgttcgaaactatgtacgatgtcctgtcaactaagcccgtcctgaacaagttgactgtctacaccacgcttattgacgttactaagggtcaattcgaaacttatctccgagattgtccagacccatgcatcggatgg

SEQ ID NO: 17185 - DNA, 1185 bp, synthetic construct
  misc_feature 1..1185: note = source = /note="Description of Artificial Sequence: Synthetic coding sequence"
  source 1..1185: mol_type = other DNA
atgcccggtaggagctgcgtggcactggtgcttttggctgctgccgtcagctgtgccgtggcacagcacgcacctccttggacagaagactgtaggaagagtacctatccgccatcgggcccgacatacaggggtgctgtgccatggtacactattaacctcgatctgcctccctataagcgttggcatgagctgatgctcgacaaagcaccagtcctgaaagttattgtcaactcccttaagaacatgatcaacactttcgtgccgtctggaaaaatcatgcaggtggtggatgaaaagctccctggcctgctaggcaatttccctggcccattcgaggaagaaatgaaaggcatcgccgctgtgacagatattcccctcggagagattatcagctttaacatattttacgaactcttcactatatgcaccagcattgtggcagaggataaaaagggccacttgattcatggccgcaacatggacttcggagtcttcctgggttggaacatcaacaacgacacctgggtcatcaccgagcaactgaagccactcaccgtgaacctcgattttcagcggaacaataagaccgttttcaaagcgtcttcctttgccggttacgttggcatgctgacgggcttcaagccgggtctgttttctctgactttaaatgagaggttttcaattaacggaggctaccttggaattcttgagtggatactgggcaaaaaggacgtgatgtggatcgggtttctgacccgcacagtactggaaaattcgacatcatacgaggaggcaaagaacttacttacaaagacaaagatccttgctccggcttacttcatcctgggaggaaatcaaagtggagagggttgtgtgatcactagagaccggaaagaaagcctggacgtttatgaacttgacgctaaacagggtcgttggtacgtggtgcaaacaaactatgacagatggaagcatcccttcttcctcgacgaccgccgcactccagctaaaatgtgcctgaacaggacgtcccaggaaaatatttcctttgaaaccatgtacgatgtgctctcaaccaagcccgtgctcaataagctcactgtctatactacattgatagacgtgaccaaaggccaatttgagacttatctccgggattgccctgatccatgtatcggatgg

SEQ ID NO: 17186 - DNA, 1185 bp, synthetic construct
  misc_feature 1..1185: note = source = /note="Description of Artificial Sequence: Synthetic coding sequence"
  source 1..1185: mol_type = other DNA
atgcccggtagatcttgtgtggctttggtgcttcttgccgcagccgtctcttgtgccgtcgcccagcacgcacccccttggaccgaggattgcaggaagtccacttaccccccatcagggcctacataccgaggggcggtcccatggtatacaattaatctggacctgccaccttacaagcggtggcacgagctgatgctcgataaggccccagtcttgaaggtcatcgtcaattccctgaagaacatgataaatacattcgttccgtctggcaaaatcatgcaggtggtagatgagaagctgcctggcctgctgggtaactttccgggacccttcgaagaggagatgaaaggaatcgctgcggtgacagatataccgcttggagagatcatctctttcaacattttctatgaattgtttactatatgcactagcattgtcgccgaggacaaaaagggacatctcattcacggacggaacatggatttcggagtttttctcggctggaacattaacaacgacacttgggtgatcactgagcagctgaagccgcttaccgtaaacctggacttccaaaggaacaataaaactgtttttaaggctagttcttttgctggctatgtcggcatgctgacaggtttcaagcccggactcttttcattgacacttaacgagcgattctctatcaacggaggttatttgggaatcctcgaatggatactggggaagaaagatgtgatgtggatcggtttcctgacacgcactgttctcgaaaactccaccagttatgaggaggccaagaatctcctgaccaaaaccaagatcctggcccccgcatacttcatcctgggcggcaaccagtctggggaaggatgcgtaatcacaagagacagaaaagaaagcttggatgtgtacgagttggacgcaaagcaaggcaggtggtacgtggtccagacgaattatgataggtggaaacacccattttttcttgacgaccgaaggacgcctgccaagatgtgcctgaatcgcacctctcaggagaatatctcctttgagacgatgtacgacgtcctgagtaccaaacccgtgctgaacaaattgacagtctacaccaccctgatcgacgtgacaaaaggtcagttcgagacatatcttcgggactgtcctgacccctgcatcggatgg

SEQ ID NO: 17187 - DNA, 1185 bp, synthetic construct
  misc_feature 1..1185: note = source = /note="Description of Artificial Sequence: Synthetic coding sequence"
  source 1..1185: mol_type = other DNA
atgcccggaagatcatgtgtggccctggtgctgctcgcggcagccgtcagctgcgctgtggcacagcacgctccgccatggaccgaagattgcagaaaatccacttacccgccttctggccccacttaccgcggagctgtgccgtggtacaccatcaacctcgacctgcctccttacaagcggtggcacgaactcatgttggacaaagcaccagtgctgaaggtgatcgtgaactcactgaagaacatgatcaatacgttcgtgccaagcgggaagattatgcaagtcgtcgatgagaaattgccagggctgctgggaaacttcccgggaccgttcgaggaagagatgaaggggattgccgcagtgacggatatcccactcggagaaatcatctccttcaacatcttctacgaacttttcaccatctgcacttcgatcgtcgccgaggacaaaaagggccatctgatccacggcaggaacatggacttcggcgtgttcctgggatggaacattaacaatgatacttgggtcattactgaacagctgaagccccttaccgtgaacttggattttcagcgcaacaataagactgttttcaaggcgtcgtcgtttgctggttacgtgggaatgctcacgggattcaaacctgggctgttttctctcacccttaatgaacggttttcgatcaatggaggatatctgggcatcctggaatggatcctgggaaagaaggatgtcatgtggatcggatttctgactaggaccgtgctggaaaattccaccagctacgaggaggctaagaatctcttgaccaagacgaagatcctggcgccagcctactttatcctgggaggaaaccaatcaggagaaggctgtgtgatcacccgcgatcgaaaagagtcactggacgtgtacgaactggacgcgaagcagggcaggtggtacgtcgtgcagactaattacgaccgctggaagcacccgttcttcctggacgaccgcagaacgccggccaagatgtgcctgaaccggaccagccaggaaaacatctccttcgagactatgtacgacgtcctgtcaactaaaccggtgttgaataagctgactgtctacactactctcattgacgtgactaagggacagttcgaaacttacctccgcgattgccctgatccttgcatcgggtgg

SEQ ID NO: 17188 - DNA, 1185 bp, synthetic construct
  misc_feature 1..1185: note = source = /note="Description of Artificial Sequence: Synthetic coding sequence"
  source 1..1185: mol_type = other DNA
atgccaggaaggtcgtgcgtggcgctcgtgcttctggccgccgccgtctcctgcgcagtggcgcagcatgctcctccgtggaccgaggactgccggaagagcacctaccccccatccggtcctacctaccggggtgccgtcccgtggtacactatcaaccttgacctccccccgtacaagaggtggcacgagctgatgctcgataaggcacctgtgctcaaagtgatcgtgaactcgttgaagaacatgatcaatactttcgtgccgtcgggtaagatcatgcaggtcgtggatgaaaaactccctggactgctcggtaacttcccgggaccgttcgaagaagagatgaaaggtatcgccgccgtgacggacatccctctgggggaaatcatctcgttcaatatcttctacgaacttttcactatctgtacctccatcgtcgctgaggacaaaaaggggcatctgatccacggacgcaacatggacttcggagtgttcctgggctggaatatcaacaatgatacttgggtgatcaccgaacagctgaagccgctcactgtcaatctcgatttccagagaaacaacaaaactgtctttaaggcttcgagctttgccggatacgtcggcatgctgacggggttcaagccgggcctgttctccctgacgctcaatgaacggttctcaattaacggaggttatctcggaatcctggagtggatcctcgggaagaaggacgtgatgtggatcgggttcctgacccggactgtgttggagaactcgacttcctacgaggaggcgaagaaccttctgactaaaaccaagattttggcccctgcctactttatcctcggaggaaaccagagcggcgaggggtgcgtgatcacccgcgaccgaaaagagagcctggacgtgtacgaactcgacgccaagcagggacgctggtacgtggtccagaccaattacgaccgctggaagcacccattcttcctggacgatagacgtactccagccaaaatgtgtctcaaccggacctcacaagaaaacatcagcttcgaaactatgtacgatgtgctctccaccaaaccggtgctcaacaagctgactgtctacaccaccctgatcgatgtgaccaagggacaattcgaaacgtacctgcgggattgcccggacccctgcattggttgg

SEQ ID NO: 17189 - DNA, 1185 bp, synthetic construct
  misc_feature 1..1185: note = source = /note="Description of Artificial Sequence: Synthetic coding sequence"
  source 1..1185: mol_type = other DNA
atgcccggaaggtcttgtgtggcacttgtcctgcttgccgccgcagtttcctgtgcagtggcacagcatgccccaccctggactgaggactgtagaaagagcacctacccgcccagcggcccaacttacagaggagccgtgccttggtacacaattaacctggaccttccaccttacaaaaggtggcacgaattaatgctcgataaagcccccgttcttaaggtcatcgtgaattctcttaagaacatgataaatacattcgttccctcaggcaaaattatgcaggtcgtggatgaaaagcttcccggtttactggggaacttcccaggtccctttgaagaagagatgaaaggaatcgctgcagtgacagatatcccattgggtgaaattatctcattcaatatattctatgagttattcaccatctgtacaagtatcgtggcggaagacaagaaaggccatttgatacacggtcgtaatatggactttggcgtttttttaggctggaacattaataatgatacctgggtgatcaccgagcaactgaaacctctgacagtcaacctggacttccaaagaaacaataaaacggtttttaaggcgtccagcttcgctggctacgtggggatgctgaccggctttaagcccggtttgttcagcctgactctcaacgaacgcttcagcatcaatggagggtacctgggcattcttgaatggattctcggcaaaaaagatgtgatgtggatcgggttcttaacacgcacggtgctggagaatagcacctcatacgaggaggcaaagaatctgctaacgaaaactaagatcttagcacctgcgtacttcattcttggcggcaaccaaagtggggagggctgtgtgatcacccgcgacagaaaggaatctttggatgtgtatgaactggacgccaagcaaggacggtggtacgtggtgcaaaccaactatgacagatggaagcacccctttttcctcgacgaccgcaggacacctgctaaaatgtgtttgaacaggacgtcccaggaaaacatttcattcgaaactatgtacgacgtgctgtccaccaaacctgtgttaaacaaactgacagtgtatacaaccctcattgatgttactaaggggcagtttgagacttatttgagagactgtccagacccctgcatcgggtgg

SEQ ID NO: 17190 - DNA, 1185 bp, synthetic construct
  misc_feature 1..1185: note = source = /note="Description of Artificial Sequence: Synthetic coding sequence"
  source 1..1185: mol_type = other DNA
atgccgggccgaagctgcgtggcgcttgtgctgttagctgccgcagtctcctgtgcggtggcccagcacgctcccccgtggaccgaggactgtcgtaaatccacgtaccccccttctggccccacgtaccgcggcgctgtgccatggtatactattaatctggaccttcccccctacaaacggtggcacgagttgatgcttgataaagctccggtgcttaaggtcattgtgaacagtttgaagaatatgattaatacattcgtcccgtccgggaagattatgcaggttgtagatgagaagctaccaggtttgctgggcaatttcccgggaccattcgaagaggaaatgaaggggatcgcggcggtaacggatattccactcggagaaatcatttcttttaatattttctacgagctctttactatctgcacctccatcgtagcagaggacaagaagggtcaccttatccacggacgcaacatggatttcggcgtcttcttgggatggaatatcaataacgatacgtgggtgatcactgagcaactcaagcctcttaccgtgaacttggacttccagcgtaataataaaacagtctttaaggcttcaagcttcgcaggatatgtcggcatgcttacaggtttcaagcccggcttgttctccctaacactgaatgagcgcttcagtattaacggcgggtacctcggcatccttgagtggatcttgggcaagaaggacgtcatgtggataggtttcctgacgcgaactgtactagagaactcgacatcgtacgaagaggctaagaatcttctaaccaagacaaaaattcttgcacctgcttatttcatcctcgggggaaaccagagcggtgaaggttgtgtgatcaccagagaccgtaaggagagtctcgatgtctacgagcttgacgctaaacagggtcggtggtatgtagtgcaaactaattatgaccgttggaaacatccatttttcctagacgaccgtaggacgcctgcgaagatgtgcctaaatcggacttctcaagagaatatcagcttcgagactatgtacgacgtcctctctaccaaacccgtcctgaataaactgacagtgtacaccacactcattgacgtcaccaaaggtcagtttgaaacatacctgcgtgattgtccagacccctgcatcggttgg

SEQ ID NO: 17191 - DNA, 1185 bp, synthetic construct
  misc_feature 1..1185: note = source = /note="Description of Artificial Sequence: Synthetic coding sequence"
  source 1..1185: mol_type = other DNA
atgcctgggcggtcttgcgtggccctcgtcttactggccgctgccgtgagttgcgcagtagcacaacacgcaccgccctggaccgaagactgtagaaaaagtacctaccccccatctgggccaacatatcgaggtgccgtgccctggtacaccatcaacttggatctcccgccatacaaaagatggcatgaactcatgctggacaaggctcctgtgctgaaggtaatcgtgaatagcctaaaaaatatgattaatacttttgtgccaagcgggaagataatgcaggtagtggatgaaaaattacccggtctgttgggaaacttccccggcccctttgaagaagaaatgaagggaatcgcagccgtaactgatataccgctcggtgagatcatttcctttaatatcttctatgagctttttacgatctgcacatctatcgttgcagaggataaaaagggacacttgattcatggtagaaatatggacttcggggtgtttctcggatggaatatcaataatgatacttgggtcataaccgagcagcttaagcctttaacagtgaaccttgatttccagcgaaacaataagacggtgtttaaagctagtagtttcgcgggttatgtcgggatgcttaccggattcaaacccggcctcttttctctcactttaaatgaaaggttcagcataaatggagggtatctgggcatactggagtggatactgggcaagaaagacgttatgtggataggcttccttactcggaccgtgctggagaattccacaagctatgaggaagccaagaacctcctgacaaagaccaagatccttgctcctgcttactttatcctagggggtaaccagtccggcgagggctgcgtcattactagagatcgaaaggaatctctagatgtgtacgagcttgatgcaaagcagggaaggtggtatgtcgtccagacaaactatgatcggtggaaacaccctttttttttagatgatcggcggacgcccgccaagatgtgtctcaatcggacttcacaagagaatatctcgttcgaaaccatgtacgacgtactctccacaaagcccgtgctgaataaactcactgtgtatacgactctcattgacgtcaccaaaggtcagttcgagacttacctgagggactgtcccgacccttgcatcggctgg

SEQ ID NO: 17192 - DNA, 1185 bp, synthetic construct
  misc_feature 1..1185: note = source = /note="Description of Artificial Sequence: Synthetic coding sequence"
  source 1..1185: mol_type = other DNA
atgcccggacggtcatgcgtggcattggtgttgctggcggctgccgttagttgcgcagttgcgcagcacgctcccccgtggacggaggactgccggaagagcacctatcccccttctggcccaacgtacagaggtgcagtcccttggtacaccataaacctggatctccccccctacaagaggtggcacgaactgatgctggacaaggctcctgtgttgaaagtgattgtgaatagcctcaaaaacatgatcaacacttttgtgcccagtggcaagataatgcaggtcgtggacgaaaagctgcctggactgcttgggaacttccccggccctttcgaagaggaaatgaaaggcatcgcagcagtcaccgacatcccgctgggcgaaattatatcctttaacatcttttacgagctcttcaccatttgcacctctattgtggccgaagacaaaaaaggacacctcattcatggacgcaatatggattttggcgtgtttctcggctggaacatcaacaatgatacctgggtgattaccgagcagctgaaacccttgacagtcaacctcgatttccagagaaacaacaagaccgtttttaaggcaagttcttttgccgggtatgtgggaatgctgaccgggttcaagccaggattgttttcactgaccctgaacgagagattttctattaacgggggatacctgggaatccttgagtggatcctgggtaaaaaagatgtcatgtggatcggcttcctcacccggaccgtcttggagaactctacttcctatgaagaagcaaagaacttgctgacaaagaccaagatcctggcccctgcatattttatccttggaggcaaccaaagcggcgaaggatgtgtgatcacacgggatagaaaagaatccctggatgtttatgaactcgacgccaagcaagggcgttggtacgttgttcagacaaactatgaccgctggaagcaccctttcttcctggatgatcgtagaacccctgctaagatgtgcctgaacaggaccagccaagagaatatcagtttcgaaacaatgtacgacgtccttagcaccaaacccgtcctgaataagctgaccgtttacactaccctcattgacgtcacgaaaggacagtttgaaacatacttaagggactgcccagacccatgtatcgggtgg

SEQ ID NO: 17193 - DNA, 1185 bp, synthetic construct; identical to SEQ ID NO: 17169
  misc_feature 1..1185: note = source = /note="Description of Artificial Sequence: Synthetic coding sequence"
  source 1..1185: mol_type = other DNA

SEQ ID NO: 17194 - DNA, 1185 bp, synthetic construct
  misc_feature 1..1185: note = source = /note="Description of Artificial Sequence: Synthetic coding sequence"
  source 1..1185: mol_type = other DNA
atgcccggaaggtcctgtgtcgcactggttcttctcgccgcagccgtgagctgtgccgtcgcgcaacatgccccgccctggacggaggattgtcggaagtcaacctaccccccttccgggcctacctacaggggtgccgtcccgtggtacactattaaccttgatctgcccccctacaagcgatggcatgaattgatgttggataaggcccctgtgctgaaggtgattgtgaattcgctcaagaatatgattaacaccttcgtgcccagcgggaagataatgcaagtcgtcgatgaaaaactccccggtctgctgggtaactttccaggtccatttgaggaagaaatgaagggaattgctgcggtgactgatattccactgggcgagatcatttcgttcaacatcttttacgagctcttcaccatctgcacgagcattgtggcagaagataagaagggacaccttatccatgggagaaatatggattttggagtgtttcttgggtggaacattaacaacgatacctgggtgatcaccgaacaactcaaacctctgactgtcaacctggactttcagcgcaataacaaaactgtgttcaaggcctcatcctttgcaggttacgtgggcatgcttacgggcttcaagcccggtctgttctcgcttactcttaacgaacggttttcaatcaacggtggctacctgggtatccttgagtggatcctgggtaagaaagatgtgatgtggatcggcttcttgacccgaactgtgctcgagaattcgacctcctacgaggaagccaagaacctgcttactaagaccaagatccttgcacctgcatacttcatccttggaggaaatcaatcaggagagggatgtgtgattacgagggaccggaaagaatccctggatgtgtatgaacttgatgccaagcaagggcgctggtacgtggtgcaaaccaactacgatcggtggaagcacccctttttcctcgacgatagacggacgccagcgaagatgtgtttgaaccgcacctcacaggaaaacatctcgtttgaaactatgtatgacgtgctctcgaccaagcctgtgcttaacaaacttactgtctacaccaccctgattgacgtcaccaagggccaatttgagacgtacctgagggactgtccagacccatgtattggatgg

SEQ ID NO: 17195 - DNA, 1185 bp, synthetic construct
  misc_feature 1..1185: note = source = /note="Description of Artificial Sequence: Synthetic coding sequence"
  source 1..1185: mol_type = other DNA
atgcccggccgttcctgtgttgcactagttctgctggccgctgccgtgtcatgtgctgtggcccagcatgccccaccatggaccgaggactgccggaagagcacgtacccaccgagcgggccaacctaccggggtgcggttccttggtataccatcaacctggaccttcctccatataaacggtggcacgagctcatgcttgacaaggcccccgtgctcaaggtgatcgtgaacagtttaaagaacatgatcaatacatttgtccctagcggaaagatcatgcaggtcgtcgacgagaaactaccggggctgcttggaaacttccccgggccttttgaggaggagatgaaggggattgccgctgtgacggatattccgctgggggagattatcagctttaatatcttctatgagctcttcactatttgtacaagcattgttgccgaggacaagaagggtcacttgattcatggaagaaacatggacttcggagtcttcctcggttggaacatcaataacgacacttgggttataactgagcagttgaaacccctgaccgtgaatctggactttcagcgaaataataagaccgtgtttaaggcaagtagttttgccggctatgtgggaatgctgacgggttttaagccaggccttttttctcttaccctgaacgaaaggtttagcataaacggagggtacctgggaatcctggagtggattttaggcaagaaggatgtcatgtggattgggtttctcactcgtacagtcctggagaactcaacatcctatgaagaggctaaaaacctgttaaccaagaccaaaattctagctcctgcgtacttcatcctggggggaaaccagagcggcgaggggtgcgtgattacacgggatcgcaaagagtccctcgacgtctacgagctggacgctaagcaaggaaggtggtacgtggtgcagacaaactatgatagatggaaacaccctttctttctagacgaccgacgcacgcccgccaaaatgtgtctaaacaggacttcgcaggagaatatcagtttcgaaaccatgtacgatgtgctgtccacgaagcccgtcctaaacaaactcaccgtatataccacactgatcgatgtgacgaagggtcaattcgagacctacctacgagattgtcccgatccctgtatagggtgg

SEQ ID NO: 17196 - DNA, 1185 bp, synthetic construct
  misc_feature 1..1185: note = source = /note="Description of Artificial Sequence: Synthetic coding sequence"
  source 1..1185: mol_type = other DNA
atgcctggacggtcatgcgtggcgcttgtgctcctggccgccgcagtgtcctgcgctgtcgcacagcatgccccgccctggactgaggattgccgaaaatcgacctacccgccgagcggaccgacctacagaggtgcggttccgtggtacactatcaacctcgacttgccgccgtataagagatggcacgagctgatgctcgataaggctccagtgctgaaggtgatcgtgaactcgctgaagaacatgattaacactttcgtccctagcggaaagatcatgcaggtggtggacgagaagctgcctggactgctgggaaactttcctggacccttcgaagaagagatgaaggggatcgccgccgtgaccgacatccctctgggcgagatcatcagcttcaacattttctacgagctcttcactatttgcactagcatcgtcgcggaggacaaaaaaggccacctgatccatgggcggaatatggacttcggggttttcctcggctggaatatcaataacgatacctgggtcatcactgagcagctgaagccactgacggtgaacctcgatttccagcggaataacaagaccgtctttaaggcctcatccttcgcaggatacgtgggcatgctgactggattcaagccgggactcttttcactgaccctcaacgaaagattttcaattaacggtggatacctgggcatcctggaatggatccttggtaagaaagacgtgatgtggattggctttctgactcggactgtgctcgaaaactcgacttcgtatgaagaggccaaaaacctgctgaccaagactaagatcctggccccggcctacttcatcttgggcggtaaccagtccggagagggctgtgtcatcactcgggataggaaggaatcactggatgtgtacgagctcgacgcaaagcagggaagatggtatgtggtccaaactaattacgatcgctggaagcatcctttctttctggatgaccgccgtaccccggcgaaaatgtgcttgaaccggacctcgcaggagaacatttccttcgagactatgtacgacgttctcagcaccaaaccagttctcaacaagctgaccgtctacactaccctgattgatgttactaagggccaattcgaaacttacttgcgcgattgccccgatccgtgtattggatgg

SEQ ID NO: 17197 - DNA, 1185 bp, synthetic construct
  misc_feature 1..1185: note = source = /note="Description of Artificial Sequence: Synthetic coding sequence"
  source 1..1185: mol_type = other DNA
atgcctggcaggtcctgtgtggccttggtgcttcttgccgccgcagtgtcgtgtgcggtcgcccagcacgcccctccttggaccgaggactgtcggaagagcacctaccctccctccggcccaacctacagaggtgccgtgccctggtacaccattaacttggacctgcccccgtacaagagatggcatgaattgatgcttgataaggcccctgtgctgaaggtgattgtcaactcacttaagaacatgattaacacgtttgtccctagcgggaagattatgcaggtggtggatgagaagctgcctggactgctgggaaacttcccaggtccatttgaagaggaaatgaagggaattgcagcagtgaccgacatccccctcggtgagattatcagctttaacatattctacgaacttttcactatttgcaccagcatagtcgccgaggataagaaaggtcatcttatccatggtcgtaacatggattttggtgtttttctgggatggaatatcaataacgatacctgggtaattacggagcaacttaaacctcttactgtcaatctggatttccaaagaaataacaagaccgtgttcaaagcctcgagctttgcgggatacgtgggcatgctgactggctttaagccaggactgtttagcctcaccctcaacgaacggttcagcatcaacggtgggtatctcggaatacttgaatggatacttgggaagaaggatgtgatgtggattggatttctcactagaactgttcttgaaaattcgacctcctacgaagaggcgaagaaccttctgactaagaccaagattcttgcacctgcatactttattctgggaggaaatcagtcaggtgagggatgcgtcatcactcgcgacagaaaggaatccttggatgtctacgaactggacgccaaacagggtcgatggtatgtggtccagaccaactacgataggtggaagcacccttttttcttggacgatcgcaggacgcctgctaagatgtgcctcaaccgcacttcacaagagaatatctcgtttgaaaccatgtacgatgtgcttagcacgaagcccgtcttgaataagctcaccgtttacactacgcttattgatgtgactaagggtcagtttgaaacgtacctgcgggattgcccggacccatgtataggctgg

SEQ ID NO: 17198 - DNA, 1185 bp, synthetic construct
  misc_feature 1..1185: note = source = /note="Description of Artificial Sequence: Synthetic coding sequence"
  source 1..1185: mol_type = other DNA
atgcccggaagaagttgcgtggccctagtcctcctggcagcagcagtgtcatgcgctgtggcccaacatgcacccccctggacagaagattgccggaagtcgacatacccaccctccgggcctacatataggggagccgttccttggtacaccataaatctggacttgcccccctataagcgatggcacgaattaatgcttgataaggccccagtgctgaaagtgatagtcaactccctcaaaaatatgattaatacatttgtgccgagtggaaagatcatgcaggtggtggatgagaagctaccagggctccttggcaacttcccggggcccttcgaggaggagatgaaggggattgccgcagttaccgacattcctctcggagaaattatttcctttaatattttttatgaactttttaccatttgtacatctattgtggccgaggataaaaagggtcatctgattcatggtcgcaatatggactttggcgtctttctcggatggaatattaataacgacacatgggttatcaccgagcagctgaaacctctaaccgtgaatcttgattttcagaggaacaacaagacagtcttcaaagctagctcctttgcagggtacgtgggtatgcttaccggctttaagcctggactattctcactgacccttaacgaacgtttttcaatcaacggcggatacttaggcatcttggaatggatactcggcaagaaagacgtgatgtggattggattcctgacgaggactgttcttgagaattctaccagctatgaagaagcaaagaatctgttgacgaagaccaagattctggcaccggcctactttatacttgggggcaatcagtctggcgaaggttgtgttatcactagagatcgaaaggagagcctggatgtgtacgaactggatgccaagcaaggcaggtggtatgtggtgcagactaattacgatcgctggaagcacccattcttcctcgacgaccgtcgcacaccagccaagatgtgtctaaacagaacctcccaggagaatatttctttcgagacaatgtatgacgttttaagcaccaaacctgtgctcaacaaactcaccgtgtataccacattgatcgatgttaccaaggggcagtttgaaacctacctgcgtgactgcccagatccctgtatcggctgg

SEQ ID NO: 17199 - DNA, 1185 bp, synthetic construct
  misc_feature 1..1185: note = source = /note="Description of Artificial Sequence: Synthetic coding sequence"
  source 1..1185: mol_type = other DNA
atgccagggcgctcctgcgtggcgctcgtgttgctggctgcagcagtgtcgtgtgcagtggcccaacatgccccaccctggaccgaggactgtaggaagtcgacctatccaccatcaggtccgacttacaggggtgcggttccatggtacaccatcaatctggatctccctccatataagaggtggcatgaacttatgctggataaagcacctgtccttaaggtgattgtcaactcactcaagaacatgattaacacctttgtcccttcgggtaaaatcatgcaggttgtggatgaaaagctgcctgggcttctgggcaactttccaggtccatttgaggaggagatgaagggaattgcagcagtgaccgacattcccctcggagagattatctcatttaacatcttctatgagctgtttaccatctgtacgtccattgtggcagaagataagaaaggccacctgatacatggaagaaacatggattttggagtattcctcggatggaacatcaacaatgatacttgggtgattaccgaacagctgaaaccgctgaccgtgaacctggactttcaacgtaacaataagaccgtgttcaaggcatcatcatttgccgggtatgtcggaatgctcaccggatttaagcctgggcttttctcactgacgctcaatgagcggttttcaattaacggaggatacctgggtattcttgaatggatactggggaaaaaagacgtcatgtggataggttttttgactagaactgtcttggaaaacagcaccagctacgaagaagcaaagaatctccttactaaaaccaagattctggcgccagcatacttcatcctgggaggaaaccagtccggcgagggatgtgtgatcactagagatagaaaagagtcgctggatgtctacgaacttgatgcaaaacaaggtcggtggtacgtggtgcaaactaattacgatcgctggaaacatccgtttttcctggacgatagacgaaccccagcaaagatgtgtctcaaccgcacttcccaggaaaacatctcgttcgaaactatgtatgatgtgctttcgacgaagccggtgttgaacaagctgactgtgtacaccacgctgattgacgtgaccaaggggcaatttgaaacttacttgcgggactgtccagacccatgcatcgggtgg

SEQ ID NO: 17200 - DNA, 1185 bp, synthetic construct
  misc_feature 1..1185: note = source = /note="Description of Artificial Sequence: Synthetic coding sequence"
  source 1..1185: mol_type = other DNA
atgcctggaagatcatgtgtcgcactggtcctcctggccgccgccgtgtcttgtgccgtggcccagcacgcaccaccatggacagaggattgtcgcaaatctacgtatcctcctagtgggcccacttaccggggggccgttccctggtacacaatcaatctcgatctcccaccttataaaaggtggcatgaactgatgttggataaagctcctgtgcttaaagtcatagttaattctctgaagaatatgataaacacattcgtcccaagtgggaaaataatgcaggtcgtagatgaaaaattgcctggattactcgggaatttccccggacctttcgaagaagagatgaaagggatcgccgctgtgactgatatcccactaggagaaatcatctcatttaacatattctatgaactgttcactatctgcacttccatagtcgccgaagataaaaaggggcaccttattcacgggaggaacatggactttggggtgtttctgggatggaatatcaacaatgatacttgggtaattactgaacagctcaaacccctgactgtcaacctggatttccagcgcaacaataaaacagtgttcaaggcttcatcttttgcagggtatgtcggaatgttaacagggttcaaacctgggctcttctcgttaacattaaacgaaaggttttctataaatgggggatatctgggaattctggaatggatactggggaaaaaagacgtcatgtggatcggattcctgacaaggactgtgctcgaaaactctacaagttatgaagaagctaaaaaccttcttacaaaaactaaaatactggctccagcatatttcatacttggggggaatcagtctggagaagggtgtgtcattacaagggaccggaaagaatctctcgacgtgtatgaactcgatgcaaaacaggggagatggtatgtggtgcagacaaattatgataggtggaaacatcccttcttccttgacgaccgccggactcccgctaaaatgtgcctgaacaggacttcacaggagaacatttcattcgagacaatgtatgatgttctatctacaaaaccagtgctgaataaactaacagtatatactactctgatcgatgtgacaaaaggacagttcgaaacatatctccgcgactgccctgacccctgcatcggatgg

SEQ ID NO: 17201 - DNA, 1185 bp, synthetic construct
  misc_feature 1..1185: note = source = /note="Description of Artificial Sequence: Synthetic coding sequence"
  source 1..1185: mol_type = other DNA
atgcccggtcgatcttgcgtggcccttgtactcctagcagccgccgtgtcctgcgctgttgcccagcatgccccaccgtggacagaagactgtcgcaagagtacctacccccccagtggacctacctatcgcggcgccgtgccatggtatacgattaacctggatctgccgccatacaaaaggtggcatgaactgatgctcgacaaagcgcccgtgctaaaggtgatagtgaacagtctcaagaatatgataaataccttcgtgccatcgggaaagattatgcaggttgtggatgagaagctgccaggactgcttggcaacttcccaggtccttttgaggaagaaatgaagggaatcgctgccgtgacagacattcctctcggcgaaatcatatctttcaatattttctacgagctgtttactatctgcacgagcatcgtggcagaggacaagaaagggcacctcatccatgggagaaacatggattttggagttttcctcggttggaacatcaacaatgatacctgggtcataactgagcaacttaagccactgacagtgaatttggactttcagaggaataacaagactgtgttcaaggccagctctttcgctgggtatgtcggaatgttgactgggtttaagcctggtctcttcagtctcacgttaaatgaacgattttccatcaatggcgggtacctggggattctggagtggattctgggcaaaaaagacgtgatgtggattggcttcttgactcgcaccgtattggagaacagtacatcgtacgaggaggctaaaaatttactgaccaaaactaaaattctggctccagcctactttatccttggagggaaccagagcggcgaaggctgcgtcatcactcgggacagaaaggaatcattagacgtgtatgagcttgatgccaagcagggccgctggtacgtggtacaaacaaattacgaccgatggaagcacccattttttctggatgataggcgcacccccgccaagatgtgtttaaacaggaccagccaggagaacatctccttcgagacaatgtacgacgttctatccacaaagccggtgctgaacaagcttacagtgtacacaacactaatcgacgttaccaagggacaatttgaaacatatctccgggactgcccggatccctgtataggatgg

SEQ ID NO: 17202 - DNA, 1185 bp, synthetic construct
  misc_feature 1..1185: note = source = /note="Description of Artificial Sequence: Synthetic coding sequence"
  source 1..1185: mol_type = other DNA
atgcctggacgctcgtgtgtcgcactggtgcttctggctgcagccgtctcctgtgcggtcgctcaacatgcgcccccttggaccgaggactgtcgcaagtcgacctaccctccctcagggcccacctacagaggcgccgtgccttggtacacgattaacctggatcttcctccatacaagagatggcacgagctgatgcttgacaaggccccagtccttaaggtgattgtgaattccctgaaaaacatgattaacacgttcgtgccatcaggcaagataatgcaagtggtcgatgagaaacttcccggtctgctgggtaactttccgggaccttttgaggaagaaatgaaaggtatcgcagctgtgactgacatccctcttggggagattatctctttcaacattttctacgaactttttaccatttgtacctccattgttgcagaggacaagaagggacaccttatccatggaagaaacatggactttggcgtatttctgggttggaacattaacaacgacacttgggtcataaccgagcaacttaagccattgactgtcaatcttgactttcaacggaacaataagaccgtgtttaaggcgtccagctttgccgggtatgtggggatgctgactggtttcaagcctggcctcttttcccttaccttgaacgagaggtttagcataaacgggggatacctgggaatcctggaatggattctgggaaaaaaggatgtcatgtggatcgggtttctgacccggaccgtcctcgaaaattcgacctcatacgaagaggccaaaaacctcctcaccaagactaagattctcgcacctgcatacttcatacttggtgggaatcagtccggggaaggatgcgtgattacccgcgaccgcaaagaatcgcttgatgtgtacgaactcgacgcaaagcagggcaggtggtacgtggtgcagactaattacgatagatggaagcatccgttttttctcgacgatcggagaaccccggctaaaatgtgtctgaatcggacttcccaagagaacatttccttcgaaactatgtacgacgttctttcgaccaagcccgtgctcaacaaactgacggtgtacactacccttatcgacgtaactaagggacaattcgaaacgtaccttagagactgtccagatccatgcattggttgg

SEQ ID NO: 17203 - DNA, 1185 bp, synthetic construct
  misc_feature 1..1185: note = source = /note="Description of Artificial Sequence: Synthetic coding sequence"
  source 1..1185: mol_type = other DNA
atgcctggccgttcctgtgtggcattggtgctcctggcagccgccgtttcctgtgctgtggctcaacacgcaccaccatggaccgaagattgtcgaaagtctacgtaccctccaagcgggcccacatatagaggagccgtgccctggtacactatcaatctagacctgcctccgtacaaaagatggcacgagcttatgctggataaagcccccgtcctcaaagttatcgtcaactctctgaagaatatgataaacacctttgtcccttcaggtaaaattatgcaagttgtcgatgagaagctgccaggcctcttgggcaactttccaggcccgttcgaggaagaaatgaagggtatcgcggcagtgaccgatatacccctcggcgaaattatcagctttaacatcttctatgagctcttcaccatatgtacttctattgtggccgaagacaaaaaaggtcatctcatccacgggcgaaatatggatttcggcgtgttcctcggatggaacatcaataatgatacctgggttataacagaacagctgaaacccctgacagttaacctggacttccagcggaataacaagaccgtgtttaaagcctcgagcttcgcgggctacgtgggcatgttgacagggtttaagccagggctcttttctctcacgctgaacgaacgattctccatcaatggcggctatctgggtatcctggagtggattcttggtaaaaaagatgtgatgtggattggtttcctgacccggaccgttctggaaaatagtactagttacgaagaagcgaaaaatctgctgacaaagacaaaaatcctggctccagcatacttcattcttggaggaaaccaatcgggagaggggtgtgtgataacccgcgaccggaaggaaagcttggatgtctacgagcttgacgctaaacagggccgatggtacgtggtgcagaccaattacgacaggtggaagcatccatttttcctcgatgacaggaggactcctgccaagatgtgtttgaaccgcacctcgcaggagaacatcagttttgaaaccatgtatgacgtcctgagcacgaagcctgtactgaacaagctgaccgtttacaccaccttaattgatgttaccaaggggcagttcgaaacctacctccgggactgccccgacccttgcatagggtgg

SEQ ID NO: 17204 - DNA, 1185 bp, synthetic construct
  misc_feature 1..1185: note = source = /note="Description of Artificial Sequence: Synthetic coding sequence"
  source 1..1185: mol_type = other DNA
atgccaggtcgcagctgcgtggcactagtgcttctggccgcagcagtgtcctgtgccgtggcacagcacgcccctccttggaccgaagactgcaggaagtcaacttatcctcctagcggcccaacatatagaggcgcagttccgtggtataccattaatctggacctgcctccatataaacgatggcacgaacttatgttggataaagcaccagtgctgaaggtcatagtgaatagtctgaaaaatatgatcaacactttcgtcccctctggcaagattatgcaggtggtagatgaaaaactccccggtctgctggggaacttcccggggcctttcgaggaggagatgaagggtatcgccgccgtgaccgacatccctttaggggaaatcatcagttttaatattttctatgagctgttcacaatatgcacctcaattgtcgccgaggataagaaagggcaccttatccatggccgcaatatggacttcggagtctttctaggctggaatattaacaatgacacttgggttatcaccgagcagcttaaacccctgacagttaacctggactttcagaggaacaataaaaccgtgtttaaggcgtcctcctttgccggctacgtggggatgttgacgggttttaagcctggactcttttccctcacacttaatgaaaggttttccattaacggtggctatctgggaatcctggagtggattctaggtaagaaggatgtcatgtggattgggttccttactcgcactgtcctggagaattcaacttcttatgaagaggcgaaaaatctgttgacaaagacgaaaattctcgcaccagcatacttcatcctgggtggaaatcaatccggggaaggatgtgtgattaccagggatcgtaaagagagcctggacgtctacgagctagacgctaaacagggacgatggtatgtggttcagacaaattatgaccgatggaagcacccgttcttccttgatgacaggcgtacccccgcaaagatgtgtctgaaccgaaccagccaggagaatatcagcttcgagaccatgtacgacgttctctccacgaaaccagtactgaataagctcaccgtgtacactaccctgattgacgtgactaaaggacagtttgagacttatctcagagactgtcctgatccctgtattggctgg

SEQ ID NO: 17205 - DNA, 1185 bp, synthetic construct
  misc_feature 1..1185: note = source = /note="Description of Artificial Sequence: Synthetic coding sequence"
  source 1..1185: mol_type = other DNA
atgccggggagatcctgcgtggccctggtgttgcttgccgccgccgtctcttgcgctgtggcccaacatgccccaccctggaccgaggactgtcgaaagtctacttacccgccgtcgggacctacttaccggggcgcagtcccttggtacaccatcaacctcgatctgccaccctataagaggtggcatgagctgatgcttgacaaagcgccagtactgaaagtcatcgtgaattcgctgaagaatatgataaacacctttgtcccttccggaaagattatgcaagtggtggatgaaaagctgcccgggcttctcggaaactttccgggaccgttcgaggaggagatgaaggggatcgcagccgtgactgacattccgctgggagagatcatcagcttcaatatcttttacgaactgttcacgatctgcacctcgatcgttgccgaagataagaagggtcaccttattcacggccggaacatggattttggtgtgttcctggggtggaacatcaataacgacacttgggtgatcactgagcagttgaagccgctcactgtgaacctcgatttccaacgaaacaataagacggtctttaaagcgtcaagtttcgctggatacgttggcatgttgaccggcttcaaacccggcctcttctcactcactctgaacgagaggttttccatcaacggaggctaccttgggatcttggagtggatcctgggtaagaaagatgtgatgtggatcggatttctgacgcgcaccgtcctcgagaatagcaccagctacgaagaagccaaaaacctgctgaccaagacgaagatccttgctcccgcgtatttcattctgggaggcaaccaatcaggcgagggatgtgtcattactagggacagaaaggaatcattggacgtctacgaattggatgcgaagcagggaagatggtacgtggtgcagactaattacgaccggtggaagcatccgttcttcctcgacgataggcgcaccccggctaagatgtgtctcaacagaacctctcaagagaacatctcgttcgaaacgatgtacgacgtgctctcgacgaaaccagtcctgaataagctgaccgtctacactaccttgatcgacgtgactaaaggacagttcgaaacttacctccgcgattgcccggacccatgcatcgggtgg

SEQ ID NO: 17206 - DNA, 1185 bp, synthetic construct
  misc_feature 1..1185: note = source = /note="Description of Artificial Sequence: Synthetic coding sequence"
  source 1..1185: mol_type = other DNA
atgccaggccggtcttgcgtggcccttgtgctcctggccgcggccgtcagttgcgcggtggcccaacacgcccccccctggaccgaggattgccgtaagtccacatacccacccagtgggcctacatatcggggtgccgtgccttggtacacgattaacctggacctgcctccatacaagaggtggcacgagttgatgctagacaaagccccagtcctgaaggttatagtcaattctctgaaaaacatgatcaatactttcgtgccaagtggaaaaatcatgcaagtagtcgatgagaagctgccgggactgctagggaactttcccggtccctttgaggaggaaatgaaggggatcgcagcggtaaccgatattccattgggcgagatcattagctttaacatcttctatgagctcttcaccatttgcacttccattgtggcggaggataagaagggtcatttgattcacggacgcaatatggacttcggcgtgtttctcggctggaatatcaacaacgatacatgggttatcacagaacagctcaagcctctcactgtcaacctagatttccaacgtaacaataagacagttttcaaagcctcgtctttcgccggatatgtgggtatgctgactggcttcaagcctggcctgttcagcctaactctgaatgaaaggttctccattaatggaggatatctcggcatactggaatggatattaggaaaaaaggatgtgatgtggattgggttcctgacgcggaccgttttggaaaattcaacatcttatgaggaggcaaagaacttgttgactaagacaaagatcctcgcaccagcttatttcatcctgggcggcaatcaaagcggagagggttgtgttattacccgggaccgcaaagagtccctcgacgtgtacgaactggatgccaagcagggtagatggtatgtagttcagactaattatgaccgctggaagcatccattcttcctagacgatcgtcggacgccagcaaaaatgtgtctgaaccggaccagccaggagaatatttcctttgagactatgtatgacgttttgagcacaaaacctgtcttaaacaaacttaccgtctatactacactcatagatgtcactaaaggacagttcgagacatatttgcgcgactgccccgacccctgcatcggttgg

SEQ ID NO: 17207 - DNA, 1185 bp, synthetic construct
  misc_feature 1..1185: note = source = /note="Description of Artificial Sequence: Synthetic coding sequence"
  source 1..1185: mol_type = other DNA
atgccagggcgaagttgtgtggcactggtactgctcgccgccgccgtcagttgtgctgtggcacagcatgcaccaccgtggactgaagactgtcgaaaatccacatatcctccttcagggcctacttaccggggggccgtaccttggtacacaatcaacttagatctgccaccctacaaacggtggcatgaactcatgctcgataaagctcctgtgctgaaagtgatcgtcaattccctcaaaaatatgattaatacatttgtgcccagtgggaaaatcatgcaggtcgtggacgaaaaacttccagggctcctgggaaactttccagggcccttcgaagaagaaatgaaaggaattgcggctgtaactgatatccctcttggagaaataatttcttttaacattttctatgaactcttcactatctgtacttctatagttgctgaagacaaaaaaggacacttgattcatgggaggaacatggattttggagtatttctcgggtggaatattaacaacgatacatgggtgattactgaacagctcaaacctctaacagtaaatcttgacttccagaggaataacaaaacagtattcaaagcgtcctctttcgccggatatgttgggatgcttactggatttaaacctgggttgttttcgcttactcttaatgagaggttcagtatcaacggaggatatttggggatcctcgagtggatcctcggaaaaaaggatgtgatgtggatcgggtttctcacacggactgttctcgaaaattcaactagttatgaggaagcaaaaaatctccttacaaaaacaaagatacttgcacccgcttatttcatcctgggaggaaatcagtcaggagaggggtgcgtaatcactagagatcggaaagaaagtctggacgtgtatgagctggatgccaaacagggaagatggtatgtagtccagactaactatgatagatggaaacaccccttttttcttgacgataggcggacacccgctaaaatgtgtcttaaccggacatcacaggaaaacatatcgtttgaaacaatgtatgatgtcctgtcaactaaacccgtgctgaataaacttactgtctacactacactgatcgacgtgacaaaagggcagttcgaaacttatctccgggattgtcccgacccatgcattggatgg

SEQ ID NO: 17208 - DNA, 1185 bp, synthetic construct
  misc_feature 1..1185: note = source = /note="Description of Artificial Sequence: Synthetic coding sequence"
  source 1..1185: mol_type = other DNA
atgcctgggcgctcgtgcgtcgcccttgtgctgctggccgcggctgtctcctgcgcggtggcgcagcacgcgccgccatggactgaggactgtagaaaaagcacctacccaccgtccggcccgacttaccgaggagcagtgccttggtacaccatcaacctcgacttgcccccctacaaacgctggcatgagctgatgctcgataaggccccggtgctgaaggtgatcgtgaactccctcaagaacatgatcaacacttttgtcccgtccggaaagattatgcaagtcgtcgatgaaaagctccctgggctgctggggaactttccgggaccgtttgaggaagagatgaaaggaatcgccgccgtgaccgacatcccactgggcgaaatcatctcgttcaatatcttttacgaactgtttaccatttgcacctcgatcgtggctgaggataagaagggccacctgatccatgggaggaatatggactttggagtctttctcggatggaacattaacaacgatacgtgggtgatcaccgaacagctcaaaccgctgactgtgaacctcgacttccaacgcaataacaaaactgtgttcaaagcctcgagcttcgccgggtacgtcggtatgttgacggggttcaagccaggactcttctccctgaccctgaatgagagattctcgatcaatggaggctacctgggcatcctggagtggatcctggggaagaaggacgtcatgtggatcggattcctgactcggacggtgctcgagaactccacctcctacgaggaagcaaaaaacctgcttaccaagaccaagatccttgcaccggcctacttcatcctcggcgggaatcagtcaggtgaagggtgcgttattactcgcgaccggaaagaaagcctggatgtctacgaactggacgccaagcaaggacgctggtacgtggttcagaccaattacgataggtggaaacacccgttcttcctggacgaccgccggactccggccaagatgtgtctgaaccgcacctcccaggaaaacatcagctttgaaaccatgtacgacgtcctgtcgacgaaaccggtcctgaacaaactcactgtgtacactactctgatcgacgtgactaagggacaattcgaaacctacctgcgtgactgcccggatccttgcatcggctgg

SEQ ID NO: 17209 - DNA, 1185 bp, synthetic construct
  misc_feature 1..1185: note = source = /note="Description of Artificial Sequence: Synthetic coding sequence"
  source 1..1185: mol_type = other DNA
atgccagggcgttcctgcgtggctctggtattgcttgctgcagcagtgagttgtgctgtggcacagcacgctcccccctggactgaggattgcaggaagtccacatatcctcccagcgggcccacctaccggggcgccgtaccctggtacaccatcaacttggatctacctccttacaaacggtggcacgaactcatgctggataaagctcctgtgctgaaagttatagtgaactctcttaaaaatatgatcaatacctttgttccatccggaaagatcatgcaggtggtagacgagaagctgcccggactgttgggaaactttcccggacctttcgaagaggagatgaaggggatagccgcagtgacggatattcccctgggcgaaattatatccttcaacattttttatgaactgtttaccatatgcactagcatagtggcggaggataaaaaaggccatttgatccacggtaggaatatggattttggagtctttctaggctggaatatcaataacgacacctgggtgatcacagaacaattgaaacccctgacggtgaacctcgatttccagagaaacaataaaaccgtgtttaaggcttcatcgttcgcaggatacgtaggaatgctgaccggatttaagcctggactttttagcctgaccttaaatgaacgcttctctatcaacgggggctaccttggaattctggaatggatcttaggcaaaaaagatgtaatgtggataggatttcttactagaacggtgctggagaattcaacatcctacgaagaggcaaagaacctgttgacaaagactaagattttggctccagcttacttcatcctaggcgggaatcagtccggcgaagggtgcgtgatcacccgcgaccggaaagaaagccttgacgtctatgagctggacgctaaacaggggcgatggtatgtggtacagaccaactatgatcgctggaagcatccatttttcctggacgaccggaggacgcccgccaagatgtgtctgaataggacatcccaggaaaacatctcattcgagaccatgtacgatgtgctctcaacaaagccagtcctgaataaactgaccgtttacaccactctcatcgacgtcaccaaagggcagttcgagacctacctgcgcgactgtcctgacccctgcataggctgg

SEQ ID NO: 17210 - DNA, 1185 bp, synthetic construct
  misc_feature 1..1185: note = source = /note="Description of Artificial Sequence: Synthetic coding sequence"
  source 1..1185: mol_type = other DNA
atgcccggaaggtcttgcgtcgctctggtgcttctcgcagccgccgtatcctgcgccgtggcacagcacgcccccccatggactgaagattgtcgcaaatcaacctacccccccagcgggcccacatacaggggagccgtgccttggtatacaatcaacttggacctgcccccctacaaacgctggcatgagttgatgctggacaaggcacctgtgctcaaggtgattgtgaactccttgaagaatatgatcaatacttttgtgccttccggaaagattatgcaggtcgtggatgagaagctccccggcttgctgggcaacttcccgggtccattcgaggaggagatgaaaggcattgcagccgtgacagacatcccactgggagagatcatctccttcaacatcttctacgaactcttcaccatatgtacaagcatagtagccgaagacaagaaggggcacctgatccatgggaggaatatggactttggagtcttcttaggctggaacattaataacgacacatgggtgattactgagcagttaaagccactgacagtgaatctcgatttccaaaggaataacaagactgtgttcaaagcaagttcattcgctggatacgtcggaatgctgaccgggttcaagcctgggcttttctcccttacactaaacgagaggttttctataaacggtgggtatctcggtatcttggaatggatcctcggaaagaaggacgttatgtggataggcttcctgactcggacggtgctggagaattctacctcttatgaggaggccaagaacctcttaaccaaaacaaaaattctggcgcccgcttattttatcctcggggggaatcagtcgggagagggatgcgtcatcactcgggataggaaggagtcacttgacgtttacgagctggatgccaagcagggcaggtggtatgtagtgcagactaattacgacaggtggaagcatcctttttttctcgatgacagaagaactccggctaagatgtgccttaaccgcacctctcaggaaaatatttcatttgaaaccatgtacgatgtcctttccaccaaacctgtcctgaataagctgaccgtttacactaccctgattgatgtgactaagggtcagtttgaaacataccttcgcgattgtcccgacccttgcatcggatgg

SEQ ID NO: 17211 - DNA, 1185 bp, synthetic construct
  misc_feature 1..1185: note = source = /note="Description of Artificial Sequence: Synthetic coding sequence"
  source 1..1185: mol_type = other DNA
atgcccggccgctcttgtgtagccctagtactgctggcagcggccgtcagctgcgcagtggctcagcacgctccaccgtggacagaagactgcaggaagagcacctaccctccctcggggccaacgtatagaggagccgtgccatggtacactatcaacctggacttacccccttataagaggtggcatgagctgatgctggataaggccccggtacttaaggtcatagtgaactcactcaaaaacatgattaatacgttcgtgccaagcgggaaaattatgcaagttgttgacgagaagttgccaggactgctggggaattttccagggcccttcgaagaggagatgaagggcattgcagctgtcacagacattcctcttggcgagataataagctttaacatattctatgaactgttcacaatctgtacctccatcgtggcagaggacaaaaagggacacctcatacatgggcgcaatatggattttggagtcttcctgggctggaatatcaataatgatacttgggtcatcaccgagcagctaaagcctctgacagtgaacttggactttcaacgaaataataagaccgtgttcaaggcctcttccttcgctggatatgttgggatgcttactggctttaaacccggcttatttagtcttactcttaatgagcgcttctccattaatgggggatatctgggaattctggagtggatcctcggaaaaaaagatgtgatgtggattggattcctcaccaggacggtgttagagaacagtacctcttatgaggaggctaaaaatctccttaccaagacgaagattttagccccggcctactttatcctgggaggaaaccagtctggagaaggctgtgtaataacccgagataggaaagagagcctcgacgtctatgagctcgatgccaagcagggcaggtggtatgtggttcagaccaattacgatcgctggaagcaccccttctttctggatgacagacgcactcctgcaaaaatgtgtctgaacaggacctcccaagaaaatatctcatttgagaccatgtatgatgtactgagtacaaaaccggttttgaataaactcactgtctacacaacactgattgacgtaacaaaaggccagtttgaaacatacctgcgggactgcccagatccctgcatcggatgg

SEQ ID NO: 17212 - DNA, 1185 bp, synthetic construct
  misc_feature 1..1185: note = source = /note="Description of Artificial Sequence: Synthetic coding sequence"
  source 1..1185: mol_type = other DNA
atgccaggccgctcatgcgtcgccctagtgctgttggcggccgctgtgagctgcgcagttgcccagcacgctcctccatggaccgaagattgtcgcaaatccacttatcctccatcaggccctacttatcggggcgcagtcccgtggtataccatcaacctcgacctgcctccctacaagcgttggcatgagcttatgctggataaggccccagttctcaaagtcatcgtgaacagcctgaagaacatgattaacaccttcgtgcccagcggcaaaattatgcaagtcgtggacgagaaactgcctggtttactgggcaacttcccaggccctttcgaagaagagatgaagggcattgccgccgttaccgatataccactgggcgagatcattagctttaacattttctacgaattgttcactatctgcacctctatcgtcgcagaagacaagaaagggcatctgattcacggacgaaatatggatttcggcgtcttcttgggctggaacattaataacgatacatgggtcattaccgagcaattgaagccacttactgtgaatctggacttccagaggaataataaaacggtctttaaggcctcctccttcgcaggctacgtaggaatgctgaccggattcaagcccgggctattctctctcaccttgaacgagcggtttagcatcaacggcgggtatctgggcatcctggagtggatactgggcaaaaaggatgtaatgtggataggattccttactcggaccgtgctagagaattcaacatcttatgaagaagcgaagaatcttctgacgaagacaaaaatattggctccagcttacttcattttgggcggcaatcagtccggggaagggtgtgtcatcaccagggacagaaaagagtctctggatgtgtatgagctggatgcgaaacaaggacggtggtacgtggtgcaaactaactatgaccgatggaaacaccctttctttctcgacgacaggcgcacccctgccaagatgtgcctgaatagaacctcgcaagaaaacatcagctttgagaccatgtacgatgtattgtcaaccaagcctgtgctgaataagctgaccgtctacacaacactgatcgacgtcaccaaaggccagttcgagacatacctccgcgactgccctgatccatgcatcgggtgg

SEQ ID NO: 17213 - DNA, 1185 bp, synthetic construct
  misc_feature 1..1185: note = source = /note="Description of Artificial Sequence: Synthetic coding sequence"
  source 1..1185: mol_type = other DNA
atgccgggccgatcgtgtgttgcactggtgttactggccgctgcagtgagctgcgcggtagcgcaacacgccccaccatggacagaagactgcagaaagtcgacttatccacctagtggaccgacctatcggggagccgtcccctggtacacaattaatctggacctcccaccgtataagagatggcacgaactgatgcttgataaagcaccagtcctgaaagtgatcgtgaactccctcaaaaacatgatcaatacctttgtgcctagtggcaaaataatgcaggttgtcgacgaaaagttaccggggctcctggggaatttccccggccccttcgaggaagagatgaaaggtatcgctgccgtgaccgacattcccctcggtgagataatttctttcaatatcttctacgaactattcacgatctgcacctctattgtggccgaggataagaaaggccacttaatccatgggaggaacatggactttggcgtcttcctggggtggaatatcaacaacgatacctgggtaattactgagcagctgaagccattaactgtaaatctggactttcaacgaaacaataaaactgtgtttaaggcctctagctttgctggctatgtgggcatgttgaccggctttaaacccggtctcttttccttgacgctgaacgagagattttccattaatggggggtatcttggtattctggagtggatcttgggtaagaaggacgtaatgtggattggtttcttgactcgcactgttctggagaattctacgtcttacgaggaggctaaaaaccttctaaccaaaacaaagatccttgctccagcatactttatcctggggggaaaccagagcggagaagggtgtgtgattacccgcgataggaaagaaagtctggatgtatacgaattggacgcaaagcagggcaggtggtacgtggttcagacaaattacgacagatggaaacatcctttcttcttggacgatcgccgtacgcccgccaagatgtgcctgaataggacttcacaggagaacatcagctttgagacgatgtatgacgtgcttagtacaaaacctgtcctgaacaaactcaccgtatacacaaccctaatcgatgtgactaaggggcagtttgagacctatctcagagattgtcctgatccgtgcattgggtgg

SEQ ID NO: 17214 - DNA, 1185 bp, synthetic construct
  misc_feature 1..1185: note = source = /note="Description of Artificial Sequence: Synthetic coding sequence"
  source 1..1185: mol_type = other DNA
atgccgggtcggtcctgcgtcgcccttgtgctgctcgccgccgcagtgtcgtgcgcggtggctcaacatgcgccaccgtggactgaggactgccgcaagtcaacttacccgccgtcgggaccaacgtaccgcggagccgttccgtggtacaccatcaaccttgatttgcccccctacaagcgatggcatgaacttatgctggacaaggcaccagtcctgaaggtgattgtgaactcgctgaagaatatgatcaataccttcgtccccagcggcaagatcatgcaagtggtggacgagaaactcccgggcttgctgggcaattttccaggtcctttcgaagaagaaatgaaaggaatcgccgcggtcactgatatcccactgggagagatcatctcctttaacatcttctacgaactgttcacgatctgtaccagcatcgtggctgaggataaaaagggccacctcattcacggaaggaacatggactttggggtgttcctggggtggaacatcaacaatgacacttgggtgatcactgaacagcttaagcctctcactgtcaatctggatttccaacgcaacaacaagaccgtgtttaaggccagctccttcgcaggatacgtggggatgctgacgggattcaaaccgggactgttttccctgactctgaatgaacgcttttcaatcaacggcggctacctcggaattctggagtggatcctgggaaagaaggatgtcatgtggattgggttcctcaccagaaccgtgttggagaattctacttcgtatgaggaggcgaaaaacctcttgactaagaccaagattctcgctccagcatacttcatcctcggaggtaaccagtcaggagaaggttgcgttatcacccgcgacaggaaggaaagcctcgatgtgtacgaactggacgccaagcagggacggtggtacgtggtgcagaccaactacgacagatggaagcacccgttcttcctcgacgatcggcggaccccggccaaaatgtgcctgaatagaacttcccaggagaacatcagtttcgagactatgtacgatgtgctgtcgaccaaaccggtcctgaacaaactgaccgtctacaccactctcatcgacgtcacgaagggccagttcgaaacctatctgcgggactgtcctgacccttgcatcggatgg

SEQ ID NO: 17215 - DNA, 1185 bp, synthetic construct
  misc_feature 1..1185: note = source = /note="Description of Artificial Sequence: Synthetic coding sequence"
  source 1..1185: mol_type = other DNA
atgcctggccggtcatgcgtggctctggtgctgctggccgcggcagtcagctgcgctgtagcccagcatgcgcccccatggaccgaggactgtagaaagtccacttacccgccttcgggcccaacgtacagaggtgccgtgccgtggtataccataaacctcgatctcccaccgtacaaacgctggcacgaactgatgctggacaaagcaccggtcctgaaggtgatcgtcaattcgctcaagaatatgattaacaccttcgtcccttcgggaaaaatcatgcaggtggtggatgaaaagctcccgggactgcttggcaacttccctggcccatttgaggaggaaatgaagggaatcgccgccgtgactgatatcccattgggagagatcatcagcttcaacatcttctacgaactcttcacgatctgtacttctatcgtggcggaggacaagaaaggacacctgatccacggaagaaacatggacttcggagtgttcctcggatggaacatcaacaacgacacttgggttatcacggagcagctgaagccgctgaccgtgaatctcgatttccaacggaataacaaaaccgtgtttaaggcttcatcatttgccggttacgtgggaatgctgaccggtttcaagcctggccttttttcgctcactctcaatgagcgattcagcatcaatggcgggtacctgggcatccttgagtggatccttgggaagaaggacgtgatgtggatcgggttccttactcgaacggtgttggaaaattcgacctcgtacgaagaagccaagaacttgctgaccaagactaagatcttggctccggcctactttattctggggggaaaccaatccggtgaggggtgtgtcattaccagagatcgcaaggaatccttggatgtctacgaactggacgcgaagcagggacggtggtacgtggtgcagaccaactacgaccggtggaaacatccgttcttcctggacgacaggcgcactccagccaagatgtgtttgaaccgcacctctcaagaaaacatctcatttgaaacgatgtatgacgtcctctccaccaagccggtgctgaataagctgaccgtatacactactctcatcgatgtgactaaaggtcagttcgaaacctacctgagagactgccccgatccgtgcataggctgg

SEQ ID NO: 17216 - DNA, 1185 bp, synthetic construct
  misc_feature 1..1185: note = source = /note="Description of Artificial Sequence: Synthetic coding sequence"
  source 1..1185: mol_type = other DNA
atgccaggccgcagctgcgttgccttggtcctcctcgcggctgcagtttcttgtgccgtggctcagcacgccccgccttggactgaggattgccgtaagtctacctaccctccatcagggcctacataccgcggagccgtgccctggtatactatcaacttggacttgcccccgtacaagaggtggcacgaactgatgctggacaaggccccagtgttgaaagtcatcgtgaatagcctcaaaaatatgataaacacattcgttcctagtggcaagatcatgcaagttgtggacgaaaagctcccggggctgctcggaaacttccccggaccatttgaggaggagatgaagggcattgcggccgttactgacattcctttaggcgaaattatctcattcaacatcttttacgagctgtttacaatctgtacatcaattgttgccgaagataagaaggggcatctcattcacggtaggaacatggactttggggttttcttggggtggaatattaacaacgatacgtgggttatcacggagcagctcaagccccttactgtgaatcttgactttcaacgaaacaataagactgtgttcaaagcctctagcttcgcaggatatgtggggatgctgacgggctttaagcccggccttttcagcctgactctgaacgagaggttttcgattaatgggggctatctaggcatacttgagtggatactgggaaaaaaagatgttatgtggatcggctttctaacacggaccgttctggagaattctacctcttacgaagaggccaagaatctcttgactaagacaaagattctggcgcctgcttatttcattctgggaggtaaccagagcggcgaggggtgtgtaataactcgtgacagaaaagagagcctggatgtgtacgagctggatgccaaacaggggcggtggtatgtcgtccagacgaactacgaccgctggaagcaccctttcttcttggatgatagacgaaccccagcaaagatgtgtctgaatagaacaagccaggaaaacatttcttttgaaactatgtatgacgttctcagtaccaagccagttctgaataagctcaccgtttacaccacccttatcgatgtgactaaagggcagtttgagacatacctgagggactgccctgacccttgtattggttgg

SEQ ID NO: 17217 - DNA, 1185 bp, synthetic construct
  misc_feature 1..1185: note = source = /note="Description of Artificial Sequence: Synthetic coding sequence"
  source 1..1185: mol_type = other DNA
atgcccggcaggtcctgtgtggcactcgtccttcttgccgcagccgtttcctgcgcggtggcccagcacgcgcctccgtggacagaggactgtcggaagagtacatatccaccttcaggcccaacctacaggggcgctgttccgtggtacacgatcaaccttgacctgcctccttataagaggtggcacgagctcatgctcgacaaggcgccagtgttgaaggttattgttaacagcctcaaaaatatgatcaacaccttcgtgccctcagggaagatcatgcaagttgttgacgagaaactccctgggctgctgggcaatttccctggcccattcgaggaggaaatgaaaggaatagcagctgtgaccgatatccctctcggggagattatcagcttcaatatcttttatgaactgtttactatctgcacttcaatagtcgcggaagacaagaaggggcacctcatacacgggagaaacatggatttcggggtattcctgggttggaatattaacaatgatacctgggtcattactgagcaacttaagccactgacagtcaacctggatttccagcggaacaataagacggtgttcaaggcttctagtttcgccgggtacgttggaatgttgaccggttttaaacccggtctgttcagcctcacgctgaacgaaagattttccatcaacggtggatatctcgggattttggaatggattttgggaaagaaagatgtcatgtggattggattcctgactcggactgttctggaaaactccacatcatatgaggaagcaaagaacttgctgaccaagaccaagattctcgcccccgcttacttcatactgggcggtaatcagtcaggcgaggggtgtgttatcaccagggaccggaaagaatcactcgacgtctacgaactggacgccaagcagggaaggtggtacgtggtacagactaactacgatcggtggaagcaccctttttttcttgacgacagacggactcccgctaaaatgtgtcttaacaggacttcccaggaaaatatttcttttgaaactatgtacgacgtgttgtctacaaaacccgttctgaataagcttacagtgtatacaaccctcattgatgttacaaaaggccagttcgagacgtacctgagagactgtccagatccctgtatcggatgg

SEQ ID NO: 17218 - DNA, 1185 bp, synthetic construct
  misc_feature 1..1185: note = source = /note="Description of Artificial Sequence: Synthetic coding sequence"
  source 1..1185: mol_type = other DNA
atgccaggaagaagttgtgttgcacttgttcttttagctgctgccgtttcctgtgctgttgcacaacatgctcctccatggacagaagattgtagaaagtcaacttatccaccatctggtccaacctatagaggagctgttccttggtatacaattaatttagatttaccaccttataaaagatggcatgaactaatgttagataaggctccagtcttaaaggttatagttaattctcttaaaaatatgattaatacttttgttccatcaggaaaaattatgcaagttgttgatgaaaaattaccaggtttattaggaaatttccctggtccatttgaagaagaaatgaaaggtattgcagcagtaactgatataccattaggagaaataatctcatttaatattttttacgaactttttactatttgtacttccattgtagctgaagataagaaggggcatttaattcatgggcgtaatatggattttggtgtctttttaggatggaatattaataatgatacatgggtaattactgaacaattaaaaccacttaccgttaatcttgatttccaacgaaataataaaacagtatttaaagctagttctttcgcaggatatgttggtatgcttactggatttaaaccaggattattttcattaacacttaacgaaagattttcaattaatggaggatatcttggtattcttgaatggattttaggaaaaaaagatgtaatgtggattggatttttaacaagaacagtacttgaaaattcaacttcatatgaggaggctaagaatttattgactaaaacgaagatattagctccagcatattttattttaggaggaaatcaaagtggagaaggttgtgttataactagagatagaaaggagagtcttgatgtttacgaactcgatgcaaagcaaggaagatggtatgtagttcaaactaattatgatagatggaaacatccattttttctcgatgatagaagaactccagcaaaaatgtgtcttaatagaacttcacaggaaaatatatcctttgagactatgtatgacgttttatccactaaaccagtactaaataaattaacagtttatactaccttaattgacgttactaagggacaattcgaaacgtatcttagagattgtccagatccttgtattggatgg

SEQ ID NO: 17219 - DNA, 1185 bp, synthetic construct
  misc_feature 1..1185: note = source = /note="Description of Artificial Sequence: Synthetic coding sequence"
  source 1..1185: mol_type = other DNA
atgccaggcaggtcgtgcgttgctttggtccttttggcggctgctgtcagctgtgcagttgcccagcacgctcctccttggactgaagattgccgtaaatctacatatcctccatctggtcctacatatcgaggcgcagttccgtggtatacaatcaacttggatcttccaccttataaacgatggcacgaacttatgctcgacaaggcaccagttctcaaagttattgtcaacagtcttaaaaacatgattaacacttttgttcctagtgggaaaattatgcaggtcgtcgatgaaaaactgccaggtcttttaggcaactttcctggaccattcgaggaagagatgaaaggtatcgcagcagttaccgatatccctctaggtgaaattattagtttcaacattttttacgagctgttcactatctgcacgagtatagttgctgaagataagaaaggacaccttatccatggacgtaatatggactttggggttttccttggttggaatatcaacaatgatacatgggtcatcaccgaacaattgaaacctcttacagtgaaccttgattttcaacgaaataataaaactgtttttaaggctagcagttttgcgggttacgtaggtatgctgactggattcaagcctgggcttttttcacttacacttaacgaaagattctcaatcaacggaggatatcttgggatccttgaatggattctgggcaaaaaagatgtcatgtggattggctttctcactaggacggttctggagaattctacaagctacgaggaagctaagaatctcctcacaaaaactaaaatcttggctcctgcttattttattttaggggggaaccaatccggggagggttgcgtgatcactagggataggaaggagtctttggatgtttatgagttggatgcaaagcaaggtaggtggtatgtggtgcaaacgaattatgataggtggaaacatccattttttttggatgatagacgtactcccgcaaaaatgtgtctcaatagaacaagtcaagaaaatatctcatttgaaaccatgtacgatgtattatccacaaaaccagtacttaataaactcacggtttatactacattgattgatgttactaaagggcaatttgaaacctacctaagagactgcccggatccgtgcatcgggtgg

SEQ ID NO: 17220 - DNA, 1185 bp, synthetic construct
  misc_feature 1..1185: note = source = /note="Description of Artificial Sequence: Synthetic coding sequence"
  source 1..1185: mol_type = other DNA
atgccgggacgaagctgcgtcgccctagtgctgctggccgcagccgtgtcttgtgctgttgcacaacacgcaccaccttggactgaagattgcaggaagagcacatacccaccctctggccccacgtatcgtggagcagtcccatggtacaccatcaacttggaccttccgccctacaagaggtggcacgagttgatgctcgataaagcccctgtcctcaaggtgatcgtcaactccctgaagaacatgatcaatacgtttgttcccagcggaaaaattatgcaagtcgtggacgaaaagctgccaggcctgttgggaaattttcccggtccttttgaggaggagatgaagggaatcgcagcggtgacagacatcccactaggcgagataataagctttaatatcttctatgagctctttacaatatgcacatccatcgtggcagaagacaagaaaggccacctcattcatggccgcaacatggatttcggtgtctttctgggctggaacatcaataacgacacttgggttatcacggaacagcttaagccactcactgtaaacctagactttcagcggaacaataaaaccgtcttcaaggcctcaagttttgccgggtatgtaggcatgctaacaggctttaaaccgggtctctttagcctcacactaaacgagcggttcagtattaacggaggctacctgggtatcttggagtggatactagggaagaaagacgtgatgtggataggattcctcactagaaccgtgttggagaactccacaagctatgaagaggccaagaaccttcttactaaaactaagatcttggccccagcctacttcatccttggaggaaatcagtctggggaaggctgcgtgattacacgtgacagaaaggagtctctcgacgtctacgagctcgatgcgaagcaggggagatggtatgttgtccagaccaattatgaccgctggaaacacccattttttctggatgacaggagaactccagcaaaaatgtgcctaaaccgtacgtctcaggagaacatcagctttgaaactatgtacgatgtgctgagcacaaagcccgtcctgaacaaactaactgtctacactaccctgatagatgtgacaaaaggacagtttgagacgtatctgcgagactgtccagacccatgcatcggctgg

SEQ ID NO: 17221 - DNA, 1185 bp, synthetic construct
  misc_feature 1..1185: note = source = /note="Description of Artificial Sequence: Synthetic coding sequence"
  source 1..1185: mol_type = other DNA
atgcccgggagatcatgcgtcgccctggtcctcctggccgccgcggtttcatgcgcagtggcacagcacgctccaccctggactgaagattgtcgcaagtccacgtatccaccttcgggtcctacctaccgcggggcggtcccttggtacaccatcaatctggatcttcccccgtacaaaagatggcatgagttgatgctggataaggcgccggtgctcaaggtgatcgtcaacagccttaagaatatgattaacacttttgtgccttcgggcaagatcatgcaagtcgtggacgaaaagctgcctggcctgcttggaaatttccctggtccgttcgaagaggagatgaaagggatcgccgccgtgaccgacatcccgctcggagaaatcatctcgttcaatatcttctacgaactcttcactatttgcacctcgattgtggctgaggacaagaaaggacacctgattcatgggcgtaacatggacttcggcgtgttccttggatggaatatcaacaacgacacttgggtgatcaccgaacagctgaaacctctcaccgtcaacctggatttccaaaggaacaacaaaactgtgttcaaggcctcctcatttgcgggctacgttggtatgcttaccggattcaagcccggactgttttcactgaccctgaacgaacggttctcgatcaatggaggttacttgggaattctggaatggatcctgggcaagaaagacgtgatgtggatcggtttcctgactcggaccgtgttggagaactccacgtcttacgaggaggcgaaaaacctgctgactaagaccaagatcctcgccccggcttacttcatactcgggggaaaccagtcaggagagggatgcgtgatcactcgcgatcgcaaggaatccctggacgtgtacgaactggacgcgaagcagggacggtggtatgtcgtccagactaattacgataggtggaagcacccgtttttcctcgacgaccggaggactccggcgaaaatgtgcctgaacaggacttcccaagagaacatttccttcgaaaccatgtacgacgtgctgtccacgaaaccggtgttgaacaagctgacggtgtacactacccttatcgatgtcacgaagggtcaatttgaaacttatctgcgggattgtccggacccatgcatcgggtgg

SEQ ID NO: 17222 - DNA, 1185 bp, synthetic construct
  misc_feature 1..1185: note = source = /note="Description of Artificial Sequence: Synthetic coding sequence"
  source 1..1185: mol_type = other DNA
atgccggggaggtcatgcgtggccctggtgttgctggccgcagcggtttcatgtgcagtggcacaacatgccccaccgtggaccgaagattgcagaaagtccacctacccaccctcgggacctacgtatcgcggagcggtgccgtggtacaccattaatctggacttgcctccctacaagcggtggcacgaactgatgctcgacaaggcaccagtccttaaagtcatcgtgaattcactcaagaatatgatcaacaccttcgtcccgtcaggtaagatcatgcaagtggtcgacgaaaaacttccagggctcctcggaaacttcccgggaccgtttgaagaggaaatgaaggggatcgcagcggtgacggatatcccattgggggagattatctcattcaatatcttctacgaactgttcaccatctgtacttcgatcgtggccgaggacaagaagggacaccttatccacggtcgcaacatggacttcggcgtctttctgggatggaatatcaacaacgatacctgggtgattaccgagcagctgaaacccctgactgtgaacctggacttccagcgaaacaataagaccgtattcaaagcgtccagcttcgcggggtacgtcggaatgctgaccggtttcaaaccaggcctgttctcgctgactctgaacgagcggttctcaatcaacggcgggtacctggggattctcgagtggatcctcggaaagaaagacgtgatgtggattggtttcttgaccagaactgtgttggaaaactcaacttcctacgaagaggccaaaaatctgcttaccaaaactaagatcctggcaccggcttactttatcctgggtggcaaccagtcgggggaaggatgtgtgatcactagagatcgcaaggagtcgctggacgtgtacgaactcgacgcgaaacaaggcagatggtatgtcgtgcagaccaactacgatcggtggaagcatccattctttctggacgatcgcagaacccctgctaaaatgtgcctcaaccggacctcccaagagaatatctcctttgaaacgatgtacgatgtgctgtccactaaaccggtcttgaacaagttgaccgtgtacacgactcttatcgacgtaaccaagggacagttcgaaacctacttgcgggattgcccggacccttgcatcggctgg

SEQ ID NO: 17223 - DNA, 1185 bp, synthetic construct
  misc_feature 1..1185: note = source = /note="Description of Artificial Sequence: Synthetic coding sequence"
  source 1..1185: mol_type = other DNA
atgcccggtaggagctgtgtcgccctcgtgctgcttgcagccgccgtgtcgtgtgcggtcgcccagcatgcacctccgtggaccgaggactgcaggaagtcgacctaccccccgtcgggaccaacttacagaggcgcagttccctggtacacgatcaatctggacctccccccgtacaagagatggcacgaactgatgcttgataaggcaccggtgctgaaagtgattgtgaacagccttaagaacatgatcaacacttttgttccctcgggcaagataatgcaggttgtggatgaaaaactgcctggacttttggggaactttcctggacctttcgaggaggagatgaaaggcatcgctgcggtgacggatattcctctcggagagatcatttcctttaacatcttttacgaactgttcaccatctgcacctccattgtggcagaggacaaaaagggacacctgattcatggtcgcaatatggactttggagtgtttctggggtggaacattaacaatgacacttgggtcattactgaacagttgaagcctctgactgtgaaccttgactttcaacgcaataacaagacggtgttcaaagcatcgtctttcgctggctatgtcggtatgctgactggcttcaagcctgggcttttcagccttactctgaacgaacgcttcagcattaatggcggttatctgggaatactggagtggatacttgggaaaaaagacgtgatgtggatcggatttctcactagaactgtgctcgaaaactccacctcgtacgaagaagctaaaaaccttctcaccaagacgaaaatcctggcacccgcgtacttcatactgggaggaaatcaatccggtgagggttgcgtcatcactcgggatagaaaggaatccttggatgtgtacgaactcgatgccaagcagggcagatggtatgtcgttcaaaccaattacgacaggtggaagcatccttttttcctggacgatagacgcactccagcaaaaatgtgtctgaatagaaccagccaagagaacatttcgtttgaaaccatgtacgatgtcctttccacgaagcctgtgcttaacaagctcaccgtgtacacgacccttattgatgtgaccaaaggtcaattcgaaacctaccttagggattgtccagatccatgtattggatgg

SEQ ID NO: 17224 - DNA, 1185 bp, synthetic construct
  misc_feature 1..1185: note = source = /note="Description of Artificial Sequence: Synthetic coding sequence"
  source 1..1185: mol_type = other DNA
atgccagggcgctcatgcgtcgcactggttctgttggccgctgctgtgtcatgtgccgtcgctcaacacgcgcctccctggacggaagattgtcgcaaaagcacttacccaccgtctggccctacttacaggggtgccgtgccatggtatactatcaacctggatcttcccccctacaaacgctggcacgagcttatgctggacaaggctccagtgttgaaggtcattgtgaactctctgaagaatatgattaacacattcgtgcctagtggaaaaataatgcaggtggtggacgagaagctccccgggctgctgggcaacttcccaggtccatttgaggaggaaatgaagggcattgcagcagtcactgacatcccactgggtgagatcatcagtttcaacatattttatgaactttttactatctgcacatcaattgtcgccgaagacaaaaaaggacacctgatccacgggcgaaacatggacttcggcgtctttctggggtggaacataaataacgatacctgggtgattacagaacaactgaaaccgctcaccgtgaaccttgactttcagcggaataataagaccgtgttcaaagcttcatcttttgcaggatatgtggggatgctcaccggatttaaacccggcctcttttccctcaccctcaatgagcggttttcaatcaacggggggtatctcgggatcctggagtggatccttgggaagaaagacgttatgtggattggttttctcacccgcacggttttggagaactccactagttacgaggaggctaagaaccttttgaccaagactaagatactcgcaccagcatattttatcctgggcggtaaccagtccggagaaggatgtgtcatcaccagagaccgaaaagaaagtctggatgtatatgagctggatgcgaaacaaggccgatggtatgtggtgcagacaaactacgacaggtggaagcatcccttttttttggatgaccggagaacacccgccaagatgtgcctcaataggacctcccaagaaaatattagtttcgaaacgatgtacgacgttctgagcaccaagcctgtgctgaacaaacttaccgtctacaccaccctgatcgatgtcaccaaaggacagtttgaaacatatctcagggactgtccagatccctgtattggctgg

SEQ ID NO: 17225 - DNA, 1185 bp, synthetic construct
  misc_feature 1..1185: note = source = /note="Description of Artificial Sequence: Synthetic coding sequence"
  source 1..1185: mol_type = other DNA
atgccgggtaggtcttgtgtcgcccttgttctgctggcagcagcggtcagctgtgcagtcgctcagcatgccccaccctggacagaagactgtagaaagtcgacctacccaccctcaggccccacatatcgaggcgcggtaccctggtacaccataaacctcgaccttcctccctacaaacgatggcatgaactaatgcttgacaaggcacctgtgctgaaagtgattgtaaattcactgaagaacatgatcaacacatttgtcccgagcggcaagattatgcaggtggttgatgaaaaactgcccggccttttgggcaacttccccggcccgtttgaggaagaaatgaaggggatagcagccgtcacagatatccccctcggagaaataatctctttcaatatcttctacgagctgtttaccatttgcacaagcatcgtcgcagaagacaaaaaggggcacctgatccatgggcggaatatggactttggcgtttttctaggttggaatattaacaacgacacatgggtcattacagaacaattgaaacctttgaccgtgaatctggactttcaaaggaataacaaaacagtgttcaaggcaagttcattcgctggatatgtgggaatgctaactggattcaagccagggctgttctcattgaccctgaacgagagattttcaattaacggcggttacctggggatactcgagtggatcctggggaagaaggacgtcatgtggataggctttctcacgcgcacagtcctcgagaattcaacaagctacgaagaagccaagaacttactgacaaagaccaagatactggcacccgcctactttatcttgggagggaaccaatctggggaaggatgcgtgatcacccgcgatcgcaaagaaagtctagacgtttacgagctagacgcaaaacaaggcaggtggtacgtggtgcagacaaactacgacaggtggaagcatcccttctttctggatgacagacggacgcccgctaagatgtgtctaaatagaacttcacaagagaacatttcttttgagacaatgtacgacgtgctttccaccaaaccggtgcttaataaactgacagtgtacacaacactcatcgacgtgaccaaaggacaattcgaaacatacctccgggactgtccagacccgtgcatcggctgg

SEQ ID NO: 17226 - DNA, 1185 bp, synthetic construct
  misc_feature 1..1185: note = source = /note="Description of Artificial Sequence: Synthetic coding sequence"
  source 1..1185: mol_type = other DNA
atgccagggcgctcctgtgtcgcgctcgtgttgctggctgccgccgtgtcatgcgccgttgctcaacacgcgccaccctggaccgaagattgccgcaaatcgacttatccaccatcaggaccaacttaccgcggggccgtcccgtggtacacgatcaatctggacttgccaccatacaagcgctggcatgaacttatgctggacaaggcgcctgtcctcaaggtgatagtgaactcgttgaagaatatgatcaacacttttgtgccttcgggtaaaatcatgcaggtggtggacgaaaagctccctggcctcctgggcaacttccccggacctttcgaggaggaaatgaagggaatcgccgcagtcactgatattccgctgggtgagatcatctcgttcaacatcttttacgagctcttcaccatttgcacctccatcgtcgccgaggacaagaaggggcacttgatccacggacgcaatatggacttcggcgtgttcctggggtggaacattaacaacgacacttgggtgatcaccgaacagctcaaacctctgaccgtcaatctcgactttcaacggaacaataagaccgtgttcaaggcctcatccttcgctggatacgtcgggatgctgaccggattcaaaccgggacttttttcactgaccctcaacgagcgtttctcgatcaatggtggctacctgggtattcttgaatggatcctgggtaaaaaggatgtcatgtggatcggatttcttactcgcaccgtgcttgagaactccacttcatacgaggaggcgaagaacctgctcaccaagaccaagatcctcgcgccagcctactttatcctgggaggaaaccaaagcggcgagggctgtgtgatcaccagagatcggaaagagtcccttgacgtgtacgaacttgatgctaaacaagggagatggtacgtcgtgcagaccaactacgaccgctggaagcatccattcttccttgacgatcggagaacccctgccaaaatgtgtttgaaccggaccagccaagaaaacatctcgttcgaaaccatgtacgacgtgctttcgaccaaaccggtgctgaataagctgaccgtgtacactaccctgattgacgtgactaaagggcagttcgagacttacttgcgggattgcccggatccgtgcattggctgg

SEQ ID NO: 17227 - DNA, 1185 bp, synthetic construct
  misc_feature 1..1185: note = source = /note="Description of Artificial Sequence: Synthetic coding sequence"
  source 1..1185: mol_type = other DNA
atgcctgggagatcgtgtgtggcacttgtgctgctggcagcagcagtgtcttgtgcagtggcacagcatgcaccgccttggacggaagattgccgaaagtcaacgtatccgccgtcagggccaacttaccgcggtgccgtgccctggtacaccatcaatcttgatctgcctccatacaagcggtggcatgaactcatgttggataaagcaccagtgcttaaggtgatcgtgaactccttgaagaacatgattaacacgtttgtcccttcaggcaagatcatgcaagtggtggatgaaaagctgccaggtctgttggggaattttcccggacccttcgaggaggaaatgaaaggtattgccgcggtcaccgacattccgctgggtgaaatcatctcgtttaacattttctacgaactctttaccatctgtacttcaattgtggcggaagataagaaagggcaccttattcacggccgcaatatggattttggcgtgtttctgggatggaacattaacaacgacacttgggtgattaccgaacagcttaagcccctgaccgtgaatctggactttcagaggaacaacaagaccgtctttaaagccagctcctttgcaggctacgtgggaatgctgacgggtttcaagccaggactgttcagccttactctgaatgagcgcttctcgatcaacggaggataccttggcattcttgagtggattcttggaaagaaggatgtcatgtggattggttttcttactagaaccgtgctggaaaactctacttcgtacgaggaagctaagaatctccttactaagaccaagattctggcgcctgcatacttcatccttggtggtaaccaatcaggtgaagggtgtgtcattactcgggaccgtaaagagtcgcttgatgtgtacgagctcgatgctaaacaaggacgatggtacgtggtgcaaaccaattacgatcggtggaagcaccctttctttttggatgatagacggacgcccgcaaaaatgtgtttgaacaggacttcccaagagaatatcagctttgagacgatgtacgacgtgctgtcaaccaagccagtgctgaacaaactgactgtgtacactaccctgattgacgtgactaagggccagttcgaaacctatctgagggattgtcctgatccgtgcatcggatgg

SEQ ID NO: 17228 - DNA, 1185 bp, synthetic construct
  misc_feature 1..1185: note = source = /note="Description of Artificial Sequence: Synthetic coding sequence"
  source 1..1185: mol_type = other DNA
atgccggggcgttcatgtgtggctcttgtattgctggccgcagcagtatcatgtgccgtcgcccaacatgcaccaccatggacggaagattgtcgcaagagtacttatccaccgtccggtcctacttatagaggagctgtaccttggtacacaattaatctggatctcccaccatacaagagatggcatgaattgatgctagataaagctcccgttttgaaagtgattgttaactccctgaaaaatatgattaatacatttgtcccttccggcaaaatcatgcaagtcgttgatgaaaagcttccaggattgttgggaaattttccgggaccatttgaagaggagatgaaaggaatcgcagcagttaccgacatcccattgggagaaattatctcgtttaatattttctacgagttgtttaccatttgtacatctattgtggctgaagataaaaagggacacctgattcatggacgaaatatggattttggtgtgtttctagggtggaatataaataatgacacttgggtcattactgaacaacttaagcctctaacagtaaatttagattttcaaagaaataacaaaactgtttttaaggcttcttcgttcgcaggatatgttggtatgttgaccggatttaaaccaggactcttctcgcttactttgaatgaaagattttcaataaatggaggatatcttggaattttggaatggattttggggaagaaggatgtcatgtggattggttttctgacgaggacagtgctggagaacagtacttcttatgaggaagccaaaaacctgctcacaaagaccaagatcctcgcaccagcctactttattctcggtggaaatcaatctggtgaaggctgcgttattaccagagatagaaaggaatcgcttgatgtctacgaactcgatgcaaagcagggacgatggtatgtggtccaaactaactatgatcgttggaaacacccgtttttccttgatgatcgtcgaaccccagccaaaatgtgtctcaacagaacatcccaagagaatatcagtttcgaaacaatgtatgatgtactctcaacaaaacctgtgctcaataagttgactgtgtacactactttgattgacgtaacgaaaggacaatttgaaacatatttacgcgactgcccagacccgtgtatcggatgg

SEQ ID NO: 17229 - DNA, 1185 bp, synthetic construct
  misc_feature 1..1185: note = source = /note="Description of Artificial Sequence: Synthetic coding sequence"
  source 1..1185: mol_type = other DNA
atgccagggcgctcgtgtgtggcactggtccttctggcagcagcagtgtcctgtgccgtcgcacaacatgctccgccatggaccgaggactgcaggaagtcgacctacccaccatccggccctacctacaggggagcagttccttggtacacgattaacctggacctgcctccatataagagatggcacgagctgatgcttgacaaggcgccagtcctcaaggtgattgtgaacagcctgaagaacatgataaacacctttgtcccctccggtaagataatgcaggtggtcgatgaaaaacttcccgggcttcttggcaactttcctggtccctttgaagaagagatgaagggaatcgcagcagtcacggacattcccctgggcgaaatcatttcatttaacatcttctacgaattgtttaccatctgtacctctatagtggccgaggacaaaaagggtcatctcattcatggaaggaatatggactttggtgtctttcttggttggaacattaacaatgatacctgggtcatcaccgaacaactgaagcccctgactgtgaacctggactttcagcgcaacaacaagactgtgttcaaggcgagcagcttcgctggttacgtgggtatgcttaccggatttaagcctggactgttttcactgactctgaacgaaagattttcgattaacgggggttacctgggaatcctggaatggatcctgggtaagaaagatgtcatgtggattggctttcttacgagaactgtcctggaaaactcaacttcgtatgaagaggcaaagaatctcctgaccaaaactaagatccttgcacctgcgtactttattctgggagggaaccaatcgggtgaggggtgtgtgataacccgcgaccggaaagagtcgctggatgtgtatgagctcgatgcaaaacaagggagatggtacgtggttcaaactaactacgatcgctggaagcacccgttttttcttgacgatcgcagaaccccggccaaaatgtgcttgaatcgcacgtcacaggaaaacatttcctttgagactatgtacgatgtcctttctaccaagcctgtgcttaacaagctcaccgtctacaccactcttatcgatgtcaccaagggacaattcgaaacctaccttcgggactgcccagatccgtgtatcggctgg

SEQ ID NO: 17230 - DNA, 1185 bp, synthetic construct
  misc_feature 1..1185: note = source = /note="Description of Artificial Sequence: Synthetic coding sequence"
  source 1..1185: mol_type = other DNA
atgccgggacggtcgtgtgtggcgctggtgctcctcgcagctgcagtgtcctgcgcagtcgcacagcatgcacccccgtggacggaagattgccgcaagtccacttaccctccttcagggccaacttacagaggtgctgtcccatggtacaccattaatctggatctccctccatacaaaaggtggcacgagctgatgctggacaaggcacctgtccttaaggtcatagtcaactctctgaagaacatgattaacacttttgtcccatccgggaagattatgcaggtggtggacgagaagctgccaggattgctgggaaactttcctggtcctttcgaggaagaaatgaagggtattgccgccgtcaccgacatcccactgggagagatcatctcattcaatatcttctacgaattgttcacgatctgtacgtctattgtcgcagaagataagaagggacatctgatacacggccggaacatggactttggagtattcctgggctggaacattaacaatgatacttgggtgatcactgagcaactgaaacctctcacggtcaatctcgactttcaacgtaacaacaagaccgtgtttaaggcttcgtccttcgccggatacgtggggatgctcactggattcaaacctggattgttctcccttactctcaatgagcgtttttccatcaacggcggttaccttggaatccttgaatggatcctgggaaagaaggatgtgatgtggattggttttctgaccagaacggtgctcgaaaactcgacctcatatgaagaggcgaagaatcttctgaccaagaccaagattcttgcacctgcctacttcattctgggtgggaaccaatctggagaaggttgcgtgattacccgagatcggaaggaatcactggatgtgtatgagttggatgcgaagcagggaagatggtacgtggtgcaaacgaattacgaccgctggaaacatccattctttctcgacgacaggcggacgccggcaaagatgtgcctgaaccggacttcgcaagaaaacatttcctttgaaaccatgtacgatgtgctcagcacgaagcccgtgctgaataaacttactgtctacactacccttatagatgttactaagggacagtttgaaacctaccttcgggattgtcctgacccctgtattggttgg

SEQ ID NO: 17231 - DNA, 1185 bp, synthetic construct
  misc_feature 1..1185: note = source = /note="Description of Artificial Sequence: Synthetic coding sequence"
  source 1..1185: mol_type = other DNA
atgccaggacggtcatgcgtggctttggtgctgctggccgctgctgtgagctgcgctgtcgcgcaacacgctccgccttggaccgaggactgcaggaaatcgacctacccgccgtcaggacctacctacaggggagcagtgccatggtacactatcaatttggatctgcctccgtacaagcgctggcatgagctgatgctggataaggctccggtgctcaaggtgatcgtcaactcgctgaagaacatgatcaacacctttgtgccgtcgggtaagatcatgcaggtggtcgacgaaaagctgccgggcctcctgggcaacttcccgggaccattcgaagaagaaatgaaggggatcgccgccgtgaccgacatcccgctgggagagatcatctcattcaacatcttttacgagttgttcacgatctgcacttccattgtggccgaagataagaagggtcacttgatccacggcagaaatatggacttcggtgtgttcctgggatggaacattaacaatgatacctgggtgatcaccgaacagcttaagccactgactgtgaatctggatttccaacgtaacaacaaaactgtgttcaaggcgtcctcctttgcaggatacgtcggaatgctgacgggatttaagccaggactctttagtctcacccttaatgaaagattctccatcaacggaggctacctgggaatcttggaatggatcctgggtaaaaaggatgtgatgtggatcgggtttctgaccagaaccgtccttgagaattcgacttcgtacgaggaagccaaaaatcttttgactaagactaaaatcctggcccctgcttacttcattctcggaggaaatcaaagcggagagggatgcgtcatcacccgagataggaaggagtccttggatgtgtacgagcttgacgccaagcagggacgctggtacgtggtccaaaccaactacgaccggtggaagcatccgttcttcctcgacgatcgccgcaccccagcaaagatgtgtctcaaccggacctcacaggaaaacatctcgttcgagactatgtacgacgtgctctccactaagccggtgttgaataagttgaccgtgtacaccaccttgatcgacgtgacgaaaggtcagttcgaaacttatctgagagactgcccggacccgtgcatcggatgg

SEQ ID NO: 17232 - DNA, 1185 bp, synthetic construct
  misc_feature 1..1185: note = source = /note="Description of Artificial Sequence: Synthetic coding sequence"
  source 1..1185: mol_type = other DNA
atgccagggcgttcctgcgtggcactggtgctgctcgcagctgccgtgtcctgcgccgtagcacagcatgcacccccatggactgaagattgtcgcaaaagcacctacccgccttcgggccccacttacaggggggccgtaccgtggtacactataaacttggacctcccgccgtataagcggtggcatgagctgatgctcgacaaagcgccggtcctgaaggtcatcgttaacagcctgaagaacatgatcaacaccttcgtgcccagcggaaaaatcatgcaagtggtggacgaaaaactcccgggcttgctggggaacttcccaggtccgtttgaagaggaaatgaaaggaatcgccgcggttacggacattcctcttggagaaatcatatcattcaatatcttctatgaactgtttactatctgcacctctatcgtggccgaagataagaagggacacctcatccacggaagaaatatggacttcggagtgttcctcggctggaacatcaacaacgatacttgggtgatcactgagcagctcaagccattgaccgtgaacctggactttcagcgcaataacaagaccgtgttcaaggcatcctcctttgccgggtacgtgggaatgctgacgggattcaagcctggactgttctcgctgactcttaatgaacgcttctccatcaacggagggtacctcggcatcctggagtggattcttggtaagaaagacgtcatgtggattggcttcctgaccaggacggtgctggaaaactctacttcgtacgaggaggcgaaaaatctgctcactaagactaaaatcctggctcctgcgtactttatcctcggaggaaatcagtcgggcgagggctgcgtgattaccagggaccggaaggaatcgctggatgtctatgagctggacgcaaaacaaggacgatggtacgtggtccagaccaattacgatcgatggaagcacccgttcttcttggatgacaggcgcacccccgccaaaatgtgtctgaatagaacgtcacaagagaacattagctttgagactatgtacgatgtcctgagcaccaagcctgtgctcaataagctgactgtctacaccacgctgatcgacgtcactaagggacagttcgaaacttacctccgcgattgcccggacccatgcatcggatgg

SEQ ID NO: 17233 - DNA, 1185 bp, synthetic construct
  misc_feature 1..1185: note = source = /note="Description of Artificial Sequence: Synthetic coding sequence"
  source 1..1185: mol_type = other DNA
atgcctggccgatcctgcgtggcactggtgctactggccgcagccgtgagctgcgcagtggcgcagcatgctccaccatggactgaagattgcaggaaaagcacgtatccgccctccggaccaacctaccgaggcgcggtaccttggtatacaataaatcttgaccttcccccttacaaacgatggcacgaattgatgttggataaggcccctgtattaaaggtgatagtgaactccctgaaaaatatgatcaatacattcgtcccctccgggaagatcatgcaagtcgttgacgagaaactcccaggcctgctggggaattttcctggtccgtttgaggaagaaatgaaagggatcgctgcagtcaccgatatccctctgggcgaaattattagctttaatatcttttatgaacttttcacgatctgcacaagcatagtcgccgaggacaaaaagggtcacttaatccacggacgtaacatggatttcggggtgttcttggggtggaacatcaataacgatacctgggtaattaccgagcagcttaaacctctcaccgttaatctcgacttccagcgaaataataaaaccgtctttaaggcttcctccttcgcaggctacgtcggaatgcttactggattcaagccagggttattctctttgactcttaatgagagattttccattaacggtggatacctcgggattttggaatggattctcggcaagaaggatgttatgtggatcggctttcttacgcgaacagtactggagaactcaacatcatatgaagaggccaaaaatctacttacaaagactaagatcctggccccagcttatttcattctgggtggaaatcagtctggtgagggatgtgtgattacccgagaccgaaaggaaagtctcgacgtgtacgagctggatgccaaacagggccgatggtacgtggtgcagaccaactatgatagatggaaacatccctttttcctggacgaccgtaggaccccggcaaaaatgtgtctgaatagaacgagccaggagaatatctcattcgaaaccatgtacgacgtgctgtctacgaaaccggttctcaacaagctaacagtttatacgactctgatcgacgtaaccaaaggccagtttgagacttatctgagggattgtcccgacccttgcatcggctgg

SEQ ID NO: 17234 - DNA, 1185 bp, synthetic construct
  misc_feature 1..1185: note = source = /note="Description of Artificial Sequence: Synthetic coding sequence"
  source 1..1185: mol_type = other DNA
atgcctggccgctcttgtgtggccctggtgctgctggctgctgctgtaagctgcgctgttgcacagcacgcacctccatggaccgaggactgtcggaagtcaacgtaccctccctctggtcccacttacaggggggccgtgccttggtacaccattaaccttgacttgcctccatacaagagatggcacgagttgatgctcgacaaggcacccgtgctgaaagtgatagttaatagtctcaaaaatatgataaatacattcgtgccatcagggaagattatgcaggtcgttgacgaaaagctgccagggcttctcggcaacttcccagggcctttcgaggaggaaatgaaaggtatagcggccgtcacagatatccccttgggcgaaattatttctttcaatattttttacgagctgtttaccatttgtaccagcatagtggccgaggacaagaaaggtcatttgattcacggtaggaatatggactttggggttttcctgggatggaatatcaacaatgatacttgggttataaccgaacaactgaaaccccttaccgtgaacctggattttcagagaaataataaaaccgtgttcaaagcgagttcttttgccgggtacgtcggcatgcttacaggttttaagccaggactgtttagcctaacactgaacgaacgctttagcatcaacggtggctacctgggcatcctggaatggattctgggaaaaaaggatgtgatgtggattggttttctgaccagaacagtccttgagaactccaccagttacgaggaagccaaaaacctactgacgaagaccaagatccttgcgccagcgtactttatcctgggaggcaatcagtcaggggagggctgcgtcataacaagagatcgcaaggagtccctcgatgtgtatgagctcgatgctaaacaaggtaggtggtacgtggtccagacgaattatgaccggtggaaacatccattctttctggatgaccggcgcacgcctgcgaagatgtgcctcaaccggacatctcaggagaatatctctttcgaaaccatgtacgacgtgttgagcacaaaaccagttttgaataaactaaccgtgtacacgaccctaatcgatgttactaagggccagttcgagacatacctccgggactgcccggacccatgtatcggctgg

SEQ ID NO: 17235 - DNA, 1185 bp, synthetic construct
  misc_feature 1..1185: note = source = /note="Description of Artificial Sequence: Synthetic coding sequence"
  source 1..1185: mol_type = other DNA
atgcctgggcgaagctgtgtggcattggtacttctcgccgctgcagtgtcctgtgccgtggctcagcacgctcctccatggacagaagattgccgcaagtccacctacccgcctagcggaccaacttatagaggggcagtaccctggtacacaattaatctggatctcccaccatacaagcgctggcatgaactaatgcttgacaaggcccccgtgcttaaggtgatcgtgaattcactgaaaaacatgattaatacctttgtgccatctggtaaaatcatgcaggtggtcgatgaaaaactccctggacttttaggtaacttccccggtccgtttgaggaggaaatgaagggaattgctgcagttaccgatatccctctcggtgagatcattagctttaatattttctacgaattattcactatttgcacaagtatcgtggctgaggacaaaaaaggccaccttattcacggccggaacatggattttggcgtgttccttggctggaatatcaataacgatacctgggtcatcaccgaacagttgaagccactcactgtgaaccttgactttcagaggaacaacaaaacagtgttcaaagcttccagttttgctgggtacgtaggcatgctcactgggtttaaacctgggctcttctcccttacactcaacgagagattctccataaacggcggctacctcgggatactcgaatggattcttggcaaaaaggacgttatgtggatcggattcctgacccggaccgtattggagaattcgactagctacgaagaggccaagaatctgcttactaaaaccaagatcctcgctccagcttactttatcctagggggaaaccagagcggcgaaggctgcgtgatcacccgggacaggaaagagtccctcgatgtgtatgagcttgatgcgaaacaaggacgatggtacgtggtccagactaattacgaccggtggaaacacccatttttcctggacgatcgccggacgccagcaaaaatgtgcttgaatcgcacatcacaagaaaacatcagcttcgagacaatgtatgatgtgttgagtaccaagccagtgctgaacaagctgacagtttacactactttgatagatgtgacgaagggacagttcgagacttacttaagggattgtcccgatccctgtatcgggtgg

SEQ ID NO: 17236 - DNA, 1185 bp, synthetic construct
  misc_feature 1..1185: note = source = /note="Description of Artificial Sequence: Synthetic coding sequence"
  source 1..1185: mol_type = other DNA
atgcccggtcgctcctgcgtcgcattggtgctgctcgcggccgctgtctcttgcgccgttgcgcagcacgcgccaccctggacggaggattgcagaaaatcgacttaccctccctcggggcctacatatcgcggcgcggttccctggtacaccatcaacttggatttgccgccctacaagcgctggcatgaactcatgctggataaggcccccgtcctcaaggtcattgttaacagcctgaagaatatgatcaataccttcgtcccttcgggtaagattatgcaggttgtcgacgagaaactccccggtctgctgggcaacttcccgggtccctttgaagaagaaatgaagggtatcgctgccgtcacagacattccactgggcgagatcatttcgtttaacatcttctacgaactgtttaccatctgtacctcgattgtcgctgaagataaaaagggccacttgatccatggccggaacatggatttcggggtgttcctgggctggaacattaacaacgacacctgggtcataaccgagcagcttaagccgctcactgtcaatcttgacttccagcgcaacaacaagaccgtgttcaaggctagttcttttgctggttacgtcggcatgctaaccggtttcaagcctgggcttttttctctaaccctcaacgagcgtttctccattaatggcggttacctcggcatcttggagtggatcctgggtaagaaagacgttatgtggatcggcttcctgacacgtaccgttttggagaactcgacttcatacgaagaggccaagaacctcttaaccaagacaaagatcctggcaccggcatatttcatcctgggcggtaaccagagtggagaagggtgcgttatcacacgggaccgaaaggagtcgttggacgtttacgaactagacgccaagcagggacgctggtacgtagtgcaaaccaactacgaccgctggaagcacccgttcttccttgacgaccgccgtactcctgctaagatgtgtctgaaccgcacctcccaggagaacatcagtttcgagacgatgtacgacgtcttgagcactaaaccggttcttaacaaactgactgtttacaccaccctgattgatgtcactaagggacagttcgagacttacctgcgtgactgtccggacccctgcattggctgg

SEQ ID NO: 17237 - DNA, 1185 bp, synthetic construct
  misc_feature 1..1185: note = source = /note="Description of Artificial Sequence: Synthetic coding sequence"
  source 1..1185: mol_type = other DNA
atgccaggccgttcctgtgtggccctggtgctccttgcagcagccgtgagctgtgcggtcgcacaacacgcgcctccatggactgaggactgccgaaagtcaacctacccaccaagtggacctacttaccggggcgcagtaccctggtacaccattaacttggaccttccgccctacaaacgatggcatgaactgatgttggataaggcccctgttcttaaggtgatcgtgaattcccttaagaacatgatcaatacctttgtcccatccgggaagattatgcaggtggttgatgaaaagctgcccggcctgctcggcaatttcccgggtcctttcgaagaagaaatgaaagggattgcagcggttaccgacattcccttgggagagattatctcgttcaacatcttttacgaactgtttaccatttgtacctcaatcgtggccgaggacaaaaaaggacatctgattcatggaagaaacatggattttggggtctttcttggatggaacatcaacaacgatacttgggtcataactgaacagctcaaacctcttactgtgaaccttgactttcaaaggaataacaagaccgtgtttaaggcatcatcgtttgccgggtacgtgggaatgcttactgggtttaagcctggtctgttctccctgaccctcaacgagagattttcgattaatggaggataccttggaatccttgagtggatattggggaaaaaagatgtcatgtggatcgggttccttacccggactgttctggagaactccacttcatatgaggaagccaagaacctcctgactaagactaagattcttgctcccgcatatttcattctcggagggaatcagagcggcgaaggatgtgttataacccgcgatagaaaggaatcgctggatgtgtacgaactcgatgccaagcaaggtcgatggtacgtggtccaaactaattacgaccggtggaagcacccttttttcttggatgatcgtcgcaccccagctaagatgtgcctgaacagaacgagtcaggaaaacatctctttcgagacgatgtacgacgtgctgtctacgaaacccgtgcttaacaagctgactgtgtacaccacccttattgatgtgaccaaaggacaatttgaaacttacttgcgcgactgtcctgatccatgcatcggttgg

SEQ ID NO: 17238 - DNA, 1185 bp, synthetic construct
  misc_feature 1..1185: note = source = /note="Description of Artificial Sequence: Synthetic coding sequence"
  source 1..1185: mol_type = other DNA
atgcctggacggtcatgtgtggcgttggttctactggcagcagcggttagttgtgcggtggctcagcatgcacctccctggacagaggattgtcgtaaatccacatatccgcctagcgggcctacgtacagaggcgctgtaccgtggtataccataaatttggatttgcccccctataagagatggcacgagcttatgttggacaaagctccggtactcaaagtcattgttaattccttgaaaaacatgatcaacacgtttgtccctagtggcaagataatgcaagtagtggatgaaaaacttcctggactgcttggcaattttcctggcccatttgaagaggaaatgaagggaattgctgcagtgacggatataccgttaggagaaattatctcgttcaatattttctacgaattatttactatatgcacatctatcgtggcggaagacaaaaaaggtcacttaatccatggacggaacatggattttggcgtgttcctcggctggaatatcaacaatgatacgtgggttattacggaacaactgaaaccgcttactgtgaatctggatttccagcgcaataataagactgtctttaaagcaagttcatttgcaggatatgtcggtatgctaactggcttcaaacctggcctgttttctctgacgctcaacgaaaggttctcaatcaacggcgggtatcttggcattttagaatggattctgggaaagaaagatgtaatgtggattggattcctgacaaggacagttttggaaaattcaacgtcttatgaagaggccaagaatctcctgacaaaaaccaaaatccttgccccagcttattttatcttggggggaaatcaatccggggaggggtgtgtgatcacgcgggaccgcaaagaaagcctcgatgtttatgagcttgatgctaagcagggaagatggtacgtagtacagacgaactatgatagatggaagcacccattttttttggatgacagacgcaccccagcgaagatgtgcctgaacaggacgtcacaggaaaacatttcgttcgaaactatgtacgatgtactttcgacaaaacctgtgttaaacaaattaacagtctatacgacgctgattgatgttaccaaagggcaatttgaaacataccttcgtgattgtccagatccgtgcatcggatgg

SEQ ID NO: 17239 - DNA, 1185 bp, synthetic construct
  misc_feature 1..1185: note = source = /note="Description of Artificial Sequence: Synthetic coding sequence"
  source 1..1185: mol_type = other DNA
atgcccggcagatcctgcgtggctcttgtgctgctcgcagcagcagtgagttgcgccgtggctcagcacgccccaccctggactgaggattgtaggaagagcacgtacccaccttccgggccaacctatcgtggtgcggtgccatggtacaccattaacttggatctgccaccatacaagcgatggcacgagctgatgcttgataaggcccccgtgttgaaggttattgtgaattcacttaagaatatgatcaatacttttgtgccctctggtaaaatcatgcaggtggtcgacgagaaactgccaggccttctgggtaacttccctggccccttcgaggaggagatgaaaggtatcgccgctgtgactgatatccccttgggcgagataatcagttttaacatcttctatgaacttttcaccatatgtacttctattgtggccgaagacaaaaagggccacctcattcatgggcggaatatggatttcggggtgttcctgggttggaacataaacaatgacacctgggttattacagagcagctgaaaccattaaccgtgaacctagacttccagagaaataacaagactgtgtttaaggcgtcctccttcgcgggatatgtcggcatgttgactggcttcaagcctggcctgtttagtctcactttgaatgaacgcttcagcattaatggggggtatctcgggattttggagtggatactcggaaaaaaagatgtgatgtggattggattcctaacgcgaaccgtgttggaaaatagcactagctatgaagaggccaaaaacctgctcacaaagactaagattctggccccagcctattttattctcggagggaatcaatcaggagagggctgcgttatcactagagataggaaggagtctctcgacgtgtacgagctggacgctaagcagggtcgttggtatgtggttcaaaccaattacgatcgatggaaacaccctttctttctagacgaccggcgcacaccagcaaaaatgtgcctgaaccgcacctcacaggaaaatatcagcttcgagaccatgtacgacgtgctctctactaagcccgtgctgaataagttgaccgtgtacacgaccctgatagatgtgactaaaggccagttcgagacctacctccgcgattgtcctgatccctgcattggttgg

SEQ ID NO: 17240 - DNA, 1185 bp, synthetic construct
  misc_feature 1..1185: note = source = /note="Description of Artificial Sequence: Synthetic coding sequence"
  source 1..1185: mol_type = other DNA
atgccgggcaggtcgtgcgtggctctggttttgctggctgccgccgtgtcatgcgcagtcgcccagcacgccccgccatggaccgaggattgtcggaaatccacctaccccccgtctggtccgacgtaccggggcgctgtgccgtggtacactatcaatctggacttgccgccctacaagaggtggcacgaactcatgctcgacaaagcccctgtgttgaaggtgatcgtcaattcccttaagaacatgatcaacacgttcgttccttccgggaagatcatgcaggtcgtggacgagaagctgccgggactgctggggaacttcccgggaccgttcgaagaagaaatgaagggaatcgcagcggtcactgacatcccgttgggggaaatcatcagcttcaacatcttctacgagctgtttaccatctgcacctcaatcgtggcagaggacaagaagggacatctgatccacggacggaatatggatttcggagtgttcctgggatggaatatcaacaacgacacctgggtgatcactgagcaactgaaaccgctgaccgtgaaccttgacttccagagaaacaacaagaccgtgttcaaggcgtcatcgttcgctggatacgtgggcatgttgaccggattcaagcctggattgttctcactgactctcaacgaacggttttctatcaacggtggctatctcgggatcttggaatggattctgggcaagaaagacgtgatgtggatcggtttcctgacccgaaccgtgctggagaacagcactagctacgaggaggcgaagaatctgctcaccaagactaagattctggcgccagcctacttcatccttggaggaaaccaatccggcgagggctgcgtgatcactcgcgatcgcaaggaatccctggatgtgtatgaactcgacgctaagcagggccggtggtacgtggttcagaccaactacgaccgctggaagcatccatttttcctcgatgacaggagaaccccggcaaagatgtgtctgaacagaacttcacaagagaacatctctttcgagactatgtacgatgtgctgtcgaccaagccggtgcttaacaagctgaccgtttacaccaccctgatcgatgtgactaaaggacaattcgaaacctacctgcgcgactgtccggatccttgcatcggttgg

SEQ ID NO: 17241 - DNA, 1185 bp, synthetic construct
  misc_feature 1..1185: note = source = /note="Description of Artificial Sequence: Synthetic coding sequence"
  source 1..1185: mol_type = other DNA
atgcccggccgaagctgtgtggcactggtgctgcttgccgcagcagtgtcgtgtgcggtggcacaacatgcccctccctggaccgaggattgtcgtaagagcacttacccaccttctggccctacttacagaggagcagtgccctggtataccatcaacttggatctgccaccctacaagcgctggcatgaactgatgcttgacaaggccccagtgctgaaggtcatagtgaacagcttgaagaacatgattaacacctttgtgccttccggaaagattatgcaggtcgtggacgaaaagctccctggactccttggtaactttccaggcccctttgaagaagaaatgaagggcattgccgctgtcacggacatacctctgggtgaaatcatttccttcaacattttctacgagcttttcactatctgtaccagcatcgtcgcagaggacaagaaagggcaccttatacacggacgtaacatggacttcggggtctttctgggatggaacattaacaatgatacttgggtgatcactgaacagcttaagccacttactgtgaacctggacttccagagaaacaataagaccgtgttcaaggctagctcgtttgcaggttacgtgggaatgcttactgggtttaagccaggtctgtttagcctgaccctgaacgagcggttctccattaacggcggctacctcggtatcctcgaatggattcttggcaaaaaggacgtcatgtggatcggatttcttacgagaaccgtgcttgaaaactccacctcctacgaagaagcgaaaaacttgcttactaagactaagatcctggctccagcatactttatccttggaggtaatcaatcaggagaaggttgtgttattactcgggatagaaaggagagccttgatgtttacgagctggatgcgaagcaagggcgttggtatgtggttcagaccaattacgaccggtggaaacacccatttttcctcgacgaccgcagaacccctgcaaagatgtgtttgaacagaacttcacaggagaacatatccttcgagactatgtacgatgtgttgtcgaccaagcccgttctcaataaacttaccgtttacactaccctgatcgatgtcacgaaggggcagtttgaaacctacttgcgagattgtccagacccttgcatcggttgg

SEQ ID NO: 17242 - DNA, 1185 bp, synthetic construct
  misc_feature 1..1185: note = source = /note="Description of Artificial Sequence: Synthetic coding sequence"
  source 1..1185: mol_type = other DNA
atgccaggcagatcttgcgtggccctggtactgctggcagccgccgtatcctgtgccgtggctcagcatgcccccccttggaccgaggactgtaggaagagcacttacccaccttctggtccaacttacaggggcgctgttccttggtacaccatcaacctggacttgcctccctataaaaggtggcatgagctgatgttggataaggcccctgttctgaaagtgatcgttaacagcttgaaaaacatgatcaacacctttgtgcctagtggcaaaataatgcaagtggttgatgagaaacttcctggacttcttggcaatttcccaggtccatttgaggaggagatgaagggaattgctgcagtaacagacatcccactcggcgaaataattagtttcaacatcttctacgaactctttacaatctgtactagcatagttgctgaagacaagaaaggtcacctcatacatggcagaaatatggactttggagttttccttggatggaatatcaacaacgacacttgggtcatcaccgagcagctcaaaccactcactgttaacctggatttccagaggaacaataagactgtcttcaaggctagcagcttcgcaggctacgtgggtatgttgacaggattcaagcccggattgttcagccttacccttaatgagcgtttttctattaacggcggctacttgggcatccttgagtggattttgggcaagaaagacgtgatgtggattggatttctgaccagaaccgttttggagaactccacctcttatgaggaggctaagaacctgctcacaaaaactaaaatccttgctccagcttatttcatccttggcggtaaccagtctggcgagggttgtgtgattacccgtgatcgtaaggagtcactggatgtttatgaactggacgctaaacaaggaagatggtacgtggtgcagaccaattacgaccgctggaaacatcccttctttctcgacgaccgtcgcacccctgctaagatgtgtctgaataggacttcccaagaaaatatctcattcgaaactatgtacgatgtgctcagtaccaagcctgtgttgaataagttgacagtgtatactaccctgatcgacgtcactaagggccaatttgaaacctacctcagggactgccccgacccctgtattggctgg

SEQ ID NO: 17243 - DNA, 1185 bp, synthetic construct
  misc_feature 1..1185: note = source = /note="Description of Artificial Sequence: Synthetic coding sequence"
  source 1..1185: mol_type = other DNA
atgcccggaaggtcgtgtgttgcgcttgtgctgcttgcagccgcagtctcctgtgcagtggcacagcatgcgcctccttggaccgaagattgccgtaagtcaacttacccaccctcaggccccacttacagaggtgcggtcccttggtacactataaaccttgatctccctccttacaaacggtggcatgaactgatgcttgataaggcacccgtcctgaaagtgattgtgaactccctcaagaacatgatcaataccttcgtcccatccggaaagatcatgcaagttgtcgatgagaaattgcccggccttctgggtaatttcccaggacctttcgaagaggaaatgaaaggaattgcagctgtgaccgacattcccctgggagaaatcatatcgttcaatatcttttacgagctttttacgatatgtacctcgatcgtcgcggaggataagaaaggacatctgattcatggcagaaacatggattttggagtctttctgggctggaacattaacaacgatacctgggtcatcactgaacaactgaaaccgttgactgtcaaccttgacttccaacgcaataacaagaccgttttcaaggcaagctcgtttgctggatacgtcggtatgctgactggttttaagcccggtcttttttccttgacccttaatgaaaggtttagcatcaacggaggttacctggggatcctggagtggattcttggcaagaaggacgtcatgtggatcggatttctcacccgaaccgtgctggaaaactcaacctcgtacgaagaggcgaaaaatctcctgactaaaactaagatacttgcccctgcatactttatcttgggcggaaaccagtcgggagaaggatgcgtgatcaccagggaccggaaggagtcattggatgtgtacgagcttgatgcaaagcagggtcggtggtacgttgtccaaactaattacgatagatggaagcatcctttctttctggatgacagaagaactcccgcgaagatgtgtctgaatcgcacctcacaggagaacatttcattcgaaactatgtacgacgtgctcagcactaaaccagtgctgaataagttgaccgtgtacaccactctgattgacgtgaccaagggccaatttgagacgtacctcagggattgtcctgatccatgcatcgggtgg

SEQ ID NO: 17244 - DNA, 1185 bp, synthetic construct
  misc_feature 1..1185: note = source = /note="Description of Artificial Sequence: Synthetic coding sequence"
  source 1..1185: mol_type = other DNA
atgcctggtagatcctgcgtagctctggtgctgctcgcagctgccgtgagttgtgccgttgcacagcatgccccaccatggactgaggattgtcggaaatctacataccctccgtctggtcctacctatagaggtgccgtcccatggtatacaatcaacctagatctcccgccttacaaacggtggcatgaacttatgctggacaaggcccccgtgctgaaggtgattgtcaacagtctcaaaaatatgatcaacacctttgtgccctctggcaaaattatgcaggtcgtagatgaaaagttgcccggactcctgggcaactttccaggaccatttgaagaggagatgaagggcatcgccgcagtcactgacattccccttggggagataattagtttcaacatcttttacgagctttttaccatttgtacaagcattgtggctgaagataagaagggccacctgatccacggaagaaacatggattttggtgtctttctcggctggaacattaacaacgatacatgggtaatcacggagcagctgaagcccctcaccgtgaacctggattttcagagaaacaacaagactgtatttaaagcctcttctttcgcaggctacgtaggcatgcttacaggatttaaacccggattgttctctcttaccctgaatgaacgtttctcaattaatggcgggtatctgggaattctcgaatggatcttggggaagaaggatgtcatgtggataggattcctgactcggactgtgctggagaatagtacaagctatgaggaggccaagaaccttttgaccaagacaaagatattagccccggcctatttcatcttgggcggcaatcagagcggtgaaggctgtgttataaccagggaccgcaaggagtcccttgatgtatatgagttggatgcaaaacaggggcgctggtatgtggtccagacaaattatgatcgctggaagcatcccttctttcttgatgatcgccgcacaccagccaagatgtgtctgaataggacttcccaggagaatattagcttcgaaactatgtatgacgtactgtcaactaaacctgttctcaacaagctgaccgtctacaccacacttatcgatgttacaaaaggccagtttgaaacctatctgcgtgattgtccagatccctgtatcggttgg

SEQ ID NO: 17245 - DNA, 1185 bp, synthetic construct
  misc_feature 1..1185: note = source = /note="Description of Artificial Sequence: Synthetic coding sequence"
  source 1..1185: mol_type = other DNA
atgccaggccgaagttgcgtggcgctggtattactggcggcagccgtgtcatgcgctgtggcacagcacgcgcccccatggacggaagattgtagaaaaagcacctatcctccttctggacctacatacagaggggccgtgccgtggtacacgataaatttggacttgccaccttataaaaggtggcatgaactgatgctggacaaagccccagttctgaaagtgatagtcaacagcctgaagaatatgattaacacatttgttcccagtgggaagattatgcaagttgtggatgaaaagcttcccggattgttgggtaattttccgggcccattcgaagaggagatgaagggaatcgcagctgttaccgatatcccactgggcgaaattatctccttcaacattttctacgagctgttcaccatttgcaccagcatcgttgccgaagataagaagggccatctcatccatggcaggaatatggactttggggtgttcttggggtggaacataaacaatgatacatgggttatcaccgagcagttgaaaccacttaccgtcaacctcgatttccagaggaacaacaagaccgtgtttaaggcctcttcctttgccgggtatgtagggatgctaacaggttttaagccaggtctgttctctctcacgctgaacgaacgatttagcattaatggaggctatctaggtatcctggaatggattctaggtaagaaggacgtgatgtggattggcttcctcacgagaacagtgttggaaaattccaccagctatgaagaggcgaaaaacctgctcactaaaactaaaattttggcacctgcatatttcatcctcggcggcaaccagagcggcgagggctgcgtcattacaagagaccgaaaagaatcattagacgtgtacgagctcgacgccaaacagggaaggtggtatgtcgtccagacaaattacgatcggtggaagcaccctttctttttggatgataggagaacaccagccaaaatgtgcttgaacagaacatctcaggagaatattagctttgaaactatgtatgacgttctgagcaccaaacctgtgctgaacaagcttacagtgtatactactttaattgatgtcacaaaagggcaatttgaaacttacctgagagactgtcccgatccctgcattgggtgg

SEQ ID NO: 17246 - DNA, 1185 bp, synthetic construct
  misc_feature 1..1185: note = source = /note="Description of Artificial Sequence: Synthetic coding sequence"
  source 1..1185: mol_type = other DNA
atgcccgggcggagctgcgtggcactggtgttgctcgcagcggccgtctcgtgtgctgtcgcccagcacgcacctccttggactgaagattgccgtaagtctacttatccccccagtggtcctacctacagaggagccgtcccctggtacactatcaaccttgacctgccgccatacaagagatggcacgagctcatgctggataaagcgccagtgttgaaagtgatagtgaattcactgaagaatatgatcaacacattcgttcctagtggaaaaataatgcaggtggtcgatgagaagctacctggccttctgggtaattttccaggacccttcgaggaagagatgaagggtatcgcagccgtaacggacatccccttgggcgagatcataagcttcaatattttctacgagctctttaccatttgcacgtccatcgtggctgaggataaaaaaggccatctgatccacggaagaaatatggatttcggggtctttttggggtggaatattaataatgatacctgggtcattactgaacaattaaaacctttgacagttaatcttgatttccagcgtaataataaaacggttttcaaggccagcagctttgccgggtatgtaggtatgctgaccgggttcaaaccgggactgttctcattgaccctaaacgagcgattctcaatcaatggcggctacctcgggatcctcgagtggattctgggtaagaaggatgttatgtggataggatttctgacacggaccgtattggaaaatagcacctcctatgaggaggctaagaatctgttgaccaaaacaaaaatcctagcccctgcctactttattctcggaggtaatcagtccggggaagggtgcgtaattacccgagaccgcaaggagtccttggacgtctatgagctggacgcaaagcagggtaggtggtacgtggtccagaccaactacgacaggtggaaacatccctttttcctggacgacaggcggacacccgcaaaaatgtgcctaaacaggaccagccaggaaaatatctcattcgagactatgtatgatgtgctcagtaccaagcccgtgctaaacaagctaacagtgtataccacattgatagacgttaccaaaggtcagttcgagacttacctgcgggactgccctgacccctgcattggatgg

SEQ ID NO: 17247 - DNA, 1185 bp, synthetic construct
  misc_feature 1..1185: note = source = /note="Description of Artificial Sequence: Synthetic coding sequence"
  source 1..1185: mol_type = other DNA
atgcccggcaggtcctgcgtcgccttggtgctgcttgcggctgctgtgtcctgcgcggtggctcaacacgcaccaccctggaccgaggattgcaggaaatctacctatccaccatccggacccacatataggggagcagtaccctggtatacaatcaacctggatctgcctccctataagagatggcacgagcttatgctggacaaggccccagtgttgaaagtgattgtgaatagtctcaaaaatatgatcaacacatttgttccttcagggaagatcatgcaggttgtggacgagaaacttcctggtctgttggggaatttccccggacccttcgaggaggaaatgaagggcattgcagccgtgactgatatccctctgggcgagattatctcttttaatatcttttacgagctgttcacgatttgcacctccatcgtggctgaggacaagaaggggcatctcatccacggccggaacatggacttcggagtgttcctgggctggaacatcaataacgatacgtgggtgatcactgagcagctcaaaccgctgaccgttaacctggatttccagcggaacaacaagaccgtcttcaaggccagctcttttgccggctacgttggcatgctgactgggttcaaaccaggtctgttttcactcaccttgaatgaaagattctctattaatggaggataccttgggatcctggaatggattttgggcaaaaaggacgtaatgtggattggctttttgaccaggactgtgctggaaaactcaacttcatacgaagaggcgaagaatctgctcaccaagaccaagatattggctccagcatattttatactcggaggcaatcagtctggagagggctgtgtcattacaagggatagaaaggaaagcttggatgtttacgagcttgacgctaagcaggggcggtggtacgtggtccagaccaactatgatcgctggaagcaccctttctttttggacgacaggagaactccagcaaagatgtgccttaaccgcaccagtcaggagaatattagtttcgaaacaatgtacgacgtgctctccacaaagcccgtactgaacaagctgacagtctataccaccctgatagacgtgactaaaggccagttcgaaacgtacctgcgagactgccccgatccttgtatcggctgg

SEQ ID NO: 17248 - DNA, 1185 bp, synthetic construct
  misc_feature 1..1185: note = source = /note="Description of Artificial Sequence: Synthetic coding sequence"
  source 1..1185: mol_type = other DNA
atgccgggccggagttgcgtcgccctggtgctgttggcagccgcagtgtcgtgtgccgtggcacagcacgccccgccgtggactgaggattgccggaagagcacttatccgccttccggaccaacttatcgcggggctgttccctggtacactatcaacctcgatctgcctccgtacaagcgctggcatgaactgatgttggacaaagcgccggtgcttaaggtcatcgtcaattcactgaagaacatgatcaacaccttcgtgccgtcgggaaagatcatgcaagtggtggatgaaaaactgcctggattgctggggaactttcctgggccgttcgaggaggaaatgaagggaattgcggcggtgactgacattccacttggagaaattatctcattcaatatcttctacgagctgttcaccatctgcacctcgattgtggcggaagataaaaaaggacacctgatccacggcagaaatatggactttggagtattcctcggatggaacatcaacaatgatacctgggtgatcactgagcagctgaagccattgaccgtgaatctggattttcaacgcaataataagaccgtctttaaagcctcgtcctttgctggatacgtgggtatgctgaccggattcaagccaggcctcttctctctgactcttaacgaacgattcagcatcaacggcggctacctgggcatcctcgaatggatactcggaaaaaaggatgtcatgtggatcggcttcctgactcgcaccgtgctggaaaacagcacttcatacgaagaggcaaaaaacctcctcaccaagacgaagattctcgctccagcctacttcatcctgggagggaatcaatccggtgaaggatgcgtcatcaccagagacagaaaggaatcgctggatgtgtacgaactggacgccaagcagggacggtggtacgtggtccagaccaactacgacaggtggaagcatccgttctttcttgacgaccgcaggactcccgccaagatgtgcctcaaccggacgtcccaggagaacatcagcttcgagacgatgtacgacgtgctctccaccaagccagttctgaacaagctgaccgtctacaccactctcatcgacgtgacgaaaggtcagttcgagacttacctccgggactgccccgacccgtgtatcggttgg

SEQ ID NO: 17249 - DNA, 1185 bp, synthetic construct
  misc_feature 1..1185: note = source = /note="Description of Artificial Sequence: Synthetic coding sequence"
  source 1..1185: mol_type = other DNA
atgccaggccgatcttgtgtggccctggtcctcttagcagcagccgtgagctgcgctgtggcccaacacgctcctccctggactgaggactgcaggaaaagcacctacccccctagtggaccgacatatcggggggcagtgccatggtatacaataaaccttgatctgcctccctacaagagatggcacgaattaatgctggacaaagcaccagtcctgaaagttatagtcaatagtctgaagaacatgatcaacactttcgtgccgtctggcaaaatcatgcaggtcgtggatgaaaagctgccaggactgcttggcaactttccagggccgttcgaagaggagatgaaagggatcgccgcagtgaccgacataccattaggggagataatctcatttaatatcttctacgagctgttcactatctgcacctcgatagtggccgaggacaagaaaggacatctgatacacggtcggaatatggatttcggggtcttcctgggatggaatattaacaacgacacatgggtcatcacagagcagctgaagcccctgaccgtcaacctcgacttccagaggaacaataagacggtattcaaggcctcttccttcgctggctacgttggtatgctcaccgggttcaaaccaggcctgttctcgctcacactgaacgagcggttctcaattaacggtggctacctgggtatactggagtggattctgggcaaaaaggatgtgatgtggatcggctttcttacgcggaccgtgctggagaactctacctcgtatgaggaagctaagaatctattaaccaaaaccaaaattctagcacccgcctacttcatcctcgggggaaatcagtctggcgaaggatgtgtcatcactcgcgatagaaaggagagcctagatgtatatgagttagatgccaagcagggccgatggtacgtcgtgcagaccaactacgataggtggaaacatcccttcttccttgacgacaggaggactcccgccaaaatgtgtctgaatcggacctctcaggagaacatctcctttgagactatgtacgacgttctgtctaccaaacctgtccttaacaagcttaccgtctataccacactcattgatgtaactaagggacagttcgaaacctacctgagagactgtccggatccgtgcatcgggtgg

SEQ ID NO: 17250 - DNA, 1185 bp, synthetic construct
  misc_feature 1..1185: note = source = /note="Description of Artificial Sequence: Synthetic coding sequence"
  source 1..1185: mol_type = other DNA
atgcctggaagaagctgtgttgctctcgtgttactggccgctgcagtgagctgcgccgtggcgcagcatgccccaccctggaccgaggactgtcggaagagcacgtatccccccagcggacccacatacaggggagccgtaccttggtatacaatcaatctggatttgcccccatacaaacgttggcatgagcttatgctggacaaggccccagtgttaaaggttattgtgaactctctgaagaatatgatcaatacattcgtcccctctgggaaaattatgcaggtagttgatgagaagttaccagggctacttggtaactttccagggccatttgaagaagaaatgaaaggtatagccgccgttactgacatacccctgggggagatcatctctttcaatattttctacgaactctttacaatctgtacttcaatcgttgcagaggataaaaagggtcatttaattcacgggaggaatatggatttcggagtattcttggggtggaatatcaacaatgatacttgggtgatcacagagcagttgaagcccctgacggtaaatttggattttcagcgaaataacaaaacggtgttcaaggcttcttctttcgcgggttacgtgggcatgctgaccgggtttaagcctggcctgttctcactgaccctgaacgagcggttcagtattaatggaggctatctcggcatattggagtggatactgggaaagaaagacgtgatgtggatcggcttcctgacaaggactgtcctggagaattctacctcttacgaggaggccaagaacttactgacaaagaccaaaatcctggctccggcatatttcatcctcggaggtaaccagtccggcgaaggttgcgttatcacaagagaccggaaagagagccttgatgtgtacgagctggatgctaaacagggcaggtggtacgtagtgcagaccaattatgatcggtggaaacacccattcttccttgatgatagacggaccccagctaaaatgtgtctcaacaggacctctcaggaaaacatcagctttgagacaatgtacgatgtgctgtccaccaagcctgtgttgaacaagctaaccgtctataccacgctcatcgacgtaacaaaaggtcagtttgagacgtacctgagagattgccccgatccttgtatcggatgg

SEQ ID NO: 17251 - DNA, 1185 bp, synthetic construct
  misc_feature 1..1185: note = source = /note="Description of Artificial Sequence: Synthetic coding sequence"
  source 1..1185: mol_type = other DNA
atgccaggacggtcctgcgttgcactggtgctgctagcagctgccgtcagttgcgcagtagcacagcacgcccccccttggacagaagactgcaggaaatcgacctatccacccagcggaccgacataccggggggctgtaccctggtacactatcaacttagatctgcccccatacaaacggtggcacgaactgatgctggataaggctcccgttttaaaagtgatcgtcaacagcctgaaaaatatgataaacacctttgtacccagcgggaaaatcatgcaggtggtggacgaaaagctgcctggactgcttggaaattttcccggccccttcgaggaggagatgaagggaattgccgctgtgaccgacataccacttggagagatcatttcattcaacatcttctacgagctgtttacaatctgcacctccattgtcgctgaggacaaaaaaggccatctgatacacggcagaaacatggactttggagtctttttgggctggaacatcaataacgatacttgggtgatcacagaacagttgaaacctcttacagtcaaccttgactttcaaagaaacaacaaaaccgtgtttaaggccagctcctttgccgggtacgtggggatgctgaccggattcaagcccggactgtttagcctgaccctgaatgaaagattcagcatcaacggcggctatcttggaatacttgagtggattcttggaaaaaaggatgtcatgtggattggattcctcaccagaaccgtcctggagaactctacttcatatgaagaggcaaagaacctgctcaccaaaacaaaaatcctcgcgcccgcttactttatcttgggaggcaaccagtcaggcgaagggtgcgtcataaccagggacagaaaggaatcactagacgtttacgagcttgacgcaaaacaagggagatggtatgtggtccagactaactatgatagatggaaacatcccttcttcctggatgatcgccgtacaccagccaagatgtgtctcaacaggacctcccaggaaaacattagttttgaaactatgtacgatgtgctgtccaccaagccggttctaaacaaactgaccgtgtacacaactctcatcgatgtgactaaagggcagttcgaaacatacctgcgagactgtccagatccgtgtatcggttgg

SEQ ID NO: 17252 - DNA, 1185 bp, synthetic construct
  misc_feature 1..1185: note = source = /note="Description of Artificial Sequence: Synthetic coding sequence"
  source 1..1185: mol_type = other DNA
atgccagggaggagctgcgttgccctcgtcctcctcgccgcggcagtgtcttgtgccgtagctcagcatgcacctccttggacagaagactgccgaaaaagtacatatcccccaagcggaccgacgtatcgcggggccgttccgtggtacaccataaaccttgatttacccccttacaagagatggcacgaactcatgcttgacaaggctccggtcctcaaggttattgtcaacagccttaagaatatgattaacacatttgtgccatcgggcaagatcatgcaggtagtcgatgaaaagctcccaggactgctgggtaacttccccggcccgtttgaggaagaaatgaaagggatcgccgccgtaacggacatccccctgggcgagatcataagctttaacatcttttacgaactgttcaccatctgcacttcaattgtcgccgaggacaagaaaggtcacctcatccacggacgcaatatggactttggggtgttcctgggctggaatataaataacgacacttgggtcatcacagagcagcttaagccactgaccgtgaatctggattttcagcgcaacaataaaacggtgttcaaggcgagcagctttgccggttatgttggcatgttgaccggatttaagcctggtctttttagcttgacccttaatgagcgattcagcattaacggaggctatttgggcatactcgagtggatactagggaagaaagacgtgatgtggattggatttcttacacgaaccgtcctagagaattctacaagctacgaggaggcgaaaaacctcctcacaaagacaaagatcttggctcctgcttatttcatcctggggggtaaccagtctggagagggctgcgtcattacccgtgatagaaaggaatccctggacgtctacgagctggatgccaaacagggaagatggtacgtcgtacaaacgaattacgacaggtggaagcaccccttctttctcgatgacaggcgcacccccgccaagatgtgtcttaatagaacctcacaagaaaatatttcttttgaaaccatgtatgatgtgttaagcaccaagcctgtgctcaataagctcacagtgtacacaaccttaatcgacgtgacgaaagggcagtttgaaacttatctgagagactgcccggacccatgtattggctgg

SEQ ID NO: 17253 - DNA, 1185 bp, synthetic construct
  misc_feature 1..1185: note = source = /note="Description of Artificial Sequence: Synthetic coding sequence"
  source 1..1185: mol_type = other DNA
atgccgggtcgttcatgcgtggcccttgtgctgctggcagctgctgtgtcctgtgccgtggcccagcacgccccaccctggactgaagattgtaggaagtcaacctatccaccttctggtccgacttataggggtgccgtgccctggtatacaatcaatctggatctgccgccatacaaacgctggcacgagctgatgctggacaaggcccccgtattgaaggtaatagtgaactctctgaagaacatgatcaacaccttcgtcccgagtggaaagataatgcaagtcgttgatgaaaaactgccagggctgctgggaaactttccggggcctttcgaagaggagatgaaaggcattgccgccgttaccgatattcctctgggcgagattatctctttcaatatcttctatgaattgtttactatctgcactagcatcgttgccgaggataagaagggccacctcatccatgggcggaatatggatttcggagtgttccttggctggaacatcaacaacgatacttgggtgatcactgagcagctgaaaccactcacggtgaacctcgactttcaacgtaacaacaagaccgtgtttaaggcctccagttttgccgggtacgttggcatgctcacaggatttaaaccgggacttttttcattgactctcaatgaacgctttagtatcaacggtgggtacctgggcatcctggagtggatactaggcaagaaggatgtgatgtggatcggattcctaactagaactgtcctggaaaattcaaccagctacgaagaagcgaagaacttactgactaaaacaaaaatattagcaccggcttacttcatcctcggtggaaatcaatcaggcgaaggatgcgtcatcacaagggaccggaaagaaagccttgatgtgtacgaactggatgctaagcaaggaagatggtatgtggtgcaaacaaattatgatcgctggaagcacccattttttcttgatgacagaagaacccccgccaaaatgtgtctcaataggacaagccaggagaacatctcttttgaaaccatgtatgatgtcttgagtactaagcctgtgctgaataaactgaccgtgtatacgactctgatcgacgtaaccaaagggcaatttgagacatatttacgggactgcccggatccctgcattggttgg

SEQ ID NO: 17254 - DNA, 1185 bp, synthetic construct
  misc_feature 1..1185: note = source = /note="Description of Artificial Sequence: Synthetic coding sequence"
  source 1..1185: mol_type = other DNA
atgcctggacgctcctgtgttgctctggtgctcttagccgcagctgtctcatgtgctgtggctcagcatgctccaccttggactgaggattgtcgaaaatcaacctaccctcctagtgggcctacatatagaggtgctgttccctggtacactattaatcttgatttgcccccttataaaaggtggcatgaactgatgcttgataaggctcccgtgttaaaggttatcgtcaattctttaaagaatatgataaacactttcgttccttctgggaaaattatgcaagttgttgatgaaaagcttcccggattgttaggtaacttccctggccccttcgaggaggagatgaaagggatcgcagctgttactgatattccgctgggcgagatcatttcttttaacattttttacgagctattcacaatttgcacaagtatcgttgctgaagataaaaagggacatcttatccacggccgaaatatggactttggtgtttttctcggttggaacattaataacgatacttgggttatcacggagcagctcaagcctttgactgttaatctcgactttcaaagaaataacaaaacagtgtttaaagcctcttcattcgctggttatgttggaatgcttactggttttaaacccggcctctttagtctcacacttaacgagaggttcagtataaatggtggatatctgggaatccttgaatggatcctgggaaagaaggatgttatgtggataggtttcttgactagaactgttcttgagaattcaacaagctatgaggaggccaaaaacttattgactaagaccaagattcttgcacccgcatactttattctgggtggaaatcagtccggagagggttgcgttattactagagaccgaaaggaatccctggatgtttacgaacttgatgcgaagcaagggcgttggtatgtcgttcagacaaactacgataggtggaagcacccattctttctagatgaccgtcgaacccccgcaaagatgtgtttaaaccggacaagtcaggagaatatctcatttgagacaatgtacgatgtcctctccaccaaaccagtattgaacaaattgaccgtttatacaactcttatcgatgtcactaagggacaatttgagacgtatctgcgtgattgccccgacccctgtattggctgg

SEQ ID NO: 17255 - DNA, 1185 bp, synthetic construct
  misc_feature 1..1185: note = source = /note="Description of Artificial Sequence: Synthetic coding sequence"
  source 1..1185: mol_type = other DNA
atgcctgggcgctcgtgtgtggctctggtgctcctggccgctgcagtctcgtgcgcagtggcacagcatgcccccccttggaccgaggactgtcgcaaaagcacttatcccccttcgggtccaacataccgcggcgccgtaccttggtacacaattaaccttgatttgcctccatacaaacgctggcacgagctgatgttggataaagccccagtactcaaggtgatcgtgaacagccttaaaaacatgatcaatacatttgtaccatcggggaaaattatgcaggtggtggatgaaaaactccctgggctgctaggtaactttcctggaccctttgaagaggagatgaaaggtattgccgccgtgactgatatccccctgggcgaaatcatttccttcaacatcttctatgaactgtttaccatttgtacgtccattgtcgccgaggataagaagggccacctgattcacggaaggaacatggatttcggagtgtttcttggttggaatatcaataacgatacatgggtaatcactgagcagttgaagccgctcaccgtgaatctggactttcagcggaataacaagactgtgtttaaagcttcctccttcgccggctatgtgggcatgctaacaggcttcaaacctggacttttcagcctgacgttgaatgagcggttcagtataaacggcggatatctcggcatattggaatggatcctcggaaagaaggatgtgatgtggattggtttcctgactcggacggtcctagaaaattcaaccagctacgaggaagcgaagaacctcttaacaaaaaccaagatactcgctcctgcctacttcatccttggcggtaaccaaagcggcgagggatgcgtcattactcgggatcgaaaggaaagtctcgacgtctatgagctggatgcaaagcagggccgctggtacgtggttcagaccaattatgacagatggaagcatccatttttcctcgacgaccgccgcacccctgccaagatgtgccttaatcgcactagccaggagaatatctcgtttgagacaatgtacgacgtgctctccactaaaccggttctgaataaactcacggtttacactacactgatcgatgtgacgaagggacagtttgagacatacctcagggattgcccagacccatgtattggctgg

SEQ ID NO: 17256 - DNA, 1185 bp, synthetic construct
  misc_feature 1..1185: note = source = /note="Description of Artificial Sequence: Synthetic coding sequence"
  source 1..1185: mol_type = other DNA
atgcctggcagaagctgtgttgcactggtgctgctggctgccgccgtctcctgcgcggtcgcccagcacgcgcccccatggacagaggactgccgaaagtctacttaccccccatcagggcccacatacagaggcgctgtaccgtggtacactattaacctagatttaccaccctataaacggtggcatgagctgatgcttgataaggcacccgtgctgaaagtgatcgtgaactcactgaaaaacatgattaacacgtttgttcccagcgggaagataatgcaggtggtggacgaaaagctgcccggattgttggggaattttcccggcccttttgaagaagaaatgaaaggtatcgccgcagttacagacataccccttggtgaaattatctcctttaatatcttctacgaattgtttacaatttgtacatcgatcgttgccgaggataaaaaggggcatcttattcacggtcgtaatatggatttcggggtttttctcgggtggaacattaataatgatacctgggtgatcacagagcagctgaagcctcttacggtgaatctagacttccaaaggaataacaagaccgtgttcaaggcctcatccttcgcggggtacgtgggtatgcttaccggattcaaacccggattatttagcttaacattgaacgaacggtttagtatcaacggggggtacctggggattctggagtggatcctgggcaagaaggacgtgatgtggattggctttctcactcgtaccgtactggagaattccaccagctacgaagaggccaagaatctgctcactaagactaagattctggcccccgcttatttcatattaggtggtaaccagtcaggcgaaggatgcgtgataacccgtgatcggaaggaaagtctggacgtttacgagcttgacgccaaacaaggtaggtggtatgtcgtccagacgaactacgacagatggaaacatccttttttcctcgatgataggcggacacccgccaagatgtgtctcaatagaacgagccaagaaaacatctcgtttgaaacgatgtatgacgtgttgtctactaagcctgtattaaacaaactgacagtgtacactactctgatcgatgtgacgaaggggcagttcgaaacctacctacgcgattgtcctgatccttgcattggctgg

SEQ ID NO: 17257 - DNA, 1185 bp, synthetic construct
  misc_feature 1..1185: note = source = /note="Description of Artificial Sequence: Synthetic coding sequence"
  source 1..1185: mol_type = other DNA
atgcctggcagaagttgcgttgccctggtgctcctggcagcagccgtcagctgcgcagttgctcaacacgccccaccatggaccgaggattgcaggaagagtacatacccgccttctgggcccacataccgaggtgctgtgccttggtacactatcaatttggacttgcctccgtataaacggtggcacgaactgatgttggacaaggcccccgttcttaaggtgatcgtgaactcactgaagaacatgatcaacacctttgtgccttccgggaagattatgcaggtcgtggacgagaagctgcccgggctcctgggcaattttccaggcccctttgaggaggagatgaagggcatcgccgcagtgacagacattccgctcggtgagattatctcgtttaacattttttacgaactcttcacaatatgtacatccatcgtggccgaagacaaaaagggtcacctaatccatggtaggaacatggatttcggcgtgtttctggggtggaacataaacaacgacacctgggtaatcacagagcagctgaagccactgacagttaatctagattttcaacgaaacaacaaaacggtcttcaaggcgagtagctttgcaggatatgtggggatgctgacaggatttaaacctggcctctttagccttacacttaacgagaggttcagcataaatggcgggtacctggggattctggagtggattttaggcaagaaagacgtaatgtggattggcttccttacccggaccgtgttagaaaactctacctcatacgaggaagccaaaaatctcctaacaaagaccaagatcctggcccccgcgtactttatcttgggcggaaatcagtccggagagggctgcgtgattacaagagacaggaaggagagcctggacgtctatgaattggacgcgaagcaggggcggtggtatgtggtacagaccaattatgaccggtggaagcatccgttcttccttgacgacagacgtaccccagctaagatgtgtttgaaccgaacgagccaagagaatatctccttcgagacaatgtacgatgtgctgtctactaaacctgttctgaacaaactcacggtgtataccactttaatcgacgtcaccaagggccagtttgagacctatctaagagattgtcctgatccatgcataggttgg

SEQ ID NO: 17258 - DNA, 1185 bp, synthetic construct
  misc_feature 1..1185: note = source = /note="Description of Artificial Sequence: Synthetic coding sequence"
  source 1..1185: mol_type = other DNA
atgcctggaagatcatgtgttgcattagttttacttgcagctgctgtatcatgtgcagtagctcaacatgcaccaccatggacagaagattgtagaaaatcaacgtatcctccaagtggtccaacatatagaggtgctgttccatggtataccattaatcttgatttgccaccatacaagcgatggcatgaattaatgttagataaggctccagttttaaaagttattgtcaactctcttaaaaatatgattaatacgttcgtgccaagtggtaaaataatgcaagttgttgatgaaaaattaccaggacttcttggaaattttccaggaccatttgaagaagaaatgaaaggtattgcagcagtaacagatattccattaggagaaattatttcttttaatattttctatgaactttttacaatctgtacttcaattgttgctgaagataaaaaaggacatctaattcatggaagaaatatggactttggagtttttttaggatggaatattaacaatgatacttgggttattacagaacaattaaaacctcttacggttaacttagattttcaacgaaataataaaacggtttttaaagcatcatcatttgcaggttatgtaggtatgcttacaggatttaaaccaggacttttctcacttacattaaatgaacgattttctattaatggaggatatctaggaatattagaatggattctcggaaagaaagatgtaatgtggattggatttcttacaagaacagtattagaaaattctactagttacgaagaagctaaaaacttattaacaaaaactaaaattctagctccagcttattttattttaggtggaaatcaaagtggggaaggatgtgttattaccagagatagaaaagaaagtttagatgtttatgaattagatgctaaacaaggtagatggtatgtagtacaaacaaattatgatcgatggaaacacccatttttcttggacgaccgaagaactcctgcaaaaatgtgtcttaatcgtacatctcaagagaatatttctttcgaaactatgtatgatgttctttcaactaaaccagttttgaataaattgacagtctatacaacacttattgacgttacaaaaggacagtttgaaacatatcttagagattgtccagatccatgtattggatgg

SEQ ID NO: 17259 - DNA, 1185 bp, synthetic construct
  misc_feature 1..1185: note = source = /note="Description of Artificial Sequence: Synthetic coding sequence"
  source 1..1185: mol_type = other DNA
atgcccggtcggagctgtgtggccctggttttgttggctgctgccgttagctgtgcagtggcacagcatgctcccccatggacagaagattgccgaaagtccacttatcctccatccgggcctacctatcgaggtgcagttccctggtatacaatcaacctcgaccttcccccctacaagagatggcacgaattgatgctggataaagcacctgtcctgaaagtgatcgtcaatagcctgaagaatatgataaatacatttgttcctagtggcaagatcatgcaggttgtggatgaaaaactccccgggctgttgggcaatttcccaggcccatttgaggaagaaatgaagggcatcgccgccgttaccgatatcccgctgggggaaataatctccttcaacatcttctacgagctatttactatatgtacctccattgtggctgaggacaagaaagggcatttgattcatggtcgcaacatggatttcggggtgtttctgggatggaacatcaacaatgatacctgggtgattacggagcagctgaaacccctcacagtgaacctcgactttcagagaaacaacaaaacagtgtttaaggcgagctccttcgcgggctacgtgggcatgctgactggtttcaagcctggcctgttttccctcacgctcaatgagcggttcagtataaacgggggatacctgggcatactggagtggattctgggcaaaaaggatgtcatgtggatcggtttcttgactcgaaccgttctggagaactctacgtcctacgaagaagctaaaaacctcctaaccaagactaaaatactggctccagcctattttatcctgggcggaaatcagtctggcgagggctgcgtgatcacaagggaccgcaaagaatctcttgatgtgtatgagctggacgctaagcagggccggtggtacgtcgtgcagaccaattacgaccgttggaagcacccattcttcctggatgaccggaggacccccgcaaagatgtgcctgaaccgtacctctcaggagaacatttcctttgagaccatgtacgacgtactgagtactaaaccagtgctgaacaagttgacagtctacacaaccttgatcgatgtgaccaaggggcagttcgagacatacctgagggattgccccgatccatgtatagggtgg

SEQ ID NO: 17260 - DNA, 1185 bp, synthetic construct
  misc_feature 1..1185: note = source = /note="Description of Artificial Sequence: Synthetic coding sequence"
  source 1..1185: mol_type = other DNA
atgcccggacgcagttgcgtggccctggtgctcctagctgccgcggtctcgtgtgctgtggcgcagcacgctcctccttggactgaggattgccgcaaatctacctaccccccctcgggtccgacttaccgcggagccgttccatggtatacaatcaatcttgatttacccccgtacaaaagatggcacgaactcatgcttgataaagcacctgtgctcaaagttatcgtgaactcccttaaaaacatgatcaatacttttgtccccagtggcaagatcatgcaggtagtcgatgagaaactgcccggtttgctcgggaatttccctgggccctttgaggaagagatgaaaggcatcgccgccgtgaccgatatccccctgggggagatcatatctttcaacatcttttacgaattgttcactatctgcaccagcatcgttgctgaggacaaaaagggtcatctgatccacggtcgtaacatggactttggcgtgttcttaggctggaatatcaacaacgatacatgggtcatcaccgaacagctcaagcccctgacagtgaaccttgacttccagcgcaataataaaacggtgttcaaagcttcttccttcgcaggatatgtgggtatgctcacaggattcaagcccggcctgtttagtctcactttgaacgagaggttcagcatcaacggcggatatctgggtatcctggagtggattctcgggaaaaaggatgtaatgtggatcggattcctgacccggacagttctggagaactcaacctcttatgaggaggccaagaacctgttgaccaagacaaagatcctggctcctgcttactttattctgggaggcaaccagtcaggggagggatgtgtgatcaccagagatcgaaaagagtccctcgacgtgtacgaacttgatgccaaacagggcaggtggtatgtcgttcagaccaactatgaccggtggaaacacccatttttcctggacgaccggagaacaccagcgaagatgtgcctgaaccggacatctcaggagaatatatcttttgagaccatgtacgatgtactgtcaacgaagcctgtcctcaacaaacttactgtatacactaccctcatagatgtgacaaaagggcagtttgaaacctatctaagggattgcccagatccctgcatcggatgg

SEQ ID NO: 17261 - DNA, 1185 bp, synthetic construct
  misc_feature 1..1185: note = source = /note="Description of Artificial Sequence: Synthetic coding sequence"
  source 1..1185: mol_type = other DNA
atgccggggcgatcgtgtgtcgctcttgtcctgcttgcagcggcggtttcgtgcgcggtggcccaacacgcgccaccgtggactgaagattgcagaaagagcacctaccccccgtccggaccaacctaccgtggtgccgtgccgtggtacaccatcaacctggacctgcccccctataagcgctggcatgagttgatgttagacaaggccccggttttgaaggtcatcgttaacagcctgaagaatatgattaacaccttcgtcccttcgggcaagatcatgcaggtcgtagacgagaagctgcctggtcttctgggcaacttccccggaccgttcgaggaggagatgaaaggcatcgccgcagtcactgatatcccgctcggtgagatcatttccttcaatatcttctacgagctcttcaccatctgcacctcgatcgtcgccgaggacaagaagggtcacctcattcacggtcggaatatggattttggcgtcttcctcggatggaacatcaataacgatacttgggtgatcacggaacagctcaagcctctgacagtgaacctcgatttccaacggaacaataagactgttttcaaagccagcagttttgctgggtacgtaggaatgcttacgggcttcaagcctggtttgttttccctgaccctgaacgaacggtttagcatcaacggaggctacctgggcatcctggagtggatcctcggaaagaaggatgtgatgtggatcggctttttgacgcgcaccgtgctcgagaacagtacgtcgtatgaagaggccaagaacctgctaactaagaccaagattctcgccccagcttactttattctcggaggcaaccaaagcggcgagggctgcgttattactcgcgatcgcaaggagagtcttgacgtttatgagctcgacgccaagcagggcagatggtacgtggtccaaactaactacgacaggtggaagcatccgttcttcctcgacgatcgccgcaccccagccaagatgtgcttgaaccgtacctcacaggagaacatctctttcgagaccatgtacgatgtgctgtccaccaaaccggtgctgaacaagctaacagtctacacgaccctcatcgacgtcaccaagggccaattcgaaacatatcttagagactgccccgatccctgcatcggctgg

SEQ ID NO: 17262 - DNA, 1185 bp, synthetic construct
  misc_feature 1..1185: note = source = /note="Description of Artificial Sequence: Synthetic coding sequence"
  source 1..1185: mol_type = other DNA
atgccaggacgaagctgtgttgccctggtcttgctagcggccgcagtgtcatgtgcagtggcccagcatgctcctccttggacagaagattgccgaaagtcaacttatcctccctcaggacccacataccggggggctgtgccttggtacaccattaacctcgatttgccaccgtataaaaggtggcacgagcttatgctggataaagcccccgtccttaaagttatcgttaacagcctgaagaatatgataaacacatttgtgccttcaggcaagatcatgcaggtggtggacgagaaattgccaggactgctcgggaactttcccggccccttcgaggaagaaatgaaaggaattgcagctgtgacggacatccctctcggggagatcatcagcttcaacatattttacgagttgtttacaatctgcacatcaatcgtggccgaagataagaaggggcacctcatccacggccggaacatggacttcggggtgttcctgggttggaatatcaacaatgacacctgggtgatcaccgagcagctgaaacctctgactgtgaacctagatttccagagaaacaataaaacagtcttcaaggcctcctcatttgcaggctatgtcgggatgctaacaggattcaagcctggtttgttttctttgacacttaatgaacgcttttcaatcaacggaggctacttgggaatccttgagtggatacttgggaaaaaggacgtgatgtggattggattcttgacccggacggtactggaaaacagcaccagctacgaagaggccaagaacttgctcaccaagactaaaatattggcccccgcctatttcattctggggggtaaccagtcgggagaaggatgtgtgattacccgagatagaaaggagtccctggatgtctacgaactggatgctaaacagggtcggtggtatgttgtgcaaacaaactatgaccggtggaagcaccccttttttctggatgacaggcggacgcctgccaagatgtgtttaaatcggacctcccaagagaacatctcttttgagacaatgtatgacgtgctgtctacaaaacctgtgttgaacaagttgacggtatataccactttgatcgacgtcactaagggccagttcgaaacttacctgcgggactgccccgacccatgtatcggctgg

SEQ ID NO: 17263 - DNA, 1185 bp, synthetic construct
  misc_feature 1..1185: note = source = /note="Description of Artificial Sequence: Synthetic coding sequence"
  source 1..1185: mol_type = other DNA
atgccgggaagaagctgcgttgcactggtgttgctggctgctgccgtctcgtgcgctgtcgctcagcatgcccctccttggaccgaagactgtaggaagtctacgtatcctccttccggtcccacataccgaggcgccgtgccatggtacaccatcaacttggacttgccaccctacaaacgctggcacgaattaatgctggataaggctccagtactgaaggttattgtaaactctttgaagaatatgataaatacctttgttcccagcgggaaaataatgcaggtggtggatgagaaattgccaggactgctcgggaactttcctggtccctttgaagaagaaatgaagggaattgccgccgtgactgatatcccactgggggaaattattagcttcaacatcttctacgagctattcactatctgtacatctattgttgcagaggacaagaaaggacatcttatccacgggcggaacatggattttggcgtattcctggggtggaacattaataatgatacctgggtcattacagaacagctgaaacccctgacagtcaatcttgacttccagaggaacaataagaccgttttcaaggcatctagcttcgcaggctatgtcggcatgctgacagggtttaagccagggctgttcagccttacacttaacgagaggttctccatcaacggaggctacctgggcattctagaatggatcctcggcaaaaaggacgtgatgtggatcggttttttgacacggacagtgttggagaatagcacttcctacgaagaagccaagaacctgttgacaaagacgaaaatactggcacctgcctatttcatcctgggggggaatcagtcaggcgaaggttgcgtgattacaagagatcggaaggaaagtttggatgtatacgaactagatgccaagcaggggagatggtacgtcgtgcagacaaattacgaccgttggaagcatccattcttcttggacgatagacggacacccgctaaaatgtgcctcaatcgcacaagccaggagaatataagctttgagacaatgtacgacgttctgtcaaccaaacccgtcctgaacaagctgacagtgtataccaccttaattgatgtgactaaaggccaatttgagacttacctccgggactgtccagatccctgcatcggatgg

SEQ ID NO: 17264 - DNA, 1185 bp, synthetic construct
  misc_feature 1..1185: note = source = /note="Description of Artificial Sequence: Synthetic coding sequence"
  source 1..1185: mol_type = other DNA
atgcccggtcggtcttgtgtggccctcgtacttctggctgctgccgtaagctgtgcggtcgcacagcacgctcctccctggacggaagactgtcggaagtccacctaccccccctccgggcccacatatcgaggcgcggtgccctggtacaccatcaacctggatctgccaccgtataagcggtggcacgaacttatgttggataaggcccccgtcctgaaagtaatcgttaattccctcaagaatatgatcaatacattcgttccgagcggcaaaatcatgcaggtggttgacgagaagctgccgggcctcctgggaaacttccctggcccattcgaggaagaaatgaaaggcatagcagccgtaacagacataccccttggcgaaattatctcttttaacatattttatgaactgttcactatctgtaccagcattgtagccgaggacaagaaagggcacctcatacatgggaggaatatggacttcggagttttccttgggtggaatatcaataatgacacgtgggtgataactgagcagttgaagccgctcacagtgaacttggactttcagagaaacaataagactgtgtttaaggcttctagcttcgctgggtacgtgggcatgctcaccggcttcaaacccggcctgttcagtctgacactgaacgagaggttcagtattaatggagggtatctgggtatcctggagtggatccttggtaagaaggacgttatgtggattggatttctgacccggactgttctcgagaattccacgagctatgaggaggcgaagaatctgcttaccaagaccaaaatactggcaccggcatacttcattctcggcggaaatcaatctggtgaggggtgcgtgattactcgcgaccggaaggagtcccttgacgtgtatgaactggacgcaaagcaagggcggtggtatgttgtgcagacaaactacgatagatggaagcatccctttttcctggatgatcgacgcacacctgctaagatgtgtttgaatcggacctctcaggaaaacataagcttcgagaccatgtatgacgtcctgtctacaaagcctgttcttaacaagcttactgtctacacaactctgatcgatgttactaaggggcagtttgaaacctatctgagggactgcccggacccatgcataggctgg

SEQ ID NO: 17265 - DNA, 1185 bp, synthetic construct
  misc_feature 1..1185: note = source = /note="Description of Artificial Sequence: Synthetic coding sequence"
  source 1..1185: mol_type = other DNA
atgccaggccgcagctgtgttgctctggtgctgctagctgcggccgtttcttgtgctgtggcacaacacgcaccgccatggaccgaggattgccgcaagagcacctatccgccaagcggccctacgtaccgcggcgcagttccgtggtatacaattaacttggatctgcctccatacaaacgttggcatgagctcatgctcgacaaggcacctgttctgaaagtgatcgtgaacagcttaaagaacatgatcaacacctttgtcccttccggtaaaatcatgcaagtcgtggatgaaaagctgccggggctgctgggaaacttcccagggccatttgaagaggagatgaaaggcattgcagctgtgacggacattccgctgggggagatcattagcttcaatatcttctacgagctgtttaccatttgcaccagtattgtagcagaagataaaaagggacacctgatccacggtcgtaatatggattttggtgtgttcctgggttggaacattaacaacgacacttgggtaatcacggagcagctgaaacctttgactgttaatctagattttcagaggaacaataagacggtgtttaaagcctcttcttttgcgggctatgtcggaatgctaaccggctttaaaccaggcctgttttctctgacgctgaatgagaggttcagcatcaatggtggctatctgggcatcctggaatggatcctggggaaaaaggatgttatgtggattggcttccttacccgaaccgtgctggaaaattccacttcttatgaagaagcaaagaacctgctgactaaaactaaaattctggccccagcctattttatcctgggtggtaaccagagcggtgagggctgcgtgatcacgcgtgaccgtaaagaaagtctggatgtttacgagctggatgcgaagcaaggtagatggtatgtggtgcagactaactacgaccgttggaaacacccattcttcctggacgaccgccggaccccagccaagatgtgtctgaatcgcaccagccaagagaacatctctttcgagaccatgtacgacgtcctgagcaccaagcctgtcctgaacaagctcactgtgtacaccaccctgattgacgtgactaaaggtcaatttgagacttacctgcgcgattgcccggatccttgcatcggctgg

SEQ ID NO: 17266 - DNA, 1185 bp, synthetic construct
  misc_feature 1..1185: note = source = /note="Description of Artificial Sequence: Synthetic coding sequence"
  source 1..1185: mol_type = other DNA
atgccgggtagatcttgtgttgcactagttcttctggcggccgcagtatcgtgcgcagtagcgcaacatgctcctccatggactgaagattgcagaaagtcgacatatcccccgagtggacctacttacagaggagccgtcccttggtatacaataaacttagacctcccaccgtacaaacggtggcatgaattaatgctcgataaagctccagtcctaaaagtcatcgttaattcattgaaaaatatgattaatacttttgtaccatcgggaaagattatgcaagttgtggatgaaaagctccctggattacttggaaatttcccaggtccctttgaggaagagatgaagggcatagccgcagtaacagatattccactgggagagattattagtttcaatatcttctatgaactgtttacaatttgcactagtattgtagctgaagataaaaaaggacacctgatccatggacgtaacatggattttggagtgtttctaggatggaatattaataatgatacatgggttataacagagcaattgaagccactgacagttaatctggacttccagagaaacaataaaactgtttttaaagcatcttcgtttgctggatatgtgggaatgctcacaggttttaaacctggtttgttttcgctcactctcaatgagcgattttcgatcaatggtggatatttgggaatcttggagtggattctaggtaaaaaggatgttatgtggattggatttcttactcgtaccgtattagaaaactcaacaagttatgaagaggccaagaatctactcacgaaaactaagatacttgccccagcatatttcatcttgggaggaaatcaatcaggagagggatgtgttatcacaagagatcgtaaagaatccttggatgtctatgagcttgatgcgaaacagggacgttggtatgtggttcagactaattatgatcggtggaaacatccattttttctggatgatagacgaacccctgcaaagatgtgcttgaatagaacatctcaagaaaacatctcatttgaaactatgtatgatgtcttgtcgacgaaacctgttttaaataaactcacagtctacacaacgttgattgatgttacaaagggacagttcgaaacatatcttcgagattgcccagatccatgcattggttgg

SEQ ID NO: 17267 - DNA, 1185 bp, synthetic construct
  misc_feature 1..1185: note = source = /note="Description of Artificial Sequence: Synthetic coding sequence"
  source 1..1185: mol_type = other DNA
atgccagggcgctcatgcgtggcgttggtgctgctcgctgcagcggtatcttgcgcagtcgcacagcatgctcccccttggaccgaggactgcaggaagtccacatatccaccgtccggccccacctaccgtggagccgtaccttggtacactataaatctggacctgcccccttacaagagatggcacgaactaatgttggataaggcccctgttttgaaagtgattgtcaacagcctcaaaaatatgattaatactttcgtgccaagcggtaaaattatgcaagtagtagatgaaaagctgcctggcctcctcggcaactttcctgggccgttcgaggaggagatgaagggcatcgctgctgtgactgatattccacttggggagattatctcgttcaatatattttacgaattgttcacgatctgcacgtccattgtagccgaagataaaaaaggacatctaatccacggacggaatatggacttcggagtgttccttggatggaatattaacaatgatacatgggttataactgagcagttgaagcccttgacagtgaacttggattttcagagaaataacaagacagtgtttaaagccagtagcttcgccgggtatgttggaatgctgaccgggttcaagccaggtctgttttcactgaccttgaatgaacgcttctcaatcaacggtggctaccttggaattttagagtggatcctggggaaaaaagatgtcatgtggataggatttttgacaagaactgttctggaaaactctacctcctacgaagaggcaaaaaatcttctcacgaaaaccaagatactcgcaccagcctattttatccttgggggtaaccagtctggggaaggatgtgtcattacccgtgatcgcaaagagtctctggatgtgtacgaactggatgcgaagcagggccggtggtacgtggttcaaactaattacgaccgctggaagcatccgttcttcctggatgacaggagaacccctgctaagatgtgtctgaatcggacctcccaagagaacatcagtttcgagactatgtatgacgttttgagtactaagccggtcctgaataaacttactgtttatacaactttgatagacgtcactaagggccaattcgagacctacctacgcgattgtcctgacccatgtattggctgg

SEQ ID NO: 17268 - DNA, 1185 bp, synthetic construct
  misc_feature 1..1185: note = source = /note="Description of Artificial Sequence: Synthetic coding sequence"
  source 1..1185: mol_type = other DNA
atgcccggccggtcctgcgtcgccctagttctcctcgccgccgctgtgtcttgcgccgtggcgcagcacgctccaccttggacagaggactgcaggaagagcacttaccctccaagtggtcctacatatcggggggcggttccatggtacactatcaatctggatcttccaccatataagagatggcatgaactaatgctagacaaggcacccgtgttgaaagtcatagtaaattcattgaagaacatgataaacaccttcgtcccgtccggcaagatcatgcaagtggtcgacgagaagctgccaggacttcttggaaattttcctggcccattcgaagaagagatgaagggaatagcagccgtgactgatatccccctgggggagatcatctcttttaacattttctacgagctgtttactatctgtacgtccatcgtggcagaggataaaaaagggcatttgatccacggtcgaaatatggacttcggtgtattcctcggatggaatattaacaatgacacctgggtgattacagagcagttgaagcctctgaccgtcaatctcgattttcagcgtaacaataaaactgtattcaaggcttctagttttgcagggtacgttggcatgctcacgggtttcaaacccggcctgttcagcttgacccttaatgagcgtttctccatcaacggcgggtacttaggcatcctagagtggatcctgggtaagaaagacgttatgtggatagggtttctcacccgaactgtcttagaaaatagtacatcttacgaagaagcaaaaaatctgctaactaagaccaagatcctggcaccggcctatttcatcctggggggcaaccagtctggcgagggatgtgtcattaccagagaccggaaagaatcattggatgtctatgaacttgacgccaagcaagggaggtggtacgttgtccagacaaactacgaccggtggaagcaccctttcttcctggacgaccgaaggacaccggccaaaatgtgtctgaatcggacgtctcaagagaacatcagcttcgaaacaatgtatgatgtcctctccacaaagcctgtgctcaataagctgaccgtatacaccacactgatcgacgtgaccaaaggccagttcgagacctacctgcgtgattgtcctgatccctgtataggatgg

SEQ ID NO: 17269 - DNA, 1185 bp, synthetic construct
  misc_feature 1..1185: note = source = /note="Description of Artificial Sequence: Synthetic coding sequence"
  source 1..1185: mol_type = other DNA
atgccgggccgcagttgcgtggccctcgttctgttagccgcggcagtatcctgcgcggtggcccagcatgctccaccctggactgaagattgtaggaagtcgacatatcctcccagcgggccaacttatcggggggctgtgccttggtatactatcaacctggatctcccgccctataaacgatggcatgagctgatgctggacaaagcaccagttttgaaagtcatcgtgaattccctgaagaatatgatcaatacgttcgtccccagcggcaagattatgcaagtggttgatgaaaaactgcccggcttgctgggcaattttcctgggccgtttgaggaggaaatgaaagggatagctgccgtgacagacatccctctcggagagatcatttcttttaacatcttttacgaattgttcactatctgtacgagcattgttgctgaggacaaaaagggccacctgattcatgggaggaatatggatttcggcgtattccttggttggaatataaataacgacacctgggtcattaccgaacagctgaaacccctaacagtgaatctggatttccagcgaaacaacaagactgtctttaaagcgtctagctttgcaggctatgtggggatgcttacgggcttcaaacccggattgttctcactgaccctcaacgaacggtttagtattaatggtggatacctcggcatactggaatggatattaggtaaaaaagacgtgatgtggattggatttctcacacgtacagtccttgagaacagtacctcctatgaagaagcaaagaacctcctgacgaagacgaaaatcttggcgcctgcatattttatcctggggggcaatcagagcggtgagggatgtgtgatcaccagggatagaaaagagagcctggatgtgtacgagcttgacgcgaagcagggcagatggtacgttgtgcagacaaactacgaccggtggaagcaccccttctttttagatgacaggaggaccccggctaagatgtgtctgaatcgcaccagccaggaaaatattagtttcgagacaatgtacgatgtcctgagcaccaaacccgtcctaaataagttgaccgtttatactacgcttattgacgtaactaaaggtcagttcgagacttatctgcgagactgtccagacccatgcattggctgg

SEQ ID NO: 17270 - DNA, 1185 bp, synthetic construct
  misc_feature 1..1185: note = source = /note="Description of Artificial Sequence: Synthetic coding sequence"
  source 1..1185: mol_type = other DNA
atgccgggtagaagctgcgtggctctggtgctgctcgcagccgctgtgtcctgtgcggttgctcagcatgcgccgccttggactgaggactgtcgaaagtcgacttatcccccctccggtcccacctatcgtggggctgtgccctggtacaccatcaatctcgacctccctccgtacaagcgctggcacgagctcatgctggataaagcacctgtactgaaggtcattgtgaatagcctgaaaaacatgatcaatacattcgtaccgagtggaaagataatgcaggtggtcgatgagaagctgccaggtctcctggggaatttcccaggccccttcgaggaggagatgaaagggatcgcggccgtgacggacataccactcggcgaaatcatcagcttcaatattttctatgaattattcaccatctgtacctctattgtcgctgaggacaagaagggccacctgatccacggtcgcaatatggacttcggcgtctttctcggctggaacattaataatgacacgtgggtgatcaccgagcaacttaagccgctgaccgtcaacctggacttccagcgcaataacaaaacggtatttaaggcttcgtccttcgctggctacgtaggcatgttgaccgggttcaagccaggattattttcactgacactaaacgagcggttctccatcaatggtggctacttgggtattctggagtggattctgggaaaaaaagacgtcatgtggattgggtttctcaccaggacggtgctggaaaactcgactagctacgaggaggcaaagaatctcttgaccaagaccaagatcctggcccctgcttacttcatcctgggaggcaatcagagcggcgagggttgcgtcatcacacgcgatcgtaaggagagcctggatgtgtatgaactggacgcgaaacaaggccggtggtacgtggttcagacaaactacgatcgttggaagcatcccttctttctcgatgatcgccgaactccggccaagatgtgcctgaatcgaacctcgcaggagaacatctcatttgaaacgatgtatgacgtcctctcaacgaaacccgtgctgaacaagttgaccgtgtacacaacgcttattgatgtcacaaagggccagttcgagacataccttagggattgtccagatccctgcatcggatgg

SEQ ID NO: 17271 - DNA, 1185 bp, synthetic construct
  misc_feature 1..1185: note = source = /note="Description of Artificial Sequence: Synthetic coding sequence"
  source 1..1185: mol_type = other DNA
atgcccggccggtcctgtgtcgccctggtgctcctggctgccgccgtctcttgcgccgtggcacagcacgcaccgccatggactgaggactgtcgaaaaagtacctacccgccatccggtccaacatatcgaggagccgttccctggtatacaatcaacttagacctacctccttataagaggtggcatgagctaatgctcgataaggcaccagtgttgaaggtgatcgtgaatagcttgaaaaacatgattaacactttcgtaccctccggaaagatcatgcaggtcgtcgatgagaaactccctggattactgggaaattttcctggtccattcgaggaagagatgaagggcatcgccgccgtcactgatattcccttgggtgagatcatcagtttcaatattttttacgaactcttcactatctgcacaagcatcgtggccgaggacaaaaaagggcacttgattcacggtagaaacatggactttggagtgttcctgggatggaatattaataacgatacgtgggtaattaccgaacagctgaagcccctaaccgtaaatctggacttccagcgcaataacaaaacggtcttcaaggctagctcgttcgccggatatgtcggaatgctgacggggtttaagccaggcttgttttctttaaccctaaatgaaaggttcagtatcaacgggggttacctcggcattctggagtggatcctaggcaagaaagacgtgatgtggataggattcctcaccagaaccgtcctggaaaattcaaccagttatgaggaggccaaaaatctcctcaccaaaactaagatactggctcccgcttatttcattctgggaggcaaccagagtggggaaggatgtgtgatcactagggaccgcaaggaatcactagacgtgtatgaacttgatgctaaacagggtagatggtacgttgttcagaccaattatgatcgctggaaacatcctttctttctggacgataggcgaacgcccgcaaaaatgtgtctgaatcgcacatctcaagagaacatatcttttgagaccatgtacgatgtcctgagtaccaaaccggttcttaataagctcacagtgtacacaacattaattgacgtcacaaaagggcagtttgaaacttatctacgggattgcccagacccctgtatcggctgg

SEQ ID NO: 17272 - DNA, 1185 bp, synthetic construct
  misc_feature 1..1185: note = source = /note="Description of Artificial Sequence: Synthetic coding sequence"
  source 1..1185: mol_type = other DNA
atgcccggcagatcctgcgtcgccttggtcctgttggcagccgccgtgagttgtgcagtggctcagcacgcccctccctggacagaggactgccggaagtcaacttatcctccttctggacccacctaccggggggctgtgccatggtatactatcaatctggatctgcccccatataagagatggcacgaacttatgttggacaaggcacccgttttgaaggttatagtcaactctctgaagaacatgatcaatacatttgttccgtcagggaagatcatgcaagttgtggacgagaaactccccggactgctcggaaactttccagggcctttcgaggaagaaatgaagggcatagcagcggtgaccgatattcctcttggagaaattatcagtttcaatattttttatgaattattcaccatctgtactagcatcgtggctgaagataagaagggacatttgatacacggccgtaacatggattttggcgtgtttctgggctggaatattaacaacgacacatgggtgatcactgaacagctaaaacctctaaccgtaaacctggacttccagcgtaataacaaaacagtctttaaagcttcatcttttgcaggctatgtgggtatgctgacgggattcaagccagggctattctctctgaccctgaatgaaagatttagcattaatgggggctacctggggatactggagtggattctggggaagaaggacgtgatgtggatcggctttttgactcgcactgtgctggagaattccacatcatacgaagaagccaaaaatctattgactaaaacgaaaatcctggcccccgcctactttatactgggaggcaatcagagcggggagggctgcgtaataacaagggatagaaaggaatcactggacgtgtacgagttggatgctaagcagggtcgctggtacgtggttcagacgaattacgaccgctggaagcacccattttttctggatgataggcggacccccgctaagatgtgccttaacagaacctcacaggaaaacatctcttttgagaccatgtacgatgtactgagcaccaagccagtgctgaataagttgacggtgtataccacactgatagatgtaacgaagggtcagtttgagacatacctgcgtgactgtccggatccctgcattggctgg

SEQ ID NO: 17273 - DNA, 1185 bp, synthetic construct
  misc_feature 1..1185: note = source = /note="Description of Artificial Sequence: Synthetic coding sequence"
  source 1..1185: mol_type = other DNA
atgcctggacgcagctgcgttgcacttgtgctgctcgctgccgcagtgagttgcgcggtggctcagcacgcgccaccgtggactgaagattgtcggaaaagtacctatcccccaagcgggccaacttataggggcgccgtgccctggtatacgattaatctggacctccccccatataagcgatggcatgagcttatgctggacaaggcccccgttctgaaggtgatcgtcaacagcctcaaaaatatgatcaacactttcgtacctagcggaaagattatgcaagtagtcgatgaaaagctacctggcctgctgggtaactttcctgggccttttgaagaggagatgaagggaatcgcagcagttactgacatccctctgggggaaatcatttccttcaacatcttttatgagctctttacaatctgcacgtcaatagtggctgaggataaaaagggccaccttattcacggtcgaaacatggatttcggagtctttttaggctggaacattaacaatgacacctgggtgattactgagcagctaaagcccttgactgtgaacttggattttcagcgaaacaacaagaccgttttcaaagcaagttcattcgctggctatgtaggcatgctaacaggctttaagcctggcctatttagtctaactttgaacgagcgcttttccatcaatgggggctatctgggcattttggagtggattctgggtaaaaaagatgtgatgtggataggctttttaactaggacggtgctggagaatagcaccagttacgaagaagcaaaaaacctcctaacaaagactaagattttggctccagcctacttcatactcggcggtaaccagtccggtgaaggatgcgtgataacacgggacaggaaggaatcactggatgtgtatgagctcgacgccaaacagggacgctggtatgtggttcagactaattatgatagatggaaacatcccttctttcttgacgatcggagaacccccgcgaagatgtgtcttaacaggaccagtcaagagaatatctctttcgaaacaatgtacgatgtgttgagcaccaaaccagtccttaacaagttaacagtttacacgacgctgatagacgtcacgaagggacagtttgaaacatacttgagggattgccctgacccttgtatcgggtgg

SEQ ID NO: 17274 - DNA, 1185 bp, synthetic construct
  misc_feature 1..1185: note = source = /note="Description of Artificial Sequence: Synthetic coding sequence"
  source 1..1185: mol_type = other DNA
atgcctggaagaagttgtgtggccctggttttgctggccgctgcagtctcttgtgccgttgcccagcacgccccaccttggaccgaggactgcaggaagtctacatatcctccaagcggcccaacctacagaggtgctgttccttggtacactatcaacttggatctgcccccctacaagcgttggcacgagcttatgctggacaaggcaccagtgttgaaagtcatcgtcaatagcttgaagaacatgattaacacattcgtcccttctggaaaaattatgcaagttgtggatgaaaagctgccaggactgttgggcaatttccccggacctttcgaggaagagatgaagggtatcgcagccgtgacagacatcccccttggtgagatcatctccttcaacatcttctacgaactcttcacaatatgtacctctatcgtggctgaggacaagaagggtcacctgattcacggacgtaacatggacttcggtgtcttccttggctggaatattaacaacgatacttgggtaatcacagaacagctgaagcctctgactgtaaatcttgacttccagcgcaacaacaaaactgtattcaaagctagctcctttgctggttatgtgggcatgctgactggattcaaacccggcctgtttagtctgaccctgaacgaacgcttttccatcaacggaggttacctgggcatcctggagtggatcctgggtaagaaggacgtaatgtggatcggatttctgacccgtacagtgctggaaaattcaacaagctacgaagaggctaagaacttgctgaccaagacaaaaatcttggcacccgcctacttcattctgggcggaaaccagtctggtgaaggttgtgtgattactcgcgatcgtaaagaaagcctcgacgtatacgaactcgatgctaagcaaggccgctggtacgtggtgcagaccaattacgaccgctggaagcaccccttttttctggacgaccgtaggactccagctaagatgtgcttgaacagaaccagtcaggaaaacatcagttttgagacaatgtacgacgtcctgagtaccaagcctgtgctgaacaaacttactgtgtacaccactctgatagacgtgaccaagggtcaattcgaaacatacctgagagactgtcctgatccatgcattggatgg

SEQ ID NO: 17275 - DNA, 1185 bp, synthetic construct
  misc_feature 1..1185: note = source = /note="Description of Artificial Sequence: Synthetic coding sequence"
  source 1..1185: mol_type = other DNA
atgccgggtcgttcgtgtgtagcgttagttctactagcggcggcggtttcgtgtgcggtagcgcaacatgcgccgccgtggacggaagattgtcgtaaatcgacgtatccgccgtcgggtccgacgtatcgaggtgcggtaccgtggtatacgataaatttagatctaccgccgtataaacgttggcatgaactaatgttagataaagcgccggtactaaaagttatagttaattcgctaaaaaatatgataaatacgtttgttccgtcgggtaaaataatgcaagtagtagatgaaaaattaccgggtttattaggtaattttccgggtccgtttgaagaagaaatgaaaggtatagcggcggtaacggatataccgttaggtgaaataatatcgtttaatatattttatgaattatttacgatatgtacgtcgatagtagcggaagataaaaaaggtcatctaatacatggtcgtaatatggattttggtgtttttttaggttggaatataaataatgatacgtgggtaataacggaacaattaaaaccgttaacggttaatttagattttcaacgtaataataaaacggtatttaaagcgtcgtcgtttgcgggttatgtaggtatgttaacgggttttaaaccgggtttattttcgctaacgttaaatgaacgtttttcgataaatggtggttatctaggtatattagaatggatattaggtaaaaaagatgtaatgtggataggttttttaacgcgtacggtactagaaaattcgacgtcgtatgaagaagcgaaaaatttattaacgaaaacgaaaatactagcgccggcgtattttatactaggtggtaatcaatcgggtgaaggttgtgtaataacgcgagatcgtaaagaatcgttagatgtatatgaactagatgcgaaacaaggtcgttggtatgtagtacaaacgaattatgatcgttggaaacatccgttttttttagatgatcgacgaacgccggcgaaaatgtgtttaaatcgtacgtcgcaagaaaatatatcgtttgaaacgatgtatgatgttctatcgacgaaaccggttctaaataaattaacggtatatacgacgttaatagatgtaacgaaaggtcaatttgaaacgtatctacgtgattgtccggatccgtgtataggttgg

SEQ ID NO: 17276 - DNA, 1185 bp, synthetic construct
  misc_feature 1..1185: note = source = /note="Description of Artificial Sequence: Synthetic coding sequence"
  source 1..1185: mol_type = other DNA
atgccgggcaggtcttgcgtagcgttagttctgcttgcagcagcagtcagttgcgctgtagcgcagcatgcacccccgtggacggaagattgccggaaatctacataccctccttccggacctacataccgcggagctgttccgtggtatacaattaatttagatctgccgccttacaaacgttggcatgagctaatgcttgataaagctccagtacttaaagtcatcgtgaattcacttaaaaacatgatcaatacatttgtcccttctgggaaaataatgcaggttgtggatgaaaaactgccgggcttgctaggtaacttcccaggaccgtttgaagaggaaatgaaaggaatagcggctgttacagacattccattaggagaaattattagctttaatatattttacgagctgtttacaatctgtactagtatcgttgccgaagataagaaaggtcatctcattcacgggcgcaatatggactttggagtctttctggggtggaatattaataatgatacatgggttatcacggaacagcttaagcccttaaccgtaaacttagatttccagcgcaataataaaactgttttcaaagcgagctcatttgcaggttatgtaggaatgctgacaggctttaaaccgggacttttttctcttacgcttaacgaaagattttccattaatggaggttatcttggtattctggaatggatccttggcaaaaaagacgtcatgtggataggatttcttacccgtacggtgctcgaaaactcaacttcctatgaagaggccaaaaatcttttgacaaaaacaaaaatactagccccggcctattttattttgggtggaaatcaaagcggtgaagggtgcgtaatcacccgtgataggaaagaatctcttgatgtctatgaactggacgcgaaacaaggtcgatggtatgtagttcagaccaattatgatcgttggaaacatcctttttttttggatgatagacgtacgcctgcgaaaatgtgcctcaaccgcacgtctcaggaaaacatttcatttgaaacaatgtatgatgtactgagcacaaagccggtgcttaataaattgacggtctacaccacgttaattgacgttacgaagggacagtttgagacatatcttagagactgtcctgacccttgtattggatgg

SEQ ID NO: 17277 - DNA, 1185 bp, synthetic construct
  misc_feature 1..1185: note = source = /note="Description of Artificial Sequence: Synthetic coding sequence"
  source 1..1185: mol_type = other DNA
atgcccggacgcagttgcgtggccctcgtattgctagctgcggccgtgtcttgtgctgtggcgcaacatgcaccaccttggacggaggactgccgcaagtctacatacccaccatccggcccaacctatcgaggagccgtgccatggtatacaatcaacctggacttgcccccgtacaaacgctggcatgaactgatgttagataaagccccggttctgaaggtcatcgtgaactctttgaagaatatgataaacactttcgtgcctagcggtaagattatgcaagttgtggatgaaaaactgccaggtctgctcgggaactttcctggccctttcgaggaggagatgaaggggatcgctgccgtaacagatattcccctgggtgaaatcatcagtttcaacatcttttacgaactgtttaccatctgtacatccatcgtagccgaagacaaaaagggccacctcatccacggacggaacatggattttggggtgttcctaggctggaacatcaataacgacacctgggttatcacagaacagctcaagccactgaccgttaatctggatttccagcgcaacaacaagacagtgtttaaggcatcatccttcgccggctatgtggggatgcttacgggctttaagcccggtctgttcagcttgacgttgaacgaaagattctctatcaacggtggttatcttggtattctggagtggattctgggaaagaaggatgtcatgtggattgggtttctgacacgcactgtgcttgagaacagtacatcttatgaggaggccaagaatctgcttactaaaacaaaaatattggcacctgcctatttcatcctaggagggaaccagagcggagagggctgtgtgattacccgggaccgtaaagaatctctcgacgtttacgagcttgacgctaagcagggtcgctggtacgtggttcaaacaaactatgaccgatggaaacacccgttcttcctggatgaccgacgcaccccagcgaaaatgtgcctgaatcgcacatcgcaggaaaatatatccttcgagaccatgtacgatgtcttgtctacgaaacctgtgcttaataaactgacggtttatacgacactgattgacgtcactaaaggccaatttgagacgtatctgagggactgtcccgatccatgcattgggtgg

SEQ ID NO: 17278 - DNA, 1185 bp, synthetic construct
  misc_feature 1..1185: note = source = /note="Description of Artificial Sequence: Synthetic coding sequence"
  source 1..1185: mol_type = other DNA
atgcccggccgcagctgtgtagccctggtcctcctggctgcagccgtgtcctgcgcagttgctcagcacgcccccccatggacggaggactgtagaaagagcacatatccaccttcaggtccaacatatcgcggggccgtgccatggtatacaataaacctcgacctgcctccttacaaaagatggcatgaacttatgcttgacaaagctcctgtgctgaaagtgattgtgaacagcttgaagaacatgatcaacactttcgtcccttcaggcaaaattatgcaggtagtggacgaaaagttgccgggactgctggggaactttcccggcccattcgaagaggaaatgaagggaatcgccgccgttaccgatataccgttaggagaaatcatttcattcaacatattctatgagctttttacgatctgcacttctatcgtagcggaagacaagaagggacatctgattcacggtcgtaatatggacttcggcgtttttctggggtggaacataaataatgacacttgggtaatcaccgagcagttaaagccactgacagtgaatctggactttcagagaaacaataagaccgtctttaaagcatcttcgttcgccgggtatgtgggtatgctgactggattcaaacctggcctgttttcactgacactgaacgaaagattttcaatcaacggtggatacttgggcattttagagtggattctgggcaagaaggatgtgatgtggatcggatttctcacacgtactgttctcgaaaatagcacctcttatgaagaagccaaaaacctgctgaccaagacaaagattttggctcctgcctacttcattctcggggggaaccaatccggagagggctgcgtcatcaccagagaccgcaaggaaagcctggacgtctatgaactcgacgctaagcagggacggtggtatgtcgtgcagaccaactacgaccgctggaagcacccattttttctagacgacaggcggactcccgctaagatgtgtcttaataggacctcacaggagaatattagttttgagactatgtatgacgtgctatccaccaaacccgtccttaataagctgactgtgtacacaacgcttatcgacgtcacaaagggccaattcgaaacatatctgagagactgtccggacccttgcataggatgg

SEQ ID NO: 17279 - DNA, 1185 bp, synthetic construct
  misc_feature 1..1185: note = source = /note="Description of Artificial Sequence: Synthetic coding sequence"
  source 1..1185: mol_type = other DNA
atgcccggacgcagttgcgttgccctggtgcttctggcggctgctgtaagctgtgccgtggcacagcacgcccccccgtggacagaggactgccggaagagtacttatccccccagtggtccaacctatcgcggggccgtcccttggtacaccattaacctggaccttcctccctataagagatggcacgagttgatgctagataaggctccagttttaaaggtgatcgtaaacagtctgaaaaacatgatcaatactttcgtcccatctggtaagatcatgcaggtggtggatgaaaagttgccaggcctccttgggaacttccccgggcccttcgaagaggagatgaaggggatagccgctgtcactgatatcccactgggggaaatcatttcctttaatattttttacgaactctttaccatatgcacaagcattgtggctgaagacaagaagggacacctcattcacggcaggaatatggactttggagttttcttggggtggaatatcaataatgacacatgggtgatcactgaacagttgaagcctttgacagtaaatctcgatttccagagaaacaataaaacggtgttcaaggcctctagctttgcaggatacgtagggatgctgaccggcttcaagcccggtttgttctcactaactctgaacgagaggttttctataaacggggggtaccttggtatcttggaatggatcctggggaagaaggacgtaatgtggattgggtttctgacacggaccgttctggagaatagtaccagctacgaggaggcgaaaaacttactgactaaaaccaagattctcgcccccgcctatttcatactcggcggcaaccagagcggcgagggttgcgtgatcacccgggacaggaaggagagtctggatgtgtacgaattagatgccaagcagggcaggtggtacgtggttcagactaactacgatcgatggaaacatcctttctttctggacgatcggcggacccccgcgaagatgtgccttaaccgaactagtcaggagaacatctcttttgagaccatgtatgacgtgctcagcaccaagcccgtcctgaacaaactgaccgtgtatacaaccttgatcgatgtgaccaagggccagtttgaaacttatctacgggattgcccagatccgtgtattggctgg

SEQ ID NO: 17280 - DNA, 1185 bp, synthetic construct
  misc_feature 1..1185: note = source = /note="Description of Artificial Sequence: Synthetic coding sequence"
  source 1..1185: mol_type = other DNA
atgcccgggcgtagttgcgtcgctctggtattattggccgccgccgtttcttgtgctgtcgctcaacacgcgcctccttggacagaagactgccggaagtctacttatcccccatccggtcctacctatcggggagccgtgccctggtacaccattaaccttgatctgccaccatataagcgatggcacgaacttatgctggataaagcacccgtccttaaggtgattgtcaacagtctgaagaacatgatcaatacattcgttccatcagggaagatcatgcaggtggtcgatgagaagttgcctggcctattgggtaattttccaggcccattcgaggaggaaatgaagggtatagccgctgtgaccgacattcctctgggggaaattatcagcttcaacattttctacgaattattcacaatttgcacgagcatagtagccgaagataagaagggacatctcatccacgggaggaatatggacttcggcgtgttcttaggatggaacattaataacgatacatgggtgatcactgaacagctgaaaccactgacagtgaaccttgattttcagaggaacaataaaacagtattcaaggcgtcgtcattcgccggctatgtaggtatgctgacaggattcaaacccggcctattttcactgactttgaatgagagattctcaattaacggcggttatctgggaattctggagtggatattgggaaaaaaagatgtaatgtggatcgggtttctaactcgcactgtactggagaattctaccagttacgaagaggccaaaaaccttctgaccaagaccaagatcctggcgcctgcctatttcattcttggcggtaatcaaagcggcgagggatgcgtcatcactcgcgatagaaaggagagcttggatgtatatgagctggacgcgaaacaagggcggtggtatgttgtgcagacaaattacgacagatggaaacatccgttcttcctggatgaccgtagaactccagccaaaatgtgtcttaatcgcacgtcacaggagaacatctcttttgaaaccatgtacgacgtgcttagcaccaaaccagtgcttaataaactcactgtgtacacgacgctgatcgacgttacgaagggtcagtttgaaacctatttacgtgattgtccagatccttgtattggctgg

SEQ ID NO: 17281 - DNA, 1185 bp, synthetic construct
  misc_feature 1..1185: note = source = /note="Description of Artificial Sequence: Synthetic coding sequence"
  source 1..1185: mol_type = other DNA
atgcccgggaggagctgcgtggctctggtactgttggcagctgctgtgtcatgcgccgtggctcagcacgcccctccatggaccgaggactgtcgcaagagcacttaccccccatctggcccaacctatcggggcgccgtcccttggtatactatcaatctagatctaccaccctataaacgctggcacgagctaatgctggacaaggccccagttttaaaggttatcgtgaactctttaaagaatatgataaacacttttgtgcccagcggcaaaataatgcaagtcgtggatgagaaactaccaggcctcttagggaatttcccaggcccttttgaagaggaaatgaagggcatcgccgcagtgaccgacatccctctgggcgagattatcagcttcaacatcttttacgaacttttcacaatttgtacttccatagtggccgaggataaaaaagggcatttaattcatggccggaacatggatttcggagtgttcctaggctggaacatcaacaacgacacctgggtcattactgaacagttgaagcctctcactgtcaatttggatttccagaggaataataagaccgtgttcaaggcctcctcttttgcaggctacgtcggaatgcttacaggctttaagccagggctctttagtctcacactgaacgagcgattctctatcaacgggggttatttaggcattctggagtggatattggggaaaaaagacgtgatgtggatcgggttcttaacccgcacagtgttagaaaatagcacttcctacgaggaagctaagaacctgctgaccaagaccaagattttagctccagcatactttattctcggcggcaatcagtcaggcgaaggctgcgttatcacaagagaccgaaaagaatctctggatgtttatgagctggacgctaagcagggcaggtggtatgtcgtgcagaccaattatgataggtggaaacaccctttctttctggatgatcgcaggactcccgccaaaatgtgtctcaaccgcacatctcaggagaatatcagttttgaaactatgtatgatgtgctttctaccaagccagtgttgaacaagctgacagtttacacaactttaattgacgtcaccaaggggcaatttgagacttacctccgcgactgccccgatccctgcatcggctgg

SEQ ID NO: 17282 - DNA, 1185 bp, synthetic construct
  misc_feature 1..1185: note = source = /note="Description of Artificial Sequence: Synthetic coding sequence"
  source 1..1185: mol_type = other DNA
atgccagggcggtcttgcgtggccctcgtcctgctcgccgctgccgtttcttgcgccgtcgctcagcatgcgcctccatggacagaagattgtcgtaaaagtacataccccccatccgggcctacatacaggggagccgtgccttggtatacaatcaatctggatctccccccttataagcgctggcatgaactcatgctcgataaggcccccgtcttaaaagtcatagtgaattccctcaaaaatatgatcaatactttcgtgccttcagggaagataatgcaggtggtggacgaaaaacttcccggactgctgggaaactttcctgggccctttgaggaagagatgaaggggatcgctgcagtaacagatatccctttgggggaaataatctcttttaacatcttctatgaacttttcacaatttgtacttctattgtggcagaagataaaaaaggacaccttatccatgggcgtaatatggattttggagtttttttaggatggaacattaacaatgacacatgggtgataacagaacagctaaaacctcttactgtaaatctagattttcagagaaacaacaaaacagtgttcaaagcctcttcctttgccgggtatgtagggatgctaacaggattcaagccagggctgtttagtttaacacttaacgaaagattctctatcaatggggggtacctcggaatcctggaatggattttaggaaagaaagatgtaatgtggataggatttctcacacgcacagtcttagaaaattccactagttatgaagaagctaaaaacttgttgacaaaaactaaaatcttagcaccagcctatttcatcctggggggaaaccaatcaggggaaggatgcgtgataactagagatcggaaggaaagtctagacgtatatgagcttgacgcaaaacaggggcgttggtatgttgtgcagacgaactacgatcgatggaaacatccattctttcttgacgataggagaactccagccaagatgtgtctaaatcggacttcacaggagaatatttcatttgaaactatgtatgatgttctgtccactaagccagtgctgaataaacttactgtctatactacactcatcgatgttactaagggacagtttgaaacatatcttcgagattgccccgatccatgtataggatgg

SEQ ID NO: 17283 - DNA, 1185 bp, synthetic construct
  misc_feature 1..1185: note = source = /note="Description of Artificial Sequence: Synthetic coding sequence"
  source 1..1185: mol_type = other DNA
atgccgggccgcagttgtgttgccctggtgcttttggcagccgcagtgtcctgtgcggtagcacagcatgccccgccctggaccgaggattgccgcaagtccacttacccacctagcggccctacctaccggggcgccgtcccttggtacaccataaacctggacttgcctccatataaacgatggcacgaactgatgctggataaggctccagttctgaaagtgattgtgaactccctgaagaatatgattaacacttttgtgccgagcggcaagatcatgcaagtggttgacgagaagcttcccggactgctgggcaacttccccgggccctttgaggaagaaatgaaaggcatcgcggctgtgaccgacattcctctcggagagattatctcattcaatattttctacgaattgtttaccatctgcacttcaatagtggcggaggataaaaaagggcacttaatacacggtcgaaatatggacttcggggtgtttcttggctggaacataaataatgatacatgggtgatcacagagcagctgaagcccctgacagtgaacttggatttccagagaaataataagaccgtattcaaggcatctagcttcgcgggttacgtgggaatgctcaccggattcaaacctggcctgttttcccttaccctaaatgagcggttcagtattaacggtggatacctaggcatcctagaatggattcttggcaagaaggatgtgatgtggatcggcttcctcacaaggacggtcctcgaaaatagcacttcctacgaggaagccaagaacctactgacaaaaactaaaatcctggctcctgcatactttatcctgggcggcaatcaaagtggtgaggggtgtgtaatcactcgagaccgaaaagagtcccttgatgtttatgaactggacgccaagcagggccgctggtatgttgtgcaaacgaactatgatagatggaaacaccctttctttcttgatgatcgaaggaccccagcaaagatgtgcctgaaccggacaagccaagagaacataagctttgagaccatgtatgacgtgttgagtacaaagcctgtgttaaataagcttacggtatatacaacactgattgacgttacaaaaggccaattcgagacctatctccgagattgcccagacccttgcataggatgg

SEQ ID NO: 17284 - DNA, 1185 bp, synthetic construct
  misc_feature 1..1185: note = source = /note="Description of Artificial Sequence: Synthetic coding sequence"
  source 1..1185: mol_type = other DNA
atgccaggccgatcctgtgtggccctggtgttgctagccgccgctgtctcttgcgcagttgcgcagcacgcccccccatggactgaggactgtcggaagtcaacttaccctccttccggacctacttaccgtggcgcggtgccctggtataccatcaacctagacttacccccctacaaacgttggcatgaactcatgctcgataaagccccggtattaaaagtgatcgttaactccctgaagaacatgatcaatacctttgtcccatccgggaaaattatgcaggttgtggatgaaaaactgccgggcctgttggggaattttccaggcccattcgaggaggagatgaaaggcatcgctgccgtcacagatatcccgctgggcgagattatctcgtttaacattttttacgaactttttaccatatgtacctccatcgttgctgaagataagaaggggcaccttattcatggcagaaacatggactttggcgtgttcttaggctggaatattaataatgatacctgggttatcacggagcagctgaagccactcactgtgaacctggacttccagaggaacaacaagacagttttcaaggcctccagctttgcgggatacgtagggatgctgaccggctttaaaccaggcctcttctccctgaccctcaatgagagatttagtattaatgggggatacctgggtatcctggagtggatcctcgggaaaaaagacgtgatgtggatcgggttcttaacacggaccgtactggagaacagtaccagttacgaagaagctaagaacctgttgaccaaaaccaagatcctggcgcctgcatacttcatactcgggggcaatcaatcgggcgagggctgtgtcattacccgcgaccgcaaggaatctctggacgtttatgagctggatgcgaaacaaggaagatggtacgtggtgcagacgaattatgatcgatggaagcaccccttcttcctcgacgatcgccggactccggcaaagatgtgtcttaaccggacaagccaggagaatattagtttcgagaccatgtacgacgttctcagtaccaagccagtacttaataaattgacggtgtacacgacactgattgatgtcacaaagggccaatttgagacttatctaagagattgtccagatccctgtattggctgg

SEQ ID NO: 17285 - DNA, 1185 bp, synthetic construct
  misc_feature 1..1185: note = source = /note="Description of Artificial Sequence: Synthetic coding sequence"
  source 1..1185: mol_type = other DNA
atgccaggcaggtcgtgcgtggctcttgtccttttggccgcagcagtgtcgtgcgctgtggcacaacatgccccgccttggaccgaggattgtcgaaagtcgacctacccgccctctgggccaacctaccgtggggccgttccctggtatacaatcaacttggatttgccgccatataaaaggtggcacgaactgatgttagataaggcccctgtacttaaggtcattgtaaacagtcttaagaacatgatcaatacattcgtgccgtctggaaaaatcatgcaggtcgtcgacgaaaaactgcctggattactaggtaacttcccaggtccattcgaggaagagatgaaggggatagcggccgtaacggatatacctttgggggaaattatctcgttcaatatattctacgagttgttcacaatttgtacttccatcgtggcagaggataaaaaaggacatctaattcacggccgaaacatggatttcggagtgttcctaggatggaacataaacaatgacacatgggtcattaccgaacaactcaagcctttgaccgtaaatttggacttccaaaggaacaacaaaactgtgtttaaggcttcatctttcgccggatacgtagggatgctaacgggttttaaacccggacttttcagtttgacgctcaacgagagattttccattaatggcggctacctaggcatacttgagtggatcttgggtaagaaggacgtcatgtggattggtttcctgacccgtacggttcttgagaacagcacttcctacgaggaagccaagaacctgctgacaaaaacaaaaatattagctccagcgtacttcatcctgggcggaaatcagagcggcgagggctgtgttatcacgcgagaccgtaaggagtcacttgatgtctacgaattagatgcgaaacagggcagatggtacgtagtccagactaattatgaccggtggaagcaccccttttttctcgatgatcggagaactcccgcaaagatgtgtctgaaccgcaccagccaggaaaacatctctttcgaaaccatgtatgacgtcttgtcgaccaaaccagtattaaacaagctgacggtatatactacccttattgacgtaacaaaagggcaatttgaaacttacctacgagactgcccagacccatgcatcggttgg

SEQ ID NO: 17286 - DNA, 1185 bp, synthetic construct
  misc_feature 1..1185: note = source = /note="Description of Artificial Sequence: Synthetic coding sequence"
  source 1..1185: mol_type = other DNA
atgcccgggcggtcatgcgtggctttggtactcctggccgctgccgttagctgcgctgtggcacagcatgcccccccatggacagaggactgcagaaagagtacctaccccccaagcggaccaacctaccgcggcgcagtgccttggtatactatcaatcttgacttgcctccatacaagaggtggcacgagcttatgctcgataaagctccagtcttaaaagtgatagtgaattctctgaaaaatatgataaatacattcgtcccatctggaaagatcatgcaagtggtcgatgaaaaactccctggactgctgggaaacttccccgggccctttgaagaagagatgaagggaatcgcagcagtgactgacattcccttgggcgaaattattagtttcaacatcttttacgagctgtttactatttgtacctccatcgtggcagaagataaaaaggggcatctgatccatggaaggaacatggacttcggagtctttttgggctggaacatcaataacgacacctgggtaatcaccgagcagctaaaaccactcacagtcaacctcgactttcagagaaacaataaaaccgtgtttaaggccagcagctttgccggatatgtcggcatgctaaccggatttaaacccggactgttctcgctgacattgaacgagcggtttagtatcaacggaggctacttggggatcctcgagtggatcttggggaagaaggatgtcatgtggattgggtttctgacccgtacagtcctggagaacagcacgagttacgaggaggcgaaaaacctgctgaccaagacgaagatcctggcacccgcgtactttatccttggcggaaatcagtcaggagagggttgcgtcattaccagggatcgcaaagaatcccttgacgtttatgaactcgacgcaaaacaggggcgatggtatgtggtgcaaacaaactacgacagatggaagcacccgttttttctggacgacaggagaacccccgctaaaatgtgcctcaacaggaccagccaggaaaacataagctttgaaactatgtacgacgttctttcgacaaagcctgttctgaacaagctgaccgtttacaccacccttatagatgttactaagggccaattcgaaacttatctgagagactgccccgacccctgtattggttgg

SEQ ID NO: 17287 - DNA, 1185 bp, synthetic construct
  misc_feature 1..1185: note = source = /note="Description of Artificial Sequence: Synthetic coding sequence"
  source 1..1185: mol_type = other DNA
atgcccggccggtcgtgtgtagccctcgttctgctggccgcagccgtgagctgcgccgtggcacaacacgctcctccatggactgaggactgcagaaagtctacttaccccccaagcggtcctacctataggggcgcagtcccctggtatacaatcaatttggacctccctccgtacaagaggtggcacgagttaatgttagataaggcccccgtgctaaaggtgattgtgaatagtctgaagaacatgatcaatacctttgtgcctagcggaaagatcatgcaagtggtggacgaaaagctccctggcctgctcggaaatttccctgggccttttgaagaagagatgaaaggcatcgcagctgttactgatatccctctgggcgagattatatccttcaatattttctatgaactctttaccatctgcacatcaattgtggccgaagacaagaaggggcatttgattcacggccgaaatatggactttggcgtgtttctggggtggaatatcaacaacgacacatgggtcataaccgagcagcttaaacctctaaccgtgaacttagactttcagaggaataataaaacagtttttaaggcctcaagcttcgccggttacgtaggaatgctaaccgggttcaaaccaggtctcttctccctgaccctcaatgagaggttttctattaatggggggtaccttggtatcctggagtggattctgggtaagaaggatgtcatgtggatcgggttcctcaccagaacggtgctcgaaaattcgaccagttatgaggaagctaagaatctgctaaccaaaacaaagatccttgcacccgcgtactttattctgggcgggaaccaatctggagagggatgcgttattaccagagatcgcaaggaaagtctcgacgtttacgaactggacgcaaagcagggaaggtggtacgttgttcagaccaactatgataggtggaagcacccattcttcctggacgatcgccgaacacccgcaaaaatgtgtctgaataggacgtcacaggagaacatttcctttgaaacaatgtacgatgtgctgtcaactaagccagtactcaacaagctgacagtttacaccacgctcatagatgtcacgaaagggcagtttgagacatatctgcgggattgccccgacccttgcatcggatgg

SEQ ID NO: 17288 - DNA, 1185 bp, synthetic construct
  misc_feature 1..1185: note = source = /note="Description of Artificial Sequence: Synthetic coding sequence"
  source 1..1185: mol_type = other DNA
atgccggggcgatcctgcgtcgccttggtgctgctggccgcggccgtgagctgtgccgtcgctcagcacgctcctccatggacagaagactgcaggaaatcaacctaccctccctccggacccacttaccgaggggctgttccatggtatacgatcaacctcgatctgccaccatacaagaggtggcacgaactcatgctggataaggctcctgtcctgaaagttatagtcaattccctgaagaacatgatcaacacgttcgtgccgagcggcaagattatgcaagtcgttgacgagaagctgccgggcctattaggcaattttcctggcccgtttgaggaggagatgaaaggaatcgccgccgtgaccgacatcccgctgggtgaaatcatttcatttaatatcttttatgagctctttaccatatgcacctctattgtagccgaggacaagaaggggcatctgattcacggccgaaacatggacttcggcgtgtttttgggttggaacatcaataacgacacctgggtgattaccgaacaactgaagccactcactgtgaatcttgatttccagcgtaacaacaagacggtctttaaggctagctccttcgcgggctacgtgggaatgctgacagggttcaagccaggattgtttagcctgacgttgaatgagcgattcagtatcaacggggggtatctcgggatccttgaatggattttgggcaagaaggacgtcatgtggattggctttctcacccgaacagtcctggagaattcaacttcatacgaagaggcaaaaaacctcctgactaagaccaaaattttggctcctgcttacttcatccttggcggaaatcagtcaggcgaagggtgcgtgatcactagggatagaaaggaaagtttggacgtgtacgaactggacgcgaagcagggtcgctggtacgtggttcagacaaattacgatcgttggaaacacccgttcttcttggacgacaggcggactccagccaagatgtgcttgaaccgcacatctcaggagaatatcagctttgaaactatgtacgatgtgctgagcaccaagccagtactcaacaagctaacagtgtatactaccctgattgacgttacaaagggccaattcgaaacctatcttcgggattgtccagacccatgcatcggctgg

SEQ ID NO: 17289 - DNA, 1185 bp, synthetic construct
  misc_feature 1..1185: note = source = /note="Description of Artificial Sequence: Synthetic coding sequence"
  source 1..1185: mol_type = other DNA
atgccaggaagatcatgcgttgctctggtgctcctggcagccgcagtcagttgtgctgttgctcagcatgcgccaccttggacagaggattgcagaaaatcgacataccctcccagtgggcccacctacaggggagcagtgccctggtacacaattaacctggacctgcctccttataaacgctggcatgaactgatgttggataaagccccggtgctcaaagtaattgtgaactctttaaagaatatgatcaatacattcgtaccaagcggcaaaatcatgcaagtggtggacgagaagctgcccggactcctggggaatttcccagggcccttcgaagaggagatgaagggcatagctgcggtgaccgacatacctctgggtgagattatttcttttaacattttttacgagctgtttaccatttgcactagtattgtagcggaggacaaaaaaggccatctcatccacggtcggaatatggacttcggcgtgttcctggggtggaacattaataacgacacctgggtaataacggaacagctgaagcccctcacggtcaatctggatttccaaagaaacaataagaccgtttttaaggcttcctccttcgcaggctatgtgggcatgctgaccggctttaagcccggactcttctctttaaccctgaacgagcgcttctccataaatggcggatatctgggcatcttagaatggatcctcgggaaaaaggatgtgatgtggatcgggtttctcacgagaacagtgctggagaatagtaccagttatgaggaagcgaagaatctgctgaccaagacaaaaatactcgccccagcctattttattctcggagggaatcaatctggggaaggatgtgtgataacacgggaccgaaaggaaagtctggacgtgtacgaactcgacgccaagcagggcagatggtatgttgtacaaacgaactatgacaggtggaagcatcctttcttcctggacgatcgccgaacaccggctaagatgtgcctcaatcgaaccagccaggagaacatcagttttgaaactatgtacgacgtactgtccacaaagccagtattaaacaagctgactgtctacaccacactcatcgacgtgactaaggggcagtttgaaacatacctgagagactgtcccgatccgtgcatcggctgg

SEQ ID NO: 17290 - DNA, 1185 bp, synthetic construct
  misc_feature 1..1185: note = source = /note="Description of Artificial Sequence: Synthetic coding sequence"
  source 1..1185: mol_type = other DNA
atgcccggcagaagctgcgtagcgctcgtcctcctggccgcagctgtcagctgtgccgtcgcccagcacgccccaccttggaccgaggactgtagaaaatctacgtatccgcccagtggacctacgtaccggggcgcggtgccctggtacacaattaatctcgaccttccaccctataaacgttggcacgaattgatgttggacaaggcacccgtgctgaaggtcatcgtgaatagcttgaaaaacatgataaatacattcgttccctcaggcaaaattatgcaggtggtggatgaaaagctgccgggcctactgggcaatttccctgggccctttgaggaagagatgaaaggaattgctgctgtaacggacattccgcttggtgagataatttccttcaatattttctatgagctctttacaatctgtacctccattgtggccgaggataagaaaggacacttgatccatggccgcaatatggattttggggtgttccttggctggaacatcaacaatgatacatgggtgatcactgagcagctcaaacctttgacagttaatctggattttcagagaaataataaaacggtatttaaggcctcctctttcgcagggtatgtgggaatgctgactggttttaaacccgggctttttagcttaactctcaacgaacgtttcagcatcaacggaggctatctgggaatccttgagtggatcctgggcaagaaggatgtgatgtggattggtttcttaacacggaccgtgctggagaatagtacgtcgtacgaggaggccaaaaacctcctaaccaaaactaaaattctggccccagcttatttcatcttggggggcaaccagtctggagaaggctgcgtcattacgagagatcgcaaagaatcgctcgacgtctatgagctggatgctaagcaggggcgatggtacgtcgttcaaaccaactacgaccgttggaagcacccattctttctggatgatcgtaggactccagcaaagatgtgcctgaatagaacaagccaagaaaatatctccttcgagactatgtacgacgtcttgagtacaaagccagttttaaataagctgactgtctacacaacattgatcgatgtcacaaagggccaattcgagacctaccttagagattgccctgatccatgcatcggctgg

SEQ ID NO: 17291 - DNA, 1185 bp, synthetic construct
  misc_feature 1..1185: note = source = /note="Description of Artificial Sequence: Synthetic coding sequence"
  source 1..1185: mol_type = other DNA
atgccagggcgaagttgcgtcgcactggtattattagccgctgctgtttcatgtgctgtagcccagcacgctcccccatggacagaagattgtaggaaaagtacatatcctccctctggacccacatatcggggagcagtcccatggtatacaataaacttggatctccctccctataaaaggtggcatgaactgatgcttgataaagcacccgtcttaaaagtcattgtaaattccctgaaaaacatgatcaatacattcgttccatctggaaaaatcatgcaggtcgtcgatgagaaacttcccggactcctggggaattttcccggaccatttgaggaagaaatgaaggggatagccgcagttactgatatacctctcggagagatcatttcatttaatatattctatgaactctttacgatttgcacatctattgtggccgaagacaaaaaaggacatctcatccatggacggaacatggatttcggagtgttcttagggtggaatatcaacaatgatacatgggtgatcacagaacagcttaaacccctgacagtcaacctggattttcagcggaacaataaaacagtattcaaagcatctagtttcgctgggtacgtggggatgctcacagggttcaaacccggacttttcagtctaactctcaacgaacggttcagtattaacggaggataccttggaattcttgagtggatacttggaaaaaaagatgtgatgtggattggattcctgacacgtacagtactggaaaactctactagttatgaagaggcaaaaaacctcctaacaaaaactaaaatacttgctcccgcttattttatcctgggggggaaccagtccggagaaggatgcgtgattacgcgggaccggaaagaaagtcttgatgtttatgaactagatgccaaacaggggaggtggtatgtggtgcagactaactacgatcgatggaaacaccccttcttcctcgatgataggcgcacacctgccaaaatgtgcctcaacaggacaagtcaggaaaatatatcattcgaaacaatgtacgatgttctgagtacaaaacctgtcctaaacaaactcactgtatatacaacactcatcgatgtcacaaaggggcagttcgagacatatctcagagattgccccgatccctgcataggatgg

SEQ ID NO: 17292 - DNA, 1185 bp, synthetic construct
  misc_feature 1..1185: note = source = /note="Description of Artificial Sequence: Synthetic coding sequence"
  source 1..1185: mol_type = other DNA
atgcccggcaggtcttgcgttgctcttgtgctgctggcagccgccgtctcatgtgccgttgctcagcatgctcctccctggacagaggattgtcgtaaaagtacctacccccccagcggacctacctatagaggcgccgttccctggtatacgataaatcttgacctgcccccatacaaaaggtggcacgagctgatgttagacaaggcacctgtcctgaaggtgatagtaaacagcctaaagaatatgattaacacattcgtcccctcagggaaaattatgcaggtcgttgatgagaaattgcctggactcctgggtaacttccccggcccgttcgaagaagaaatgaagggaatcgccgccgtgaccgatatcccactcggggaaattatcagcttcaacatcttctacgagctgtttacaatatgcacatcaattgtggctgaggataaaaagggacacctgatacatggacgcaatatggattttggcgttttcctcgggtggaacataaataatgatacttgggtgatcacagaacagcttaagcctctgactgtgaatttggactttcagagaaataataagacagtgtttaaagccagttcattcgctgggtacgttggaatgcttacaggctttaaaccaggactgttcagtcttacattgaacgagcgctttagtatcaacggcgggtatctgggcatcctggagtggatcctcggtaagaaagatgtgatgtggatcgggttcttaactcggacagtgttggaaaacagcaccagttacgaagaagcaaaaaacctgctgaccaaaactaagattctcgctcccgcgtatttcattctcggtgggaaccagagtggagaagggtgtgttattactagggaccgaaaggaatccctcgacgtctatgaattggacgcaaagcaggggcgatggtatgtggtacaaaccaactacgacagatggaagcaccccttctttctggacgatcggcggacaccagctaagatgtgtctcaataggacatcccaggaaaatatcagctttgaaaccatgtacgacgtcctctcaaccaaacccgttttaaacaaactgacagtctacacaactctgattgacgtgaccaagggacagttcgaaacctatctgcgggattgccccgatccctgtatcggttgg

SEQ ID NO: 17293 - DNA, 1185 bp, synthetic construct
  misc_feature 1..1185: note = source = /note="Description of Artificial Sequence: Synthetic coding sequence"
  source 1..1185: mol_type = other DNA
atgccgggaagaagctgtgtagcgctggtgctgttggccgctgccgtgtcatgcgccgtggcccagcatgctccgccttggactgaggactgccggaagagcacctaccctccttccggccctacttatagaggggctgtcccatggtataccattaatctggacctcccaccctacaaacgatggcatgagctgatgctggacaaggcccccgtgttgaaggtgattgtgaattccctgaagaacatgatcaacacctttgttcctagcgggaaaataatgcaagtagtggatgagaagctgcccggactgcttggaaatttccctggcccttttgaagaagagatgaaaggtatcgcagcggtgactgacatccctcttggggagataattagtttcaatatattctatgaactgttcaccatttgcacctcaatcgtggctgaagacaagaaaggacacctcattcatggtcggaatatggacttcggtgtgtttttgggttggaatattaataacgatacctgggtgataacagaacagctgaagcccctgaccgtgaatctggacttccagcgaaacaataagaccgtctttaaagcatcttcatttgcagggtacgttggcatgctgaccggctttaaacccgggttgtttagcctcaccctgaacgagcggttctccatcaatggggggtatctcggcattctggaatggattctcgggaaaaaggatgtaatgtggataggcttcttgactaggacggtgctggaaaacagtacatcatatgaggaagctaagaatcttctgacaaaaactaaaattctggctccagcttacttcatcttgggggggaatcagagcggggagggctgcgtgattaccagggatcgcaaggaatcccttgacgtatacgagctggacgcgaaacagggacgctggtatgtagtgcagaccaactatgacagatggaagcatccgttctttctcgacgacagacggactcccgctaagatgtgtctcaatcggacctcccaggagaatatatcatttgagactatgtacgacgtgctgtccaccaagccagtcctcaataagctgactgtatacacgactctcatcgatgtgaccaaagggcaatttgagacttacctccgcgattgtcccgatccctgcattggatgg

SEQ ID NO: 17294 - DNA, 1185 bp, synthetic construct; identical to SEQ ID NO: 17262
  misc_feature 1..1185: note = source = /note="Description of Artificial Sequence: Synthetic coding sequence"
  source 1..1185: mol_type = other DNA

SEQ ID NO: 17295 - DNA, 1185 bp, synthetic construct
  misc_feature 1..1185: note = source = /note="Description of Artificial Sequence: Synthetic coding sequence"
  source 1..1185: mol_type = other DNA
atgccaggcaggtcctgtgtggctctggttctgctggccgccgcagtctcctgcgctgtagctcaacacgcaccgccttggactgaggattgccgcaagtctacctacccgccgagcggacctacatacaggggcgctgttccctggtacactataaacctcgatttgcccccttataaacgctggcacgagctcatgctggacaaggcacctgtcctcaaggtcattgtgaatagtctcaagaatatgattaacacattcgttcctagcggcaagattatgcaggtggtggatgaaaaactgcccggacttctgggtaattttcccggccccttcgaagaggaaatgaagggcatcgccgcagtgaccgacatccctctcggcgagataatttcattcaacatattttacgagctgtttactatctgcacctctatcgtggctgaggataaaaaaggccacctgattcatggtagaaacatggatttcggtgtgtttctcggatggaacattaataacgacacctgggttatcacggaacagttgaaaccactgacagtgaaccttgactttcagcgcaacaacaagacagtatttaaagcatcctcctttgcaggttatgtcggtatgttgacaggcttcaagccaggtctcttttccctgactttgaatgaaaggtttagcattaacggcggttatctgggcattctcgagtggatccttggcaaaaaggatgtgatgtggatcggttttcttacaaggaccgtcctggagaactcaacgtcttacgaggaggccaagaatcttctgactaagacaaagatcctggcaccggcatactttatcctcggtggcaatcagagcggagaaggctgcgttatcacccgcgacaggaaggaatctctcgacgtgtacgagctcgatgccaagcagggccgctggtacgtggtgcagaccaactacgatagatggaaacaccccttctttctggatgacaggcgcacacccgcgaagatgtgccttaacaggacgtcacaagagaatatatcttttgagacaatgtacgacgtcctgtcaactaagcctgtgctgaacaaattgacagtgtatactactctcatcgacgtgacaaaaggtcagtttgagacctacctcagagactgccctgacccctgcatcggttgg

SEQ ID NO: 17296 - DNA, 723 bp, synthetic construct
  misc_feature 1..723: note = source = /note="Description of Artificial Sequence: Synthetic coding sequence"
  source 1..723: mol_type = other DNA
atgtcgatgctgttctacacgctcatcaccgcttttctcattggaatccaggcagaaccgcacagcgaatccaacgtgccggcgggccataccatcccacaggcccattggactaaactgcagcatagccttgacaccgccctccggcgggcccggagcgccccagccgctgctattgcagcccgggttgctggacaaacccggaacatcaccgtggaccctagactgttcaagaagcgccggctgcggagccctcgtgtgttgttttcgacgcagccgccacgcgaagccgccgacactcaggatctggacttcgaagtgggaggcgcagcacccttcaatcggacccatagaagcaagcgaagctcatcgcacccaatctttcatcggggggagttcagcgtgtgcgactcggtgtccgtgtgggttggagataagacgaccgcgacggacatcaaaggcaaggaggtgatggtgctgggagaagtgaatatcaacaattcagtgttcaaacagtacttttttgaaactaagtgccgcgatcctaacccggtggatagcggttgccgcgggatcgattcgaagcactggaattcatactgcacgactacccacaccttcgtcaaggcgctcaccatggatggtaaacaagcagcttggcggttcatccgcattgatacggcctgcgtgtgtgtgctctcccgaaaagcagtgcggagggca

SEQ ID NO: 17297 - DNA, 723 bp, synthetic construct
  misc_feature 1..723: note = source = /note="Description of Artificial Sequence: Synthetic coding sequence"
  source 1..723: mol_type = other DNA
atgtctatgttattttacaccttaatcaccgccttcctgattggcattcaagctgaacctcacagtgaaagtaacgtgcctgcaggacatacgatccctcaggctcactggactaaactgcagcactccctggacactgccctgcggagagcacgatctgccccagccgcagcgatcgcagctcgggtcgcaggacagacacggaatatcacagttgatcctagacttttcaaaaagcggagactgaggtcgccgcgcgtcctgttttctacacaacccccccgggaggccgccgacacgcaggatttagatttcgaagtgggcggagccgctccatttaatcgtactcataggtcgaagagatcctcttcccacccaatatttcatcgtggggagttcagcgtgtgcgattcagttagtgtctgggtcggcgacaagaccaccgctacagacatcaagggcaaggaagtaatggtgctcggagaagtcaatatcaacaactccgtcttcaagcaatacttctttgagaccaagtgtcgcgatcccaaccctgtggacagtggatgtcggggaatagactccaaacactggaattcctattgcacaacaactcatacatttgtgaaagcgctgactatggacggaaagcaggcagcttggaggtttatacggatagacacggcctgcgtgtgcgtgttgtcacgtaaggctgtaaggagagct

SEQ ID NO: 17298 - DNA, 723 bp, synthetic construct
  misc_feature 1..723: note = source = /note="Description of Artificial Sequence: Synthetic coding sequence"
  source 1..723: mol_type = other DNA
atgtcaatgctgttctataccttgatcacagcttttctgataggcattcaggcagagcctcactcagaatccaacgtccctgcagggcacacgataccccaggcccattggactaaactccagcacagtctggatacagcactacggagagcgaggtcagcccccgccgccgccatagctgcccgggtggcaggacagaccagaaatatcactgtggacccacgcctcttcaaaaagcgaaggctgaggtctccccgcgtgttgttctccacccaaccgcctcgcgaagccgcagacactcaggatctggatttcgaagtcgggggcgctgctccctttaaccggactcataggagtaaacgctcttcttcccacccaatcttccataggggtgaattctcagtctgcgacagtgtgtccgtttgggtgggagacaagactaccgccacggatatcaagggcaaagaagtgatggtcttaggagaggtaaacattaataacagtgtattcaagcaatacttttttgaaacgaaatgccgggaccccaatccagtggacagcggctgccgaggtattgatagtaagcactggaattcatactgtacaactacacatactttcgtgaaggctctgactatggatggcaagcaagccgcatggcgtttcatccggattgacacggcttgcgtgtgtgtcctgtctcgcaaggcagtgaggcgggct

SEQ ID NO: 17299 - DNA, 723 bp, synthetic construct
  misc_feature 1..723: note = source = /note="Description of Artificial Sequence: Synthetic coding sequence"
  source 1..723: mol_type = other DNA
atgtcaatgttgttctacacgttgatcactgcctttttgatcggaatccaagccgagccacatagcgaatcaaacgtcccggcaggacatactatccctcaggcccactggaccaaattgcagcattcactggacaccgcactgagacgggcccggtcagccccagctgcagcaatcgccgcgcgggtggcaggtcagacccgcaacattaccgtggaccccagactctttaagaagcgcagactgcgcagcccgagagtgcttttcagcactcagccgcccagagaggctgccgatacccaagacctggactttgaagtgggcggggccgcccctttcaatcggacccatcggtcgaagcggtcctcgagccaccctatcttccatagaggcgaattctccgtctgcgattcggtgtccgtgtgggtcggagataagactaccgccactgacatcaagggaaaggaggtcatggtcctcggtgaggtgaatatcaataactccgtgttcaagcagtacttcttcgagactaagtgccgcgatcccaacccggtcgatagcggatgtcgaggtatcgactcgaagcattggaactcgtactgcacgactacccatacttttgtgaaggcgctgaccatggatggaaaacaagccgcatggcgctttattcggatcgatactgcctgtgtgtgcgtcctctccagaaaagccgtgagaagagct

SEQ ID NO: 17300 - DNA, 723 bp, synthetic construct
  misc_feature 1..723: note = source = /note="Description of Artificial Sequence: Synthetic coding sequence"
  source 1..723: mol_type = other DNA
atgagcatgctcttctatacccttataactgcattccttattggaatccaggcagaaccacattctgaaagcaacgtgccagcagggcataccattccacaggcccattggacaaagcttcaacactctcttgatacagcgctgagacgggcgaggagcgcccccgctgctgctattgctgcccgcgtcgccggacagaccaggaatattactgtagatccccgacttttcaaaaaacgaagattacgaagtccacgcgtgcttttttccactcaaccccccagagaagccgcagatactcaggaccttgatttcgaggttgggggtgccgccccttttaatcgtactcatcgttcaaagaggtcaagttcccatccaatttttcataggggagagttttctgtttgcgattccgtttcagtttgggtcggcgacaagaccaccgccacagatattaagggaaaggaggttatggttttgggtgaggtcaacatcaacaattccgtgtttaagcaatactttttcgaaaccaagtgtagggatccgaatcctgttgatagcgggtgtcgcgggatcgattctaagcattggaattcctactgcacaactacacatactttcgttaaggccctcacgatggacgggaaacaagctgcttggcggttcataagaatagacactgcttgtgtttgtgttctctccaggaaggccgtgaggagggct

SEQ ID NO: 17301 - DNA, 723 bp, synthetic construct
  misc_feature 1..723: note = source = /note="Description of Artificial Sequence: Synthetic coding sequence"
  source 1..723: mol_type = other DNA
atgtcaatgttattttatactcttataacagcattccttattggaattcaagcagaaccacattcagaatcaaacgttccagctggacatacaattccacaagcacattggactaaattacagcatagtttagatacagctcttagaagagctagaagtgcaccagcagctgcaattgcagctagagtcgcagggcaaacaagaaatataaccgtagatcctcgactttttaaaaagcgtagattacgttcacctagagtattattttctactcaaccaccaagagaagctgcagacacacaagatttagatttcgaagttggtggagcagctccatttaatagaactcatagatcaaaaagaagtagtagtcatcctattttccatagaggagaatttagtgtatgcgatagtgtatctgtctgggttggagataaaactactgctactgatataaagggaaaagaagtaatggtattgggtgaagtcaatattaataattcagtttttaagcaatattttttcgaaactaaatgtagagatccaaacccagttgattcaggatgtagaggaatagattctaaacattggaattcatattgtactactacacatacatttgtaaaagctcttactatggatggtaaacaagcagcttggagattcattcgtattgacactgcatgtgtttgtgtactttctcgtaaagcagtaagaagagct

SEQ ID NO: 17302 - DNA, 723 bp, synthetic construct
  misc_feature 1..723: note = source = /note="Description of Artificial Sequence: Synthetic coding sequence"
  source 1..723: mol_type = other DNA
atgtccatgcttttctacacgctcatcaccgcctttttgatcggaatccaggcggagccacactcggagagcaacgtcccagctggacacaccattcctcaagctcattggacgaaactccagcatagcctcgataccgccctgcgtagggcgaggagcgccccggccgctgcaatcgccgcacgcgtggcgggccaaacccgaaatatcacggtggacccgcgcctcttcaagaagaggcgcctgcggtccccgcgggtcctcttctcgacccagccacctcgcgaagcagccgacactcaagacctcgactttgaagtgggaggagccgccccctttaatcggacccaccgctctaaacgctcctcatcgcaccctattttccatcgaggagaattctcagtgtgcgattccgtctcggtgtgggtgggtgataagactactgcaaccgacatcaaggggaaggaagtcatggttctgggcgaggtcaacatcaacaactcggtgttcaaacagtatttcttcgaaaccaagtgcagagatccgaatccggtggactcaggctgcaggggcattgatagcaagcactggaactcgtactgtactacgacgcacacgttcgtgaaagccctgactatggacggaaaacaggctgcatggcgctttatcagaatagatactgcatgtgtgtgcgttctctcccgcaaggcggtgcgccgcgcg

SEQ ID NO: 17303 - DNA, 723 bp, synthetic construct
  misc_feature 1..723: note = source = /note="Description of Artificial Sequence: Synthetic coding sequence"
  source 1..723: mol_type = other DNA
atgagtatgctgttttatacactgattaccgcttttctgatcggcatccaagccgaacctcacagcgagagtaacgtgcccgccggacataccatcccacaagcacattggacaaagctgcaacatagcctagataccgccctgcggcgcgcccgctcagcaccggctgcggcaattgccgctcgagtggctggacaaacgcgcaatataactgtggaccccagactcttcaaaaagcggcggttgaggagccccagagtcctgtttagcacccagcccccacgcgaagcggctgatacccaggatctggactttgaagtgggtggcgctgcccctttcaatagaactcatcggtcaaagcggtcaagcagtcatccgatctttcaccggggagagttctcggtgtgcgattctgtaagtgtctgggtgggtgataaaactaccgctacagatattaagggcaaagaagttatggtgttgggagaggtaaacatcaataacagtgtgtttaagcaatattttttcgaaacaaaatgtagggaccccaacccagttgacagcgggtgcaggggaatcgactcaaaacactggaactcctactgtacaaccactcacacctttgttaaggccctgacgatggatggtaaacaagcagcttggagattcatccggatcgacaccgcttgcgtctgcgtgcttagtagaaaggccgtacgtagagca

SEQ ID NO: 17304 - DNA, 723 bp, synthetic construct
  misc_feature 1..723: note = source = /note="Description of Artificial Sequence: Synthetic coding sequence"
  source 1..723: mol_type = other DNA
atgtcgatgctgttctacacccttatcactgcttttttgattggcattcaggccgagcctcattccgaaagcaacgtccccgcaggccacaccatcccacaggcacactggacgaagctccaacactccttggacactgcgctccggcgcgcccgctcggcaccggcagcggccattgcggcgagagtggccggtcagactagaaatatcactgtggatccccggctgttcaaaaagcgtaggcttcggagcccgcgggtgctgttctcgactcagccgcctagggaggccgcagacactcaggacttggacttcgaggtgggtggagccgctccgttcaatagaacccacaggagcaagagaagctcctcccacccgatcttccatagaggagaattctcggtgtgtgattcggtgtccgtctgggtcggagacaagaccaccgccacggacatcaagggtaaggaagtgatggtgcttggagaggtgaatatcaataactcagtctttaagcagtacttttttgaaaccaagtgccgggatccaaacccggtggactccggctgtaggggaatcgattcaaaacactggaactcctattgcacgactactcacacttttgtgaaggcgttgaccatggacggaaagcaggcggcttggcgcttcattcggatcgacacggcttgcgtgtgcgtcctgtcgaggaaagccgtgcggagagca

SEQ ID NO: 17305 - DNA, 723 bp, synthetic construct
  misc_feature 1..723: note = source = /note="Description of Artificial Sequence: Synthetic coding sequence"
  source 1..723: mol_type = other DNA
atgagtatgttgttttatacattgattactgccttcctgatcggaatccaggcagagccccatagcgagtcaaacgttccagcaggacacacaataccccaggcccattggacaaaactacaacactcgctcgacaccgcattgagacgtgctcgctcggccccagccgcagctatcgccgctagggtggccggccagaccaggaatattacagtggaccccaggttgttcaaaaagcgtagactgcgctccccccgcgttttgttttcaacgcaacctcctcgggaagctgctgatacccaggatctggacttcgaagtcggaggggccgccccattcaatcgtacccaccgctccaagaggagttcctcccatccaatattccataggggcgaatttagcgtctgtgactctgtgtcagtttgggtgggggataaaaccacggctaccgatattaaaggcaaggaggtaatggtgctcggtgaggtcaatataaataattcagtgttcaaacaatattttttcgagacgaagtgcagggatccaaacccggtggactccggttgcaggggaattgatagtaagcattggaacagctactgtactaccacacacacttttgtcaaggccctgaccatggacgggaagcaggcagcctggcgtttcatccgtatcgacacggcgtgtgtgtgtgttctgagccgaaaagcagtgcgccgcgcc

SEQ ID NO: 17306 - DNA, 723 bp, synthetic construct
  misc_feature 1..723: note = source = /note="Description of Artificial Sequence: Synthetic coding sequence"
  source 1..723: mol_type = other DNA
atgagcatgctcttctatactctgatcactgcctttcttatcggtatacaagccgagcctcattccgagagcaatgtgcctgccgggcacaccataccacaggctcactggacaaaattgcagcactccctcgacaccgctctgcggcgagctaggtccgccccggccgcagccattgcagctagggtcgccggtcaaactcggaatattacagtcgaccctcggctatttaaaaagagaaggcttaggtctccacgtgttttattttctacacagcccccacgcgaagccgccgacacacaagacctcgacttcgaggtagggggagccgctcctttcaatcgcacacaccgctctaaaagaagttcaagtcatcccatctttcaccgcggcgagtttagcgtctgtgacagtgtgtctgtgtgggtcggagacaagaccactgccaccgacatcaaagggaaagaggtgatggtgttaggcgaagtgaacatcaacaatagcgtctttaagcagtatttctttgagacgaagtgccgcgacccgaatccggttgacagcggatgcagaggcatcgattccaaacactggaacagctattgcacaaccacgcatacgtttgtgaaagcccttacgatggacggtaaacaggctgcatggcgctttatacgcatcgacaccgcctgcgtgtgcgtgctgtcccggaaggccgtgcggagggct

SEQ ID NO: 17307 - DNA, 723 bp, synthetic construct
  misc_feature 1..723: note = source = /note="Description of Artificial Sequence: Synthetic coding sequence"
  source 1..723: mol_type = other DNA
atgagcatgcttttctatacgctgattaccgccttcctgattggcattcaggcagaaccacactcagagtccaatgtaccagctggtcatactattccccaagcccactggactaaactgcagcactctcttgacactgctctgcggagggctagaagcgccccagcagccgcaattgccgctcgcgtggcaggccaaacacgcaatataacagtggaccccagacttttcaaaaagcgaaggctgcgctctccacgcgttttgtttagcacacagcctccacgcgaggccgcagatacccaggacctggatttcgaagtgggtggagcagcgccgtttaatcgcacccaccggagcaaaagaagcagttcccatcccatttttcacaggggagagttcagcgtgtgcgattccgtgagcgtgtgggtgggagataaaactaccgctacagacattaagggtaaggaggtaatggtcctgggggaggtcaatattaacaactccgtgttcaagcaatatttcttcgagacaaagtgtcgcgacccaaacccagtagactcaggttgtcggggtatcgattccaagcattggaacagctactgtaccaccacccatacattcgtgaaagctctgacaatggacgggaaacaagcggcctggcggttcatccgcattgacaccgcgtgtgtgtgcgtgctgtcccgcaaagctgtgaggcgggcc

SEQ ID NO: 17308 - DNA, 723 bp, synthetic construct
  misc_feature 1..723: note = source = /note="Description of Artificial Sequence: Synthetic coding sequence"
  source 1..723: mol_type = other DNA
atgtcaatgttgttttacactctgatcactgccttcctcattggtatccaagctgaaccccactcagaatcgaacgtgccggccggccacaccatcccacaggcgcattggaccaagctgcaacactcgcttgacaccgccctcagacgcgcccgatcggccccagcggcagccattgcagcccgggtcgctggacagactcgcaatatcactgtcgacccaagactgtttaagaagcgcagattgcgttcgcctagggtgctgttttccactcaaccgccgcgggaagcagcagatacccaggatctcgacttcgaggtcggaggagctgctccgttcaataggacccatcggtccaaacgctcctcctcccacccgatattccacagaggagaattcagcgtctgcgattcagtttctgtgtgggtaggtgacaaaacgacggccaccgacattaaggggaaggaggtgatggtcctgggcgaggtgaacatcaacaactcagtgttcaaacagtatttctttgaaactaagtgtcgcgatcctaaccctgtggactctgggtgtcgcggaatcgacagcaagcattggaatagctactgcactaccacccacacgtttgtgaaggcgctcaccatggatggtaagcaggcagcgtggcggttcatccgaatcgacaccgcatgcgtatgcgtgctgtcccgaaaagctgtgaggcgggca

SEQ ID NO: 17309 - DNA, 723 bp, synthetic construct
  misc_feature 1..723: note = source = /note="Description of Artificial Sequence: Synthetic coding sequence"
  source 1..723: mol_type = other DNA
atgtctatgctcttttacaccctgattacggcattcctgatcggaatccaggccgagccacattcagagtcgaacgttccagccgggcacactatcccccaagcacattggaccaagctgcagcattccctcgacactgccctgcggcgagcccggagcgccccggcggctgctatcgccgcaagagtggcaggacagactagaaatattacggtggatcctagattgtttaaaaaacggcggcttcggtcgccgcgcgtcctcttcagcactcagccgccacgcgaggccgctgatacccaagacctcgactttgaagtcggaggggctgccccgttcaacagaacccaccggtcaaaacgctcatccagccaccctatcttccaccgcggcgaattctcggtctgtgattcagtctccgtgtgggtgggcgacaagaccaccgcgaccgacatcaagggaaaggaagtgatggtgttgggagaggtgaacattaacaattccgtgttcaagcagtacttcttcgaaaccaagtgcagggaccccaacccggtggattccggatgcaggggtatcgactcgaagcattggaattcgtactgtaccactactcacacttttgtgaaggccctgactatggatggcaagcaagcggcctggcgcttcatccgcatcgacaccgcgtgcgtgtgcgtcctgagccggaaagcagtccgtcgcgcg

SEQ ID NO: 17310 - DNA, 723 bp, synthetic construct
  misc_feature 1..723: note = source = /note="Description of Artificial Sequence: Synthetic coding sequence"
  source 1..723: mol_type = other DNA
atgtccatgctcttctacaccctcatcaccgcattccttattggcatccaggccgagccccacagcgagtctaacgtccccgctggccacaccattcctcaggcccactggacaaagcttcagcattccttggacaccgccctgaggcgcgcccggagcgcccccgccgccgcaatcgccgcgcgggtcgccgggcagacacggaatatcactgtggatccaaggttatttaagaagaggagattgaggagcccgagggtgttgttctccacgcagcctcctcgcgaggcagccgacacccaggacttggattttgaagtcggtggggccgcaccattcaaccgcactcaccggagcaagcgttcatcctctcacccaatttttcaccgaggcgagtttagtgtgtgcgatagtgttagtgtatgggtgggagacaagacaactgccacagatatcaaagggaaggaggtgatggtgctcggggaggtgaatatcaataacagtgtctttaagcagtactttttcgaaaccaagtgcagagacccaaatcctgtggattctgggtgcagagggattgactcaaaacattggaatagctattgtaccacaacacacaccttcgtgaaagcactgacaatggatgggaaacaggcagcctggagattcatccggatcgatacagcgtgcgtttgcgtgctctcccgaaaggccgtccggcgcgcg

SEQ ID NO: 17311 - DNA, 723 bp, synthetic construct
  misc_feature 1..723: note = source = /note="Description of Artificial Sequence: Synthetic coding sequence"
  source 1..723: mol_type = other DNA
atgtcgatgctgttttacactctgattacggcatttctcattgggattcaggcagagcctcactcggaaagcaatgtcccagcaggacatactattcctcaggcacactggactaagttgcaacattccctggataccgctcttaggagagcacgatccgccccagcagcagcaatagccgcaagagtggcaggacaaacccgtaacattactgtggatccccgtctgtttaagaaacgccggctgcgctccccccgcgtgttgttctccacccagccccctagagaagcagcagacacccaagacctggactttgaagttgggggcgccgcacccttcaatcgaacccaccggtccaagcggtcgtcgtcacatcctatctttcatcgtggtgaattttcggtgtgtgattcggtgtcggtgtgggtcggcgataaaactactgctacggacattaaaggaaaggaggtgatggtcttgggagaagtgaacatcaacaattccgtgttcaagcagtacttttttgaaactaagtgtcgggacccgaaccctgtcgactccggttgtcgaggaatcgactcaaagcattggaactcctactgtaccactacccacactttcgtcaaggcactgacgatggacggtaagcaagctgcatggagattcatccgaatagacaccgcatgtgtctgtgtgctctccaggaaagcggtgagaagagcc

SEQ ID NO: 17312 - DNA, 723 bp, synthetic construct
  misc_feature 1..723: note = source = /note="Description of Artificial Sequence: Synthetic coding sequence"
  source 1..723: mol_type = other DNA
atgtcgatgctcttttacaccttgatcacggccttcctgatcggaatccaggcggaaccacattcggagagcaacgttccagctggacacactatccctcaagcacactggactaaactgcaacattctctcgacacggcactgcgtcgagcacgatcggcaccagcagctgctattgcagctcgggtggcggggcaaacccgcaacattacggtcgaccctcggctgtttaagaagcgtcgccttcggtcgcctagagtcctttttagcactcagcccccgagagaggccgcggatactcaggacctggatttcgaagtgggaggcgctgcaccttttaaccgcacccatcggtcgaagcgttcctcgagccatcctattttccatcggggagaatttagcgtgtgcgactccgtgtccgtgtgggtgggtgataagaccactgcaaccgacattaagggcaaggaagtgatggtcttgggtgaagtcaacattaacaactcggtgttcaagcaatacttcttcgaaaccaagtgtagggatcctaatcccgtggattccggatgcaggggcattgattcaaaacattggaactcatactgtactaccactcatacgttcgtgaaggcactgactatggacggaaagcaggcagcatggcggtttatccggattgacaccgcatgtgtgtgtgtcctttcgaggaaagccgtgcggagagcg

SEQ ID NO: 17313 - DNA, 723 bp, synthetic construct
  misc_feature 1..723: note = source = /note="Description of Artificial Sequence: Synthetic coding sequence"
  source 1..723: mol_type = other DNA
atgtccatgctattctacacactgataactgcctttttgatcgggattcaggcagagccccacagcgaatccaacgtgccagccggccataccatcccacaagcccactggactaaactgcagcattctcttgacacggccctccgtagagccagatctgcgcccgccgcggctatcgctgctagagtggccggccagacacggaacatcactgtcgacccaaggctgtttaagaaacggcgcctccgatcaccacgggttctcttcagcacacaacccccccgggaggctgctgatacccaggacctggatttcgaagtaggtggggctgccccattcaacaggacgcaccgatccaaacggtcttcctctcaccctatatttcaccggggcgaattttctgtttgtgacagcgtgagtgtttgggtcggcgacaagaccaccgctactgatatcaaggggaaggaagtgatggtcctgggcgaagtaaatattaataacagcgttttcaaacaatacttttttgagacaaagtgtagggacccaaatcccgttgacagtggttgtcgcgggatcgatagtaaacattggaacagctattgcaccacgacccatacattcgtgaaagccctgacaatggatgggaaacaggccgcttggagatttatccgcatagacaccgcatgcgtgtgcgtgctgagcaggaaagccgtgcgtcgcgca

SEQ ID NO: 17314 - DNA, 723 bp, synthetic construct
  misc_feature 1..723: note = source = /note="Description of Artificial Sequence: Synthetic coding sequence"
  source 1..723: mol_type = other DNA
atgtccatgcttttctatacactgatcaccgcctttctaattggaattcaggccgaaccacactccgaaagcaacgttccagcgggccacacaatccctcaggctcactggacaaagctccagcatagtttagataccgcgctccgacgtgctcgcagcgccccagctgctgcgatagcagcacgtgttgctggtcaaactaggaatatcactgtggaccctagactgtttaagaagagacggttgcgctccccgcgggtgctattcagcacccagccaccccgggaagccgctgatactcaagatcttgacttcgaagttggtggcgcagctccattcaatagaacacacaggagcaagcgaagttcttcccatcctatcttccatcgcggagaattctctgtctgtgattccgtgagcgtgtgggtcggggataaaaccacagctaccgatattaaggggaaggaggtgatggtactgggtgaggtgaatatcaataacagtgtgttcaagcagtacttcttcgaaaccaaatgcagagaccccaacccagtggatagtggctgccgtggtattgacagtaagcactggaactcttactgcactaccacacatacctttgtgaaggcactcaccatggacggcaagcaggcagcatggaggtttatccgtatagatactgcctgtgtgtgtgtgctcagtagaaaagcagtgaggagagcc

SEQ ID NO: 17315 - DNA, 723 bp, synthetic construct
  misc_feature 1..723: note = source = /note="Description of Artificial Sequence: Synthetic coding sequence"
  source 1..723: mol_type = other DNA
atgagtatgctgttttacactcttatcactgcctttcttattggcattcaggcagagccacacagcgagtctaatgtcccagcaggccacactattccacaagcccattggaccaaattgcagcattcactggacactgcactcaggagagcgagatctgcccccgcggctgccattgcggccagggtggccggacagacccggaacataacggttgatcctcgattgtttaagaagcgccgcctccggtcccctagagtactgttttccacccaacctccacgagaagctgcagatacccaagatctggactttgaagtgggcggggcagctcctttcaaccgcacccatcgttcgaaaagatcatcgagccatcctatcttccatcgaggtgagttctctgtctgcgattccgtgtcggtgtgggtgggagacaagacgaccgccaccgacatcaagggaaaggaagtaatggtgctcggtgaagtcaatatcaacaactccgtctttaaacaatacttcttcgaaactaagtgtagggatccgaatccagtggattccggatgtcgcggtatagattcaaagcactggaactcgtactgtacgacgactcatacctttgtgaaggcacttacgatggatggaaagcaagcagcatggagatttatccggattgacactgcatgtgtctgcgtgctgagccgcaaagcagtgaggcgcgcg

SEQ ID NO: 17316 - DNA, 723 bp, synthetic construct
  misc_feature 1..723: note = source = /note="Description of Artificial Sequence: Synthetic coding sequence"
  source 1..723: mol_type = other DNA
atgtcaatgttgttttacaccctcatcaccgcgtttcttattgggattcaagcagaaccacattcagaatccaacgtgccggccgggcataccattcctcaagcacattggactaagctgcagcattcacttgatactgcactccggcgagctcgctctgcacccgcagcggcaattgcggcgcgcgtggcaggacaaactcggaacatcacggttgacccacggcttttcaagaagagacgcctgaggtcacctcgagtgttgttctccacccaacctcctagagaggcagcagatactcaagatttggactttgaggtgggcggagcggccccttttaaccgaacgcaccgtagcaagcgttcttcatcgcaccctatattccatagaggtgaattttccgtctgtgattcggtatcggtctgggtgggtgataagactacggccaccgacataaaagggaaagaagtcatggtgcttggtgaggtgaatatcaataactccgtgtttaagcagtacttttttgaaaccaagtgtcgtgaccctaatccggtggattcaggctgtagaggtatcgattccaagcactggaacagctactgcaccactacccacaccttcgtcaaagcactcaccatggatgggaagcaagctgcatggagattcattcgcatcgacacggcctgtgtgtgcgtgcttagccggaaggctgtccgtcgggca

SEQ ID NO: 17317 - DNA, 723 bp, synthetic construct
  misc_feature 1..723: note = source = /note="Description of Artificial Sequence: Synthetic coding sequence"
  source 1..723: mol_type = other DNA
atgagcatgctgttctacaccttgatcaccgcgttcctgatcggtatccaggcagaaccgcactccgaatccaacgtgccagctggacacactattccgcaagcgcattggactaaactgcagcattcgttggacactgcgcttcggcgagcccgctccgcaccggcagcagccatcgcggcacgcgtcgctggccagactcggaacatcaccgtggatccgcgcttgtttaagaagcggagattgcggtcgcctcgtgtcctcttctccactcagccgccaagggaggccgcggacacgcaggatctggatttcgaggtcggaggagccgccccgttcaatcgcacccataggtcaaaacgctcgtcgtcacatccgatctttcacaggggagaattcagcgtgtgcgactcagtcagcgtgtgggttggcgataagaccactgccacggacatcaaggggaaggaggtgatggtgttgggcgaagtgaatatcaacaactccgtgttcaagcaatacttcttcgagactaagtgcagagatccgaatcctgtggactcaggctgccggggaatcgactcgaagcattggaactcctactgcactactacccatacgtttgtcaaggcactgaccatggacggcaaacaagcggcctggcgcttcatccggatcgacactgcctgcgtctgcgttctgtccaggaaggcggtgcggcgggcc

SEQ ID NO: 17318 - DNA, 723 bp, synthetic construct
  misc_feature 1..723: note = source = /note="Description of Artificial Sequence: Synthetic coding sequence"
  source 1..723: mol_type = other DNA
atgtccatgctgttttacaccctgatcactgcattccttataggaattcaggccgaaccgcactccgaatcgaatgtgccagcgggacatactatccctcaggcacactggaccaagctccagcattccctcgacacggcgcttcggagagctcgctccgcccccgccgccgctatcgcagcgcgggtggccgggcagacccgcaatatcactgtcgacccaagactctttaagaagcggcggctccgctcacctagggtgctgttttccactcagccaccgagagaagctgccgatacccaggacctggattttgaagtgggcggagccgcaccattcaaccggactcaccggtctaaaagatcatcctcccatcccatcttccaccgaggagagttctcggtgtgcgactcggtgtcggtgtgggtcggagacaagactactgccaccgacattaagggaaaggaggttatggtgttgggcgaggtgaatatcaataactccgtgttcaaacaatacttctttgaaactaagtgcagagatccgaatcctgttgattcgggttgccgggggatcgacagcaagcactggaacagctactgcaccaccactcacaccttcgtgaaggccttgactatggacggaaagcaggcagcatggcggtttatccgcattgacactgcctgcgtgtgtgtgctctcgcgaaaggccgtgcgccgcgcc

SEQ ID NO: 17319 - DNA, 723 bp, synthetic construct
  misc_feature 1..723: note = source = /note="Description of Artificial Sequence: Synthetic coding sequence"
  source 1..723: mol_type = other DNA
atgtccatgctcttctacacgctgatcaccgcattcctgattggaatccaggctgagccacatagcgagtcgaacgtccctgcaggacacaccatcccgcaagcccattggactaagctccagcattcgctggacaccgcgcttcggcgagctagatctgcacctgcagcagcaatagccgcgcgcgtggcaggtcaaaccagaaatatcaccgtcgaccctaggctgttcaagaaacgccgactccgctcgccaagagtgctcttttccacccagccaccaagagaagccgcagatacgcaagatcttgatttcgaggtgggtggtgcggctccgtttaacagaacccataggtccaagagatcatcttctcatcccatttttcacagaggcgagtttagcgtatgtgattcagtcagcgtctgggttggagacaaaactactgcaactgacataaaagggaaggaagtgatggttctcggcgaagtgaacatcaataactcagtctttaagcagtactttttcgaaacgaagtgtcgggacccaaaccctgtggactcgggatgccgtggtattgattccaaacattggaattcctactgcacgaccactcatacttttgtcaaagcgctgacgatggatggcaaacaagcagcctggaggttcataaggattgataccgcatgcgtgtgtgtgctgagccggaaggccgtccgtcgggct

SEQ ID NO: 17320 - DNA, 723 bp, synthetic construct
  misc_feature 1..723: note = source = /note="Description of Artificial Sequence: Synthetic coding sequence"
  source 1..723: mol_type = other DNA
atgtcaatgctgttctacactctgatcaccgcatttctgatcggaatccaagcggaaccacacagtgagagcaacgtccctgcaggtcatactattcctcaggctcattggaccaaattgcagcattccttggacacggcgttgcgtagggcgcggtcagcaccagcggccgccatagcagcaagagtggctggtcaaactcggaacattaccgtagatcctcggctcttcaagaaacgccgccttagatcgcctcgagtgcttttctccacgcagccgccacgggaagcggcagacactcaagacctcgattttgaggtgggtggagccgctccattcaatagaactcatagaagcaaacgctcctcgagccatcccatttttcacagaggtgagtttagcgtgtgtgactcggtttctgtctgggtcggcgacaagaccaccgcaaccgatatcaagggaaaagaagtgatggttttgggggaagtgaacattaacaactccgtgttcaaacagtacttctttgaaactaagtgcagggatcccaatccggtggactccgggtgcaggggcattgattccaagcactggaacagctactgtaccacgacccatacgtttgtgaaggcacttaccatggatggtaaacaagcagcatggcgcttcattcggatcgatactgcttgtgtgtgtgttctgtcgaggaaggctgtgagacgggca

SEQ ID NO: 17321 - DNA, 723 bp, synthetic construct
  misc_feature 1..723: note = source = /note="Description of Artificial Sequence: Synthetic coding sequence"
  source 1..723: mol_type = other DNA
atgtcaatgttattttatactttgattacagcttttctgataggtatccaagcagaaccacattccgaatcaaatgtccctgctggacataccattccacaagctcattggactaagctacaacattcactggacactgcactaagaagagctagaagcgcaccggcagcggcaatcgccgcaagagtggcgggtcaaacaagaaatattaccgttgatccgcgtttgttcaaaaaacgaaggttgaggtccccgcgcgtcctcttcagcacgcagcctccaagagaagctgcagatacgcaagatttggattttgaagtcggaggagctgctccgttcaatagaacacaccgttctaagcgttccagttcacatcctatcttccataggggagaattttcagtttgtgactctgttagtgtatgggtgggagataaaacaacagcaacagacattaaaggcaaagaggtaatggtcctcggcgaggttaatatcaataactcagttttcaagcagtacttctttgagactaagtgtcgtgatccaaatccggtcgattcaggttgcagaggcattgatagtaaacattggaattcatactgtaccaccacccatacctttgttaaggcactcacaatggatggtaaacaagctgcgtggaggttcattcgtattgatactgcatgcgtctgtgttttatccagaaaagctgtcaggagagct

SEQ ID NO: 17322 - DNA, 723 bp, synthetic construct
  misc_feature 1..723: note = source = /note="Description of Artificial Sequence: Synthetic coding sequence"
  source 1..723: mol_type = other DNA
atgtcgatgctattctatacactgattaccgcattccttattgggatccaggcggagccacacagtgagtctaacgtgccagcgggtcacacaattccacaggcccactggaccaagctccaacactctttggacaccgcccttaggcgggcccggtctgcaccggcggccgctatagcggcccgagtcgctggccaaacacgcaatattaccgtcgatcccagattgtttaagaagcgccggttgcggagccctcgggtgctgttctccacccagcctccacgcgaagcagctgatacccaagatcttgatttcgaggtcgggggggccgctcccttcaaccggactcacagatcgaaacgaagttcatctcaccccattttccaccgtggtgaattttctgtttgcgacagcgttagcgtgtgggtgggcgataagacaactgccacagatattaaaggaaaagaagtgatggtactgggagaggtaaatattaataactcagtgtttaaacagtatttttttgagacaaaatgcagagatcctaatccagtcgactccgggtgtcgggggatcgactccaagcattggaattcctactgtacgactactcacacatttgttaaggccctcacgatggacgggaaacaagccgcgtggcgttttatacggatagacacggcctgtgtctgcgtcctaagccgaaaggcagttcgacgggct

SEQ ID NO: 17323 - DNA, 723 bp, synthetic construct
  misc_feature 1..723: note = source = /note="Description of Artificial Sequence: Synthetic coding sequence"
  source 1..723: mol_type = other DNA
atgtcaatgctgttttacaccctcatcaccgcgttcctgattggtatccaagcagaacctcactccgaatcaaacgtccccgcgggtcacacgatcccacaggcacattggactaagttgcaacatagcttggatactgcacttcggagagcacgaagcgcaccagcagccgcaatcgcagcaagggtggccggacagacccgaaacattactgtggaccctcggcttttcaagaaaaggagactgcgcagccctagagtgttgttttcgacccaacctccaagagaggcagcagacacccaggacctggattttgaggttggcggtgccgcacctttcaatcggactcatcgttccaagagaagcagcagccatcctatctttcacagaggagagttttcggtgtgtgactcagtcagcgtttgggtcggggataagaccaccgccactgacataaaagggaaggaagtgatggtgcttggagaagtgaacattaacaactcggtgttcaaacaatacttcttcgagacgaaatgccgcgatccaaaccctgtcgattcgggatgtcgaggaatagactcgaaacattggaactcatactgcaccactacccatacctttgtcaaggcccttaccatggacgggaaacaagcagcctggcgatttatcaggattgataccgcgtgtgtgtgtgtgctgtcccgcaaggcggtgcggagagcc

SEQ ID NO: 17324 - DNA, 723 bp, synthetic construct
  misc_feature 1..723: note = source = /note="Description of Artificial Sequence: Synthetic coding sequence"
  source 1..723: mol_type = other DNA
atgtcaatgctgttttacacccttatcaccgcatttctgataggcatccaggctgagcctcactccgagagcaacgttcctgcgggacataccatacctcaagcgcattggactaagctccaacattcattggataccgcgctgcgacgcgccagatcggcaccagccgcagcaattgccgcgcgggtcgcagggcagaccagaaacatcactgtggatccacgtcttttcaagaaaaggaggctgaggtcgccaagggtgctgttctcgactcagcctccaagagaagcagcagatacccaagaccttgactttgaggtgggaggtgcggccccctttaatcgaacccatcgttccaagcgaagctcgtcgcaccccatcttccataggggagagttttcagtgtgtgattccgtttccgtgtgggtgggtgataaaactactgccaccgacatcaagggtaaggaagtgatggttcttggcgaagtgaacattaacaactcggtgtttaagcaatacttttttgaaaccaaatgcagagatcctaaccccgtggatagcgggtgtcggggcattgattcgaaacattggaattcatactgcaccaccacccacaccttcgtcaaggctctgacgatggatggtaaacaggcagcatggcgttttatcagaatcgatactgcatgcgtgtgcgtgctcagtcgtaaggccgtgagaagagca

SEQ ID NO: 17325 - DNA, 723 bp, synthetic construct
  misc_feature 1..723: note = source = /note="Description of Artificial Sequence: Synthetic coding sequence"
  source 1..723: mol_type = other DNA
atgtcgatgctattttatacgttaataacggcgtttttaataggtatacaagcggaaccgcattcggaatcgaatgtaccggcgggtcatacgataccgcaagcgcattggacgaaactacaacattcgttagatacggcgctacgtcgagcgcgatcggcgccggcggcggcgatagcggcgcgagtagcgggtcaaacgcgtaatataacggtagatccgcgtctatttaaaaaacgtcgtttacgatcgccgcgtgttctattttcgacgcaaccgccgcgtgaagcggcggatacgcaagatttagattttgaagtaggtggtgcggcgccgtttaatcgtacgcatcgttcgaaacgttcgtcgtcgcatccgatatttcatcgaggtgaattttcggtttgtgattcggtttcggtatgggtaggtgataaaacgacggcgacggatataaaaggtaaagaagttatggttctaggtgaagttaatataaataattcggtttttaaacaatatttttttgaaacgaaatgtcgagatccgaatccggtagattcgggttgtcgaggtatagattcgaaacattggaattcgtattgtacgacgacgcatacgtttgtaaaagcgttaacgatggatggtaaacaagcggcgtggcgttttatacgaatagatacggcgtgtgtatgtgttttatcgcgtaaagcggtacgtcgtgcg

SEQ ID NO: 17326 - DNA, 723 bp, synthetic construct
  misc_feature 1..723: note = source = /note="Description of Artificial Sequence: Synthetic coding sequence"
  source 1..723: mol_type = other DNA
atgtccatgcttttctacactctcatcaccgcattcctgatcgggattcaggcagagccgcactccgagtcaaacgtgccagcgggccatactataccgcaggcgcattggaccaagctccaacactcactggacaccgctctgcgtagagccagatcagctcccgcggccgcgatcgctgcgcgcgtggccggacaaacccgcaacattactgtggatcctagactgttcaaaaaacgcaggttgcgctcgccaagagtccttttcagcactcagccccctcgcgaagctgctgacactcaggatctggatttcgaagttgggggtgccgcaccgtttaacaggacccaccgttctaagcgcagctcgagccacccaatctttcacagaggagagttcagcgtgtgcgactcagtctcggtgtgggtgggagacaaaaccactgcgaccgacattaagggaaaggaagtgatggttctcggggaagtgaatatcaacaactccgtctttaaacaatacttcttcgaaaccaagtgtcgggatcctaatccggttgactccggatgccgaggcatcgactcgaagcattggaattcctactgcaccaccacccacactttcgtgaaggcgctgacgatggatgggaagcaggccgcttggaggttcatcagaatcgatacggcctgtgtctgcgtcctgtcccgcaaggccgtgcgacgcgcg

SEQ ID NO: 17327 - DNA, 723 bp, synthetic construct
  misc_feature 1..723: note = source = /note="Description of Artificial Sequence: Synthetic coding sequence"
  source 1..723: mol_type = other DNA
atgtccatgttgttttacaccttgatcactgcattcttaattgggattcaggccgagcctcacagtgaatctaacgtgcccgcagggcacactattcctcaggcacactggacgaaactacagcattctctcgatacggccttacgcagggcacgctccgctcccgctgccgctattgctgctcgggttgcaggccagacgaggaatatcactgtagacccccgtttatttaagaaaaggagattgaggtctcctagagtcttatttagtactcagccccctagggaggccgctgacacacaagacctcgactttgaagtgggaggggctgctccatttaaccggacacacagaagtaagaggtcaagtagccaccctatattccaccgcggagagttctcagtgtgtgatagtgtgagtgtgtgggtgggtgacaagaccaccgctactgatataaagggaaaggaggttatggtgctgggagaggtgaatataaacaattccgtgttcaagcagtacttttttgagactaaatgcagagatccaaatccggtggatagcggctgccgcggcatcgatagcaaacactggaacagctattgtacaacaacgcacacatttgtgaaggccctgaccatggacggaaaacaggctgcttggagatttattcgaattgatacagcttgtgtgtgtgtcctgtcaagaaaggccgtgcggcgagcc

SEQ ID NO: 17328 - DNA, 723 bp, synthetic construct; identical to SEQ ID NO: 17298
  misc_feature 1..723: note = source = /note="Description of Artificial Sequence: Synthetic coding sequence"
  source 1..723: mol_type = other DNA

SEQ ID NO: 17329 - DNA, 723 bp, synthetic construct
  misc_feature 1..723: note = source = /note="Description of Artificial Sequence: Synthetic coding sequence"
  source 1..723: mol_type = other DNA
atgtcaatgttgttttatactttaattaccgcgtttctcattggcattcaggccgagccgcattctgaatccaacgtgcctgcggggcacacaatcccccaagcgcactggactaaactacagcattctctagacacggccttgcgacgggcccggagtgcaccagccgcggccattgctgctcgcgtcgccggccagacaaggaacattactgtggaccccaggctcttcaagaagaggcggctgcgttcaccacgggtcctattcagtacccagccccccagggaggctgccgatacccaggacctagacttcgaagttggcggggctgcgccatttaaccgcacacacagaagcaaacggagtagttcgcatcctatcttccacaggggagaattttctgtgtgtgattccgtgagtgtatgggtgggggacaagaccacagccactgacattaaagggaaggaagtgatggtattgggtgaagtcaacattaataactctgttttcaaacagtatttttttgagacgaagtgccgcgacccaaatccggtggattcaggctgtcgcggtattgactcaaaacattggaacagctactgcactaccacacacacatttgtgaaggctttgaccatggacgggaagcaggctgcctggcgcttcatacgaatcgacacagcgtgtgtatgcgtcctgagtaggaaagcagtccggagagcc

SEQ ID NO: 17330 - DNA, 723 bp, synthetic construct
  misc_feature 1..723: note = source = /note="Description of Artificial Sequence: Synthetic coding sequence"
  source 1..723: mol_type = other DNA
atgagcatgctcttctacactttgatcaccgcgtttttaattgggattcaagctgaaccccactccgagtctaatgtgcctgcaggtcataccatcccgcaagctcactggacgaagttacagcactcgttggatacggccctccgcagggcccgctcggcaccggcagcggcgatcgccgcgagggttgctggccagacgagaaacattaccgttgacccacgactcttcaagaagaggcgacttcgctctccccgggtcttgttcagtacacaacctccaagggaggccgcggatacacaggacttggacttcgaagtaggcggtgccgctccctttaaccgtacgcaccgttccaaacggtcaagctcccatccgatcttccatcgcggtgaattctcagtttgtgatagtgtctcggtttgggtcggagataagaccacggcgacggacattaaaggaaaggaggtgatggttcttggggaggtgaacatcaacaactccgttttcaaacaatatttttttgagacgaagtgccgcgaccccaatcctgtggacagcggatgccggggaattgacagtaagcattggaattcctattgtacgactactcataccttcgtgaaggctctgaccatggatggcaagcaggccgcctggcgattcatccgtatcgacaccgcctgtgtgtgtgtgctgtcgcggaaggcagtgcgaagagca

SEQ ID NO: 17331 - DNA, 723 bp, synthetic construct
  misc_feature 1..723: note = source = /note="Description of Artificial Sequence: Synthetic coding sequence"
  source 1..723: mol_type = other DNA
atgagtatgttgttctataccttaataacagcattcctcattggcatacaggccgagccccactctgagtccaacgtccccgcaggacacacaatcccacaagcccattggacgaaactgcaacactccttggacactgcactgcggcgggctcgtagtgcacccgctgctgcaatagctgctagagtggctggccagacacgtaacatcaccgtggatcccaggctgtttaagaaaaggcgactaaggtcccctcgggtcctcttctcaacccaaccccctcgggaggcggcagatacacaagatctcgattttgaggtgggcggtgcagctcccttcaacagaacccaccgctcgaaacggagttccagccatcctatttttcacaggggtgagttcagcgtctgcgactctgtaagcgtgtgggtaggcgacaaaaccactgcgaccgacataaaaggaaaagaggtcatggtgcttggcgaagtcaatataaataacagcgtgtttaagcagtacttctttgaaactaaatgccgggaccctaatccagtggattcaggttgtcgcgggatagactctaaacactggaacagctactgcacaacgacccatacctttgtaaaggcccttactatggatggaaaacaggcagcttggcgctttattcgcattgacacggcttgcgtctgcgtgctctcacggaaggcagtccggcgagcg

SEQ ID NO: 17332 - DNA, 723 bp, synthetic construct
  misc_feature 1..723: note = source = /note="Description of Artificial Sequence: Synthetic coding sequence"
  source 1..723: mol_type = other DNA
atgagcatgttgttttataccctcataacggccttcctgattggcatccaggcagagccccacagtgagtcaaacgtgcctgccggacacacaatcccacaggcacactggacaaaattgcaacatagcctggataccgcccttcgaagagcgcggtctgcaccagcagccgcaattgccgctagagtggccggccagactaggaatatcaccgtggatccacggctgttcaagaagcgaaggctacgaagtccacgtgtacttttcagtactcagcctcccagggaagccgcagacacccaggacctagatttcgaggtggggggggccgctcccttcaaccggacgcacaggtcaaaaagatctagcagccaccctatatttcaccgaggggaattcagtgtgtgtgactccgtctctgtctgggtgggcgataagaccactgcaacagacatcaagggtaaagaggtgatggtcctgggtgaggtcaatatcaacaacagcgtgtttaaacagtattttttcgaaactaagtgccgagatcctaacccagttgattccggctgcaggggtatcgatagcaagcattggaactcatattgcacaaccactcacacttttgtgaaagctctgaccatggatggtaagcaggccgcctggcggttcattcgaatcgatactgcttgcgtatgtgttttgagcaggaaagcagtgcggcgggcg

SEQ ID NO: 17333 - DNA, 723 bp, synthetic construct
  misc_feature 1..723: note = source = /note="Description of Artificial Sequence: Synthetic coding sequence"
  source 1..723: mol_type = other DNA
atgtccatgctcttttatacactgatcaccgctttcttgatcggcatacaggcggaacctcacagcgaatctaacgtgcctgctgggcacactatccctcaggctcattggaccaagctgcagcactctttggacacagctcttaggagggccaggagcgcaccagctgctgctattgccgcacgggttgccggacagacccgtaatatcacagtggatccccgactctttaagaagagacggttaaggtctcccagggtccttttcagtacccagcccccgagagaagctgcagatactcaggacctggacttcgaagttgggggagccgcaccattcaacagaacccaccggagcaaaagatccagctcccaccctatttttcatcgaggggagttttcagtgtgtgactccgtctccgtgtgggtgggcgataaaactactgctaccgatatcaagggcaaggaggtaatggtgcttggggaggtcaatataaacaacagcgtgtttaagcagtactttttcgagaccaagtgcagagaccccaaccctgttgattccgggtgccgcggcattgacagcaagcattggaatagctactgcacaacaacacatacctttgtaaaggctctgacaatggatggtaagcaggcagcctggagatttatacggattgataccgcttgcgtgtgcgtgctcagccggaaagcagttagacgcgcc

SEQ ID NO: 17334 - DNA, 723 bp, synthetic construct
  misc_feature 1..723: note = source = /note="Description of Artificial Sequence: Synthetic coding sequence"
  source 1..723: mol_type = other DNA
atgagcatgctgttctacaccctgataaccgccttcttaattggcatccaagccgagccccacagcgaaagtaatgtaccggccggtcacaccataccccaagcgcattggacgaaactgcagcactctctggacacagctctgcgccgagcccgttctgctcctgcggcggctattgctgcccgggtcgccggacaaacacgcaacattaccgtcgatcccagactctttaagaagcgaaggctgcggagccccagggtcctattttcaactcagcccccaagggaggccgccgatacccaagacctggatttcgaggtgggtggggctgcgcctttcaatcgaacacacagaagcaaaaggtcaagctcacatcccattttccatcgaggcgaatttagcgtctgtgatagtgttagtgtctgggtcggcgacaagactacagccacagatatcaaggggaaggaggtgatggttctgggcgaggtgaatataaacaattctgtgtttaaacagtatttctttgaaacgaagtgccgggaccccaatcctgtcgactctggctgtcggggcattgatagcaagcattggaactcctactgcacaaccacacatacgttcgttaaggctttaactatggatggtaagcaggcagcctggcgatttattcggatcgacaccgcttgcgtatgtgtgctatctaggaaagccgtgagacgagcc

SEQ ID NO: 17335 - DNA, 723 bp, synthetic construct
  misc_feature 1..723: note = source = /note="Description of Artificial Sequence: Synthetic coding sequence"
  source 1..723: mol_type = other DNA
atgtcgatgcttttctacactttgatcaccgcgttcctcattggaattcaggcagaaccgcattccgagtccaacgtacctgcgggccatactattccccaggcccactggactaaactgcaacattccctggacaccgcactgcggcgcgcacggtccgccccagccgcagcaatagccgcacgcgtggcaggtcagacccgcaacataactgtggaccctcgtcttttcaagaaacggagactccggtcgccccgggtgctcttcagcactcagccaccccgtgaagcggcggatactcaagatctcgactttgaagtgggaggggcagcaccttttaacaggacgcatagatccaagagatcctcgtcacaccccatctttcatcgaggagaattttcagtttgtgattctgtgtccgtgtgggtgggtgataagacgacggcaactgatatcaagggtaaggaggtcatggtgctcggagaggtcaacattaacaactcggtctttaagcaatacttttttgaaaccaagtgtcgcgatccaaaccctgtcgatagcggttgtagaggtattgatagcaaacattggaactcgtactgtaccaccactcatacctttgtgaaagctctcactatggacggaaagcaagcggcatggcggtttatcagaatcgacaccgcatgtgtgtgtgttttgtcccgaaaggccgtccggagggca

SEQ ID NO: 17336 - DNA, 723 bp, synthetic construct
  misc_feature 1..723: note = source = /note="Description of Artificial Sequence: Synthetic coding sequence"
  source 1..723: mol_type = other DNA
atgtctatgctgttctacaccctgatcacggcctttctgatcggaatccaggcggaaccacactcagagagcaatgtcccagcagggcatactataccgcaggcacactggaccaagctgcagcattccctcgacactgccctgagacgggcccggtccgcgcccgcggccgccatcgccgcccgggttgccggccaaactcggaacatcaccgtcgacccccggctgttcaagaagcggcgactgagatcgccgcgggtgttgttctcgacccagccgccgcgggaggccgctgatacccaagatctggatttcgaagtgggaggagcagcacctttcaaccgcacccaccggtccaagagatcatcctcacacccaatctttcatagaggagaattctcggtgtgcgactcggtcagcgtgtgggtgggagataagacgaccgcgaccgatatcaaaggaaaggaggttatggtgctcggcgaagtgaatatcaataacagcgtgtttaaacaatacttcttcgagactaagtgccgggacccgaatcccgtggatagcggatgccgcgggatcgattcgaagcattggaactcatactgcactactactcacacgttcgtaaaggctttgactatggatggaaaacaagctgcttggagattcatccggatcgacaccgcctgtgtctgtgtgctctcccgcaaagcagtgcggcgagcc

SEQ ID NO: 17337 - DNA, 723 bp, synthetic construct
  misc_feature 1..723: note = source = /note="Description of Artificial Sequence: Synthetic coding sequence"
  source 1..723: mol_type = other DNA
atgtccatgctgttttacactctgattacagccttcctaatcggcatccaggcagaacctcatagtgagtctaatgtccccgcaggccacacaataccacaggctcattggactaagttgcagcattccctggacacagcattgaggagagctcgctctgccccagctgccgctatagccgcaagagtggcaggtcaaaccaggaatattacggtggacccccgcctttttaagaagagaaggttgcgaagtccaagggtgctgttctccacacagcctccacgggaggccgccgatacgcaggacctagacttcgaagtgggaggtgccgcccccttcaacaggacgcaccgttctaagcggagttccagtcatcctatattccacaggggggaatttagtgtctgcgacagtgtatctgtatgggtcggcgataagaccactgccaccgacatcaagggcaaggaggtaatggtgcttggggaggtaaatattaataacagcgtttttaaacagtacttctttgagaccaaatgccgcgatcccaatcccgtcgattctggttgtagaggcattgacagtaagcattggaattcttactgtacgacaacccatacgtttgtcaaggctctgaccatggacggtaaacaagccgcttggcggtttatcagaatcgacacagcctgcgtgtgtgtcctttctaggaaggcagtccgcagggcc

SEQ ID NO: 17338 - DNA, 723 bp, synthetic construct
  misc_feature 1..723: note = source = /note="Description of Artificial Sequence: Synthetic coding sequence"
  source 1..723: mol_type = other DNA
atgtcgatgcttttctataccctcataaccgcttttctgataggcatccaagccgagcctcattcggagtccaatgtgccagcgggtcataccattcctcaagcccactggaccaaattgcaacacagcctcgacaccgccctgcgcagagcaagatccgcgcctgcagcagctatcgccgctagggtcgccggacaaactaggaatatcaccgtggatcctcggctctttaagaaaagacgattgcgatctcctcgagtcctgttttcgacccagccaccacgggaagctgcagatacgcaggatcttgactttgaggtgggtggagcagccccttttaacagaactcatcggtcgaagcgttccagctcccatccgatttttcataggggggaattttcagtgtgcgatagtgtctcggtttgggtgggggataaaaccactgcaactgacattaagggtaaggaagtgatggtgctcggtgaagtcaacataaacaactcagtgtttaaacagtacttcttcgaaaccaagtgtcgcgacccaaaccctgtggattctggatgccggggaatcgatagcaagcactggaactcatactgtaccaccacccatacttttgtgaaagcgctgaccatggatggaaagcaagcagcatggaggttcataagaatcgataccgcatgcgtgtgtgtgctgtcgcggaaggcagtacggagagct

SEQ ID NO: 17339 - DNA, 723 bp, synthetic construct
  misc_feature 1..723: note = source = /note="Description of Artificial Sequence: Synthetic coding sequence"
  source 1..723: mol_type = other DNA
atgagcatgttgttttacacgctgatcaccgcattcctcatcgggatccaggccgagccgcactcggagtcaaatgtgccggccgggcacactatccctcaagcccattggactaagctgcagcactcccttgacacggcactgagaagagctaggtcagccccggcggccgccatcgccgcgagagtggctggacagacccggaacattaccgtcgatccgcggctcttcaagaagaggagactgagatcgccgcgcgtgctgttcagcactcagccgccccgggaggcggctgacactcaagacctcgacttcgaggtggggggagccgcgccgttcaatcgcacccacagatcgaaacgatcatcgtcccacccaatcttccaccggggtgaattcagcgtttgtgactcagtgtctgtgtgggtcggggataagactaccgcgaccgatatcaagggaaaggaagtgatggtgctgggcgaagtgaacatcaataacagtgtgtttaagcaatactttttcgaaactaaatgcagagatccgaaccctgtcgactcgggctgcagaggtattgactcgaagcactggaacagctactgcactaccacccatactttcgtgaaggcgctgaccatggacggcaagcaagcggcgtggcgcttcatccgcatcgacactgcctgcgtatgtgtgctctcacgcaaggcggtgcgccgtgca

SEQ ID NO: 17340 - DNA, 723 bp, synthetic construct
  misc_feature 1..723: note = source = /note="Description of Artificial Sequence: Synthetic coding sequence"
  source 1..723: mol_type = other DNA
atgtcgatgctcttctatacactaattaccgcgttcttgattggcattcaggcagagccgcacagcgaatcaaacgtgccggctggtcacaccatcccgcaggctcattggaccaaactccaacattcattggacacagctttgcgtcgtgccagatccgcccccgcagctgcaattgcagctcgagtagccggacagacgcgtaacataaccgttgaccctcgcctgttcaagaaacgacggcttaggagccctagagtgctgttttccacccagccgccaagggaagctgcagacacacaggacctcgacttcgaagtgggaggtgcggcccccttcaaccgcacccatcggtcaaagagatcttcctcccatcctatcttccacaggggggaattttctgtctgcgattccgtcagcgtgtgggtcggggataagacaactgcgacagatatcaaggggaaggaggtgatggtcctgggagaggtcaatataaacaattccgtttttaaacaatacttctttgaaaccaaatgccgtgaccctaatccagtagattctggctgcagaggtattgactccaaacactggaactcctattgcactaccacgcacacctttgtaaaggcgttaaccatggacgggaaacaggctgcctggcgctttatcagaatcgacaccgcgtgtgtgtgcgttctctctaggaaggccgtgcggcgagca

SEQ ID NO: 17341 - DNA, 723 bp, synthetic construct
  misc_feature 1..723: note = source = /note="Description of Artificial Sequence: Synthetic coding sequence"
  source 1..723: mol_type = other DNA
atgtctatgcttttttatactcttataacagctttcttgatcggtatccaagcagagccccactcagaatctaacgttcctgctggtcacacaatcccccaagcacactggaccaaactgcagcacagcctcgacacagctctgcgccgcgctcgttcagccccagccgcggccatcgccgcacgggtagcaggccagaccaggaatatcacagtcgaccctcgcctgtttaagaagcggaggctcaggtctcctcgggtgctgttcagcacacaaccccctcgtgaggccgctgatacccaagaccttgactttgaggtgggcggggctgccccttttaataggactcaccgcagcaaaaggtccagctcacacccaatctttcatagaggggagttcagcgtatgtgatagcgtctccgtctgggtcggggataaaacaactgctacagacatcaagggcaaagaagtgatggttctgggggaggttaacatcaacaacagtgtcttcaagcaatactttttcgaaaccaaatgcagggatcccaaccctgtggatagtgggtgcaggggaattgacagtaaacactggaactcttattgcacaaccacccacaccttcgtcaaagccctgacaatggatggtaagcaggcggcttggagattcataagaatcgataccgcatgtgtatgcgtgctcagcagaaaggccgttcgtcgggcc

SEQ ID NO: 17342 - DNA, 723 bp, synthetic construct
  misc_feature 1..723: note = source = /note="Description of Artificial Sequence: Synthetic coding sequence"
  source 1..723: mol_type = other DNA
atgagcatgctgttctatacgctgatcaccgccttcctgatcggaattcaggcggaaccgcatagcgagtcaaatgtgccagcaggacatacgatccctcaggcccattggacgaaactgcagcacagcttagacacggcgctgcggcgggcgcgctctgcaccggccgcggcaattgccgcccgggtggctggtcagacccgaaatattaccgtggatcctcgactgttcaagaagaggagattacgctccccgcgagtgctgttttcgacacagcccccccgcgaggccgccgatacccaggatctggattttgaagtgggcggagccgccccctttaaccgcacacaccggagcaagcgctcgtcttcgcatccgatattccaccgcggagagttcagcgtgtgcgactccgtgtctgtgtgggttggagataagactactgccactgacattaagggtaaagaagtcatggtgctgggcgaggtcaacataaacaacagtgtcttcaagcagtacttttttgagaccaagtgtagagatccgaatcctgtggattctggatgtcgcggcatagatagcaaacattggaattcatactgtactacgacacacacctttgtaaaggcgttgacgatggatggaaagcaggcggcgtggcgctttattcgcatagacactgcttgcgtgtgcgttctgagtaggaaggcagtgcggagggct

SEQ ID NO: 17343 - DNA, 723 bp, synthetic construct
  misc_feature 1..723: note = source = /note="Description of Artificial Sequence: Synthetic coding sequence"
  source 1..723: mol_type = other DNA
atgtcgatgctcttctatacgctcatcactgcctttctgattggaatccaggcggagccacactcagagtcaaacgtgccagccggacataccatcccacaggcacactggactaagttgcagcactcactggataccgccctcaggcgcgcgcggagcgcgcctgccgcggcaatcgcagcccgggtggctggccagacccgtaacattactgtggacccacgcttgttcaagaaaaggcggttgaggagcccgcgcgtgcttttctcgacgcaaccccctcgcgaggcggctgatactcaagacctcgattttgaggtcggaggagccgccccgttcaacagaacgcatcgctcgaagcgctcaagcagccatcctattttccaccggggagagttcagcgtgtgtgactcggtgtcagtgtgggtcggcgacaagaccactgcgaccgacatcaagggcaaggaggtcatggtgctgggagaagtcaacatcaataactcggttttcaagcagtactttttcgagactaagtgccgagatccgaatccggtggattccggatgtagagggatcgattctaagcattggaactcttactgcaccaccactcacacttttgtgaaagcactgaccatggacgggaagcaagcagcatggcggttcattcgcatcgataccgcatgcgtgtgtgtcttgagccgcaaagccgtgcggcgagca

SEQ ID NO: 17344 - DNA, 723 bp, synthetic construct
  misc_feature 1..723: note = source = /note="Description of Artificial Sequence: Synthetic coding sequence"
  source 1..723: mol_type = other DNA
atgtcaatgctcttctacaccctcatcactgcgttcctgatcggtatccaggcagaaccgcacagcgaatcgaacgtccccgccggacatactatccctcaggcccactggaccaagctgcagcactccctggacactgctttgaggagagcacggagcgccccggctgcggcaatcgccgcgagggtggctgggcagactaggaacatcactgtcgacccccggcttttcaaaaaacggagactgcgctcgcccagagtgctcttctcaacccagcctccacgcgaagcagcagatacccaggatctggacttcgaagtaggtggagctgccccattcaaccgcacccacagatcaaagcgctcctcatcgcatccgatctttcatcgcggtgagttctcagtgtgcgattccgtgtcggtgtgggtgggagacaagaccaccgctaccgacatcaagggaaaggaagtcatggtcctcggagaggtcaatatcaataactccgtgttcaaacagtacttcttcgagactaagtgtcgggatcctaacccagtggactcgggatgtcgcggaatcgactcgaagcattggaattcttattgcaccacgacccataccttcgttaaagcgctcaccatggatggaaagcaggcggcttggcgcttcattaggatcgacaccgcctgcgtctgcgtgctgtcgcggaaggcagtccggcgggcc

SEQ ID NO: 17345 - DNA, 723 bp, synthetic construct
  misc_feature 1..723: note = source = /note="Description of Artificial Sequence: Synthetic coding sequence"
  source 1..723: mol_type = other DNA
atgagtatgcttttttatacattaatcactgccttcctgattgggattcaggcagagccccacagcgaaagcaacgtccccgctggacacactattccacaggcccattggaccaagttacagcactctttggacactgctctaaggcgcgctcggagtgccccagcagcagccatcgcagcacgggtagcagggcagactcgaaacataacagtggatcccaggctgtttaaaaagcggagactacggtctccccgggtgctcttcagcacccaacctcctagggaggcagctgatactcaggaccttgatttcgaggtgggtggcgctgctccttttaaccgtactcatcggtcaaagcggagctcttcccacccaatatttcatagaggtgagttcagcgtctgtgactctgtttcagtttgggtgggcgataaaactactgccacagatataaagggcaaggaggttatggtgctcggagaggtcaacatcaataatagtgtcttcaagcagtattttttcgagacaaagtgccgcgatccaaatccagtggattcaggttgtcgagggattgattctaagcactggaatagctactgcaccaccacacacacatttgtcaaggccctgactatggacggcaagcaggctgcttggcggtttatcaggattgacacagcatgtgtttgcgtactgagcaggaaggccgtgcgacgggct

SEQ ID NO: 17346 - DNA, 723 bp, synthetic construct
  misc_feature 1..723: note = source = /note="Description of Artificial Sequence: Synthetic coding sequence"
  source 1..723: mol_type = other DNA
atgtctatgcttttctatacactcataacagctttcctgatagggatccaggcagaacctcattccgaatccaatgtgcctgccggacacactatcccacaggcccattggacaaaactccagcactccctcgatacagccctccggcgcgcccgatctgcccccgcagccgcgattgccgcacgggttgccgggcagacaagaaatataacagtggatcctaggctctttaaaaaacgccgcctaagatcacctagggttctcttttctactcagccaccacgagaagccgccgatactcaggatctcgatttcgaagttggaggagcagcaccatttaacaggactcataggtctaaacggtcttcttcccacccaattttccaccggggggagttcagtgtgtgtgatagtgtttctgtctgggtgggggataaaactactgcaacagatatcaaagggaaagaggtgatggtgctgggagaggtcaatatcaacaattctgtctttaagcagtatttcttcgaaacaaagtgcagggatcccaaccctgtggattctgggtgtcggggaatagattctaaacactggaattcatattgtactactacacatactttcgtgaaagcccttacaatggatgggaagcaggctgcctggaggtttatccgaattgatactgcctgcgtgtgtgtcttgtcccgcaaagctgtgcggagggct

SEQ ID NO: 17347 - DNA, 723 bp, synthetic construct
  misc_feature 1..723: note = source = /note="Description of Artificial Sequence: Synthetic coding sequence"
  source 1..723: mol_type = other DNA
atgtctatgttgttctatactctcatcacagccttcttgattggcatccaggctgaaccacactccgagagcaatgttcccgcaggccacaccattcctcaagcacattggaccaaattgcagcactccctggacactgctctcagaagggctaggtcagctccggcagcagctatcgctgccagagttgctggtcagaccagaaatataaccgtggaccctagactgttcaaaaagagaagattgcgcagtcccagggtcctgttctctacccagcctccaagggaggccgccgacacccaggaccttgattttgaggtaggcggcgcggctccatttaataggactcacagatctaaaaggtccagctcccacccgatctttcacagaggcgagttttctgtttgcgattctgtgtccgtgtgggtaggtgataagaccactgccaccgatattaagggaaaagaggttatggttctcggtgaagtcaacattaacaatagtgtattcaagcagtatttctttgagacaaagtgcagagaccctaatcctgtcgacagcggctgccgcggaatagacagtaagcactggaattcttactgcactactactcacacattcgtaaaggcgcttacaatggatggaaaacaagctgcttggcgcttcattcgcattgatacggcctgtgtgtgcgtactgagtcgcaaagcagttaggcgcgcg

SEQ ID NO: 17348 - DNA, 723 bp, synthetic construct
  misc_feature 1..723: note = source = /note="Description of Artificial Sequence: Synthetic coding sequence"
  source 1..723: mol_type = other DNA
atgagtatgctcttttacacgctgattacagcttttctgattggcattcaggcagagccccacagcgagagcaacgttcctgctgggcacactatcccacaggctcactggaccaagctgcagcattctctggacacggcccttcgacgggcgagatccgcacctgccgcagcaatcgcagccagggtggcaggacagaccagaaacataacagtggacccgcgactcttcaaaaaaagaaggctgagatcgccccgggttctgttctccacacagcctccacgcgaggcggcggatacccaagatctcgacttcgaagtgggtggagccgcacccttcaacaggacccaccgctcaaaaaggtcctccagtcaccctatattccaccgcggagagtttagtgtatgcgacagtgttagtgtgtgggtcggcgataagacaacagccactgacatcaaaggaaaagaggtgatggttctgggcgaggtaaacatcaacaattctgtgtttaagcagtatttttttgaaaccaaatgtagggaccccaaccccgtggatagcggatgccgcggcatagatagcaagcattggaacagctattgcacaaccacgcatacgtttgtgaaagcactcacgatggacggaaaacaggccgcttggaggtttatacggattgataccgcctgcgtatgcgtgctgtctcggaaagctgtccggcgggct

SEQ ID NO: 17349 - DNA, 723 bp, synthetic construct
  misc_feature 1..723: note = source = /note="Description of Artificial Sequence: Synthetic coding sequence"
  source 1..723: mol_type = other DNA
atgtcaatgcttttttatacacttattacagcgtttttgattggcatccaggcggagccacatagcgaatctaacgtcccagcgggacatacaattcctcaggcgcattggacgaaacttcagcacagcctggatacagctctacgccgggccagatcagctccggccgcggcaattgcagcgcgtgttgcgggacagacgcgtaatattaccgttgatccgaggttgtttaagaagagaaggttgcgctctccgcgagtattgtttagcacgcaaccgccgcgcgaagcggcggatacccaggatcttgattttgaggtcgggggagctgcgccgtttaatagaacgcaccgctctaaaagaagctcctcgcatccgatttttcatagaggagaattttcggtgtgcgattcagtttcggtctgggttggagataagacaaccgcgacagatattaaaggcaaagaagtaatggttcttggagaggttaatatcaataactcagtatttaaacagtattttttcgagacgaaatgtcgcgatcccaacccggttgattcaggttgcagaggtattgacagcaaacactggaacagctattgcacaacaacgcacacgttcgttaaagccttaaccatggatggcaagcaggcagcgtggagatttataagaatagacacggcgtgtgtctgcgttctttctcgtaaagctgtaaggcgtgct

SEQ ID NO: 17350 - DNA, 723 bp, synthetic construct
  misc_feature 1..723: note = source = /note="Description of Artificial Sequence: Synthetic coding sequence"
  source 1..723: mol_type = other DNA
atgtcaatgctgttctacactctcatcactgctttcctgattggcatccaggccgagccgcactcggaatcaaatgtgccggcaggccacaccataccacaggctcattggactaagttgcaacattcgctggacaccgcactgcgccgggcccggtccgcacctgctgcggccattgctgccagggtggcgggacagacccgcaacatcaccgtcgacccaagacttttcaaaaagcgcagacttaggtcgccgcgggtactcttctcgactcaaccgccgcgggaggcggccgatacccaggacctggacttcgaggtgggaggagcagccccgtttaacagaacccaccgcagcaaacgctcctcttcacatcccatctttcacagaggagagttctccgtctgtgattccgtctcagtgtgggtgggagacaagacgaccgccaccgacataaaaggaaaggaagtgatggtgttgggagaagtcaatatcaacaattccgtgttcaagcaatactttttcgaaactaagtgccgggatcccaatcctgttgattcggggtgccggggcatcgactcaaaacactggaactcctactgcactaccactcacactttcgtgaaagcactgaccatggatggaaagcaggctgcctggcgctttatccgaatcgacacggcctgtgtctgcgtgctgtccaggaaagcggttagacgcgcc

SEQ ID NO: 17351 - DNA, 723 bp, synthetic construct
  misc_feature 1..723: note = source = /note="Description of Artificial Sequence: Synthetic coding sequence"
  source 1..723: mol_type = other DNA
atgtctatgctcttttacacattaattaccgctttccttattggcattcaggctgaacctcatagcgagagtaatgtcccggccggacatacgattccccaggctcactggactaagctacaacatagtctcgacactgccctacggagggcccgctctgccccagcagcagcaatagctgccagggtggccgggcagactagaaatatcactgtcgacccccggctgttcaagaagcgcagacttcgctcccctagggttctcttctcaacgcagccaccaagggaagcggctgacacccaagacctagatttcgaggtaggtggtgcagctccatttaacagaacacatcgctcgaaaagaagctcaagccacccgatcttccatcgtggcgagttcagtgtgtgcgactcggtgagcgtatgggtgggagataagacaacagctacagacattaagggcaaggaagtgatggtgcttggggaagtcaatatcaacaatagcgttttcaagcagtatttcttcgagacaaagtgccgggaccccaatcccgtggacagcggatgtagaggcatcgattctaagcattggaacagttactgcactaccacacataccttcgtcaaagccctgaccatggatggtaagcaggccgcctggaggttcatccggatcgacacagcctgcgtgtgtgttctttctagaaaagccgttagaagggcc

SEQ ID NO: 17352 - DNA, 723 bp, synthetic construct
  misc_feature 1..723: note = source = /note="Description of Artificial Sequence: Synthetic coding sequence"
  source 1..723: mol_type = other DNA
atgtcaatgcttttctacaccctcataaccgcatttctgatcggaatccaagcagaaccacactcagaatcgaacgtgcctgcaggacataccataccccaagcgcattggaccaagctgcagcactccctggatactgcactgcgacgggcccgcagcgctcccgccgcggcaattgcagcaagggtcgctggacaaacccgtaatatcactgtcgatccgcgactgttcaagaagagaaggcttagatccccacgggtcctgttttcaactcagccccctcgcgaagcagctgacacccaagatctggattttgaggttggaggcgccgcaccctttaaccggactcaccgaagcaagagatcctcgagccatccaattttccacagaggagaatttagcgtgtgtgacagcgtgtcggtttgggtgggtgataaaaccactgcaaccgacattaaaggaaaagaggtgatggttctgggcgaagtcaacatcaacaattccgtgtttaagcagtacttcttcgaaaccaagtgcagggatcctaatcctgtcgattccggttgtcgagggattgactcgaagcattggaactcctactgtaccactactcatacgtttgtgaaggcactcaccatggacggaaagcaggcggcatggagatttatccgcatagataccgcctgtgtctgtgtcctgtcaaggaaagcagtgaggcgggcg

SEQ ID NO: 17353 - DNA, 723 bp, synthetic construct
  misc_feature 1..723: note = source = /note="Description of Artificial Sequence: Synthetic coding sequence"
  source 1..723: mol_type = other DNA
atgtccatgctgttctacactctgattacagccttcctgattggcatacaagcagaacctcactccgagagtaacgtccctgcggggcacacaattccacaggctcattggacgaagctacagcacagtctggacacagccctgcggcgagccaggtcagcccctgcagccgccatcgccgctagagtggccggacagacgaggaatatcacagtcgacccgcgcctgtttaaaaaacgcaggctcagatccccacgcgttctattctccacccaacctcccagggaagccgctgatacgcaggacctggattttgaagtaggcggtgcagccccctttaaccggacgcaccgatccaaacgttcatcatcccaccctatcttccatagaggcgaattctctgtttgtgactctgtgtccgtgtgggttggcgataagactactgcgaccgacatcaaggggaaagaagtcatggtgctgggagaagtcaatatcaataatagtgtttttaagcagtacttctttgaaaccaaatgccgggaccccaaccccgtcgactctggatgcagagggatcgatagtaaacactggaactcgtactgtacgacaacgcacacctttgtaaaggccctcaccatggatgggaagcaggccgcgtggcgatttattaggatcgacacagcctgtgtctgcgtgctgtcaagaaaggctgtaagacgagcc

SEQ ID NO: 17354 - DNA, 723 bp, synthetic construct
  misc_feature 1..723: note = source = /note="Description of Artificial Sequence: Synthetic coding sequence"
  source 1..723: mol_type = other DNA
atgagcatgttgttttacactctcatcaccgcgtttcttataggcatacaagctgagccccattccgagtccaacgtccctgccgggcatactatcccgcaggctcattggaccaaattgcaacactcgcttgacaccgcactgcggcgtgccaggtctgcaccagcagcggccattgcggcacgagtggcgggacagactcgcaacataaccgttgatcctagacttttcaaaaagcgccgtctgaggtcccctagagtgcttttctccactcaacctccacgcgaagcggctgatacgcaggatctggatttcgaagtgggaggtgccgcacctttcaacaggactcatagaagcaagcgctcgagctcacatcccattttccaccgaggtgaattttcggtgtgcgattctgtgtccgtgtgggtcggtgataaaacgaccgccaccgatatcaaaggtaaagaagtgatggttctgggcgaggtgaacataaacaactcagtgttcaagcaatacttttttgaaaccaaatgtcgggacccgaatcccgtggatagcggatgccgcgggattgacagtaagcactggaattcctactgtaccacgacccatacgtttgtgaaggctctcactatggatggaaagcaggcggcatggagattcattcgaatagacaccgcatgtgtgtgtgtgctctcaagaaaggcagtgcgccgcgca

SEQ ID NO: 17355 - DNA, 723 bp, synthetic construct
  misc_feature 1..723: note = source = /note="Description of Artificial Sequence: Synthetic coding sequence"
  source 1..723: mol_type = other DNA
atgagtatgctgttctacactctgatcacagccttcctgatcggaatccaggccgaaccccacagcgagtcaaacgttcccgccggccacactatccctcaggctcattggactaagttgcagcacagtttggacaccgccttgagacgcgctcgttcagccccagctgctgctatagctgcaagagtagccggtcagacacgtaacatcaccgtagatccccgcctctttaaaaaaaggcgtctgagatctcccagggtgctcttcagcacccagcccccaagggaggcagctgacacccaagacctggacttcgaagtaggaggtgccgcccccttcaaccgtacacacagaagcaagaggtccagttcccatcccattttccatcgcggagagttttccgtgtgcgatagtgtgtccgtgtgggtcggagataagaccactgccactgacattaaaggaaaagaggtgatggttctgggtgaggttaatatcaacaactccgtgttcaagcagtacttcttcgagacaaagtgccgtgatccaaaccccgtggacagcggttgccgtggtattgactcaaaacattggaattcttactgcacaactacccacaccttcgtgaaggccctgactatggacggcaaacaggctgcttggcgctttatcaggatcgacacagcttgtgtttgcgtgctttcaagaaaagccgtgaggcgcgct

SEQ ID NO: 17356 - DNA, 723 bp, synthetic construct
  misc_feature 1..723: note = source = /note="Description of Artificial Sequence: Synthetic coding sequence"
  source 1..723: mol_type = other DNA
atgtcgatgctgttttacaccctgataactgcgtttttgatcggcattcaagcagagccacatagcgaatcgaatgtgcctgcagggcacacgatcccacaggctcactggactaaacttcaacattccctcgataccgctctcagacgtgcaagaagcgcgcccgctgcagcaatcgcagcgcgagtcgccggacaaactcgcaatatcaccgtcgaccctagactcttcaaaaagcgtcgcctgcggtccccgagggtgctgttttccactcagcccccgcgcgaggccgcagacacccaggatctggattttgaagtggggggagccgcaccctttaacaggacccatagatcaaagagatcgtcctcccaccctatctttcatcgcggggaattttccgtgtgtgactcggtcagcgtgtgggtgggagataagactaccgcaaccgatatcaagggtaaagaagtcatggtgctgggagaagtcaatatcaacaactccgtctttaagcaatactttttcgaaaccaaatgtcgagatcctaatcctgtggattcgggttgtagaggtatcgatagcaaacattggaattcgtactgcaccacgactcacacctttgtgaaagcacttacgatggacggcaagcaggctgcctggagattcattcgcattgatactgcatgcgtttgcgtgctttcaaggaaagcagtcaggcgcgct

SEQ ID NO: 17357 - DNA, 723 bp, synthetic construct
  misc_feature 1..723: note = source = /note="Description of Artificial Sequence: Synthetic coding sequence"
  source 1..723: mol_type = other DNA
atgtcaatgctcttctacactctgattactgcgttcttgattggtatccaagctgagccgcactcagagtcaaacgtcccagcaggtcatactatccctcaagcgcattggacgaagctccagcactccttggacactgcactgagacgggcccgatcggctcctgcggccgcaattgccgcgcgagtcgcgggtcagactcggaacattaccgtcgatccacgactcttcaagaagcgccgtcttaggagccctcgtgtgctgttctctacccagccaccgagggaagccgccgatacgcaggacctggattttgaggtcggcggcgcagcaccctttaatcggacccatcgaagcaaaagatctagctcgcatcccatctttcataggggagaattttcggtgtgtgattcggtgtcagtgtgggttggagataagactaccgccaccgacattaagggaaaggaagtgatggtcctgggtgaagtgaacattaacaactccgtgtttaagcaatacttcttcgagactaaatgcagggaccctaatcccgttgatagcggttgcagaggcatagatagcaaacactggaattcgtactgtactactacgcacacgtttgtgaaggcacttactatggatggaaaacaagcagcgtggagattcataagaatcgacaccgcatgtgtgtgtgtcctttcgcggaaagctgtgcgaagagca

SEQ ID NO: 17358 - DNA, 723 bp, synthetic construct
  misc_feature 1..723: note = source = /note="Description of Artificial Sequence: Synthetic coding sequence"
  source 1..723: mol_type = other DNA
atgtcaatgctgttctataccctgatcacggccttcctgatcggtattcaggccgagccgcattcagagagcaacgtccccgcaggtcatactatacctcaggcacactggactaagctccaacatagcctggataccgcattgcgccgcgcacgcagcgcgccagccgcggctatcgctgcgcgcgtcgcgggtcagacccgcaacattacggtcgacccacgcctgttcaagaaacgccgcctaaggtcccctcgcgtcttattctccacccaaccgccaagagaggcggctgacacgcaggacctagatttcgaagttggtggtgcggcaccatttaatcgtacccaccgcagcaaaaggagctcctcccaccctattttccaccgtggtgaatttagcgtctgcgactccgtaagcgtttgggttggcgataaaacgactgcaaccgatattaaaggcaaggaggtcatggttctgggcgaggtgaatatcaacaatagcgtcttcaagcagtacttcttcgaaacgaaatgtagggacccgaatccagtggattcggggtgtcgcggaattgactcgaaacattggaattcttattgcacaactactcatacatttgtgaaggcgttaacgatggacgggaagcaggctgcctggcgcttcattcgcatagacaccgcgtgtgtctgcgtactctcccgcaaggccgtgcgccgggct

SEQ ID NO: 17359 - DNA, 723 bp, synthetic construct
  misc_feature 1..723: note = source = /note="Description of Artificial Sequence: Synthetic coding sequence"
  source 1..723: mol_type = other DNA
atgtcgatgctgttttacacccttattacggcctttctcatcggcatacaggctgaacctcattctgagtcaaacgtgccggctggccatacaataccccaggcacattggacaaagctgcagcactctttagatacagctcttcggcgggcaaggagcgcaccagctgcagccatagctgcccgggtggctggccagacccggaacattacagtggatccgcggttgttcaagaaaaggaggcttcggtcaccccgagttctgttcagcactcagcccccccgcgaggccgcagatacgcaggacctagattttgaggtgggcggagctgctccattcaaccgcacacaccggtccaagcgctccagctcccaccccattttccacagaggggagttttctgtgtgcgacagcgtgtccgtgtgggtcggagataagacgaccgccaccgacatcaaaggaaaagaggttatggttctgggcgaagtgaacattaataactcagtcttcaaacaatacttttttgaaaccaagtgtcgagatcccaaccccgttgatagcggctgccgtggtatagactctaagcattggaattcatactgtaccaccacccacactttcgtaaaagctctgacaatggacggcaagcaggccgcttggaggtttattcgtattgataccgcctgcgtttgtgttctgtccagaaaggccgtccgtcgggct

SEQ ID NO: 17360 - DNA, 723 bp, synthetic construct
  misc_feature 1..723: note = source = /note="Description of Artificial Sequence: Synthetic coding sequence"
  source 1..723: mol_type = other DNA
atgtccatgctgttctacaccctgataaccgcttttttaatcggtatccaggccgagcctcactctgagtccaacgtgcctgcgggccacacaatccctcaagcccattggacgaaattgcagcactctctggacactgccctgcggagagctcgaagcgcccccgctgccgctatcgcagcccgcgtggccggtcaaacgaggaacattactgtggacccacgcctctttaaaaaaagaagattgcggtctcccagggttctgttcagtacccaaccgcctcgtgaagctgctgacactcaagacctggatttcgaggtcggcggagcagctcctttcaaccgtacccataggtcgaaacggagctctagccacccaatctttcatcgcggtgaattctccgtgtgtgattccgtgagcgtctgggtgggagacaagacaaccgctacagacataaaaggcaaagaagtaatggtcctgggagaggtgaatatcaacaacagtgtgttcaagcagtatttttttgaaaccaaatgtcgcgatccgaaccctgttgatagtggctgtaggggtatcgattctaaacactggaactcatactgcaccaccactcatacttttgttaaggctctcaccatggacggtaagcaagctgcatggaggtttatcaggatcgacacagcctgcgtctgcgtcctgagtcggaaggcagtaagacgcgca

SEQ ID NO: 17361 - DNA, 723 bp, synthetic construct
  misc_feature 1..723: note = source = /note="Description of Artificial Sequence: Synthetic coding sequence"
  source 1..723: mol_type = other DNA
atgtcaatgctcttctacactcttataacggcctttctcatcggaattcaagcagaaccacattccgaatccaacgtgcccgcgggccatactatacctcaggcacattggaccaaactgcagcacagcctggataccgcacttcgcagagcacggtcagcacctgccgcggccattgctgcaagagtggcgggacagactaggaatatcacggtcgatccgagactgtttaagaagcgaagattgcgatctccccgcgtcctcttttcgacccagcccccaagagaagcagcggacactcaggatctggatttcgaggtgggaggcgctgcacctttcaaccggacccataggtccaaacgctcatcatcgcacccaatctttcatagaggagaattttccgtctgtgatagcgtgtcggtgtgggtgggcgataagactaccgccaccgatatcaaggggaaggaggtgatggtgctgggcgaggtcaatatcaataacagcgtgtttaagcaatactttttcgaaaccaaatgtcgggacccaaatcctgtggactcagggtgccgggggattgatagcaagcattggaactcatactgcaccactacccatacttttgtgaaggcactgacgatggacgggaaacaggccgcatggcggtttatacggatcgataccgcgtgtgtgtgtgtgctttcaagaaaggccgtgcgcagagca

SEQ ID NO: 17362 - DNA, 723 bp, synthetic construct
  misc_feature 1..723: note = source = /note="Description of Artificial Sequence: Synthetic coding sequence"
  source 1..723: mol_type = other DNA
atgagtatgctgttctacaccttgatcaccgcttttctgatcggcatccaggctgaaccccattccgaaagcaacgtgcccgccgggcacacaattcctcaggctcactggacgaagctgcagcattccctggacaccgcgctgcgccgggctagatccgcccccgccgctgcgattgccgcgcgagtggctggtcaaacaagaaacataactgtagacccccgactgtttaagaaacgacgccttcggtctcctcgggtcctgttcagtactcagcctccaagggaggccgccgacactcaggacctggacttcgaggtgggcggtgccgccccatttaatcggacgcaccgcagcaaacgaagctcctctcatccaatatttcatcgaggggagtttagcgtgtgcgactctgtgagtgtgtgggtgggcgataagactaccgccaccgatataaaaggcaaggaggttatggtgctaggtgaggtgaacataaataacagcgtcttcaagcagtatttttttgagaccaaatgccgagatccgaatccggtggacagcggttgtagggggattgatagcaagcattggaatagctattgtaccaccacacacacattcgtgaaagcactgacaatggacgggaagcaggcggcatggcgatttattcggatagacactgcgtgcgtttgtgtacttagccgtaaagctgtacgccgggcc

SEQ ID NO: 17363 - DNA, 723 bp, synthetic construct
  misc_feature 1..723: note = source = /note="Description of Artificial Sequence: Synthetic coding sequence"
  source 1..723: mol_type = other DNA
atgagcatgctgttctataccttgataaccgctttcttgattggcatccaggcggagccacacagtgaatctaacgttcccgccggacacaccataccccaggcgcattggactaagctgcagcattctctggacaccgccctgcgtcgagctagatctgcccccgcagcagcaatcgcagctcgggtcgccggacagacgcgaaatattaccgtggatccccgcctgttcaagaaacgccgcctacgatccccacgagtgctcttcagcacccaacccccccgggaagccgctgatacacaagatttagattttgaagtcggcggagccgccccattcaacagaactcaccgctctaagcgctcctccagccatcctattttccacaggggcgaattctctgtctgtgacagcgtttccgtgtgggtgggggacaagacgactgcaactgatattaagggaaaggaggtaatggtgttgggagaagtgaatataaacaactctgtcttcaaacagtacttcttcgagaccaagtgtagagacccgaaccctgttgacagcggttgtcggggcattgacagcaagcattggaacagctactgcacgacaacacacacttttgttaaggccctcacaatggatggcaaacaggccgcatggagatttatacgcattgacaccgcttgtgtgtgcgttctatcgagaaaggcagtgaggcgcgcc

SEQ ID NO: 17364 - DNA, 723 bp, synthetic construct
  misc_feature 1..723: note = source = /note="Description of Artificial Sequence: Synthetic coding sequence"
  source 1..723: mol_type = other DNA
atgagtatgctcttttacacccttatcaccgcatttttgatcgggattcaggcagagccccactcggaatctaacgtccccgcaggacataccattccgcaggcccactggactaaacttcaacattcgctggatacggcattgagaagagcgcggtccgcacctgcagcagccattgcggcgcgggtggctgggcaaactagaaacatcaccgtcgatcctcggctcttcaaaaagagacggctgagatcaccccgcgtgctttttagcacccagcccccaagagaggctgccgatacgcaggaccttgatttcgaagtgggaggtgctgctccattcaatagaacccatcggtcgaaaaggagctccagccatcctattttccatagaggggaatttagcgtgtgtgactccgtgtccgtttgggtcggagataagactacggcgactgacataaagggaaaggaagtgatggtactgggagaagtgaatatcaacaactccgtctttaagcagtatttctttgaaaccaagtgccgagatcctaatcctgtggatagtggttgtagagggattgactccaaacattggaactcgtactgtactaccactcacactttcgtgaaggccctgactatggatggtaagcaggcagcctggcgcttcattcgaattgacaccgcatgtgtgtgcgtcctgtcacgaaaagcggtccgccgtgca

SEQ ID NO: 17365 - DNA, 723 bp, synthetic construct
  misc_feature 1..723: note = source = /note="Description of Artificial Sequence: Synthetic coding sequence"
  source 1..723: mol_type = other DNA
atgtccatgctcttttatactttgatcaccgcttttctgatcggcatccaggctgagcctcattcggagagcaacgtcccggccggccacacgatcccccaagcccattggactaagctgcagcattcgcttgacaccgcccttaggcgcgcccggtcagcgcctgctgctgcaatcgcagcgcgcgtcgccggtcagacgcggaacatcaccgtcgaccctcgtctattcaaaaagcgccggctgagaagtcctcgggttctgttttcgacccagcccccccgtgaggcggccgacactcaggacctggatttcgaggtcggcggtgccgcgcctttcaaccgaactcatagatccaagcgtagcagcagccaccctatcttccatcgcggcgaattctctgtgtgtgactccgtctcggtctgggttggggacaagacgacagcaaccgatattaaaggcaaggaggtcatggtcctcggggaggtgaacatcaacaactccgttttcaagcagtattttttcgaaaccaagtgccgcgatcccaaccctgtcgactctggttgtcgtggtatcgattccaagcattggaactcctactgcactaccactcatactttcgttaaggccctcacgatggacggcaagcaggcagcctggcgtttcatacgtatcgacacagcgtgtgtttgcgtcctgtcccggaaggccgtgcgccgggcg

SEQ ID NO: 17366 - DNA, 723 bp, synthetic construct
  misc_feature 1..723: note = source = /note="Description of Artificial Sequence: Synthetic coding sequence"
  source 1..723: mol_type = other DNA
atgtctatgcttttctatacactaatcacagcatttctgatcggaattcaggccgagccacattcggaatctaatgtacctgctgggcacactataccccaggcccattggactaaactccagcattctctcgatacagcactgaggagagcccggtctgctcctgccgccgctatcgctgctcgggtagcagggcagacacgaaacatcacagttgatcccagactgtttaaaaaacggaggctccgctcgccacgggtcctattctccactcagcccccaagagaagctgcagatacacaggatcttgatttcgaagtaggaggggcagcaccatttaacaggacacatagatccaaacggagttcatcacatcccatttttcaccgcggggagttttcagtgtgtgatagtgtgtccgtatgggtgggagataaaactacagcgacagatatcaaaggaaaggaagtaatggtgctgggagaggtgaatattaacaactccgtttttaaacagtattttttcgaaacaaagtgtagggatcccaatcctgttgattcgggatgtagagggatagactcaaagcactggaactcttattgcacaacgacacatacatttgttaaagccctcactatggatggaaagcaagccgcctggcggtttataagaattgatacagcctgtgtgtgtgtactgtctagaaaggccgtgcggcgcgct

SEQ ID NO: 17367 - DNA, 723 bp, synthetic construct
  misc_feature 1..723: note = source = /note="Description of Artificial Sequence: Synthetic coding sequence"
  source 1..723: mol_type = other DNA
atgtccatgctgttttacaccctgattactgccttcctcatcggaatccaggctgagccccatagcgaatcgaacgtcccagcggggcacactatcccccaagcacattggaccaagctccagcactcacttgacaccgccctgcggcgagctagatctgccccagctgctgcgatcgcggcgagagtcgccggacagactcggaacatcacggtggatccgcgactcttcaagaaaagaaggctgcgctcacctcgggtcctgttctcgacccagccaccgcgggaggccgcagatacccaagaccttgatttcgaagtgggtggagcggcaccgttcaaccgcacccaccggtcaaaacgaagctcctcacatccgatctttcaccgcggagaattttcggtatgcgacagcgtgtcggtgtgggtgggcgacaagacgactgccaccgacatcaaggggaaggaggtgatggtgctcggggaagtgaatatcaataacagcgtgttcaaacaatacttcttcgagactaagtgccgggatccgaatccagttgattccggttgtcggggcattgacagtaagcattggaatagttactgcaccactactcacacgtttgtgaaagcgctgactatggacggaaagcaggctgcctggagattcatcaggatcgatactgcttgcgtctgtgtattgtcacgcaaagcagttaggagggcg

SEQ ID NO: 17368 - DNA, 723 bp, synthetic construct
  misc_feature 1..723: note = source = /note="Description of Artificial Sequence: Synthetic coding sequence"
  source 1..723: mol_type = other DNA
atgtccatgcttttctacacactcatcacagccttcttgatcggtatccaggccgaaccacatagtgaaagcaatgtgcccgcaggacacacaatcccccaggctcactggaccaagcttcagcattccctggacaccgccctgcggagagccaggtcagcacccgccgccgccattgcagcacgggtcgctgggcagacccggaatattaccgtggatcctaggctcttcaagaagcggcgactgaggagcccccgcgtgctgtttagtacccaaccccccagagaagccgcagatacacaggatctggacttcgaagttgggggcgcggccccgttcaatcggactcaccggtctaaaaggtcaagctctcacccaattttccacagaggcgaattcagtgtgtgcgacagcgtctctgtgtgggtaggggataaaaccacggccaccgacatcaagggcaaagaagtgatggtgctcggagaggtgaacatcaataactccgtcttcaagcaatattttttcgagactaagtgccgcgacccaaaccccgtggactctggctgcagagggatagatagtaagcactggaactcatattgtaccaccacccacacttttgtgaaagcattgaccatggacgggaagcaagccgcgtggagattcataagaatcgatacggcgtgcgtttgcgtgttgtcccggaaggccgtccgccgggct

SEQ ID NO: 17369 - DNA, 723 bp, synthetic construct
  misc_feature 1..723: note = source = /note="Description of Artificial Sequence: Synthetic coding sequence"
  source 1..723: mol_type = other DNA
atgtcaatgctgttctatactttaatcaccgcttttctgatcggcatacaggcagagcctcactccgagagcaacgtgccagctgggcacactattcctcaggcacactggacgaaacttcagcattccctcgacaccgctctgagaagagcaaggagtgcccctgcagccgcaattgccgcaagggttgccgggcagacccggaacattacagtcgaccctaggctgttcaagaaaaggcgcttgaggtctccgcgcgtgctcttttccacccagcctcctcgagaggctgcagatacgcaggacttggacttcgaggtagggggcgcagctccctttaaccgcacacaccgatcaaagcgcagcagttcccaccctatatttcatcggggtgagttctccgtgtgtgactctgtgtccgtgtgggtcggagacaagacgacagccacggacataaaggggaaagaagtaatggtgctcggcgaggtgaatatcaataattccgtattcaagcagtacttcttcgaaacgaaatgtcgagatccaaatcctgtggattcaggatgcagaggaatcgattcaaaacattggaatagctactgcactaccacacatacattcgtgaaggcgctgaccatggacggtaagcaggccgcatggaggtttatccgaatcgacactgcctgcgtgtgcgtgctttcgaggaaggcagtaaggcgggcc

SEQ ID NO: 17370 - DNA, 723 bp, synthetic construct
  misc_feature 1..723: note = source = /note="Description of Artificial Sequence: Synthetic coding sequence"
  source 1..723: mol_type = other DNA
atgtccatgttgttctacacgttgattacagcattcctgatcggtattcaggctgaaccccacagcgagagtaacgttccggctggtcatacaattccccaggcacattggacaaagctccaacactccctggacacagccctgcggcgcgcccggtccgctcctgctgcggctatcgcggcacgcgtggctgggcagacaaggaatatcacagtagacccgcgacttttcaaaaaaagacgcctgaggagtccacgcgttcttttctccacgcagcccccacgagaagccgccgacacccaggacctcgatttcgaagtggggggggcagcccccttcaatagaactcatcgctcaaaaaggtcatctagccatccaattttccacaggggcgagttctcagtgtgtgacagtgtgagtgtgtgggtgggcgacaagacaacagccacagacatcaagggcaaggaagtgatggtcctgggtgaggttaatatcaacaatagcgtttttaagcaatacttctttgaaacaaaatgtcgggacccaaacccggtggattcagggtgtaggggaattgatagtaagcactggaattcttactgtacaaccactcacactttcgtgaaggcgctgacgatggatggtaagcaggcggcctggagattcatccgaattgacacagcttgcgtctgcgttctgtcacggaaagccgtgcggcgagct

SEQ ID NO: 17371 - DNA, 723 bp, synthetic construct
  misc_feature 1..723: note = source = /note="Description of Artificial Sequence: Synthetic coding sequence"
  source 1..723: mol_type = other DNA
atgtcaatgctattttatactctgataactgcttttctgattgggatccaggctgagccccacagcgaatcgaacgtaccagcggggcataccataccgcaggctcattggacaaaattgcagcactctctcgacaccgctttaaggagagcccggtcagcgccggccgcggccatcgctgcacgcgtagcgggccaaacacggaatataactgtggaccctcgtctgttcaaaaagcggaggctccgatcgccccgggtgctgttctccacccagccacctcgggaggcagctgacacccaggatttggattttgaggttggtggtgccgctccattcaaccgcacccatcgcagcaagcggagcagctcacatcccatcttccacagaggagagttttctgtatgcgactcggtctcagtgtgggtgggagataagactacagctactgacatcaaaggtaaggaagtgatggtgcttggggaagtgaacatcaacaacagcgttttcaaacagtacttctttgaaactaagtgtagagatccgaacccagtggattccggctgccgtggtatcgattctaagcactggaatagctactgcactaccacccacacatttgtcaaggccctgaccatggatgggaaacaggccgcttggcggtttattagaatcgacactgcctgtgtgtgtgtgctgagtcggaaagctgtgagacgggcg

SEQ ID NO: 17372 - DNA, 723 bp, synthetic construct
  misc_feature 1..723: note = source = /note="Description of Artificial Sequence: Synthetic coding sequence"
  source 1..723: mol_type = other DNA
atgagcatgctgttctacacactcattacagccttcctgataggcattcaagcagaacctcattctgagagcaatgttcccgccgggcacactataccgcaggcccactggacgaaactgcagcattctctggacacagccctgcgaagggcaaggtccgctcctgcagccgccatagccgccagagtggctgggcagacaaggaacattactgtggaccccaggctattcaagaaacgcaggctccgctctccgcgcgtgctgtttagcacccagcctccaagggaagccgccgatactcaggatctggattttgaagttggcggggctgctccgtttaatcgcacacacagaagcaagagaagttcctctcacccgattttccatcgtggcgaattttctgtctgtgatagtgtctccgtctgggtcggggataaaactactgcgacagatatcaaggggaaggaagttatggtgctgggcgaagtgaatatcaataactcagttttcaagcagtatttcttcgaaactaagtgccgggaccctaaccctgtagacagcggatgtcggggtatagatagtaagcattggaactcatactgtaccactacacacacatttgtgaaggcgcttactatggacggaaagcaggctgcctggcgatttatccgtatcgacactgcctgcgtgtgtgtgctgtcacgtaaggccgtgcgccgcgcc

SEQ ID NO: 17373 - DNA, 723 bp, synthetic construct
  misc_feature 1..723: note = source = /note="Description of Artificial Sequence: Synthetic coding sequence"
  source 1..723: mol_type = other DNA
atgagcatgctgttttacaccttgatcaccgctttcctcattggaatacaggctgaaccgcattccgagtccaacgtaccagctggccacacgatcccacaggcacactggaccaaactgcaacattcactggacaccgctctccggcgcgccagatccgctccagcggctgcaatagctgcccgtgtcgccgggcaaacccgcaatatcactgtggacccgaggctgttcaagaaaagacgcctgcggtcacctcgcgtgcttttttcgacccagccgcctagagaggcggccgatactcaggatcttgactttgaggtcgggggagccgcgcctttcaatcgcactcacaggtcaaaacgatccagctcacacccgatcttccacagaggagaattttcggtgtgcgactccgtgagcgtgtgggtgggagacaaaactaccgcgactgacatcaagggtaaggaagtgatggtgctcggagaggtgaatatcaacaacagcgtgttcaagcaatactttttcgaaacgaaatgcagggatccaaaccccgtggactccgggtgcagaggcatcgacagcaagcattggaactcttactgcacgactactcatacgttcgtgaaagccttgaccatggatggaaagcaggcagcctggcgcttcattcgcattgatactgcctgtgtctgtgtcttgtcgcgcaaggccgtgaggcgcgct

SEQ ID NO: 17374 - DNA, 723 bp, synthetic construct
  misc_feature 1..723: note = source = /note="Description of Artificial Sequence: Synthetic coding sequence"
  source 1..723: mol_type = other DNA
atgtcgatgctgttctacactctcattactgcctttcttatcggaatacaggcagaaccacattccgaaagcaatgtaccggctggacatactatcccacaggcccactggacgaaactccagcactcactggatactgcactgcggcgagcacggtcggcgccggctgccgccattgcggctcgcgtggccggacagacccggaacatcacggtggatccccgcttgttcaagaagaggagactccggtcaccgagagtcctcttttccactcaacctccgcgcgaggctgccgacacccaagatctcgatttcgaggtgggaggtgctgcgcctttcaaccgcactcacaggtccaagagatcatcgtcccatccaatctttcacaggggggagttctccgtgtgcgactcagtctcggtgtgggtaggcgacaagaccaccgcgactgatatcaaggggaaggaagtcatggtgctgggcgaagtgaacatcaataacagcgtattcaaacaatacttctttgaaactaagtgccgcgaccctaacccagtggactcgggctgccgggggattgacagcaagcactggaattcatactgtactacgacgcataccttcgtgaaagccttgaccatggacggaaagcaggccgcatggcggtttatcagaatcgataccgcgtgtgtctgcgtcctcagtcggaaagccgtgcggcgcgca

SEQ ID NO: 17375 - DNA, 723 bp, synthetic construct
  misc_feature 1..723: note = source = /note="Description of Artificial Sequence: Synthetic coding sequence"
  source 1..723: mol_type = other DNA
atgagcatgttgttctatactctcattactgcatttcttattggaatccaagcggagccacattcggaatctaacgtgcctgcgggtcataccataccccaagcacattggactaagctccagcactcactcgatactgcacttcgtcgcgcacgatccgcaccagcagcagcaatcgccgcccgggtcgcaggtcaaactcggaacatcaccgtggaccctaggctgtttaagaagcgccgactcaggtcgcctagggtgctttttagcactcagcctcctcgcgaagcggcagacacccaagatcttgattttgaagtcggcggtgcagccccgtttaaccgtacccataggagcaagagaagctcatcccatccaattttccacagaggcgagttctcggtctgtgattcggtgtcagtgtgggtgggtgataaaaccactgcaactgacataaagggaaaagaagtaatggtgcttggagaagtcaacattaacaactcagttttcaaacaatacttttttgaaaccaagtgtagagatccaaacccagtggattcgggctgtagagggatcgattccaagcattggaactcctactgtaccactacccacacttttgtgaaggcactgactatggacggaaagcaggcggcgtggagatttatccggattgacaccgcgtgtgtgtgtgtgctctcccggaaggcagttagacgggca

SEQ ID NO: 17376 - DNA, 723 bp, synthetic construct
  misc_feature 1..723: note = source = /note="Description of Artificial Sequence: Synthetic coding sequence"
  source 1..723: mol_type = other DNA
atgtcaatgctgttctacactcttataacagccttccttattggtatccaggctgagcctcactccgaaagcaacgtcccggctggccacacgatcccgcaggcacactggacaaaactacagcactcactggatacggcacttcgtcgcgcgagatcagcccccgctgccgccattgccgctagggtcgcaggccagacacgcaatatcaccgttgatcctcggttgtttaagaagcgcagactgcggagcccccgcgtgcttttcagtacccaaccacccagggaggccgcagacacccaagacctggactttgaagtaggtggggccgctcccttcaatcgcacccacaggtccaagagaagcagctcgcatcctatcttccatcgcggagaattctctgtctgcgacagcgtgtcagtatgggtgggagacaagacaaccgctaccgacatcaaagggaaggaggtcatggtgctgggcgaagtgaacattaataactctgtcttcaaacagtattttttcgagacaaagtgccgggatccaaatccggtagattcggggtgtagggggatcgactctaaacactggaactcttactgcacaaccactcatacattcgtgaaagccctcaccatggacggcaagcaggctgcttggaggttcattcggatcgacacggcttgcgtgtgcgttctctccagaaaggccgtacgacgcgcc

SEQ ID NO: 17377 - DNA, 723 bp, synthetic construct
  misc_feature 1..723: note = source = /note="Description of Artificial Sequence: Synthetic coding sequence"
  source 1..723: mol_type = other DNA
atgtcgatgctgttctatacactcattaccgcctttctgataggcatccaggccgaaccacactccgagtctaacgtgccggctggacatactataccacaggcgcactggaccaagttacagcatagcttagacaccgcactgcggagggctagatctgcacctgctgctgccatcgccgccagagtagctggccagacacggaacattaccgttgatccacgtttattcaagaaacgtcgactccgctcccctcgagtgctgttttcaacccaaccacccagggaggccgctgatactcaggatctcgactttgaggtcggcggtgcagccccattcaacagaacacatagatccaaacgttcctcaagccaccccatttttcaccggggtgagttcagtgtttgtgactcggtgagcgtgtgggtgggggacaagacaaccgctacagacattaagggcaaggaggttatggtcctgggtgaagttaacattaataactcagtattcaaacagtatttttttgagacaaaatgtagggatcctaaccccgtggacagcggttgtagaggcatcgatagcaagcattggaattcatactgcactactacccatacattcgtaaaggctcttaccatggacggcaagcaggccgcctggcgcttcatcaggatcgacactgcatgtgtgtgtgtactgagccgcaaggctgtacggagagca

SEQ ID NO: 17378 - DNA, 723 bp, synthetic construct
  misc_feature 1..723: note = source = /note="Description of Artificial Sequence: Synthetic coding sequence"
  source 1..723: mol_type = other DNA
atgagtatgctcttttacacgctgattactgccttcctgattggtatccaggctgagcctcattcggaaagcaatgttcctgccgggcacactatcccacaggcacattggaccaaactacaacacagcttagacacagcactgaggcgtgcccgatcagcaccggctgccgccatcgcagctcgagttgccggacagaccaggaatattaccgtggacccccgcttattcaagaagaggcgattgcgaagtccccgtgtcctgttctctacgcagccgcccagagaagccgcggacacgcaggacctggactttgaagtgggcggtgccgccccattcaatcgtacccacagatccaagcgatcaagttcccaccctatttttcatagaggggaattctctgtctgtgactcggtaagcgtttgggtcggagacaaaactaccgcaacggatataaagggaaaagaggtcatggtgttgggtgaggtgaacattaataactccgttttcaagcagtactttttcgagaccaaatgtagagacccgaacccggttgatagtgggtgtaggggcattgactccaaacactggaatagttattgcacgaccacccatacatttgttaaagccctgaccatggacggaaagcaagctgcttggcgttttatcagaatcgatacagcctgcgtgtgtgtcctcagccgaaaggccgtgcgacgggcc

SEQ ID NO: 17379 - DNA, 723 bp, synthetic construct
  misc_feature 1..723: note = source = /note="Description of Artificial Sequence: Synthetic coding sequence"
  source 1..723: mol_type = other DNA
atgtcaatgcttttctacacactgatcacggctttcctcatcggtattcaggctgagccccactcagagtctaacgtcccagccggccacactattccccaagcgcattggaccaaactgcagcacagcctggatacagccctgagaagagctaggagtgctccagcagcagctattgccgcgcgggttgctggccagacgcgcaatattacagttgatcccaggctcttcaaaaagcgaaggctgcgaagtcccagagtactcttttcaactcaaccaccacgggaggccgctgatacccaggacctggattttgaggtaggcggtgccgctccatttaacagaacccacaggagtaagcgaagtagctctcacccaatattccatcgaggagaatttagcgtgtgtgatagtgtgtctgtgtgggtgggcgacaagacaaccgcaacagatataaagggtaaagaggtgatggtgctgggtgaggtgaacatcaacaattcagtgttcaagcaatacttctttgagactaagtgtcgagatcctaatcctgtggactctggctgtaggggcatcgatagcaagcactggaacagttactgtacgacaactcacacatttgtgaaggccttgacaatggacggcaagcaggcggcctggagatttatccgaattgataccgcttgcgtctgtgtcctctctcgcaaggctgttcgccgagca

SEQ ID NO: 17380 - DNA, 723 bp, synthetic construct
  misc_feature 1..723: note = source = /note="Description of Artificial Sequence: Synthetic coding sequence"
  source 1..723: mol_type = other DNA
atgtcgatgctcttttacaccctcatcactgcctttcttatcggtattcaggctgagccgcactccgagtcaaatgtgccagccggacacaccatcccccaggcccactggactaagctgcaacatagcctggacactgcgttgcggcgcgcccgctccgctccagctgccgccatcgctgcgcgcgtcgcagggcagaccaggaacatcacggtggacccccggcttttcaagaagagaaggcttagatcgccgagggtcctgttttcgactcaaccacctcgcgaggcggcggacactcaggatctggatttcgaggtcggtggagcggccccattcaacagaactcaccgcagcaagcggtcgtccagccacccgatctttcaccggggagagttctcggtctgcgactccgtgtcagtgtgggtcggggacaagactaccgcgaccgacatcaagggaaaggaggtcatggtgctgggagaagtgaacattaacaactccgttttcaagcaatacttcttcgaaaccaagtgccgcgatccaaaccccgtggattcagggtgtagaggcatcgacagcaaacattggaacagctattgcacgactactcacaccttcgtcaaggccctgactatggacgggaagcaggcggcgtggcgctttatccggatcgataccgcttgtgtgtgcgtcctgtcgcggaaagcggtgcgccgcgcc

SEQ ID NO: 17381 - DNA, 723 bp, synthetic construct
  misc_feature 1..723: note = source = /note="Description of Artificial Sequence: Synthetic coding sequence"
  source 1..723: mol_type = other DNA
atgtccatgctgttctacactcttatcactgccttccttatcggaatccaggctgaacctcacagcgaatccaacgtgccagccggacacactatcccgcaggcgcactggaccaaactccaacactcgcttgacaccgcactcagaagggcgcgcagcgccccagcggcagccatcgccgctcgggtggccggacaaacccgcaatatcactgtggacccgaggttgtttaagaagcgccgcctgagatcgccgcgcgttctgttcagcactcaacccccacgggaggcggcagacacccaagacctcgatttcgaagttggaggcgcggcgccattcaaccgaacccatcggtcgaagcggtcctcctcccaccccattttccatcgcggcgagttttcagtgtgtgatagcgtgagcgtgtgggtgggcgacaagaccaccgccaccgacatcaaaggtaaagaggtgatggtgctgggggaagtgaacattaacaactcggttttcaagcagtacttctttgaaacgaagtgccgcgacccaaacccagtggattcgggttgccggggcattgattcgaaacactggaactcctactgtaccactacccatacctttgtgaaggccctgactatggatggcaaacaagctgcgtggcgcttcatccgcatcgacaccgcgtgcgtgtgcgtcctgagcagaaaggctgtgcgcagggca

SEQ ID NO: 17382 - DNA, 723 bp, synthetic construct
  misc_feature 1..723: note = source = /note="Description of Artificial Sequence: Synthetic coding sequence"
  source 1..723: mol_type = other DNA
atgtcgatgctgttttatacattgatcacagcatttctcattggcatacaagccgagccccactctgagagcaacgtccccgccgggcacaccatcccccaggcccactggaccaaacttcaacacagcctggatactgcactgagacgggcccggagcgcacctgctgcagctattgcggctcgcgttgcggggcagacccggaatattacggtggatccacgactgtttaagaagagacgcctgcgctccccacgggtgctgttcagcacccagcccccacgggaggcagccgatacccaggaccttgactttgaggtcggaggcgcagccccattcaatcggacccatagatctaaaaggagtagtagtcacccgatttttcacaggggagagtttagcgtgtgtgatagtgtaagcgtctgggtgggagataaaacaacagccacagacattaagggaaaggaggtcatggtgcttggggaagtgaacatcaacaactccgtcttcaaacagtacttttttgagactaaatgtagagaccccaacccagtagattccggatgtcgcggcattgacagtaaacactggaatagttattgcacaactacacatacattcgtcaaggctctgacaatggatgggaaacaggctgcatggagatttattcggattgacacagcctgtgtgtgtgtgttgagtagaaaagcagtaagacgggct

SEQ ID NO: 17383 - DNA, 1911 bp, synthetic construct
  misc_feature 1..1911: note = source = /note="Description of Artificial Sequence: Synthetic coding sequence"
  source 1..1911: mol_type = other DNA
atgtccgaacgcaaagaaggtagaggtaaagggaaaggcaaaaagaaggagcgcggatccggaaagaagcctgaatccgctgcgggaagccagtcaccagcactgcccccaagactcaaggagatgaagtcccaggaatcggcagccggaagcaagctcgtcctgcggtgcgagacttcaagcgaatactcgtccctgcgttttaagtggttcaaaaatggaaatgagctgaacagaaagaataagcctcagaacattaagatacaaaagaagcctggtaagtccgaacttcgaatcaacaaggcctctctcgcagactccggagagtacatgtgtaaagtgatctccaagctggggaacgattcagcaagcgcgaacattaccatcgtggaatcgaatgaaatcatcacggggatgcccgcctcgactgaaggcgcatacgtgagctccgaatcacccattagaatttccgtgtcgactgaaggtgcaaacacctcctcctccacgtccaccagcactaccggaacttcgcacctggtgaaatgcgcggagaaggaaaagaccttttgcgtgaacggcggggaatgttttatggtcaaggatctttcgaatcccagcaggtacctgtgcaagtgtcccaacgaattcactggggataggtgtcagaattacgtgatggcctcgttttacaaggcagaggaactgtaccaaaagagagtgcttaccatcaccggaatatgtatcgcacttttggtggtcggcataatgtgcgtggtggcgtactgtaagactaagaagcagcgaaagaagctccacgacagactccgccagtcccttaggtcagaacgcaacaacatgatgaacattgcaaacggtccacatcatccaaacccgccacctgaaaacgtccaacttgtgaaccagtacgtctccaaaaacgttatttcatcagaacatatcgtggagcgagaagctgaaacttccttttcaacctcgcattacacctcgaccgcacatcattccaccaccgtgactcagaccccctcgcattcgtggtcgaacggtcatactgaatccattctgtcggaatcccactcggtgattgtgatgtccagcgtggaaaactcacgccactcctcccctactggaggccctagaggacgcctgaacggtactggagggcctagggaatgtaattcctttcttagacatgctcgcgagactccagattcctaccgagattccccacattcagagcgttacgtgtcggcaatgaccacgccagcccgtatgtcgcccgtggattttcatactcctagctcacccaaatcacctccatctgaaatgagccctccagtgtcgtcgatgaccgtctccatgccatcaatggcggtgtcgccattcatggaggaagagcgaccacttcttttggtgacccctcccagacttcgtgaaaagaagttcgatcatcatcctcagcaattttcgagctttcatcataaccctgcccacgattcgaactcactccccgcgtcgcctcttagaatcgtggaggatgaagaatacgagactacgcaggaatacgagcccgcacaagagcctgtgaaaaagctggcaaattcccgtcgggcaaagcgtaccaagccaaacggccatattgccaacagactggaagttgattcgaacacttcttctcagagctccaattccgaatccgaaaccgaagatgaacgtgtgggtgaggacacgcccttccttggaattcaaaaccctttggcagcatcgctggaagcaactccagcattcagactggcagatagcaggaccaatccagctggtcgattctcgactcaagaagagattcaagcaaggcttagcagcgtgattgcaaatcaagatcctattgcggtg

SEQ ID NO: 17384 - DNA, 1911 bp, synthetic construct
  misc_feature 1..1911: note = source = /note="Description of Artificial Sequence: Synthetic coding sequence"
  source 1..1911: mol_type = other DNA
atgtcggaacgtaaagaaggtagaggcaaaggtaagggtaaaaagaaagaacgtgggagtggtaagaaacccgaatctgctgcagggtcgcagtcccccgcactcccaccccggctgaaagagatgaagtcccaggaaagcgcggcaggatctaagctggtgctacgctgtgagacgtcctccgaatattcttctcttcggtttaaatggttcaaaaacggtaacgagctgaaccgtaagaacaagccacaaaacataaagatccaaaagaagccgggcaagtctgaactgcgcattaacaaggcctcgctggccgattctggagagtatatgtgtaaagtgatatctaagctgggcaacgactccgcttcagccaacatcacaatcgttgaaagcaacgagattattaccggaatgccagcttctaccgaaggcgcctacgtgtcctcagaaagccccatacgaatctcggtgagtaccgagggggctaatacttctagttctacctctactagtacaaccggaacgagccaccttgtcaagtgcgcagagaaagagaagaccttttgtgtgaacggtggtgaatgttttatggttaaagatctgtcgaatccaagtaggtatctgtgtaaatgcccaaatgaatttacaggagatcggtgtcagaactacgtcatggcctctttctataaggccgaggagctctatcagaagcgggtgctcaccatcactggaatttgcatcgctctcctggtggtcgggattatgtgcgtagtggcatactgtaaaaccaaaaagcagcgcaagaaactgcatgaccgactgcgccagagtctgcgctccgagagaaataacatgatgaatattgccaatggcccacatcatcctaatcctccaccggaaaacgtccagctggttaaccaatatgtcagcaagaacgtcatcagttcagagcatattgttgagcgcgaggcggagacgtcttttagcacatcccactacacaagcactgcacaccactccaccacagttacccaaacccctagtcactcatggtctaatggccacacagagagtattctgagtgagtcacactccgtgatcgtaatgagcagcgtggaaaattcacggcattcatctcccactggaggtcccaggggccgccttaatggcaccggcggtcctcgcgaatgcaattcatttctgcggcacgcccgcgaaacacccgacagttatcgggactcgccacatagtgaacggtatgtgtcggccatgacaacaccagctagaatgagtcctgtggattttcatacgcccagctctcctaagtccccacctagcgagatgagccctccagtttcatcaatgactgtgagtatgcccagcatggctgttagcccattcatggaagaagagcgaccactgctgctggtaactccaccgcgcctgcgcgaaaaaaaattcgaccatcaccctcaacagttctcctcgtttcatcataatcctgcccatgattccaattcgttacccgcaagccccttaagaatcgtggaggatgaggaatacgaaaccacccaggagtacgagccggctcaggaaccagttaagaagctagcaaatagtcgacgcgctaagagaaccaagcccaatggccatattgccaataggctggaggtagacagcaacacctcctctcagtcaagtaactctgagtccgagaccgaagatgagcgggttggggaggatacaccattcctgggtatacaaaacccgcttgcggcatcgctggaagcgacacctgcctttaggctagccgacagcagaaccaaccccgctggccgattctccactcaagaagagatccaggcgcgtctcagctcggtcattgcgaatcaggaccccattgccgtg

SEQ ID NO: 17385 - DNA, 1911 bp, synthetic construct
  misc_feature 1..1911: note = source = /note="Description of Artificial Sequence: Synthetic coding sequence"
  source 1..1911: mol_type = other DNA
atgtcagagaggaaggaggggcgcggtaaaggaaagggtaagaagaaagagcgaggcagtgggaagaagccagagagtgccgctgggtcgcagtctcccgctctgcctccccgattgaaggaaatgaaatcgcaagagagcgctgcgggctccaagctggtcctccggtgcgagacctcaagtgaatattcctcactgcggttcaagtggttcaagaacggaaatgagcttaacaggaagaataagccccagaatatcaagatccagaaaaaacccggcaagagcgagctccgaatcaacaaggcctctctcgctgactcaggtgaatacatgtgcaaagtgatctctaagctcgggaacgacagtgcgtctgccaatataaccattgtggagtccaacgagatcatcactggcatgcctgcttctaccgagggggcctatgtgagcagtgagtctccaatacggatttcagtatcaaccgagggagccaacacttcctcatcaacgtcaacttccacaactggtacgagccacctcgtgaaatgtgccgagaaggaaaagaccttttgcgtcaatggtggcgaatgtttcatggttaaggacctgtccaacccctcacgctatctttgcaaatgccccaacgagttcacgggggataggtgccaaaactacgtgatggcttctttctacaaggccgaggagttgtatcagaagcgggtgttgaccatcacaggcatatgtatcgcactgcttgtcgtgggaattatgtgcgtcgtggcctactgcaagactaagaagcagcgcaaaaaactccacgaccgtctacgccagtctcttcggtctgaaaggaataatatgatgaacatcgcaaatgggcctcaccaccctaaccccccccctgagaatgtccagctggttaaccagtacgtgagcaagaacgtgatcagcagcgagcatattgtagagagggaggccgagacaagcttcagcaccagtcattacacatctactgcccaccacagtacaacagtgacacagacaccaagccactcttggtcaaatggacatacagaatcaatcctgagcgagtcacattcggtgatagttatgtcttccgtcgagaattctagacactccagtcccactgggggcccacgcgggcgattgaacggaactggcggtcctagagagtgtaatagcttcctgagacacgcacgtgagacccccgacagctaccgcgactccccgcattcagaaaggtatgtaagcgccatgacgactcccgcacgtatgagtccggtcgacttccatacgccaagttctcccaagtcacctccctccgaaatgagtccacctgtttcatcgatgacagtttctatgccttcgatggccgtgtcaccttttatggaagaggaacggccactgctcctcgtcacccctcctcgtctgcgcgaaaaaaaatttgaccaccacccccagcaatttagcagctttcatcacaaccccgctcacgattccaactccctgcccgccagcccgttgcgtatcgtagaggatgaggaatatgaaacgacacaggaatacgagcctgcgcaggagcccgtgaagaagttggctaattctcggagagccaaaagaaccaagccaaacgggcatatcgctaaccggctggaggtggattccaatacatcctcacagtcctctaacagcgaaagcgagacagaggatgaacgggtgggagaggatacacccttcttgggcatccagaacccattagcggcctccttagaggcaacccccgccttcagactggcagattcccggacaaacccagcagggcgcttctcaacgcaggaagaaatccaggcacgcttaagttcagtcattgccaaccaagacccgattgcagtg

SEQ ID NO: 17386 - DNA, 1911 bp, synthetic construct
  misc_feature 1..1911: note = source = /note="Description of Artificial Sequence: Synthetic coding sequence"
  source 1..1911: mol_type = other DNA
atgagtgagcgcaaggagggcagaggcaaggggaaaggcaagaaaaaggaacgggggtccgggaaaaaacctgaaagcgctgcgggtagccagagccctgcattgcccccaagacttaaggagatgaaatctcaggagagtgcagccggtagcaaactcgtcttacgctgtgagacatctagtgaatattcaagcctgcgtttcaaatggtttaaaaacgggaacgagctgaaccgaaaaaataaaccccagaatatcaaaatacagaaaaagccaggcaagtctgagctgcggatcaataaagcttctctggcggactcaggagagtacatgtgtaaagttatatctaagctggggaacgactccgcctccgccaatattactatcgttgaaagtaatgaaattattactggcatgcccgcttctactgaaggtgcatatgtgtctagtgaatcacccatccgcatcagcgtcagtacagaaggcgccaacacaagcagtagcacgtcaacttcgaccaccgggaccagccatttagttaagtgcgcggagaaggaaaagacgttctgtgttaacggcggggaatgttttatggtgaaggacctctcaaatcccagcaggtatctgtgcaagtgtcccaatgaatttactggggatagatgccaaaactacgtcatggccagcttctataaggcagaagagctgtatcagaaacgagtgctgaccattacaggtatatgcattgccctgctggtcgtgggaatcatgtgcgttgtcgcatactgcaaaaccaagaagcaaaggaaaaagttacacgatagacttagacaatctttaaggagcgaaaggaacaacatgatgaatatagccaatggtccccatcatcccaatcccccacccgaaaacgtccaattggttaaccagtacgtatctaagaatgtgatctcttccgaacacattgtagagagggaagccgagacctcatttagtacctcccactatacgagtaccgctcaccatagtacaacggtgacacagacaccatcacattcttggtcgaacggtcacaccgagtctattctgtccgaatctcactccgtcattgtgatgtcatcagtcgagaattctagacacagcagcccaactggaggtccccgggggagactcaatggaacagggggtcctcgggagtgtaattcttttctccggcacgctcgtgaaactcccgactcctatagggattcgccacattcggaacgttatgtatctgcaatgacaactcccgccaggatgagtcccgtggattttcacacgccatccagcccgaagagcccaccctccgaaatgagcccccccgtgagctcaatgacggtctctatgccaagtatggcagtgtcccccttcatggaggaggagcggcccttgttgttggtcaccccccctcggctgagagaaaagaaattcgatcaccacccccaacaattctccagtttccatcataatcctgctcacgactccaacagtttacctgcctcgcccctccgcattgtcgaagacgaggagtacgaaacaacccaagagtatgaacctgcccaagagcctgttaagaaactggccaatagtcggcgggccaaaagaacgaaacctaacggccatattgcaaatcgtctggaggtcgattcaaacacatcctcccagtccagtaactctgagtcagaaaccgaggatgagagagttggagaggatacacccttccttggaatccagaatccactggctgccagcctggaagcaactccggcattccggttagcagattcaagaacaaaccccgctggacgatttagcactcaggaggaaatccaggccagactgtccagtgtgatagccaaccaagatccgatcgctgtg

SEQ ID NO: 17387 - DNA, 1911 bp, synthetic construct
  misc_feature 1..1911: note = source = /note="Description of Artificial Sequence: Synthetic coding sequence"
  source 1..1911: mol_type = other DNA
atgtcagagagaaaagaaggtcgcggcaaaggcaagggtaagaaaaaagaaaggggctctggcaagaaaccagaatctgctgcagggagccaatcaccagctcttccaccacgcctgaaggaaatgaagagccaggagtcggcggctgggtcaaagttggtgcttcggtgtgagacaagttcagaatactcatctctgaggtttaagtggtttaagaatggcaatgagctcaaccggaagaataaacctcaaaatattaaaatccaaaaaaagccgggtaaatcggaactgaggatcaataaggcctctctcgcggattcgggcgaatacatgtgcaaggtgatttcaaaacttggaaacgactccgccagcgcaaacattacaatcgtcgagagcaatgagatcataactggtatgccagccagcactgagggggcctacgtttcctccgaatcacctattcgaatttccgtgtcaactgagggggcaaatacttccagctcaactagtacatcaactactgggacatcacacctcgtgaagtgtgccgagaaggaaaagacgttctgcgtcaacgggggggagtgcttcatggtcaaggacctgtccaatcctagcagatatctctgcaaatgtcccaatgaatttaccggagatcgttgccagaactatgtcatggcctccttctacaaagcggaggaactttaccagaagcgcgtcctgaccattactggtatttgtattgcactccttgtagtgggcatcatgtgtgtcgtggcctactgtaagaccaagaaacagaggaaaaaattacacgataggctgaggcagtccctgagaagtgaaaggaacaatatgatgaatattgccaacggtcctcatcatcccaacccaccacccgagaacgtacagcttgtgaatcagtacgtgagtaagaatgtgatctcttcagagcacatagtcgagcgcgaggccgaaaccagtttctccactagccactacacctctactgctcaccacagtactaccgtgacacaaacaccttcccatagttggtctaacggccataccgaatctatcctgtccgaaagtcacagcgtgattgtgatgagcagcgtagagaacagccggcattccagccctaccggagggcctagaggtcggctgaacggcacgggcggtccacgggaatgcaacagtttcctccggcacgctagagaaacccctgactcctatagggacagccctcatagtgaaagatatgtgtctgctatgacgacaccagcaaggatgtctcctgtggattttcacaccccaagttcaccaaaaagcccgccatccgaaatgtcacccccggtgagttccatgaccgtctcaatgccatctatggcagtatcaccttttatggaggaagagcggcctctgctgttagttacgccaccacgcctgcgcgagaaaaaatttgaccaccaccctcaacagttctcctccttccatcacaatcctgctcatgactcgaactccctgccagcctctcccctgcggatcgtggaggacgaagagtatgagactacccaagagtacgagcctgcccaggaacctgtcaaaaaacttgccaatagtaggagagctaaacgcacaaaacccaatggacacatcgcgaaccgactcgaggtggacagtaacacatcttctcagagcagcaattctgagtctgaaacggaagatgagagagtgggcgaagatacaccctttttggggattcagaatcctttggccgcaagtctcgaggccacgcccgcattccggttagccgactctagaaccaatcctgctggaagattcagcacccaggaggaaattcaggctcggttgtcatccgtgatcgcaaatcaggatccaatagccgta

SEQ ID NO: 17388 - DNA, 1911 bp, synthetic construct
  misc_feature 1..1911: note = source = /note="Description of Artificial Sequence: Synthetic coding sequence"
  source 1..1911: mol_type = other DNA
atgtccgaacggaaagaaggccgaggcaaagggaaaggaaaaaagaaggagcgtggttcaggtaagaagcctgaatcagcagcgggctcccagagccccgcactgcctccacggctgaaggagatgaaaagtcaggagtccgcagccggctccaagctagtcctgcggtgcgaaacatcctctgaatacagctccttgcgattcaaatggtttaagaacgggaacgagctgaacagaaaaaacaaacctcagaatattaaaattcagaagaaacctgggaaatccgagctgcggattaataaagcttcactagccgatagcggcgaatacatgtgtaaggtgatctctaaactgggaaacgactcagcatcggcaaatatcaccatcgtggagagcaacgagatcatcactggaatgcccgcgagtaccgagggggcatacgtcagttctgaaagcccgatccgcatttcagtgtcaaccgaaggggctaacaccagttcctcaacctccacctctacaaccggcacttctcacctggtcaagtgcgcagaaaaagagaagactttttgcgtaaatggcggagagtgtttcatggtcaaagacttaagtaatccctctagatatctttgtaaatgtccaaatgaatttacaggcgataggtgccagaactacgttatggcctccttctataaggcggaagaactgtatcagaaaagggttctcactatcacgggcatctgtatcgctctgttggtggtgggcatcatgtgcgtcgtcgcctactgtaagacaaaaaagcagagaaaaaaacttcatgataggctaaggcaatcgctgcgttctgagcgaaacaacatgatgaacatcgccaacgggcctcatcatcccaatccaccgcccgagaacgtgcaactggtcaaccaatacgtctctaagaacgtaatctcttccgaacacattgttgagcgtgaggcggaaacttcatttagcaccagccactatacaagcactgcccaccatagtacgacggtcacacagacacccagtcattcttggagtaatggacacaccgaatccatcctgtccgaatcccatagtgtgatagtgatgtctagtgtggagaatagtagacactcgtctcctacgggtggtccccgcggccgcttgaatgggaccggtggacctcgggaatgcaacagctttcttagacacgcgcgggaaacccccgacagctatcgcgactctccccatagtgaacggtacgttagcgccatgacaacccctgcccggatgtccccagtggattttcataccccttccagcccgaagagcccaccctcagagatgagtccacccgtatcttcaatgacagtgtctatgccatccatggccgtatctcccttcatggaagaagagagacccctcctgctcgtgacaccaccccgactccgagagaagaagtttgatcaccatcctcaacagttttcaagttttcaccacaatccggcacacgactctaatagcctgccagccagtcccctacgcattgtggaggatgaagagtatgaaacaacacaggagtacgaacccgcacaggaacccgtgaagaaacttgccaactcccgtagggctaagcggacaaaaccgaacggacatatcgccaataggcttgaggtcgatagtaacacttctagccagtcatccaattcagagagcgaaaccgaagatgagagggtcggagaggacaccccctttcttggcatccagaaccctctcgccgcctctctggaagccacacccgctttcaggctggcagactcaagaactaatccagcagggaggttcagtacacaggaggagatccaggctaggctgtcatccgtcatcgctaaccaggatccgatcgccgtc

SEQ ID NO: 17389 - DNA, 1911 bp, synthetic construct
  misc_feature 1..1911: note = source = /note="Description of Artificial Sequence: Synthetic coding sequence"
  source 1..1911: mol_type = other DNA
atgagcgagcgcaaggaaggaagaggcaaaggcaaaggaaagaaaaaggaaagggggagcggaaagaaaccagagagcgccgccggatctcaatcaccagctctaccgcctagactgaaggagatgaagtctcaggaatccgcagccggcagcaagcttgttttgcggtgcgaaacatcaagcgagtattcgagtctccgtttcaaatggttcaaaaatgggaatgaactgaataggaagaacaagccacaaaacataaagatccaaaaaaagccgggaaaaagcgagctgcgcatcaacaaagctagtttagctgactccggcgaatacatgtgcaaggtgattagcaagctcggaaatgactctgcctcggccaacataacaattgtggagtctaatgagattattaccggcatgccagcaagtaccgaaggcgcttatgtgtcttccgagtcccctatccggatctccgtcagcacagaaggagcaaacactagtagcagtacttcaacttctacaactggcacctcccatctcgtaaagtgtgccgagaaagagaaaactttttgcgtaaacgggggtgagtgcttcatggtaaaggatctcagtaatccttcgcgttatttgtgcaaatgccctaatgagttcaccggggatcggtgccagaactacgttatggcatcgttctataaagccgaggagctctaccagaagagagtactcaccattacaggaatatgtattgcactgctcgtagtcggcatcatgtgtgttgtagcttactgtaaaacgaagaagcagagaaagaagctgcatgacaggctcaggcagtctctgaggagcgaacgaaacaatatgatgaatattgcaaacggacctcatcatccaaatccccctcccgagaatgtccagctcgtgaaccagtatgtgtcaaaaaatgtgatttccagtgaacatatcgtggagagagaggccgagacctcctttagcacctcccactacacctcaactgctcatcattcaaccacagtgacacagacacccagtcattcatggagtaatggacacactgagtctatactgagtgagtcccactctgtgatagtcatgagctctgtggaaaacagtcggcattcgtcaccaacaggaggcccccggggccgcctcaatgggaccggtggccctcgcgagtgcaattcatttcttcgtcacgctagggagactcccgacagctaccgggattcaccgcactcagagcgttacgtgagcgcgatgaccacccccgcccggatgtctcccgttgactttcatactccttcttcaccaaaaagccccccttctgagatgagccccccagtgagttccatgacagtcagcatgccaagcatggcagtaagtccctttatggaggaggagcggcccctccttttagttaccccccctcgcttgagggaaaagaagttcgaccaccatcctcagcagtttagctccttccaccacaacccagcccacgattccaactctctaccagcgtccccactgcgcatcgtggaagacgaggaatatgagaccacccaggaatacgagcccgcccaggagcccgttaaaaagctcgctaattctagacgagccaaacggacgaaacccaacgggcatatcgcaaaccgtctggaggtcgactccaacacttcctcccagagttcaaattccgaatccgagaccgaagatgagagagtcggggaggacaccccatttttaggaatccaaaaccctctggctgcgtctttggaggccacccctgcattccgtttagccgacagtcggacaaatccagccgggcgattctccacccaggaggagatccaggcccggttgagttcagtcatagccaaccaagacccgatcgccgtg

SEQ ID NO: 17390 - DNA, 1911 bp, synthetic construct
  misc_feature 1..1911: note = source = /note="Description of Artificial Sequence: Synthetic coding sequence"
  source 1..1911: mol_type = other DNA
atgtcggaacgtaaggagggccgcggcaagggcaagggaaagaaaaaggaaagagggagcggaaagaaaccagagtccgcagcaggtagccaaagccccgccctaccgccccgtctgaaagagatgaagagtcaggagtctgcggccggatcgaagctagtcctgagatgtgagacgtctagtgagtatagctcgctccgctttaagtggttcaagaacgggaacgaactgaaccgcaagaacaagcctcagaatattaagatacaaaagaagcctggaaagagtgagctgcgcatcaataaggccagtttggctgattccggagaatacatgtgcaaggtgattagcaagctgggaaacgattcagccagcgccaatatcacgatcgttgaatcgaacgaaattattacgggaatgcccgcatccacggagggagcctacgtgagctcggagagcccgattcggatctccgtgagtactgagggtgctaacacgagctcctcaaccagcactagcacaacaggaacgtcgcacttagtgaagtgtgcggagaaggagaagacgttctgcgtgaacggaggagaatgttttatggtcaaggacctgagtaaccccagtcgctatctgtgcaaatgcccgaacgaattcaccggtgaccgctgtcagaattatgtcatggcatcgttctataaggccgaggagctgtatcagaagcgtgtgcttacaatcaccggcatctgcatagcgttgctggtcgtcggtatcatgtgcgtggttgcatattgcaagacaaagaaacaacgcaaaaagctacacgacagactacggcaatccttaagaagcgaacgaaacaatatgatgaatatcgcaaatggtccccatcatcccaatccccctccagagaatgtccagctggttaatcagtacgtgtcaaagaatgtcatctcgtccgagcacatcgtcgagcgggaggcagagaccagcttctccaccagtcactacacaagtacggcccaccactcgacgacggttacgcagacgccctctcacagttggagcaacggtcatacggaatcaatcctgtcagagtcccatagtgtgatagtcatgagcagtgtggaaaactcgaggcactccagtccgacaggcggaccacggggcagacttaacggcaccggtggaccacgcgaatgcaattctttcctgcgtcatgcgcgtgagacccccgactcgtaccgcgatagcccgcattcggagcgatatgtgagcgcgatgacaacgcccgcgcgcatgtccccggtcgactttcacacaccaagcagccctaaatcccctcctagcgagatgagcccgcccgtgagcagcatgacggtgtcgatgccatccatggccgtctcgcccttcatggaggaggaacgaccactgctgttagtaacgcccccacgtttgcgtgagaagaagtttgaccatcatccacagcagttcagctcattccaccacaatcccgcccacgattcgaacagcctgccggctagcccccttcgcattgtcgaagatgaagaatacgaaaccacgcaggagtacgaaccagcccaggaaccagtgaaaaaattggccaactcccggcgggccaagcggacgaaaccgaatggacacatcgccaaccggctggaggtcgatagtaatacatcttcccagtctagcaactctgaaagcgaaacggaagacgaaagagtgggagaggatacgccatttctgggcattcagaatccgttggcagccagcctagaggcaacgcccgccttccgcctggccgatagccgcacaaacccggcgggtcgcttctccactcaagaagagatacaggcgagactgtccagtgtgatcgccaatcaagatccaattgccgtc

SEQ ID NO: 17391 - DNA, 1911 bp, synthetic construct
  misc_feature 1..1911: note = source = /note="Description of Artificial Sequence: Synthetic coding sequence"
  source 1..1911: mol_type = other DNA
atgtccgagagaaaagaaggacggggtaaaggaaagggaaaaaagaaagagcgcggatccggcaaaaagccagagtcggcggcgggatcacagtcaccggccctccctccacgcctgaaggagatgaagtcccaagagtctgccgccggctcgaagctggtcctccggtgcgagacttcatccgaatactcatccctgcggttcaaatggttcaaaaacggtaacgagctgaatagaaagaataagcctcaaaacatcaagatccagaagaagccgggaaagtcagagctgcgaatcaacaaggcgtcattggccgacagcggggagtacatgtgcaaagtgatctcaaagctgggaaacgactccgcatcggcaaacattaccatcgtcgaatcaaatgaaatcattactggcatgccggcctcgactgagggagcctacgtctcctccgagtcgccaatccgcatctcagtgagcaccgagggagctaatacttcctcgtccaccagcacgtcaaccactggaaccagccatctggtgaaatgtgctgagaaggaaaagaccttctgtgtgaacggaggagaatgcttcatggtgaaggatctgtcaaatccatccagatatttgtgtaagtgtccgaacgagttcactggagatagatgccagaattacgtgatggcatccttctacaaggctgaagagttgtaccagaaacgagtgttgacgatcaccggcatctgcatcgcactgctggtggtgggaatcatgtgcgtggtggcctactgtaagacgaagaagcagcggaaaaagttgcacgatagacttcgccagtcgcttaggagcgagaggaataacatgatgaatattgcgaacggccctcatcaccctaacccaccacccgaaaatgtgcagctggtgaaccaatacgtttcaaagaatgtgatctccagcgagcacatcgtggagcgggaagctgaaacttccttttcaacctcccattacacctccactgcccaccactcgactaccgtcacccaaaccccgagccattcctggtcgaacggtcataccgagtcaatcctgtctgaatcacacagcgtcatcgtgatgtcgtctgtcgagaattcgaggcactcctcaccgaccggcggaccgcgcggacgcctgaatggaactggtggaccacgcgaatgcaactcgttcctccggcacgcacgggagacgccggattcctacagagactcgccgcacagcgaacgctacgtctccgcaatgactacccccgcccggatgtcgccagtcgacttccacaccccgtcgtcgcctaagtccccgccgagcgaaatgagcccgccggtgtcgtcaatgactgtgtcaatgccgtccatggctgtgtcccccttcatggaagaggaacgccctctgctgctcgttactccaccgaggctcagagagaaaaagtttgaccaccaccctcaacagttctcatcattccatcataacccggctcacgattcaaattcgctcccggcgtcccctctgaggattgtggaggacgaagagtacgaaaccactcaggaatacgaaccagctcaggaacctgtgaaaaagttggcaaacagccgccgcgccaagagaaccaagccgaacgggcacattgcgaaccggctggaggtggactctaacacctcatcgcaatcatccaattccgaatccgaaaccgaggacgaaagggtgggagaagataccccgttccttggtattcaaaatccgctggccgcaagcctggaagcgacgccagcgttccggttggcggactcgcggactaacccggcgggacggtttagcactcaggaggaaattcaggcccggctttcgagcgtgatcgcaaaccaggatcccatcgctgtc

SEQ ID NO: 17392 - DNA, 1911 bp, synthetic construct
  misc_feature 1..1911: note = source = /note="Description of Artificial Sequence: Synthetic coding sequence"
  source 1..1911: mol_type = other DNA
atgtcagaaagaaaagaaggtcgaggtaaaggaaaaggtaaaaaaaaagaaagaggttctggaaaaaaaccagaatcagcagctggatcacaatcaccagcacttccaccacgtcttaaagaaatgaaaagtcaagaatcagctgcaggttcaaaacttgttttaagatgtgaaacttcatcagaatattcatctttaagattcaagtggtttaaaaatggaaatgaattaaatagaaaaaataaacctcaaaatattaaaattcaaaaaaaacctggaaaaagtgagttaagaattaataaggctagtttagctgatagtggagaatatatgtgtaaagttatatcaaaattgggtaatgatagtgcttctgcaaatataacaattgttgaatcaaatgaaattattacaggaatgcctgcaagtactgaaggtgcttatgtttcttcagaatcaccaattagaatttctgtaagtacagaaggtgctaatacaagctcatcaacttctacatcaactactggaacaagtcatcttgttaaatgtgctgaaaaagaaaagactttttgtgtaaatggaggagaatgctttatggttaaggacttatctaatccttctaggtatttatgtaaatgtccaaatgaatttactggagatcgttgtcaaaattatgttatggcttcattttataaagccgaagagctttatcaaaaaagagttttaactataacagggatttgtattgctcttttagtggttggtattatgtgtgttgttgcatattgcaaaacaaaaaaacaaagaaagaaacttcatgaccgattgagacaatctttaagatcagaaagaaataacatgatgaatattgctaatggacctcaccatccaaatccaccaccagagaatgttcaattagtgaatcaatatgtttctaaaaatgtcatatctagtgaacatattgttgaaagagaagcagaaactagtttttctacatcacattatactagtacagcacatcattcaacaacagttacacaaactccatcacattcatggtcaaatggacatacagaatcaatcttgtctgaatcacatagtgttattgttatgtcatctgttgaaaattcaaggcattcatctcctacaggaggaccaagaggaagattaaatggaactggaggacctagagaatgtaattcattccttagacatgctagagaaactccagattcatatagagattcaccacacagtgaaagatatgtttcagcaatgacaacaccagcaagaatgagtccagtagattttcacacaccatcatcaccaaagtcaccaccatctgaaatgtcaccacctgtttctagtatgactgtttcaatgccaagtatggcagtttcaccttttatggaagaagaaagacctttacttttagttacaccaccaagattaagagaaaaaaaattcgatcatcatccacaacaattcagttcatttcaccataatccagcacatgattctaattctttacctgcttcaccattaagaattgtcgaagatgaagaatatgaaactacccaagaatatgaaccagctcaagaacctgttaaaaaacttgctaattcaagaagagcaaaaagaacgaaacctaacggacatatagcaaatcgattggaagttgactctaatacatcctcgcaatctagcaactcagaaagtgaaacagaagatgagagagtaggagaagacactccatttcttggaattcaaaatccacttgctgcaagtttagaagctacaccagcattcagattagctgatagtagaactaatccagcaggacgtttttcaacgcaagaagaaattcaagctagactttcttcagtaattgccaatcaagatccaattgcagtg

SEQ ID NO: 17393 - DNA, 1911 bp, synthetic construct
  misc_feature 1..1911: note = source = /note="Description of Artificial Sequence: Synthetic coding sequence"
  source 1..1911: mol_type = other DNA
atgtctgagaggaaagaggggcgcggcaagggcaagggcaagaagaaggagcgcggatccggaaaaaaacccgaaagtgccgcaggctcccagagccccgccctgccgcctaggctgaaggaaatgaaaagccaggaatctgccgccggttccaagctggtgctccgatgcgagacatcctcagagtacagctccttgcggtttaagtggttcaagaatggtaacgagcttaatcgcaagaataaaccacaaaacatcaaaattcaaaagaagccaggcaagtcagagctgaggattaataaggctagcttggccgacagtggcgaatacatgtgcaaggtcatatcaaaactggggaacgattctgcgtccgccaatattactattgtggagtccaatgagatcataacaggaatgcccgcaagcacagagggtgcttatgtgtctagcgagtcccctatcaggatcagtgtgagtacagagggggcaaatacaagttctagcactagcacgtccacaaccggcactagtcatttggtgaagtgcgcagagaaggagaagacattttgcgttaacggaggagaatgcttcatggtgaaagatcttagtaatcccagccgatatctctgtaagtgtccaaacgagttcacgggagacagatgccagaactacgtgatggcgtccttttacaaggcggaagagctctaccaaaagagagtgctcactattacaggcatctgtattgcactccttgttgtaggcatcatgtgtgtggttgcgtactgtaagacgaaaaagcagagaaagaaactgcatgaccgactgaggcagagtttgagatctgaaaggaataacatgatgaacatcgctaacgggccccatcaccctaatcccccccccgaaaacgtgcagctggtgaaccaatacgtgagtaagaacgtgatttcctctgaacacatcgtcgaaagagaggctgagacatcatttagcacaagccactatacatcaaccgcacatcactccacgacagttacccagactccgtctcactcttggtctaacggacatacagagtccattctttccgaaagccactctgtcattgtgatgagctccgtcgaaaattcacggcattcaagtccaaccggcgggcctcgggggaggttgaacggcactgggggcccccgggagtgtaattcattcctgcggcacgccagagaaactcccgattcatacagggattctcctcactccgaacgctatgtcagcgccatgaccacccctgctcggatgtcccccgtcgacttccacacccccagcagccccaaatccccaccaagtgagatgtctccaccagtgagctctatgacagtgtcaatgccctctatggccgtgtctcctttcatggaggaggaacggcccctgctcctggtgacgccaccccgcttgcgagagaagaagttcgaccaccaccctcagcagttttcttcatttcatcacaaccccgcacatgactccaatagcttgcctgccagtcccctgagaatcgtcgaggacgaagaatatgagactacgcaggagtacgaaccggcccaggaacccgtgaagaagcttgctaattccagaagggctaaacgcaccaagccgaatggtcacatcgctaatcgcctcgaggtcgattctaatacatcatctcagagctctaattctgagtcagagaccgaggatgagagggttggcgaagatactccgttcctgggaatccaaaaccccctggcagcgagtctcgaagctacaccagcgtttcgcctcgctgactcccggaccaacccagctggtcgcttttccacccaagaagaaattcaagcaaggctgtcctccgttatcgccaatcaagatccgatcgcagtg

SEQ ID NO: 17394 - DNA, 1911 bp, synthetic construct
  misc_feature 1..1911: note = source = /note="Description of Artificial Sequence: Synthetic coding sequence"
  source 1..1911: mol_type = other DNA
atgagcgaacgcaaagagggacggggaaagggaaaaggcaagaagaaggaaagggggtcgggaaagaagccggaatcggcggcggggagccaatcaccagcactcccaccgcggcttaaagagatgaaatcgcaggaaagcgctgctggatcgaaactggtgcttaggtgcgagacttcttcggaatattcgtccttgcgcttcaagtggttcaagaatggcaacgagctgaaccgcaagaataagccacaaaacatcaaaattcagaagaagcccggtaaatctgagttgagaatcaacaaagcctcgctggcggactccggcgaatacatgtgcaaggtgatctcgaagctggggaatgactcagcctcggccaacatcactatcgtggagtcgaacgagattatcactggaatgccagcatcgaccgagggggcgtatgtctcgtcggaatcccctatcagaatctccgtgagcacggagggtgctaacaccagctcatcgacttccacctcaaccaccggaacttcccatctggtcaagtgcgcagaaaaagaaaagaccttctgcgtcaatggaggagaatgcttcatggttaaggatctgagcaacccgagccgatacctgtgcaagtgtccaaacgaattcaccggagacagatgtcagaactacgtgatggcctcattctacaaggcagaggaactgtaccagaagcgggtgctcaccatcaccggcatctgcatcgcgctcctcgtcgttggtattatgtgtgtggtggcgtactgtaaaaccaagaaacaacggaagaagctgcacgacagacttcgccagtctctgaggtccgaacggaacaatatgatgaatattgctaacggtccacatcaccccaacccgccgccggagaatgtgcaactggtgaaccagtacgtcagcaagaacgttatctcatcagagcacatcgtggaaagagaggccgagactagcttctcgacgtcccactacacctcgactgcacaccattccactactgtcactcagactccaagccattcctggtcgaatggccacactgagtccatcctctcggaaagccactcggtgatcgtgatgtcgtcagtcgagaacagcaggcatagctcaccaacgggaggcccacgcggtcgcctgaatggaaccggagggccgagggagtgcaactcattcctccgtcatgcccgagaaacccctgattcgtaccgcgactctccgcactcggaaagatacgtgtcggcaatgacgaccccggcaagaatgtctccagttgacttccatactcccagctcccctaagtccccgccatctgaaatgtcccctcccgtctcttctatgacggtttctatgccgtctatggctgtgtccccgtttatggaagaagagcgccccttgctgttggtcactccgcctcgcttgcgggaaaagaaatttgaccaccacccgcagcagttctccagctttcatcacaaccccgcgcacgattccaattcgctccctgcctccccgctcagaatcgtcgaggacgaggagtacgaaaccactcaggaatacgagccggcccaagagccagtgaagaagctggccaattcacggcgggccaagaggaccaagccaaacggacatatcgcgaatcgattggaggtggattcaaacacctcgtcccaatcctcgaactccgaatcagaaactgaagatgaacgtgtgggagaggacactccgtttctggggattcagaaccctcttgccgcatcgctggaggccacccccgcgttccggctggccgattcccgcaccaatccggccggacggttctcgacccaggaagaaatccaagcgcgcctgagctcggtcatagcgaatcaagatcctattgcagtg

SEQ ID NO: 17395 - DNA, 1911 bp, synthetic construct
  misc_feature 1..1911: note = source = /note="Description of Artificial Sequence: Synthetic coding sequence"
  source 1..1911: mol_type = other DNA
atgtccgaacgcaaagaagggcggggaaaagggaaagggaagaagaaagaaagggggtcaggaaaaaagcctgaatcagctgctggatctcagtcaccagccctacctcctcggctcaaagaaatgaagagtcaggaaagtgctgccgggagtaagctcgtgctccgatgtgaaacatcttcagagtattcttccttacggttcaagtggttcaagaatgggaacgagctgaatagaaaaaacaaacctcagaacataaagatccagaaaaaacctggaaaatccgagcttcggatcaataaagcttccctagccgatagtggagaatatatgtgcaaagtcatctcaaaactcgggaatgatagtgcgtccgccaacatcacaatagtggaatctaacgaaataataacaggaatgcccgcctcaacagagggggcctatgtctcctcggagtctcccatcagaataagtgtctctacagaaggagccaatacttcaagttcgacttctacatcaacaacaggaacatcccacctagtaaaatgtgccgaaaaagagaagacattttgtgtgaatgggggggaatgtttcatggtgaaggatttgtctaacccatcccggtatttatgcaagtgccccaacgagttcacaggagataggtgtcaaaattacgtgatggcttcgttctacaaagccgaggaactgtaccagaaacgggtgctgactatcacagggatctgcatagctctattggttgttgggataatgtgtgttgttgcatattgcaaaactaagaagcagaggaaaaaattacacgaccggctgagacagtccctccgctctgaacggaacaacatgatgaacatcgccaacgggccccaccacccaaatcctcccccagaaaatgttcagcttgttaatcagtacgtttcaaagaatgtgatttcttctgaacatatcgttgaaagagaggccgaaactagtttttctacttctcattacactagtactgcccatcattccacaacagtgactcagactccatctcattcttggtctaatggacacactgaatccatattatccgaatcccactcagtcatagtcatgagtagtgtggaaaatagtcgccattcctcacctactggaggaccccggggaagattaaacggaacagggggacccagagaatgcaattcgtttctacggcatgcccgggaaactcctgattcataccgggactcccctcactcagaacggtatgtctctgcaatgacaactccagccaggatgtctcctgtggattttcacacaccttcttcccctaagtcacctccatcggaaatgtctccgcctgtctcttcaatgactgtgtctatgccatctatggctgtgtctccatttatggaggaagaacgtcctctcttattagttactccccctcggctgcgcgagaaaaaattcgatcaccaccctcaacagttctccagtttccatcacaatcctgcgcatgattctaactctctacccgcttctcctctgaggatagtcgaagatgaagagtatgagacaacacaggaatacgaaccagctcaggaacccgtcaaaaaactggccaacagtcgaagagcaaaacgaacaaaacccaacgggcatatcgcaaaccgactcgaagtcgattctaacacatcatcccagtcttctaattctgaatcagaaactgaagatgaacgggtcggggaggatacaccatttttagggatccagaatcccttagccgctagtcttgaggcaactcctgcctttagactggccgattctaggactaaccctgccgggcggttctcaactcaggaagagatacaggcccgtctctcatcagtgatagccaatcaggatcccattgccgtt

SEQ ID NO: 17396 - DNA, 1911 bp, synthetic construct
  misc_feature 1..1911: note = source = /note="Description of Artificial Sequence: Synthetic coding sequence"
  source 1..1911: mol_type = other DNA
atgtctgaacgcaaggaggggcggggaaagggcaaaggaaagaaaaaggagaggggtagcggaaagaaaccagaatccgccgctggtagccaatcgccggctcttccaccgcgcctgaaggagatgaagagccaggaatcagccgctggatcgaagctggtgctgcggtgcgaaacctcaagcgaatactcatccctccgcttcaagtggttcaagaatggaaacgagctgaacaggaagaacaaaccacagaatatcaagattcagaagaagccaggaaaatcggagctgaggatcaataaggcctcgctggccgactccggagagtacatgtgcaaggtcatcagcaagctcgggaacgactcggcttccgcaaatatcaccatcgtggaatcaaacgaaatcatcaccggaatgcctgccagcaccgaaggagcctacgtgagctcggaaagcccaatccgcattagcgtgtcgactgaaggggctaacactagctcgtccacctccaccagcacgaccgggacctcgcacctcgtcaagtgcgccgaaaaggaaaagactttctgcgtcaacggcggcgaatgtttcatggtcaaggacctctccaacccctcgcgatacttgtgcaaatgtccaaacgagttcaccggagatcggtgccaaaactacgtgatggccagcttctataaggcggaggaactgtaccagaagagagtgctgactatcaccggcatctgcatcgcgctgctggttgtcggaatcatgtgcgtcgtggcatactgcaagactaagaagcagcgcaaaaagctccatgatcggcttagacagtcgctgaggtcagaaagaaataacatgatgaatatcgcgaacggacctcatcacccgaacccaccacccgagaacgtgcagctggtgaaccagtatgtctcgaaaaatgtcatctcctcggagcatattgtggagcgggaggccgagacttcattttcgaccagccattacacttcaactgcccaccactcgactaccgtcacccagactccgtcccatagttggtcgaacggccacacggagtccatcctctccgaatcgcactccgttatcgtgatgtcgtcggtggagaatagccgacactcatcgcccaccggcggaccgaggggacgcctgaacggaaccggaggcccccgcgaatgcaactccttcttgaggcatgctagagaaacccctgatagctaccgggactcgccacattcagagcggtatgtgtcggcgatgaccactccggctcggatgtcaccggttgatttccataccccttcttcccccaagtccccgccgtcggaaatgtcaccccccgtgtcgagcatgaccgtgtcaatgccgtccatggccgtgtccccgttcatggaagaggaaagaccgctgttgctcgtgaccccgcctagactccgcgaaaagaagttcgaccatcatccacagcagtttagcagctttcaccacaacccggcccatgactccaattcgctgcctgccagccctctgcggatcgttgaagatgaagaatacgagacgacccaggagtacgaacctgcgcaagaaccagtcaagaaactggcgaattcacggcgcgcgaagcggactaagcctaatggacacatcgctaacaggctggaggtcgactcgaacacgagcagccagtcgtcgaacagtgagtcggagactgaagatgagcgtgtgggagaggacacccctttcttgggtattcaaaatcctcttgccgccagcctggaggccactccggccttccgtctggcggactcccggaccaacccagcggggagattctcaactcaggaagagatccaggcccgcctctcaagcgtgatcgccaatcaggaccctattgcggtc

SEQ ID NO: 17397 - DNA, 1911 bp, synthetic construct
  misc_feature 1..1911: note = source = /note="Description of Artificial Sequence: Synthetic coding sequence"
  source 1..1911: mol_type = other DNA
atgtccgaaaggaaggaaggccgaggtaaggggaagggaaaaaagaaggagcgcggtagcgggaagaagcctgagtcggccgcagggagccaatcccccgccctgccgccacgcctgaaggaaatgaagtctcaggaatcagcagcaggatccaagctggtgcttcggtgcgaaacgtctagcgagtactcgtcactgcgctttaagtggttcaagaatggaaatgagctgaacaggaaaaacaaacctcaaaacatcaagatccaaaagaaacctggtaagtccgagcttcggataaacaaggcatcacttgccgactccggagaatacatgtgtaaggtgatatccaagctgggaaacgattcggcatcagccaatatcacgattgtcgagtcaaacgagatcattactggaatgccggcgtccaccgagggtgcatacgtctcctccgaatcacccattaggatttcggtgagcaccgaaggcgcgaatacttcgagcagcacctccacctccactaccggtacctcgcatcttgtgaagtgtgccgagaaggaaaagactttctgtgtgaatggaggcgaatgttttatggtcaaggatctctcaaacccttccagatacctgtgtaaatgtcctaatgaatttaccggtgatcggtgtcagaattacgtgatggcgtccttttacaaggcagaagaactttaccaaaaaagggttcttactatcaccggcatttgtattgcattgctcgtggtcggaatcatgtgcgtcgtggcgtattgtaaaacgaagaaacaacggaaaaaactccatgatagacttcggcaatcgcttcggtccgagcggaataacatgatgaacattgccaatggacctcatcatccgaatcctccacctgaaaatgtccaactcgtgaatcagtacgtctccaaaaacgtgatctcgtcggagcacattgtggagagggaagcagagactagcttttcaacctctcactacacttcaaccgcacatcattcgactaccgtgacgcaaactccttcgcattcatggtccaacggtcataccgaaagcatcctgagtgagtcacattccgtgatagtgatgagcagcgtggagaattcgagacactcctcgccaaccggaggaccccgcggtcgtctgaacggaactggtggtccaagagaatgtaactcctttcttagacacgcaagggaaacccccgatagctacagggattcgcctcactccgaaagatacgtgagcgcgatgaccactccagcaagaatgtcacctgtcgatttccatacgccctcctcaccaaagtcaccaccttcggagatgagcccccctgtgtcctcgatgaccgtctccatgccttcgatggcagtctcgcccttcatggaggaggaaagaccccttcttcttgtgactccacctagacttagagaaaagaagttcgatcatcatccacaacaattttcctctttccaccataaccccgcgcacgattcaaattcccttccagcctcgcccctgagaatcgtggaagatgaggaatatgagactacccaagagtacgagccagcccaagagcctgtgaaaaaactcgcaaactccaggagagccaagcgcactaagcctaacggacatattgcaaatcgtctggaagtggattcgaacacttccagccagtcgtcgaatagcgaatctgagactgaagatgagagggtgggcgaggacaccccgtttctgggaattcagaacccgctcgcagcctcgttggaagcaacgcctgcatttcgcctggccgatagccgaaccaaccctgccggtaggttctccacccaagaagagattcaagccagactttcctccgtgatcgcaaatcaagacccaattgcagtg

SEQ ID NO: 17398 - DNA, 1911 bp, synthetic construct
  misc_feature 1..1911: note = source = /note="Description of Artificial Sequence: Synthetic coding sequence"
  source 1..1911: mol_type = other DNA
atgagcgaaagaaaagagggccgcggaaaggggaaaggtaagaaaaaggaaagaggcagcggaaaaaaacctgagtccgcagccggaagccagtcaccagccctgccacctaggcttaaggaaatgaagagtcaagaatccgccgctggaagcaaactcgtgctgagatgcgagacatcttcagagtacagctcgctgcgttttaagtggttcaaaaacggcaacgaacttaaccgaaaaaacaagccacagaatataaagattcagaagaagcctggcaagtcagaactgcgcatcaacaaagcttcactggcggactcaggagaatacatgtgcaaagttatcagtaaactgggcaacgacagtgcatcagccaacattactatcgtagagtcaaacgagatcatcacgggcatgccggcttctacggagggggcgtatgtgagcagcgagtctcctatccgaatctcagtgagtaccgaaggcgccaacacaagctccagcaccagcacttcgaccacaggtacaagccatctcgtgaaatgtgctgaaaaggagaagacattctgtgtcaacggaggcgagtgcttcatggtgaaagatctgagtaacccctcacgctacctctgcaagtgtcctaacgaattcacaggtgaccgctgccagaactacgtcatggcttctttctacaaggctgaagagctgtaccagaaacgcgtactgacaatcacaggaatctgtatcgccttactggtggtcggaatcatgtgcgtcgttgcttactgcaaaaccaagaaacagcgtaagaaactccatgatagactgaggcaatctcttaggagcgaacgcaataacatgatgaacatagctaatggcccccaccaccctaatcctccacccgaaaacgtccagctggtgaaccaatatgtctccaagaacgtcatctcaagtgagcacatcgtcgagagggaggcggaaacttccttctccaccagccactacaccagcaccgcacaccactctaccacagtcacacagacgccctcccattcttggtcaaatggacacacagagagcatattaagcgaatcacacagcgtcatcgtgatgagctcagtagagaacagtcgccattccagtcctacaggcggcccccgaggcaggctgaacggcaccggcggccctcgagagtgcaacagctttctgagacacgctcgcgagacaccagactcctatagggactctccacacagcgagagatatgtgtcggctatgaccacaccagcacgaatgtccccagtcgattttcacacacccagctctccaaagtcgcctccttctgagatgagccctcccgtaagcagcatgactgtgtccatgccaagcatggcagtctcaccatttatggaggaggaaaggccacttcttctggtaactcccccaaggctccgtgagaagaaatttgatcatcacccccagcagtttagtagctttcaccataacccagctcatgactcaaacagcttgccggcttctcctctgagaatcgtggaagacgaggaatatgagacaactcaggagtacgagcccgcccaagagcccgttaagaagctggctaatagcaggcgtgcaaaacgaactaagcccaacggccacattgccaacagactcgaggtcgattctaacacaagcagccagagctccaatagcgagtctgagacagaggacgagagagttggcgaagacaccccattcctgggtatccagaacccactcgcagctagtctggaggctactcccgcttttcggctggccgactccaggacaaatccagctgggcgtttcagtacgcaggaggaaattcaggctcgtctttctagtgtcatcgccaatcaagatccaatagccgtg

SEQ ID NO: 17399 - DNA, 1911 bp, synthetic construct
  misc_feature 1..1911: note = source = /note="Description of Artificial Sequence: Synthetic coding sequence"
  source 1..1911: mol_type = other DNA
atgtccgaacggaaggagggcaggggaaaaggaaagggtaagaagaaggagcggggttccggaaagaaaccggaatcagccgctggttcgcagagcccagcgctgccaccacgcctgaaggaaatgaagtcacaagagtcggccgcaggaagcaagctggtcttgaggtgcgagacttcgtcagaatacagcagcctgcgctttaagtggttcaagaatggcaacgaactgaaccggaagaacaagccccagaacatcaagatccagaagaagcctggaaaatcagaactgcgcatcaacaaggcttccctggcggactccggggagtatatgtgcaaagtcatctccaagttgggaaacgactccgcctcggctaacatcaccatagtggagagcaatgaaatcatcactggaatgccggcgtcaaccgaaggagcctacgtctcctccgaatcacctatccgcattagtgtgagcacggagggagccaatacttcctcgagcacctctactagcaccactggcacctcacacctcgtgaagtgcgcggaaaaagagaaaactttctgcgtcaacggcggggaatgttttatggtgaaagaccttagcaatccgtcgcggtacctgtgcaaatgtcctaatgaattcaccggggaccgatgccagaactacgtcatggcttccttctacaaggctgaagagttgtaccaaaagagggtgctgaccatcaccggaatttgcatcgcgctgcttgtggtgggaatcatgtgcgtcgtggcctactgtaaaactaagaagcagagaaagaaactgcacgaccgcctgcgacagagcctgcggtccgagcgcaacaacatgatgaacattgccaacggaccgcaccatccaaaccctccgccggaaaatgttcagctggtgaaccagtacgtgtccaagaatgtcatctcatcagaacacatcgtggaacgggaggccgagactagcttctcgaccagccattatacctcgactgcacaccactcgaccacggtgactcaaactccctctcactcgtggtcaaacggccacactgagtccatcctttccgaatctcactcagtgatcgtgatgtcgtctgtggagaacagccgccactcctcaccgactggcggaccgcgcggccggctcaatggaaccgggggcccgcgggagtgcaattcgttcctcagacatgcacgggaaactccggactcgtaccgcgattcgccccattccgaaagatacgtgagcgcgatgaccactccagcccggatgtcgccggtcgacttccacaccccatcctcgcctaaatcaccaccgagcgagatgtccccgccggtgtcgtccatgacggtatccatgcctagcatggcggttagcccctttatggaagaagaacgcccactgctcctcgtcaccccgcccagactcagggagaagaaattcgatcaccatccacagcaattttcaagtttccatcataatcctgcacatgactcgaactccctcccagcctcgccgttgaggattgtggaggatgaagagtacgagacgacccaagaatacgagccagcccaggaaccagtcaagaagctcgcaaattcacgccgggccaaaagaaccaagccgaatgggcacattgcaaatagactggaggtggattcgaacacctcgtcgcagagctcaaacagcgaatccgaaacggaggacgagcgtgtgggagaagataccccgtttctgggaatccagaaccccctcgcggcatcgcttgaggcgactcctgccttccgcctggcagattccagaactaaccctgccggtcgcttcagcacccaagaagaaatccaggctagactctcgtccgtgatcgctaaccaagacccgatcgccgtc

SEQ ID NO: 17400 - DNA, 1911 bp, synthetic construct
  misc_feature 1..1911: note = source = /note="Description of Artificial Sequence: Synthetic coding sequence"
  source 1..1911: mol_type = other DNA
atgtccgagcggaaagagggaaggggaaaggggaagggcaagaagaaggagcgggggtccggcaaaaaacccgaatcggccgcgggatcccagtcccccgcgttgccccctcggctgaaggagatgaagagccaggagagtgctgcgggaagcaagctggtactccgctgcgagacaagttctgaatactctagcttgcgcttcaaatggtttaagaacggaaatgaactgaaccgcaagaataagcctcaaaatattaagatccaaaagaagcctggcaaatctgaactacggataaacaaggcctctcttgctgattctggtgagtatatgtgcaaagtgatctccaaactggggaacgattccgccagtgccaacattaccatcgtggagagcaacgagatcattacaggcatgccggcgagcacagaaggggcttacgttagctcagagagtcctataagaatcagcgtgtccactgaaggcgcgaatacttcttcatcgacttccacgagtacgacggggacttcacaccttgtcaaatgtgcggaaaaggaaaagacattctgtgtaaacggcggagagtgctttatggtcaaagatctgtctaacccatctaggtatctgtgtaagtgccccaatgagtttactggtgataggtgtcagaattatgtgatggcgtcgttctacaaagccgaggagctctaccaaaagagggtgttgaccataactggaatttgcattgctctactggtggtgggcataatgtgtgtagttgcatattgtaagactaaaaagcagaggaaaaaactgcatgatcgcctgcgacaaagcttgcgatcagagcgcaacaatatgatgaacatcgccaacggtccacatcacccaaaccccccacctgaaaacgtccaactggttaatcagtacgtgtccaagaatgtcatctctagtgaacacatcgtggagagagaggctgagactagctttagcacgagtcactatacatctaccgctcatcattcaacgaccgtgactcagacgccatcccacagctggtccaacggccacacagagtctattctgagcgaatcacactcagtgattgtgatgtcctctgtggaaaactcccggcattcttcaccgaccggaggacccaggggacggctgaatgggaccggagggccgcgagagtgtaattctttcctgaggcatgctagggaaacaccagattcctatcgagattctccacactctgaaaggtacgtgtcagcgatgacaacccccgcacgaatgtcccccgtagattttcacactccttcttcaccgaaatccccaccatctgagatgtcaccacctgtgagttcgatgacagtgagcatgccaagtatggctgtgagtccatttatggaggaagaaaggcccctgctgttagtcacaccacctcgactcagggagaagaaatttgatcaccatccacagcagtttagctcatttcaccacaaccccgcacatgactcaaactctctgccagcttccccgttgagaatcgtcgaagatgaagagtacgagaccacccaggagtatgaacccgcccaggagcctgttaagaagctggccaacagtaggcgggctaaaaggactaaacccaacggccacatcgctaaccggttagaggtagattcaaacacatcttcccagtctagcaatagcgaatctgagacagaggacgaacgcgtgggcgaagatacacctttccttggcatccagaaccctctggctgcatccttggaagctacaccagctttcaggctcgccgatagtcgtacaaacccagcaggaaggttttccactcaggaagaaattcaggctcgactttcctcggttatcgccaatcaggacccaatcgcagtc

SEQ ID NO: 17401 - DNA, 1911 bp, synthetic construct
  misc_feature 1..1911: note = source = /note="Description of Artificial Sequence: Synthetic coding sequence"
  source 1..1911: mol_type = other DNA
atgagcgaaagaaaggagggacgcggcaaaggcaaaggaaagaagaaggaacggggctcaggaaagaaaccagaatcagccgccggatcacaatctcctgcgctgccccccaggcttaaggagatgaagtcccaggagtccgctgccgggtcgaagctcgtgctgaggtgtgaaacttcgtccgagtacagctccctgagattcaagtggtttaagaatggaaacgaacttaaccgtaagaataagccccaaaacatcaaaatccagaagaagcccggaaaatcggaactgcggattaacaaagcctcactggctgacagcggagagtacatgtgcaaggtgatctcaaagctcggcaacgattcagcttcggccaatatcactatcgtcgaatcgaatgagatcatcactggtatgccggcttccaccgagggtgcgtacgtgagctccgagtcaccaatccgcatcagcgtgtcgacggaaggagcaaacacttcgtcctcaacctccacctcgaccaccggaaccagccatctggtgaaatgcgccgagaaggaaaagactttctgcgtgaacggaggagaatgcttcatggtcaaggatctgtcgaacccatcccgttacctgtgcaagtgcccaaacgaattcaccggagatcggtgtcagaactacgtgatggccagcttctacaaagcagaggaactgtaccagaaaagagtcctgaccatcaccggaatttgtatcgcgctgctcgtggtgggcatcatgtgcgtagtggcctactgcaagaccaaaaaacagagaaagaaactccacgatcgcctccggcagtcactccgcagcgaacgcaataacatgatgaacatcgcaaacggaccgcaccatccgaatccaccgccggagaacgtgcagctggtaaaccagtacgtgtcgaagaacgtcatctcctccgaacatatcgtggaacgcgaagccgaaacctctttcagcaccagccactacacctccaccgcccaccactcgaccaccgtgacgcaaaccccttcccattcgtggtccaatgggcacaccgagtccatcttgagcgagtcacactccgttatcgtcatgtcctcggtcgaaaactcgcgccattcctcgccgaccggaggcccgagaggccgccttaacggaaccggaggaccgcgggaatgcaattcgttcctgcggcacgccagggaaacccctgactcgtaccgcgactccccccactcggaaaggtacgtgagcgcaatgaccacgccagctcgaatgtcccccgtcgacttccataccccttcgtcaccgaaaagccctccaagcgagatgagcccgccagtctcaagcatgaccgtctccatgccgtccatggctgtctcgccttttatggaggaagagcggccacttctcctggtgactccgcctcggctcagggagaagaagtttgatcatcacccacagcaattttctagcttccaccataacccggcacacgactcgaattcgctccctgcatcgccgctgcgcatcgtggaggacgaggagtacgagactacgcaggagtacgagcctgcacaggaaccggtgaagaagctggcgaactcccgacgggcaaaaagaactaagccgaacggacatatcgctaataggctcgaggtggactcaaacacctcgtcccagtcatccaactccgaatccgaaactgaggacgaaagagtgggcgaggacacgccgttcctgggtatccagaatcctctggctgcctcgctggaggcgactccggcattccgcctggcggactcccggaccaacccagcgggacgcttttcaacccaggaggaaatccaggcccggctctcgtcagtgatcgcgaatcaagacccgatcgcggtg

SEQ ID NO: 17402 - DNA, 1911 bp, synthetic construct
  misc_feature 1..1911: note = source = /note="Description of Artificial Sequence: Synthetic coding sequence"
  source 1..1911: mol_type = other DNA
atgagcgagagaaaggaggggcgaggaaaaggaaagggcaagaagaaagagaggggctcgggcaaaaaacctgagtccgcggccggatcacagagtccagctctcccgccacggctgaaagagatgaagtcacaggagagcgcggccggaagcaaactcgttcttaggtgtgaaacatcttccgagtattcctccttaaggtttaagtggttcaagaatggcaacgaactcaacaggaagaacaaaccacagaatatcaagatccagaagaaaccaggcaagtccgagcttcgaattaataaagcctcgctggcggactcaggggaatatatgtgcaaggtcatcagcaaacttgggaacgactccgcatccgccaacattacaatcgtggaaagcaacgagataatcacgggcatgccagcgagcacagagggcgcctatgtctcctccgagtcgcccatcaggatcagcgtttccaccgagggagccaacacctcttcatcaacctcaacaagcactacagggacaagccacctagttaagtgtgcagaaaaggagaaaaccttctgtgtcaacggcggagagtgtttcatggtcaaagatctgtctaatccgtccaggtatctatgtaaatgcccgaatgagttcactggggaccgatgccaaaactacgtcatggcaagcttctacaaggctgaagagttatatcagaagcgagtgctgaccatcaccggcatctgcatcgccctcctagtcgtcggaatcatgtgcgtcgtagcctactgcaagaccaaaaaacaaagaaagaagttgcacgataggctaagacagtcactacgcagcgagagaaataacatgatgaatatagccaatggccctcatcaccccaaccctccccctgaaaatgtccagttggtcaatcagtacgttagtaagaacgtgatcagctctgaacatatcgtggaacgcgaggcagaaacatcattctcaaccagccattacactagcacagcccaccactctactaccgtcacccagaccccatcccattcatggtcaaatgggcacacagaaagcatccttagtgagtcccactccgtaatcgtcatgtcaagtgtggaaaattccagacactcttcacccaccggcggaccacgggggaggctgaacggaaccggtggacctcgggagtgtaatagttttcttcggcacgccagagagacgccggactcatatcgagactccccgcactccgaacgctatgtaagcgccatgactactccggccaggatgagtcccgttgacttccacacacccagctctcccaagtctccgccctctgaaatgagccctccggtatcctcaatgaccgtgtccatgccttcaatggcagtgagtccattcatggaggaagaacggcccttgctgttggtcacccctccgcgtctgcgcgagaagaagttcgaccaccacccacaacagttctcatctttccaccataaccccgcccacgacagcaacagtcttccagctagcccgctgaggattgttgaagatgaggaatacgagaccacgcaggagtatgagcccgcccaggaacctgtcaaaaaattggctaatagccgcagagccaaaaggactaagccaaacggtcatattgccaatcgactggaagtcgactcgaacacatcttcgcaatcgtctaatagtgagagtgaaacagaagacgagcgcgttggcgaagacacacctttcctgggcattcagaaccctctggcagcgagcctggaagccacaccagcattccggctggccgactctcgcacgaatcccgctggcagattttccactcaggaagaaatacaagcccgcctatcttccgtgattgctaatcaggaccccatcgcggtt

SEQ ID NO: 17403 - DNA, 1911 bp, synthetic construct
  misc_feature 1..1911: note = source = /note="Description of Artificial Sequence: Synthetic coding sequence"
  source 1..1911: mol_type = other DNA
atgtccgagcgtaaagaggggcgaggcaaaggcaagggtaagaagaaagagcgcggtagcgggaagaagcctgagagcgctgccggtagccagagcccggctctgccccctcgactgaaagagatgaagtcacaggagtccgcggctggtagcaaactggtgctacgttgcgagacgagcagcgagtactcaagcctgcgtttcaagtggtttaagaatggcaacgagctgaatcgcaagaacaagcctcagaacataaagatccagaagaaaccggggaagtccgagctgcgcatcaacaaagcgagcctggcagacagcggcgagtatatgtgtaaagttatctccaagctgggtaacgactccgcttctgccaatattaccattgttgaatccaatgaaataattacgggcatgccggcaagcacagagggcgcatacgttagcagcgaatcccctatccgtataagcgtcagcacggaaggtgcaaacaccagcagctccacgagcaccagcactacgggtaccagccatttagttaagtgcgctgagaaggaaaaaaccttctgtgttaatggtggtgaatgcttcatggttaaagacctaagcaacccttcccgctacctttgtaaatgccccaacgaatttactggagatcgttgccagaactacgtaatggcatccttctacaaagctgaggaactgtaccagaaacgtgtgctgaccattacgggtatctgtattgcgttgctggtggtaggcattatgtgcgtagtggcatactgtaaaactaagaaacaaagaaaaaagctgcatgaccgcctgcgccagagcctgcgctcggaacgcaataacatgatgaatatcgcaaatggacctcatcatccgaatcctccacctgagaatgtgcagctggtcaaccagtacgtttctaagaacgtgatcagcagcgagcatatcgttgaacgggaagcggaaactagcttctctacgagtcactataccagtaccgctcaccacagcacaactgtcacacagactccatcccactcctggagcaacgggcacacagaatctattctgtctgagagccacagcgtgatagtgatgagcagcgtggaaaactctcgccactctagcccgaccggcggtcctcggggaaggctgaacggtaccggcggcccgcgcgagtgtaactctttcctgcgccatgcgcgggagacccctgacagctacagggactctccacactccgagcgctacgtttccgcgatgaccaccccggcccgcatgtccccagttgacttccatactccgtcttctccgaagtcccctccttctgaaatgtcccctccagtgtcctccatgactgtgagcatgccaagcatggccgtctctccgttcatggaggaagaacgtccgttgctgttggtcactccaccccgtctgcgagagaagaagtttgatcatcacccacaacagttcagctcatttcatcacaacccagcgcatgattcgaatagcctgcccgcctctcctctgcggattgttgaggatgaagaatacgaaaccacccaggaatatgaaccggctcaagagccggttaaaaaactggcgaactcacgtcgcgcgaaacgcacgaagcctaacggtcacatcgctaaccgtctggaagttgacagcaataccagcagccaaagctcgaacagtgagagcgagaccgaggacgagagagtgggcgaggacaccccatttctgggtattcaaaacccattagcagcgagcctggaagcaactccggcatttcgcctggcagatagtcgcaccaaccctgctggaagattttccacccaagaggagatccaggcgagattgagctctgttatcgcaaatcaggatccaatcgccgtt

SEQ ID NO: 17404 - DNA, 1911 bp, synthetic construct
  misc_feature 1..1911: note = source = /note="Description of Artificial Sequence: Synthetic coding sequence"
  source 1..1911: mol_type = other DNA
atgtcggaacggaaggagggtcggggcaaaggaaagggcaaaaagaaggagcgcggtagcggcaagaagcccgaatcggccgccggatctcagtctcccgccctcccccctcgtctgaaagagatgaagtctcaagagtccgctgcaggatctaaactcgtgctgcgatgcgagactagtagcgaatattcctcgctcagattcaagtggttcaaaaacggtaacgaactgaataggaaaaacaaacctcagaatatcaaaattcaaaaaaaaccaggaaagtctgaattaaggatcaacaaggccagcttggccgattcgggtgaatacatgtgtaaggtcatatccaaactcggtaatgatagtgcttctgccaacattaccatcgtagaaagcaatgagattattaccggcatgccagccagtacagaaggtgcttacgtgagttcagaaagtcctatacgcatctcggtctcaacagaaggcgcaaatacctcgtctagtacctctacctcaacaaccggcacaagccatctcgtcaagtgcgcagaaaaggagaagaccttttgtgtgaacggcggagagtgctttatggtgaaggacctgtcgaacccgagccgttatctgtgcaaatgcccaaatgagttcacaggagaccgatgtcagaattatgtcatggcatctttttacaaggcagaggaactgtaccagaagcgggtgctgacaatcacaggaatctgcattgctctgctggtggtgggaatcatgtgtgtggtggcctactgcaagacaaaaaagcagcgcaaaaagctgcacgatagactccgacagagtttgaggtccgaacgtaacaacatgatgaacatcgctaatggtcctcatcacccaaatcccccaccagagaatgttcagctggtgaaccaatacgtttccaagaatgtgataagcagcgagcacatagtggaacgcgaggcggagaccagcttctctaccagtcattacacatccacggcgcaccactccacaaccgtgacacaaacaccctcacacagctggtcaaatgggcatactgaatcaatcctgagcgagtcacactccgtcatcgtgatgagctcggttgagaattcccgccactccagcccaaccggtggcccaaggggacgtctgaacggtactggcggcccaagagaatgtaactccttcctgcgtcatgctcgagagacccctgattcttacagggattcgccccactctgaacgctatgtatcagctatgaccacaccagctcgcatgtcacccgtagacttccatacaccatcgtcaccaaaatccccgccgagcgagatgagccccccagtgtcttcaatgacagtctcaatgccatccatggcagtgtctccctttatggaagaggaaaggccacttctcctggttacaccaccaaggctgcgtgaaaagaagtttgatcaccacccacagcagtttagcagctttcaccacaatccggcccacgactccaacagcctgccagcctctcctctccgcatcgtcgaggatgaggagtacgagaccacccaggagtatgagcccgcgcaggagccggtgaaaaagttggcgaacagcagacgtgcaaaaaggacgaagccaaatgggcatattgctaatagactggaggtcgatagcaacaccagttcccagagtagtaattccgaatcagaaaccgaagatgaaagagtgggcgaagacactccattcctgggcattcagaaccctctggctgcatcactcgaagccacgcccgctttcaggctggctgactccagaactaaccccgccgggcggtttagtactcaggaagaaattcaggcgcgactatctagcgttattgctaatcaggacccaatcgcggtg

SEQ ID NO: 17405 - DNA, 1911 bp, synthetic construct
  misc_feature 1..1911: note = source = /note="Description of Artificial Sequence: Synthetic coding sequence"
  source 1..1911: mol_type = other DNA
atgtccgagcgcaaagaagggcggggtaagggtaagggcaagaaaaaagagcgaggctcaggaaagaagcctgaatcagcagcgggatctcaatcgcccgcgctgcctccgcgccttaaagagatgaaaagccaggaatccgcagcgggaagcaaactggtgctccggtgcgagacttcatccgaatacagcagcctgcggttcaagtggtttaagaacgggaacgagctcaaccgcaagaacaaaccacagaacatcaagatccaaaagaagcccggcaagtcagaattgcggatcaacaaggcttccctggctgacagcggagagtatatgtgcaaggtcatttcgaagctcggaaatgactctgccagcgctaatatcaccatcgtggaatcgaatgagatcataaccgggatgcccgcgtccaccgagggcgcctacgtgagctccgaatccccgattcgcatttcggttagcaccgagggagcgaatacctcttcgtcaacttccacctcaactaccgggactagccacctcgtcaagtgtgccgagaaggaaaagacgttctgcgttaatggaggagaatgttttatggttaaggatctgtccaatccttcgcggtacctttgtaagtgccccaacgaattcactggagatcgctgccaaaactacgttatggcctcgttctacaaggctgaggagctgtaccagaagagggtgctgaccatcaccggtatctgcatcgccctcctggtggtggggatcatgtgcgtcgtggcctactgcaagaccaaaaagcaacggaagaagctccacgacagacttagacagagcctgagatccgagcgcaacaacatgatgaatatcgcaaacgggcctcatcaccccaatcccccaccggagaatgtgcaactggtgaaccagtacgtgtccaagaatgtcatctcatccgagcacattgttgaacgcgaagcggagacttctttttccacttcccactacacttcgactgcgcaccactccacgaccgtcacccagactccctcccactcatggtcgaacgggcatactgaatcgatcctcagcgagtcccattcggtcatcgtgatgtcatcggtggagaacagccgacactcctcaccgactggcggaccgcggggccggctgaatggaaccggtggcccgcgggaatgcaacagcttcctccgccacgcgcgagaaaccccagactcctaccgcgattcaccgcattccgaacgctacgtctcggcaatgaccactccggcccgcatgtcgccagtggatttccataccccgtcctctccgaagagcccgccatccgaaatgtcgccaccagtgtcgtcgatgactgtctccatgccatcaatggcggtgtccccgttcatggaggaggaacggccactccttttggtgactccaccacgccttcgggaaaagaagttcgaccatcacccgcagcagtttagctcgttccaccacaaccctgcacatgactctaactcgctgcctgcgtcccccttgagaatcgtggaggatgaggagtacgaaaccacccaagaatacgagccagcccaggaaccggtcaaaaaactcgcaaactcccgcagagcaaaacggaccaagccgaatggccacattgcaaatcgcttggaagtcgactccaacacctcctcgcaaagctcaaactcggagagcgaaactgaagatgagcgggtgggtgaagatactccattcctcggaatccaaaaccctctggcagcttctctggaggcaacgccggcttttagactggcagacagccgcacgaacccagccgggagattttcgacccaggaggaaatccaggctaggctgagctcagtgatcgctaaccaggaccctatcgcggtg

SEQ ID NO: 17406 - DNA, 1911 bp, synthetic construct
  misc_feature 1..1911: note = source = /note="Description of Artificial Sequence: Synthetic coding sequence"
  source 1..1911: mol_type = other DNA
atgtcagaaaggaaggaaggccgcgggaagggcaaggggaaaaagaaggaaaggggatcaggtaagaaacctgagtcggccgcggggagccagtctcctgcactgccacctcggctgaaggaaatgaagtcccaggagtccgctgcaggatccaagctagtgctccgttgtgaaacaagctctgagtatagttcactgagattcaaatggtttaaaaacgggaatgaactgaataggaagaataagccccagaatatcaaaattcagaaaaagcccggtaaatctgagttaaggattaacaaggccagcctggccgacagtggagaatacatgtgtaaagtgatctcaaaactaggcaacgattctgcctccgccaatattacgattgtggaatcaaatgagataatcaccggtatgccggctagtactgaaggagcgtatgtttcctctgagtcccctataaggataagcgtgtccactgaaggagcaaacacaagcagctccacttcgacgagtaccaccggcacctcacatctcgttaagtgcgccgagaaggagaagaccttctgtgtgaatggcggagagtgctttatggtcaaagatctgagcaacccttcccgctacctctgcaaatgcccaaacgaattcacaggtgaccggtgccaaaactacgttatggcgagtttttacaaggctgaggagctgtatcagaagcgcgtgttgaccattactggaatatgcatcgcgctattggtagttgggataatgtgtgtcgtcgcatactgcaaaaccaaaaagcagcgcaagaaacttcatgatcgcttgagacagagcctgcggagcgaacgtaataacatgatgaacattgctaatggtccacaccatcccaaccccccccctgaaaatgtccagctagttaatcagtacgtttcaaagaacgtgatctccagtgagcacatagtggagagagaggcggaaacgagtttcagtacatcccactacacttcaaccgctcatcactcgaccacagtcacgcagacaccaagccatagctggtccaacggacacaccgaatccattctgagtgagagccattctgtaattgtgatgagctctgtagagaactcaaggcacagcagccctacggggggacccagaggaagactgaatggtaccggtggaccacgagagtgtaacagctttctccgccacgcacgagagacccctgactcctatagggatagtccccactctgaacgttatgtgtctgccatgacaacaccagcccggatgtcccctgtggattttcacactcctagcagtccaaagtctccccctagcgaaatgtcacctcccgtttcctcaatgaccgtgtctatgcctagcatggccgtctccccgtttatggaggaagagagacctctgctgctggtgacccctccacgcctcagagagaagaaatttgaccatcatccacagcagttctcatcttttcatcacaaccccgctcacgatagtaattccttacccgcctccccacttagaatcgttgaggacgaggagtacgaaaccacgcaggagtacgagccagcccaggagccagtaaagaaattagcgaattcacggagggctaagcggacgaaacccaacggtcacatcgctaaccggttagaggtggactcgaacacttccagccagtccagtaacagtgagagcgagactgaagatgaaagagtcggggaagacacacctttcctgggcatccagaacccactggctgcctctttggaggccactccagccttccgcctggcggactctcgtacaaatccagctggccgattttctacccaagaggaaatccaggcccggctgtcatctgtcattgccaatcaggacccaattgcagtg

SEQ ID NO: 17407 - DNA, 1911 bp, synthetic construct
  misc_feature 1..1911: note = source = /note="Description of Artificial Sequence: Synthetic coding sequence"
  source 1..1911: mol_type = other DNA
atgtccgaacgtaaggagggtcgaggcaagggtaaggggaaaaagaaagaaagaggttctggcaagaagcccgaatcggcggcaggctcgcaaagcccagcgctgccaccgaggctgaaggagatgaagagccaggagagcgcagcaggatcgaagctcgtgcttcggtgtgaaacctcgagcgaatacagcagcttgcggttcaagtggttcaaaaacggcaatgagctgaaccgtaagaataagccccagaacatcaaaattcaaaagaagccgggaaagtcggaacttcggattaacaaagcatcgttggcggatagcggggagtacatgtgcaaggttatcagcaaactgggaaatgactccgcatcggccaatatcacgatcgtggaatcgaacgagatcataacgggaatgcctgcatcgaccgagggcgcatacgtttcgtcggaatcgccaatccgtatttccgtctcaaccgaaggtgcaaatacttcctcatccacttcaacttcgactactggcaccagccatctcgtgaagtgcgcagaaaaggaaaagacgttttgcgtgaacgggggagaatgtttcatggtgaaagacctctcaaatccatcaagatacctgtgtaagtgtccgaacgaattcactggtgatagatgccagaattacgtgatggcatcgttctacaaagccgaggaattgtatcaaaagcgcgtgctgaccattactgggatatgtattgcgctgctggtcgttggcataatgtgtgtcgtggcatactgtaagactaagaagcagagaaaaaagctccatgaccggctgagacagtcactgcgctccgaacgaaacaatatgatgaatattgctaacggcccacatcacccaaatcctccacccgaaaacgtgcagttggtcaaccagtacgtgtccaaaaatgtcatttcaagcgagcatattgtcgagcgtgaggcagagacttcgttttcgacctctcattacacttcgaccgcacatcacagcacgactgtgacgcaaactccttctcactcctggagcaatggtcacactgaatccattctttccgaatcacattcagtgatcgtgatgtcgtcggtggaaaattcacggcactcgtccccaactggagggccacgcggtcgacttaacggaaccggcggaccaagagaatgtaactcatttctgcggcatgccagagaaacccccgactcgtacagagattcaccacatagcgagaggtatgtgagcgcaatgactacgcctgcccggatgtcaccagtcgatttccataccccatcctcgcctaaatcccctccttcagaaatgtcacctcctgtgtcctccatgaccgtctccatgccttcaatggccgtgtcgccttttatggaggaagaacgacctctgttgcttgttacccctccaagattgagggagaagaagtttgaccatcacccacaacaatttagctcctttcatcataacccagcccatgacagcaactcgcttcccgcaagcccacttcgcattgtcgaggatgaggaatacgaaactacccaggaatacgaaccagcacaagaaccagtgaaaaaacttgctaacagcaggcgtgcgaagcgcaccaagccgaatgggcatattgctaaccgtcttgaggtcgattcaaacacctctagccaatcgtccaactcggaatccgagacggaggatgagagagtcggagaagataccccttttctcggaattcagaatcctctggccgcatcgctggaggcaacccctgcatttcggctggctgattcccgcaccaacccggcaggacgtttttcaacgcaggaggagattcaagctcgcctgtcgagcgtcatcgcaaaccaagatccaatcgcagtg

SEQ ID NO: 17408 - DNA, 1911 bp, synthetic construct
  misc_feature 1..1911: note = source = /note="Description of Artificial Sequence: Synthetic coding sequence"
  source 1..1911: mol_type = other DNA
atgtccgagcgtaaggaggggcgaggtaagggaaaagggaagaagaaggagcgaggatctggcaaaaagcctgagtcagcggccggaagccaaagtcccgctcttcctcctcggctcaaggaaatgaagagccaagaatcagcagcaggatcaaaacttgtgctccgctgtgaaacctcaagcgagtactcctcacttagatttaagtggtttaagaatggaaatgaacttaaccggaagaacaagcctcaaaacataaagattcaaaagaagcccggaaagtccgaacttcgcatcaacaaggcctcgcttgcagattcgggagaatacatgtgcaaagtgatatcgaagctgggaaacgacagtgcaagcgctaatatcaccatagttgagtcgaacgaaatcattactgggatgcccgcaagcactgagggagcttacgtgtccagcgagtccccaattcgcatttccgtgtcgactgagggggccaacacttcgagctcgacctccacgagcactactggaacctctcatctggtgaagtgcgccgaaaaggaaaagactttttgcgtgaacggcggtgaatgttttatggtgaaggacctctccaatccgtcgagatacctgtgtaaatgccccaatgagtttactggtgataggtgtcagaactatgtcatggcgtccttttacaaagcagaagagctctaccaaaagagggtgctgacgattactgggatctgtattgccctgctggtggtgggtattatgtgcgttgtggcatactgtaagacgaaaaagcagaggaagaagctgcacgaccggcttcgccagtcgcttcggtcagagcggaacaatatgatgaatatagcaaacgggccacatcatcctaaccctccccctgagaacgtgcagctggtgaatcagtacgtgtccaagaacgtaatttcgtcggagcatatcgtcgagagagaagcagaaacctccttctcaacctcgcattatacttcgaccgcacatcactccaccaccgtgactcaaaccccttcgcattcctggtctaacggtcatactgaatctattctttcggaaagccattcggtgatcgtgatgagcagcgtggaaaattcaagacattcctcgcctacggggggaccaagaggacggctgaacggaactggtgggcccagggagtgtaattccttccttcggcatgcgcgcgagacgccagattcctaccgcgattccccgcactccgaaagatacgtgtcagcgatgactacgccagccaggatgtcccctgtggatttccatactccttcctcacctaaatcgcccccttcggaaatgtccccaccggtgtcaagcatgaccgtgtcgatgccttcgatggccgtgagcccatttatggaggaagaacgcccacttcttcttgtgactccacctagactgagagaaaagaagttcgatcatcacccacaacagttctcctcgtttcatcacaacccagctcacgactcaaattcgctcccagcatcgccgctgcgcatcgtggaagatgaggagtacgaaaccactcaagaatacgaaccggcgcaagaacccgtgaagaaactcgcgaactccagaagggcaaaacgcactaaacccaatgggcatattgcgaatcgtctggaagtggacagcaatacctcgagccaatcgtcaaactcagaatcggaaaccgaagatgaacgggtgggggaagataccccttttctgggaatccaaaaccctctggcggcctcattggaagcgactccagcgtttagattggcagacagccggaccaacccagcaggtcgttttagcactcaggaagagattcaggctagattgtcgtcggtgattgcaaaccaggatccgatagcagtg

SEQ ID NO: 17409 - DNA, 1911 bp, synthetic construct
  misc_feature 1..1911: note = source = /note="Description of Artificial Sequence: Synthetic coding sequence"
  source 1..1911: mol_type = other DNA
atgagcgaaaggaaagaaggtaggggcaaaggcaaaggtaagaagaaagaaagaggcagtggaaagaaacctgaaagcgctgccgggagtcaatcccccgcccttccaccacggctgaaagagatgaaaagccaagagagcgctgcaggttccaagttggtgttaagatgtgaaacatcgtctgagtatagctctctgcgatttaagtggttcaagaacggtaatgaactcaacagaaagaataagccccagaatataaagattcagaaaaaaccggggaaaagcgaattgcgcattaataaggctagcctggctgactccggagaatacatgtgcaaggtcatctctaaactgggaaatgatagcgcaagcgctaacatcactatcgtggagtccaatgagattattaccggcatgcccgcctctactgagggcgcctacgtttctagcgagtccccaatcaggatttcagtgagcacagagggcgccaatacgagttcctcaacctccaccagtaccaccggtacttcccacctcgttaaatgtgctgaaaaggaaaaaactttctgcgttaacgggggagagtgtttcatggtgaaggatctgtcaaatccgtctcgatatctatgtaagtgccccaatgagttcaccggcgatagatgtcagaattacgttatggccagcttttacaaagccgaggaactgtatcagaaaagggtgttaacaattaccggcatttgcatcgcattgctggtcgttggcatcatgtgcgtggtggcctattgtaagaccaagaaacaaagaaagaagctccatgacagattacgccagagcttgcggagtgagcggaacaacatgatgaatatcgccaacgggcctcaccacccaaatccaccccctgagaatgtacaattggttaaccaatatgtgtcaaaaaatgttatttcctcagagcatattgtggaacgggaggctgagacctccttctccaccagtcattatacgagcaccgcgcaccatagcacaaccgtgacccagacgccaagtcacagttggtctaacggccacacagagagcattctgtctgaaagtcattccgtgatcgtgatgtcctcggtggagaactccaggcattcgagcccaactggtgggcctcgagggcgcctgaatggtaccggagggcctcgggagtgcaacagcttcctgcggcacgcccgagagacccccgactcctatagagattcccctcattctgaacgatacgtttccgccatgactacgcctgctcggatgagcccagtggactttcataccccatcctctcctaagagtccaccaagtgagatgagcccgcccgtctcttccatgacggtaagtatgccttcaatggcagtttcacctttcatggaagaagaaaggcccctcctgcttgtcaccccccctcggttaagagagaaaaagttcgatcaccatccacagcagttttcgagcttccatcacaatccggcgcatgacagcaactctctcccagcctctcctcttaggattgtggaggacgaagagtacgagactacacaggaatatgagccagcacaggagccggtcaagaaactggcgaactctaggcgcgccaaaaggaccaagcctaatgggcatatcgctaacaggctggaggtcgatagcaatacatcttctcagagctctaactctgaatctgaaactgaagatgagcgagtgggagaggatacaccatttcttgggatccagaacccgctagcagcgagcctggaagcaacccctgctttcagattggcggactccaggacaaacccggccggccggttctccacccaggaggaaatccaggcgagattaagttcagtgattgccaatcaggatcccattgcagtc

SEQ ID NO: 17410 - DNA, 1911 bp, synthetic construct
  misc_feature 1..1911: note = source = /note="Description of Artificial Sequence: Synthetic coding sequence"
  source 1..1911: mol_type = other DNA
atgagcgaacgcaaggagggacggggaaaagggaagggcaagaagaaggaacgcggctcaggaaagaagcccgagtctgccgctggatcgcaaagccccgcactgccgcccagattgaaggaaatgaagtcgcaggaaagcgcagcaggatcaaaattggtgctgcgctgcgagacttcctcagagtactcctcactgcgcttcaagtggttcaagaacggaaatgagttgaaccgcaagaacaaaccgcaaaacatcaagatccagaaaaagcccggaaagtccgaactgcggataaacaaagcgtctctcgctgactcgggggagtacatgtgcaaagtgatctccaaattgggtaacgacagtgcgagcgcgaatatcaccatcgtggaatctaatgagattatcaccggaatgccggccagcacggagggcgcgtacgtgtcctcagaatcgccaatcagaatctcagtgagcactgagggtgccaacacttcatcatccactagcacctctacgaccggtaccagccacctggtgaagtgcgcggagaaggaaaagaccttttgcgtcaacggaggagagtgcttcatggtgaaggacctcagcaatccgtcgcgctacctctgtaaatgcccgaacgaattcaccggagatcgctgtcagaattacgtgatggcgtcattctacaaagcagaagagctgtaccagaagcgggtcctgactatcacgggcatctgcattgctcttctggtcgtcggcatcatgtgtgtggtggcatattgcaagaccaagaagcagcggaagaaacttcatgatcgcttgcgccaaagcctccgctctgaacggaataacatgatgaatatcgccaacgggccacaccaccccaacccgccgccggaaaatgtgcagctggtgaaccagtacgtctcgaagaacgtgatctcgtcggaacatatcgtggagagagaagcagaaacttccttctcgacgagccactatacgtccactgctcaccatagcaccaccgtgacccaaactccgtcccattcctggtcaaacgggcacacggaatcgatcctgagcgaatcccactccgtcatcgtgatgtcgtcagtggagaactcacgacattcctcccctaccggaggaccaaggggacggctgaatggcactggtggcccgcgcgagtgtaatagcttcctgcgacatgcgcgcgagactcccgactcctaccgggactccccacactcggaacggtacgtgagcgcgatgactactccggccagaatgtccccagtggactttcataccccatcgtccccgaagtcccctccttcagaaatgtcgccgccagtgtccagcatgaccgtgagcatgccatcaatggccgtgtcgcctttcatggaggaggaaaggccactcctgctggtcactccaccgagactccgggagaagaagttcgaccaccatccacagcagttctcgtcgttccaccacaatcccgcacatgactcgaactccctgcctgccagcccactgcgcatcgtggaggacgaggagtacgaaaccactcaagagtatgagccggcccaagaacctgtgaagaagctcgcgaattcgaggagagctaagcggaccaagcccaatggacacatcgcaaaccggctcgaagtggattcgaacacttcctcgcagtccagcaacagcgagagcgaaactgaagatgaaagagttggcgaggacacccctttcttgggaatacagaatccgctggcggcctcactggaggcaaccccggctttccgccttgccgatagccgcacgaacccagcaggacggtttagtactcaagaagaaattcaggcgcggcttagctcggtcatcgcgaatcaagatcctatcgccgtc

SEQ ID NO: 17411 - DNA, 1911 bp, synthetic construct
  misc_feature 1..1911: note = source = /note="Description of Artificial Sequence: Synthetic coding sequence"
  source 1..1911: mol_type = other DNA
atgtccgagcgcaaggaggggcgaggcaaagggaaaggcaaaaagaaagagagaggatcaggaaaaaagcctgaaagcgcagcaggctctcaaagtccagctctgccccctcgcctcaaagaaatgaaatctcaggaaagtgctgccggcagcaaactcgttctgcgttgtgagacatccagcgaatactcttcccttagattcaaatggtttaagaatgggaacgagctcaacaggaaaaataagccccagaacattaagattcaaaagaagccgggcaaaagcgaactccggatcaataaagcttcattggcagacagcggcgagtatatgtgcaaggtgattagcaagttaggaaatgattccgcctctgcaaatatcacaatagttgagtctaatgaaattatcaccggtatgcccgcaagtacagaaggcgcatacgtgtcgtctgagagtccaattaggatttcagttagtacagagggggccaatactagcagttctaccagtacatcaaccacgggcacttcacacctggtgaagtgcgccgagaaagaaaagactttttgcgttaatggaggggaatgcttcatggttaaggacctgtccaatccgtctaggtacttatgcaaatgtcccaacgagtttactggcgacaggtgccagaattatgttatggccagtttctacaaggcggaggagctgtatcagaaacgcgttctaaccatcacaggcatctgtatagctctgcttgtcgtaggaatcatgtgtgtggttgcatattgtaagacgaaaaagcagaggaagaagctgcacgatagattgcgccaatcccttcggtcagagcggaataatatgatgaacatcgcaaatggcccccatcatcccaacccccccccggagaacgttcagcttgtcaatcagtatgtctccaagaatgtcatcagttccgaacatattgtggagagggaagccgagacttcattttcgacttcacactataccagcactgctcatcacagcaccaccgtgacacagacgccctcacattcctggtctaatggtcacacggaatcgattctgagcgagtctcattccgttattgttatgtcctccgtggaaaatagccgccacagttctcccaccgggggcccccgcggtagactaaatggtacaggtgggcctcgggagtgtaactccttcctacggcatgcacgtgaaacaccagactcttatagagactctccccactccgagcgatacgtcagtgcaatgacgactccagcacgaatgtcaccggtcgactttcacacgccctcttctcctaaatctccgccctcagagatgagtcctccagtgtccagcatgacagtgagcatgccctcaatggcagtgagtccctttatggaagaagaacgccctttgctgctggtgacaccaccgcgtttaagagagaagaagtttgaccatcaccctcagcagttttcatcctttcatcacaaccctgcccatgactctaatagcctccccgcaagcccactgaggatcgtggaggacgaagagtatgagaccacccaagagtacgagcccgcacaggaaccagtcaagaaactggctaacagcagacgtgcgaagagaactaaacccaacggccatatagccaatcggcttgaagtcgacagtaacacgtccagtcagtcctcgaactcggagtcagaaacggaagacgaacgagtcggagaggataccccatttctcggcatccaaaatccactggccgcctctctggaagctacacccgcttttcgtctcgctgacagtcggactaaccctgctggtagattttctacacaggaagagatccaggcgagactgagtagcgttatcgccaaccaggaccctatcgcagta

SEQ ID NO: 17412 - DNA, 1911 bp, synthetic construct
  misc_feature 1..1911: note = source = /note="Description of Artificial Sequence: Synthetic coding sequence"
  source 1..1911: mol_type = other DNA
atgagcgaaagaaaagagggtcgaggtaaaggtaagggaaagaagaaggagaggggatcggggaagaagcctgaaagcgcagcgggatctcaatcgcccgctcttcctccacgactgaaggagatgaagtcccaagagtccgcagccggaagcaagctggtgctgcggtgtgaaacgtcatccgaatactcctcgctcaggttcaagtggtttaagaatggaaacgagctgaatcgtaaaaacaagcctcagaacatcaaaattcaaaagaaacccggaaagagcgagctgaggattaacaaggcctcgctggccgactcgggagaatacatgtgtaaggtcatctcaaaacttggaaacgattcggcaagcgcaaacattaccatcgttgagtccaacgagatcattactggaatgccggcctccaccgaaggagcatacgtgtccagcgagtcaccaattcgtatatctgtgtcaaccgagggagcaaacacctcatcatccacttccacctcgactactgggacctcgcatctggtgaagtgcgcagagaaggaaaagactttttgtgtgaatggtggagaatgctttatggtcaaggacctttccaatccttctcgctacctgtgtaaatgtccgaacgaatttaccggagacagatgccaaaactacgtgatggcatccttctacaaggcggaagaactgtatcagaaaagagtcctgaccatcactggtatttgtattgcccttcttgtggtgggcataatgtgcgtggtggcgtactgtaaaaccaagaagcaacgtaagaagctgcatgaccgcctgcgacagtcacttcgaagcgaaaggaataacatgatgaatatcgcgaacggaccacatcacccgaacccgccacccgaaaacgtgcaattggtcaaccaatacgtctcgaagaatgtcatttcgtcagagcatattgtcgaacgcgaagcagagacttcgttctccacttcgcattacacctcaaccgcccaccattccactaccgtgactcaaactccgtcacattcctggtcaaacgggcacaccgagtccatcttgagcgaatcccattccgtgattgtgatgtcatccgtcgaaaactccagacactcgagccctaccgggggccctcgcggaaggcttaacggaaccggtggtcctagggagtgtaacagtttccttagacatgcacgcgaaactcccgatagttacagagactccccccactcggagcgctacgttagcgcaatgaccacccctgcacggatgtcgccagtcgattttcataccccaagctcgcctaaatcccctccttcggagatgtccccacccgtgtcctccatgacggtgtcgatgccaagtatggcagtcagcccttttatggaagaggaaagacctctgctgcttgtcactccgccacggctgcgtgaaaagaagttcgatcatcatcctcagcaattttcctcgtttcatcataatcctgcacatgactcgaactcccttcctgccagtccgctgcggattgtggaagatgaggaatacgagactactcaagaatacgaacctgcacaagaacccgtgaagaaattggccaacagccggcgagctaagcgaaccaaaccaaacggccatatcgccaatagacttgaagtcgattccaacacgagcagccaatcgagcaactcagaatcggaaactgaagatgagagggtcggggaagatactccatttttgggtattcagaacccactcgcagcgtccctggaagccactccagcatttcggcttgcagactccaggactaatcccgccgggcggttctcaacccaagaggaaatccaagcccggctctcgtcggtgatagcgaaccaggacccaatcgctgtc

SEQ ID NO: 17413 - DNA, 1911 bp, synthetic construct
  misc_feature 1..1911: note = source = /note="Description of Artificial Sequence: Synthetic coding sequence"
  source 1..1911: mol_type = other DNA
atgtccgagaggaaagaagggcgggggaagggcaagggaaagaagaaggaacggggttcaggcaagaagcctgaaagcgccgctggttctcagagcccagcattacctccacgcctaaaggagatgaagagccaagagagcgcagctggcagtaagttggtacttaggtgtgagacctcttcagaatattcctctctgcggtttaagtggttcaagaacggaaatgagcttaataggaaaaacaaaccccagaatattaaaattcaaaagaagcccggcaagtccgaactgcgaataaataaggcgtccctggcagattccggagagtatatgtgcaaggtgatctcgaagctaggtaatgacagcgcctccgcgaatattacgatcgtggagtctaacgagataatcaccggaatgccggcgtctactgaaggggcctatgtatcctccgagagccccattagaatctctgtgagtacagagggggccaacacatccagctctacaagtacaagcacaacgggcacctcccatctggtgaagtgtgccgagaaggagaagaccttctgcgtgaacggaggagaatgctttatggtgaaggatctgagtaacccctcgaggtatctgtgtaaatgtcccaatgaatttacaggagacaggtgccagaactacgttatggcctcgttctacaaagctgaagagctttatcagaagcgcgtcttaaccatcaccggcatctgtatagcgttgcttgtggtgggcattatgtgcgtcgttgcctattgcaaaaccaaaaagcaacgcaagaaactgcacgaccgactgaggcaaagtctaaggtcggagaggaataatatgatgaatattgccaacggcccacatcacccaaacccccctcctgagaacgtacaactggtgaaccagtatgtcagtaagaatgtaatttcctctgagcatattgtggagagagaggctgagacgagcttctccacctcacactatactagcactgctcaccactcaactacagtcacgcagactccctcacacagctggtccaatggccacactgaatcaatcctgtcggaaagccacagtgtcatcgtcatgagcagcgtggagaactcccggcatagtagccctaccggcggacccagaggacgcctgaatggcaccgggggaccaagggagtgtaatagctttctaaggcatgcaagggagactcccgatagttatagggactcaccacactccgaacgttatgtatccgccatgaccactcctgctcggatgagccctgtcgacttccatacaccatcatcacccaagagtcccccatccgagatgagcccacctgtgagctcaatgacagtctccatgccctcaatggctgtcagcccatttatggaggaggaacggccccttttgctggtcacgcccccacgcctacgtgaaaagaagttcgatcaccacccacaacagttctcatcttttcaccacaaccccgcgcacgattctaactcactgcctgcttcacctctgcgcatagtcgaggacgaagaatatgagaccacacaggagtacgagcccgcccaagaacctgttaagaaattggctaatagcaggcgcgccaagagaaccaagccaaacggtcatatcgcaaataggctcgaagtggatagtaacactagctcccaatccagcaattccgaatctgagacagaagatgaacgagtgggtgaggatacaccattcctggggatacagaatcctctcgccgcgtctcttgaggcaacacctgccttcagactcgccgatagccgcactaatccagccggacgcttcagtacacaggaggaaattcaggcccgactgtctagcgtcatcgctaatcaggatccaatcgcggtt

SEQ ID NO: 17414 - DNA, 1911 bp, synthetic construct
  misc_feature 1..1911: note = source = /note="Description of Artificial Sequence: Synthetic coding sequence"
  source 1..1911: mol_type = other DNA
atgtccgagcggaaggaagggaggggtaaaggaaagggaaagaagaaagagcggggctccggcaagaaaccggagagcgctgcggggtctcagtcacctgccctgccccctcggctgaaggagatgaaaagtcaggagtcagcagccgggagcaagctcgtattgagatgcgaaacgtcttccgaatactcgtccctgaggtttaaatggtttaagaacggtaacgaactcaaccggaaaaacaagccccagaacatcaagatccagaagaaaccgggcaagagtgagctccgaattaataaagcatccctcgccgacagcggcgagtacatgtgtaaagtgataagtaagctgggcaatgattcagcttcggcgaatatcaccatcgtcgagagcaatgagatcattaccggaatgcctgcatctaccgaaggggcctacgtgagtagcgagtccccaatcagaattagcgtgagcacggagggagccaatacttcttcatctacatcgactagcactaccggaacctcacacctggtgaaatgtgccgagaaagagaagaccttctgcgttaatggtggagagtgttttatggtcaaggacctctccaatccttcccgatatttgtgcaagtgccccaatgaattcacgggagacaggtgtcaaaactatgtgatggcttctttctataaggccgaggagctctatcagaagcgggtgttgaccatcaccggaatttgcattgccctgctagtggtcggaattatgtgcgtcgtagcttattgcaaaacaaagaagcagcggaaaaagctccatgaccgtctgcggcagtccctgcgcagcgagcggaataacatgatgaatatcgccaacgggcctcaccacccgaacccccctccagaaaacgtgcagctggtcaaccagtacgtaagtaagaacgtcatcagtagtgagcatatcgtggaacgtgaggccgaaacctccttctcaaccagtcactacacttctaccgcacatcattccaccaccgtgacacaaaccccctcgcactcatggagtaacggccacacagaatctatcctctctgaaagccactctgtcatcgtcatgagttcagtggagaacagtagacatagctcgcccactggcggtccccgagggagattgaacggcactggaggcccgagagagtgcaacagcttcctcagacacgctcgggagacgcctgatagctacagggactccccccattccgagcgctacgtgtcagcaatgactactcctgcacgaatgtcgccggtggatttccacaccccatcttcacctaaatcccccccctcagagatgagtcccccggtgtcctccatgacagtgagcatgccatctatggctgtgagcccttttatggaggaagagcgacccttgctgctggttactccccctcgactgagagagaagaaattcgatcatcacccacagcaattctcgtcttttcaccataatcctgctcatgattcaaattcactccctgcgagcccgcttcgtatcgttgaggacgaagagtatgaaacgacacaggagtatgaacctgcccaggagccagtaaaaaaactggcaaacagcaggagagccaagcgcactaagccaaatgggcacatagctaacaggctggaagtagatagtaatacatcttcccagtcttctaatagcgagtccgagaccgaagatgagagagtcggagaagatacgcccttccttggcattcagaaccccctggcagcttccttagaggcaacaccagccttccggctggccgactcccggaccaatccggctgggagatttagcacacaagaagagatccaagcccgtttgagctccgtgattgcaaaccaagacccaattgccgtt

SEQ ID NO: 17415 - DNA, 1911 bp, synthetic construct
  misc_feature 1..1911: note = source = /note="Description of Artificial Sequence: Synthetic coding sequence"
  source 1..1911: mol_type = other DNA
atgtcagaacggaaagagggtcgggggaagggaaagggaaagaagaaggaacgcggatcgggaaagaagccagaatcggcggctggatcccagtccccggcccttccgccacgcttgaaggagatgaagtcccaggagtccgccgcgggatccaagctggtgctgcgctgcgaaactagcagtgagtactcgtcccttcgcttcaaatggtttaagaacgggaacgagctcaacagaaagaacaaaccacagaacatcaagatccagaaaaagccgggcaaatcggagctccggatcaacaaggccagcttggcggactccggcgagtacatgtgcaaggtcatctctaagctgggaaatgatagcgcgtccgctaacattaccatcgtcgaatcaaacgagatcattaccggtatgcctgcgagcacggaaggcgcatacgtgtcatccgaatcaccgatccgcatctctgtgtccaccgagggtgccaacacctcgtcatcaacttcaacctccacgactggcacctcccatctggtcaagtgcgcagaaaaggaaaagacgttctgcgttaacggtggcgaatgcttcatggttaaagacctttcaaacccctcacgctacctctgcaagtgccccaatgagttcaccggggatcgctgtcagaactatgtgatggcatccttctacaaggcagaagagctctaccaaaaacgcgttctgactattactggcatctgtatcgccctgctcgtcgtcggcatcatgtgcgtggtcgcatactgtaagacgaagaaacaacgcaaaaagctgcacgatcgcctccggcagtctctccgctccgaacgcaataacatgatgaatatcgccaatggcccacatcaccctaacccgccaccggaaaatgttcagctggtcaatcagtacgtgtcgaaaaacgtgatctcctccgagcacatcgtggaacgggaagcggaaaccagcttctctacctcccactacacctccaccgcgcaccacagcactaccgtcacgcagactccgtcccacagctggtcaaacggccataccgagtcaatcctcagtgagtcgcacagcgtgatcgtcatgtcgtcagtggaaaattcacggcacagctctcccacggggggtcctcggggacgactcaatggaactggcggacctagagaatgcaactcattcctgcggcacgcccgcgaaacccccgactcctacagggattcgcctcattcggagcgctacgtttccgcgatgaccactccggcacgcatgagcccggtggattttcacaccccttcgtccccgaagtcgccgccgtccgaaatgtccccaccggtgtcatctatgactgtctcgatgccgagtatggcagtgtcgccattcatggaagaggaacgccctctgctgctggtcactcccccaaggctgcgggaaaagaagttcgaccaccatccacaacagtttagctcatttcatcataacccggcgcatgacagcaactcactccccgccagcccgctgcggatcgtcgaggacgaagagtacgaaaccactcaggagtatgagcctgctcaggagcctgtgaaaaagctcgccaactcgcggcgcgccaagcgcacgaagccaaacgggcacatcgccaacagactggaggtggactccaacacgtcgtcgcagtccagcaacagcgaatcggaaaccgaagatgagagggtgggagaagatactccgttcctcggaatccaaaatccgctcgcagcctccttggaagcgactcccgcgttccgcctcgcggactcgcggaccaatccagctggccggttctcgactcaggaagagatccaggcccggctctcgtccgtcatcgccaatcaagaccctatcgcggtg

SEQ ID NO: 17416 - DNA, 1911 bp, synthetic construct
  misc_feature 1..1911: note = source = /note="Description of Artificial Sequence: Synthetic coding sequence"
  source 1..1911: mol_type = other DNA
atgtccgaaagaaaggagggtagagggaaaggtaagggaaagaaaaaggaacggggatccggcaagaagcctgagagcgcggcaggttcacaatcaccggcgctgccgccacgtcttaaggagatgaaatcccaggaaagcgcagcaggttccaagctggttctcagatgtgaaacctcgagtgaatactcgtcgcttcgttttaagtggttcaaaaatggaaatgagcttaatcgaaagaacaagcctcagaacatcaagattcaaaagaagccaggtaaatctgagctgcggatcaataaagctagcttggcagatagcggagaatacatgtgtaaagtgatatccaagctcgggaatgatagcgcttccgccaacatcaccattgtggagtccaacgagattatcaccggcatgccagcttctaccgaaggggcatacgtgagctcggagtcgcccataaggatctccgtctcaaccgaaggagcaaacacttcgagctccacttcaaccagcactactggtacttcccatctggtgaaatgcgcagaaaaggaaaaaactttctgcgtaaatggaggtgagtgcttcatggtgaaggacttgtcgaacccatccagatacctttgtaagtgccccaatgaatttaccggtgaccgctgccaaaactacgttatggcatccttttacaaagcagaggaattgtaccagaagcgcgtcctgaccatcaccggaatatgtattgctcttcttgtggtgggtattatgtgcgtggtggcatattgtaagactaagaaacagagaaagaaacttcacgaccgactgaggcaatcactgagaagcgaaagaaacaacatgatgaatatcgcgaatggcccacatcatccaaacccgccccctgaaaacgtgcagcttgtcaatcagtacgttagcaagaatgtgataagctcggaacacattgtggaaagggaagcagagacgtcgttctcaacttcgcattatacctcgaccgcgcatcatagcaccaccgtgacccagacgccctcccattcatggtcgaacggacatacggagtcaattctttccgaatcacactccgtgatagtgatgtcgtccgtggaaaattcccgacattcatctccgactggaggacctaggggacgcttgaatggtaccgggggtccacgagagtgtaacagctttcttaggcacgcaagagaaacccctgattcataccgcgactcccctcatagcgaacggtacgtgtccgcgatgaccaccccagcacgcatgtcgccagtggatttccataccccttcgtcacctaagtcgccaccctcagagatgtcccctcctgtgtcctcaatgacggtgtcgatgccgagcatggctgtctcgccgtttatggaggaagaacgaccgctgcttttggtgactcctccgaggctgagagagaagaaatttgaccaccaccctcaacaattcagctcgtttcatcacaacccagcacatgattcgaacagcctcccagcatccccactccgaatagttgaggacgaagaatacgagactactcaggaatacgagccggcgcaggaaccagtcaagaagctcgcaaactcgcggcgagcaaaaaggaccaagcctaatggacatatcgcgaaccggctcgaagtggattctaatacttcgtcccaatcgtcgaattcggagagtgagactgaagatgaacgtgtcggagaagataccccatttctgggcattcaaaatcctctcgcagcatcccttgaagcaacccccgcattccgcctggccgactccaggaccaaccccgccgggcgtttctcaacccaagaggagattcaggcaaggctttcaagcgtcattgccaatcaagacccgatagcagtg

SEQ ID NO: 17417 - DNA, 1911 bp, synthetic construct
  misc_feature 1..1911: note = source = /note="Description of Artificial Sequence: Synthetic coding sequence"
  source 1..1911: mol_type = other DNA
atgtcggagcgaaaggagggacgcggcaaagggaagggtaagaaaaaagagcgaggctccggcaagaagccggaatccgcagcgggatcccaatcaccagctcttccaccaaggctcaaggaaatgaaatcccaggaatcagcggccgggtcaaagctcgtcctgcggtgcgagacttcatccgaatactcgtcgctcaggttcaagtggttcaagaacggtaacgagcttaaccgcaagaacaaaccgcagaatatcaaaatccaaaagaagccgggaaaatcagaattgcggatcaataaggcgtcacttgcggactcgggagaatacatgtgcaaggtcatctcaaagctcggaaatgactccgcgtcggcaaacatcaccatcgtggagtctaatgaaatcatcacgggaatgcctgcttccactgaaggcgcctacgtctcctccgaatcgccgatccgcatctcagtcagcactgagggagcgaacacctcatcctccacttcaaccagcactaccggtacttcccacctcgtgaaatgcgccgaaaaggaaaaaaccttttgtgtgaacggaggtgaatgcttcatggtcaaggacctgagcaacccaagcagatacctctgcaagtgcccaaacgagttcactggcgaccgctgccagaactacgtgatggcatccttttacaaagcagaggagctctaccagaagcgggtgctgaccatcactggcatctgcatcgcgctccttgttgtgggcattatgtgcgtcgtcgcctactgcaagaccaaaaagcagagaaagaagctccacgatagactgcggcagtctcttaggtcggagcggaacaatatgatgaacatcgccaacggaccccatcatccgaacccaccaccggaaaacgtgcagctggtcaaccaatacgtgagtaaaaacgtgatttcgtcagaacacatcgtcgaacgggaggccgagacttcgttttccacctcgcactacacttccacggcccatcactcgaccactgtcactcagactccttctcatagctggtcgaatggccatactgaatccatcctgtcagagagccactcagtgatcgtgatgtcaagcgtggaaaactcacggcactcgtcgccgacgggcgggccgcgcggacgcttgaacggtaccggaggacctcgcgaatgcaactcgtttcttcgccatgcgcgcgaaaccccggactcctacagagatagcccgcactcggaacggtacgtgtcggccatgactactccggctaggatgtcaccagtcgacttccacactccgtcgtcgccaaagtcgccgccatccgagatgtccccgcctgtgagctccatgaccgtcagcatgccatccatggctgtgtcgccattcatggaagaggaaaggccgctgttgctcgtgaccccgccccggctgcgcgaaaagaagttcgaccaccacccacagcagttctctagcttccatcataaccccgcccatgattccaattcacttccagccagcccgctgagaatcgtggaagatgaagaatatgagactactcaggagtacgaacccgcccaggagccggtgaagaagctcgcgaacagcagaagagcaaaaagaacgaagccaaatggccacatcgccaaccggcttgaagtcgatagcaacacttcctcgcaatcgtcaaactccgagagcgaaaccgaggatgaacgcgtgggggaggatactccgttcctgggaatccagaatccgctcgcggctagccttgaagcaactccggctttccgcctcgcggatagccgcaccaatccggcgggcagattttcgactcaagaagaaattcaggcacggctttcgtccgtgatcgccaaccaggacccaatcgcagtg

SEQ ID NO: 17418 - DNA, 1911 bp, synthetic construct
  misc_feature 1..1911: note = source = /note="Description of Artificial Sequence: Synthetic coding sequence"
  source 1..1911: mol_type = other DNA
atgtctgagagaaaggaaggcaggggcaagggcaaaggaaaaaaaaaggagcgcggatccggcaagaagcctgaatctgctgcaggatctcagtcacctgctctgcctcctaggctcaaggaaatgaagagtcaggaaagcgccgccggaagcaagctggtgctcaggtgtgaaaccagctcagaatatagcagccttagattcaagtggtttaaaaacggaaatgagctgaacaggaaaaacaaaccccagaacatcaaaatccaaaaaaagcctggcaaatctgaacttcgtatcaacaaggcatctttagcagatagcggagagtacatgtgtaaggttattagcaaactgggaaacgactctgcaagcgctaatattacaattgtcgaatccaacgagataatcaccggcatgcctgcctctacagaaggcgcatatgtgagttccgaatctcccatcaggatcagtgtgtctactgagggcgcaaacacctcaagctccacaagcacaagcaccacaggcacctcacacctcgtaaaatgtgccgagaaggaaaagaccttttgtgtgaacggcggggagtgctttatggtgaaggatttaagtaatcccagccgttacctttgcaaatgccccaacgagttcaccggcgaccggtgtcagaactacgtcatggcttctttctataaagctgaggaactctaccagaagagggtgctgacaatcaccggcatttgcatcgcactcctggtcgtcggaattatgtgcgtggtggcctactgcaagacaaaaaagcagaggaagaagctgcatgaccgccttagacagtctctgcgatccgaaagaaataatatgatgaacatcgctaatggccctcaccaccccaaccccccccctgagaacgtgcaactggttaatcagtatgttagcaagaatgtaatcagctcagagcatatcgtggagagggaagcggaaactagtttttctactagtcactacacatcaaccgctcaccactccacaactgtcacccaaacgccctcccattcctggtcgaatggccacacagagagcatcctgagcgagtctcacagtgtcatcgtaatgtcttcagtggaaaacagccgccacagctctccaactggaggacccagggggagacttaacggcactggtgggccgcgtgagtgcaacagtttcctgagacacgcgagagagacgcctgactcttatcgtgactcgccccatagcgagcgatatgtaagtgcaatgaccacaccggccagaatgagtccggtggattttcacaccccctcatcacctaagagcccacctagcgaaatgtcacctcctgtgagtagcatgacagtgagcatgccttccatggccgtcagcccttttatggaggaagaaaggccacttctcctagtgacccccccaagactcagagaaaaaaagttcgaccatcaccctcagcaattctcctcttttcaccacaatccggctcacgactccaacagcctgccagcttcacccttgcgaattgttgaagacgaagagtacgagactactcaagagtatgagcctgcccaggagccagtgaagaagctggcaaatagccgcagagctaagcggaccaaacccaacggtcatattgccaacagactggaagtagatagcaacaccagcagccaatcgagtaatagtgagagtgagactgaggacgagagagtaggcgaggacaccccattccttggtatccagaacccactggctgccagcctcgaggcaacccctgctttcagactggccgacagcagaactaatccagccggaagatttagcacacaggaggaaatccaggcacgtcttagcagcgtgattgccaaccaagacccaatcgccgtt

SEQ ID NO: 17419 - DNA, 1911 bp, synthetic construct
  misc_feature 1..1911: note = source = /note="Description of Artificial Sequence: Synthetic coding sequence"
  source 1..1911: mol_type = other DNA
atgtctgagaggaaggagggtagaggcaagggcaagggtaagaaaaaggagaggggtagtggaaagaagcccgagtctgccgccggaagccaatctcctgccctgccccctagattgaaagagatgaaaagtcaggaatctgctgcaggttctaagctggtgctccgctgcgaaacctcttccgagtactcatctttgcgttttaagtggttcaagaacggtaacgaactgaataggaagaacaagcctcagaacattaaaatccagaaaaagcccggaaagtctgaacttaggattaacaaggcctccttggctgactcaggcgagtatatgtgcaaggtcataagcaaactcggtaacgatagcgctagtgccaacattacaattgtggagtccaacgagatcataacaggaatgccagcatcaactgaaggagcctatgtctccagcgagtccccaattcgtatctctgtttccactgagggagctaatactagcagctctactagtactagcacaactggcaccagtcacctggtgaagtgtgcagagaaggagaagacattttgcgttaacggtggtgaatgctttatggtgaaggatctcagtaacccctccagatatctgtgcaaatgcccaaatgagttcacaggcgataggtgccaaaattacgtaatggcctccttttacaaggccgaagagctctatcagaagcgcgtcctgaccattaccggaatctgcatcgcactcctcgtggtcggtatcatgtgtgtggtggcctactgtaaaaccaaaaaacagagaaagaagttgcatgacaggctgagacagagtctgaggagcgagaggaacaatatgatgaacatcgctaacggacctcaccatcctaaccctccacctgaaaatgtgcagctcgttaatcaatatgtttctaaaaacgtcataagcagtgagcacatcgtggagagagaggccgagacaagtttctcaaccagccactatacctcaacagcccaccattccacaaccgtaacccaaacaccctcccatagctggtcaaacggccacactgagagtatcctctccgagtctcatagcgtgatcgtgatgtcctcagtcgagaattcccgtcacagttcccccacaggtggtcctagaggacgtctgaatggaacaggtggacctagagagtgcaacagttttctgcgtcacgcccgcgaaacccccgattcataccgtgattctccacactctgagaggtacgtgtcagctatgaccacacccgctagaatgtctccagtcgacttccacaccccaagcagtcccaaaagtccaccttccgaaatgagcccccctgtgtcttccatgaccgtttccatgccctctatggccgtttcccctttcatggaagaggaaagacccctgctgttggtgacaccccccagactgcgtgagaagaagttcgaccaccacccccagcaattctcttcttttcaccacaaccccgcacacgattccaattccttgcctgcctccccactgagaatcgtggaagacgaggagtatgagaccacccaagaatacgagcctgcccaagagccagtaaagaaactggctaacagtcgtcgcgcaaagcgtaccaagcccaacggacatatcgcaaacaggctcgaagtggacagcaacacttcatcccagagtagcaactcagagtctgagactgaggacgaacgcgtcggcgaggacactcccttccttggcatccagaatcccctggctgccagtcttgaggcaactcctgcatttaggctggcagattctagaaccaacccagcaggtcgtttctccacacaagaggagattcaagcccgtttgtccagcgttattgctaatcaagaccccattgcagtg

SEQ ID NO: 17420 - DNA, 1911 bp, synthetic construct
  misc_feature 1..1911: note = source = /note="Description of Artificial Sequence: Synthetic coding sequence"
  source 1..1911: mol_type = other DNA
atgtcagaacggaaggagggccggggaaaaggtaagggaaagaagaaagaaagggggtcgggaaaaaaaccggaatcagctgccggcagccagagccccgccctcccccctcggttgaaagagatgaagtcacaggagtccgctgcagggagcaagttggtgcttcgctgcgagacctcctccgagtactcaagcttaagattcaaatggttcaagaacgggaacgagctgaaccgaaagaataaacctcagaatatcaaaattcaaaagaaaccgggaaaatccgaacttcggataaataaagcatccctggcagactctggtgagtatatgtgtaaggtaatctctaagttgggcaacgacagtgcctctgcgaacatcaccattgtggagtcaaacgagattataacaggcatgccggcctcgaccgagggtgcgtacgtctcttccgagtccccaattcgcatctccgtgagcacagagggtgcgaacacctcatcgtccacaagcaccagcactactgggacctctcacctggttaagtgtgcggaaaaggagaagacattttgcgtgaacggtggtgagtgtttcatggtaaaggacctgtccaatccaagtcggtatttatgcaagtgtccgaacgaatttaccggtgaccgctgtcaaaactatgttatggcatctttctacaaggccgaggagctctaccagaaacgggtgttgactatcaccggaatctgtatcgccctcctggtggttgggatcatgtgcgtcgtagcctactgcaagactaaaaagcagagaaaaaagctgcacgaccgactaagacagtccctgcgctctgagcgaaacaacatgatgaacattgcaaacgggcctcaccacccaaacccgccaccagaaaatgtccaattggtgaatcagtacgtttcaaagaacgtcatctccagtgagcacattgttgagcgggaagcagagactagtttctccactagccactataccagcacggcccaccactctacaaccgtaacacagacccctagccattcttggtcaaacgggcacaccgaaagcatcctatccgaaagccatagtgtgattgtgatgtcatcagtggagaattccagacacagctctccaaccggaggacctagaggacgactgaacggaacaggcggcccacgggaatgcaattctttcctgaggcacgcccgcgagactccagacagttaccgggatagcccccattctgaaagatacgtgtcagctatgaccacacccgcccggatgtctccagtggacttccacacaccttctagtcccaaaagcccgccttcagagatgtccccccccgtgagcagcatgacagtatccatgccttccatggctgtgtcgccttttatggaggaggaacgccctctgctccttgtcactccaccccgcttacgggaaaaaaagtttgaccaccatcctcagcagtttagcagcttccaccataatcccgcgcatgattcaaacagtcttccggcctccccgctgcgaattgtcgaagacgaagaatatgagaccacgcaggagtatgaacctgcccaggagccagtcaagaaattagcaaactctcggagggcaaaacggactaagccaaatggccacattgctaacaggctagaggtggactctaatacaagctcccaatctagtaatagtgagtctgagactgaagacgagcgagttggagaggatactccctttctaggtatccagaacccactggccgcttctcttgaggccacccccgcctttaggttagcagatagtcgcacaaatcccgccggacgattttcaacccaggaggaaatccaggccaggttgagtagtgtgatcgcaaatcaggatcccattgccgtg

SEQ ID NO: 17421 - DNA, 1911 bp, synthetic construct
  misc_feature 1..1911: note = source = /note="Description of Artificial Sequence: Synthetic coding sequence"
  source 1..1911: mol_type = other DNA
atgtctgaaaggaaggaaggacggggcaaaggaaagggaaagaagaaggaaagagggtcaggaaagaagccagagtccgcagcaggaagccagtcccctgcattgccccccagacttaaagaaatgaagtcccaagaatccgcagcaggtagtaaactcgtgctccgatgcgagacgtcgtcggaatatagctcgctgagattcaaatggtttaagaacggaaatgaacttaatagaaagaataagccgcaaaacattaagattcaaaagaagcctggcaagtccgaactgcggattaacaaagcaagcctggccgattcaggagaatacatgtgcaaggtgatttccaaactgggaaacgactcggctagcgcgaacattactattgtcgaaagtaatgagattatcaccggtatgcccgcgagcactgagggcgcatacgtgtcgtcggaatcgccaataagaatctccgtttcaaccgaaggtgcgaatacttcaagctccaccagcacctcgaccaccggtacttcacacctggtcaagtgcgccgaaaaggaaaagaccttttgtgtcaatgggggagaatgctttatggtcaaggacctctcgaaccctagcaggtacctttgtaaatgtccaaacgaattcactggtgaccggtgtcagaactacgtgatggcatcgttttacaaagcagaagaactgtaccagaagcgggtgcttacgattactggtatctgtatcgcacttctggtggtcggcatcatgtgtgtggttgcatactgtaagactaaaaagcagcggaaaaagctccatgatcggctgcggcaatcgcttcgctccgaaagaaacaacatgatgaacatcgcgaacggacctcatcacccaaacccccctcccgagaacgtccagctcgtaaaccaatacgtaagcaaaaacgtgatttcctccgaacatattgtcgagcgagaggcagaaaccagcttttcaacttcacactacacttccactgcgcatcattcgaccacggtgactcagactccgtcgcattcgtggtcaaatggacacaccgagagtatcctgtcggaatcgcatagcgtgattgtcatgagttcggtggagaactcacggcactccagtccgactggaggacccagaggccgtcttaatggaaccggaggtcctcgggaatgcaattccttcctccggcatgcccgggaaacccctgacagctaccgtgacagcccacatagcgaacgctatgtcagcgcaatgaccaccccagctaggatgtcccctgtggactttcacacgccaagctcccctaagagcccgccctcagagatgtctccaccagtctcgtccatgacggtgtccatgccctcgatggcggtgtcaccctttatggaggaagaacgccctcttctgttggtgacccctcccaggcttcgcgagaagaaatttgatcatcatccccaacaattttcttcattccaccataaccctgcgcacgattcaaactcgttgccagcatcaccgcttaggatcgtggaagatgaggagtacgaaaccacccaggagtacgaaccagcgcaggaacctgtcaagaaacttgcgaactcgagacgagccaagcggaccaaacctaatggtcatatagcaaaccgtctggaggtggatagcaataccagctcgcaatcttccaatagcgagtcggaaaccgaggatgaaagggtgggtgaagataccccattcctgggtattcaaaatccacttgcagcatccctcgaagcgactcctgcgttccgtctggctgatagcagaactaacccagcaggtagattctccacccaagaggagattcaggcccgcctgtcctcagtgatagcaaaccaagatcccatcgccgtg

SEQ ID NO: 17422 - DNA, 1911 bp, synthetic construct
  misc_feature 1..1911: note = source = /note="Description of Artificial Sequence: Synthetic coding sequence"
  source 1..1911: mol_type = other DNA
atgagcgagaggaaagaagggagagggaaaggcaaaggtaaaaagaaggagcgggggtcaggcaagaagcccgagagtgcggctgggtcccagagtcccgcgctgcctccccgtttgaaagaaatgaaatcacaggaatccgccgccggtagtaagctagtgctgcgatgcgaaactagcagcgagtattcctcgctgagattcaagtggttcaagaatgggaacgaacttaatagaaaaaacaagcctcagaatatcaagattcagaagaaaccagggaaatccgagctgcggataaacaaagcctctctggccgactcgggggagtatatgtgtaaagtcatctctaaattaggtaatgattctgcctcagcgaatataacaatcgtggaaagtaatgaaataataaccggcatgcccgccagcacagaaggggcatacgtgtcatcggagtcaccgatcagaataagcgtttccacagagggtgccaacacgtcttctagtaccagtacctcaacaaccgggactagtcacttggtaaagtgcgctgagaaagaaaagacgttttgcgtgaatggcggagaatgcttcatggttaaggacttgagcaatcccagcagatacctctgcaagtgtcctaacgagtttaccggcgaccgttgtcagaattacgttatggcgtccttctataaggctgaggagctttatcagaaacgagttctcacaattaccggcatttgcattgcgctgttggttgtgggcataatgtgcgtggtcgcttattgcaagaccaaaaagcagcgtaagaaactccacgatcgactaaggcagtccctgcgatcggaaagaaacaacatgatgaacatcgcaaatggtccacaccatcccaatccaccccctgaaaatgtgcaactggtgaaccagtatgtcagcaagaacgtcatctcctctgagcatatagtggagagagaagctgagacatctttttcaacctcacactatacctctaccgctcaccattccacaactgtcacccagactcccagtcactcttggagcaatggacacaccgagagcattctcagtgagtcgcactccgtgatcgtgatgtcctccgtggagaacagcaggcactctagtccaactggagggccacggggtaggctaaacggaacaggcggcccaagagagtgcaattccttcctgcgacatgcccgtgaaacacccgactcgtatcgagactcgcctcatagcgagcgatacgtctccgccatgaccacaccagcccgaatgagtcctgtggactttcataccccatcaagcccaaagtctccccctagcgagatgagcccaccagtgtctagtatgactgtgagcatgccctctatggcagtgagtccattcatggaagaggaaaggccgctgctgctggtgactccccctcggctgagggagaaaaaattcgatcatcatcctcagcagtttagttcttttcaccataaccccgcacatgactccaacagtttacctgcctcgccgctccgaatcgtcgaagacgaagagtacgaaaccacgcaggagtatgaacccgcccaggagcccgttaagaaactggccaactccagacgggctaaaaggactaagccgaatggtcacatcgctaaccgcctggaggttgacagtaatacaagtagccagtcaagcaatagcgagagtgagacggaggatgaacgtgtcggcgaagacaccccattcttgggtatacagaatccactggccgcatcattggaggcaacgccagctttccgtttggccgattcaaggactaatccagccggacgtttttctacacaggaagaaatccaggctagactctcctctgtcatagcaaaccaggaccctattgcggta

SEQ ID NO: 17423 - DNA, 1911 bp, synthetic construct
  misc_feature 1..1911: note = source = /note="Description of Artificial Sequence: Synthetic coding sequence"
  source 1..1911: mol_type = other DNA
atgtccgagcggaaggagggtcgcggcaagggcaagggcaaaaaaaaagaacggggctcagggaaaaagccggagagcgctgccggctcccagtctcccgctcttcccccaagacttaaggaaatgaaaagccaagagtcagctgcaggttctaaactggtgcttaggtgcgagactagctccgaatacagttccctgaggtttaagtggttcaagaacggaaacgaactgaaccggaaaaataagccccagaatattaagatccagaaaaaacccggtaagtccgagctccgaatcaacaaggcgtcccttgctgactctggcgagtatatgtgtaaagtgatttccaagttggggaacgacagcgcttcagccaatatcacaattgtagagtctaatgaaatcatcacaggcatgcccgccagtacagaaggcgcatacgtgtctagtgagtcacctatcaggatatccgtatctaccgaaggagctaacacatcgtcctcaacttccacgtcgacaaccggtacttcccatcttgtgaagtgcgccgagaaagagaagaccttctgcgtaaacgggggagaatgttttatggtgaaggacctgtccaatccctcccgctatttatgcaagtgccccaacgagttcaccggtgaccggtgccagaattatgtgatggctagcttctacaaagccgaagagttgtaccagaagagagtgctgacgattaccggtatttgtatcgctcttctggtggttggaatcatgtgtgtcgttgcctactgtaaaacgaagaagcagcgcaagaagctgcacgatcgtctgcggcagtctctccggagcgaacgaaataatatgatgaatattgccaatggcccacaccatccaaaccccccccccgagaacgtacagctggttaaccaatacgtcagcaagaatgttatctcatctgagcacatcgtcgagagggaggcagagactagttttagtacctcacactacaccagtacggctcaccacagtactacagtgacacaaaccccctcccacagttggtcaaacgggcacaccgagagcatcctttccgaatcccattccgtaattgtgatgagtagcgtggagaattctcgtcactcgtccccgactggcggaccgcgcggcagactaaatggcaccggcggaccgcgggaatgtaactcatttctgcggcatgcccgcgagacaccagactcctaccgggactctccccactccgagcggtacgtctctgctatgacaacccccgccaggatgtctccagtagattttcacactccttcttctcctaagtcaccgcccagtgagatgagcccaccagtgagcagcatgacagtttccatgccttccatggctgtgtctcctttcatggaagaggaaaggcccctgctgcttgttaccccaccccgcctccgggagaagaagttcgatcaccatccccagcagttttcatcctttcaccacaaccccgctcatgacagtaacagcttacccgcgagccccctacgtatcgtggaagacgaggaatatgaaaccactcaagagtatgagcctgcccaagaaccagttaaaaagttggctaactcacgccgggcgaaacggactaaacccaatgggcacatcgctaatcgactagaggtggatagcaacactagttctcagtcgtctaacagtgagtccgaaacagaggatgagcgggtaggggaagacactccgtttttaggtattcaaaaccctctggctgcttccttagaagcgaccccggcatttcggctggccgattctagaacgaaccccgctggcaggttctcaactcaggaagagattcaggcacgactgagtagtgtaattgcgaatcaggatcctatcgctgta

SEQ ID NO: 17424 - DNA, 1911 bp, synthetic construct
  misc_feature 1..1911: note = source = /note="Description of Artificial Sequence: Synthetic coding sequence"
  source 1..1911: mol_type = other DNA
atgtccgagagaaaagaaggacgaggcaagggaaaaggaaagaaaaaagagagaggcagtgggaaaaagcccgagagcgctgctggctctcaatctccagctctgcctccccggctgaaggaaatgaagagccaggagagcgcagccggcagcaaactggttttacgatgtgagacctccagtgaatacagcagcctccgctttaagtggttcaaaaacggaaacgaactgaataggaaaaataagccacagaacattaagatccagaaaaaacccggcaaatcggagctgcgaattaacaaggcctcactagccgactcaggagaatacatgtgtaaggtcatctcaaagctcggcaacgacagcgcttccgctaacattactattgtggagtccaacgaaatcatcaccggcatgcccgcttccactgagggcgcatacgtgagctctgagagcccgattagaatttccgtgagtacagaaggcgctaatacttccagctccacaagtacttctacgactggcacctcacatcttgtgaagtgcgccgaaaaagagaagaccttttgtgtcaatggcggggagtgttttatggtgaaggacttgtccaacccaagcagatacctttgcaagtgccccaacgagtttactggagacagatgtcagaactacgtgatggcctccttctacaaagccgaggagctttatcagaaacgggtgttaaccataacgggaatctgcatcgccctgttagttgtggggataatgtgcgttgtagcgtactgcaagacgaagaagcaaaggaagaagctccacgatcggctgaggcagtcacttagaagcgagcggaacaatatgatgaacatcgccaacggccctcaccatcctaatccccctccagagaatgttcagctcgtgaaccagtatgtcagcaagaatgtcatctccagcgaacatattgtggagcgcgaggccgagacgtctttcagcacgtcccattatacttcaactgctcatcattctactacagtgactcagactccttcacattcttggtccaatggacataccgagtccatcttgtctgaaagtcattctgtgattgtaatgtctagcgttgaaaactccagacactcctccccgactggcggacctcgaggtcgcttaaatggtactgggggaccacgggaatgtaactctttcctcagacacgccagagaaactcctgatagttacagagattcaccacattccgagcgatatgtctctgctatgacaactccagcaaggatgagccctgtcgacttccacaccccatcctccccaaagtcaccgccaagcgagatgagccctcctgtgtcctccatgacagtgtcaatgccgtccatggccgtgagtccatttatggaggaagagcgtccgctcctcttggtcacacccccacggctgagggaaaagaaatttgaccatcacccccagcagttcagctctttccaccataatcctgcacatgattccaacagccttccagcaagtcctttgagaatcgtagaggacgaagagtacgagacgacgcaggaatatgaacccgctcaagagccggtgaaaaagctggctaacagtagacgcgctaaacgcacaaaaccgaatggccatattgcaaaccggctggaggttgattctaatactagcagtcagagttccaactccgagagtgagactgaagacgagagggtaggggaggacaccccgtttttgggaatccaaaacccactcgccgcttcactggaggccacccccgctttccgcttggctgactcccgaaccaaccccgcgggaagattttcaacacaagaggagatccaggcccgtctgtcttctgtgatagctaaccaagacccaatagcggta

SEQ ID NO: 17425 - DNA, 1911 bp, synthetic construct
  misc_feature 1..1911: note = source = /note="Description of Artificial Sequence: Synthetic coding sequence"
  source 1..1911: mol_type = other DNA
atgtcagagcgaaaggaaggacgaggtaagggaaagggtaagaagaaggagcgcggcagcggcaagaaacctgaatccgcagcagggtctcagtcccctgccttgcctcccaggttgaaggagatgaagtcacaggaatcagcggcgggcagcaaattagtgctgaggtgcgaaacaagcagtgagtacagttccctgagattcaaatggtttaaaaacggcaacgagttgaaccggaagaacaagccgcaaaacatcaaaatccaaaagaagcctggtaagtcagagctgcggatcaacaaagcgtcacttgccgactcaggtgaatatatgtgtaaggttatttccaagcttggtaatgattcagcatctgctaacattactatagtcgagtcaaacgaaataataacgggaatgccagcgagcacagagggggcctatgtctctagcgagagtcctatacgtatcagcgtgtccacagagggggcaaatacctccagcagcacctccacatcaaccacaggcacgtcccacttggtcaaatgtgctgagaaggagaaaactttttgcgttaatggtggagagtgtttcatggtgaaggacctttccaatcccagtcgctacttgtgtaaatgccccaatgaattcactggggacagatgtcagaattacgttatggcctcgttctataaggccgaagagctctaccaaaagcgagtactgactatcactgggatctgcatagccttgctggtggtcggaattatgtgcgtggttgcatattgtaaaacaaagaagcaacgaaaaaaactgcatgataggctgcgccagtcactgcgtagcgaacgtaacaacatgatgaacatcgcaaatggcccgcatcatccaaatcctcctccggagaacgtgcagctggtgaaccaatatgtgtcaaagaatgttatatcttcagagcatattgtagaacgcgaagcagaaacttccttttcaacctcccattataccagtaccgcacaccacagcacaaccgtcactcagacaccttcccattcctggagtaacggacacacggagagtatcctgtcggagagccacagcgtgatcgttatgagtagtgtggagaattcacgccacagcagtccgactggcggcccccgcgggcgtctaaacgggactggaggaccccgcgaatgcaatagtttcctgaggcacgctagggaaacccctgattcataccgggactcaccacactcagagcgctatgtgagtgcaatgacaacaccagctcggatgagccctgtggacttccacacgcccagttctcctaaaagccctccatccgaaatgtctcctccggtaagctctatgacggtgtcaatgccctcaatggcggtttccccttttatggaggaggagaggcccctgctgctcgtgaccccaccccgactgagggagaaaaagttcgaccaccacccccaacagttctcatcatttcaccacaatcccgcacacgactctaacagtcttccggcgagcccattgcgcatcgtcgaggacgaagagtacgagaccactcaggaatatgagccggctcaggagcccgtgaagaagctggccaactcccgacgggctaagcgtacaaagcctaatgggcacatagccaataggctagaggttgactcaaacacttcctctcagtcgtctaattcagagagcgagacagaggacgagagggtgggggaagatacacctttccttggcatccaaaatcccttggctgcgagtctggaagccaccccagctttcaggctggcagattctagaacaaacccagccggccgattctctacacaagaagagatacaggcgaggctctcatccgttatcgccaaccaggatcctatcgccgtg

SEQ ID NO: 17426 - DNA, 1911 bp, synthetic construct
  misc_feature 1..1911: note = source = /note="Description of Artificial Sequence: Synthetic coding sequence"
  source 1..1911: mol_type = other DNA
atgtccgaacgtaaggagggtcggggcaaaggtaagggaaaaaaaaaggaaagaggcagcgggaaaaaacccgagagcgctgccggatctcagtcccccgccctaccacctcggctcaaagagatgaagagccaagaatcagctgctgggtctaagttagtcctcagatgcgagacctcatcagaatactcttcattgcgcttcaaatggttcaagaacggcaatgagctgaataggaagaacaagccacagaacataaagattcagaagaagcctggtaagagcgaactgaggataaacaaggccagcttagccgactccggggaatatatgtgtaaggtgatctctaagctgggaaatgattcagcctctgctaacattaccatagtcgagagcaatgagatcatcactggaatgccagcttccaccgagggagcctatgtgtcatccgagtctccaatccgcatttccgtctcaactgagggcgccaatacgtcttcatcaacaagcactagtactactgggacctctcatttagtgaagtgtgccgagaaggaaaaaactttctgtgtgaatgggggcgaatgcttcatggttaaagatttgagtaatcccagtcgttatctctgtaaatgcccaaatgagttcacgggcgaccggtgtcagaattacgttatggccagtttttacaaagctgaggagctgtatcaaaaaagagttctaaccatcacgggtatttgtatagctctgcttgtggtcgggattatgtgtgttgtagcttactgcaagactaaaaagcaacggaaaaaattacatgacaggctgaggcagtcactgcgctccgagcgcaacaacatgatgaatatagctaatggaccacaccacccgaaccccccccccgagaatgtccagctagtaaaccagtacgtgagcaagaatgtgatcagctccgagcatatcgtggaacgcgaagctgagacttccttttctacttcccattatacttctacggcacaccatagcactaccgtaactcaaacacctagtcattcttggagcaacgggcacacagagagcatcttgtccgaaagtcattcggtgattgtaatgagctcagttgagaattctcggcacagctcaccgacaggcggccctaggggcagactcaatggtaccggaggcccaagagagtgtaactctttcttgagacacgcacgggaaactcctgactcctatcgggattccccacatagcgagcgctacgtcagcgccatgacaacccccgccagaatgagtcccgttgattttcacacacccagctcccccaagtctcctccatctgaaatgtccccacccgtgagcagcatgaccgttagtatgccatccatggctgtctcgccatttatggaagaagagcgtcctttgctcctcgtaactccacctagactacgcgagaaaaaatttgaccatcatccccagcagttctcttcctttcaccacaatccagcccacgatagcaactctcttcccgcgagtccactgcggatagtggaggatgaggagtatgaaaccacccaggagtacgagccggcacaggagccagtgaagaaactggcgaactcgcgacgcgctaaaaggactaagcccaacgggcacatcgcaaataggctggaagtggattcgaacacctcatcgcagtcttccaacagcgagagcgaaacggaggacgagcgggttggcgaagacactccattcctcggaattcagaacccgctggccgcttctcttgaggcaacccccgcttttcgccttgccgatagtcggacgaaccccgctggccgctttagcacacaggaggagattcaggcaaggttaagcagcgtaattgcgaaccaagacccaatcgctgtt

SEQ ID NO: 17427 - DNA, 1911 bp, synthetic construct
  misc_feature 1..1911: note = source = /note="Description of Artificial Sequence: Synthetic coding sequence"
  source 1..1911: mol_type = other DNA
atgtccgagagaaaagagggcaggggaaagggaaaggggaagaagaaggagcggggctccggaaaaaagcctgaatccgcagcaggatcgcagtctccggcgctgccgccaagactgaaggagatgaagtcacaggagtcggcggcgggatccaagctcgtgctgagatgcgaaacttccagcgagtactcgtcgctgagattcaaatggttcaagaacggaaatgagctgaacaggaagaacaaaccacagaacataaagatccaaaagaagcctggaaaaagcgaacttcggattaacaaggcttccttggctgattcaggggagtacatgtgcaaggtgatctccaagctgggaaacgattcggcgtcagcgaatatcacgatcgtcgaatcgaatgagatcatcactggaatgccggcctccacggaaggcgcctatgtgtcgtcggagtcccccatcagaatctccgtgtccaccgagggagcaaacacctcgtcgtcgacttcaactagcaccactgggacctcccacctggtgaagtgcgcggaaaaggaaaagacgttctgcgtcaacggaggcgaatgtttcatggtgaaggacctctcaaatccgagccggtacctgtgcaaatgtccaaacgagttcaccggagatcgctgccagaattacgtgatggcatcattttacaaagccgaagagctgtaccagaaacgggtcctgactatcactggcatctgcatcgccctcctggtcgtcggaatcatgtgcgtggtggcatactgcaagaccaagaagcagaggaagaaactgcacgaccgcctgagacagtcgctcagaagcgagaggaacaacatgatgaacatcgcgaacggaccacaccacccgaatccgccgcctgaaaacgtgcaactggtgaaccaatacgtgagcaaaaatgtcattagcagcgagcacatcgtggaaagggaagcggagacgagcttttctacctcgcactacacttccaccgcccatcattctaccaccgtgacccagactccgtcacactcatggtcgaatggtcatacggaatcgattctgtccgagagccactccgtcatcgtcatgtcgtcagtcgagaactcccggcactcaagcccgaccggaggcccccggggccggcttaatggaaccggagggccacgggagtgcaattccttcctgagacatgcaagagagactccagacagctacagggactccccacattccgagcggtatgtgtcagctatgactacgccggcacgcatgtccccagtggattttcacaccccgtcgtcgccaaaatcgcctccctcggagatgtcgccaccagtgtctagcatgactgtgtcgatgccgtccatggccgtgagcccgtttatggaagaagagcgcccacttttgctggtcaccccaccgcgcctccgggagaagaaattcgaccaccacccccagcagtttagctcattccatcataacccggcgcacgattcgaattcccttccggccagccccctgcgaatcgtggaggacgaggagtacgaaaccacccaagagtacgaacccgcccaagaaccggtgaaaaagctggccaattcgcgccgcgctaagaggaccaagccaaacggacacattgcgaataggctggaggtggacagcaacacctcaagccagtcatccaattcggagagcgagactgaggacgaacgcgtgggtgaagataccccattcctcggtatccagaacccgttggctgcatccctggaagcaactcccgcgtttcggctggcggactccagaactaacccagcgggacgcttttcgacgcaagaggagatccaggcccgcctgagctccgttatcgcgaatcaggaccctatcgcggtg

SEQ ID NO: 17428 - DNA, 1911 bp, synthetic construct
  misc_feature 1..1911: note = source = /note="Description of Artificial Sequence: Synthetic coding sequence"
  source 1..1911: mol_type = other DNA
atgtctgagaggaaagaggggagggggaagggtaaagggaagaagaaggagcgaggctctggcaagaagcctgagagcgccgccggaagtcagtcacccgcgttgcctcctcgcctcaaggaaatgaagtcccaggaatccgccgccggatcgaagttagtgctgcggtgcgagacttcctcagaatacagctctctgaggtttaaatggttcaagaatgggaatgaacttaaccgtaagaataagcctcagaacatcaaaatccaaaaaaagccaggcaaaagtgaactgaggatcaataaggcctcattggctgacagcggagagtatatgtgcaaggtgatatccaagctcggtaacgatagcgctagtgccaatattaccatcgtggagtccaacgagatcattactggcatgcctgccagcactgagggagcttacgtcagtagcgagagccctatccgaatttctgtctcaactgagggtgcaaatacaagttcctccacctcaacaagcacaacagggacctcccaccttgtgaagtgcgccgagaaagaaaagacattctgtgtgaatgggggagaatgctttatggttaaggacttgagcaatccgagccgctatctttgcaagtgcccgaacgagtttacgggagacaggtgtcagaattacgttatggcttctttttacaaggcagaagaactatatcagaaacgggtgctcacgattaccggaatctgcatcgccctcctcgtggttggtattatgtgcgtcgtcgcatactgcaagactaaaaaacagagaaaaaagctgcacgaccggctgcggcagtcgttgaggtctgaaaggaataacatgatgaacatcgccaacggtccccatcaccctaatcccccaccggagaatgtgcaactggttaaccagtacgtttctaagaatgtcatctcgtccgagcacatcgtcgagcgggaggccgagacctctttcagtacctcacactatacgagtactgcccaccatagcacaaccgtgacgcaaactccctcgcactcttggagtaatggacacactgaaagcatcctgtccgaatcccactccgtgatcgtgatgtcttccgtcgaaaactccagacattcctctcccacaggtggacctaggggtcggctaaatggaaccggtggtccccgcgagtgcaacagtttcctgaggcatgcgcgggaaacaccagacagctaccgggatagtccgcattccgagcggtacgtctctgccatgactactcctgctcgaatgtctccagtcgatttccacacacccagcagcccaaagagtccgccatctgaaatgtcacctcccgtctctagcatgaccgtgtcaatgccatccatggcagttagtcctttcatggaggaggaacggcccttgctgttagtgactcctccccggctgcgggaaaagaagtttgaccatcaccctcagcagtttagctcattccaccacaaccccgcccacgatagcaactctcttcccgcttctccattacggatcgtcgaagacgaagagtatgaaacaactcaggagtatgaaccggcccaggagccagtaaaaaaattggctaacagccgtagagctaaacgcacgaagccaaatggacacattgcaaataggctggaggtagattcaaatacctcatctcagagctctaacagcgaaagtgagaccgaggacgaaagggtaggggaggacacccccttccttggtattcagaaccccctggctgcgagcctcgaggccactccagcttttcgtctggccgattcgagaacaaatccagccggacggttttccactcaggaggagattcaggcccgcctctcctccgtgatcgcgaatcaggaccccattgccgtg

SEQ ID NO: 17429 - DNA, 1911 bp, synthetic construct
  misc_feature 1..1911: note = source = /note="Description of Artificial Sequence: Synthetic coding sequence"
  source 1..1911: mol_type = other DNA
atgtcggagagaaaagaaggtcgaggcaaagggaaaggaaagaagaaggaacgggggtcaggaaagaaacctgagtcggcggcagggagccagagcccagccctccctccaagactgaaagaaatgaagtcccaagaatccgcagcaggatcgaagctggtactgcgttgtgaaaccagctcggagtactcatccctgcggtttaagtggttcaaaaacggcaacgagctgaacaggaagaacaaacctcaaaacatcaagatccaaaagaagcccggtaagtcagagttgcgaattaacaaagcatccctggcagacagcggggaatacatgtgtaaggtcatatccaaactgggaaatgattcagcatccgcgaacattaccattgtggaaagtaacgagattatcacggggatgcctgccagcactgaaggtgcctacgtcagcagcgaatcaccaatcaggatttcggtgagcaccgaaggagcgaacaccagctcatcgacctccaccagcactaccggtacttcccatttggtgaaatgcgcagagaaggaaaagacgttttgtgtgaacggaggtgaatgttttatggtcaaggatcttagcaatccgtcgcggtacctgtgtaagtgtcctaatgagttcaccggagatagatgccagaattacgtgatggccagcttttacaaggccgaggaactgtaccaaaagcgcgttctcaccataaccggaatctgcatagcacttctggtggtgggtataatgtgcgtggtcgcttattgtaagactaagaaacaaagaaagaagttgcatgataggttgcggcagagccttcgatcagaacgaaacaacatgatgaacatcgccaatggaccccaccaccctaaccctcccccagagaatgtgcagcttgtcaaccaatatgtgtcgaagaatgtgattagctccgaacatattgtggaaagagaggccgaaaccagcttttcgacctcacattacacttccactgcgcaccattcaacgactgtgacgcagaccccgtctcattcgtggtcaaacggccacaccgagagcatcctttccgaatctcattccgtaattgtgatgagctcggtggaaaatagccgacatagctcgcctacgggtgggccacgaggcagattgaatggaaccggcggtccgcgggagtgcaattcctttctgcgacacgcgcgcgaaaccccggattcctacagggattcccctcattccgagagatacgtatcggcaatgactaccccagcgagaatgtccccagtggattttcatactcctagctcgcctaaatcccctccatcggagatgagcccacctgtttcgtcaatgaccgtgtcaatgccctcgatggcagtctcgccgttcatggaagaagaacgccctctgctccttgtcactccgcccagacttcgtgaaaagaaattcgaccatcacccccaacagttttcgtccttccaccataatcctgcacacgattctaactcgcttcccgcttcccctctcagaattgtggaggacgaggaatacgagactactcaggaatacgaaccggcacaggaacctgtgaagaagctggcaaattcgcgtcgagcaaagcgcacgaagccaaatgggcatatcgccaaccgcctcgaagtggactctaacacctcgtcgcaaagctcaaacagcgaatcagaaacggaagatgagagggtgggcgaggacacccctttcctgggaatccaaaatccccttgccgcatccctggaagcgactcctgcgttccgcctcgcagatagcagaactaacccagcaggtcgctttagcacccaagaagaaattcaggctagacttagctcagtgattgctaaccaagaccctattgcagtt

SEQ ID NO: 17430 - DNA, 1911 bp, synthetic construct
  misc_feature 1..1911: note = source = /note="Description of Artificial Sequence: Synthetic coding sequence"
  source 1..1911: mol_type = other DNA
atgagtgaacggaaggaagggcgggggaaagggaaagggaaaaaaaaagaaagggggtcagggaaaaagcctgaatccgctgcagggagtcagtcgcccgccctacctccacggctcaaagagatgaaatctcaggaatctgcagctgggtccaaactcgttctccggtgtgaaacatcttccgaatattcaagtttaaggtttaagtggttcaaaaatggaaatgaactaaacagaaaaaataaaccccagaatataaaaatacagaaaaaacccggaaagagtgaactaagaatcaataaagcctcactagcggatagtggggaatatatgtgtaaagtaatatctaagctcggaaatgattctgcttctgctaatataacaatagtagaatccaatgaaataatcacagggatgcctgccagtactgaaggggcttatgtttcttccgagtcacctataagaatttccgttagtactgaaggggcgaacacgagttcaagtacatcaacatctacaacaggaacttctcatctggtcaaatgtgcggaaaaagaaaaaactttctgtgtcaatgggggggagtgtttcatggtgaaagatttatcgaacccatctcgctatctttgcaagtgccctaatgaatttacaggggatcgatgccagaactatgttatggcctcgttctataaagccgaagaactctatcaaaaacgggtccttacaattacaggaatctgtattgcacttctagttgtagggataatgtgtgtcgtagcctactgtaaaacaaaaaagcagagaaaaaaactacacgaccgcctgaggcagagtcttaggagtgaacggaataacatgatgaatatcgcaaatggaccccatcatccaaacccaccccccgaaaacgtgcagctagtcaatcaatacgtgtcgaaaaacgttatctcatctgaacatatagttgaacgagaagctgaaacatcttttagtacatcccactacacttctacagcgcaccattctactacagtaactcagacaccaagtcactcttggtctaacgggcacacagaatcaattctgtctgaatcccactcagtcatagttatgagttccgtggaaaattcacgacactcttcccccactgggggacctagagggaggctgaacggaactggggggcccagggaatgcaactcttttctgaggcatgcccgggaaacacctgattcctatcgagacagtcctcattctgaacggtatgtatctgccatgacgactccagctcggatgtctcctgtggatttccacactcccagttctcctaaatcccctcccagtgaaatgtcccctcccgtctcatcaatgacagttagtatgcccagtatggcagtctctccctttatggaagaagaacgccccttgctcctcgttactccacctcgactgagggaaaaaaaatttgatcatcatccacagcagtttagttcctttcaccacaatcctgctcatgatagtaatagtttacctgcatctcctctccgaatagtggaagatgaagaatatgaaactactcaggaatatgaaccagcccaggaacccgtgaaaaagctcgctaattctaggcgcgcaaaacgaacaaaaccaaacgggcacatcgccaaccggctggaagtggattctaacacatcctctcagtcatccaattcagaatctgaaacagaagatgaaagagtgggagaggacacaccattcttagggatccagaaccccctcgctgctagtctagaagccactcctgcttttcgactcgcagactcaaggactaaccctgccggacgattctcaacacaggaagagatacaagctcgcctgtcctctgtgatagcaaaccaggatcctatagccgtg

SEQ ID NO: 17431 - DNA, 1911 bp, synthetic construct
  misc_feature 1..1911: note = source = /note="Description of Artificial Sequence: Synthetic coding sequence"
  source 1..1911: mol_type = other DNA
atgtcagaacgcaaggagggtcggggaaaggggaagggtaagaaaaaggaaagaggatccggtaaaaagcctgagtccgcagcaggtagccaatcaccggctctcccccctcgtcttaaggaaatgaaatcccaggaatcagcagcaggctcaaaacttgtgcttagatgtgaaacctcgagcgagtactccagcctgaggttcaaatggtttaagaatggaaacgagctgaatcgaaaaaacaagccacagaacatcaagattcaaaagaagccgggtaaatccgaactgaggatcaataaggcatcgctggcagattcgggagagtatatgtgtaaagtcatatccaagctcggaaacgactccgcatcggcaaacatcaccatcgttgaatccaacgagatcataaccggaatgcctgcatcaaccgaaggggcctacgtatcgtccgagtccccaatccgaatttccgttagtactgaaggagcaaatacttcatcctcgacctccacttccaccactgggaccagccacctggtgaagtgcgcggagaaggaaaagactttttgtgtgaacggaggcgagtgctttatggtcaaggacctgtccaacccttcgaggtacctgtgcaaatgtcctaatgagtttaccggcgatagatgtcaaaactacgtcatggcgagcttttacaaggctgaagaactttaccagaagagggtgcttactatcaccggcatttgcattgcacttttggttgtcggtattatgtgtgtggttgcctactgtaaaacgaagaaacaaagaaagaaactgcacgataggctgcgtcagagccttagatcagagcgtaacaatatgatgaatatcgcaaacggacctcaccaccccaatccccctcctgaaaatgtccaacttgtgaatcaatacgttagcaagaacgtcatttcatcggaacacattgtcgagcgggaagccgaaacctccttttccacttcacattacacctccactgcgcatcacagcaccactgtcactcagactcctagccactcctggtctaacggccataccgagtccatcctttcggaatcgcattctgtaatcgtgatgtcgagcgtggaaaattccagacattcatcccccactggaggccctaggggtcggcttaacggaaccggtggtccgcgcgaatgtaactctttcctgcgccatgcaagagagactcccgatagctaccgcgactccccccattcggaacgttatgtgagcgcaatgactactcccgctcgcatgagccctgtggactttcacactccatcaagcccgaagtcacctccctccgaaatgtcccctcctgtctcgagcatgacggtgtcgatgcctagcatggcagtgtcaccatttatggaggaggaacgtccgcttttgctggtgactccccctcgactgagggaaaagaaatttgatcatcatcctcagcagttctcgagcttccatcataatcctgcccatgactcgaactccctgcctgccagcccactgaggattgtggaagatgaagagtacgaaaccactcaagaatacgagcctgcacaagaacctgtgaagaagctcgcaaattcgcgacgggctaagaggaccaagcccaacggacatatcgctaaccgtctggaggtggattcgaacacttcgtctcaatcctccaactcggagtccgagactgaagatgaaagggtcggcgaggacacccccttcctggggattcaaaatccactcgcagcctccctcgaagcaaccccagcctttagactggctgattcccgaaccaacccagccggtcgcttctcaactcaggaggaaatacaagcaagactttctagcgtgattgctaatcaggatccaatcgccgtg

SEQ ID NO: 17432 - DNA, 1911 bp, synthetic construct
  misc_feature 1..1911: note = source = /note="Description of Artificial Sequence: Synthetic coding sequence"
  source 1..1911: mol_type = other DNA
atgtcggaacgaaaagaaggtcgtggtaaaggtaaaggtaaaaaaaaagaacgaggttcgggtaaaaaaccggaatcggcggcgggttcgcaatcgccggcgttaccgccgcgattaaaagaaatgaaatcgcaagaatcggcggcgggttcgaaattagttttacgatgtgaaacgtcgtcggaatattcgtcgctacgatttaaatggtttaaaaatggtaatgaactaaatcgtaaaaataaaccgcaaaatataaaaatacaaaaaaaaccgggtaaatcggaattacgaataaataaagcgtcgttagcggattcgggtgaatatatgtgtaaagtaatatcgaaactaggtaatgattcggcgtcggcgaatataacgatagttgaatcgaatgaaataataacgggtatgccggcgtcgacggaaggtgcgtatgtatcgtcggaatcgccgatacgtatatcggtatcgacggaaggtgcgaatacgtcgtcgtcgacgtcgacgtcgacgacgggtacgtcgcatttagtaaaatgtgcggaaaaagaaaaaacgttttgtgttaatggtggtgaatgttttatggttaaagatctatcgaatccgtcgcgatatttatgtaaatgtccgaatgaatttacgggtgatcgttgtcaaaattatgttatggcgtcgttttataaagcggaagaactatatcaaaaacgagtattaacgataacgggtatatgtatagcgctattagtagtaggtataatgtgtgtagttgcgtattgtaaaacgaaaaaacaacgtaaaaaactacatgatcgtttacgtcaatcgttacgatcggaacgtaataatatgatgaatatagcgaatggtccgcatcatccgaatccgccgccggaaaatgtacaattagttaatcaatatgtatcgaaaaatgtaatatcgtcggaacatatagtagaacgagaagcggaaacgtcgttttcgacgtcgcattatacgtcgacggcgcatcattcgacgacggtaacgcaaacgccgtcgcattcgtggtcgaatggtcatacggaatcgatattatcggaatcgcattcggttatagtaatgtcgtcggtagaaaattcgcgtcattcgtcgccgacgggtggtccgcgtggtcgtttaaatggtacgggtggtccgcgtgaatgtaattcgtttttacgacatgcgcgtgaaacgccggattcgtatcgtgattcgccgcattcggaacgttatgtatcggcgatgacgacgccggcgcgaatgtcgccggttgattttcatacgccgtcgtcgccgaaatcgccgccgtcggaaatgtcgccgccggtatcgtcgatgacggtttcgatgccgtcgatggcggtttcgccgtttatggaagaagaacgtccgttattattagtaacgccgccgcgtttacgtgaaaaaaaatttgatcatcatccgcaacaattttcgtcgtttcatcataatccggcgcatgattcgaattcgctaccggcgtcgccgttacgtatagttgaagatgaagaatatgaaacgacgcaagaatatgaaccggcgcaagaaccggttaaaaaattagcgaattcgcgacgagcgaaacgaacgaaaccgaatggtcatatagcgaatcgactagaagttgattcgaatacgtcgtcgcaatcgtcgaattcggaatcggaaacggaagatgaacgagttggtgaagatacgccgtttttaggtatacaaaatccgttagcggcgtcgttagaagcgacgccggcgtttcgattagcggattcgcgtacgaatccggcgggtcgtttttcgacgcaagaagaaatacaagcgcgactatcgtcggtaatagcgaatcaagatccgatagcggtt

SEQ ID NO: 17433 - DNA, 1911 bp, synthetic construct
  misc_feature 1..1911: note = source = /note="Description of Artificial Sequence: Synthetic coding sequence"
  source 1..1911: mol_type = other DNA
atgagcgaacgtaaggaaggtcggggaaaggggaaggggaagaagaaggaaaggggatccggtaagaagcctgaatcagcagcgggatcacaaagccccgctcttccgcctagactgaaggaaatgaagagccaagagtcggcagccggtagcaagttggtgctgaggtgcgagacttcgagcgagtatagctcgctgagatttaagtggttcaagaacggtaatgagttgaacagaaaaaacaaaccacagaacataaagattcaaaagaaacctggcaaatctgaacttcggatcaacaaagcgtcgctggcagactccggcgaatacatgtgtaaggtcatcagcaagctcgggaacgactcagccagcgcaaatatcaccattgtcgaatccaatgagattatcaccggaatgcctgcatcaaccgaaggcgcatacgtgtcaagcgaatccccgatcagaattagcgtctcgaccgagggagcaaacacctcatcatcgacttctacctccactaccggaacttcccacctcgtgaagtgtgcagagaaggagaaaacgttctgcgtgaacggtggggaatgctttatggtgaaggacctctcaaacccgagccgatacctgtgtaaatgtcctaatgaatttactggagataggtgtcagaactacgtgatggcttctttttacaaggcggaagaactttaccagaagcgggtgctgacgattacgggaatatgtattgcattgttggtggtgggcattatgtgtgtcgttgcttactgcaagacgaagaagcagcggaagaaactccatgacagattgcgccaatccctgagatcggaaaggaacaacatgatgaatatcgcgaatggccctcatcaccctaatcctcctccagaaaacgtccaacttgtcaaccaatacgtgtcgaagaacgtgatctccagcgaacacattgtggaaagagaagccgaaacctctttttccacttcccattacactagcacggcccaccattccactaccgtcacccaaaccccttcacactcgtggtcgaacggacataccgagtcaattctttccgagtcgcattcagtgatcgtgatgtcctcagtggaaaactcacgtcattcgagccccactggcggtcccagaggacgcctgaatggcaccggtggacctagagaatgtaactcgtttctgagacatgcaagagaaactccggacagctacagagattcgccccattccgaaaggtacgtttcggcaatgaccactccagcacgcatgtcgcctgtcgattttcatactcctagctcgccaaagtcgcctccatcggaaatgagcccacctgtgtcgtcaatgaccgtgtccatgcctagcatggccgtcagcccgttcatggaggaggagaggccactgcttcttgtgacgcccccgaggcttcgcgagaaaaagttcgatcatcatccacaacagttctcgtcgtttcatcataaccctgcacatgattcaaactcgctgcctgcctcaccactgaggatcgtggaagatgaagaatacgaaaccacccaggaatacgagccagcacaggaacccgtgaagaagctcgcgaactcacggcgagcaaagagaactaagcccaacgggcacatcgcaaacagacttgaggtggattccaacacctcgtcccagtcctcaaactcggagtccgaaaccgaggatgaaagagtgggagaagataccccttttctcgggatccaaaatcctcttgcagcttccttggaggcaaccccagcgttccgcctggccgatagccggactaaccctgcaggacgcttctcaacgcaggaagaaattcaagcacggctttctagcgtcatagcaaaccaagaccccattgcagtg

SEQ ID NO: 17434 - DNA, 1911 bp, synthetic construct
  misc_feature 1..1911: note = source = /note="Description of Artificial Sequence: Synthetic coding sequence"
  source 1..1911: mol_type = other DNA
atgagtgagcgtaaagaaggccgtggcaagggcaaaggcaaaaaaaaagaacgcggctctggaaaaaaaccggaaagtgcagcaggcagtcaaagcccggcgctccctcctcgcctgaaagagatgaagagtcaggaatcagctgcgggatccaaacttgtgctgcggtgcgaaacatcatccgaatatagctcattacggtttaaatggtttaaaaacggtaacgaacttaatcgtaaaaacaagcctcaaaacattaaaattcagaaaaagccgggaaaatccgagctgagaattaacaaagcgtctctcgctgactctggcgagtatatgtgcaaggtcatcagcaaactggggaacgacagcgcgtccgccaacatcaccattgtagagagcaatgaaattattacaggaatgccagcgtcgaccgaaggtgcatatgtctcatcagaatccccaataaggatctctgtatcaacagaaggtgccaatacatcctcgtcaacttcgaccagcacaactgggacgagccatctcgttaaatgtgctgaaaaagaaaagactttctgtgtgaatggaggtgagtgttttatggtcaaagacctttcaaacccttctcgttatctttgtaaatgcccgaacgaatttacaggcgatcgctgtcagaattacgtgatggcatccttttacaaagccgaggagttatatcaaaaacgtgtccttacgataacaggaatttgcattgctctgctggttgttggtatcatgtgtgtagtggcatattgcaaaacaaaaaagcagaggaagaagctccatgaccggcttcgccagtctcttcgctctgaacgcaataatatgatgaacatcgcaaatgggccccaccatcctaatccaccaccggagaacgtacagctcgtcaaccaatatgtgtctaaaaatgttatttcatcagagcatattgtcgaacgcgaggctgagacctctttttcaacatctcattatacatctacagcacaccacagcacgactgtcactcaaacaccgtctcactcgtggtctaacggacatactgaaagcatcctgtctgagtctcattctgttatagtgatgagttcagtggagaattcgcgtcattcctcgcctacaggcggtccgagaggccgtcttaatggcacagggggtccgagagaatgtaatagctttctgcgtcatgcgagagaaactccagattcttatcgtgattcgccgcatagtgaaagatatgttagcgctatgaccacgccggctcgcatgtctccagtagatttccatacgccgtcgagccctaaatcaccgccgtctgaaatgtcacctccagtttcatcaatgacagttagcatgccttcaatggccgtgtcaccattcatggaagaggaaagaccccttttactcgttaccccgccgcgcttgcgcgaaaaaaagtttgaccatcatccgcagcagttcagctcctttcaccacaacccagcgcatgactcaaacagcttgccagcctcgccgctcagaattgttgaggatgaggaatacgaaacgacacaagagtatgaacctgcacaggagccggtcaaaaaactggcaaactctcggagagcaaagcgcacgaaaccgaacggccacattgccaatcgattagaagttgatagcaatacatcttcccaatcctcgaactcagagtccgaaacagaagatgaacgtgtgggggaagacacgccgtttctgggtattcagaatccgctggccgcatctcttgaggcaacaccggcatttcgattggcggatagccggacgaatcctgctggccgattttcaacacaagaggaaatccaggcgcggctgtcaagtgtcattgcgaatcaagacccgatcgccgtg

SEQ ID NO: 17435 - DNA, 1911 bp, synthetic construct
  misc_feature 1..1911: note = source = /note="Description of Artificial Sequence: Synthetic coding sequence"
  source 1..1911: mol_type = other DNA
atgtcggagcggaaggaaggacgcggaaagggtaaggggaaaaagaaagagagaggatccggtaagaagccagaatcggcagccggctcccaatcacctgccctcccacctcgacttaaggaaatgaaatcccaagaatcggctgcgggttcaaaactggtcttgcgatgtgagacgtcatcggagtactcatcactcaggtttaagtggttcaaaaacggtaacgaactgaatcgtaaaaacaagcctcagaacattaagatccagaagaaaccaggaaaatccgagctgcgaattaacaaggcatcgcttgcagatagcggtgaatacatgtgtaaagtgatctcaaagctgggcaacgattcagcaagcgccaacattaccattgtggaatcgaacgagatcattaccggtatgcctgcgtccactgaaggagcatatgtctcctcagaatcgcctattaggatctcagtctcgacggaaggcgcgaatacgtcctcctccacctcaacctcgaccacgggaacttcccatctcgtgaagtgcgcagagaaagagaaaaccttctgtgtgaatggtggtgagtgttttatggtgaaagacctgagcaacccgtcgaggtacctgtgcaagtgtcctaatgaatttaccggggacagatgccagaactatgtgatggcttctttttacaaggcggaagaactttaccaaaagcgcgtacttaccattaccggaatctgcattgcccttctggtcgtgggaataatgtgtgtggtcgcatactgtaagaccaaaaagcagagaaagaagctccatgatagactgcgccagtcattgcgcagcgaacggaataacatgatgaacatcgcgaatggcccgcatcatccaaatccaccgcctgagaacgtgcaactcgtgaaccaatacgtgtcgaagaatgtcattagcagcgagcatattgtagagagagaggcagaaacttctttttcaacttcgcattacacttcgactgcgcatcactccactaccgtgacccagactccttcgcattcgtggtccaacggtcacaccgaatcgatactgtctgaatcccattcggtgattgtcatgtcgtcggtcgagaattcgagacattccagccccactggtggtccaagaggcagactcaacggtaccggtggcccccgtgagtgcaattccttcctgagacatgcaagagaaacccccgactcgtaccgcgattccccacactccgaacggtatgtgtccgcaatgaccacgccagcccggatgtccccagtggattttcacactccgtcatcgcctaagtcccctccctcggaaatgtccccacctgtgtcgtcgatgactgtgtcgatgcctagtatggccgtgtccccttttatggaagaagaaagacctcttctgctcgtgacccctccccgcctcagggaaaagaagtttgatcatcatccacaacaattttcgtcttttcatcataaccctgcacatgactcaaattcacttccagcgtcccccttgcgcatagttgaagatgaagagtatgaaaccacccaagagtacgagccagcccaagagcccgtgaagaaacttgcaaatagccgacgtgcaaagcggacgaaacctaatggacacatcgcaaatagactggaggtggattcaaatacttcctcgcaatcgtccaattccgagtccgaaaccgaagatgaacgcgtgggggaagatactcccttcctcggtatccaaaaccccctggcagcttcgcttgaagcaactccagcatttcgtttggctgattcacgaaccaatcccgccggaaggtttagcacccaagaagaaattcaggcgcgcctctcgtcagtgattgcaaaccaagaccccattgcagtg

SEQ ID NO: 17436 - DNA, 1911 bp, synthetic construct
  misc_feature 1..1911: note = source = /note="Description of Artificial Sequence: Synthetic coding sequence"
  source 1..1911: mol_type = other DNA
atgtccgaacgcaaagaaggtcgcggtaaaggaaaagggaaaaagaaggaaagagggagcgggaagaaacccgagtccgcggccggctcccaatctccggcccttcctccacggttgaaagagatgaagtcccaggaatcggccgccggatcgaaactggttctgagatgcgagactagttcagaatatagtagtcttcgctttaagtggtttaaaaatggaaacgagcttaacaggaaaaataaacctcaaaacataaagatccaaaaaaagcctggcaagagtgagctaagaattaataaggcgtcattggctgattccggtgaatacatgtgtaaggtcattagtaagctcggaaatgactctgccagtgcaaatataaccattgtcgaatcgaacgaaatcattacaggaatgcccgcatccaccgagggtgcgtacgtttccagtgagtctcccattcgcatttccgtgtcaaccgaaggggcaaatacttcttcctcgaccagcactagcaccacggggaccagtcacttagttaagtgcgccgagaaagagaaaacattttgcgtgaacggaggagagtgctttatggtaaaagaccttagcaatccgtcaagatacttatgcaagtgccccaatgagttcactggtgacagatgccaaaattatgtaatggcctcattttacaaggctgaggagctttatcaaaaacgagtacttacgattacgggtatctgtattgccttgttagttgtgggtataatgtgcgttgtggcttactgcaaaactaagaaacaacggaagaagcttcatgatcggctccgtcaaagcctcagatctgagagaaacaacatgatgaacatcgctaacggtcctcatcatcctaacccacctcctgagaatgtccagttagttaaccaatacgtatccaagaatgtcatttcttccgagcacatagtggagagagaggctgaaacctctttttcaacctcacattacacgagtactgcacatcattccacaacagtcactcagacaccttctcattcatggtcaaatgggcataccgaatcaatactatcagaatcacatagtgtcatagtgatgtcttccgttgaaaacagcaggcattctagtcccaccggcggtcctaggggaaggttgaatggtactggcggtcctcgagaatgcaacagttttcttcggcatgcaagagagactccggattcatatagagatagtcctcattcagaaaggtatgtgagtgcgatgacaacaccagcacggatgtcacctgtggattttcacacaccatcaagtcctaagtccccaccgtcagagatgtctcccccagtttcctcaatgactgtttccatgcccagcatggcagtaagtccttttatggaggaggagagacctttgcttcttgtcactccccctagactaagggagaaaaagtttgatcaccacccgcagcaattttcttcattccaccataacccggcacatgattccaatagtttgcctgcttctcctttacgaatcgtggaagacgaagaatatgaaacaactcaggagtatgaaccagctcaggaaccggtcaagaagctggctaactcacgtcgtgcgaaaaggacaaaacctaacggtcatatcgcgaataggctggaagtggattccaacacatcatcacaatcctctaatagcgagtcagagactgaagatgagcgagtcggtgaagatactccattccttggtattcaaaaccctttggctgcaagcttggaggccactcctgcattcagacttgccgatagccgaaccaatccggccgggaggttttcgactcaagaagagattcaggctagattgtcatctgttatcgccaatcaagatccaatcgcagtt

SEQ ID NO: 17437 - DNA, 1911 bp, synthetic construct
  misc_feature 1..1911: note = source = /note="Description of Artificial Sequence: Synthetic coding sequence"
  source 1..1911: mol_type = other DNA
atgtcagaacgcaaggaagggagaggtaagggaaaggggaagaaaaaagagagaggctcaggcaaaaagccagagtcagccgccggctcccaatcgcctgcacttccccctcgactgaaggaaatgaagtctcaagagtccgccgcaggctcgaaacttgtgctgcgttgcgaaacctccagcgaatactcgtcgctgagattcaaatggtttaagaatggtaatgagcttaacagaaagaataagccacagaacattaagattcaaaagaagccagggaagtctgagcttaggatcaataaagcatcacttgcagattccggggagtacatgtgtaaggtgatttcaaagctgggtaacgactctgcctcagcgaatatcaccattgtggaatcaaacgaaatcattactggaatgcctgcttcaaccgaaggggcatatgtctcatcggaaagcccaattcggatctctgtgtccaccgaaggagcaaatacctcgtcgtcaacctcgacttcgaccactggaacctcgcatttggtgaaatgtgcagagaaagaaaagacgttttgcgtcaatggaggtgaatgtttcatggtgaaggatctctcgaacccgtcccggtacttgtgcaaatgtccaaacgaatttactggtgatagatgtcagaattacgtgatggcttcgttctataaagcagaggagctgtaccaaaaaagagtgcttactattaccggcatctgtattgcactcctggtggtcggcatcatgtgcgtcgtggcctactgtaagactaagaagcaacgcaagaaacttcatgacagactccgacaatcactcagaagcgagcgcaacaatatgatgaacatcgcaaacggaccacaccatcccaaccctcctccggaaaatgtccagctggtcaaccagtacgttagcaagaatgtgatctcgtcagaacatattgtcgaacgagaggctgaaacctccttctccacttcgcattatacttcaaccgcacaccactcgaccaccgtcactcagacccctagccattcatggagcaatggccataccgagtcgatcctgtccgagtcccatagcgtgatcgtcatgtcctccgtcgaaaattcccggcattcctcgcctacgggaggtccaagaggacggctcaatggaactggaggaccgagagagtgcaactcgttcctccgtcatgcaagagaaactccagattcgtaccgtgactcaccacatagcgaaagatacgtgtcagcaatgaccactcccgcacgcatgagcccggtggattttcatacgccttcctcacctaagtctccgccctctgaaatgtcgccacccgtgtcgtcaatgacggtgtcaatgcctagtatggctgtgtcaccttttatggaagaggaacggccactgctgctcgtgacccctccaagacttagggagaagaagtttgatcatcaccctcagcagttttcttcgttccatcacaaccccgcccatgatagtaattcattgccggcttcccctctgcgaatcgtggaagatgaagagtatgaaaccacgcaagaatacgagccggcacaggaacccgtgaaaaaactggcaaatagccgccgcgcgaagcgcactaagcccaacggtcacattgcaaacaggcttgaagtggattcgaatacttcctcgcagtcgagcaactcagagtcagaaaccgaggatgagagagtgggtgaagatacccctttcttgggcattcaaaacccactcgcagcgtccctcgaggcgacccctgcctttagacttgccgatagccggactaatcctgcaggtcgtttttcgacccaagaggaaatccaggctcggctgtcctcggtgatcgcaaaccaagatcctattgcagtg

SEQ ID NO: 17438 - DNA, 1911 bp, synthetic construct
  misc_feature 1..1911: note = source = /note="Description of Artificial Sequence: Synthetic coding sequence"
  source 1..1911: mol_type = other DNA
atgtcggagaggaaggaaggccggggaaaaggaaagggcaagaagaaggagaggggttctggtaagaagccggaatcagctgcaggatcccagagccccgctctgccgccccggctgaaggaaatgaaatcccaagagtcggcggcgggatcgaaactggtcctgaggtgcgagacttcgtcggaatactcatcgctgcgcttcaagtggtttaagaacggaaacgaattgaaccggaagaataaaccgcaaaacataaagatccaaaagaagccgggaaaatctgagctgagaataaacaaggcaagccttgcggattcaggtgaatacatgtgcaaggtgattagcaagctggggaatgacagcgcgtccgcaaacatcactatcgtggaatcaaacgagatcatcaccggaatgccggcaagcactgaaggagcctacgtgtcgtccgaaagccccatcagaatctccgtgtcgaccgaaggagccaacacctccagctccacctccacgtccaccactggaacttcgcacctcgtgaaatgcgccgagaaggaaaagactttctgcgtgaacggaggcgaatgcttcatggtgaaggacctgagcaacccgtcaagatacctgtgcaagtgcccgaacgaattcactggggatagatgccaaaactacgtgatggcttcattctacaaggcagaagagctgtaccagaaaagagtcctcaccatcactggcatttgcatcgccttgctggtggtgggtatcatgtgcgtggtcgcctactgtaagaccaagaagcagagaaaaaagctccatgaccgcctcaggcagtccctccggtcagaacgcaacaacatgatgaatatcgccaacggaccacatcatccgaacccgccgcctgaaaatgtgcagttggtcaaccaatacgtctcgaagaacgtgatctcgtcagaacatatcgtcgaaagagaggcggagacgagcttctccactagccactacacttcgaccgcgcatcattcgactactgtcacccagaccccgtcacattcctggtcgaacggacatactgagtcaatcctttcggaatcacatagcgtgatcgtgatgtcgagcgtggagaactccagacacagttcaccgactggtgggccacggggacgcttgaacggaaccggagggccaagggaatgtaattccttcctgcgccacgcacgcgagacgccggactcgtaccgagactcgccacactcagaacggtacgtgagcgccatgactaccccagcccggatgagccctgtggattttcataccccgagctcgccgaaatcgccgccatccgagatgtcgccacccgtgtcctccatgactgtgtcgatgccgagcatggccgtctcacctttcatggaggaagagcgcccacttcttctcgtgaccccgcctaggctgcgcgagaaaaagttcgaccaccacccgcagcagttctcatcgttccatcataatccggcccatgactcgaactcgctgccagcctcacctctccgcatcgtggaggatgaagaatatgagacgacccaggagtacgaacctgcccaggagccggttaagaaactggctaactcccggcgggcaaagagaactaagcctaatggtcacatcgccaaccggctggaagtcgattcgaacacctcgtcccagtcatccaattcggaatccgagactgaagatgagcgggtgggagaggatactccgttcctgggaatccagaacccgcttgccgcctcgctcgaggcaactcctgccttccgcctggccgattctcgcactaatcctgcgggacgcttttccacccaagaggaaatccaagcccgcctgtcctcggtgatcgcgaaccaagacccgatcgcagtg

SEQ ID NO: 17439 - DNA, 1911 bp, synthetic construct
  misc_feature 1..1911: note = source = /note="Description of Artificial Sequence: Synthetic coding sequence"
  source 1..1911: mol_type = other DNA
atgagcgagaggaaagaagggcgggggaaggggaaagggaagaaaaaggaacggggatcaggaaagaagccggaatcggcagctggatcgcagtcgccagctctgccgccccgcttgaaggaaatgaaatcacaggagtcagccgcaggatcgaagttggtgctccgctgcgagacgtcgtccgagtactcctccttgcgcttcaagtggttcaagaacggtaatgaactgaacagaaagaacaagccacaaaacatcaagattcagaaaaagcccggaaaatcggagcttcggatcaacaaagcctcactcgcagactcgggtgaatacatgtgcaaggtgatctcgaagctcgggaacgactcagccagcgccaacatcactatcgtggaatcgaacgaaatcatcaccgggatgcctgctagcacggaaggggcctacgtgtcctcggaatcgcctatcagaatcagcgtctcaaccgaaggcgcgaatacttcctcctcaacttccacttccacgactggtacctcacatctggtcaagtgtgccgaaaaagaaaagaccttttgcgtgaacggcggcgaatgcttcatggtgaaagacctctcgaatccttccaggtacttgtgcaaatgcccgaacgagttcactggggaccgatgtcagaactacgtcatggcgtcgttctacaaggcagaggagctgtaccagaagcgcgtgttgactattactggcatttgtatcgctctgctcgtggtgggtatcatgtgcgttgtggcgtactgcaagacgaagaagcagcggaagaaactgcatgataggctgagacagagccttagatcggaacggaataacatgatgaacatcgccaacggaccgcaccacccgaatcctccgcctgagaatgtgcagctcgtgaaccaatacgtgtcgaaaaatgtgatctcctcagagcacattgtggaacgggaagcggaaactagcttcagtacctcacattatacctcaactgcacaccattcgactaccgtgacccagaccccgagccactcctggtccaacggacacaccgagtcaatcctctcagaaagccactcggtgatcgtgatgtcatccgtcgagaacagccgccattcaagccctactggcggaccaagaggacgcctcaacggaaccggagggccgcgggagtgcaactcgtttctgcgccatgcgcgagaaacccctgattcttatcgcgattcgccccactcagagcgctacgtgagcgccatgaccaccccggcacggatgagccctgtcgactttcacaccccctcctctccgaaaagcccaccgagcgaaatgagcccaccggtcagttcgatgactgtgtcgatgccctcgatggccgtgtccccattcatggaggaggaaaggcccctcctgctcgtcaccccaccgagactgcgggaaaagaagtttgatcatcatcctcagcagtttagctccttccatcacaacccggctcatgattcaaactcactgcctgcctcaccactgcggatcgtcgaggacgaagaatacgaaaccactcaagagtacgagccagctcaggaacctgtgaagaagctggccaattcgagacgcgcaaagcgcactaagccaaatggacacatcgcaaatcggctggaagtggatagcaacacctcctcccagtcctccaactcggaatcagagacggaggacgaacgcgtgggtgaggacacgcctttcctgggtatccaaaacccgctggccgccagcctcgaggcaactccggccttccggctggccgactcgcgcaccaaccccgcgggccgcttctccacccaagaggagatccaggccagactgagctccgtgatcgccaaccaagatccgatcgcagtc

SEQ ID NO: 17440 - DNA, 1911 bp, synthetic construct
  misc_feature 1..1911: note = source = /note="Description of Artificial Sequence: Synthetic coding sequence"
  source 1..1911: mol_type = other DNA
atgagcgaaagaaaggaaggacgcggtaagggaaaaggaaaaaagaaggagcgcggctcaggaaagaagccggagtcagccgcaggctcgcagtccccggccctgcctccgaggctcaaagaaatgaagtctcaggagagcgctgctggcagcaagctggttctgcgctgcgaaacttcatcagagtacagctcgctccgttttaagtggtttaagaacggaaatgagctgaacagaaagaacaagcctcagaatatcaaaatccagaaaaaacccgggaaatccgaactgcggatcaataaggcttctctggccgacagcggtgaatacatgtgcaaagtgatctcaaaactgggtaacgattcagcctcggccaacattaccatcgtcgaatcaaacgaaatcatcacgggaatgccagcgagcactgaaggcgcctacgtgtccagcgagtcgccaatcagaatctccgtctccactgagggcgctaataccagctcctcaacgtctacctccaccactggcacgtcccacctggtgaagtgcgccgaaaaagaaaagactttctgtgtgaatggtggagaatgcttcatggtgaaggacctgtcgaatcctagccggtacctgtgtaaatgccctaatgaattcaccggggacagatgtcagaactacgttatggcttcattctacaaggccgaggaactctaccagaagcgcgtgctgaccatcacgggtatctgcatcgctttgctggtggtgggaatcatgtgcgtggtggcgtactgcaagaccaaaaagcagaggaaaaagctgcatgatagactgcgccaatcactccggtcggagcgcaataacatgatgaatatcgcaaacggcccgcatcaccctaacccgccaccggaaaacgtgcaactggtgaaccaatacgtgtccaaaaatgtgatcagcagcgagcatatcgtggagagggaggccgagacttccttctcgacctcacactacacttcgaccgctcaccattccactaccgtgactcagaccccgtcccacagttggtcgaatggacacactgaatcgatactgtcggaaagccattccgtgatagtcatgtcctctgtggagaattcacggcactcgtcgccgaccggtggaccacgcggaaggttgaacggaaccggaggcccgcgagaatgcaactcattccttcgccacgctcgggaaacgccggacagctaccgggattctccgcacagcgaacgctacgtgagtgcaatgaccactcctgcacgcatgtcgcctgtggattttcataccccatcatcccctaagtcacctccttcggagatgtcgcccccagttagctctatgaccgtgtcgatgccctcgatggcagtgtcaccattcatggaagaggaaagaccgcttctcctggtgactcctccaagactcagagagaaaaagtttgaccatcacccccaacagttcagcagcttccatcacaacccggcgcacgattcgaactcattgccggcatccccactgaggatcgtcgaagatgaggaatacgaaactactcaggagtacgaacctgcgcaggagccagtgaagaagctggcgaacagccgcagggcaaaacggacgaagccgaacggacacatcgcgaaccgccttgaagtggactccaacacttcatcccagtcgtcgaactccgagtcggaaactgaggacgaacgcgtgggagaagatactccgtttctcggaatccagaacccgctggcggccagcttggaggccacgccagcattcagactcgcagattccaggacgaacccagccggccggttctcaacgcaggaggaaattcaagcaagactgtctagcgtgatcgcgaaccaggacccgattgccgtc

SEQ ID NO: 17441 - DNA, 1911 bp, synthetic construct
  misc_feature 1..1911: note = source = /note="Description of Artificial Sequence: Synthetic coding sequence"
  source 1..1911: mol_type = other DNA
atgagtgaaagaaaggaaggaaggggaaagggaaaggggaagaagaaggaacgtggaagcggtaagaaacctgagtcagctgccggatcacagtcccccgctctgcccccaagactcaaggaaatgaaatcacaagaaagcgccgcaggctcaaaacttgtgctgcgctgtgaaacctcaagcgaatattcgtcccttcgatttaagtggttcaagaacggaaacgagctgaacagaaagaataaaccacaaaacattaagatccaaaagaaaccagggaagtcagagctgagaattaacaaggcctcacttgcagacagcggagaatacatgtgcaaggtcatttccaaactcggaaacgatagcgcgtcggctaatatcactattgtggaatcaaacgagatcataacgggcatgcctgcctcgaccgagggggcatacgtcagctccgaatcgcctatcaggatatccgtgtccaccgagggagccaacacttcttcgtcaacctcaacctctaccactggaaccagtcacttggtgaagtgtgcagaaaaggaaaagactttttgtgtgaacggaggggagtgctttatggtcaaggatcttagcaacccctcgaggtacctttgtaagtgtcctaacgaatttaccggtgatcgctgtcagaattacgtgatggcctctttttacaaggcagaagaattgtaccagaaacgcgttcttaccatcaccggaatttgtattgccctgttggtggtgggcatcatgtgcgtcgtcgcgtactgcaaaactaagaagcaaaggaagaagttgcatgaccggctccgccaatctctgcgctcagaacgcaacaatatgatgaacatagcaaacggacctcatcaccctaatccacctcctgagaatgtgcagctcgtcaaccagtacgtgagcaagaatgtcattagcagcgagcatatagtcgaacgtgaggcagagacttcattctccacgtcgcattatacgtcgactgcgcaccattcgaccaccgttactcaaactccgtcccactcgtggagcaacggacatactgaatcaattctctcagagtcccacagcgtgatagtgatgagcagcgtggagaactcaaggcactcctccccaactggaggaccgcggggtagactcaatggaaccggaggacctcgagaatgcaatagctttctccggcacgcacgagaaacgccagattcctacagggattctccacatagcgagcggtacgtcagcgcaatgactactcctgcaagaatgtcccccgtggactttcacactccatctagcccgaagtcaccccctagcgagatgtccccaccagtctcatcgatgactgtgtccatgcctagcatggcagtgtcgccatttatggaagaagaaagacctcttctgctggtcactcctccacgacttcgtgagaaaaagttcgatcatcatccacagcagtttagcagctttcaccataacccggcccatgattcaaattccctgcccgcctcacctctgcgcatcgtggaagatgaagagtacgaaaccacccaggagtacgaaccagcacaggaacctgtgaaaaaacttgctaactcacggagagcaaagagaaccaaaccgaatggacacatagctaataggctggaggtcgactccaatacctcctcccaatcctctaattccgagtcggaaaccgaagatgagagagtgggagaggacaccccattcctgggaatacagaatcctctcgcggcctccctggaggccactcccgcatttcgactggcagacagccggacgaacccagccggaagattctcgactcaggaagaaatccaagcacgtctctcctcagttattgcgaatcaagatcccattgcagtg

SEQ ID NO: 17442 - DNA, 1911 bp, synthetic construct
  misc_feature 1..1911: note = source = /note="Description of Artificial Sequence: Synthetic coding sequence"
  source 1..1911: mol_type = other DNA
atgagtgaacggaaggaaggcagaggcaagggcaagggaaagaaaaaggagcggggctccgggaagaaacccgagtctgccgcgggttcccagagccccgccttgccgcctagactcaaggaaatgaagagccaggagagcgcagcagggtcaaagctggtcttgagatgcgagacttccagcgagtattcctcacttagatttaagtggtttaagaatggcaacgagttgaatagaaagaacaagccccagaacattaaaatccagaagaagccagggaaatctgagctgcgaatcaataaggcgtcgctcgccgactccggggaatatatgtgcaaggtgataagcaagttagggaacgactcagcttccgccaacatcactatagtggagtcaaacgaaataattactgggatgccagccagtacagagggagcatacgtcagcagcgagagcccaatccgtatctctgtatcaacagagggcgctaacacgagctcttcaacgagtacctctactaccgggacttctcacctggtcaagtgtgccgaaaaggagaaaacgttctgcgtgaacggcggagaatgtttcatggtcaaagacttgtctaacccctccagatacctgtgcaaatgcccaaacgagtttactggggataggtgtcagaactacgtaatggctagtttttacaaggccgaggagctgtatcagaaacgagtcctgactatcaccggaatctgcattgcgctgctggtggtgggaatcatgtgtgtcgtagcctattgcaaaaccaagaagcagcggaagaaactccatgaccggctccggcagtcactgaggagtgaaagaaataatatgatgaacatcgccaacgggccccaccatccaaaccccccaccagaaaacgtccagctcgttaaccagtacgtgtctaaaaatgtaatttcttcagagcacatcgtggagagagaggcggagacttctttctctacctcacactacacgtctacagcccatcatagtaccactgtgactcagaccccgagccatagttggtccaacggtcacacagagtccatcctgtcagagagccatagcgttattgtgatgagcagcgtggaaaattcccgtcatagctctccaacaggcgggccacggggccgcctgaatggaaccggagggcctcgggagtgtaactccttcctgcgccatgcacgcgaaacacctgatagctatagagattcccctcatagtgagcgatatgtttcggcgatgactacgcccgctcgaatgagccctgtggatttccacacccccagctcccccaagtcccctccctccgaaatgagcccccccgtctcatctatgacagtgagtatgccctccatggccgtcagccccttcatggaagaagagcgaccgcttctcctcgtgaccccgccacggctgcgtgagaaaaaatttgatcaccaccctcagcagttcagctcattccatcataatcccgcacatgattcgaattctcttcctgcatctccccttaggatcgtggaagacgaggagtacgagaccacacaggaatatgaaccggcgcaagagcccgtgaagaagctcgcaaacagcaggcgggctaagcggaccaaacctaatggacacattgcaaacagactcgaggtggacagcaacacctcttcccaaagtagcaactccgagtctgaaaccgaggatgaacgggtaggggaggataccccattcctgggaattcagaaccctctggcagcatctcttgaggctaccccagcctttcggctggcggactctagaaccaatcctgctgggcgcttctcaacacaggaagagattcaagctaggctgtcaagtgtgattgcaaatcaggatcccattgctgtg

SEQ ID NO: 17443 - DNA, 1911 bp, synthetic construct
  misc_feature 1..1911: note = source = /note="Description of Artificial Sequence: Synthetic coding sequence"
  source 1..1911: mol_type = other DNA
atgtctgaacgcaaggagggtcgcggcaagggaaagggaaaaaagaaagagcgcggctcaggaaagaaacctgaaagcgcagccggatcacagtccccggcactgccacccagactcaaagagatgaagagccaagaatcagctgctggttctaaactcgtcctgagatgcgagacctcatctgagtattccagcttgaggttcaaatggttcaagaacggtaatgagctgaacagaaaaaataagccccagaacatcaagatccagaaaaagcctggcaagtctgagctgaggattaacaaggcctctctggctgatagcggtgaatacatgtgtaaggtgatcagtaaacttggcaacgactcagcttccgctaacatcaccattgttgaatccaacgagatcattacaggtatgccagcttcaactgagggcgcatacgtgtcaagcgaaagtcctatcaggatctctgtctccacggagggcgcaaatacatcctcctccacttccaccagcacaaccggtacttcacatcttgtcaaatgtgcagaaaaggaaaaaacgttctgcgtgaatggtggtgaatgtttcatggtgaaggacctcagtaatccgtccaggtatctgtgcaaatgcccaaacgaattcaccggcgatcgctgccagaactacgtaatggcctctttttataaggccgaagagctttaccagaaaagggttctgacgattactggaatttgtattgccttgttggtggtgggcattatgtgcgtggtggcatactgcaagacaaagaagcagaggaagaagctgcatgataggctgaggcagagtctcaggagtgagagaaacaacatgatgaatatcgctaacggaccgcaccacccgaacccaccccccgagaatgtacaactggtgaatcaatacgttagcaaaaacgtcatttcttctgagcatatcgttgaacgcgaggccgagaccagtttttcaacttcccactacacctccaccgcccatcactccacgactgtcacccagacaccaagccacagctggtccaacggccacaccgagtcaattttgagtgagagtcatagtgtgatcgtgatgagctccgtggagaactctcgccacagtagcccgaccggcggaccacgcggtagactcaatggcacaggtggaccgagggaatgtaactctttcctcagacacgcccgcgagacaccagactcttacagagattcacctcactcagagagatacgtttctgccatgactactcctgcccgcatgtccccagtcgatttccacactccaagctctccgaaaagcccaccttccgaaatgtcccctcctgtctctagcatgactgtatctatgccttccatggcggtatccccattcatggaggaggagcgcccccttctgctggtcacacctcctcgcctgagagaaaaaaaattcgatcaccatccacaacagttctcttcctttcaccataaccctgctcatgactcaaattctctcccagcatctcctctcagaatcgtagaagacgaggagtacgaaactactcaggaatatgaacctgctcaggaacctgtgaagaagctcgccaactccaggagagccaagagaaccaaacccaacggacatatagcaaacagattggaagtggactctaacacctcctcccagtcatccaactccgaaagtgagacggaagatgagcgcgtgggagaagacacgccattcctgggtatccagaatccgctggccgccagccttgaagcaactcctgctttccgcctggctgatagcaggacgaaccccgctggtcgcttcagcacccaggaagaaatccaggcaagactgtcaagcgtgattgccaaccaggatccgatcgctgta

SEQ ID NO: 17444 - DNA, 1911 bp, synthetic construct
  misc_feature 1..1911: note = source = /note="Description of Artificial Sequence: Synthetic coding sequence"
  source 1..1911: mol_type = other DNA
atgtctgagaggaaagaaggtcgcggaaaggggaagggaaagaagaaggagcgcggtagtggaaagaaacccgagagcgctgcaggctcccagtcacctgccctcccccctaggctcaaggagatgaaatcccaggaaagcgccgccgggagtaagctggtgctacgttgcgagacttcttcagagtatagctctttacggtttaaatggtttaagaatggcaacgaactcaatcggaagaacaaaccacagaatattaagattcagaagaaacctggaaagtcagaactgaggattaacaaagccagcctcgcagactccggcgaatacatgtgtaaagtgatatccaagttaggcaatgactccgcaagcgcaaatattactatagttgagagcaacgagatcataacaggaatgccggcgagtaccgagggcgcatatgtgtccagtgagagtccgattaggatttccgtgagtacggaaggcgctaatactagctcaagcacatccacttcaacaaccggaactagccatctcgtcaaatgcgcagagaaagaaaagacattctgtgtcaatggcggagagtgtttcatggtgaaagatctgtctaacccctctaggtatctgtgtaaatgtccaaacgagttcacaggggacagatgtcagaattatgtgatggcatcattctacaaggccgaggagctctatcagaaaagagtgctcacaatcactgggatctgcatcgctttactagtggttggcataatgtgtgtggttgcatattgtaagactaagaaacagcgtaagaaactgcacgatcggttaagacagagtctgaggtctgaacgtaataatatgatgaacatcgcaaacggcccacaccatccaaatcctccaccagaaaacgtacagctggtgaaccagtacgtttcaaagaacgtcatatcatccgagcatattgttgagcgtgaggccgaaaccagtttttccactagccattacacaagtaccgcacatcacagcactaccgtgacacaaacgcctagccacagctggtcaaatggacacacagagtccattttatcggagtcacatagtgtgatcgtgatgtctagtgtcgaaaactcacggcactcctctccaaccggagggccaaggggacgccttaacggcactgggggacctagggagtgtaattctttcctgagacatgctagggagaccccggattcctaccgggacagcccccattccgaacgatatgtctcagcaatgaccacgcccgcacggatgtctcctgttgactttcacacgccttcatccccgaaatcaccacccagcgagatgtcaccacccgtgtcttctatgaccgtatccatgccttcaatggccgtgagcccatttatggaggaagagcgacccctgctgttagtaaccccacctcgactgagagaaaagaaatttgaccatcatccccagcagttcagtagctttcaccacaatccagcgcacgactcgaattcgctgcccgccagtcccctcaggattgtcgaggacgaggagtatgaaactactcaggaatacgaacctgcccaagagccagttaagaagcttgccaattccagaagagcaaagcggaccaagcccaacggtcatatcgcaaatcgcctcgaggtcgactcaaataccagctctcaatcctccaactctgagagtgaaacagaagacgagagggtgggcgaagataccccattcctgggcatccagaaccccttggccgcgtccctcgaggcaacccccgcgttccgtctcgccgactctcgcaccaatcccgcaggaaggtttagcacacaagaagagatccaagcacgtctctcttccgtgatcgctaatcaggacccaatcgccgtc

SEQ ID NO: 17445 - DNA, 1911 bp, synthetic construct
  misc_feature 1..1911: note = source = /note="Description of Artificial Sequence: Synthetic coding sequence"
  source 1..1911: mol_type = other DNA
atgagtgagcggaaggaagggcgcggcaaaggcaaaggtaagaagaaggagagagggagcggcaaaaaaccagagtccgctgccggctctcagagcccagccctgccaccacgactgaaagaaatgaagtcccaggaatccgccgccggaagtaagctagtcttacggtgtgaaacctcctcagaatattcttccctgcggttcaagtggttcaagaatggcaacgaactgaacaggaaaaacaagccccagaacattaagattcagaagaagccaggaaaatcagagcttcggatcaacaaggccagcctagctgatagtggcgaatatatgtgtaaggttattagcaagctaggcaatgactctgcaagcgcaaacattacaatagttgaaagcaacgagataattaccggtatgcccgcttccacagaaggcgcctacgtcagctccgaatcccctatccgtatttccgtttctactgaaggcgcaaacactagcagctccaccagtacaagtacaaccggcactagtcacctggtgaaatgtgccgaaaaggaaaagactttctgcgtgaatggtggagaatgtttcatggtgaaggatttaagtaatccttctagatatctgtgcaaatgtccaaacgaattcaccggcgataggtgtcagaattacgtgatggccagtttttacaaggctgaggaactgtaccagaaacgggttctgaccataactggcatatgcatcgctctccttgtagtgggaatcatgtgcgtggtggcatattgcaagacaaagaaacaacggaagaagctgcacgatagactgcgccagtctctgcgctctgagcggaataacatgatgaacatagcaaatggccctcaccaccccaatcctcccccagagaatgtgcagttagtgaatcagtacgtttctaagaatgtgatttcttctgaacacatcgtcgagagggaggctgagacctctttctccacctctcattatacaagcactgcacaccatagcaccactgtcactcagacaccctctcatagctggtctaacggtcatacagaaagcattctaagcgaatcacattcagttattgtgatgagctccgttgagaactctagacactcatcccccaccggcggacctcgtggcagattaaacggcaccggcgggcccagagagtgtaatagctttctacgacatgccagagaaactcccgacagctatcgagattctccacattccgagaggtacgtttccgctatgacaacccccgcccgaatgtcaccagtggattttcataccccaagtagtccaaagagtcctcccagcgagatgtctcctcccgtttcttccatgaccgtgagcatgccgtccatggctgtgagtcctttcatggaggaggagagacccctgctgctcgtgacacctccccggctgagagagaaaaagtttgatcaccaccctcaacagtttagttctttccatcataatccagcacacgacagcaattccttaccagcttctcccttgcgcattgttgaagacgaagaatacgaaacaacccaagagtacgagccagcacaggaaccagttaagaagctagctaactctagaagggccaaaagaactaagcccaacggccatattgctaacaggctagaagtggattctaacacttccagccaatcctccaattccgaatcagaaacagaggatgagcgggtgggcgaggacactccctttctgggaatacagaatccactggctgctagtctggaagctacccctgcatttcgtctggcagatagtaggactaaccccgctggccgtttttccacacaagaggagatccaggctaggctgagcagcgtcatagcaaaccaggaccctatcgctgtg

SEQ ID NO: 17446 - DNA, 1911 bp, synthetic construct
  misc_feature 1..1911: note = source = /note="Description of Artificial Sequence: Synthetic coding sequence"
  source 1..1911: mol_type = other DNA
atgtcggaacggaaggaaggccggggaaagggtaagggaaaaaaaaaagagcgcggctctgggaagaagcctgagagcgcagctggctctcagtcccccgctctaccccccagactgaaagagatgaaatcacaggagtccgccgcaggcagcaagctggtcctgcgctgtgaaacctcttccgagtactctagccttagatttaaatggttcaagaacggtaatgaactcaatcgcaagaataagcctcagaacatcaagatccagaaaaagcctggtaagtccgaactccggattaacaaagcttctctggcagatagtggagagtacatgtgtaaggttatatcgaaactgggaaacgactccgccagcgccaatatcactatcgtggaatctaatgaaataatcactgggatgcccgcttccaccgagggggcctatgtgtcaagtgaatctccaatccgcatatctgtctccaccgaaggagccaacacaagttcgtccaccagtaccagtaccactggcaccagccacctcgtaaaatgcgctgagaaggagaaaacattttgcgtgaacggcggcgaatgttttatggtcaaggacctcagcaatccaagccgctatctttgcaaatgccccaatgagtttactggcgatcgctgccagaattatgtaatggcctcattttacaaagccgaggaactgtatcagaaaagagtgctgactataactggtatttgcatagccctattggtagtcggaattatgtgcgtggtggcttactgtaaaactaagaaacaaaggaaaaaactgcacgaccgtttgaggcagtcgttgcgctctgagcggaacaacatgatgaatatagcaaacggaccccaccatcccaatccacccccagagaacgttcagctggtgaaccagtacgtctctaagaacgtgataagttctgaacatattgtggagcgcgaagccgaaacctcattttccacgagccactatacgagtaccgctcaccacagcactacagtgactcaaaccccatcacattcttggagtaacggccataccgaaagtattcttagcgagagtcacagcgtcatcgtgatgtcttccgtggagaactctagacacagcagtcccacaggaggacccagaggcagacttaatgggacaggtggccctagagagtgcaactcttttttaagacacgcccgcgaaacacccgacagctaccgggactcacctcacagcgaacgctacgtcagcgccatgaccacgcccgcaaggatgagtccagtcgatttccatactccatcctcacctaagtcccctccatccgagatgtcgcctccggttagttctatgaccgtgtccatgccctcgatggccgtctccccgttcatggaggaggaacggccgctgctactggtgactcccccaaggctacgggagaaaaaatttgaccaccaccctcagcaattctcttcgtttcatcataatcccgctcacgatagcaactcactccctgcatcacctctgcggatcgtcgaagatgaggagtatgagaccacacaagagtatgagccggctcaagaacccgttaaaaagcttgccaattcacggagggctaagcgcaccaagccgaacggacacattgccaataggttggaagtggatagcaataccagttcacagtcttcaaattctgaaagtgaaactgaggacgaaagagtgggcgaagacactccattcctcggaattcaaaatcctcttgccgcgagcctggaggccactcccgcctttcgactggctgatagccgcaccaacccagccgggcggttctccacccaggaagaaatccaggcaagactcagctctgtgatcgctaaccaggatccaatcgctgta

SEQ ID NO: 17447 - DNA, 1911 bp, synthetic construct
  misc_feature 1..1911: note = source = /note="Description of Artificial Sequence: Synthetic coding sequence"
  source 1..1911: mol_type = other DNA
atgtccgagaggaaagaaggacgcggaaagggaaagggcaagaagaaagaaaggggatcgggaaagaagccggagtccgccgccggaagccagtcgccggcgttgcctccgcggttgaaagaaatgaagtcccaagagagcgcagctggctccaagctcgtgctcagatgcgaaacttcctctgagtactcgtcgcttaggttcaagtggtttaagaacggaaatgaactgaaccgcaaaaacaagccgcaaaatatcaagatccagaaaaaaccaggcaagtctgaactgagaatcaacaaagcgtcgttggccgactcgggtgagtacatgtgtaaggtcatcagcaagctgggcaacgattcggccagcgccaacattaccatcgtagagtctaacgagatcatcaccggaatgccagcttccaccgagggcgcctacgtgtcctcagagagtccaatccgcatttccgtgtccactgagggagccaataccagctcctcaacctcgacttcgaccaccggtactagccacctggttaagtgcgcggaaaaggagaaaactttttgtgtgaatggcggagagtgtttcatggtgaaggatcttagcaatccgtcgcggtacctttgcaaatgcccaaacgaattcactggagacagatgtcagaactacgtcatggcatcattctacaaggcagaagaactgtaccagaagcgcgtcctgactattaccggaatctgcatcgcactcctggtcgtgggcatcatgtgcgtcgtggcctactgtaagaccaagaagcagcggaagaagctgcacgatcgactgcgccaatcgctccgctcagaacggaacaatatgatgaacattgcaaacggaccgcaccacccaaacccgcccccggagaatgtgcagttggtgaaccagtacgtctcgaagaacgtcatctcgagcgagcatatcgtcgagcgcgaagcagaaacttcattctcaacctcgcactacacttccactgcccatcattcaactactgtgacccaaaccccgagccactcttggtccaacgggcacaccgagtcaatcctgtcggagtcgcactcggtgatcgtcatgtcgtccgtggaaaactcacgccactcgtcccccactgggggaccgcgaggaagactgaatggcaccggaggacctcgcgaatgcaattccttcttgagacacgcgagagagacgccggactcctaccgcgactccccccactccgaacggtacgtgagcgcgatgactaccccggccagaatgagcccggtggacttccacactccatcgagcccgaaatcaccgccatccgagatgtccccgccggtgtcgagcatgaccgtctccatgccgagcatggccgtctcaccgttcatggaagaagagaggcctttgctcctcgtgactccaccgaggttgcgggagaaaaagttcgaccaccacccgcagcagttctcgtcatttcaccataatccggcccatgattcgaactccctccccgcatcgccactgagaatcgtggaagacgaagaatatgaaaccacccaggagtacgaacctgcccaggagccagtcaagaagctcgcaaactcaagaagagccaagagaaccaaacccaatggccacatcgcaaaccgcctcgaagtcgactccaacaccagctcccaatcctcgaacagcgaatctgaaaccgaagatgaaagagtgggagaggacactcctttcctggggattcaaaaccctctggcggccagcctggaggccacgcctgccttccgccttgcagattcacgcactaatcctgcggggagattctcaactcaggaagaaatccaggcccgcctgtcatcagtgattgctaaccaggatccgatcgccgtg

SEQ ID NO: 17448 - DNA, 1911 bp, synthetic construct
  misc_feature 1..1911: note = source = /note="Description of Artificial Sequence: Synthetic coding sequence"
  source 1..1911: mol_type = other DNA
atgtccgagagaaaggaaggccggggtaagggaaagggcaagaagaaggagcgaggtagcggcaagaagcccgaatccgccgcgggctcgcagtcgccggcgctgcccccgagattgaaggagatgaagtcacaggaatcggccgcaggaagcaagctggtcctgcggtgtgaaacttcgagcgagtactcctcactgcggtttaagtggttcaagaatggtaacgaactgaaccggaaaaacaaaccacagaatatcaagatccagaagaagccgggtaagtccgaactgcgcatcaataaggcctcactggccgatagcggagaatacatgtgcaaggtgatctcgaaactgggcaacgattcggcctcggcgaacatcactatcgtcgaatccaacgaaatcatcactggtatgccagccagcactgagggagcctacgtgtcgagcgagtcacctatccgaatctccgtgtcaactgagggtgcaaacacgtcctcttccacgtccacctcgactaccgggacctcgcacctcgtcaaatgtgctgaaaaagaaaagacgttttgtgtgaatggcggagaatgcttcatggttaaggacctgagcaacccttcacgctacctctgcaagtgcccgaacgaattcacgggagacaggtgccagaactatgtgatggcatctttctataaggcggaggagttgtaccagaagcgtgtgctgactatcactggtatctgcatcgcactcctcgtcgtgggcatcatgtgcgtggtcgcctactgtaagaccaaaaagcagcgaaagaagctccatgaccggctgagacaatcgctgcggtcagaaagaaacaatatgatgaacattgcaaacggaccccatcatccaaacccgccgccagagaatgtgcaactcgtgaatcaatacgtgtcaaaaaacgtcatctcctcagaacacatcgttgaacgggaggcagagacttcgttctcgacctcccactacactagcaccgcgcaccattcgaccacggtgacccagaccccgtcgcattcgtggagcaacggtcacaccgaatccattctgtcagaatcccattccgtgatcgtgatgtcgtccgtcgagaactctcggcactcgtcgcctactggcggaccacgcggacggctgaacggaaccgggggtccccgcgagtgcaacagcttcctcagacacgcgcgcgagacgcctgactcctaccgcgactcgccacacagcgaacggtacgtgtcggcgatgaccactcctgcccggatgagcccggtagatttccataccccgagctcgcctaagtctccaccttcggagatgtcgcctcccgtctcgtctatgactgtgtccatgccgtccatggccgtcagcccattcatggaagaagaaagaccacttctgctggtgaccccaccacggctgagagaaaagaagttcgaccatcacccgcagcaattctcatcgttccaccacaatccggctcatgacagcaactcgctcccggcgagcccgctgaggatcgtggaggacgaggagtacgagactactcaggagtacgaaccggcccaagaaccggtcaagaaactcgccaactcgcgtagagcaaaacggactaaaccaaatggtcacatcgcgaatcgccttgaagtggactcgaacacctcgtcccagtcctcaaattcagaatcggaaaccgaagatgagcgcgtcggggaggacactccgttcttggggatccaaaacccactcgccgccagccttgaagccacgcccgcatttcgcctggcggactcacgcaccaatccggcagggaggttctcgacccaagaggaaatccaagcgagactctcgtcagtcatagctaatcaggacccgatcgcggtg

SEQ ID NO: 17449 - DNA, 1911 bp, synthetic construct
  misc_feature 1..1911: note = source = /note="Description of Artificial Sequence: Synthetic coding sequence"
  source 1..1911: mol_type = other DNA
atgagcgaacggaaggaagggcgcggtaagggaaaaggaaagaagaaggagcgcggaagtggcaaaaagccggaatcagcggcaggaagccagtcgccagcgctgccgccgcggttgaaagagatgaaatcacaggaaagcgcggcgggctcgaaactggtgctgcgatgcgaaacctcgtccgaatactcgtcactgagattcaagtggttcaagaacggaaatgaactcaatcgcaagaataaaccccaaaacatcaagatccaaaagaaaccgggcaaatcggaactccggatcaataaggcgtccctggcggattccggggagtacatgtgtaaggtcatctctaagctgggcaacgactcagcctccgcaaacatcaccatcgtggagtccaacgagattatcaccggaatgccggcatcgacggagggcgcctacgtgtcgtccgagtcgccgatcaggatctcggtgtctaccgaaggtgccaacacctcaagctcaacctcgacttccactaccggaacgtcgcatttggttaagtgcgcagaaaaagaaaagaccttctgtgtgaacggaggtgaatgcttcatggtgaaagacctgtcaaatccaagcagatacctctgtaagtgcccgaatgaattcactggggaccggtgtcagaattacgttatggcctcattctacaaagcagaagaactgtaccagaagcgggtgctgactattaccggaatctgtatcgcgctgcttgtcgtggggatcatgtgcgtggtggcatactgcaagaccaagaagcaaagaaagaagttgcacgaccggctccgccaatcacttcgcagcgaacgcaacaacatgatgaatatcgcaaacgggcctcatcacccgaacccacctcccgaaaacgtgcagctggtcaaccaatacgtgtcaaaaaacgtgatctcgagcgaacacatcgtcgagagagaggccgagacttcgttttccacttcccattacacctccaccgcacaccattcgaccaccgttactcagaccccttcgcactcctggtcgaacgggcatactgagagcattctgtccgaatcgcattcggtgatcgtgatgagctccgtcgagaactcgcgccactcgagcccgactggaggaccaaggggacgtctcaatgggaccggaggaccgcgggaatgtaacagctttttgcgccacgcgagggagactcccgattcgtaccgagatagcccacactccgagagatacgtcagcgcgatgaccaccccagcgcggatgtcgccagtggacttccacaccccatcttctccaaaaagcccgccttccgaaatgtccccgccggtgtcgtcaatgaccgtctccatgccgtctatggcagtgtcccctttcatggaggaggaaagaccactccttctggtgaccccaccgaggctccgggagaagaagttcgatcaccaccctcagcagttctcatcttttcaccacaatcccgcacacgattcgaattccctgccggcctcgccactgagaatcgtggaggacgaggaatacgagactacccaagagtacgaacctgcacaggagccagtgaagaagctggccaattcacggagagcgaagagaaccaagccgaacggacacatcgccaatcggctggaggtcgacagcaacaccagctctcaaagctccaactccgagtcggaaaccgaggacgaacgcgttggagaggacaccccgttcctcggaattcagaaccccctggcggccagcctggaagccacgcctgcgttcaggctcgccgattcgcggactaaccctgctggacggttctcaactcaggaggagatccaagctcgcctgtcctcggtgatcgcaaatcaagacccgatagccgtg

SEQ ID NO: 17450 - DNA, 1911 bp, synthetic construct
  misc_feature 1..1911: note = source = /note="Description of Artificial Sequence: Synthetic coding sequence"
  source 1..1911: mol_type = other DNA
atgtccgagcgcaaggagggcaggggcaagggcaagggaaaaaagaaagaacggggatccggcaaaaaaccagaatcggcagctggatcccagagcccagcgctgccgccccggctgaaggaaatgaagagccaggagagcgccgcgggaagcaaactcgtgctcaggtgcgaaacctccagcgagtactcatcccttcgctttaagtggttcaagaacggaaacgagctgaatcggaagaataaaccgcagaatatcaagattcaaaagaagcccggaaagtcagaacttcggatcaataaggcctcactcgctgacagcggagagtacatgtgtaaagtcatatcgaaactgggaaacgactcggcttcagcaaacataactattgtcgagtccaatgagatcatcactggaatgccggcctcgaccgaaggagcatacgtgtcctcggaaagcccgattcgcatctccgtgtcgactgaaggagcaaatacttcaagcagcacttcgacttcgaccaccggaacgtcgcaccttgtcaagtgcgccgaaaaagaaaagaccttctgtgtgaacggaggcgaatgcttcatggtgaaagacctgtctaacccgtcacggtatctttgcaagtgcccaaacgagttcaccggagatcggtgccagaactacgtgatggcttcattctacaaggccgaggagctgtatcagaaacgggtcctcacgatcaccgggatctgtatcgcactgctcgtggtcgggatcatgtgcgtggtggcttactgcaaaactaagaaacagagaaagaagttgcatgaccggcttcgccagtcactccgatcagaaaggaacaacatgatgaacatcgccaacgggcctcatcacccgaatcctccgcccgagaacgtgcagctggtcaaccaatatgtcagcaagaatgtgatctcatcggaacacatcgtcgagagagaggctgaaacttcgttctcaacctcacactacacttccaccgcacatcactcaactaccgtgacgcagaccccttcgcattcctggtccaacggacacactgaatcgatcctgtccgagtcacattccgtgatcgtcatgtcctcggtggagaactcgaggcactcgagcccgaccgggggaccgcgcggcagactgaatggtacgggcggacctagagaatgcaactcctttctccggcacgctagggaaactccggattcgtaccgggattcgccccattcggagcgctacgtgagcgctatgactaccccggcccgcatgagcccggtggatttccacaccccgtcctcacccaagtccccaccgtccgagatgtcgccgccagtgtcctcgatgacggtgagcatgccctcaatggcagtgtccccctttatggaagaggaacgcccgctgctgctcgtcactccgccgcgcctccgcgaaaagaagttcgaccaccatccgcaacaattctcctcattccaccacaatccggcacatgactccaacagcctgccggcgtccccgctgcggattgtcgaggacgaggagtacgaaaccacccaagagtacgaacccgcgcaagaaccggtcaaaaaactcgccaactcacggagagcaaagcggaccaagccgaacggacatatcgcgaatcgcctggaagtggactccaacacctcctcgcagtccagcaatagcgagtcggaaactgaagatgagagagtgggagaggacaccccatttcttggcatccagaacccactggccgcctccctcgaagccacccccgcgttccgcttggcagattcacggactaaccctgcgggacggttctccacccaggaagagattcaggcgaggctgtcctcagtgattgccaaccaggacccgattgccgtg

SEQ ID NO: 17451 - DNA, 1911 bp, synthetic construct
  misc_feature 1..1911: note = source = /note="Description of Artificial Sequence: Synthetic coding sequence"
  source 1..1911: mol_type = other DNA
atgtctgaacgcaaggagggcaggggaaagggaaagggcaagaaaaaggaaagaggctcgggaaaaaagccagaatccgctgcgggctcccagtccccggccctgccgccgcgcctgaaggaaatgaaatcccaggaatccgccgccggaagcaaactggtgctgcgctgcgaaactagctcagagtactcctccctcagatttaagtggttcaaaaatggaaacgaattgaaccggaagaacaaaccccagaatatcaaaatccagaagaagccgggaaagagcgagctccggatcaacaaagccagcctggcagattcgggggagtacatgtgtaaggtgatcagcaagctgggtaacgactctgcgtcggccaatatcacgatcgtcgaatccaacgagattatcactgggatgccggcgtcaaccgagggagcctacgtttcctcagaatcaccaattcgcatctcggtgagcaccgaaggagccaacacgtcctcgagcacctctacctcaaccactggaactagccacctcgtgaaatgcgctgaaaaagaaaagactttctgcgtcaacggaggagaatgtttcatggtgaaggacttgtccaatccaagccgctacctgtgtaagtgcccgaacgagtttactggcgatcggtgccagaattacgtgatggccagcttctataaggccgaggagctgtatcaaaaacgcgtcttgactattactggcatctgcatcgcgctgctcgtggtaggaatcatgtgtgtggtggcctactgcaagaccaagaagcagcgaaagaagctccatgaccggctgcggcaatcattgcgaagtgaacgcaataacatgatgaacatcgccaatggcccccatcatccgaaccctccgccggagaacgttcagctggttaaccaatacgtcagtaagaatgtgatttcatcagagcatatcgtggaacgagaagccgaaacctcattctccactagccactacactagcactgcccaccactccactactgtcacccagaccccgtcgcatagctggagcaatgggcacactgagtccatcctgtcggagtcacactccgtgatcgtcatgtccagcgttgaaaattctcggcactcatctccaaccggaggaccacgcgggagactgaacggaaccggcggcccacgcgaatgcaactcgttcctcagacacgcgagagaaaccccggactcataccgggattccccgcattcggaaaggtacgtgtcggccatgaccactcccgctcgaatgtcaccggtcgatttccacactccttcatccccaaagagcccgccttcggagatgtccccgccagtgtcgtcgatgaccgtgtcaatgccgtccatggcggtcagccctttcatggaggaggaacgccctctcctgctcgtgactccaccgcgtctgcgggaaaagaagttcgaccaccacccacagcaattctcttcttttcatcacaatcccgcccatgactccaactcccttcccgccagccctctgcgcattgtggaggatgaggaatacgaaaccacgcaggagtacgagccggcccaggaaccagtcaaaaagctggctaatagccgacgcgctaagcggactaagccaaacgggcatatcgcaaaccggctcgaagtggactccaacacgagcagccaatctagcaactccgaaagcgaaacggaagatgagcgcgtgggagaggacactcccttcctgggtatccaaaatcctctggccgcgtcgctggaggccacccctgcgttccgcctggcggactcccgcactaatccggccggtcgcttttcaacgcaggaggaaatccaagcgcggctctcctcagtgatcgccaatcaggacccgatcgctgtg

SEQ ID NO: 17452 - DNA, 1911 bp, synthetic construct
  misc_feature 1..1911: note = source = /note="Description of Artificial Sequence: Synthetic coding sequence"
  source 1..1911: mol_type = other DNA
atgtcggagaggaaggaaggacggggaaaggggaaaggtaaaaaaaaggagcgcggctccggcaagaagcctgaaagtgcagctggcagtcagagtcccgcactcccccccaggctaaaagagatgaagagccaggagtctgcagccggatccaaactagtcctacgatgtgaaacttcttccgagtactcgagcctgaggttcaagtggtttaagaacgggaacgagctgaaccgcaagaacaaaccccagaacatcaagatccaaaaaaaacctggaaagagcgagttaagaattaacaaagcatctctggccgactcaggagaatatatgtgcaaggtaatctcgaaattgggcaatgactccgcctccgccaacatcacgattgtcgaaagcaatgagataattacgggaatgcctgcttccacagagggggcttacgtgagctcagagtctcccatcaggatttcagtgtctaccgagggagcgaatacatcatctagcacctcgactagcacaacaggtactagtcacctggtcaagtgtgccgagaaggaaaagacgttttgcgtgaacggtggagaatgctttatggtgaaggatttgagcaacccttccagatacctttgcaagtgtcccaatgagttcaccggcgataggtgtcagaactacgttatggctagcttctacaaggctgaggagctgtaccagaagagagtcctcactatcactgggatttgcatcgcattgctagtggtcgggatcatgtgcgtcgtggcatattgtaaaaccaagaaacagaggaagaaattacatgatcggctgcgtcaatcgcttcgctcagaacgaaataatatgatgaatattgccaacggtccccatcaccctaaccccccacctgagaacgtacagcttgtgaaccagtacgttagcaagaacgtaatcagctccgagcatattgtggagcgtgaggccgaaacgagctttagcacatcacattacacgagcacggcgcaccactccacaactgttacccagactccgagccatagttggtcaaatggccataccgagtctatcctttctgagtcacacagcgtgatagtgatgtcgagcgtggagaatagtagacactcctctcccacgggggggcccagaggcaggctaaacgggactggcgggcccagagagtgcaacagtttcctccgccacgctagggagacccctgatagctatcgcgattctccccacagtgagcgctatgtgtctgccatgactaccccagcacgcatgtcaccagtcgacttccatactccgagctcacctaagtccccgcctagtgagatgtcgccgcctgtcagtagtatgactgtgagcatgcccagcatggccgtaagtccatttatggaggaagagaggcctttacttttagtcaccccgccacgtttgcgggaaaagaagttcgatcatcatccacagcagttctcaagctttcaccacaatcccgctcatgactctaatagcttgcccgcctccccacttaggatcgttgaggacgaggagtatgaaaccactcaagagtacgagccggctcaagagcctgtgaagaaattagcaaactctagacgagcaaagcgaacgaagcctaacggccacattgctaaccggctcgaggtggactccaatacctcctcccagtcatctaactctgagagtgagactgaggacgagagagtcggggaagacactccgtttctgggtatacagaatccgctcgcggcctccctggaagcaactcctgccttcaggctggctgacagtaggaccaaccctgcaggtcggttctcaactcaggaggaaatccaggcgcggctgtcctctgtgattgccaatcaggatcccatcgctgtg

SEQ ID NO: 17453 - DNA, 1911 bp, synthetic construct
  misc_feature 1..1911: note = source = /note="Description of Artificial Sequence: Synthetic coding sequence"
  source 1..1911: mol_type = other DNA
atgtctgaaagaaaggaaggtcgaggtaaaggaaagggcaaaaagaaggagagaggtagcggaaagaagccggagtcagcggcaggatcccaatcgccagcactcccgccccggctcaaggagatgaagagccaagaaagcgcggcaggttcgaagctggtgcttcgctgtgaaacttcgtccgaatactcctcacttaggtttaagtggttcaagaacggaaacgagctgaataggaagaacaaacctcagaatatcaagatccaaaagaaacccggaaagtcggagctcaggatcaacaaggcctccttggccgactccggagagtatatgtgtaaggtgatctcgaaactcggaaatgactcggcctcagccaacatcactatcgtggaatccaacgagattatcaccggaatgcctgcatcgaccgagggtgcttacgtctccagcgaatcacctatcagaatttccgtgtcgacggaaggagcaaacacttcaagctcaacttcgacttccactaccggaacctcccatctcgtgaagtgcgcggaaaaggaaaagactttttgcgtgaacggaggagaatgctttatggtgaaggacctgtccaatccaagccgctacctttgcaagtgtcccaatgagtttaccggcgatcggtgtcagaactacgtgatggcgagcttttacaaagcagaagaattgtaccagaagagggtcttgactattactggaatctgcatagcactgctggttgtggggattatgtgtgtggttgcgtactgtaaaaccaagaaacagcggaagaaactgcacgaccggttgcgtcaaagccttcggtcagagcgtaataacatgatgaatattgcaaacgggccacatcaccctaatccacctcctgaaaacgttcagttggtgaaccagtatgtgtcgaagaatgtgattagcagtgaacatatagtagagagagaagcagaaacgtcattcagcacctcacattacacttcgaccgcgcatcattccaccaccgtgactcagactccgtcgcactcctggtcaaatggccacaccgaaagcatcctctccgaatcccactccgtgatcgtcatgtcgtcggtggagaactcgagacacagctcgcctaccggtggtcctcgagggagactgaacggtactggaggtcccagagagtgtaactcgttcctgcgccacgcccgtgaaacccctgattcctaccgggactccccccactcagaacggtacgtgtcggccatgactacccctgctcggatgtcccccgtggattttcacactcccagttcacctaaatcgccaccatccgaaatgtcacctcccgtgtcctctatgaccgtgtcgatgccttctatggcagtgtcaccgttcatggaggaggaaagacctctcctcctcgtcactccacctagactccgtgaaaagaaattcgatcaccatccccaacagttctcctcatttcaccataacccagcacatgactccaactcactgcctgccagccctcttagaattgttgaggatgaagagtatgaaaccactcaggaatacgagcccgcccaagaaccagtgaagaaacttgcaaattcgcgtagagccaaaaggaccaaacccaacggacatattgcaaatcggctcgaagtggactccaatacgagctcgcaaagcagtaacagcgagtcggaaaccgaagatgagcgggtgggggaggacactccttttctcgggatacaaaatcctcttgcagcttcacttgaagccaccccggcatttcgcttggcagatagcaggaccaaccctgcaggacggtttagcacccaagaagaaattcaggcacgactctcatcagtcattgcaaatcaagaccccattgcagtc

SEQ ID NO: 17454 - DNA, 1911 bp, synthetic construct
  misc_feature 1..1911: note = source = /note="Description of Artificial Sequence: Synthetic coding sequence"
  source 1..1911: mol_type = other DNA
atgtccgaacgaaaagagggccggggcaaggggaaaggtaaaaagaaagagaggggatcaggaaagaagcctgagtcggcggctgggtcccaatcccccgccttaccgccgagattaaaagaaatgaagtctcaagaatccgcggcaggctcaaaactagtgctgagatgcgagacaagcagtgaatactcctctctgcgcttcaagtggttcaaaaatgggaacgagctgaacaggaaaaacaagcctcagaatattaagatccagaagaagcccggtaaaagtgaacttcgaatcaacaaggcatccctcgctgacagtggtgaatatatgtgtaaggtcatcagcaagctgggtaatgacagtgctagcgcaaacatcaccatcgtggagagcaacgagattatcacaggaatgcccgcctccaccgagggggcctatgttagctcagagagtccgataagaatttctgtgagcacagaaggcgccaatactagctctagtactagtacatctaccaccgggacctctcacttggtgaaatgcgcagagaaggagaagaccttttgcgttaatggaggcgaatgctttatggtgaaggatttgtctaacccttcccgctatctttgtaagtgccccaatgagtttaccggggaccggtgtcagaattacgtgatggccagtttttataaggccgaggagttatatcagaaacgagtgctgacaattacaggaatttgcattgccttgctggtcgtgggaatcatgtgcgtggtcgcatactgcaagactaagaagcagaggaagaagctccacgatcgactccgccagtcccttcgcagtgaaaggaataatatgatgaacatcgccaacggaccgcatcatcctaacccccctcctgaaaatgttcagttggtgaatcagtatgttagtaagaacgtgattagcagtgaacacatagtcgagcgggaggcagagacatccttcagtacatcgcattacacaagcactgcccaccattctactaccgttacacagactccaagccatagctggtcaaacggtcatactgagtcaatccttagtgagtctcactcggtgatcgtcatgagcagcgtagagaatagtcgacactctagccccaccggggggccccggggaaggctcaatgggaccggaggcccaagggaatgcaactcgttcctccggcacgcacgggagactcccgactcctatcgcgactccccacacagtgaacggtacgtcagtgctatgacaacgccagcccgaatgagccccgtagactttcatactccttcctccccaaaatcgcccccaagtgagatgtctcctcctgtcagctcaatgactgtgtcgatgccgtcaatggctgtaagtccgtttatggaggaggagcggcccctgctccttgtgactcctcccagacttagagaaaaaaaattcgaccatcacccacagcaattcagtagttttcaccacaatccggctcatgactcaaattccctgcccgcctcaccgttgcgcattgttgaagatgaggaatacgaaactactcaggagtacgagcctgctcaagaacctgtcaaaaaactcgcaaactccaggagagctaaaaggaccaagccaaatggccacattgcaaaccgtctcgaggtggactcaaacactagttcacagagctccaatagtgaaagcgagacagaagatgaacgagttggagaagatacacccttcctgggcattcagaatccgttggctgcctcactggaggctacccccgccttcaggttggcagactcgagaactaacccggcgggccgtttcagcacacaggaggaaatccaggcaaggttaagctccgttatcgctaatcaggatccgattgcagtc

SEQ ID NO: 17455 - DNA, 1911 bp, synthetic construct
  misc_feature 1..1911: note = source = /note="Description of Artificial Sequence: Synthetic coding sequence"
  source 1..1911: mol_type = other DNA
atgtccgaacggaaggagggacgtggtaaggggaagggcaagaagaaggagcgtggctctggaaagaagcccgagtctgcagccggcagtcagtcacctgcgcttccacccagattgaaggaaatgaagtcccaggagagcgccgccggctcgaagctcgtgttgcgctgcgagacgtcttccgaatactccagcctgcgttttaagtggttcaagaatggtaacgaactcaaccgaaagaacaagcctcagaatatcaagatccaaaagaagcctgggaagagcgaactgcgcatcaacaaggcctctctcgccgacagcggcgagtacatgtgtaaggtcatctcgaagcttggaaatgacagtgcaagcgccaatatcaccattgtcgaaagtaacgagatcatcaccggcatgccagcctccacagagggcgcgtacgttagctcagagtctccgatacgcatttcggtctctaccgagggcgccaacacctcatcctccacctccacgtctactaccggaactagccacctagtgaagtgcgccgagaaggagaagactttttgtgtgaacggcggagagtgctttatggtgaaggatctgtccaaccccagtcgttacctgtgtaaatgtcctaacgagttcactggtgaccggtgccagaattacgtgatggcgtcgttctacaaggccgaggagctgtaccagaagcgggtccttacgatcaccggaatctgcatcgccttgttggtcgttggtatcatgtgcgttgttgcctactgtaagaccaaaaaacagcgcaaaaagctccacgacagactgcgacaatcattgcggagcgaacgcaacaatatgatgaacatcgctaacggccctcaccaccccaacccccccccggagaacgtccagctggtcaaccagtacgtatctaagaacgtaatcagctctgagcacatcgtggaacgcgaggccgagaccagcttctccacctcccattacacctccactgcccatcatagtaccaccgtcactcaaactccttcacattcatggtctaacggccacacagagtctatcctgagcgagtcacatagcgtcatcgttatgagctccgtcgaaaattcccgacacagctcccccaccggaggccctcgcggccgcctcaatggcaccggcggcccccgcgagtgtaattcgttcctacgtcacgcacgggagacccccgatagctaccgcgacagccctcactctgagcgttacgtgagcgccatgaccacccccgcccggatgtcgccggtcgatttccatacgccgagctcccctaagtcccctcccagcgaaatgagcccacctgtctcctcaatgaccgtatctatgccttcgatggccgtctccccttttatggaggaggagcgccccctacttcttgtcacgccgcctcgcctgcgtgagaagaagttcgatcatcatccccagcagttctcctcttttcaccacaacccggctcacgacagcaactcgcttcctgcctcccccttgcggattgtcgaggacgaggagtacgagaccacccaggaatacgagcccgctcaggaacctgttaagaagctggccaacagccggcgcgctaagcgcacaaaaccgaacggtcacatcgctaaccgccttgaagtcgacagcaacacctcctcgcagagctccaatagcgaatccgaaacggaggacgaacgtgtcggcgaggatactcccttcctcggtattcagaatcccttagccgcctccttggaggctaccccggcattccgtctcgccgacagccgtacgaacccagctggtcggttctccacgcaagaggagatacaggcacggctcagcagtgtgatcgcgaaccaggacccgattgccgtg

SEQ ID NO: 17456 - DNA, 1911 bp, synthetic construct
  misc_feature 1..1911: note = source = /note="Description of Artificial Sequence: Synthetic coding sequence"
  source 1..1911: mol_type = other DNA
atgtccgaacgcaaggaggggagaggaaagggcaagggcaagaagaaggagagaggctccggtaaaaaacccgagtccgctgctggcagccaatctcctgcgctgcccccaaggctgaaggagatgaagtcccaggaaagcgccgctggttcaaaactcgtgctccgctgcgagacttcctcagaatactcctcactgaggtttaagtggttcaagaacgggaacgagctgaacagaaaaaacaagccacaaaacattaagatccagaagaagccgggaaagtcggagttgaggattaacaaagcctctctggccgattcaggagaatatatgtgcaaagtgatatccaagctcggaaacgatagcgcatccgctaatatcactattgtcgaatccaacgaaattataacgggaatgcccgctagcacggaaggcgcctacgtgtcttctgagtccccaataaggatcagcgtgtcaacggagggagcaaatacctcttcaagcacttccacttctacaaccggtacttctcatctagtaaagtgcgccgaaaaagaaaaaacattttgtgtgaacggcggtgagtgttttatggtgaaagacctctccaacccctctagatacctttgcaaatgccccaatgagttcacaggggatcgatgtcagaactatgttatggccagcttctacaaggccgaggaactataccagaagcgcgtgttaacaattactgggatatgtatagcgctgctggtcgtcgggattatgtgtgtggtggcctactgcaaaacaaagaagcaacgtaagaaactgcacgatagactcaggcagtccctgaggtccgagaggaataatatgatgaatatcgccaacggaccccatcatcccaacccccctcccgagaatgtgcagctggtcaaccaatacgtgtctaaaaatgtaatttcgtcagaacatatcgtggaaagagaggctgagacctctttctcaacgtctcattacacctctaccgcacatcattctacaaccgttacacagactccgagtcattcatggagcaatggtcacacggagtctattttatcggagtctcattctgtaatagtgatgagtagcgtcgagaactcacgtcattctagccccactggaggacctcggggaaggttgaatgggacggggggccccagagagtgcaattcattcctgaggcatgcccgcgagacgccggactcttaccgggattctccccactcagagaggtatgtatcggccatgaccacaccagcacgcatgtccccggtggactttcacacccctagctcgcccaagagccccccctctgaaatgtcaccaccggtcagcagcatgaccgtgtccatgccatctatggccgtcagcccatttatggaggaagagaggcccctcctcctggtcacaccacctcgcctgcgcgaaaaaaaattcgatcaccatccacagcagttttccagtttccatcacaaccctgctcacgattctaattcactcccagctagcccattgaggatcgtggaagacgaggaatatgaaacaacccaggaatacgagccagcacaggagcctgtaaagaaattggctaactccaggcgcgccaaaagaactaagccaaatgggcacatcgcaaatcgccttgaggtggactcgaatacctctagccagtccagcaactccgagtccgagactgaagatgaacgcgtgggtgaagataccccgttccttggtatccaaaaccccttagccgcatcactcgaagccactccagcttttcggctggccgactcccgcacaaacccggccgggcgctttagtactcaggaggagatccaggctaggctttcatccgtgatcgctaatcaggaccccatcgctgtc

SEQ ID NO: 17457 - DNA, 1911 bp, synthetic construct
  misc_feature 1..1911: note = source = /note="Description of Artificial Sequence: Synthetic coding sequence"
  source 1..1911: mol_type = other DNA
atgtccgagcgcaaggaaggaagaggaaagggcaaaggaaaaaagaaggaacgaggaagcggaaaaaagcctgagtcggcagcgggaagccaatcccccgccctccctcctcggctcaaagagatgaagtcccaagaatccgctgccggttcgaagctcgtgttgagatgcgaaacgtcctccgagtactcgagcctgagatttaagtggtttaagaacggaaacgagcttaatcgaaagaataagcctcaaaacattaagatacagaaaaagcccggaaagagtgagctccgcatcaataaggcaagccttgcagactcgggagaatacatgtgtaaggtgatctcgaagctggggaacgactcagcctcggccaacattactattgtggaatcaaacgagatcattaccggaatgcctgcatcgaccgagggggcgtatgtgtcatcggagtccccaattagaattagcgtttcgaccgagggagcaaacacctcaagctccacgtcgactagcaccactggcacctcacatcttgtgaaatgtgcagaaaaagaaaaaaccttttgtgtaaatggaggagaatgtttcatggtcaaggatctctccaatccctcaagatacctttgtaagtgccccaatgaatttaccggtgaccggtgccagaactatgtgatggcgagcttctataaagcagaagaactgtaccagaaaagggtgctgaccataactgggatctgtattgcactccttgtggtcggtatcatgtgtgtcgtggcctactgtaaaactaaaaagcaacgtaagaaactccatgatagacttagacaatcactgagaagcgaaagaaataacatgatgaatattgcaaatggtccacaccatccaaacccaccaccagaaaacgtgcaactcgtgaaccagtacgtgagcaagaatgtaattagctcggaacacattgtggaaagggaagccgaaacgtctttctcaacttcgcattacacgtccactgcacatcattccaccaccgtgactcaaaccccttcgcattcatggtcaaatggacatactgaatcaattctgagcgaatcgcactcagtgatcgtcatgtccagcgtcgaaaattcaaggcacagctcacctaccggaggacctcgaggccgcctgaacggtaccggaggtcctcgcgaatgtaactctttcctgcgccatgctcgcgaaactccagattcgtaccgagacagcccgcactcagagaggtacgtgtcggccatgaccacccccgcaaggatgagcccggtcgattttcacactccgtcatcacccaagtctccaccaagcgagatgtcccctcctgtcagctccatgaccgtgtcaatgccaagcatggcagtgagcccttttatggaggaagagcggcctctccttcttgtgaccccaccacggctgagggaaaagaagttcgaccatcatccccagcagttttcttcctttcaccacaatccagcacatgattccaactcacttccagcatcccctctgagaatcgtggaagatgaagaatatgagacgacccaagaatacgagcctgcacaggagcctgtcaagaaactcgcaaatagcagacgcgccaaaagaactaagcctaacggacatattgctaacagacttgaggtcgatagcaacacctcatcgcaatcctccaactcggaaagcgaaaccgaggacgaacgggtgggtgaggacactccttttcttggaatacaaaacccgctggctgcatcgctggaggcgacccctgccttccggctcgccgattcaagaactaacccagcaggcagatttagcactcaagaagagattcaagccaggctgtcgtccgtgattgcaaatcaggatccaattgccgtg

SEQ ID NO: 17458 - DNA, 1911 bp, synthetic construct
  misc_feature 1..1911: note = source = /note="Description of Artificial Sequence: Synthetic coding sequence"
  source 1..1911: mol_type = other DNA
atgtctgaaagaaaggaaggccgtggaaagggaaagggtaagaagaaagaacgaggttcgggaaaaaagccagaatccgcggcaggaagtcaatcacccgctttgccaccaagactaaaagaaatgaaatcccaggaatcagccgcaggctctaaacttgtactacgatgcgaaacctcatctgaatattcatcacttcgcttcaaatggttcaaaaatggaaacgaattgaatagaaaaaataaaccacaaaacattaagattcaaaaaaaaccaggtaaatctgaactgagaattaataaagctagtctagcagactcgggagaatatatgtgcaaagtcatatcgaagctcggaaacgattctgcatcggccaatattaccattgttgagtcgaatgaaattattacaggtatgccagcgtcgactgaaggggcctatgtatcatcggaatctccgattagaatctccgttagcaccgaaggtgcgaatacatcttctagcacatctacctcaacaacaggcacttctcacctcgtgaaatgtgcggaaaaggagaagacattttgcgtcaatggaggagaatgttttatggttaaagatctctcgaatccctctagatatttatgcaaatgtccaaatgaatttacaggcgaccgatgtcaaaattacgtgatggcgtcgttctataaggccgaggaattgtaccaaaaacgagttctgactattactggtatctgtatagctttgctcgtcgtaggaattatgtgtgttgttgcgtattgtaaaacgaaaaaacaacgaaagaagttgcatgaccgtttgcgtcaatccctccgttcggagagaaacaatatgatgaacatagctaatggtccacatcatccaaaccccccaccagagaatgttcaattggttaatcaatatgtcagtaagaatgtaatttctagtgagcatattgtggagcgagaggctgaaacatcctttagtacatcgcattacacctctacggcacatcattcaactacggtaacacagactccatctcactcctggtcaaatggacacactgaatcaatccttagcgaaagtcacagcgttatcgtgatgtctagtgttgaaaactccagacactctagtccgaccggtgggccaagggggcgactcaatggaacaggtggtccacgtgaatgtaatagttttctccgtcatgctcgagaaactccggattcttacagagactccccacacagcgaacgctatgtttcggctatgacaactccggcccgaatgtccccagtggactttcacacgccatcttccccaaaatcaccaccatcggagatgtctccaccagtatcttccatgacggttagtatgccatccatggcagtcagtccatttatggaagaagaacgcccattgttacttgttacgccgccacggctacgagaaaagaaatttgatcatcacccacagcaattttcctcattccatcataatccggcccacgatagcaatagcctcccagcgagtccccttcgtattgtagaagatgaagaatatgaaactactcaggaatatgaaccggcgcaggaaccagtgaagaaacttgctaatagtaggcgtgctaagcgaaccaagcctaacggacatatagctaatagacttgaggtagattccaatactagtagtcaaagttctaatagcgagagtgaaactgaagacgagcgcgtgggagaagatacaccattcttgggtattcagaaccccttggctgcaagcctggaagccactcctgcattcagactcgcagacagtcgtacgaatccggctggaagatttagcacccaggaagagatccaagctagattgtcgagcgttatcgctaaccaagatccgattgcagtg

SEQ ID NO: 17459 - DNA, 1911 bp, synthetic construct
  misc_feature 1..1911: note = source = /note="Description of Artificial Sequence: Synthetic coding sequence"
  source 1..1911: mol_type = other DNA
atgtccgaacgtaaagagggccgaggaaaggggaaaggaaagaaaaaggaaaggggctctgggaagaagcctgagagcgcagccggaagtcaaagccctgccttacctccaaggttgaaggagatgaagagccaggagagtgccgctggaagcaaattagttctgcgttgcgagacaagttccgaatactcatccctgaggttcaagtggttcaaaaacggaaacgagctgaacagaaagaacaaaccacagaacattaaaattcagaagaaacccgggaagagcgagctgcggataaacaaagcatccctggcagattccggcgagtatatgtgcaaagtgatcagcaaactaggaaatgactctgcatccgctaacattaccatagtggaaagcaatgaaatcattaccggaatgccagcatctaccgagggcgcgtatgtgtcttccgagagccctatcagaatatccgtgtctaccgaaggagccaatacctctagttctacatctactagcaccacgggcaccagccacctggtgaagtgtgcagagaaggagaagacattctgcgtcaatggtggcgaatgcttcatggttaaggacctgtcaaatccatctaggtacttgtgtaagtgtcccaacgagttcaccggtgatcgatgccagaattatgttatggcttccttttacaaagccgaggaactctaccagaagagagtgctgacaatcacgggaatctgcatcgccctgttagttgtgggaatcatgtgtgttgtcgcctactgcaaaaccaagaaacaacgaaagaagctccacgacagactccgccagtccttgagaagtgaaagaaacaatatgatgaatatagccaatggacctcaccatcccaaccctccaccagagaacgttcagctagtcaaccagtatgtgtctaagaatgtgatttcaagtgagcacatagtcgagagagaagccgagacgagcttctcaacgagtcactacacctccactgcccatcactctacgactgtgacacagaccccgagccactcatggtccaacgggcacaccgagagtattctttcggaaagccactccgtcatcgtaatgtccagtgtagagaactccagacactcatcccccacgggtgggccacgcggccgactcaatggcaccggcgggcccagggaatgcaattcctttctgcgacacgcgagagaaacacccgattcgtatagggactcacctcacagtgaacgatacgtcagtgccatgacgaccccagctcgtatgtcacccgtggacttccacacaccatccagcccaaaatcaccccctagcgaaatgagtcctccagtgtcctctatgacagtctccatgcccagcatggccgtaagcccctttatggaagaagagaggcctctccttcttgtaacccctccccggctgagggaaaagaaatttgatcaccatccacagcagttttcctcttttcaccacaatccggcacatgacagcaattcgctgcctgcaagccctttaagaattgtggaggatgaagagtatgagacaacacaggagtatgaacccgctcaagagcccgtgaagaagctggcaaatagtaggagagccaagcgtaccaagcccaatggacacatagcgaaccgactggaagttgacagtaacacaagttcgcagtcttcgaactcagagagcgaaaccgaagacgagagagtgggggaagacactccctttttggggattcagaatccactagctgcctccctggaggcaactcccgctttccggctagctgacagcaggacgaacccggcaggtagattctccacccaggaagaaatccaggctaggttgagctctgtcatagcaaatcaggacccgatagcagtt

SEQ ID NO: 17460 - DNA, 1911 bp, synthetic construct
  misc_feature 1..1911: note = source = /note="Description of Artificial Sequence: Synthetic coding sequence"
  source 1..1911: mol_type = other DNA
atgtcagagaggaaggaaggtcgcgggaagggaaagggcaagaagaaggaaagaggatccggtaagaagccagaatcggcagcagggagccagagcccagcccttcctcctagactgaaggagatgaagtcacaggaatctgctgcaggctcaaagctggtgctcaggtgtgaaacctcctccgagtactcctctcttcgttttaagtggttcaaaaacggaaacgaacttaataggaaaaacaagcctcagaatatcaagatacaaaagaagcctggtaagtcagaactgagaattaacaaggcctcgctcgccgattcgggtgagtacatgtgtaaggtcatttccaagctcggcaacgactccgcaagcgcgaacataactatagtggaatccaacgagattatcactggaatgccagcatcgaccgaaggtgcatacgtgtcctccgaatcccccattcggatttctgtctcaaccgagggagctaatacgtcctcctcaaccagcaccagcaccaccggtactagccatctggtgaagtgtgcagaaaaagaaaagacgttttgtgttaacggaggtgagtgctttatggtgaaggatctttctaatccttcgagatatctttgcaaatgtccgaacgagttcactggtgatagatgccagaattacgtgatggcttcgttttacaaggcggaagaactctaccagaaacgcgtgctgactataaccgggatttgtatagctctgctcgtcgtgggaattatgtgtgtggtcgcctactgcaagaccaaaaaacaaagaaagaagctgcatgatagacttagacaatcgcttcgctcggagagaaacaacatgatgaacattgcaaacggtcctcatcatcctaatcctccaccagagaacgtccaacttgtgaatcagtacgtgtcaaagaatgtgatcagctccgagcacatagtggaacgagaagcagaaacctcattctcgacgagccattatacctcgactgcgcatcattcaactactgtgacccaaactcctagccattcttggtcgaacgggcacaccgaatccattctttcagagagccatagcgtgatcgtcatgtcctcggtggaaaattccaggcattcaagccccaccggcggaccgcggggccgccttaatggtaccggtggtccgcgagaatgtaactcgtttctcagacatgcaagggaaacccccgattcgtatcgtgactcccctcatagcgagcggtacgtgtccgccatgaccactcctgctcggatgagcccagtggacttccacaccccttcgtcccccaaatcaccacccagcgaaatgtcgcccccagtgtcctcgatgactgtgtccatgccaagcatggcagtctcccccttcatggaggaagagcggcctctccttcttgtgaccccgccgagacttcgcgagaaaaagtttgaccatcatcctcaacagtttagcagctttcaccataaccctgcacacgatagcaactctctgccagcatcaccacttcgtattgtggaagatgaggagtacgaaacgacccaagagtacgagccagcacaagagccggtgaagaaactcgccaattcgagaagagcaaagcggactaagcccaatggacacattgctaacagactggaagtggatagcaatacctcatcgcaatcgagcaacagcgaatcggagactgaggatgagcgagtcggtgaggacacccctttccttggaatccagaatccactggcagcatccctcgaagcgactcccgcttttagactggcagattcgcgaactaatccagcaggccgtttcagcacccaggaagaaatccaagccagactttcttccgtcattgcgaaccaagatccaattgccgtg

SEQ ID NO: 17461 - DNA, 1911 bp, synthetic construct
  misc_feature 1..1911: note = source = /note="Description of Artificial Sequence: Synthetic coding sequence"
  source 1..1911: mol_type = other DNA
atgtccgagcggaaagagggtcgagggaagggtaagggcaaaaagaaggagcggggatccggaaagaaaccggaatcggcggcgggatcccagtcgcctgccttgcctccaagactcaaggagatgaaatcccaggagtcggctgcgggctcgaagttggtgttgcgctgtgagacgtcgagcgaatactcctccctcagattcaagtggttcaagaacggaaacgaactgaatagaaagaacaagccacagaacatcaagatccagaaaaagcctggcaagtccgaactgcggatcaataaggcttcccttgcagactccggagaatacatgtgcaaagtgatttccaaactgggcaacgactcagcatccgccaatatcacgattgtcgaatcaaatgaaatcatcactggaatgccggcgtcaactgaaggagcgtacgttagcagcgaatccccaatcagaatctcggtgtccaccgaaggtgcaaacacttcatcatcgacctcgacctcgactactggcacctcgcatcttgtgaagtgcgctgagaaagaaaagactttctgtgtcaacgggggtgaatgcttcatggtgaaagacctgtcgaacccgtcaagatacctgtgtaagtgtccaaatgaattcactggggaccgatgccagaattacgtgatggcctcattctacaaggcggaggaactctatcagaagcgcgtcttgaccatcactggcatctgtattgctctgctcgtcgtgggaatcatgtgcgtggtggcatactgcaagactaaaaagcagcggaagaagctgcatgataggcttcggcagtccctgcgctcggagcggaacaacatgatgaacattgccaatggacctcaccacccaaacccgccgccagaaaacgtgcaattggtcaaccagtacgtctcgaaaaatgtgattagctccgagcacatcgtggagcgcgaggccgaaacctccttctccacttcgcactacacttcgaccgcccaccactcgactaccgtgactcagaccccttcgcactcgtggtccaacggacatactgaatcgatcttgtccgagagccattcagtcatcgtaatgtcaagcgtcgagaactcccgccattcatctccgactggagggccacgcgggcgcctgaatgggactgggggaccaagagaatgcaactcgttcctgagacatgcccgcgagactccggactcataccgcgatagcccgcactcggaacggtacgtgtccgctatgaccactcctgcccggatgtcgccggtggatttccatactccaagctcaccgaaatcgcccccgagcgagatgtcgccgccagtctcctcgatgaccgtgtcaatgccgtcgatggccgtgtcgccgttcatggaggaagagaggcctcttctgttggtgactccgccgcggctgcgggagaaaaagtttgatcatcacccccaacaattcagctccttccaccacaacccagcgcatgactcgaacagcctcccggcctcacccctgcggatcgtcgaggatgaggagtacgaaactacccaagagtacgaaccggctcaagaacctgtgaagaagctggccaattcccggcgagctaagagaaccaaaccgaacggacacatcgcgaatcggctcgaggtggactcaaacacttcgtctcagtcctccaattccgaatccgaaactgaagatgagcgcgtgggcgaggacaccccctttctcggaatccaaaatccgctcgcggcgtcgttggaagcgacgcctgcctttagacttgctgatagccggactaatccggcgggaagattttccacccaggaagagatccaggcgcggctctcctccgtcatcgccaatcaagaccccatcgcagtg

SEQ ID NO: 17462 - DNA, 1911 bp, synthetic construct; identical to SEQ ID NO: 17444
  misc_feature 1..1911: note = source = /note="Description of Artificial Sequence: Synthetic coding sequence"
  source 1..1911: mol_type = other DNA

SEQ ID NO: 17463 - DNA, 1911 bp, synthetic construct
  misc_feature 1..1911: note = source = /note="Description of Artificial Sequence: Synthetic coding sequence"
  source 1..1911: mol_type = other DNA
atgagtgagagaaaggagggtcgagggaagggaaaaggaaagaaaaaagagcggggcagcgggaagaaacctgagagcgcagcggggagccagtcacccgccctgccaccacggctcaaggaaatgaagagccaggagagcgcagcaggtagcaaactggttctgcggtgtgagaccagttctgagtatagttcactgcggttcaagtggtttaaaaacggaaacgagttgaaccggaagaacaagccacagaacatcaaaattcaaaagaagcccggtaagagcgagctgcgaattaataaggcctcactcgcggattctggggagtacatgtgtaaggtaatctcaaagttgggtaatgattccgcaagtgcaaatatcactatagtcgaatccaacgagattatcacaggcatgcccgcgtctacagaaggtgcctatgtctcctcagagtctcctattcggataagcgtgtccacggaaggggcaaacacctcaagctctacaagtacctctaccacaggcacttcacatttggtcaaatgtgccgagaaggaaaagacgttctgtgtgaacggcggagagtgttttatggtgaaagacttgtccaacccaagccggtatttgtgcaagtgcccgaatgaatttacaggcgatcggtgccagaactacgtgatggcatccttctacaaggctgaggagctgtaccagaagagagtgctgacaatcactgggatttgcattgccctgctggtggtcggcattatgtgcgtcgttgcgtattgtaagacaaagaagcagcgaaagaagttgcacgatcgactccgacaaagtttgaggtctgagaggaataatatgatgaacattgccaatggtcctcaccaccctaacccacctccagagaatgtgcagctggttaatcagtatgtctccaagaatgtgatcagctctgagcatattgtggagcgcgaggcggagacgagtttcagcaccagtcactatactagcacggctcatcacagcaccactgtcacccagacaccctcccacagctggtctaacgggcacaccgagagcatactgagcgaaagccacagcgtgatcgttatgtcctccgtggagaacagtcgccactccagtccaaccgggggacccaggggtcgacttaacggaaccggcggacctcgcgagtgtaacagtttcctgagacacgcccgcgagactcctgacagttatcgagattcccctcactccgagagatacgtgtccgccatgactacgcccgcacggatgagccctgtcgactttcatacccctagcagccccaagagtccaccctctgaaatgtctccgcctgtgagcagcatgactgtgagcatgccttctatggcagtgagcccctttatggaagaggaacggcccctcctcctggtgacccccccacgcctgagggaaaaaaaatttgaccatcacccgcagcagttctcttcctttcatcacaaccctgcccacgatagtaacagtctccccgccagtccattgcggattgtggaagatgaggaatacgagactacgcaggagtacgagcctgcccaggaaccagtgaaaaagctggccaacagccggagggccaagaggactaagcctaacggtcatattgccaatagactggaagtggattccaacaccagcagtcagagtagtaatagtgaaagcgagaccgaggatgaacgcgttggcgaagatacccctttcctggggattcaaaacccgctcgcagcatcactggaggctacaccggcgttcaggctggccgattccagaaccaaccccgctgggcggttctccacgcaggaagagatccaggcgcggctcagctccgtgattgcaaaccaggatcctatcgcagtg

SEQ ID NO: 17464 - DNA, 1911 bp, synthetic construct
  misc_feature 1..1911: note = source = /note="Description of Artificial Sequence: Synthetic coding sequence"
  source 1..1911: mol_type = other DNA
atgtctgaaaggaaagaagggaggggcaagggcaaggggaaaaaaaaggaacggggatctgggaaaaagcccgagtccgcagcgggttcccaatcaccggcattgcctcctcggctgaaggagatgaagtcccaggagtcagcagcagggagcaagcttgtgctgcgctgtgaaacctctagcgaatatagtagcctccgctttaaatggtttaagaacggtaacgaattgaatcggaaaaataaaccgcagaacataaagattcagaaaaaaccgggcaaatccgagctcagaatcaacaaggcctccctcgcagactccggcgaatacatgtgtaaggtgatcagcaagctgggcaatgactccgcttctgcaaacataaccatcgttgaatccaatgagattatcacgggaatgcctgcctccaccgagggcgcttatgtgagctctgagtcccccatcaggataagcgtgagtacagaaggtgccaataccagctcatctactagtacgtccacgacaggcacatcccatctcgtgaaatgcgctgagaaagagaaaaccttctgtgtgaatgggggggaatgttttatggtcaaggatctgtctaacccgtcccgctatctctgtaaatgtcccaatgagtttactggagacagatgccagaactacgttatggctagcttttacaaggctgaggagctgtatcagaaaagagtgctgacaatcacaggtatttgcatcgctctgctggtcgtggggatcatgtgcgtggtagcctactgtaagactaaaaagcagaggaaaaaactgcacgacaggctgcggcagtcactccggagtgaacggaacaatatgatgaacatcgctaatgggccacaccatccaaaccccccccctgaaaatgtgcaacttgttaatcaatacgtgtccaaaaatgtgattagcagcgagcacattgttgaacgggaagctgagacttcttttagtacctctcattacaccagtaccgcccaccactcaaccactgtgactcagaccccaagccattcttggtccaacggacacacggaaagtatcttgtccgagtctcacagtgtgattgtcatgtcatcagtggaaaacagccgacactcatcaccgaccggaggtcctcgcggtagacttaatggcaccggtggccccagagagtgcaattctttcctgcgccacgctcgagagacaccggattcctatagggattcccctcacagtgaacggtatgtcagcgcgatgactacacccgccagaatgagtcctgtcgacttccacacaccaagctcccccaagagccctcccagcgagatgtccccccccgtgagttcaatgactgtcagcatgccgtctatggccgtcagcccattcatggaagaagagcggcctcttttgctcgttacccctcctcggcttcgggaaaagaagtttgatcaccacccacaacagttcagcagtttccatcacaatccggcacacgacagcaatagtcttcccgctagtcccctgaggatcgtagaggacgaggaatacgaaacgacacaagaatacgaacccgcccaagagccagtgaagaaacttgccaattctagaagagcaaaacgcacaaagcctaacggtcacatcgcaaatcggctggaagtggactcaaatacaagtagtcagagcagtaattccgagagtgagaccgaagatgagcgggtcggggaggacacacctttcctggggatccagaaccctctggctgcgtccctcgaagcaactcccgcatttcgccttgctgattcaaggactaatcccgccgggcgcttttctacacaggaagagatccaggctcgcttgagctctgtgattgctaaccaggacccaatcgcagtg

SEQ ID NO: 17465 - DNA, 1911 bp, synthetic construct
  misc_feature 1..1911: note = source = /note="Description of Artificial Sequence: Synthetic coding sequence"
  source 1..1911: mol_type = other DNA
atgtctgaacggaaagaaggtcgggggaaggggaaaggcaaaaaaaaagaacgcggctcgggaaagaagcctgagtctgcagcgggcagccaaagtcctgccctgcctccccgcctgaaggagatgaagtcccaggagtcagccgcggggtccaaattggtgctgaggtgcgagacttcttccgagtactcctcgttgcgatttaagtggtttaagaatggcaatgaactcaatcgaaagaacaagccccagaatataaaaattcagaaaaagccgggcaaaagcgaactccgaattaataaggccagcctggctgacagcggtgagtacatgtgcaaggtgatatccaagctggggaacgatagtgcaagtgccaatatcacaatcgttgagagtaatgaaattatcaccggaatgcctgcgtccacagagggtgcatatgtctcttctgagagcccaatcaggatatccgtttctacggagggtgctaacacatcgtcatcaacatccactagcaccaccggaacctctcatttagtcaaatgcgcagagaaggagaagacattctgcgtgaatgggggggaatgctttatggtcaaggatctgagcaatccctcgaggtacctgtgtaagtgtcccaatgaatttaccggggacagatgccagaactacgtgatggcgtctttctataaggctgaggaactctaccaaaagcgtgtgctgacaatcactggtatttgtattgccctacttgtcgtggggatcatgtgcgtggtggcttactgtaagaccaagaagcagaggaagaaactacacgaccgcctgcgacagtctctgaggtcggagaggaataatatgatgaacatcgcgaacggccctcatcatccaaacccacctcccgaaaatgtacagcttgtgaaccagtatgttagcaaaaacgtcatttcctcggaacacatagtggaacgggaagcggagacctcctttagcactagccactataccagcactgcccaccacagcaccacggtgactcagacaccctcgcactcatggtcaaacggacacactgagagtatcttgtcagagagccactcagtgattgtgatgtcctccgttgaaaattcgagacatagctctcctaccggaggacctagaggacgccttaacggcacgggagggccccgagaatgcaatagcttccttagacatgcccgtgagacgcccgactcatatcgagatagcccgcactctgaacggtacgtctccgccatgacaacacctgcaagaatgagcccggtcgactttcacactccctcgtccccaaaatcccccccttctgagatgagtccccccgtgtcttcaatgacggtcagcatgccatccatggccgtgagcccatttatggaagaggagcggccacttctgctggttacacccccccgattacgggagaagaagtttgaccaccacccccagcaatttagttctttccatcataatccagcgcatgacagcaatagtttgccggctagccctctgaggatcgttgaggacgaggagtatgagacaacccaggagtacgagccagcacaggaacccgtgaagaagctggcaaattcccggcgggcgaagcggaccaaacctaacggacacatcgctaaccggctcgaggtggatagcaatacgtcttcacagtcttctaactctgagtctgagactgaggatgaacgggtcggcgaagacacacctttcttaggaatacaaaaccctctggccgccagcctggaggctactcccgcatttcgacttgctgattctcgcacaaaccctgcgggcaggttttcgacacaggaggaaatccaggctcggctttcaagcgtcatagcaaaccaggatcctatagccgtg

SEQ ID NO: 17466 - DNA, 1911 bp, synthetic construct
  misc_feature 1..1911: note = source = /note="Description of Artificial Sequence: Synthetic coding sequence"
  source 1..1911: mol_type = other DNA
atgtccgagcggaaagaagggagagggaagggcaagggcaagaaaaaggagcgggggtcagggaagaaacccgaaagtgctgcgggatcccagtctccagcgctgccgccaaggctgaaggagatgaaatcccaagagtccgctgcaggttccaaactcgtactccgctgcgagaccagtagcgaatattcaagtctaagatttaaatggttcaaaaacggaaatgaactcaatcgaaaaaacaagccacagaatattaagatacaaaaaaagccaggtaagtccgaactgcgtatcaataaggcttctttggctgattccggtgagtacatgtgtaaagtcatatcgaagctgggcaacgactctgcaagtgccaatatcaccatcgtggaatctaacgagattataacggggatgcctgcgagcaccgaaggcgcgtacgttagctccgagagccccattcgtataagcgtatccaccgaaggagccaacacctccagttcaacaagcacctccacgacgggcacctcccatctggtcaaatgtgcggagaaggagaagacgttctgtgtgaatggcggcgaatgtttcatggtgaaagacctctccaatccttctcggtatctgtgcaaatgccccaatgaattcacaggtgatagatgccaaaattacgtaatggcctccttttataaagctgaggagctctatcagaagcgggtgctgacaattacaggcatatgtatcgctctccttgtggtggggatcatgtgcgtggtggcatactgcaaaacaaagaaacagaggaaaaagttgcacgatcgcttacggcaatccctgcgtagcgaaagaaacaacatgatgaacattgctaacggccctcatcatcccaaccccccacccgagaacgttcaactggtgaatcagtacgtctctaaaaatgtgatctcctccgaacacatcgtcgaacgcgaagccgaaacaagctttagcacaagtcactatacgtcaaccgcgcaccattccaccacagtgactcaaacgccaagtcattcctggagcaatggtcacaccgagagcattctgagcgagtcccattccgttattgtcatgagttctgtggagaattcacgacactcatccccaaccggcggccctcgcggtagactgaatggcacggggggacccagggagtgtaatagctttctgcgacacgctcgcgaaacgcccgacagttaccgggacagtccccacagtgagcgatatgtgagtgctatgacaacccccgccagaatgagtccagttgacttccacactccttcgtctccgaagtcaccgccttctgagatgtcaccccccgtgtcctcaatgaccgttagcatgccaagtatggccgtgtctccatttatggaggaggagcggcctctgcttctcgtgacaccacccaggctaagggagaaaaagtttgatcaccatccccagcaattcagttcattccatcataaccccgcccacgactccaactcgctgccagcttcccctctgagaattgtcgaggacgaggagtatgaaaccactcaggaatatgagcccgcccaggagccggtcaaaaagttggccaattctcgccgggcaaaacgaactaaaccaaatggccatattgcaaacaggctggaggtggacagcaatacttccagccagagctccaacagcgagagcgaaacagaagatgaacgggtcggggaggatactccattcttaggtattcaaaatcctctggcagcctctctcgaggccacaccagccttcaggctcgcagacagcaggaccaacccagctggtagattttcaacacaggaggagattcaagccagactgagctccgtaattgcaaaccaggacccaattgccgtg

SEQ ID NO: 17467 - DNA, 1911 bp, synthetic construct
  misc_feature 1..1911: note = source = /note="Description of Artificial Sequence: Synthetic coding sequence"
  source 1..1911: mol_type = other DNA
atgtccgaacggaaggaaggcagaggaaagggaaagggcaagaagaaggaacgcgggtcaggtaagaagccagagtccgcggccggcagccaaagcccagcacttcctcctcggctcaaggagatgaaatcccaagaaagcgcggctggctcgaaacttgtgctccggtgtgaaacttcctcggaatacagcagcctgcggttcaagtggtttaagaatgggaacgagctgaaccgtaagaataagcctcagaacataaagattcaaaagaaaccgggcaaatcagaactgcggatcaataaggcgagcctggccgacagcggcgagtacatgtgcaaggtcattagcaaacttggtaatgattccgcatcggcaaacatcactattgtggagtcgaatgagattatcacgggaatgcctgccagcaccgaaggagcatatgtctcatctgagagcccgattcgaatttcagtgagcactgagggggcaaacacgtcctcctcgacctcaacttccactactggtacttcccatcttgtcaagtgcgcggaaaaagagaaaaccttctgtgtgaacggtggcgaatgttttatggtgaaggacctgtcaaatccatcaagatacctttgcaaatgcccaaacgaattcaccggcgaccgatgccagaactacgtgatggcatcattctataaggccgaagagttgtaccagaagagagttcttaccatcactggaatttgtatcgcactgctcgtggttggaataatgtgcgtcgtggcctactgtaagactaaaaagcagcgtaagaaactgcacgatagactgcggcaatcgcttcgcagcgaacgtaacaatatgatgaacatcgcaaatggtcctcaccaccctaaccctccgcccgaaaatgtgcaacttgtgaaccagtacgtgtccaaaaacgtgatctcatccgagcacatagtggaaagagaagccgaaacttccttctcaacgtcgcattatacttcaaccgcacaccactcaaccactgtgactcagactccaagccattcgtggtccaacggccataccgaatcgattctgtcggaatcacacagcgtcattgtcatgtcgagcgtggaaaacagcaggcatagctcgcctactggagggccccgcggtagacttaatggtaccggtggtccaagagaatgcaacagctttctgcgccacgctcgcgaaacccctgattcataccgggattcgccacatagcgaacgctacgtctccgcaatgactacccccgcccgcatgtcacctgtcgattttcacactccttcctcgccaaagtcaccgccctcagaaatgagcccgcctgtgtcgtcgatgaccgtgtccatgccttcaatggcagtgtcaccatttatggaagaggagcggccattgctgctcgtgaccccaccgaggcttagagaaaagaagtttgatcaccatccacaacaattttctagcttccatcataaccctgctcacgattccaattcgctgcccgcttcccctctgagaattgtggaggatgaagagtatgaaaccactcaagaatacgaaccagcccaggagcctgtcaagaaactcgcgaattcacgcagagcaaagcgaacgaagcctaatggacatatcgcaaatcgactcgaagtcgacagcaacactagctcacagtcgagcaactcggaatcggagactgaagatgaaagggtcggcgaggacacccccttcctcggcattcaaaaccccctggccgcgtctctggaggccacgccggcatttcgccttgcagactcgcgaactaacccagcaggtagattttccacccaggaagagattcaggcaagactgtcgtctgtcatcgcaaatcaagatcctattgcagtg

SEQ ID NO: 17468 - DNA, 1911 bp, synthetic construct
  misc_feature 1..1911: note = source = /note="Description of Artificial Sequence: Synthetic coding sequence"
  source 1..1911: mol_type = other DNA
atgtccgagcgcaaagagggtcgaggcaaaggcaaaggaaagaagaaagagcgggggtccggaaagaagcccgagagtgccgcaggctcacaaagccctgcgctgccacctaggctaaaggaaatgaaatcacaggagtctgccgctggcagcaagttagtgctacgttgtgaaacatcctcggagtattcatccttgagattcaaatggttcaagaacggcaatgagctgaatcgcaagaataagccccaaaacatcaaaattcagaagaagcccgggaagtcggagctgcgtattaataaagcctctcttgccgattcgggggagtacatgtgtaaggttatcagtaagctcggaaatgactcagcttccgcgaatatcactatcgtggagtctaacgagattatcacgggcatgcccgcttcgaccgaaggcgcttacgtgagttcggagtcacctatccgcatttccgtctcaacggaaggggcaaatacttccagttctacctcaacttcaaccaccggtacgagccatctagtaaagtgtgccgagaaggagaagactttttgtgtgaacggtggggaatgctttatggtaaaggatttgagtaacccttctcggtatttgtgcaagtgtccgaatgaattcacaggcgaccggtgtcaaaactacgtgatggcctctttttataaggccgaggagttgtatcagaaacgtgtcctgaccatcaccgggatttgcattgcgcttctggtcgtgggaataatgtgcgtcgtggcctattgcaagaccaagaagcagcgtaaaaagctacacgacaggctacgacaatctctgcgttctgaacgaaacaacatgatgaatattgccaatggtccccaccacccaaacccgccacctgagaacgtccaactcgtcaatcagtacgtatccaagaacgtgatcagcagtgagcacatcgttgaacgggaggctgagacgtcattttctacgtcccactatactagcaccgctcatcatagcactacagtaactcagaccccgtcgcattcctggtccaatggtcatacagaatctatcctctctgagtcgcattcagtaatcgtcatgtcttccgtcgagaacagtcgacactctagcccaactggtggtcctcgtggacggctcaatgggaccggaggtcctcgtgagtgtaactcgttcttgcgccatgcccgggagactccggacagctatcgagatagcccacacagcgaaaggtatgttagtgcgatgactaccccagcacgcatgtcccctgttgacttccatacaccatcttcgcctaaaagcccaccgtcagagatgagtccgcccgtcagttcgatgaccgtgagcatgccctcgatggctgtcagcccatttatggaggaggaaagacctctgctgctcgtcactccccctcgactccgggagaagaaatttgatcatcatccccagcagtttagttcttttcatcataacccagcacatgatagtaacagtcttcctgcatcccccctgcgtatcgttgaggatgaggagtacgaaacaactcaagagtacgaacccgctcaggagcctgtgaagaaacttgctaacagtaggcgcgccaaacgtactaagcctaatggacatatcgctaatcggttagaggtggactctaatacgtcgagccaatcttcaaactcagagagcgaaactgaggatgagagagtgggagaggatacccccttccttggtatccaaaatcctctcgctgcaagcctcgaggcaactccagcatttcgactggcggactcgcgaacgaatccagccggtagattctccacgcaggaagaaattcaagcgagattgtcgtccgtcatagctaaccaggatcccatcgctgtg

SEQ ID NO: 17469 - DNA, 1911 bp, synthetic construct
  misc_feature 1..1911: note = source = /note="Description of Artificial Sequence: Synthetic coding sequence"
  source 1..1911: mol_type = other DNA
atgagcgagaggaaggagggtcgcggtaaagggaaagggaaaaaaaaggagagaggctcggggaaaaaaccggagagtgctgctggctctcagagccccgcattgcctccacgcctgaaagagatgaaatcccaggagagtgctgcaggttccaagcttgttttgagatgtgaaacctcttcggagtattcttccttgaggtttaaatggttcaagaacggaaatgaactgaatagaaagaataagccacagaacattaagatacagaagaagcccggcaaatctgagcttaggataaataaggcatctctcgccgattccggggaatacatgtgtaaagttatctctaaacttggtaatgacagcgcctctgctaatatcaccatcgtggaatccaatgaaatcattactgggatgccagcatccacagagggagcctacgtgagcagcgaatccccgatcaggatctccgtttccacagaaggcgctaacacttcgagtagtaccagtacatctactactgggacttctcatttggtaaaatgcgccgagaaagaaaaaaccttctgcgtgaatggcggagagtgctttatggtaaaggatctgtcaaatccatctagatacttatgcaagtgtcccaatgagtttactggggataggtgtcagaattacgtgatggcttctttttacaaagccgaagagctgtatcagaagagagtgctaacaatcaccggcatttgcattgccctgctagtagtgggtattatgtgcgtggtagcttactgcaagacaaaaaagcagcggaaaaaattgcatgataggcttcgtcaatctttgcggtccgagagaaacaacatgatgaacattgcgaatggaccccatcaccctaatcctcctcccgaaaacgtgcagctggtaaaccagtacgtatctaaaaatgtgatttcaagcgagcacatcgtggaacgggaggctgagacaagtttcagcacatcccactacacaagtacggcccaccactctacaactgtcactcagaccccctctcactcttggtccaatggtcatacagaatccatcctgagcgaaagccatagcgtaatagtgatgtcatccgttgagaactccaggcactcctcccctaccggtgggccccgtggccggctgaacggtacgggcggcccacgcgaatgtaacagcttcctgcggcatgcaagggaaactccagacagttatagagactcaccgcattctgaaaggtatgtgagtgccatgaccacacccgcgagaatgtccccagtcgattttcatacaccttcatctccgaaaagtcccccttcagagatgtcccctcccgtgtcttctatgaccgtgtccatgcctagcatggcagttagccccttcatggaagaggagcgccccctcctgcttgtgactcctccaagactcagggagaaaaaattcgaccaccacccacagcagtttagttctttccatcacaaccccgcacacgattcaaactcgctgccggccagccctcttagaattgtagaagacgaggagtacgagaccacccaagagtacgaacctgctcaggagcccgtgaagaagcttgccaattcacgccgagctaagcgtaccaagccaaatggtcacatagcaaaccgattggaggtggatagcaacacttcctctcagtcctccaatagcgaaagcgaaaccgaagacgagagggttggagaagatacaccattccttggaattcagaaccctctggcggcctctctggaggcaacccctgctttcaggctggcagacagccgcacaaaccctgccggacgcttttcaactcaagaagaaattcaggcccgactaagcagcgtaatcgcaaaccaggatccgatcgctgtg

SEQ ID NO: 17470 - DNA, 1266 bp, synthetic construct
  misc_feature 1..1266: note = source = /note="Description of Artificial Sequence: Synthetic coding sequence"
  source 1..1266: mol_type = other DNA
atgcgctggcggagagcaccacgacgatccggacggcctggtcctagggcacagcggccaggttctgcagcgagaagctccccacctctcccactgcttcctcttcttctcctgcttggaactgctgcacttgcacctggcgcagcagctggaaacgaggcagcaccagcaggagcatcagtgtgttactcctcaccaccatccgttggaagcgtccaagaacttgcacaacgcgccgctgtggtgattgagggaaaggtgcacccgcaacggcgccaacaaggagcactggataggaaggcggcagcagcagcgggtgaggccggcgcctggggcggtgaccgggagccgcctgcagcgggacctcgggcacttggacctcctgcagaagagccccttctcgcggcaaacggtacggtgccatcgtggccgactgcgccagtgcctagcgcaggagaaccgggcgaggaggccccctacctggtgaaagtgcatcaagtgtgggcagtcaaggcaggcggacttaagaaagattccctccttacggtgcgtctgggtacgtggggacatcctgcgtttccttcgtgtggtagactcaaagaggacagccgctatatctttttcatggaacctgatgcaaactccacgtccagagcgccagcagcattccgggcatcctttccacccctggagactggaagaaatcttaagaaggaggtgtcccgcgtgctttgcaagcgatgtgcacttccgcctcgtttgaaggaaatgaagtcgcaggaatcggcagcaggtagcaagctggtgctgcgatgtgaaacctcgtccgaatactcctccctcaggttcaaatggttcaagaatggaaacgagttgaatcgcaaaaacaagccacaaaacattaagatccaaaagaagcctggaaagtccgaactcagaatcaataaagcatctctcgccgattccggtgaatacatgtgtaaggtcatcagcaagctggggaatgattcggcttcagcaaacattactattgtcgaatcgaatgcaaccagcacctcaactactggtacctcgcatctggtgaagtgtgcggaaaaagagaaaaccttttgtgtgaatggtggtgaatgctttatggtcaaagatctgtctaacccttcaaggtacctgtgtaagtgtccaaacgaatttaccggcgatagatgtcagaattacgtgatggcgtcgttttactcgacctccaccccatttctcagcctgcctgag

SEQ ID NO: 17471 - DNA, 1266 bp, synthetic construct
  misc_feature 1..1266: note = source = /note="Description of Artificial Sequence: Synthetic coding sequence"
  source 1..1266: mol_type = other DNA
atgcggtggagacgggccccacgaagatccggcagaccaggtcctcgggcccagaggccaggctctgctgcgcggtcatcaccacctctgcccttgctgccgctcttgctgttgctcgggaccgctgctctcgcccccggtgccgccgccggaaacgaagccgcacctgccggtgcatccgtgtgttattccagccccccgtccgttggctctgtgcaggagttggcccaacgggcggctgtagtgattgaaggaaaagtgcacccacaacgaaggcagcagggcgccctggatagaaaagccgctgccgccgccggcgaggcaggtgcatggggtggtgatagggagccaccagccgccggacctcgcgcacttgggccacccgccgaagaacccttgctcgccgcgaacggtacagtgccaagctggccaactgcccctgttccaagcgccggggaaccaggcgaagaggccccttacctggtgaaggtgcaccaggtctgggcggtgaaagccggcgggttgaagaaagattctcttctgacagtgcggctgggcacttggggccacccagcctttccctcctgcgggaggttgaaggaggacagcagatatatcttcttcatggaacctgacgcgaatagcacctccagagctccggctgcatttcgcgcctcttttccccccctggagactggtcgaaatctcaagaaggaagtgagccgcgtgctgtgtaagcgctgtgctttgcctccccggctgaaggagatgaaatctcaagagtcagctgctgggtctaagcttgtcctgcggtgcgagaccagctctgagtacagcagtcttagattcaaatggttcaaaaacggtaacgaactcaatagaaagaacaagcctcaaaatatcaaaatccaaaagaagccaggcaagagtgaactcaggattaacaaagcatcactggctgatagcggcgaatacatgtgtaaggtcatatctaaacttggaaatgacagtgcaagcgccaacataactatcgttgaatcaaatgccactagtactagcactacgggaacctcccatctggtgaagtgcgccgagaaagagaaaaccttttgcgtgaatgggggcgagtgtttcatggtaaaggatctcagcaacccttctagatacctgtgcaaatgccctaacgagtttacgggcgacagatgtcagaattacgtcatggcatccttttattccaccagcaccccgttcttgtccctgccagaa

SEQ ID NO: 17472 - DNA, 1266 bp, synthetic construct
  misc_feature 1..1266: note = source = /note="Description of Artificial Sequence: Synthetic coding sequence"
  source 1..1266: mol_type = other DNA
atgcgttggcggagagctccccgccgcagcgggcgcccaggtcctcgggcacagcgacctggaagtgccgcgcgctcaagcccgcctttgccactgctgccactgctgctgctactgggcaccgctgcgctggctccaggtgcggcggctggtaacgaggcagccccagcgggagccagcgtttgctactcatctccacctagcgtgggttctgtgcaggaactggcacagcgcgccgcggtggtgatcgaaggcaaagttcatcctcaacgacgtcagcaaggcgctctggaccgtaaggcagctgctgcagccggcgaggccggggcttggggcggtgatcgcgagccaccggctgccggtcctcgggcactgggcccacctgcagaagagccactgctggcggcgaacggtaccgtgcctagctggccaaccgcgccggtcccgtccgccggtgagcctggtgaggaagccccttacctcgtgaaagtccatcaagtctgggcggtcaaagcaggtggcttgaaaaaggatagcctgctcaccgttcgcctgggtacttggggccacccggcgttcccttcctgcggccgactgaaagaagattcacgctacatcttcttcatggagcctgatgcaaactctacgtcccgagcgccggctgcatttcgagcctctttccctccattggaaacggggcgaaacctgaaaaaggaggtgagcagggtcctgtgcaagcgttgcgccctgccgcccagactgaaagagatgaagagccaggaatccgcagcgggcagcaagctggttctgcggtgcgaaactagctcggagtacagctctctgcgatttaagtggttcaagaacggaaatgaactaaaccgcaagaacaagccccaaaatattaaaattcaaaagaaaccgggtaagtcagaactgcgcatcaacaaggcgtcacttgcagatagcggggagtacatgtgtaaagtgattagcaagcttggtaatgattctgcgtccgccaatatcacgatcgttgagtctaatgctacctcgacgtccacgaccggtacctcccacctggtcaaatgtgctgagaaggaaaaaacgttttgtgtaaacggtggtgaatgcttcatggtgaaagatttgagcaacccaagccgctacctgtgcaaatgccctaacgaattcacaggtgatcgttgccagaattatgtgatggcaagtttctacagcacctcgactcctttcctgagcttgccggag

SEQ ID NO: 17473 - DNA, 1266 bp, synthetic construct
  misc_feature 1..1266: note = source = /note="Description of Artificial Sequence: Synthetic coding sequence"
  source 1..1266: mol_type = other DNA
atgcgctggcgtcgtgcccctcgtcgctctggtaggcccggtccccgcgctcagcgtcccggcagtgccgctcgcagctcacctcccctccccctcctccctctgcttctgctgctgggcactgcagctttggcccccggtgccgctgccggtaacgaagccgcacctgctggcgcttccgtctgctattcttccccacccagtgtcggtagtgtgcaggagcttgcccaaagagctgccgtcgtaattgagggtaaagtacaccctcagcgcagacagcagggagctctggatcgcaaggcagccgccgctgccggtgaggccggtgcctggggcggcgacagagagcccccagccgcaggtcccagagcactcggccccccagcagaagagcccctgttggccgccaacggaaccgtgcccagctggcctaccgcccccgtaccaagcgccggcgagcccggagaggaagccccatatttggtcaaggttcatcaggtgtgggccgtgaaggcaggaggtttgaagaaagattctctcctgactgtaagactgggtacctggggccatccagctttccccagttgcggccgtctcaaggaagacagccgctacatttttttcatggagcctgatgccaatagcactagccgcgcccccgctgcatttcgcgctagcttcccaccccttgagaccggaagaaacctcaagaaagaagtgtctagggtgctgtgcaagaggtgtgcactgcccccacgcctcaaggaaatgaagtctcaggagtccgccgcaggtagcaagctggtacttcgctgcgagacctccagtgagtactcatccctgaggttcaaatggttcaagaatggaaacgagctgaaccgtaagaacaaacctcagaacattaaaatacagaagaaacctggaaaatccgaactgcgcatcaataaggcctcccttgccgatagcggcgaatacatgtgtaaggtcatctccaagttgggtaacgattccgcttccgccaatattaccattgtggagtccaatgccacatctacatcaaccaccggaacctctcatctcgttaagtgcgccgaaaaggaaaagaccttttgcgttaatggtggtgaatgtttcatggtcaaggacctgagcaacccctcacgctatctctgcaaatgccccaacgagtttaccggcgaccgttgtcagaattatgtcatggcatcattctactctacctcaacccctttcctcagtctgcccgaa

SEQ ID NO: 17474 - DNA, 1266 bp, synthetic construct
  misc_feature 1..1266: note = source = /note="Description of Artificial Sequence: Synthetic coding sequence"
  source 1..1266: mol_type = other DNA
atgcgttggcggagagcgccaagacgatcagggcgacctggtcccagagcgcagcggcccgggtcagcagcccggagctcccctccccttccacttctccctctgcttcttctgctggggaccgcagcgctggctccaggtgcagccgcaggaaacgaggctgctcctgctggagcctcagtgtgttactcgtcccctccaagcgtgggatcggtgcaagaactggcacagagggccgcagtggtcatagagggcaaagtccatcctcaacgtcgtcagcaaggagcactggataggaaagcggcagccgctgcgggggaagcgggtgcatggggcggtgaccgggaaccacctgccgctgggcctcgagccctgggaccgcccgcagaagagccccttcttgcagccaacggcaccgtcccttcctggcccacggcacctgtcccatcagcaggggaaccgggagaagaagcaccttacctggttaaggttcatcaagtctgggcggtgaaggcaggtggtctgaaaaaggactccctgctcaccgtgaggctcggtacctggggtcacccagccttcccatcgtgtggtagactcaaggaggattcccgctacatcttctttatggagccagacgcgaattcaacttcgagggccccagctgcgtttcgtgcctcatttccaccattggaaactgggcgtaacctcaagaaggaagtctccagagtcttgtgcaaacggtgtgcactcccacctaggcttaaggagatgaagtcacaagagtccgccgcaggatcgaaactggtgcttaggtgcgagacttcatcggaatactctagcctgagatttaagtggtttaagaacgggaacgaacttaatcgcaagaacaagcctcaaaacattaagatccagaaaaagccaggaaagtcagaactcaggattaacaaggcatcgctcgcagatagcggcgagtacatgtgtaaggtcatttccaagctcggaaacgattcagcctcggcaaatatcaccatcgtggaatcaaacgcaacgtcgacctcgactaccggaacctcgcaccttgtcaaatgtgcagaaaaagagaaaactttttgcgtcaatggtggcgaatgtttcatggtgaaggatctctcgaatcccagccgatacttgtgcaaatgtccgaatgagttcactggtgaccgctgccagaactatgttatggcctccttttactctacctcgacgcccttcctgtcgcttcctgag

SEQ ID NO: 17475 - DNA, 1266 bp, synthetic construct
  misc_feature 1..1266: note = source = /note="Description of Artificial Sequence: Synthetic coding sequence"
  source 1..1266: mol_type = other DNA
atgagatggcgccgggctccgcgccggtcgggacggccgggccctcgtgcacagagaccgggttcggcagcgcgaagctctcccccgttgcctcttttgccgctgctccttttgcttggcacggctgcacttgccccgggggcggcggccggaaacgaagcagcaccggccggggcgtccgtttgttattcgtcacctccgtccgtcggatccgtgcaggaactcgcgcaacgcgcggcagtagttattgaaggaaaggtccatccgcagagacgtcagcaaggcgcgttagatcgcaaagcggccgcggcagccggagaagctggtgcatggggaggagatcgtgagccgccggcagcaggccctcgagccctggggccaccggcggaagagccgcttcttgctgccaacggaaccgtacctagctggcctacagctccggtcccgagcgccggcgaaccaggcgaagaagctccgtatcttgtcaaagtgcaccaagtgtgggctgtaaaagcgggcggacttaaaaaagactcgcttcttacggtaagacttggcacgtggggccatccggcttttccaagctgtggacgactaaaggaagatagccgctatatatttttcatggagccggatgcaaattccacgagtcgcgcaccggcggcgtttagggcttcctttccgccactggaaacaggccgcaacttgaaaaaggaagtaagccgggtgctttgtaagcgttgcgcactgcctcctcggctgaaggaaatgaaaagtcaagaaagcgcggcaggctcaaaattagttctgcgatgcgaaacgagctctgagtattcatcgcttagatttaaatggtttaaaaacggcaacgaattgaatcgcaagaataaacctcagaacatcaaaatccaaaaaaagcctggaaaaagtgagttgagaattaacaaagccagcctggcggactcgggagaatatatgtgtaaagttatttctaagctgggcaatgattccgcatccgcgaatattacaatagttgaaagcaatgccaccagtacctctacgaccggtacgtcacacctagtcaaatgcgcggagaaagaaaaaacgttttgcgtcaatggcggagaatgttttatggtgaaggatctttcaaatccgtccaggtacttatgcaaatgccctaacgagtttactggagatagatgtcaaaattatgttatggctagtttttatagtacatctactccgtttctcagcctgcctgag

SEQ ID NO: 17476 - DNA, 1266 bp, synthetic construct
  misc_feature 1..1266: note = source = /note="Description of Artificial Sequence: Synthetic coding sequence"
  source 1..1266: mol_type = other DNA
atgaggtggcgccgggcacctcggcgaagcggtcggccgggaccccgggcacaacggcctggatcggcagctcggagctccccgcctctgccgcttttgcccctgctgctgttgctgggaacggctgcacttgcaccaggtgccgccgcgggaaatgaggctgcaccggctggtgcatcggtgtgctactcctctccgccgtccgtgggaagcgtgcaggagctggcacaaagagccgcggtggtgatcgaaggaaaggtgcacccgcaacgcagacaacaaggggccctggaccggaaggctgcggcggcggccggcgaagctggggcttggggtggcgaccgtgaaccaccggccgccggcccgcgcgcgcttggacctccggcggaggaacctcttcttgccgcaaatggaactgtgccttcctggccgactgccccggtcccatccgcgggtgaacccggagaggaagctccctacctggttaaggtgcatcaggtgtgggccgtgaaagcaggcgggctgaagaaggacagtctgctgactgtgaggctgggcacctggggccacccagccttcccgtcctgcggaaggctgaaggaggactcgagatacatcttctttatggaacccgacgcaaactccacctcaagggcccctgccgctttccgcgcctcgttcccgcctctggaaaccggacgcaatctcaagaaggaagtgtcccgggtgctgtgcaagagatgtgcattgccacctcggttgaaagaaatgaagtctcaagaatcagccgcaggatcaaaactcgtgctccgttgcgagacttcatcggaatactcgtcgctcagattcaagtggttcaaaaacggaaatgagctcaatcggaagaataaaccgcagaatatcaagattcaaaagaagccgggtaagtcagaactgaggatcaacaaggcctccctcgccgactcgggtgagtacatgtgcaaggtcatctcgaagctgggaaatgacagcgcctcagctaacattacgattgttgagtccaacgccaccagcacttcgactacgggcacctcccacctcgtcaagtgcgcagagaaggaaaagaccttctgcgtgaatggaggagagtgcttcatggtcaaagatctgagcaatccatcgcgatacctctgtaaatgtccaaacgaattcactggcgacaggtgccagaattacgtgatggcctcgttttactcaactagcactccgtttctgtcgctgccagaa

SEQ ID NO: 17477 - DNA, 1266 bp, synthetic construct
  misc_feature 1..1266: note = source = /note="Description of Artificial Sequence: Synthetic coding sequence"
  source 1..1266: mol_type = other DNA
atgaggtggagaagagctccaaggaggtccgggcgacccgggcctcgggcccagcgtccgggctccgctgcccgatcatcacctcctctgcccttgcttcctctactcctattactaggcaccgcagccctggcccctggagccgccgccggaaacgaggcggcccccgccggagcttcggtttgttactcgtcacctccatccgtaggctctgtgcaggaactcgctcagcgcgctgctgtggtcatcgagggtaaagtccatccacaaagaaggcagcaaggggctctggatcgcaaggctgcagctgcagcaggtgaggccggcgcctggggaggcgaccgagagccaccagccgccggtcctagagctctaggacctcctgccgaggagcctctgctggccgcaaatggcacagtcccgtcgtggccgactgcccctgtcccaagcgctggggagcccggggaggaagcaccctacctggtgaaggtacaccaggtctgggctgtgaaggctggcggcttgaagaaagattcccttctgaccgttcgtctcggcacttggggacaccccgccttcccttcttgcggaaggttaaaagaggatagtcgctacatctttttcatggagccagatgctaattcaacgtcacgcgcacctgctgctttccgggcctcgttcccccctttggagaccggtcggaacctcaagaaggaagtgtctagagtgctctgcaagcgctgtgcactgccaccgaggctgaaggaaatgaagtcccaggagtcagccgccgggtctaagctggtgctgaggtgcgagacgtcaagcgagtattcatctcttaggtttaaatggtttaagaacggaaatgagctgaaccggaagaacaagccacaaaatattaagatacagaagaaaccagggaagtccgagcttagaatcaataaagctagcctcgccgacagcggcgagtatatgtgcaaagtgatatctaagctgggaaatgatagcgccagcgcgaacataaccatcgtggagagcaacgctacctccaccagcacgacaggaacgtcacatctggtgaaatgcgccgagaaggagaagactttctgtgtaaacgggggtgagtgcttcatggtgaaggacctgagtaaccctagtaggtatttgtgtaaatgcccaaatgagtttactggtgatcggtgtcagaattatgtcatggctagtttctactccacttctacgccttttctatccctacctgaa

SEQ ID NO: 17478 - DNA, 1266 bp, synthetic construct
  misc_feature 1..1266: note = source = /note="Description of Artificial Sequence: Synthetic coding sequence"
  source 1..1266: mol_type = other DNA
atgagatggaggcgcgcccctcgtagatcggggcgtcctggtcctagagcgcaaagacctggatccgcagctagatcgtcccctccacttccgctcctgcctcttctgctgcttctgggaaccgccgcattggcacctggagcggcagcaggcaatgaagccgcgccagcaggcgcctcagtgtgttactcctcccctccatcagtcggatcggtgcaggaattggcacagagagcagcagtggtcattgagggaaaggtgcatccacaacgcagacaacagggggcgctggatcgtaaggctgcagcggccgccggtgaggcaggtgcttggggcggggaccgcgaaccaccggcagcaggacctcgggcacttggcccacccgctgaggaaccccttctggccgcaaacggaaccgtgccttcctggccaactgcgccagtgcctagcgcgggtgaaccaggagaagaggcaccttaccttgtcaaagtgcatcaagtgtgggctgtgaaagccggtggcctcaaaaaggacagcctgctgaccgtgcgccttggaacttggggacatcctgcctttccaagctgcggtagactgaaggaggattcacgttacattttctttatggaacctgacgccaattcgacctcgcgcgctcctgctgcattcagagcatccttccctccccttgaaaccggtcgcaaccttaagaaggaggtttctcgggtgctttgtaaaagatgtgcactcccgccaagactcaaggagatgaagtcccaagagtccgcagccggcagcaagctggtgctccgttgtgaaacgagcagcgaatactccagcctgaggtttaagtggtttaagaacggaaatgaacttaatcgcaaaaacaaaccgcagaacattaagatccagaagaagccgggtaagtcagaactgcgcattaacaaggcgtcgctcgcagatagcggcgaatacatgtgtaaggtgatttcgaagctcggaaacgattccgcctcggccaatatcaccattgtcgaaagcaacgctaccagcacttcgactaccggaacttcccaccttgttaaatgcgcggaaaaggaaaagaccttttgcgtgaatggaggtgagtgctttatggtgaaggacctctcgaatccttcgcgatacctttgtaaatgtcctaatgagtttaccggtgacagatgtcaaaactacgtcatggcctccttttactccacttccaccccgttcctttcgctccctgaa

SEQ ID NO: 17479 - DNA, 1266 bp, synthetic construct
  misc_feature 1..1266: note = source = /note="Description of Artificial Sequence: Synthetic coding sequence"
  source 1..1266: mol_type = other DNA
atgcggtggagaagggctcctcgccgtagtggtcgtcccggtcctagggcccaaaggcctggatcagctgcgcgatctagtcctcctctccctctgctgccattactgctccttcttggcacggccgcgcttgcccctggtgcagctgcagggaacgaggcggctccagccggagcgtcggtgtgttactccagccccccttccgtagggtcagtgcaagagttagcccaacgagctgccgttgtgattgagggaaaggtccatccccagcgacgccagcaaggcgctcttgatcgcaaagctgcggcggcagctggggaggcaggagcctgggggggagatagagagccaccagctgcaggtccccgggctcttggtcccccagccgaggaacccttgttggccgctaacggcactgttccaagctggcccaccgcccccgttccgtctgccggggagcccggggaggaggctccatacctggtaaaagttcaccaagtatgggcagtaaaggctgggggcctcaagaaggacagcctcttgaccgtgcgccttggaacctggggtcatcccgctttcccatcatgcggccgacttaaggaagactctcggtacattttttttatggagcctgacgccaactcaacgagccgcgcccctgcggcattccgcgcttccttccctccccttgagaccggccgcaacttaaagaaggaggtaagtcgggttctctgtaagagatgtgcactaccgcctcgcctgaaagaaatgaagagccaggagtcggcggctgggtccaagctagtattgcggtgcgagacgtcatctgagtactccagtctacgtttcaagtggtttaaaaacgggaacgagctgaaccgcaagaacaaaccacaaaacataaagattcagaaaaagccaggtaagtctgaacttcgcattaataaagcatcgcttgcagacagcggtgagtatatgtgtaaggtgatctcaaagctgggtaacgatagcgcatcagcgaacatcactatcgtggaatccaatgccacatcgacctcgacgaccggtacttcgcaccttgttaaatgcgccgaaaaggagaagacattttgtgtgaacggaggtgagtgcttcatggtcaaggacctgtccaacccctcacgctacctgtgcaagtgtcccaacgagtttacaggcgataggtgtcagaactatgtcatggcttcattttacagcacgtcgactccgttcttgtcactccctgag

SEQ ID NO: 17480 - DNA, 1266 bp, synthetic construct
  misc_feature 1..1266: note = source = /note="Description of Artificial Sequence: Synthetic coding sequence"
  source 1..1266: mol_type = other DNA
atgcggtggagaagagctccgcgaaggtcgggacggcctgggccgcgggcccagcgtcccggtagcgcggcgaggagctcgccgccgcttcctcttctgcccctccttctcctgctgggcacggccgccctggcacccggagcggcggcaggaaatgaggcagcccccgccggcgcgagcgtgtgctactcgtctccaccgtccgtgggcagcgtgcaagagctcgctcaacgggccgccgtggtgatcgagggaaaggttcatccacaaaggcgccagcagggcgccctcgataggaaagctgcagcagcggcgggcgaagccggggcatggggaggagatcgagaaccgcccgccgcaggaccgcgggcgctgggtcctccagccgaggaacccttgctcgcagcgaacggaaccgtcccgtcctggcctactgcaccggtcccgagcgcaggtgagccaggcgaagaggcaccgtacctggtgaaggtccatcaggtctgggctgtcaaggctggaggcctcaagaaggattcgcttctgaccgtgagacttggaacctggggccacccagcattccccagctgcggacgcttgaaagaggactcgcgctacatctttttcatggaaccagacgccaattcaacctcgcgcgcaccggcggcattccgggcttccttcccgcccctggagactggacgaaacctgaaaaaggaggttagccgcgtgctgtgcaaaagatgcgcgctcccaccaagacttaaggaaatgaagtcgcaggagagcgcagccggcagcaaactcgtgctcaggtgtgaaaccagttccgagtacagctcgctgagattcaagtggttcaaaaacggtaacgagctgaacagaaagaacaagcctcagaatatcaagatccaaaagaaaccaggaaagtcggaactccgcatcaacaaagcatccctggctgactccggggaatacatgtgcaaggtcatcagcaagctcggtaatgattcggcctcagcgaacattactattgtcgagtcaaacgcaactagcacctcgaccactggaacctcgcacctcgtgaaatgcgccgagaaggaaaagaccttttgcgtgaatggaggggaatgctttatggtaaaggacctgtcgaatccgtcaaggtatctctgcaagtgtccgaacgaattcaccggagacagatgtcaaaactacgtgatggcatccttctactccacttcaactccgtttctcagtctcccggaa

SEQ ID NO: 17481 - DNA, 1266 bp, synthetic construct
  misc_feature 1..1266: note = source = /note="Description of Artificial Sequence: Synthetic coding sequence"
  source 1..1266: mol_type = other DNA
atgaggtggaggagggcccctcggcgatccgggcgccccggacctcgggcacagaggcccggatccgcagcacgctcttctcccccactgccccttctacctcttctgcttctgttgggcacagcagccctggcccccggcgccgctgctggtaacgaggccgccccagcaggcgcctccgtatgttattcttctccacccagcgttggttctgtccaggagctggcacagcgcgcagcagtcgtgattgagggaaaggtgcacccacaacgtagacaacagggggcacttgatcggaaagccgcagcggcggctggggaagccggcgcgtggggcggagacagagaacctcctgcagccgggccaagagccttaggcccacctgctgaggagccattactggcagcaaatggaacagtcccatcttggcctacggcaccggtgccaagtgcgggggaacctggcgaggaggctccctatctagtcaaagtccaccaggtgtgggcggtgaaggctggagggctaaagaaggattcactacttactgtgcggcttgggacctgggggcatcctgcttttcctagttgcggccgattgaaagaggattctaggtacatattcttcatggagccagacgctaattctactagcagagcacctgcggcctttcgcgcctcttttcctccactagaaacgggccgaaatttaaaaaaagaggtctcccgggtgttgtgcaaaagatgcgctcttcctcctcggcttaaggagatgaagtcccaggagtcagccgcaggaagtaaacttgttcttcgctgcgagacatccagcgagtacagctctctgcggtttaagtggttcaagaacggaaatgaactcaaccggaaaaacaagccccagaacatcaagattcagaaaaaaccaggtaagagcgagcttcgcattaacaaagccagccttgctgattctggggagtacatgtgtaaagtgataagcaaactcgggaacgactctgcatccgctaacattactatagtcgagagcaacgcaacatctacatcaacaacaggtacctcccacctggttaagtgcgctgaaaaagagaagactttttgcgttaacggcggagaatgttttatggtcaaggacctgagtaacccctcaaggtacctctgtaagtgccccaacgaatttactggcgaccggtgtcagaactatgttatggcatccttctattcaacttctactcctttcctgagcctgcctgaa

SEQ ID NO: 17482 - DNA, 1266 bp, synthetic construct
  misc_feature 1..1266: note = source = /note="Description of Artificial Sequence: Synthetic coding sequence"
  source 1..1266: mol_type = other DNA
atgcggtggagacgcgccccgcggaggagcggcaggcccggaccgcgcgcccaaagacctggaagcgcagctagatcgagcccgcctctccctctgctcccactcttgctgttgctgggtactgcggcacttgcaccgggcgcggccgctgggaatgaagccgccccagccggtgcctccgtgtgctattcgtcaccaccgtccgtcggatcagtgcaagagttggcgcaacgcgcggcagtggtgatcgagggaaaggtgcacccgcaacggcgccagcagggagctctcgaccgcaaagcagccgctgcggccggagaagcaggcgcctggggaggcgaccgcgaaccgccagctgccggtccacgggccttgggtcccccagcagaggaaccattgctggctgccaatggcaccgtcccaagctggccaactgcgccggtgccctccgcgggagagccgggagaagaggcaccgtaccttgtgaaggtgcatcaagtgtgggcagtgaaggccggtggactgaaaaaggactcactgctcaccgtgaggctgggtacttggggacacccggccttcccatcatgtggcaggttgaaagaggactcccggtacatcttcttcatggaaccggatgcaaactcaacttcaagagccccagccgctttccgcgcatcgttcccgccgcttgagacgggaagaaatctgaagaaggaagtgtctcgcgtgttgtgcaagagatgtgccttgccccccagacttaaggaaatgaagtcgcaggaaagcgcagcgggaagcaagctggtcctccgatgcgaaacctcctccgagtactcatcgctcagattcaagtggttcaaaaacggaaacgagttgaaccgcaaaaacaagcctcagaatatcaagatccagaagaaaccagggaagtccgaactccgcatcaacaaagcctcactggccgattccggagagtacatgtgcaaggtgatcagcaaattgggcaacgattctgcttcggcaaatatcaccatcgtggagagcaacgccacttccacctcgactactggaacttcgcatctcgtgaagtgcgcggaaaaagaaaagactttctgcgtgaacgggggagaatgcttcatggttaaggacctcagcaacccgtcccggtacctgtgcaaatgcccgaatgagttcaccggggacaggtgtcagaactacgtgatggcgtcattctacagcacgagcactccgtttctttctctgccggaa

SEQ ID NO: 17483 - DNA, 1266 bp, synthetic construct
  misc_feature 1..1266: note = source = /note="Description of Artificial Sequence: Synthetic coding sequence"
  source 1..1266: mol_type = other DNA
atgcgctggaggcgcgctccaagaagatctgggaggcctggacccagagctcaacgtcccggcagcgccgctaggagctcaccccccctgccactcctgccactactgctactcctgggaacagccgccctcgctcctggagctgcggccgggaatgaggcggccccagcgggcgcctctgtttgttactcatccccaccctcagtgggtagcgttcaggaattggcacagagagccgcggtcgtaattgaaggcaaggttcatccgcagcgcagacagcagggcgccctggacaggaaagccgccgccgcggccggcgaggccggagcttggggcggtgaccgagagccaccggctgccgggcctcgggccttggggcctccagccgaggaacccctgctagctgccaacggcacagtgccttcctggccaaccgcccctgtccccagcgctggagagcccggggaagaagctccctatctcgtcaaggtccatcaggtgtgggccgtgaaagccggaggtctgaaaaaggactccttgttaacggttcgcctgggaacatgggggcatccggcttttccctcctgtggccgattaaaagaagactcaaggtacattttctttatggagcccgatgctaattctacgagtcgggctcccgcggcgttccgagcgagtttcccacctctggagaccggccgtaacctgaagaaagaggtctctcgggttctgtgtaagcgctgcgccctgccacccaggctgaaagagatgaagtcccaagagtccgctgctggctcaaaactggtgctgcgctgcgaaacatcctccgaatacagctcgctgcgtttcaagtggtttaaaaatgggaatgagctcaatcggaagaacaagcctcaaaacatcaagatccagaagaaacccggcaagagcgaactccgcatcaataaagcatctctggctgacagcggggagtacatgtgcaaagtcatttcaaagctgggcaacgactccgcgtcagccaacatcactatagtggagtctaatgcaacctccactagtactactggcacaagccacctggtgaagtgcgccgaaaaggaaaaaactttctgtgttaacggaggggagtgcttcatggtcaaggatctgagcaacccatctcggtacttgtgcaagtgccctaacgagttcactggcgatcgatgccagaattacgtgatggcaagcttttactctacttccaccccctttctgtctttgccagag

SEQ ID NO: 17484 - DNA, 1266 bp, synthetic construct
  misc_feature 1..1266: note = source = /note="Description of Artificial Sequence: Synthetic coding sequence"
  source 1..1266: mol_type = other DNA
atgaggtggcgccgggcaccaagaaggagcggccgccccggccctcgcgcccagaggccgggatcggcagcccggtcaagtcccccactgcccctactgcctcttctattgttgctcgggacggctgctttggccccaggcgccgctgccgggaatgaagccgccccagcgggcgcgtcggtctgctacagcagccctcccagtgtagggtccgtccaggaactggcgcagcgcgccgccgtcgtaatcgagggaaaggttcacccacaacggcgacagcaaggtgctctggatcgcaaggcagctgctgccgctggagaagctggggcgtggggtggagatagggaaccacccgcagcaggccctcgggctctggggcctcctgctgaagaacccctccttgccgcgaatggcaccgtcccgtcttggcctactgctccagtcccctccgccggtgagccaggagaggaagccccatatctggtgaaggtgcaccaggtctgggcagttaaggctggcggtctgaagaaagattcacttctgacggtgcggctgggtacctggggccacccggccttcccttcctgtggccgcctcaaggaggactcacggtatattttttttatggaacctgatgccaattcgacctcccgtgcaccggccgcgtttagggcctcctttccacctctggagactggcagaaatctcaagaaagaggtgagtcgcgtgctatgcaaacgctgtgcactgccgccgagactgaaggagatgaaaagtcaagaatccgcggccggctctaaacttgtcctgcgctgcgagacttcttctgaatattcgagtttgcgattcaagtggttcaagaacggaaatgagctcaaccgcaaaaacaaaccccagaatataaaaattcagaaaaaacccggaaaatcagagctgagaatcaataaggcaagcctggccgatagcggcgagtatatgtgcaaagttatatctaagttaggaaatgatagcgctagtgctaacattacgattgtggagtccaatgccacatccacttcaacgacaggaacttcccatctcgtgaaatgtgcagagaaggaaaaaacgttttgtgtcaatgggggggaatgtttcatggtgaaggatctctccaatccatctagatatctgtgcaagtgccctaacgagttcaccggcgatcggtgccaaaattatgtgatggcaagcttctattccacttccacgccttttctttccctgcctgag

SEQ ID NO: 17485 - DNA, 1266 bp, synthetic construct
  misc_feature 1..1266: note = source = /note="Description of Artificial Sequence: Synthetic coding sequence"
  source 1..1266: mol_type = other DNA
atgcggtggagacgggcgcccaggcgctcgggtcggccggggccgcgggcacaacgcccgggctcggctgctcgatccagcccgccattgcctctgcttccactgctgctgcttttggggactgcggcgctcgccccgggcgcagctgctggaaatgaagcggccccagccggtgcgtccgtgtgctactcctcgccgccgtccgtgggttccgtgcaagagctcgcccaaagggcggctgtggtgatcgagggaaaggtgcacccgcagcgcaggcagcagggagccctcgataggaaagcggccgcagccgcgggagaggctggagcctggggcggagacagagaaccgcctgcggccggaccgagagcactgggcccaccagccgaggaaccgctgctggccgccaacggaacggtcccatcgtggccaactgcccccgttccgtcggcgggagaaccaggagaagaagccccgtacctggttaaggtgcaccaagtgtgggctgtgaaagcaggaggtctgaagaaagattcactccttaccgtgcgcctgggaacctggggacatccagcgttcccgtcgtgcggcaggctgaaggaggacagcaggtacattttctttatggaaccggatgccaacagcacctcacgggcccctgctgctttccgcgcctcctttccgcccctcgagactggtagaaacctcaagaaggaagtgtcaagagtgctttgcaagcgctgcgctctccctccacgcttgaaggagatgaagagccaagagtcagctgcaggctcaaagctggtgctccggtgcgaaacctcgagcgagtacagttccctccgctttaagtggttcaagaatggaaatgagctgaaccgcaagaataaaccgcagaatatcaagattcagaaaaaaccgggcaaatccgaactgcggatcaacaaggccagcctggccgactcgggcgaatacatgtgcaaagtgatttcgaagctggggaacgactccgcgagcgccaatatcactatcgtcgaatctaacgccacctccacctctaccactggcacctcccacctcgtcaagtgtgcggagaaggaaaagacgttctgtgtcaacggaggcgagtgtttcatggtgaaggacctctcgaatccaagcaggtacctgtgcaagtgtcctaacgaattcaccggagacagatgtcaaaactacgtcatggcctccttctactcaacttcaactcctttcctgagtctgcccgag

SEQ ID NO: 17486 - DNA, 1266 bp, synthetic construct
  misc_feature 1..1266: note = source = /note="Description of Artificial Sequence: Synthetic coding sequence"
  source 1..1266: mol_type = other DNA
atgcgatggcgccgagccccgagaaggtctgggaggcccggtccacgggctcagaggcccggttccgcggcccgatccagtcccccgttacctcttttgcccctcttgcttctgctcggaactgcggccctggctcctggcgccgctgccggaaacgaggcagctcctgccggggctagtgtgtgctatagcagtccaccttcggtaggctccgtacaagaactcgcccagcgcgctgctgtcgtcattgaggggaaggtacacccacagcgccggcagcaaggcgctttagataggaaggccgccgcagccgcgggagaagcaggcgcatggggcggggatagggaaccacccgcggccggccctcgtgcactgggccccccagcggaggagccacttctggcagccaacgggaccgtgcctagttggcctactgcacccgtccctagcgccggagagcctggagaggaggcaccttatttagttaaagtgcaccaggtgtgggcagtgaaggctgggggcctgaaaaaagacagcctcctgacagtacggctaggcacctggggacaccccgcatttccatcttgtggcaggctgaaagaggactcccgctacatattctttatggaaccggatgccaattctacctcacgggctcctgccgcctttagagcaagctttcctcctcttgagactgggcggaacctgaagaaagaagtttctcgggtactgtgcaaacgttgcgccctgccccctcggctcaaggaaatgaaaagccaggaatcagctgctggaagtaagcttgtgctccgatgcgaaaccagcagtgagtactcttcactgcggtttaaatggttcaaaaatggcaacgagctgaacagaaagaataagcctcagaacatcaagattcaaaaaaaacccggaaaatcagaattgcgcatcaacaaggcaagcctggccgactcgggtgaatatatgtgcaaagtcataagcaagctcggaaacgactccgcctccgccaacatcactattgttgagtctaacgcgacctccacctcaacaacaggaacgagccatctggtgaagtgcgccgagaaagaaaaaactttctgcgtgaacgggggggaatgttttatggttaaggatctgtctaatcccagtcgctatctgtgtaagtgccctaacgaatttacaggggaccgctgtcagaactatgtgatggctagcttctactcgacatccacacctttcctaagcctgccagaa

SEQ ID NO: 17487 - DNA, 1266 bp, synthetic construct
  misc_feature 1..1266: note = source = /note="Description of Artificial Sequence: Synthetic coding sequence"
  source 1..1266: mol_type = other DNA
atgagatggcgaagggcgccgcgccggtccggaaggcctggtccaagagcacagaggcccggtagcgccgcaagatcgtcaccccctctgcctcttttgccccttcttcttttgctgggaaccgcagctctggcgcctggtgccgcggccggtaacgaagctgcacctgcgggagcatcagtctgttactcgtccccacccagcgtgggatccgtgcaggaactcgcacagagggccgcggtggttatcgaaggaaaggtccatcctcaaagacgccaacaaggagcacttgatagaaaagccgcggcagcagccggggaggctggagcatggggaggagatcgtgaaccgccggcagcaggacctagagcacttggtcctcccgccgaggagcctctcctcgctgcaaacgggaccgtgcctagctggcccaccgctcccgtgccaagcgcaggagaacctggggaagaggcaccctaccttgtgaaagtacaccaggtttgggcggtcaaggctggggggctgaagaaggactccctcctgactgtgcgccttggaacctgggggcacccagcattcccatcgtgtgggaggctcaaggaagattcgcggtacattttcttcatggaacctgatgcaaactccacttcgcgtgcacccgcagcatttagggcatccttccctcctctggaaaccggaagaaacctgaagaaggaggtcagcagagtgctctgtaaaagatgtgcgcttccaccaagacttaaagagatgaagtcccaagaatccgcggccggatccaagctggtcctgagatgtgaaacttcttcagagtactcatcactgcggttcaaatggtttaagaacggcaacgaactgaacagaaaaaacaaaccacaaaacattaagattcagaagaagccaggaaagtccgaacttaggataaacaaggcatcacttgcagatagcggagagtacatgtgcaaggtgatatccaaactgggaaacgactccgcatcggcaaatatcaccatcgtggaaagcaacgcgacttcaacgtccactaccggcacgtcacatctcgtgaagtgcgcagaaaaggaaaagactttttgcgtcaatggtggagagtgttttatggtgaaggacctgtccaacccttctcgctacctgtgcaagtgtcctaacgaattcacgggggaccgatgtcaaaactacgtgatggcaagtttctatagcacttcaacccctttcctctcgttgcccgaa

SEQ ID NO: 17488 - DNA, 1266 bp, synthetic construct
  misc_feature 1..1266: note = source = /note="Description of Artificial Sequence: Synthetic coding sequence"
  source 1..1266: mol_type = other DNA
atgcgctggcggcgcgcacctcggaggtcgggcagacccggccccagagcacagcggccgggatcggccgcgcgctcttccccgccgctgccgctgcttccgctgctcctgcttttggggaccgccgcgctggcccctggtgccgctgcaggaaacgaagccgcaccggctggcgcgtcagtgtgctactccagcccgccgtcagtcggttcagtacaagaacttgctcaacgggcagccgttgtgatcgaaggcaaggtgcacccgcagagacgtcagcagggagccctggatcggaaggccgcggccgccgcgggtgaggcgggggcctggggaggcgacagagagccaccggcggccgggcctcgcgctttgggtcccccagcagaggaaccgctcctggcggcgaacggaacggtcccgtcttggccaaccgctccggtgccctcggctggggagcctggagaggaagccccctacctggtgaaagtgcaccaagtctgggctgtgaaggctggaggcctcaaaaaggactcactcctgaccgtgaggttgggcacttggggacatccggcgtttccttcctgtggccggctgaaagaggactcaaggtacatattctttatggagccggacgctaacagcacttcgagggccccagccgccttccgtgcatccttcccgccgcttgaaaccggacggaacctgaaaaaggaagtgagtcgggtgctgtgtaagcgctgtgcacttccacctcgcctcaaggagatgaagtcgcaggaaagcgcagctgggagcaaactggtgttgcgatgcgaaacctccagcgaatactcatccctgaggttcaagtggttcaaaaacggaaatgagctcaacagaaaaaacaaacctcagaatatcaagatccaaaagaagccaggaaagtcggagctgcgaattaacaaggcgtcgctggcagactcaggcgagtacatgtgtaaggtgatctccaagctcggaaatgactccgcgtcggcaaatatcaccatcgtggaatcgaatgcaacctccacttcgaccactggcactagccatctggtgaagtgcgcggagaaagaaaagacgttctgcgtgaacggaggagaatgcttcatggttaaagacctttcgaacccgtcgcgctacctctgcaaatgcccaaacgaatttacgggggaccgctgccagaattatgtgatggcgtccttctactccacgtccacccctttcctgtcactgcctgaa

SEQ ID NO: 17489 - DNA, 1266 bp, synthetic construct
  misc_feature 1..1266: note = source = /note="Description of Artificial Sequence: Synthetic coding sequence"
  source 1..1266: mol_type = other DNA
atgagatggagaagagcaccaagaagatcaggaagaccaggtcctagagcacaaagaccaggaagtgctgctaggtcttcaccaccacttccattacttcctttacttcttttacttggaacagcagcattagcaccaggtgctgctgctggtaacgaagccgcaccagccggagcaagtgtttgttattcatctcctccttctgttggatcagttcaagaattagctcaaagggcagctgttgttatagaaggaaaagttcatccacaaagaagacaacaaggtgctcttgatcgaaaggcagcagcagccgctggagaagcaggtgcttggggaggagatagagaacctccagctgcagggccaagagcattaggaccacctgctgaagagcctttattagcagctaatggaactgttccatcatggccaacagctccagttccttcagctggtgagccaggagaagaagcaccatatcttgtaaaagttcatcaagtttgggccgttaaagcaggaggtcttaaaaaagattctttacttacagtaagattaggaacttggggacacccagcattcccatcatgtggtagactcaaagaagatagtaggtatattttttttatggaacctgatgctaattctacatctagggcaccagctgcatttagagcttcatttccaccattagaaactggaagaaacttaaaaaaagaagtttcaagagtgttatgtaagcgatgtgcacttccaccaagacttaaggaaatgaaaagtcaagaatcagctgctggatcaaaattagtattgagatgtgaaacttcgtctgaatactcctcattaagatttaaatggtttaaaaatggaaatgaattgaacagaaagaacaaaccacaaaacattaaaattcaaaaaaaaccaggaaaaagtgaactaagaattaataaagcttctttagcagattccggagagtatatgtgtaaagtaatttctaaacttggaaatgattcagcatcagctaatattacaattgtagaaagtaatgcaacttctacatctacaacagggacttcacatctagttaaatgtgcagaaaaagaaaaaacattttgtgtaaatggtggagaatgttttatggtaaaagatttatctaatccttcacgttatctttgcaaatgtccaaatgaatttactggagatagatgtcaaaattatgttatggcttcattttattcaactagtacaccatttttatcacttccagaa

SEQ ID NO: 17490 - DNA, 1266 bp, synthetic construct
  misc_feature 1..1266: note = source = /note="Description of Artificial Sequence: Synthetic coding sequence"
  source 1..1266: mol_type = other DNA
atgcggtggcgccgggccccacggcggtcgggtcgcccgggaccgagagcacagaggccgggctccgccgctcgctcctcgccgcctcttccactccttcctctcctgctgctgctgggcactgcggccctggcacccggcgcggcggccgggaatgaggcggcccctgcgggagcctcagtgtgctactcgtcaccgccatccgtggggagcgtgcaggaactggcccagagagcggccgtggtgattgaggggaaggtgcacccacaacgcagacagcagggagcattggatcgaaaggccgcagccgctgctggagaagccggagcatggggtggagacagagaaccccccgcagctgggccccgggccctcggaccaccggccgaagagccgttgctggccgcgaacggaactgtgccgtcatggccgacggcgcccgtcccgtccgccggagaaccaggtgaagaggccccgtacctcgtcaaagtgcatcaggtgtgggccgtgaaggcgggagggctgaagaaggattcgctcctgaccgttaggttgggcacctggggacatccagctttcccgtcctgcggacggttgaaagaggattcgcggtatatcttttttatggagccggacgctaactcgaccagcagagcccctgccgcgttccgcgctagcttcccacctctggagactggacgcaatcttaagaaggaggtcagccgcgtgctgtgcaagaggtgtgcactgcctccgcggcttaaggagatgaagtctcaagaatcagccgcaggaagcaaactggtcctgagatgcgaaacctcgtccgaatactcgtcgctgcgtttcaaatggttcaaaaacggcaacgagctgaaccgcaagaacaagccgcaaaacattaaaatccaaaagaaacctggaaagagcgagctccgcatcaataaggcctcactggctgacagcggtgaatacatgtgtaaagtgatctccaaactcggcaacgactcggcatccgcaaacatcaccatcgtggagagcaatgcgacttccactagcactaccggcacgtcacacctggttaagtgcgcggaaaaggaaaagaccttctgcgtcaacggaggcgaatgcttcatggtcaaggatctgagtaatccatccaggtacctctgtaagtgcccgaacgaattcaccggcgaccgctgccagaattacgtgatggcttcattctactctacctcgactccgtttctctccctcccagaa

SEQ ID NO: 17491 - DNA, 1266 bp, synthetic construct
  misc_feature 1..1266: note = source = /note="Description of Artificial Sequence: Synthetic coding sequence"
  source 1..1266: mol_type = other DNA
atgcgctggcgtcgagctccaaggcgatcaggccgaccaggtccaagagcccagcgcccgggatctgcagcccgatctagcccccccctgcctttattaccactcctgctcctgctcgggacagctgctctggctcctggagccgcagctggcaatgaagctgccccagctggcgccagtgtctgttatagctccccaccctccgtcggatctgtgcaggagctggcccagagagccgctgtggttatcgagggtaaggtccatcctcagcgtcggcagcagggcgctctggatagaaaggcagcagctgccgctggagaggcaggcgcttggggcggggatcgcgaaccacctgctgccggccccagagcccttgggccacctgccgaggagccactgctggccgcaaacggcacagtccctagttggcccactgcccctgtcccatccgctggagagccaggcgaggaggccccatacctggtgaaggttcaccaggtatgggcagtgaaggctggaggactaaagaaggatagtctgcttaccgtgcgcctcgggacctggggacaccctgcctttccgtcatgcgggcgtctgaaggaagacagtcgctacatcttcttcatggaaccagatgccaactcaacatccagggccccagctgctttcagggctagttttccaccgctggagactggtcggaaccttaaaaaagaagttagtcgtgtgctgtgtaaaaggtgcgccctgcctccccgactgaaggagatgaaatcccaggagtccgccgccggtagcaagctggtgttacggtgcgagacatcatccgagtattctagtctgcgcttcaagtggttcaagaacggcaacgagctgaatcggaagaataagccacaaaacattaagatacagaagaagccaggcaagtcagaactccgtattaataaagcatccctggccgattctggcgaatacatgtgtaaggtcataagcaagctgggtaatgattcagcttccgcaaacataaccatcgtagagtctaatgcaaccagcacttctacaaccggcacctctcatctggtgaagtgtgcagagaaagaaaaaacattctgtgtgaatggcggcgagtgcttcatggtgaaagatctgagcaatcctagccggtacctgtgtaagtgccccaacgaattcactggcgaccggtgtcagaattatgtgatggccagtttctactctacctcaaccccatttctgagcctgcctgag

SEQ ID NO: 17492 - DNA, 1266 bp, synthetic construct
  misc_feature 1..1266: note = source = /note="Description of Artificial Sequence: Synthetic coding sequence"
  source 1..1266: mol_type = other DNA
atgagatggcgccgcgctcctagaaggtccgggaggcctggtccacgggcgcagcggccaggtagcgccgcccggtcctcacccccattacccctactgccgttgctgcttctgttgggaacagcagccctggcaccgggcgccgcggcaggaaacgaggcagcccctgccggagcttctgtctgttacagctctcccccttcagtcgggtcagtgcaggaactggcccagcgcgcagctgtcgtaattgaagggaaggttcatccccagcgacgacagcaaggcgctctggatcggaaggccgcagcagctgcgggggaagctggagcctgggggggcgatcgcgagccaccagccgcgggacctcgtgctctcggacctcccgccgaagaaccactgctcgcggccaacggaacagtaccttcctggccaacagcccccgtgccgtcggctggcgagcccggagaggaggccccataccttgttaaggttcaccaagtttgggctgttaaagctggtggcctcaagaaggattccctgctgacagtccgcttagggacttggggacatcctgctttcccttcttgtggccgacttaaagaggactcgcggtatattttctttatggagcctgacgctaactccacaagtcgtgcccctgccgcatttcgggcctcatttcccccgctcgaaacaggaagaaatcttaaaaaagaggtgtctcgcgtcctttgtaagcgctgcgcccttcctccccgtcttaaagagatgaaatctcaggagtctgccgcggggtcgaaactggtgctccgatgtgagacatcttccgagtattcatcactgaggtttaagtggttcaagaacgggaatgagcttaacagaaagaataagccacagaacattaaaatacagaagaagcctggtaaaagcgaattgcggataaacaaagcaagcctcgccgattcaggagagtatatgtgcaaggtgatttccaagctgggaaatgatagtgcttctgcgaatatcaccatcgttgagtccaacgctacctccaccagtacaaccgggacgtcgcatttggttaagtgtgccgagaaagagaagaccttttgtgtcaatggaggggaatgtttcatggttaaggatttaagcaaccccagcaggtacctgtgcaagtgtccgaatgagtttacaggtgatcggtgccagaactacgtgatggcttctttctactcaacgagtacaccttttctgtctctccctgag

SEQ ID NO: 17493 - DNA, 1266 bp, synthetic construct
  misc_feature 1..1266: note = source = /note="Description of Artificial Sequence: Synthetic coding sequence"
  source 1..1266: mol_type = other DNA
atgcgatggagacgcgcacctcgtagatcagggcgacctggtcctcgggcccagcgtcccggtagcgccgcaagaagctccccaccccttccactcctgcctctgctcctgctcctgggtactgctgcactggcgcccggagcagcggcaggtaacgaggcagcacccgcgggggcctctgtgtgttactcctcacccccctctgtgggatcggtgcaagaacttgcgcagcgcgcggcggtggtgattgaggggaaggtgcatccacaaagaaggcagcagggtgctcttgatagaaaggcggcagccgcggcgggagaggccggtgcatggggcggcgacagggagcctccggcagcgggaccacgcgctctcggccctccagctgaagaacctctcctggcagcaaacggaaccgtgccgtcatggccaactgcacctgtccctagcgcaggcgaaccaggcgaagaggctccttaccttgtgaaagtccaccaggtttgggcagtcaaggcgggaggtcttaagaaagactctcttctgaccgtgcgcctgggaacctggggtcatccagcgtttccgagttgtggacggttgaaggaagattcaaggtacattttctttatggagcctgatgccaactctacctccagggcccctgcagcgttcagagcgtcgtttccacccctggagacgggtcggaatctcaagaaggaagtatcccgtgtactctgtaaacgttgtgcactgccgcctagactgaaagaaatgaagtcccaagagtccgcagccggatcgaaacttgtgctgcggtgtgaaacgtcctcagaatactcatccctgagattcaagtggttcaaaaatggaaatgagttgaaccgtaagaacaagccacaaaacataaagattcaaaagaagcctggcaagtcggaacttagaataaacaaggcctcccttgcggattcgggagaatacatgtgtaaagtcatttccaagctcgggaatgactcggcaagcgcaaacattactatcgtcgaatccaatgcaacgtccacctcgactaccggtacttcacacttggtcaagtgcgccgaaaaggaaaaaactttttgcgtgaatggaggcgaatgctttatggtcaaggatctgtcaaaccctagccgctacctgtgtaaatgtcctaatgagtttaccggtgaccgctgccaaaactatgtgatggcatcattctactcgacgtccaccccctttctctcccttccggaa

SEQ ID NO: 17494 - DNA, 1266 bp, synthetic construct
  misc_feature 1..1266: note = source = /note="Description of Artificial Sequence: Synthetic coding sequence"
  source 1..1266: mol_type = other DNA
atgcgctggcggcgagctcctaggagaagcggccggccaggacctagggcacaacggcctggaagcgcagcaagatcgtcgccacctctgcctcttctcccactcctgcttctgctcgggactgcagccctggcacctggcgccgcagcaggcaatgaagcagctccagcaggagcatcggtgtgctactcgtcgcccccatcggtggggtccgtgcaggagctggcccaacgggcagcagtcgtgatagaaggcaaggtgcatcctcagagacgacagcagggagcacttgatagaaaggccgccgcagccgcgggtgaagccggggcatggggaggcgatcgtgaaccaccggccgcagggccgagagcactgggaccgcctgcagaggaaccgctcctggcagcgaatggaaccgtgccgtcctggccaaccgcccccgtgccatcagcgggggaaccaggagaagaggccccttacttggtgaaagtccatcaggtgtgggcagtgaaggcaggtggcctcaagaaggactcgctgcttactgtgagactgggtacttggggtcatccagcatttcctagctgcgggagacttaaggaagattccaggtacatctttttcatggaaccagatgcaaactcaactagcagggcccccgcagcatttagggcgtcctttcccccacttgaaaccggacgaaatctgaagaaggaggtgtcgcgtgtgctgtgcaagagatgtgcccttcctccgcgcctgaaggaaatgaaatcacaagaatcggcagctggttccaagttggtcctgcgctgcgagacttcatcggaatactcgtccctgcgtttcaaatggtttaagaacggcaacgaactgaatcggaagaacaaacctcaaaacatcaaaatacagaaaaaacccggcaagtcggagctgcgcatcaacaaggcatcgctggcggattcgggtgagtacatgtgtaaagtcatctcgaagctcggaaatgactcagcatcggcaaacatcaccattgttgaatccaacgcaacttccacctcgaccaccggcactagccacctcgtgaagtgtgcagaaaaggaaaagaccttttgtgtcaatggaggtgaatgttttatggtgaaggatctcagcaatccgtcgagatacctgtgtaaatgtccaaacgaatttactggagatcgttgtcaaaactacgtgatggcgtccttttactctacctcgacgccttttctttcgctgccagaa

SEQ ID NO: 17495 - DNA, 1266 bp, synthetic construct
  misc_feature 1..1266: note = source = /note="Description of Artificial Sequence: Synthetic coding sequence"
  source 1..1266: mol_type = other DNA
atgaggtggcgcagagcaccacgacgttccggtcgacccggaccacgggcacaacgccccggatcagccgcgagatccagtcctccactgcccctcttgcccctcctccttcttctgggaactgcagcgcttgcacctggtgcagcagcaggaaacgaggcagccccggctggtgcgagcgtctgttactcaagccccccatccgtcggatcagtccaagaactcgcacagagagcggccgtcgtgattgaaggaaaggtccatccacaacgcagacaacaaggagcccttgatagaaaagccgcggccgcagctggagaagcaggcgcttggggaggtgaccgagaacccccggcagcgggacctcgcgcacttggacctcctgctgaggagccactgctggcagcaaacgggaccgtgccatcatggcctactgctcccgtgcctagcgcaggcgaaccaggagaggaggcaccttacttggtgaaagtgcatcaggtctgggctgttaaggcaggtggcctgaaaaaggactcgctgctgactgtgcgcctcggcacttggggtcatcccgcatttccctcatgtgggcgtctcaaggaggattcgaggtacatattctttatggaacctgatgctaactccacctcccgtgcaccggcagcatttagggcatcctttccaccactcgaaactggaagaaacctcaagaaagaggtgtccagggtgctttgcaagcgatgtgctctcccaccacggctgaaggaaatgaaatcgcaagagtcggcagcaggaagcaaactggtgctccgctgtgaaacttcgtcagaatactcctcgctgagattcaagtggtttaagaatggtaacgagctgaataggaaaaacaaacctcagaatatcaagattcagaaaaaaccaggaaagtcagagttgaggatcaacaaggcatcgctcgcagatagcggggagtacatgtgcaaagtcatttccaaacttgggaatgactctgcgtccgcgaacattactattgtggaatcaaatgcaacctccacctcgaccaccggtacctcgcatcttgtgaagtgtgcagaaaaagaaaagacgttttgcgtcaacggaggtgaatgttttatggtcaaagatttgtcgaacccatctcgctatttgtgcaaatgtccaaacgagttcaccggagatcgatgtcagaattacgtgatggcgtccttctactcgacttcgaccccatttctttccctccctgaa

SEQ ID NO: 17496 - DNA, 1266 bp, synthetic construct
  misc_feature 1..1266: note = source = /note="Description of Artificial Sequence: Synthetic coding sequence"
  source 1..1266: mol_type = other DNA
atgaggtggcgtagagcccctcgacgatctggccgacccggccctagagcgcagcgccctggatccgctgcccggagctcacctccactgccgttgctgcccctcctgctgctacttggcaccgctgccctcgctccaggggccgctgcaggcaacgaggccgcacccgctggggcatctgtgtgctatagctctcctccgagtgttggtagcgtgcaggagttggctcagcgtgccgccgtcgtcatagaagggaaagtgcatccccagcgtcgacagcagggcgcgctagacaggaaagccgcggccgcggcaggggaggccggtgcatggggcggagaccgcgagcctccagcagcaggaccacgggctctcggtcctcctgcagaagaaccgctgctcgcggccaacggaaccgtgccaagttggcccactgcacccgtccccagtgcaggcgagccgggagaagaagctccctatctcgtgaaagtgcaccaggtgtgggctgttaaggcagggggactaaagaaggatagtttgctgactgtccgcctagggacctgggggcacccggcattcccttcgtgcgggagactaaaggaggacagccggtatatttttttcatggagcccgacgctaactctacaagccgcgcccctgcagctttcagggctagcttccctccacttgaaaccgggagaaacctgaaaaaagaggtgtcgagagtgctctgcaagagatgtgcactgccaccccgcctgaaagagatgaagtcccaggagtcagccgccggctccaaactggtccttagatgtgaaaccagctcagaatatagttctctgcggtttaaatggtttaaaaatggcaatgagctgaaccgcaaaaataaacctcagaacattaagatccagaaaaaacccggaaagagtgagctgcgaatcaacaaagcatccctggccgatagtggggagtacatgtgtaaagtgatatctaagctggggaacgatagcgcatctgccaacatcacaatcgttgaatccaacgccacgtccacttccaccaccggcacaagtcacctcgtgaaatgtgcggagaaagaaaaaaccttttgtgtaaatgggggcgagtgctttatggtgaaagacctgtcgaaccctagccggtatttgtgcaagtgccctaacgagtttacaggagatagatgccagaactatgtgatggcctccttttacagcacttcaacgccattcctatcacttcccgag

SEQ ID NO: 17497 - DNA, 1266 bp, synthetic construct
  misc_feature 1..1266: note = source = /note="Description of Artificial Sequence: Synthetic coding sequence"
  source 1..1266: mol_type = other DNA
atgcgatggcgacgagcgccgcgacgttcgggtcgaccgggtccgcgtgcgcaacgtccgggttcggcggcgcgttcgtcgccgccgttaccgttattaccgttattattattattaggtacggcggcgttagcgccgggtgcggcggcgggtaatgaagcggcgccggcgggtgcgtcggtatgttattcgtcgccgccgtcggttggttcggttcaagaattagcgcaacgtgcggcggtagttatagaaggtaaagtacatccgcaacgacgacaacaaggtgcgttagatcgtaaagcggcggcggcggcgggtgaagcgggtgcgtggggtggtgatcgtgaaccgccggcggcgggtccgcgtgcgttaggtccgccggcggaagaaccgctactagcggcgaatggtacggtaccgtcgtggccgacggcgccggtaccgtcggcgggtgaaccgggtgaagaagcgccgtatctagtaaaagttcatcaagtatgggcggtaaaagcgggtggtttaaaaaaagattcgttattaacggtacgattaggtacgtggggtcatccggcgtttccgtcgtgtggtcgtttaaaagaagattcgcgttatatattttttatggaaccggatgcgaattcgacgtcgcgtgcgccggcggcgtttcgtgcgtcgtttccgccgttagaaacgggtcgaaatctaaaaaaagaagtatcgcgtgtactatgtaaacgttgtgcgttaccgccgcgtttaaaagaaatgaaatcgcaagaatcggcggcgggttcgaaactagttctacgttgtgaaacgtcgtcggaatattcgtcgttacgatttaaatggtttaaaaatggtaatgaactaaatcgaaaaaataaaccgcaaaatataaaaatacaaaaaaaaccgggtaaatcggaattacgaataaataaagcgtcgctagcggattcgggtgaatatatgtgtaaagttatatcgaaactaggtaatgattcggcgtcggcgaatataacgatagtagaatcgaatgcgacgtcgacgtcgacgacgggtacgtcgcatttagtaaaatgtgcggaaaaagaaaaaacgttttgtgtaaatggtggtgaatgttttatggttaaagatttatcgaatccgtcgcgatatctatgtaaatgtccgaatgaatttacgggtgatcgttgtcaaaattatgtaatggcgtcgttttattcgacgtcgacgccgtttttatcgctaccggaa

SEQ ID NO: 17498 - DNA, 1266 bp, synthetic construct
  misc_feature 1..1266: note = source = /note="Description of Artificial Sequence: Synthetic coding sequence"
  source 1..1266: mol_type = other DNA
atgagatggcgtcgtgcgccaaggcgctcaggacgacctggacctagagcgcaacggcccggctcggccgccagatcaagcccgcctcttcctctgctgcccctgctccttctcctgggcaccgctgccctggcacctggagctgcagcaggcaacgaagcagcccctgcgggtgcaagcgtgtgttactcttccccaccttcggtcggtagcgtgcaggagcttgcacaacgtgcagcagtcgtgattgaaggcaaagtccatccacagcgtagacaacaaggggctcttgaccgcaaagcagcagccgcagctggcgaagcaggggcatggggaggtgaccgagagccgccagcggcaggaccgcgcgcgctcggaccacctgcagaagagcctctgctcgccgcgaatggaactgtgccttcatggcctactgcacccgtccctagcgcgggggaacccggagaagaggcaccctacctggtcaaagttcatcaagtgtgggctgtgaaagcagggggactgaaaaaggattcgttgctgactgtgcgcttgggcacgtggggacacccagcttttcccagctgtggacggctgaaggaagattcgcgctacatattctttatggaacccgatgccaactccacttccagggcaccagcagcttttcgtgcatcgtttccgcccctggagacgggcaggaacctgaagaaagaagtctccagagtcctgtgcaagaggtgtgcactgccgccaaggctgaaggaaatgaagtctcaggaatccgcagctgggtccaaactggtgcttcgatgtgagactagcagcgaatactcgtcacttagattcaaatggttcaaaaatggtaacgagcttaataggaaaaacaaaccccaaaacattaagatccagaagaaaccgggtaagtcggaactccgcataaacaaggcatccttggcagactccggtgaatacatgtgtaaggtcattagcaagctggggaatgattcagcgtccgcaaacatcaccatcgtggagtccaatgcaacctcgacttccactaccggtacgtcgcaccttgtgaagtgcgcagaaaaggaaaaaaccttttgcgtgaacggtggggaatgttttatggtgaaggacctgagcaatccctcccgatacctctgtaagtgccctaatgaattcactggggatcggtgtcaaaactacgtgatggccagcttctactctacgtcgactccctttctctccctccctgag

SEQ ID NO: 17499 - DNA, 1266 bp, synthetic construct
  misc_feature 1..1266: note = source = /note="Description of Artificial Sequence: Synthetic coding sequence"
  source 1..1266: mol_type = other DNA
atgcgctggcgcagagctcctagaaggtcaggcagaccaggtcctagggcacagcgacccggaagcgcagcccgctcatcacccccgctgccactcctgccccttctgcttctgctgggaacggccgccctcgcccctggtgcagcagccggaaatgaagccgcaccggcaggcgcctccgtgtgctactccagcccaccttcggtcggaagcgtgcaggagttggcgcagcgcgcagcagtcgtgatcgagggtaaggtgcaccctcagagacgccagcaaggcgcactggataggaaagcggcagcagcggcaggagaagccggagcatggggcggagatcgcgaacctccagcagcaggcccaagagcacttggtccccccgcagaagagcctctccttgcagcgaatggcaccgtgccctcgtggcccaccgcacctgtgccttcagcaggcgaacctggagaggaagcaccctacttggtcaaggtccatcaggtctgggcagtgaaggcgggtgggctgaagaaggactccctgcttactgtgcgtttgggtacgtgggggcaccctgcctttccctcatgcgggcgactgaaagaggactcccggtacatcttctttatggagccagacgcaaattcgacctcccgggcaccagccgcattcagagcgtcctttccccctcttgaaactggtagaaaccttaagaaggaggtgtcacgggttctgtgcaagcgctgtgcccttcctcctaggctcaaggaaatgaagagccaagaaagcgcggcaggatcaaagctggtgcttagatgcgaaacgtcgtcggagtacagctcgctcagattcaaatggttcaagaacgggaacgagctcaacaggaagaacaaaccacagaacataaagatacagaagaaacccggtaaatcggaacttagaatcaataaggcatccctggccgattccggtgaatacatgtgtaaagtgatctccaagctgggaaacgattcagcatcagcgaacatcaccatcgtcgagtcaaacgcaacctcgacttccaccaccggtacttcgcatctggtgaagtgtgctgaaaaagaaaagactttctgtgtcaatggaggtgaatgcttcatggtgaaagacctttccaacccatcgagatacctgtgtaaatgtcctaatgaatttaccggcgatcgctgtcagaactacgtcatggcatcattttacagcaccagcaccccgtttctttcgcttcccgag

SEQ ID NO: 17500 - DNA, 1266 bp, synthetic construct
  misc_feature 1..1266: note = source = /note="Description of Artificial Sequence: Synthetic coding sequence"
  source 1..1266: mol_type = other DNA
atgaggtggagacgagccccgcgtagaagcggacgcccaggaccacgcgctcagcggccgggttcggcggcccggagctctccacccctgccgcttcttccactgctcctcctgcttggaaccgcagccctcgctccgggcgcggcagctggcaacgaagccgcgccggccggagcttcggtgtgctactccagcccaccgtctgtcggatcagtccaggagttggcacaacgcgcagcggtcgtcatcgaagggaaggtgcatccacaacggcggcagcaaggcgccctggaccgtaaagccgctgccgccgccggagaggccggggcgtggggtggagatagagaaccgccggcggcaggacctcgggcactcggaccaccggcagaagaaccactgctcgccgccaacggaaccgttccgtcctggcccactgcccctgtgccgtcagcaggtgaaccgggtgaagaggccccttacttggtgaaagtgcaccaggtgtgggccgtgaaggcaggaggactgaagaaggactcactcctgaccgttcgactggggacctggggtcatccggccttcccaagctgcggaaggctgaaggaggactccagatatatcttcttcatggaaccggatgccaactctacttccagagcgcctgctgctttcagagctagcttcccaccgctggaaactggccggaatctcaagaaggaagtcagcagagtgttgtgcaaaagatgtgccctgccgcctaggctcaaggagatgaaatcacaggagtcagcggcgggcagcaagctggtgctgcggtgtgagacgtcgtccgagtactccagcctgcggttcaaatggtttaagaatggcaacgagctcaatcgtaaaaacaagccgcaaaacattaagatccaaaagaagccagggaagagcgagctgcggattaacaaagcatccctcgcggatagcggagagtacatgtgcaaggtgatctcaaagctgggaaatgactcggcctcggccaacatcaccatcgtggaatccaatgcaacgtcgacctcgaccactggtacttcccacttggtcaagtgcgccgaaaaagagaaaactttctgtgtcaatgggggagaatgcttcatggtcaaggacctgagcaacccgtcgagatacctgtgtaagtgtcctaacgaattcaccggagacaggtgtcaaaactacgtgatggcgtccttttactcaacttcgaccccgtttctgtcgctgccggag

SEQ ID NO: 17501 - DNA, 1266 bp, synthetic construct
  misc_feature 1..1266: note = source = /note="Description of Artificial Sequence: Synthetic coding sequence"
  source 1..1266: mol_type = other DNA
atgagatggcgaagggccccacggagaagcggcagacccggacctcgtgcccaacgccccggatcagcagccagatcgtcacctcctcttcccctgctcccactgttgctgcttttgggaaccgcagcactggccccaggtgcagcagccggaaacgaggcagcaccggctggagcgagcgtgtgctattcatcgccgccaagcgtaggatctgtccaggagctggcacaacgggcagcggtcgtgatcgaagggaaggttcatcctcagaggcgccaacagggagcattggatcggaaggcagctgccgctgcaggagaggcaggcgcatggggaggagatcgggaacctccagccgccgggcctcgcgcattgggcccgcctgcagaagaaccactgctcgctgcaaatggtacggtgccttcgtggcctaccgcgcctgtgccatccgcaggagagccgggtgaagaggccccctacctcgtgaaggtgcatcaagtgtgggcagtgaaggccggaggactgaaaaaagactcccttttgactgtcaggcttggtacttggggacatcctgcatttccttcgtgcgggcggctgaaggaagattcaagatacatcttctttatggagccagacgcaaattcgacttcgcgggcacctgcagcattccgggcgtcatttccaccacttgaaactgggagaaatctcaaaaaggaggtgtcgcgtgtcctttgcaaacgctgtgcactgccacctcgcctcaaggaaatgaagtcccaagagtcggcagcaggatccaagctcgtcctgagatgcgaaacctcctccgaatactcgtcgctgagatttaagtggtttaagaacggtaacgagctcaacaggaagaacaagccacagaacattaagattcagaagaagccaggaaaaagcgagctgaggattaacaaggcatctctggcagattcaggcgagtacatgtgtaaagtgatttccaaacttggaaatgattcggcgagcgcaaacataaccatcgttgagtcaaatgccacgtccacgtcgactaccggaacctcacatctcgtgaagtgtgcagaaaaagaaaaaactttctgtgtgaatgggggagagtgttttatggtgaaggatctgagcaatccatcccgttacctttgcaagtgtcccaacgaattcaccggtgatcgttgccagaactacgtgatggcgagcttctactccacgagcactccattccttagcctcccagaa

SEQ ID NO: 17502 - DNA, 1266 bp, synthetic construct
  misc_feature 1..1266: note = source = /note="Description of Artificial Sequence: Synthetic coding sequence"
  source 1..1266: mol_type = other DNA
atgcgctggagacgggccccgaggcgatcgggtcggccgggcccacgcgcccaaagacctggatcggccgcccgatcctcaccacctctgccgctcctgcctttgcttctccttctgggcactgccgcgctcgccccgggagctgcggcgggaaacgaggctgcaccggccggcgcgtcggtgtgctactcatcacctccgtcggtggggtcggtccaagaactggctcagagagccgccgtcgtgatcgagggaaaggtccacccgcagagacgccagcagggtgctctggaccggaaggcagcggcagctgcaggcgaggcgggcgcctggggtggtgatcgcgaaccccctgcagctggacctcgggctctcggaccgccggccgaagaaccacttctggcggctaacggtactgtcccatcgtggccgacggccccggttccttcggcaggagaaccgggtgaagaggccccttacttggtgaaggttcaccaagtgtgggcggtcaaagcaggcggtctgaagaaggatagcctgctcaccgtgcgcctcggtacctggggtcatcccgcctttccaagctgcgggcggctgaaagaggactccagatacatcttcttcatggaaccggatgcgaattccacttcaagggccccggccgcttttagggcctccttcccgccgctggagactggaaggaacctgaagaaggaagtatctcgcgtgctgtgcaagagatgtgcgctccctccccgcctgaaggagatgaagtcgcaagaaagcgctgcgggttcgaagttggtgctgcggtgcgaaacttcgtccgaatacagctcgctgcggttcaagtggtttaagaatgggaacgagttgaatcggaagaataagccgcagaacatcaagatccagaagaagccaggtaagagcgagctcagaatcaataaggcgtcgctggccgactcaggcgagtacatgtgcaaagtgatttccaagctgggaaacgactccgcctcagctaacatcaccatcgtggaatccaatgcgacctcaacctcgaccaccggaaccagtcacctcgtcaaatgtgcagagaaggaaaagactttttgtgtcaacggaggagagtgcttcatggtcaaagacctcagcaacccgtcacgctacctctgtaagtgtccgaatgagtttaccggcgaccggtgccagaattacgtcatggcttccttttacagcacttcgacgccgttcctctctctgccagag

SEQ ID NO: 17503 - DNA, 1266 bp, synthetic construct
  misc_feature 1..1266: note = source = /note="Description of Artificial Sequence: Synthetic coding sequence"
  source 1..1266: mol_type = other DNA
atgaggtggcggcgcgcgcctcggcgctccgggcgtcccggaccacgcgcgcagcgccccggatctgctgctagaagctccccaccgctgccgcttctccccctcctgctcctgttgggtaccgcggcactggcccccggagcggccgccggcaacgaagccgcccccgcgggagcaagcgtctgttactcgagcccgccctcagtgggttccgtgcaggaactggcgcagagggccgcggtggtcatcgagggaaaggtgcaccctcaaaggcggcagcaaggcgcactggacagaaaagccgctgccgcagcaggggaagcaggagcatggggtggcgaccgcgaacccccagccgccgggccgcgggccctgggccctccagcagaggagccactgttggcggctaacggaaccgtgccaagctggcccactgccccggtgccgtcagccggcgagccgggagaggaagctccctacttggtgaaggtgcatcaagtgtgggcggtgaaagcgggaggactgaagaaggactcgttgctgactgtccggctgggaacctgggggcatccggccttcccgtcatgcgggcgcctgaaagaggattcaaggtacatcttctttatggaaccagacgccaactcgacttcacgggctccggcggcttttcgggcgtcgttcccgcccctcgaaaccggaaggaatcttaagaaagaggtgtcgcgcgtgctctgcaagaggtgcgcgctgcctccacggctcaaggaaatgaagtcacaagaatcggctgccggatcgaagctggtccttcggtgtgaaacttcgtccgagtatagctcgctccgcttcaagtggttcaagaacggaaatgaactgaaccggaagaataagccgcagaatatcaagatccagaagaagcctggaaaatccgaacttcgcatcaacaaggcaagcctcgccgactcgggagaatacatgtgtaaggtgatctccaaactggggaacgattcggcttcagctaacattaccatcgtcgaatccaacgcgacttccacctcgaccactggaactagccacctggtgaagtgtgccgagaaggaaaagaccttctgcgtgaatgggggcgagtgcttcatggtgaaggacctgagcaatcccagcagatacctgtgcaagtgcccgaacgagtttaccggagatagatgccaaaactatgtcatggcctcattctactcaacttcgactccttttctctcattgcctgag

SEQ ID NO: 17504 - DNA, 1266 bp, synthetic construct
  misc_feature 1..1266: note = source = /note="Description of Artificial Sequence: Synthetic coding sequence"
  source 1..1266: mol_type = other DNA
atgcgctggaggagagcacctcggcggagtggaagacctggcccgagggctcaaaggccagggagcgccgctaggtcttctcctccccttccacttctgccactcctgctgttgctcgggaccgcagcactggcgcctggcgccgctgcaggcaatgaggccgccccagctggggcttctgtgtgttattcttcacccccgtctgttggatcagtacaggaactggcccagcgtgctgccgtggtgattgagggtaaggtgcatccccagcgcaggcagcaaggtgccttggatcgtaaagcagctgctgctgcgggagaggcgggcgcgtggggcggggatagggaacctccggcagccggacccagagctctcggaccgcccgctgaggaacccctgctcgccgccaatggaaccgtgccatcatggccaacagcgcccgtaccatccgcaggcgaaccgggcgaggaagcaccctacttagtgaaagttcaccaagtctgggcagtcaaagctggcgggcttaagaaagatagtttgctcacagtccgcctcggaacgtggggccaccctgcctttccctcctgtgggagactgaaggaagactctcgatatatattcttcatggagcctgatgctaacagcacttctcgggctcctgccgcctttcgcgcaagtttcccaccactcgaaacggggcggaacttgaagaaagaagtctcgcgggtcctttgcaaacgctgtgccctgccacctagactgaaagagatgaaatctcaggaatcagctgcgggatcaaagctggttctgcggtgcgaaacaagtagcgaatatagctctctaaggttcaaatggtttaaaaatggcaacgaactgaaccgtaagaataaaccacagaatatcaagatccagaagaaaccggggaaaagcgagctgaggatcaacaaggcgtccctggccgatagtggcgagtatatgtgcaaggtcatctcgaagttgggaaatgacagcgcctcagcaaacatcacaatagtagagtctaatgcaacatccaccagtacaacaggaacttctcaccttgtgaagtgtgctgagaaagaaaaaacgttttgcgtgaacggaggtgagtgtttcatggtcaaggacctgtcgaatcctagtcgctatctctgcaagtgtccaaatgaatttacaggtgacaggtgccagaactacgtgatggccagcttctattctacatccacaccgtttttgtctctccctgaa

SEQ ID NO: 17505 - DNA, 1266 bp, synthetic construct
  misc_feature 1..1266: note = source = /note="Description of Artificial Sequence: Synthetic coding sequence"
  source 1..1266: mol_type = other DNA
atgcgctggagaagggcccctcgcaggagcggacgcccgggacctagggcccaacggccgggatcggccgccaggagctccccgccgctcccgctgctgcccttgctgttgctgctcggaaccgcggccctcgctccgggagccgccgctggaaatgaagcggccccagcgggtgcaagcgtctgctacagctcaccaccgtcggtgggcagcgtgcaggagcttgcccagcgggcagctgtggtcattgagggaaaggtccacccacagcggcgccagcaaggggccctggataggaaggccgccgctgccgcaggggaggctggtgcttggggcggagatcgggaaccgccggccgcggggccaagagcgctcggcccgcccgcggaagaaccactgctggccgccaacggcaccgtgccgtcatggccgactgcacctgtgccgtccgctggagagcctggggaggaagcgccgtacctggtgaaggtgcatcaagtgtgggcagtgaaagccgggggactcaagaaagactcgctgctgactgtgcgccttggaacctggggtcatccggcctttccgtcatgcgggcggctgaaggaggactcacgttacatcttcttcatggagccggacgccaattcgacctcacgggcgccagcggcattccgggctagctttccgccactggagacgggccgcaaccttaagaaagaagtgagccgtgtgctctgcaagaggtgcgccctgccaccacgcctgaaggagatgaagtcccaggagtcagccgccggcagcaagctggtgctgaggtgtgaaaccagctccgaatactcgtcgcttcgcttcaagtggttcaagaacggaaacgagctgaatagaaaaaacaagccacagaacatcaaaatccaaaagaagccgggaaaatccgagctgagaatcaacaaggcttccttggctgactctggggagtatatgtgcaaagtgatctctaagctcggaaacgattcagcatcggccaacattacgatcgtcgagtcgaacgcaaccagcacctccactactggcacctcgcacctggtgaagtgcgccgagaaagaaaagaccttctgcgttaatggaggagagtgtttcatggtcaaagacctgagcaacccatcccgctatctgtgcaagtgtcctaacgaattcaccggcgaccggtgccaaaactacgtgatggcttccttctactccacctcaactccattcctgtcactgcctgaa

SEQ ID NO: 17506 - DNA, 1266 bp, synthetic construct
  misc_feature 1..1266: note = source = /note="Description of Artificial Sequence: Synthetic coding sequence"
  source 1..1266: mol_type = other DNA
atgaggtggcgtagagcaccgcgacgtagcggccggcccggcccccgcgctcagaggcccggcagcgctgccagatcctcacctcccttgccactgcttccattgctgctgctgctaggcactgcagcgttggcccctggggccgctgcaggcaatgaagccgcgcccgccggagcttctgtgtgttatagcagccccccctccgttgggtcagttcaggagttagctcaaagagccgccgtcgttatcgaggggaaggtgcatccccaacgaaggcagcagggggcgctggatcgcaaggcagctgcggctgccggggaagcaggggcctgggggggggaccgcgagcctccagccgctggcccccgggccctgggtccccccgccgaagagccacttcttgccgccaatggaacagtcccttcatggccaacagcccccgtgccatcagctggggagcctggagaagaagccccatacctcgtaaaagttcatcaggtgtgggccgtaaaagcaggtggccttaagaaggattctctgctgaccgtccggctgggcacctgggggcaccctgcgttcccatcttgcggacggctgaaggaggactcgcggtatatattctttatggaaccggacgcgaactccacgtcccgtgctcctgcggcttttagagcttcatttcccccgctcgaaacaggaaggaacttaaagaaagaagtatcaagggtgctgtgtaaacgctgtgccctgcctcctagactcaaggagatgaaatctcaggaaagcgccgccggatctaaattggttctgcgctgcgaaacctcatcagagtactcctccttaaggttcaagtggtttaaaaatgggaacgagctgaacaggaagaacaagcctcagaacatcaaaattcagaagaagcccggcaagtctgagctgcgaatcaacaaagctagtttggcagactccggcgagtacatgtgtaaagtcatctctaagcttgggaatgattctgcctccgctaatataacaatcgttgaatctaacgcgaccagcaccagtacgacaggcacatctcatctggtcaagtgcgccgagaaggaaaaaaccttttgcgtcaacgggggcgaatgttttatggtcaaggacttatccaatccctccaggtacttgtgtaagtgccctaatgagtttaccggggatagatgccagaattacgttatggcttccttttactcaacctctacgccattcctgagcttgcccgag

SEQ ID NO: 17507 - DNA, 1266 bp, synthetic construct
  misc_feature 1..1266: note = source = /note="Description of Artificial Sequence: Synthetic coding sequence"
  source 1..1266: mol_type = other DNA
atgcgatggcgacgcgctcccaggcggtccgggcgtcccggtcctagagcccagagacccggaagcgccgccaggtctagcccccctcttcctctgctgccgctgttgcttctgttgggcaccgctgcactcgcccctggggcagccgcaggaaatgaagctgctcctgccggcgcctctgtgtgctattctagtccaccatcggtcggttctgttcaggaacttgctcaacgagctgctgtggtgattgaaggcaaagttcatccccagcggcgacaacaaggtgctttggaccggaaagcagctgcagcagcaggcgaggcaggggcctggggcggcgatagggagcctccagcagccggaccaagagcactcggtccgccagcggaagagcccttactagcggcaaacggcaccgtgcccagctggcctaccgcacctgtgccaagcgcaggtgaaccaggagaggaagctccttacttggttaaggtacatcaggtttgggctgttaaagctggtggacttaagaaagactctttattgacagtgaggctgggaacttggggtcaccccgcattcccttcgtgtggtcgactgaaggaggacagcaggtacatcttcttcatggagcctgatgctaactccacctccagggctccagccgctttcagggccagtttcccaccgctggaaaccgggaggaaccttaagaaggaagtgtcacgagtcctttgcaagcggtgcgccctaccacctagactgaaagagatgaaaagtcaggagagcgctgctgggtcaaagctcgtgctgcgttgcgagacatcctctgaatatagttccttgcgattcaagtggtttaagaacgggaacgaactgaatcgaaagaacaagccccagaacattaaaatccaaaagaaacccggaaaatcagaactccgaatcaacaaagcttcactggcagactccggcgagtacatgtgtaaggtaatcagcaagctcgggaatgacagcgcctccgccaacatcactattgttgaaagcaacgccaccagtaccagtactactggcacatcacatctggtgaaatgtgcagagaaggagaagactttctgcgttaacggaggggagtgcttcatggtgaaagacctgtcaaacccaagcagatatctgtgtaaatgtcctaatgagtttacgggagacagatgtcagaactacgtgatggcgtcattctacagcacctccactcctttcctgtctctgccagag

SEQ ID NO: 17508 - DNA, 1266 bp, synthetic construct
  misc_feature 1..1266: note = source = /note="Description of Artificial Sequence: Synthetic coding sequence"
  source 1..1266: mol_type = other DNA
atgaggtggaggagagctccccggcgttccggccgacccggtcctagggcccagagaccaggttccgcggctaggagctctccgcctctgcccctcctgccattgttgctgctcctgggtacagcagccctcgcccccggcgccgcagcaggtaacgaagccgcccctgccggggcttcagtttgctattcttcaccccccagcgtgggaagcgtccaggagctggcgcagagagccgccgtggtgatagagggcaaagtccacccacaacgccgccagcagggggccctggaccggaaggcagcagcggccgccggggaggctggagcttggggcggggatcgggagccacccgctgcagggccgcgggcattgggaccacccgccgaagagcccttgctagcagcgaatggcactgttccctcttggccaactgcaccagtgccttccgctggcgagccaggcgaagaagcaccctacctagtcaaagtgcaccaggtctgggctgttaaggctggcggattgaagaaggactccttgctaactgtacgcttgggcacatgggggcaccccgcttttccttcatgtgggaggcttaaagaagacagcaggtacattttcttcatggagccagacgcaaacagcacgtcccgcgctcctgcagccttccgcgctagcttcccaccactggaaactggacgaaaccttaagaaagaggtgtcgagggtactttgtaagaggtgtgccctgcccccacgtctgaaagagatgaagagccaggagtccgcggccggttctaagttagttctgcgctgtgagaccagcagcgaatactcatcgctccggtttaaatggttcaaaaatgggaacgaattgaatcggaagaataaacctcagaatatcaaaattcaaaaaaaacctggaaagtcagagctgcgaatcaacaaggcctcgttagccgattccggcgaatatatgtgtaaggtaatcagcaagctgggcaacgactccgcctccgcaaatatcaccatagtagaaagcaatgcaacatcgacatccaccacgggcacaagccacctagtaaaatgcgccgagaaagagaaaaccttttgtgtaaatggcggcgaatgcttcatggttaaagatctcagcaatccctcgcgttatctgtgtaaatgtcccaatgaatttacgggcgataggtgccagaactacgttatggcatccttctactccacgtcgaccccgtttctaagcctccctgaa

SEQ ID NO: 17509 - DNA, 1266 bp, synthetic construct
  misc_feature 1..1266: note = source = /note="Description of Artificial Sequence: Synthetic coding sequence"
  source 1..1266: mol_type = other DNA
atgagatggcgccgagcccctagacggtctggaagacctggaccgagagcccagcgccctggctcagccgctcgttcaagcccacctctacctctgctccctttgttacttttacttggaacagccgcactggcccctggagctgcagcgggcaacgaagccgccccagctggcgcctctgtgtgttatagttcgcccccgtccgtcggctccgtccaggagctagctcagcgggccgccgtcgtcattgaagggaaggtgcatccccaacgaagacagcagggtgctttagacaggaaagcggccgctgcagctggcgaagccggtgcgtggggcggagatagggagccacccgctgcaggccccagagccctcggtcccccagcagaggagcctctccttgccgccaatgggaccgtgcctagttggcctaccgccccagtcccttccgcaggagaacctggggaagaggccccctatctggttaaggtccaccaagtgtgggctgttaaagctggcgggttgaaaaaagactccttgctaactgtccgactaggaacgtggggacaccccgcctttcctagctgtggcagactcaaagaggattctcgttatattttcttcatggagcccgatgccaactccacgtccagggcacccgccgcatttcgagcgagctttccaccactcgagacaggtaggaacttgaagaaggaggtaagccgcgtcctatgcaagaggtgtgccttgccaccacgactgaaagagatgaaatctcaggaatctgcagccgggtccaaactcgtgttacggtgtgagacgagctccgagtattcgtcccttaggtttaaatggtttaagaacggtaatgagcttaacaggaagaacaagccgcaaaatattaaaatccagaaaaagcccggcaaaagcgaactgcgaatcaataaggcctcgcttgcagacagcggggagtacatgtgtaaagtgatctctaagctgggcaacgactccgccagcgccaacatcactatagttgagtctaacgcaacatccacgtcaacaacaggtacttcccacctagtcaagtgtgcagaaaaagaaaagaccttttgcgtcaacgggggggagtgttttatggtgaaggacctcagcaatcccagcagatatctgtgcaagtgccccaacgagtttaccggggatcgatgtcaaaattacgtgatggcctccttctacagcaccagcacccccttcctgagcttacccgag

SEQ ID NO: 17510 - DNA, 1266 bp, synthetic construct
  misc_feature 1..1266: note = source = /note="Description of Artificial Sequence: Synthetic coding sequence"
  source 1..1266: mol_type = other DNA
atgcggtggagacgggcgcctcgccgctccgggcggccagggccacgcgcgcagcggccaggatccgcagcccgctcgagcccgccgctcccgctgctcccactgctcttgctgttgggaactgcggccctggccccgggggcggcggcaggcaatgaagccgccccggctggagcttccgtgtgttactcatccccgccatccgtcggaagcgtgcaggaactggcccagcgggccgccgtggtgatcgagggcaaagtccaccctcagcgacgccaacagggagcccttgatcgcaaagctgccgccgcagctggagaggctggagcgtggggaggggaccgggaaccgccggccgcgggaccgagagcgctcggccccccggccgaagagcctctgctggcggcaaatggtaccgtgccatcgtggccgactgcgcctgtcccaagtgctggagagccgggtgaggaggccccatacctcgtgaaagtgcaccaggtgtgggcagtgaaggccggaggattgaagaaggactcgctgttgactgtgcggctgggcacctggggccatccggcgtttccaagctgcggtagactcaaggaggactccagatacatcttctttatggaaccggatgcgaattcaacttcaagagccccggccgccttccgggcgtcgttccctcctctggaaactgggcggaatctgaaaaaggaagtatcccgcgtgctctgtaagcgttgcgccctgccgccgcgcctgaaggaaatgaagtcacaggaatctgccgcgggatcgaaactggtgcttcgctgcgagacttcttccgagtactcgtcccttcgcttcaagtggttcaaaaatggcaacgagcttaacagaaagaataagccacagaatatcaagatccagaaaaagcctggcaagtcagagctcagaatcaacaaagcctcactggccgattcaggcgagtacatgtgcaaggttatcagcaagctggggaacgacagcgcttcagctaatatcaccatcgtggagtctaacgcaacttcgactagcaccaccggaacctcacacctggtcaagtgcgctgagaaagaaaaaactttctgcgtgaacggaggagaatgctttatggtgaaggatctttcaaacccttcgaggtacttgtgcaagtgtccaaatgagtttactggcgatagatgtcaaaactacgtgatggcctcgttctactccacttcgactccgtttctgtcactgcctgaa

SEQ ID NO: 17511 - DNA, 1266 bp, synthetic construct
  misc_feature 1..1266: note = source = /note="Description of Artificial Sequence: Synthetic coding sequence"
  source 1..1266: mol_type = other DNA
atgcggtggcgcagggcccccagaagaagcggccggcctggcccaagggctcagagacccggcagcgccgcccggtcttcacctcctctgccccttctgccactgctcctgctgctgggcacagccgcgctggctcctggggccgctgctgggaatgaggccgctcctgctggtgcatcagtttgctactcatctcccccgagcgtaggctccgttcaggagcttgcgcagagagccgcggtggtgatcgaaggtaaggtccaccctcaaaggcgccagcagggggctttggacagaaaagccgctgcggcagccggtgaggccggtgcttggggaggggacagagaaccccctgctgccggacctagggctctgggccctccagcagaggagccactgctggcagctaatggtaccgtgccttcttggcctaccgctcctgtgccctctgccggtgagcccggtgaagaggccccctatctggtgaaggttcatcaggtttgggctgttaaggcaggcggattgaagaaggatagtctgctgacagttaggctcggaacttggggacaccccgcatttccatcttgcgggcgccttaaggaagatagccgctatatctttttcatggaaccggatgcaaacagtacatcacgcgcccctgctgcctttcgcgcgagttttcccccactggaaacaggcaggaatttgaagaaagaagtttctcgggtactgtgcaaacgatgtgcccttcccccgaggctgaaggaaatgaagtcacaggagtccgcggcagggtccaaacttgtacttaggtgtgagacatctagtgagtatagcagcttgcgctttaaatggtttaagaatgggaatgagttgaaccggaagaataaaccacagaatattaagattcagaagaagcccggtaagagcgaactgcggataaacaaagcctctctcgctgacagcggtgagtatatgtgcaaggtgatctccaaactggggaacgactccgcttccgctaacattactatagtggagtctaacgcaacctccacttctactaccggaactagccacctcgtcaagtgcgccgagaaagagaagacgttttgcgtgaacggcggggagtgcttcatggtgaaagatctgagcaacccttcaagatacctgtgtaagtgccccaacgaattcaccggcgacagatgccagaattacgttatggcctctttctacagcacctccacacccttcttgtcccttccagag

SEQ ID NO: 17512 - DNA, 1266 bp, synthetic construct
  misc_feature 1..1266: note = source = /note="Description of Artificial Sequence: Synthetic coding sequence"
  source 1..1266: mol_type = other DNA
atgcgctggcggagggcgcctcggcgatctggtcgcccgggtccacgggctcagcgacctggaagtgccgccaggagctcccctccactgccgctgcttcccttgctgcttcttctgggaaccgcagccctggctcctggcgcagcggcaggtaacgaggccgcaccggcaggcgcttctgtttgctactcttctcctccttcagttgggagcgttcaggaacttgctcaaagggcggcagtcgtaatcgaaggtaaggtgcaccctcagaggcgacaacaaggggctctggataggaaggctgcggctgcggcgggcgaggctggggcttggggcggggaccgcgaacctcccgcggctggtccccgagccttgggacccccggcggaggaaccacttctcgccgccaacgggaccgtcccctcttggcctacagccccagtcccgtctgccggagagcccggggaggaagctccatatttggtgaaagtgcatcaggtctgggctgttaaagccgggggcctcaagaaagacagtctgcttacagtacgactcgggacctgggggcatcccgcatttccttcctgtggtagacttaaggaggacagtcggtatatcttcttcatggagccggacgccaactccacctcaagagcgccggccgccttccgggcgagtttccctcccctcgaaacaggacggaacctgaagaaggaagtcagcagggtgctctgtaaacgctgcgctttgcctcccaggctgaaagagatgaagtctcaggagtctgctgctgggtccaagttggtgttgcggtgtgagacaagctctgagtactcatccctgaggttcaagtggtttaaaaacggtaacgagctgaataggaagaataagcctcagaatattaagatccagaagaaaccagggaagtctgagctgcgaatcaataaggcttccctggcagattccggcgaatatatgtgtaaggttatctctaaacttggaaacgattctgccagtgctaatattaccatcgtcgagtccaacgcgacatctacgtctacaactggaacaagtcacctggtcaaatgtgccgagaaggaaaagactttctgtgttaatggcggcgaatgctttatggtcaaagacctgagtaatccttcacgctacctctgtaagtgccctaacgagtttaccggagatcgatgtcagaattacgtaatggcgagcttttacagcacgtctacacctttcttgtccctccccgaa

SEQ ID NO: 17513 - DNA, 1266 bp, synthetic construct
  misc_feature 1..1266: note = source = /note="Description of Artificial Sequence: Synthetic coding sequence"
  source 1..1266: mol_type = other DNA
atgaggtggcggcgggcaccgcggcgatccggacgcccgggaccacgcgctcaaagaccgggctcggctgcccgatcatccccgccgctcccgctgctgccgctcttgttgctgctgggaaccgccgccctggccccgggagctgcagctgggaacgaggcagcgcccgcgggagctagcgtgtgctattcgagcccgccgagcgtcggatccgtgcaggaactcgcacagcgcgctgccgtcgtgatcgagggcaaagtgcacccccaaaggagacagcagggagcactcgatcgcaaggctgcggcggcagccggggaagccggtgcctggggaggcgatcgggaaccaccggctgcggggccgcgcgccctcggcccgcctgcggaggagccgttgttggccgccaatggtactgtgccatcatggcctaccgctccggtgccctcggcaggggagccgggagaagaggctccctacctggtcaaggttcatcaggtgtgggctgtgaaggctggcggcctcaaaaaggactcgctgctgactgtgaggctgggaacctggggacacccggccttcccgtcgtgcggacggctgaaggaggactcccggtatatcttcttcatggagcctgacgcgaacagcacgtccagggctccagctgcatttagggcctcattcccgccactggagactgggaggaacctgaagaaggaggtgtcgcgcgtgctctgcaagagatgcgcactgccaccgcgcctgaaggaaatgaagtcccaagaatcagcagctggatccaagctggttctgcgctgcgaaacttcatccgaatactcctcgctcagattcaagtggtttaagaacgggaatgaactgaatagaaaaaacaagcctcagaatatcaagatccaaaagaagccaggaaaatcagagctgagaatcaataaagcaagccttgctgactcaggagaatacatgtgcaaggtgatctcaaaactgggaaatgactcagcgtccgccaatatcaccatcgtcgaatcaaacgcaacttccacttcgaccaccggaacctcccatctggtgaagtgtgctgaaaaggagaaaactttctgtgtcaacggaggggagtgcttcatggtcaaggacctgtcgaacccatcacggtacttgtgcaagtgcccaaacgaattcaccggcgaccgctgccaaaactacgtgatggcctcattctacagcacgtcaaccccgtttctgagccttcctgag

SEQ ID NO: 17514 - DNA, 1266 bp, synthetic construct
  misc_feature 1..1266: note = source = /note="Description of Artificial Sequence: Synthetic coding sequence"
  source 1..1266: mol_type = other DNA
atgaggtggcgcagggcacctcgcagatctggtcgccccggtccgagggctcagcgccccggaagtgccgctaggtcttcaccacccctgcccctcctccccctgttgttgctcctcggtacggcagcattggcaccaggcgcagctgcaggcaacgaggccgctcccgccggagcgtcagtctgttattcatctccacctagcgtgggatccgtccaagaactggctcagagggctgctgttgttatagagggcaaagtccatccccagaggaggcagcaaggcgctttggacaggaaagctgctgccgctgctggcgaggccggcgcatggggcggcgacagagagcctccggctgcgggcccgagagccttgggacctccagctgaagaacctctgctggccgccaatggaactgtcccatcttggcctactgccccggttcctagcgcaggtgaaccgggcgaagaggctccatacttggtcaaggtgcaccaagtctgggccgttaaggctggtggactgaagaaagattcactcctgaccgtgaggctcggcacttggggacaccctgcattcccaagctgtggcagactgaaggaagattccaggtacatcttttttatggaaccagacgccaatagtacgagtagagctccggccgccttccgcgcgagttttcctccacttgagactggtaggaatctcaagaaagaggtgagtagggtcctctgtaagaggtgcgccctgccccctaggctgaaggagatgaaatcacaagagtcagccgccggtagcaagctggttctgcgctgtgaaaccagttcagagtactcctctcttaggttcaagtggttcaagaacggcaatgaactgaatagaaagaacaagccccagaatatcaagatccaaaagaagcccggaaagtccgagttgaggataaataaggctagcctggctgattccggtgagtatatgtgcaaggtcatttctaaactcggcaacgacagtgctagtgctaacatcactatcgttgaaagtaatgccacttccaccagtaccaccggaaccagccatctggtcaagtgcgccgagaaggagaagactttttgcgtgaacggtggcgagtgcttcatggttaaagatttgtctaacccgtccaggtacctttgcaagtgtcctaacgaattcactggagaccgctgtcaaaactacgttatggcttccttttactctactagcaccccatttctctcattgcctgaa

SEQ ID NO: 17515 - DNA, 1266 bp, synthetic construct
  misc_feature 1..1266: note = source = /note="Description of Artificial Sequence: Synthetic coding sequence"
  source 1..1266: mol_type = other DNA
atgcggtggcggcgggccccgcggcggtcaggacgtcccggcccacgggctcagaggcctggatctgcggccagatcatccccgccgctgcctctgcttccgctcctgctgctgctcggcaccgccgccctcgccccgggcgccgcggcgggcaatgaagccgcgccagcaggcgcaagcgtgtgctactcgtccccaccgtccgtcggctcggtgcaggaactggcccaacgcgctgcggtggtgattgagggaaaagtgcacccacagcggaggcagcagggagcgctcgacaggaaggctgccgccgccgccggagaggctggggcatggggaggcgatagggaaccaccggccgcgggaccgagggccctgggaccgccggccgaggagcctctcctggctgctaacgggactgtgccgtcctggccaaccgcgccagtgccgtcggcaggagagcctggagaagaagccccctacctggtgaaagtccaccaggtctgggcagtgaaggccggcggtctgaagaaggattcgctgcttacggtgcgcctgggcacctggggtcacccagcgtttccttcgtgcggacgcctgaaagaggattcgcggtacattttctttatggagcccgacgcaaacagcacttcacgcgctcctgccgcatttcgcgcctctttcccacccctcgaaaccggacgcaatctcaagaaagaagtgtcgagagtcttgtgtaagagatgcgcactcccgccgagactgaaagaaatgaaatcgcaagaatctgcggctggctcaaagctggtcctccgctgcgagacgagctcggaatactcgagccttagattcaagtggttcaagaacggaaacgagcttaaccgcaagaacaaaccgcagaatatcaagatccagaagaagccgggaaagtccgaactccgcatcaacaaggctagcctcgctgattcaggagagtatatgtgtaaggtgatcagcaagctcggaaatgactcagcgtcggcgaatatcaccatcgtggaatccaatgcgacttccacgtcgactactggcacctcccacctggtgaagtgtgccgaaaaagaaaaaactttttgcgtgaacggcggggaatgtttcatggtgaaagatcttagcaacccctctcgttatctgtgcaagtgcccgaacgagttcactggagatcgctgtcagaactacgtgatggcgagcttctactcgacctccactccgttcctgtcgctgcctgag

SEQ ID NO: 17516 - DNA, 1266 bp, synthetic construct
  misc_feature 1..1266: note = source = /note="Description of Artificial Sequence: Synthetic coding sequence"
  source 1..1266: mol_type = other DNA
atgagatggagacgcgcaccgcgccggtccggccgcccgggtccaagggcccaacggcccggatcggcggcacggagctcgccgccgcttccgctgctgccactgctgctgcttctgggaactgccgccctggcccctggagctgctgcggggaacgaagccgcgcccgcgggggctagcgtctgctacagctccccaccctcagtcggatcggtgcaggagctggcccagcgggctgcagtggtgatcgagggtaaagtgcatccacaaagacgccaacagggggccctggatcgcaaagctgccgcggctgcgggagaagcgggcgcgtggggtggagatcgggagccaccggccgccggacctcgcgcgctgggacctccggccgaggaaccgctgctcgccgctaatggaacggtgccgtcctggccaacggcgcctgtgccgtcggcgggagagcccggagaggaagccccgtacctcgtgaaggtgcaccaggtgtgggccgttaaggcgggaggcctcaaaaaagattccctcctgactgtgcgcttgggcacttggggccatccggcgttccctagctgtggcagactgaaggaggactcgcgctacatcttctttatggaacctgatgcaaacagcacctcccgcgcaccagcggctttccgggcgagctttccgccactcgaaactggacgcaacctcaaaaaggaggtatcccgagtgctgtgcaaacgctgcgctctgccgcctagactcaaggaaatgaagtcgcaagaatcagctgcgggatccaagctggtgctcagatgtgaaaccagctcagaatacagctccctgcgattcaaatggttcaaaaacggaaacgaattgaatagaaagaacaagccgcagaacatcaagatccaaaagaaaccgggcaagagcgaactgcgcatcaataaagcatcgctggcagactccggagagtacatgtgcaaggtgattagtaagctgggaaacgactccgcttcagcgaacatcaccatcgtggaatcgaatgcgacctcaacctccactaccggaacttcgcatctggtcaagtgtgccgagaaggaaaaaactttctgcgtgaacggaggagaatgcttcatggtgaaggacttgtcgaatccgagccggtacctgtgcaagtgcccgaacgaatttactggagacagatgccaaaactacgtcatggcatcattctactcgacgagcactccttttctgagcctccccgag

SEQ ID NO: 17517 - DNA, 1266 bp, synthetic construct
  misc_feature 1..1266: note = source = /note="Description of Artificial Sequence: Synthetic coding sequence"
  source 1..1266: mol_type = other DNA
atgcggtggcgccgtgcaccacggagatctgggagaccaggacccagagctcagcggcccgggtcggctgctcgaagttctcctcctttgccactactgccgcttctgctacttcttggaacagcggctcttgcccctggagctgccgcggggaacgaagctgcacctgccggagcatcggtctgttattcatcccctccatcggtggggtctgtgcaggaactcgcccagagagcagctgttgtcatagaaggaaaagttcacccccagaggcggcagcagggagccttggatcgaaaagcagccgcagcggcaggagaagcaggagcgtggggaggagaccgcgaaccccctgccgctggaccccgagcactagggccacccgctgaggaaccattgctggctgccaatgggacagtaccctcttggcccactgcacccgttccctctgctggagaacctggggaagaagctccatatctcgtgaaagtacatcaggtgtgggctgttaaagccgggggactaaaaaaagactcgttgctcacagtgaggctcggaacatggggacatccagcgttcccctcttgtggacgcttaaaagaggactcacgctacatcttcttcatggaacccgatgcaaattcaacttcacgggctcccgccgcctttagagctagttttcctccactcgaaactgggcggaaccttaaaaaagaagtatcaagggtgctgtgcaaacggtgcgcactgcctccaagattgaaggagatgaaatcccaggaatccgccgcagggtctaaattagtgcttcggtgtgaaacttcttcagaatattcatctttacgcttcaaatggttcaaaaatggaaacgaactgaacaggaaaaacaaacctcagaacatcaagatccagaagaagccaggaaaatctgagctcagaataaataaagcatctctcgctgatagtggggaatatatgtgcaaagtcattagtaaacttggaaatgatagtgcttctgctaatatcacaattgtcgagtcgaatgcaacatcaacttcaacaacaggaacaagtcatctggtaaaatgcgcagaaaaagaaaaaacattctgtgtgaacgggggggagtgctttatggtaaaagatctgtcaaacccctcaaggtatctctgcaaatgcccaaatgagtttactggagatcgctgtcaaaactatgttatggcttcgttttactctacatcgacaccttttctgtctctcccagag

SEQ ID NO: 17518 - DNA, 1266 bp, synthetic construct
  misc_feature 1..1266: note = source = /note="Description of Artificial Sequence: Synthetic coding sequence"
  source 1..1266: mol_type = other DNA
atgaggtggcggagggcaccaagaaggtccggccggccaggacctcgtgcccagcgacctggaagcgctgctagaagctcccctcctctgcccctgctccccctgcttcttttattgggaactgctgcactggctcccggagccgctgctgggaacgaggcagcgcccgcaggcgcttcggtttgttatagcagtcctccctctgtgggtagcgttcaggagctggctcaaagggccgcagtcgttatcgagggaaaagtccacccccagagaagacagcaaggggcgttagataggaaggctgcagcagctgctggggaagctggagcatggggaggggatcgcgagccacccgccgccggccctcgcgcacttgggcctccagctgaagaaccgcttttggccgccaacggcacggtgccctcatggcctaccgccccagtgccgtcagcaggagaacctggcgaggaagccccctacctcgttaaggttcaccaagtctgggctgtcaaagctggcgggctcaagaaggactccctcctgacagtgcgtcttggcacatggggacatccagccttcccctcttgtggccgcctcaaggaagattccaggtatatcttcttcatggagcctgatgcaaattctaccagccgcgcacctgctgcctttcgggcttcctttcccccgcttgaaacaggtaggaatctgaagaaagaggtgtcacgcgtgctctgcaaaagatgtgcactgcccccgcgactaaaggaaatgaagtctcaagaatccgcagcaggatctaagcttgtgctgaggtgcgaaacatcgtctgagtattcttctcttaggtttaagtggttcaaaaacgggaatgaattgaacaggaaaaacaagccacagaacatcaagatccaaaaaaaacctggaaagagcgagctgaggattaacaaggcttctcttgccgattctggcgagtacatgtgcaaagtcatttccaaactgggcaacgacagtgcttcagctaacattactatcgtcgagagtaacgcaaccagcacgtctactaccggcacaagtcacctcgttaagtgtgccgaaaaggagaagaccttctgtgtcaacggcggggagtgttttatggtcaaagatctctcgaacccaagcagatacctgtgtaagtgcccaaacgagtttacaggcgaccgctgccagaactacgtgatggcaagcttttactcaaccagtactcctttcttgagcctgcccgaa

SEQ ID NO: 17519 - DNA, 1266 bp, synthetic construct
  misc_feature 1..1266: note = source = /note="Description of Artificial Sequence: Synthetic coding sequence"
  source 1..1266: mol_type = other DNA
atgcggtggcggcgtgctcctagaagatcagggagacccggtcctcgtgctcaacgcccgggatccgcagctcgttcgagtcccccactgccattactgccgcttcttttactgcttgggacagccgcgcttgctccgggagcggcagcaggtaatgaggctgcccctgccggagccagtgtgtgttactccagtccgccttctgtaggctctgtgcaagaactcgcacagcgagccgcggttgtgattgagggaaaagttcacccacagcggagacagcagggagcacttgacagaaaagctgctgccgcagctggagaagctggcgcttggggaggagatcgcgaaccaccagcagccggacctcgagcgttgggcccgccagctgaggaaccacttttagctgctaacggcactgtgccaagttggccaacggccccagttccatccgctggtgagccgggggaggaggcaccttatctcgtcaaggttcatcaagtttgggcagtgaaagcaggaggactaaaaaaggactcactattgacagtgcgcttaggtacgtggggccacccagcatttccgtcatgtggtcgacttaaagaagattcccgatatattttctttatggagccagacgcaaactccacttcccgagcaccggcggcgtttagggcgtcgtttccacctttagaaaccgggagaaatcttaagaaagaagttagccgggttctttgtaagcgatgtgcgttaccaccgagattgaaagaaatgaaatcgcaagagtcggctgcaggatccaaactggtattgcgttgcgagacttcatctgagtactcatcacttcgttttaaatggtttaaaaatggaaacgagcttaaccgaaaaaacaaaccacagaatattaaaatacagaagaaaccggggaaatcagagttgaggatcaacaaggcatctcttgcggattccggagagtacatgtgcaaggttatatcaaaattgggaaatgactctgcctcagctaacattactattgtggagagtaatgctacaagtacatcaaccacaggaacatcccacctcgtaaaatgcgcggaaaaggaaaaaaccttctgtgtcaacggaggtgaatgtttcatggtgaaagatttgtctaacccaagccgttatttgtgtaaatgtcccaatgagttcacaggagaccgttgccaaaattatgtgatggcttctttctattcaacttcaacaccattcttgtcattgccagag

SEQ ID NO: 17520 - DNA, 1266 bp, synthetic construct
  misc_feature 1..1266: note = source = /note="Description of Artificial Sequence: Synthetic coding sequence"
  source 1..1266: mol_type = other DNA
atgagatggagacgtgcccccagacgctccggtaggccaggacctcgcgctcagcgacccggcagtgccgccaggagttctcctcccctccccttactcccccttttgttgttgcttggtacagctgccctggctcccggcgccgcagctggaaacgaagctgcgcccgctggggcgtctgtgtgttacagctccccacctagcgtgggcagtgtacaagaactggcacagagagctgcagtggtcatcgaaggcaaagtgcaccctcaaaggaggcaacaaggagccctggacaggaaggcagccgcggccgctggcgaagcaggcgcttggggaggagatcgggaacctcccgctgccgggccgagggctttgggacccccagcggaggaacctctcctcgctgctaacggaactgttccaagctggccaacagcccccgtgccatcggctggcgagccaggggaggaggcaccgtacctggtgaaagtgcatcaggtttgggcggtaaaagccggggggctgaaaaaagatagtctcctcaccgtgagactggggacttgggggcaccccgcttttccctcatgtggaagactaaaggaggatagccgttatatcttctttatggagcccgatgcaaattccacctccagagccccagcagcctttagggcttcgttccctcctctcgaaaccggccgcaacctaaaaaaggaagtgtccagggtcctttgtaagagatgcgctctgccccccaggttgaaagaaatgaaaagccaggagagtgccgcagggtctaaactcgtcctcaggtgcgagaccagctcggagtatagcagtctgagattcaaatggtttaaaaatggaaacgaacttaaccgaaaaaataagcctcagaacataaaaatccaaaaaaagccaggcaaatcggagctccggatcaacaaggcatctctggctgactcaggagagtacatgtgtaaagtgataagcaagctcgggaacgattctgcatcagcaaatatcaccatcgtagaatctaacgctactagtactagcaccacagggacctcacatttggtgaaatgtgcagaaaaggagaagaccttctgtgtcaacggaggggagtgcttcatggttaaagatctttctaatccaagtagatacctctgtaaatgccctaatgaattcacaggcgatcgatgccagaactacgtgatggccagtttttactccacttccacaccatttctgagcctgcctgaa

SEQ ID NO: 17521 - DNA, 1266 bp, synthetic construct
  misc_feature 1..1266: note = source = /note="Description of Artificial Sequence: Synthetic coding sequence"
  source 1..1266: mol_type = other DNA
atgagatggcgaagagcaccaagacggtcaggacggcccggtccccgggctcaacggccaggatctgcagcaaggtcgagccctccattgccacttctgccattgttgctcctcctgggcaccgcagcacttgcaccaggagccgcagcagggaatgaagcggcacccgcaggcgcaagcgtgtgctactcgtcacctccttcagtgggatccgtgcaggagcttgcacagcgagcggccgtggtgattgaaggaaaagtacacccgcaacgtaggcagcagggtgccctggaccgcaaggcagccgccgccgcaggcgaggcgggtgcctggggtggagatcgagaaccacctgcagcaggaccaagagcgctggggcctcccgctgaagagccactgcttgccgcaaacggaactgtgcctagctggccgaccgcgccggttcctagcgcaggcgagcctggggaagaggcaccttaccttgtcaaagtgcaccaggtttgggctgtcaaggcgggcggactgaaaaaagattcactgcttaccgtcaggctgggcacttggggtcatcctgccttcccatcgtgtggcaggcttaaggaggactctcggtacattttctttatggaacctgacgcgaactcaacctccagggccccggccgcgttcagagcatcctttcctcctttggaaaccggccgtaatctgaagaaggaggtgtcccgagtgttgtgcaaacgctgcgcattgccgccaagactgaaggaaatgaagtcgcaagaatcagccgcaggatcgaaacttgtcctccgttgtgaaacttcgagcgaatattcctcacttcgcttcaaatggtttaagaatggaaacgaactcaatagaaagaacaagcctcaaaacatcaagattcaaaagaaaccgggtaaaagcgagctccgcatcaacaaagcatcgcttgccgatagcggtgaatacatgtgcaaagtgatttcaaagctgggaaacgattctgcgtccgctaatatcactatagtggagtcgaacgcaacgtccacgagtaccactggtactagccatcttgtgaagtgtgcggaaaaggaaaagactttttgcgtgaatggtggggaatgttttatggtcaaggatctctccaaccctagtcgttacctttgtaagtgtccgaacgagttcactggagatcgttgtcaaaactacgtgatggccagcttttacagcacctccaccccgtttctgtctctccccgaa

SEQ ID NO: 17522 - DNA, 1266 bp, synthetic construct
  misc_feature 1..1266: note = source = /note="Description of Artificial Sequence: Synthetic coding sequence"
  source 1..1266: mol_type = other DNA
atgcgatggcgaagggccccaagacgaagcggccgacccggcccgcgcgcccagaggcccgggtctgctgctcgatcttcccccccccttccactgctcccccttttattgttgttgggcactgccgctctggcccctggggcggcggcgggcaacgaagccgcccccgccggcgcctccgtgtgctatagcagccctccaagcgtggggagcgttcaggagctcgctcaacgtgctgccgtggtcatcgaaggaaaagtccacccccagcgccgccaacagggcgccctggaccggaaagccgccgctgccgcgggcgaagccggggcttggggaggagatcgcgaaccccctgcagcaggtcccagggccctcgggccccccgctgaagaaccacttctggcagctaatggaacagttccatcttggcctactgcgccggtgccatccgctggggaacccggcgaagaagccccgtacttggtgaaggttcaccaggtttgggccgtgaaagctggcgggcttaaaaaggattcattgttgactgtcaggcttgggacctgggggcatcccgctttcccttcctgtgggcgtctcaaagaagactctagatatatctttttcatggagccagatgcgaattccacctctcgagcccctgccgcctttcgggcctcattcccaccgctcgagaccggccgaaacctgaagaaagaggtaagtcgagtcctgtgtaaaaggtgtgcccttcctccccgccttaaggagatgaaatcacaggagtccgctgctggatccaagttagtcctgaggtgcgagacatcaagcgagtattccagcctgcgctttaaatggtttaagaatgggaacgaactaaatagaaagaacaagccccagaacatcaagattcagaagaaacctggaaaatccgagctgcgaatcaacaaagcttctctggccgactctggagagtatatgtgtaaagttatttcaaagcttggtaacgactccgccagcgccaacattaccatcgtggaatcaaacgccacttcgaccagcaccaccggcacttctcatttggtgaagtgtgcagaaaaagagaaaacattctgcgtgaacggtggtgaatgtttcatggtgaaggacttgagtaacccatcccggtatctgtgcaagtgccccaacgagttcactggcgatcgctgccagaattatgtgatggcttctttttactctacttccacccctttcctgagtcttccagag

SEQ ID NO: 17523 - DNA, 1266 bp, synthetic construct
  misc_feature 1..1266: note = source = /note="Description of Artificial Sequence: Synthetic coding sequence"
  source 1..1266: mol_type = other DNA
atgaggtggcgacgggcgcctcgtcgctctggccgacccggtccaagagctcagcgccctggaagcgcagcacgcagttcgcctcccctacctctgctccctcttctgctgcttctcggcacagcggcactggcgccaggggccgcagcgggaaatgaagccgccccagcaggtgcatccgtgtgttactctagccccccatccgtggggagtgtgcaggaactcgcacagagggcagccgtggtaatcgaaggcaaagtccaccctcaacgcaggcaacagggagcactggacaggaaagccgccgcagctgccggagaggcgggcgcatggggcggagatagggaaccccctgcagccggacctagggctctcggacctcctgccgaagagcccctcctagccgccaacggaacggtcccctcatggcccaccgcgccagttccctctgccggggagcccggtgaggaggctccctacctggtgaaggtccatcaggtatgggcggttaaggctggaggtctgaagaaagacagtctgctaaccgtaagactcggcacatggggtcatcccgctttccctagctgtggacgcctgaaagaagattctaggtacatttttttcatggaaccagacgccaactcaacttccagggccccagcagccttcagagcttcctttcccccactggagacaggacggaatcttaagaaagaggtgagccgggttctgtgcaaacgatgcgcgctgcccccacgcctcaaggagatgaagtcacaggaaagcgcagcaggatctaagctcgttcttcgctgcgaaacgagctccgagtactcttctcttagatttaaatggtttaagaacgggaatgagttaaataggaagaacaaaccccagaatattaagattcagaagaaaccaggaaagtcagaactccgtattaataaagccagcctggccgattccggtgagtacatgtgtaaagtcataagcaaactgggcaacgactccgccagcgccaatatcacaatcgtggagagtaatgccacaagtactagcaccacaggtacctctcaccttgtcaaatgcgccgagaaagagaagacattctgcgtgaacggtggcgagtgctttatggtgaaggatctttcaaacccgtcacgttatttatgtaaatgccctaacgaatttacaggggaccgctgccagaattatgtgatggctagcttctactcaacaagcacaccttttctgtcactgccagaa

SEQ ID NO: 17524 - DNA, 1266 bp, synthetic construct
  misc_feature 1..1266: note = source = /note="Description of Artificial Sequence: Synthetic coding sequence"
  source 1..1266: mol_type = other DNA
atgaggtggcgacgggctcccagacgcagtgggcgccccggccctagggcccagcgccctggcagtgctgcacggtcttcgcccccactcccactcttgcccctgctgctgttgctagggaccgcagccctagccccaggcgccgcagctggaaacgaagcggcgccagctggtgcatcagtatgttactcatcacccccttccgtaggctccgttcaagagctggctcagcgggccgccgtggtaatagaggggaaagtgcatcctcagaggaggcagcagggagctctcgaccgcaaggccgccgctgcggccggcgaggccggggcctggggaggtgatagagagcctccagcggctgggccgcgcgctctcgggccgcccgccgaggaacctctcctggctgcaaatggtactgtgccgagttggcccactgcccctgttcccagcgcaggtgagcccggtgaggaagccccctatctagtgaaagtccatcaggtctgggcagtgaaggctgggggccttaaaaaggactctctgctgacagttcggctaggaacctggggacatcccgccttcccgtcctgcggacgcctgaaagaagattctcgctatattttttttatggagccggatgcaaacagtacgagccgggcgccagccgccttccgggcttcctttccgcctctcgaaactggtcggaatctcaagaaggaagtatcacgcgtgctctgcaagcgatgcgccctcccaccgcgtcttaaggaaatgaagagccaggaaagtgcagcgggatccaaactggtgttgcggtgcgaaactagcagtgagtactcctccttgcgctttaagtggtttaaaaatggaaatgagctgaataggaaaaacaaacctcagaacattaagatacagaagaagcctggaaagtccgagttgagaatcaataaggctagtctcgctgactccggggaatacatgtgtaaggtaatttccaagctgggcaacgactcggccagcgccaacatcacgattgtggagagcaatgcaacctctaccagtactacgggcacaagccacctggtcaaatgcgctgaaaaagagaaaacattctgcgttaacggaggcgagtgtttcatggtgaaggacctgagcaaccccagcagatatttgtgcaagtgccctaatgaattcacgggcgaccggtgccagaattacgtcatggcaagcttttactcaacgagtaccccgtttctgtccttgcctgag

SEQ ID NO: 17525 - DNA, 1266 bp, synthetic construct
  misc_feature 1..1266: note = source = /note="Description of Artificial Sequence: Synthetic coding sequence"
  source 1..1266: mol_type = other DNA
atgaggtggcgacgcgcacccagaaggtccggcagaccagggcctagggcacaaaggccaggaagcgctgcccgatcttcgcccccactgccgcttcttccactcttgctgttgctggggaccgccgctctcgcaccaggagcagccgccggcaacgaagcagcaccggcaggggcatccgtgtgttactccagcccaccctcagtgggttcggtccaggagctggcacaacgcgcggcagttgtgatcgagggaaaagtgcatccacaacgtcgccagcagggagctttggatcgaaaagcagccgcggcggcgggtgaagcgggagcatggggaggagatcgagaacctccagcggcagggcctagagcactgggacccccagcagaagaaccgcttcttgcagcaaacgggactgtcccttcgtggccaaccgcgcccgtcccgtcagctggtgagcctggcgaagaggcaccatacctcgttaaggtgcaccaagtttgggccgtgaaagcggggggccttaagaaagattcgctgcttaccgtgagacttgggacttggggccatccagcattccctagctgtggcagactcaaggaggactccaggtacattttcttcatggaaccagatgccaactccacctcgcgagcccctgcggcatttcgcgcatcttttccacctctggaaactggacgaaatctgaaaaaggaagtctcccgagtgctgtgcaagcggtgtgcactgcctcctagactgaaggagatgaagtcccaagaatcggcagcaggctccaagctcgtccttcggtgtgaaacgtccagcgaatactcgtcactccggtttaagtggtttaagaacgggaacgaacttaaccgtaaaaacaagcctcagaacattaagattcagaagaagcctggcaagtcggaactcagaatcaataaggcatcgctggctgattcgggggagtacatgtgtaaggtcatttcaaaacttggcaacgactcagcaagcgcaaacattacgattgtggagtcaaatgcaacctcgacttccaccaccggtaccagccatctggtgaaatgcgccgagaaggagaaaactttttgcgtgaacggtggagagtgttttatggtcaaggatctgtccaatcctagccgttatctgtgcaagtgtcctaacgaatttaccggtgaccgttgtcaaaactacgtgatggccagcttctactcgacctccactcctttcctgtccctgccggaa

SEQ ID NO: 17526 - DNA, 1266 bp, synthetic construct
  misc_feature 1..1266: note = source = /note="Description of Artificial Sequence: Synthetic coding sequence"
  source 1..1266: mol_type = other DNA
atgaggtggcgccgcgcaccgcggcgctccggtcgcccgggaccacgggcccagcgaccaggctccgcggcccgcagctcgccgcctctgcccctcctcccgcttctcctgttgctgggaaccgctgccctcgccccaggagctgcggcagggaatgaggctgccccggcgggagcttccgtctgctactcgagccccccgtcagtgggttcggtgcaggaactggcccaacgcgctgccgtcgtcatcgagggaaaggtgcatcctcagagacgacagcaaggcgccctcgaccggaaagctgcggctgcagcgggggaagcgggagcatggggtggcgacagggaaccgccggcggcaggcccgagagcgctgggacctccggcagaggagccgcttctggccgccaatggcactgtgcctagctggcctaccgcgccggtgccatccgcgggggaaccgggagaggaggcgccctatctggtcaaagtgcatcaagtgtgggcagtgaaagcgggaggactgaagaaggacagcttgcttactgtacggctggggacctggggacacccagccttcccgtcatgcgggcgcttgaaggaggactcccgatacatcttcttcatggaaccggacgctaactccacctcacgggcgccggcggcgttccgcgcttcgttcccgccgctcgagactggaagaaacctcaagaaggaagtgagcagagtgctgtgtaagcggtgtgccctgccgcctcgcttgaaagaaatgaagtcgcaagagtccgccgccggatcgaagctcgtgctgcggtgcgaaacctcgtccgagtactcgtcgctgcgcttcaaatggtttaagaatggtaacgaactgaaccggaaaaacaagccacagaatatcaaaatccagaaaaagcctggaaagtccgaactgagaatcaataaggctagtctggccgacagcggagaatacatgtgcaaggtgatctccaagctgggaaatgattccgcaagcgctaacatcacgatcgtggagtccaacgccaccagcacctcgaccaccggcacctcacatctcgtgaaatgcgccgagaaagaaaaaaccttttgtgtcaatggaggagaatgtttcatggtgaaggatttgtccaaccctagcaggtacctttgcaaatgtccaaacgagttcacgggagatagatgtcaaaactacgtgatggcctccttttacagcacttctactccgttcctcagcctgcccgaa

SEQ ID NO: 17527 - DNA, 1266 bp, synthetic construct
  misc_feature 1..1266: note = source = /note="Description of Artificial Sequence: Synthetic coding sequence"
  source 1..1266: mol_type = other DNA
atgcgctggagacgagctcctcgacgctctggtagaccaggtcctagagctcagcgacctggaagcgcagcccggtcatcacctccactgccgctgttgccactccttttgctgcttggaaccgctgcactcgcaccaggggcggccgcaggtaacgaggcagcccctgcaggcgcaagcgtgtgctacagttcacctcctagcgtgggatcggtgcaagaactggctcagagagctgcagtcgtgatagagggaaaggtgcatccgcagcgtcgccaacaaggagcccttgacagaaaggccgcagccgcagcgggcgaggcaggtgcatggggtggtgacagagagccacctgccgcaggcccgcgcgcgctcggtcctccagcagaagaacctctgcttgccgccaacggaaccgtgccatcgtggccaaccgcaccagtgccttcggccggagagcccggggaagaagcaccctacttggtgaaggtccatcaggtgtgggccgtcaaggcaggaggactcaagaaggactcgttgctcactgttagactcgggacttggggtcacccggcatttcctagctgcggtaggctcaaggaagatagcaggtacattttctttatggaaccagatgcaaattcaacttccagagcgccagccgctttcagagcatcgtttccaccactggaaaccggaagaaacctgaaaaaggaggtgtcaagggtgctgtgcaagcgctgtgcactgcctccaagactgaaggagatgaagtcccaagagtcagccgccggttcaaagctggtcctcaggtgtgagactagcagcgaatactcctcccttcgcttcaaatggttcaagaatggaaacgaactcaaccgaaaaaacaagccacagaatatcaaaatccagaaaaagcctggaaagtcagagttgcgcataaacaaggcctcgcttgcagattctggtgaatacatgtgtaaagtgatttccaagctcggcaacgattccgcatccgcgaacattactatagtggagtcgaatgcaactagcacctcaaccaccggaacctcccatctggtgaaatgcgccgaaaaagaaaaaacgttttgtgttaacggaggagaatgttttatggtgaaggatctcagcaacccatccagatacctgtgcaagtgccctaacgaatttacgggagatcgctgtcagaactatgtcatggcatcgttttacagcaccagcacgccctttctttccctgccagag

SEQ ID NO: 17528 - DNA, 1266 bp, synthetic construct
  misc_feature 1..1266: note = source = /note="Description of Artificial Sequence: Synthetic coding sequence"
  source 1..1266: mol_type = other DNA
atgaggtggcgcagagctccccggcggtctggaagacccggcccccgcgcccagcggcccgggtcagccgcccgaagtagtccacctttaccattgttgcccctgctgctgctgctgggaaccgcggccctggcgcccggtgctgccgccggtaacgaggccgccccggccggtgcttccgtatgctacagttctccacctagcgttggtagcgttcaggagcttgcacagcgagccgctgtcgtcattgagggcaaagtgcaccctcagaggcgccagcagggtgcccttgacagaaaggctgccgctgctgcaggcgaggcaggcgcatgggggggcgaccgagagccacctgcggccggccctcgtgcactggggcccccagctgaagagcctcttttagctgccaatggcaccgtgccgagttggcccacagcacctgtaccttccgccggcgagcccggggaagaagccccctaccttgtgaaagtgcaccaggtgtgggctgtgaaggccggcggcttgaagaaagatagtctgttgaccgtgaggttgggcacctggggccatcctgcttttccatcttgcgggcgactgaaagaagacagccggtacatcttctttatggagcctgacgcaaattctactagccgcgcccccgcggcgtttcgcgcatcatttccacctctggaaaccggccggaatctgaaaaaagaggttagccgtgtactttgtaaaaggtgcgccctgccgccgcggttgaaggagatgaagtcccaggagtctgcagccggttccaaattagttctgagatgcgaaacatctagcgagtatagttcactgcgctttaagtggtttaaaaacggaaatgaactcaacagaaagaacaagccacagaatattaagatacaaaagaaacccggaaagagcgagctgagaatcaacaaggcttcactcgcagacagtggagagtatatgtgcaaagtgatatcaaaacttggcaacgactccgcatctgcaaacattacaatcgtggaatccaacgctacctcaacttctactaccggtactagccatttggtgaaatgtgctgagaaggagaagacgttctgcgtgaacggaggcgaatgcttcatggtgaaggacctgagtaacccatctagatatctgtgcaagtgtcccaacgagtttaccggcgatcggtgccagaactatgtgatggcaagtttttactctacttcgaccccatttctgtcattgcctgaa

SEQ ID NO: 17529 - DNA, 1266 bp, synthetic construct
  misc_feature 1..1266: note = source = /note="Description of Artificial Sequence: Synthetic coding sequence"
  source 1..1266: mol_type = other DNA
atgcggtggaggagagctcccagacgctccgggagacctgggccgagagcccaaagacccgggagcgctgccaggagcagcccacccttaccacttttgccccttctgcttcttctggggaccgcagccctggctccgggcgccgcggccggaaatgaggccgctcctgccggcgcgagcgtgtgttactcctccccccccagcgttggcagcgtccaagagctggcccagagagctgcggttgtcatagagggcaaggtgcatccacagagaaggcagcagggtgctctcgaccggaaggccgccgcagccgccggtgaggccggcgcctggggcggagacagggagcctccggccgccggtccgcgagcactgggtccacctgccgaggagcctctgctggcggcaaacggaactgtcccctcatggccaacagcccccgtgccgagtgctggagagcccggcgaagaagctccataccttgtgaaggttcaccaggtgtgggctgtgaaagccggaggacttaagaaagactctctcttgacagtcaggctgggtacctggggtcatcccgccttccccagctgcggtcggctcaaagaagacagtcggtacatcttctttatggaacccgatgcaaacagcacctcccgagcacccgccgctttccgggccagcttcccccccctcgaaacgggaaggaacctgaagaaggaagtgtcacgcgtgctctgtaagcggtgcgccctgccgccccggttgaaagaaatgaagtcccaggaaagcgccgccggatccaagctggtgctgcgatgcgagaccagctcagaatattcgagtttgcgctttaaatggtttaagaacggtaatgagctaaacaggaaaaacaaaccccagaacatcaagattcaaaagaagccaggcaagtcggaactccgcataaataaagcctccctggcagattcgggtgaatatatgtgtaaagtgatatcgaaactcggcaatgactccgcttctgcgaacatcacaatcgttgaaagtaatgcaacgtcaacctccaccacaggaaccagtcacctcgtcaagtgtgccgagaaagaaaagacattctgtgtgaacggtggagaatgcttcatggtgaaggatctgtctaatcctagtcgttatttgtgcaaatgcccgaatgaattcacaggagaccgctgccaaaactacgtcatggcatctttttatagcacctctaccccctttctcagccttccagag

SEQ ID NO: 17530 - DNA, 1266 bp, synthetic construct
  misc_feature 1..1266: note = source = /note="Description of Artificial Sequence: Synthetic coding sequence"
  source 1..1266: mol_type = other DNA
atgcgctggaggagggctcctcggcgttcggggcgtccggggccccgggcccagcgccctgggagcgccgcaagatcctctccgccgctccccctcctgccgctcctactgctgcttggtacggccgcactagcaccaggggcagcagcagggaacgaagcagctcccgcaggggcgagtgtgtgttacagctcccctccctcagtgggatctgtccaggaattggctcagcgtgctgccgttgtaatcgaagggaaggtccacccccaaaggagacaacagggtgccctggaccggaaggctgctgccgctgccggagaggccggtgcctgggggggcgaccgcgaaccgcccgcagccgggccacgcgctctcggccctccggcagaagagccactgttggctgccaacggcaccgtgcctagctggccaacggcccctgtgccttctgctggtgagcctggcgaagaggccccttatctggtgaaagtgcatcaggtatgggctgtgaaagccgggggcctcaagaaggattccttactgactgtgcggttgggaacatgggggcacccagcctttccttcgtgtggccggctaaaggaagactcacggtatattttctttatggaacctgacgctaactctacctcaagagctccggcggcttttcgggcctcctttccccctctcgagacagggagaaatctgaaaaaggaagttagtcgcgtcctctgcaaacggtgtgcattgccccctcgattaaaagagatgaagagtcaggagtcagcggcggggagcaagctggtgttgcggtgcgaaaccagtagtgagtacagctcccttagatttaaatggttcaagaatggaaatgaactgaaccggaaaaataagcctcagaatatcaaaatacagaaaaaaccaggaaagtccgagcttaggatcaacaaggcctcccttgccgatagcggggaatacatgtgtaaagtgatctctaagttagggaatgactcagcctcagccaacattactattgtggagagcaacgcaacatcaactagtaccaccggaacatcacatcttgtgaaatgcgctgagaaagaaaagacgttctgcgtgaacggaggagagtgcttcatggtgaaagacctgtctaatccctcacgctatttgtgcaaatgcccaaacgaattcactggggataggtgtcaaaactatgtgatggcttcattttatagcacatccacgcctttcctgagcctgcctgag

SEQ ID NO: 17531 - DNA, 1266 bp, synthetic construct
  misc_feature 1..1266: note = source = /note="Description of Artificial Sequence: Synthetic coding sequence"
  source 1..1266: mol_type = other DNA
atgcggtggagacgggcacctagacggtctggaagacccggacctagggctcaaagacccggctccgctgccaggtcctcacccccgctgcccctccttcctctccttctgctattggggactgccgcactggcacctggcgccgccgccggcaatgaggcagcgcctgcaggagcctcagtttgttactcaagccctccatctgtgggcagtgtgcaggaacttgctcagagggcggccgtcgtgatcgagggtaaggtccacccacagcgccggcagcagggggctctcgatcgtaaagcggccgcagcggcaggtgaggccggagcctggggcggggaccgggagcccccggccgctggcccccgagccctggggccaccagccgaagaacccctgctggcggcaaacgggacagtcccttcctggcctactgcgcctgtcccgtctgcaggggagccaggagaggaagcgccatatctagttaaggtgcaccaggtgtgggcagtaaaagcggggggtctgaaaaaggatagtctgctgactgtgcgactagggacttggggtcacccagctttcccaagctgtggacgcctaaaagaagactctcggtacatctttttcatggagcctgatgcgaattctactagccgtgctccagcagcttttcgagccagtttccctcccctggagacagggaggaatctgaagaaagaggtttctcgggtgctgtgtaagaggtgcgcactgcccccacgccttaaagagatgaaaagccaggagtccgcggcaggcagcaagctggtgctcagatgcgaaacgtcatcggaatattcaagcttgcgattcaagtggttcaagaacgggaacgagctaaatcggaagaacaagccccaaaacataaagatccagaagaaacccggaaagtccgagctgcggattaacaaggcttccttggctgactcgggcgaatatatgtgcaaagtgattagcaaactcggaaatgatagcgcatccgccaatatcactattgtggagagcaacgctacttccacttccaccactggaaccagccacttggtgaagtgtgccgaaaaggaaaagacattctgtgtgaatggaggggagtgctttatggtgaaggatctctctaatccatcccgctacctctgtaagtgccccaacgagttcacaggcgacagatgccagaactatgtcatggccagtttttactcgacgtctactccctttttaagccttcccgaa

SEQ ID NO: 17532 - DNA, 1266 bp, synthetic construct
  misc_feature 1..1266: note = source = /note="Description of Artificial Sequence: Synthetic coding sequence"
  source 1..1266: mol_type = other DNA
atgcgatggcgccgagccccccgacgaagtggtcggccgggaccccgtgcgcagaggcctggcagcgctgcccggagctctccgccgttgcctctcctccccttgcttcttctgctgggtactgcagcactcgcgcctggtgccgccgccggtaacgaggccgccccggcaggtgcttcggtgtgttactcgtcgcccccatccgttggttccgttcaggaactcgcccagagggccgcagtcgtcattgagggcaaggtgcacccacagcgtcgtcaacaaggggcgcttgaccgcaaagcagcggccgccgctggtgaggctggtgcttggggcggtgatcgggagccccctgctgccggcccgcgcgccctgggtcccccggctgaggagccccttctcgcggccaatggcaccgtccccagctggcccacggcccctgttccgtctgctggagaacccggtgaggaagcgccttatctggttaaggtgcaccaggtttgggctgtcaaggcgggcggtctgaagaaggactccctgctgaccgtgcgcctgggcacgtggggtcatccggctttcccatcgtgcggcagactcaaggaggattcccgctacattttcttcatggagcccgatgctaacagcacatctagggcgccggccgccttccgagcaagcttcccgcctctcgagactggacgcaatctgaaaaaggaggtgtcccgtgtactttgtaagcgttgtgcactcccgccccgcctgaaggaaatgaaatcccaagagtcggctgccggatccaagctcgttctgcgttgcgagaccagtagcgaatactcgtctctgcgcttcaaatggttcaagaacggtaatgagctcaatcgcaaaaacaagccccagaatattaagattcagaagaagcctggtaagtccgagctcaggatcaacaaggcatccttagccgattcgggagaatacatgtgcaaggttatttctaagctcggaaacgactccgcgtccgccaacatcacaatcgtagagagtaacgcgacctctaccagcacgacaggcacttcgcacttggtaaaatgcgcagaaaaggagaagacattctgcgttaacggcggggaatgttttatggtcaaggatttgtcaaatccaagccgttatctctgcaagtgcccgaatgagttcactggagaccgctgccagaattatgtcatggcaagcttctacagtacctcgacaccgttcctctcactgcctgag

SEQ ID NO: 17533 - DNA, 1266 bp, synthetic construct
  misc_feature 1..1266: note = source = /note="Description of Artificial Sequence: Synthetic coding sequence"
  source 1..1266: mol_type = other DNA
atgcggtggcgccgcgcccctcgccgctctggacggcccggccctagggcacaaagacccggctccgccgctagatcaagtcctcccttgcctctgctcccactcctattattgctcggcaccgcagctctggcgccaggcgccgctgctgggaacgaggccgctcctgccggagcatctgtgtgttattccagtcctccctccgtggggagcgtccaggagcttgcccagcgcgccgccgttgtcattgagggcaaggtgcatccccaaaggaggcagcaaggtgctctcgaccggaaggctgcggccgctgccggtgaagcaggcgcctggggcggagacagggaaccgccagccgcagggcccagggcgcttggcccgcctgccgaggaacccctactcgccgcaaacgggaccgttccgagctggcctacggcccctgtcccgagcgccggcgagcctggggaggaagccccgtatctagtgaaggtccaccaggtctgggccgtgaaggccggcgggcttaaaaaggatagcttactaaccgtgcgtctggggacctggggtcaccctgcatttccatcctgtgggcggctgaaagaggatagccggtatatttttttcatggagcctgacgccaactctacaagtagagcacccgcggcctttcgagcctcattcccaccgctagaaaccggaagaaatctcaagaaagaggtctcacgggtgttgtgtaagcgatgtgcgctgcccccaaggctaaaggagatgaaatctcaggagagcgcggccggcagtaagctggtattgcgctgcgagacaagctcagagtatagttccttgcggtttaaatggttcaagaatggaaacgagctcaaccgcaagaataagccacaaaacattaaaatacaaaagaaacccggtaaatctgagctcaggattaataaggcctctttagcagacagtggtgaatacatgtgcaaagtgatttcgaaacttggaaatgactcagcctccgcaaatatcaccatagtggagtctaacgcaacatctacctcgaccaccgggacatctcacctcgtcaagtgcgcagagaaagagaagacgttttgcgtgaacggtggtgaatgtttcatggtcaaggatctcagtaatccatctaggtacctctgcaagtgccctaatgagtttacaggggatcgctgccaaaactacgtaatggcttccttctacagcacctccaccccgtttttgtccctccctgaa

SEQ ID NO: 17534 - DNA, 1266 bp, synthetic construct
  misc_feature 1..1266: note = source = /note="Description of Artificial Sequence: Synthetic coding sequence"
  source 1..1266: mol_type = other DNA
atgcgctggagaagggcccccaggcggagcgggcgaccggggcctagagcacaacgccctggatcagcggcaagaagctcgcctcctctccctctccttcctttgctgcttcttctggggactgcagcactcgcccctggagcggcagcggggaacgaggcagccccggctggtgcatcggtgtgttactccagcccaccaagcgtggggagcgtgcaagaactcgcccaaagagccgccgtggtgatcgaaggcaaagtgcatcctcagagaaggcaacagggtgcactggataggaaggcagccgcagcagcaggtgaggcgggtgcctggggaggtgaccgcgagccaccagccgccggcccaagagcacttggcccccctgccgaagagccactcctcgcagcaaatggaactgtcccatcatggcctaccgcccctgtcccttcggcaggtgaacctggggaggaggctccctacttggtcaaggtgcatcaagtgtgggcagtcaaagcggggggactgaaaaaggattcccttcttactgtgcggttgggtacttggggccatcctgcctttccatcctgcggacgtctcaaggaagatagcagatacatcttcttcatggaacctgacgcgaatagcacctctcgcgcacctgcagcatttagagcatcgtttccacccctggagactggacgtaatctcaagaaggaggtcagcagagtcctctgcaaacggtgtgcacttccacctagactgaaggagatgaagagccaagaaagcgcagctggttcaaaacttgtcctgcgatgtgaaacctcctcagagtactcgtccctgagatttaagtggttcaaaaatggaaacgagctcaatcgaaagaacaaaccacaaaacatcaagatccagaaaaaaccagggaagagcgaactgaggataaacaaggcatcactcgccgattccggagaatacatgtgcaaggtcatttccaagttgggcaatgattccgcatctgccaacattaccattgtcgaaagcaacgcaacctctacttcaaccactggaacctcgcaccttgtgaaatgcgcagaaaaagagaaaactttctgtgtgaacggaggagaatgttttatggtgaaggacctgagcaacccctcgagatacctttgtaaatgccccaacgaatttactggggatcgatgccaaaactacgtgatggcatcgttttactcaacgtcgactccttttttgtcactccctgaa

SEQ ID NO: 17535 - DNA, 1266 bp, synthetic construct
  misc_feature 1..1266: note = source = /note="Description of Artificial Sequence: Synthetic coding sequence"
  source 1..1266: mol_type = other DNA
atgcgctggagaagggcacctcggcgctcaggaagaccaggtccgcgagcccagcggccgggttcagccgcgagatctagcccaccgctgcctctgctgccgctgcttctcctgttgggcaccgccgcgctggcgccgggagccgcagccggaaacgaggccgcgccagcgggcgcatcagtgtgctactcatcgccgccgtccgtgggatccgtgcaggagctcgctcaaagagctgccgtggtgatcgagggaaaagtgcatccgcagcgccggcagcaaggtgccttggaccggaaagccgcggcggccgcgggagaggctggggcatggggaggtgatagagaacctccagcagcaggaccacgcgcgctcggaccgccagccgaagagccgctcctggctgcaaatgggactgtgccctcatggccgacggccccggtgccatccgcaggagaaccaggcgaagaggcgccatacctggtcaaggtgcaccaggtgtgggctgtgaaagcaggaggtctgaagaaggactctctgctcactgtgcgactcggaacctggggtcaccccgcattccctagctgcggacgcctgaaagaggactcgagatacattttcttcatggaaccggacgcgaactcgaccagccgcgcacctgcggcgttcagagcgagctttccgcctctcgagactgggagaaacctgaaaaaagaagtctcgcgcgtgctgtgcaagcggtgcgcgctgcccccgcgcctgaaagaaatgaaatcgcaggagtcggcggcggggagcaaactggtgctgaggtgcgaaacttcttccgaatactcgtcgctgcggttcaaatggttcaagaatgggaatgaactgaaccgcaaaaacaaaccgcaaaatatcaagatccagaaaaaacctggaaagtcggagctcagaatcaacaaagcctccctggcagatagcggagagtacatgtgcaaagtcatctccaagctcggaaatgactcggcgagcgctaacattaccatcgtcgaaagcaacgcgacctcgaccagcacgaccgggactagccacctggtgaagtgcgcggaaaaggaaaagactttctgcgtcaacggcggggaatgctttatggtcaaggacttgtccaacccgtcgcgctacctgtgtaagtgcccgaatgagttcaccggcgatcgctgtcagaactacgtgatggctagcttctacagcacctcgaccccattcctttcactgccggag

SEQ ID NO: 17536 - DNA, 1266 bp, synthetic construct
  misc_feature 1..1266: note = source = /note="Description of Artificial Sequence: Synthetic coding sequence"
  source 1..1266: mol_type = other DNA
atgcgatggaggcgggcccctcggaggagtggccgcccgggtcccagagctcagcggcctggcagcgcggcgaggtctagtcctcccctgcccttgcttccattactgctcctgctgggaaccgcagcactggcgcccggcgcggccgctggaaatgaggctgcacccgccggcgctagcgtgtgctattcttcccctccctcggtcggatcagtacaggagctggcacagcgggctgcagtggtcatcgaagggaaagtgcatcctcagcggcgccaacagggagccttagaccgcaaggcggctgctgctgctggcgaggctggagcctggggaggtgaccgagagcctcccgccgctgggccgcgggccctcggacccccagcggaggagccactgctagccgccaacgggacagtgccctcttggcccacagctcccgtcccttctgcaggtgaacctggcgaagaggcaccatacctcgtgaaggtgcaccaagtctgggccgtcaaagctggcggtctcaagaaggatagtctgttaaccgttcgcctgggtacgtggggacacccagcctttcctagctgcggccggctgaaggaggattctaggtacatcttcttcatggagccggatgcaaacagcacctcaagagcaccagcagcatttagggcgagtttcccaccactggagaccggtaggaaccttaagaaggaggtgtctcgagtcttgtgtaaaaggtgtgcactacctccgaggctcaaggagatgaagtcccaggaatctgccgccggtagcaagttggtactgaggtgtgagacttcatcagagtatagttcactcaggttcaaatggtttaaaaacggaaacgaactgaaccggaagaataagccgcagaacattaaaattcagaaaaagcctggtaaatccgaattgcggatcaacaaagctagtctcgccgatagtggggaatacatgtgtaaggttatttcaaagttaggcaacgacagtgcttcggccaacattactatcgtggagtcaaacgccacatctaccagcactaccggaaccagccacctcgtcaaatgtgctgaaaaggaaaagaccttttgcgtcaatggcggtgagtgttttatggtgaaggacctcagcaatccatcacggtacttatgcaaatgtcccaatgagtttaccggagatagatgccaaaactacgtgatggcttctttctactcgacctcaactccctttctctccttacccgag

SEQ ID NO: 17537 - DNA, 1266 bp, synthetic construct
  misc_feature 1..1266: note = source = /note="Description of Artificial Sequence: Synthetic coding sequence"
  source 1..1266: mol_type = other DNA
atgcggtggcgcagggcgccgcgacggtccgggaggcctgggccgagggctcaacgcccgggcagtgccgcgagaagctccccaccacttccgctgcttccacttctcttgctgcttggaactgccgcactggctccaggagccgcggcaggtaacgaagcggccccggcgggagctagcgtgtgttacagctcaccaccgtccgtgggctccgtccaggagctggcgcagcgggcggccgtggtgatcgagggcaaggtccatccacagagacggcaacaaggagcgctcgacaggaaagctgcggcagcggcgggagaggccggagcttggggaggagatcgggaacccccagcggctggccccagagcactggggccccctgccgaagaaccgctgctggccgcaaatgggactgtcccaagttggccaaccgccccggtgccttccgccggagagcccggtgaggaagccccgtacttggtaaaggtgcatcaggtatgggcagtgaaggcaggcggcctcaagaaggattccctcctgaccgtgcgcctggggacctggggacacccagccttcccgtcgtgcggacggcttaaggaagatagcagatacatcttcttcatggagcctgacgctaacagcactagcagggccccggccgctttccgtgcgtcgtttcctcctctcgaaaccggccggaatctgaaaaaggaggtgagccgtgttctgtgcaagcgctgcgccctgccgccgcggcttaaggagatgaaatcgcaagagtcggcggctggaagcaaattggttctcagatgtgagacttcctccgaatactcgtcactgaggttcaagtggttcaaaaatggtaacgaactgaatcgaaagaacaaaccacaaaacatcaaaatccagaagaaaccgggaaagtcagagctccgcatcaacaaggcgtcgctggccgattcaggcgagtatatgtgcaaggtgatttccaaacttggaaacgacagcgcctcagcgaacattacgatcgtcgaatccaatgccaccagcactagcaccaccggaacttcgcacctggtcaagtgcgctgaaaaagaaaagaccttctgcgtgaatggtggggaatgtttcatggtgaaagacctgtccaacccgtcgcgctacctgtgtaagtgccctaacgaatttactggcgaccggtgccagaactacgtgatggcatcgttttactctacctccacgccgtttttgtcactccccgaa

SEQ ID NO: 17538 - DNA, 1266 bp, synthetic construct
  misc_feature 1..1266: note = source = /note="Description of Artificial Sequence: Synthetic coding sequence"
  source 1..1266: mol_type = other DNA
atgcgctggagaagggccccaagacggtccggtcggccggggccacgggcgcagcggccaggatcagcagcccgcagctcgccgccgctcccacttctcccgctgctcttgctcctgggaaccgcggctctggccccgggagcggcagccggcaacgaagctgccccggcaggtgctagcgtgtgctactcgtctccgccaagcgttggctcagtgcaggagctcgcgcagcgcgccgccgtggtcatagaaggaaaggtccacccgcagcgacggcagcaaggagcccttgacaggaaggccgcggctgccgctggggaggccggcgcatggggcggagacagagagccgccagccgcggggcccagggcccttgggccgccagcggaggaaccactgctcgcggcgaacggtaccgtcccgtcatggccaactgcgccggtcccatcggccggcgaacccggagaagaagcaccttacttggtcaaagtgcaccaagtctgggcagtcaaggcggggggactgaaaaaggactctctgctgaccgtgcgactcggtacttggggtcaccctgcctttccgtcctgcggccgcctcaaggaggacagccgctacatcttcttcatggagcccgatgccaatagcaccagcagagcgcctgctgccttccgcgcctcctttccaccgcttgagactggacggaatctcaaaaaggaagtgtcgcgggtcctgtgcaaaagatgtgccctcccgccgcgcctgaaagagatgaagtcccaagagagcgcagccggatccaagctcgtgctcaggtgtgaaactagctccgaatatagctcgctgcgtttcaagtggttcaaaaacggaaatgagctgaatcgaaagaacaagcctcagaatatcaaaattcaaaagaaaccaggcaagtcagaactccggatcaataaggcgtcactggcggactcaggagagtatatgtgcaaggtcatttcgaaattgggtaatgacagcgcgtccgccaatatcaccatcgtggaatccaacgcaactagcacttccactaccggtactagccatctggtcaaatgtgctgaaaaagagaaaactttttgcgtgaacggtggagagtgcttcatggtgaaagatctgtcgaacccatcgcgctacttgtgcaagtgcccaaatgagttcaccggggaccgctgtcagaattacgtgatggcaagtttttactcgacgtccacgccattcttgtcactgccggag

SEQ ID NO: 17539 - DNA, 1266 bp, synthetic construct
  misc_feature 1..1266: note = source = /note="Description of Artificial Sequence: Synthetic coding sequence"
  source 1..1266: mol_type = other DNA
atgcgatggagacgcgcacctcgccggagcggacgtcctgggccacgggcgcaaagacccgggtccgcggcaagaagctcccctccacttccactccttcctctcctgctgctgctcggaacggccgcgcttgctcctggagcagcggctggtaacgaagcagctcctgcgggggcaagcgtctgctacagctcgcccccgtctgtgggcagcgtgcaggaactggcccaaagggcagcggtcgtgatcgaagggaaggtgcatccccagcgacggcaacaaggggccctcgatcggaaggccgccgcggcagccggagaggccggggcatggggcggagatagggagcccccagcagcaggtcctagagccctgggaccaccggcagaggaaccattgctggcagcaaacggtaccgtcccttcctggcctaccgctcctgtgccttcagctggggaacctggggaagaggccccatatctggtgaaggtccatcaggtgtgggcagtcaaggcaggtggactcaaaaaggattcgctcctgacggtccgactcggtacttggggacatccagcgttcccaagctgcggcagacttaaggaagatagcagatacattttctttatggaacccgacgcaaacagcaccagcagggccccagcagccttccgtgcatcctttcccccgctggaaaccggccggaaccttaagaaagaggtgagtagagtgctgtgtaagaggtgtgcacttccaccacggctgaaagagatgaaatcgcaagaatccgcagcaggttcgaagctggtccttagatgtgaaacttcctcagagtactcctcactgcgctttaagtggttcaagaacggtaatgagctgaaccgcaagaacaagccccagaacataaagatccaaaagaagcctggaaaatccgaactgcggattaacaaagcctcgctggcagattcgggagaatacatgtgtaaggtcattagcaagctgggtaacgacagcgcctccgcgaacataaccattgtggaatcaaatgccacctcgacttccaccactggcactagccatctcgtgaaatgtgccgaaaaggaaaagaccttttgtgtgaatgggggagaatgctttatggtgaaggatcttagcaatccttcacggtatctttgtaaatgccctaacgagtttaccggtgaccggtgtcaaaactacgtgatggcgagcttctactcgacttctactccatttctgtcgcttccagag

SEQ ID NO: 17540 - DNA, 1266 bp, synthetic construct
  misc_feature 1..1266: note = source = /note="Description of Artificial Sequence: Synthetic coding sequence"
  source 1..1266: mol_type = other DNA
atgagatggcggcgagccccccgccgatcaggaaggcctgggccccgcgcccagcggccagggagcgccgcacggagctccccccctctgcctctcctgcccttattactcctgttggggactgccgcactcgccccaggcgccgcagctggaaatgaggccgcccctgcaggagcttctgtgtgctactcttcccccccttcggtggggtccgtacaggaactagcccagagagccgccgtcgtcatcgaggggaaggtgcaccctcagcggcgccagcaaggagccctcgatcggaaagcagctgctgccgccggagaagcaggcgcttgggggggggacagagagcctcctgcagccggcccgcgggccctcggcccacccgctgaagaaccgctcctggctgcaaacggaaccgtgccatcgtggccaaccgctccagtgccgtctgctggagagcccggcgaggaggccccttatctcgtaaaggtgcatcaggtgtgggctgttaaggctggaggcctcaaaaaagactcgctgctcacggttaggctggggacgtggggccacccggccttccccagctgtggccgattgaaagaagatagtcgatatatcttttttatggagccagacgccaacagtacctccagggcgccggcagcctttcgggccagctttcctccacttgaaacgggacggaaccttaaaaaagaggtcagcagagtgctgtgcaaaagatgtgcgctgcctccacgacttaaggagatgaaaagccaggagtcagccgctggatccaaacttgtactgaggtgtgagacgtcttccgagtattctagccttaggtttaagtggtttaaaaacggcaacgagctaaacaggaaaaataaaccccagaacattaagattcagaagaagcctggcaaatccgaactccgtatcaataaggcgtccctcgctgattccggggaatatatgtgcaaggtgatctcaaagctggggaatgacagcgccagcgccaacatcaccattgtggagtcaaatgccacatccacttcgacgaccggaactagtcacttggttaagtgtgcagaaaaagagaagactttttgtgtgaatggcggagagtgctttatggtgaaagatctgtccaatccttcccggtacctctgtaagtgtcctaacgaatttacgggagatcgttgccagaattatgtcatggccagcttttacagcacgagtacccccttcttaagcttacccgag

SEQ ID NO: 17541 - DNA, 1266 bp, synthetic construct
  misc_feature 1..1266: note = source = /note="Description of Artificial Sequence: Synthetic coding sequence"
  source 1..1266: mol_type = other DNA
atgcgctggagaagggcccctagacgatctggccggccgggtccacgagcacagcgcccaggttccgcggccagaagtagccctcctcttccattactgcctctgctgctgttactgggcaccgccgccctggctccaggcgcagcagcaggtaacgaagccgcacccgccggagctagtgtgtgttattcttcccccccttctgtcggatctgtgcaggagctcgcccagcgggcagctgttgttatagagggaaaggttcacccccagcggcggcaacagggggctctggataggaaggccgcagcagctgctggagaggcaggcgcctggggaggcgaccgggaacccccagctgccggcccgagggcactgggccccccagccgaagagccactgcttgcagcaaatgggaccgtgccctcttggcctactgctccagtaccctcagccggcgaacccggagaggaggcaccctatctggtgaaggtccaccaggtctgggccgtgaaggccggcggcttgaaaaaggacagcttgctgaccgtccggttgggaacttggggccacccagcatttccttcatgcgggagacttaaagaagacagcagatatatcttttttatggaacccgatgcgaacagcacttccagagcccctgcggccttcagagcttcatttcccccgctggagacaggaagaaaccttaaaaaggaagtaagccgggtcttgtgtaaacgctgcgctttgcctccaaggctcaaggagatgaagtcacaggaatcagcggcaggatccaaactggttctgcgatgtgaaacatctagtgaatattcttctctgagattcaagtggttcaaaaatggaaatgaactgaaccgtaaaaacaagcctcaaaacatcaaaattcagaagaagcctgggaagtccgagctgcgaataaacaaagcttcccttgccgacagcggcgaatacatgtgtaaagtgatcagcaagttaggcaacgatagcgcctcagcaaatattacaattgtggagtcaaacgccacctccacctctacgaccggtacctctcatctcgtaaagtgtgccgaaaaggaaaaaacgttctgcgtaaacggcggagaatgttttatggtgaaggacctttctaaccccagccgttacttgtgtaaatgtccaaacgaattcaccggtgataggtgtcagaattatgtcatggctagtttctacagcacatctacccccttcctcagtctcccagaa

SEQ ID NO: 17542 - DNA, 1266 bp, synthetic construct; identical to SEQ ID NO: 17496
  misc_feature 1..1266: note = source = /note="Description of Artificial Sequence: Synthetic coding sequence"
  source 1..1266: mol_type = other DNA

SEQ ID NO: 17543 - DNA, 1266 bp, synthetic construct
  misc_feature 1..1266: note = source = /note="Description of Artificial Sequence: Synthetic coding sequence"
  source 1..1266: mol_type = other DNA
atgaggtggaggcgagcaccaaggagaagtggtagacccgggcctcgagctcagcgccctggctctgccgcacgctctagccctcccctgcccctcctgcctctgctcctcctactgggaacggcagcattggccccaggagcagcagccggcaatgaagctgcacctgcaggggcctccgtgtgctattctagtcccccaagtgtgggtagcgtgcaagaactggcccagcgagcggcggtggtgattgagggcaaagtgcacccacagagaaggcagcagggggcactggatcgaaaagccgccgccgccgctggcgaggcaggcgcctggggcggtgaccgagagcctcctgcagcgggacctcgggctctgggcccgccagcggaggagcctctgttagccgctaacggcacagtgccttcgtggcctactgcccctgtacctagcgccggggagccaggtgaggaggctccctaccttgtcaaagttcatcaagtgtgggccgtgaaggccggtggactcaagaaagattcgctcctcacagtgaggcttggaacatggggccaccccgcttttccttcctgtggccgactgaaggaggactctaggtatattttctttatggagcccgatgccaatagcacatcaagagctcctgcagctttcagagccagcttccctccacttgaaacgggccgaaatttgaagaaagaagtgtccagagtgctctgcaaaagatgcgcgctcccacctaggctaaaagaaatgaagtctcaagaatctgccgctgggagtaagcttgtgctcaggtgcgaaacctccagcgagtattcctctctgagatttaaatggtttaaaaatggaaacgagctcaacaggaagaataagccccagaatataaaaattcagaaaaagcctgggaagagcgagctccgaatcaacaaagctagcctggctgattccggggaatacatgtgtaaagttatctcgaagcttggcaacgattctgcttcagccaacattacaattgtcgaatccaatgcaactagtacctccaccaccggcaccagccacctggtgaagtgcgctgagaaagaaaagaccttctgcgtcaacggcggcgaatgctttatggtgaaagacctaagcaacccatctcgttacctctgtaagtgccccaatgaattcaccggcgaccgttgtcaaaattatgtcatggcttccttttacagcacctcaactccctttctgtccctcccagaa

SEQ ID NO: 17544 - DNA, 1266 bp, synthetic construct
  misc_feature 1..1266: note = source = /note="Description of Artificial Sequence: Synthetic coding sequence"
  source 1..1266: mol_type = other DNA
atgaggtggcgtcgcgccccacggcgttccgggcggcctggccccagggcccagcggccgggatcggccgcgaggtcctcacccccattgccgctgcttccccttttgttgctccttgggacggcagctttggccccaggggcagccgcagggaacgaagcggcccccgcaggagcttcagtgtgctactccagtccccccagcgttgggtccgtgcaggagctggcacagcgggccgctgtagtcatcgaaggtaaggtccatccccagaggagacagcagggagcactcgatcgaaaagcagcagctgcagccggggaagcaggagcatggggtggggacagagaacctcccgccgccggaccccgggcacttggcccccccgccgaagagcccctgctggctgctaacggaaccgtaccctcttggcccacggctccagtgcccagcgctggggaacccggagaggaggccccatacctcgtcaaagtccaccaagtatgggccgtcaaggctgggggactaaaaaaagattcactgcttacagtgcggctgggtacatgggggcaccccgctttccctagctgtggccgcctgaaggaagattcccgatatatttttttcatggagccagatgccaattctacgagccgtgccccagctgcatttcgagcaagctttcctcctctggaaacaggtcggaatctgaagaaagaggtttcaagggttttatgtaagagatgtgccttgccccctaggctgaaagagatgaaaagtcaggagagcgccgcaggatctaagctggtcctcagatgcgagacttcgtccgaatacagcagcctcaggtttaaatggttcaaaaatggaaacgaactgaaccgcaagaataagccccagaacataaaaattcaaaagaagccaggcaagtccgaactgcggattaataaagctagtctggccgatagcggagaatatatgtgcaaagtgatttctaagctcggaaacgactcggcttctgccaacatcacgatagtcgaatcaaacgccacttccacgtctaccaccggaacctcacatttggtgaagtgcgctgagaaagagaagacgttctgcgttaacggcggagaatgttttatggtaaaagatttgagtaacccttcccggtacctctgcaagtgtcctaatgagtttacaggggataggtgccagaactatgtcatggccagcttttactccacctccactccctttctttctttgcctgag

SEQ ID NO: 17545 - DNA, 1266 bp, synthetic construct
  misc_feature 1..1266: note = source = /note="Description of Artificial Sequence: Synthetic coding sequence"
  source 1..1266: mol_type = other DNA
atgcgctggaggcgggctccacgccggtctggacgccccggaccgagagcacagcgaccaggctccgcagcaaggtcatcgccaccacttcccctccttcccctcctcctgctgcttggtaccgccgcgcttgcacctggggccgcagccggtaatgaagcggcgcctgccggagcctcggtttgttactcatcacctcctagcgtcggtagcgtccaagagctcgctcaacgcgcggcggtcgtcatcgaaggaaaggtccatccgcagagacgccaacaaggggcactggatcggaaagccgcagccgcagctggcgaggcaggagcctggggaggtgatagagaacctccagcggcaggcccgcgtgctctgggccctcctgctgaggagcctcttcttgccgccaatggcactgtcccatcgtggccaaccgcaccggtgccgtccgccggagagcctggggaagaagccccttacctggtgaaggtgcaccaagtgtgggcagtgaaggcaggcgggctgaaaaaggattccctcctcactgtgagactggggacttggggacacccggctttcccttcctgcggcagactcaaagaggactcccgatacatattcttcatggaaccagacgcgaactcaacctcgagagcacctgccgcatttcgggcgagcttcccacctctggaaaccgggagaaaccttaagaaggaggtgtccagagtgctgtgtaagcggtgcgcacttccgccccgacttaaggaaatgaagtcccaagaatcggcagcaggttccaaacttgtgctgaggtgcgaaacctcgtccgagtattcctcactcaggttcaagtggttcaagaatgggaatgaactcaacagaaaaaacaaacctcaaaacatcaagattcaaaagaaaccaggcaaatcagagctccgcatcaacaaagcgtctctggcagattcgggagagtacatgtgtaaggtgatttccaagctgggaaacgattcggcgtcagcaaatatcaccatagtcgaaagcaatgccacgtcgactagcactaccggaactagccacctggtgaagtgtgccgaaaaggaaaagacgttctgtgtgaacggaggagagtgctttatggtcaaagatctgagcaacccaagcagatacctctgcaagtgtcctaacgagtttactggggaccggtgtcagaattatgtcatggcatcgttttactccaccagcacgccttttctttcactgccagag

SEQ ID NO: 17546 - DNA, 1266 bp, synthetic construct
  misc_feature 1..1266: note = source = /note="Description of Artificial Sequence: Synthetic coding sequence"
  source 1..1266: mol_type = other DNA
atgaggtggagacgggctccaagacgatctggacgccccggaccgcgtgcacaaaggcctggctcggcggcgagaagcagccctccgctcccgctcctcccacttcttctgcttcttggaactgcagccctggcccctggtgccgcagccggtaatgaagcagcacccgccggcgcatccgtgtgttactcctcacctcccagcgtcggttctgtccaagaactggcacagagagcagccgtggtcatcgagggtaaggtgcacccacaacgtaggcaacagggcgcgctggatcggaaggcagccgcagcagctggagaagcaggagcatggggaggtgatcgagaacctccggcagctggtcctcgtgccctcggtccgccagcagaagaacctcttctggcagctaatggtactgttccgtcatggccaactgccccggtgccgtcggcaggcgagcccggcgaagaggctccttacctcgtgaaggtgcatcaagtgtgggcagtgaaggccggaggtcttaagaaggacagcctgctgacggtgaggttgggaacctgggggcatcctgctttcccatcctgtgggagactgaaggaagattcgcgttacatattcttcatggaaccagacgccaattcgacttcgagagccccagcagcattccgcgcttcatttcctcccctcgaaaccgggagaaaccttaagaaagaggtgtcccgggtgctctgcaagagatgtgcacttccaccccgacttaaagagatgaagagccaggaaagcgcagcgggaagcaaattggtcctgcgatgcgaaacctcttctgaatactcctcccttagatttaagtggttcaagaacggcaatgagctgaaccggaagaacaaaccacaaaacatcaagattcagaaaaaaccagggaaatccgaactccgcatcaacaaggccagcctggccgattccggggaatacatgtgcaaggtgattagcaagctcggaaacgatagcgcatcggcgaacattactattgtcgaatccaacgcaacttcaacctcaactacgggcacttcccatctggttaagtgtgcagaaaaggaaaaaactttttgcgtcaacggcggcgagtgctttatggtcaaggatctgtcgaacccctcgcgttatctctgcaaatgtccgaatgagtttacgggggatcgatgtcagaattacgtcatggcttccttctattcaacctctacgccttttcttagcctgcctgag

SEQ ID NO: 17547 - DNA, 1266 bp, synthetic construct
  misc_feature 1..1266: note = source = /note="Description of Artificial Sequence: Synthetic coding sequence"
  source 1..1266: mol_type = other DNA
atgcgttggcgccgcgcgcccagacggagtggccgccctggtccacgggctcagcgcccaggaagcgccgccaggtccagtccacccttgcccttactgcctctacttttgttgctcgggaccgcggccttggctcccggggctgccgctgggaacgaagccgcgcctgccggcgcgtccgtgtgctacagttctcctcctagcgttggctcagtgcaagaactcgcgcaacgcgccgcggtcgtcatcgagggtaaagtccaccctcagcggcgacagcagggcgcactagatcgcaaggccgcagccgccgccggcgaagctggagcctgggggggcgatagagagccaccagcagccgggccacgtgccttaggaccaccagctgaggagcccctactcgcggctaacgggacagttccctcgtggcccacagctccagtgccaagtgccggagagcccggagaggaggccccttatctggtgaaggtccaccaggtttgggcagtgaaagctggtggcctgaaaaaggactcgctactgacggtcaggctgggcacatggggccaccccgcctttccgtcctgtggtcgtctaaaggaagacagccgatacattttctttatggaacccgacgcaaacagcacctccagagcaccggcggcgtttcgtgcctctttccccccactagagaccggcagaaacttgaagaaagaggtcagtcgcgtactgtgcaagcgttgtgcgctaccccccaggctgaaggaaatgaagtcccaggagtcagcggccggctctaagcttgttttgaggtgtgagacaagctcagagtatagctctcttaggtttaaatggtttaagaatgggaatgaactgaaccggaagaataagccgcagaacatcaagatacagaagaagccgggtaagagcgagctgcgaattaacaaggcatccctggcagattctggtgaatatatgtgcaaggtcatcagcaaactgggtaatgactctgcctcagctaatataactatcgtggagtccaacgctacctccactagcaccactggcacttcacaccttgtgaagtgtgcagagaaggaaaaaactttttgtgtgaacggaggtgaatgcttcatggtgaaggacctgtcaaatccttccagatatctgtgcaagtgccccaacgagttcacgggagaccggtgccagaactatgtgatggcttctttttattccacaagtacgccctttctgagtcttcctgag

SEQ ID NO: 17548 - DNA, 1266 bp, synthetic construct
  misc_feature 1..1266: note = source = /note="Description of Artificial Sequence: Synthetic coding sequence"
  source 1..1266: mol_type = other DNA
atgagatggaggcgggcaccaagacgatccggcagacccggcccccgagctcagaggcctggaagtgccgcacggtccagtcctcctctgcccctgctgcctcttttgctcctgctgggaacggctgctctggccccaggtgctgcggcaggaaacgaagcagcacccgcaggggcatccgtgtgctactccagtcccccctccgtggggtctgtgcaggaattggctcaacgagcagcagtggtgattgagggtaaagttcacccccagcgcaggcagcagggagcactcgatagaaaggcagcggccgcggccggcgaggctggagcctggggcggcgatagagagccacccgctgcaggtcctcgtgcattaggaccccccgcagaagagcccctgttggctgctaacggaaccgtaccctcttggccgaccgcccctgttcccagcgctggtgagcctggtgaagaggcgccgtaccttgtgaaagtccatcaagtttgggcagttaaggctgggggcctgaagaaagacagtctgctcactgtgaggttgggaacctggggccacccagcattccccagttgtggacgacttaaagaggacagtaggtacatcttttttatggaacctgacgctaacagcacgagtcgggctcccgctgcctttagagcctcttttcctccactagaaacgggtaggaatcttaagaaggaagtctcgcgggtcctgtgtaagcggtgcgcgctgccaccacgccttaaagagatgaagagtcaagaaagcgcagcgggttctaaactcgttttgcgctgcgagacaagtagtgagtattcttcccttcgctttaaatggttcaagaacggcaatgaactaaaccggaagaacaagccgcaaaatattaagatacagaagaagccagggaagtcagagctgcgcattaacaaagcatctctggccgactctggcgagtatatgtgtaaggtcatctctaagctgggcaatgattcagcgagcgcgaatatcacgattgttgagtctaacgctacgtcgacctcaaccacaggcacgagccatcttgtgaagtgtgctgagaaggaaaagactttctgcgttaatggcggagaatgcttcatggtgaaggacctaagtaatccaagtaggtatctgtgtaagtgcccgaacgagttcacaggagatagatgtcaaaactacgttatggcgtctttctacagcacatctacacctttcctgagcctccctgaa

SEQ ID NO: 17549 - DNA, 1266 bp, synthetic construct
  misc_feature 1..1266: note = source = /note="Description of Artificial Sequence: Synthetic coding sequence"
  source 1..1266: mol_type = other DNA
atgcgttggagaagagcaccccgacgctcaggtaggcctggtccacgtgctcaaagaccgggcagtgctgcgaggtcaagccctcctttgcccttgttacccttgttgttgttgctcggaactgctgcgcttgccccaggtgccgctgccggtaacgaggctgcgcccgctggtgcatcggtttgttattccagtccacccagcgtgggaagcgtgcaggaattggcacagcgagctgccgttgtaattgagggtaaggttcaccctcagagacgtcaacagggcgccctggatcgaaaagctgcagcagctgctggagaagctggtgcgtggggtggggatagagagcctccagctgctggtcctcgggcgctgggaccacctgccgaagagccgttattggctgccaacggcaccgtaccatcatggcccaccgctcccgtgccctcagctggagagcctggagaagaagctccatatttggtgaaggttcatcaagtgtgggctgtgaaggctggcggactcaagaaagattctcttcttacagtgcgactaggtacctggggccatcctgcctttcctagctgcggtcgtctgaaggaggatagccgatatattttttttatggagcctgatgctaactcaacttccagggcgcctgccgcttttagagcctcatttccccctttggagactggaagaaacctgaaaaaagaggttagcagagttctgtgcaagaggtgtgctcttccccctaggctcaaagagatgaagtcccaagagagcgcggcgggatcaaaacttgtcctcaggtgtgagacttcgtcggaatattcgtcattgcggttcaaatggttcaaaaatggcaacgagttgaaccgtaaaaataaacctcaaaatataaagattcaaaaaaagcctggtaagtctgagttaagaataaataaggcctctctcgctgacagtggtgagtacatgtgcaaggtcatatccaaattgggaaatgattccgcttctgcgaatattacaatcgtggagagtaatgcaacctccactagcacaacaggtacctcacatctcgtgaaatgtgccgagaaggaaaaaactttttgtgttaacggcggtgagtgctttatggtcaaagatcttagcaatccttctcgatacttatgtaagtgcccgaatgagttcaccggtgataggtgccagaattacgttatggccagtttttattctacttctacaccttttctttctcttcctgaa

SEQ ID NO: 17550 - DNA, 1266 bp, synthetic construct
  misc_feature 1..1266: note = source = /note="Description of Artificial Sequence: Synthetic coding sequence"
  source 1..1266: mol_type = other DNA
atgaggtggaggcgggctcctcgcagatcaggccgcccgggtccgagggctcagcgcccgggatccgccgcccgctcctccccaccgctcccgctgctgccgctgcttctcctgctcggcaccgctgctctggcgccaggcgcggcggcgggaaatgaggccgcccctgctggggccagcgtgtgctactcgagcccaccgagcgtgggatccgtgcaggagctcgcacagcgggccgcagtggtcatcgaaggaaaggtccatccgcagcgccggcaacagggagcgcttgacagaaaggctgccgcagccgctggcgaggccggggcatggggaggagacagagaaccacctgccgccgggcctcgcgcgcttggaccgccggctgaagaacccctgctcgcggcgaatggaacggtgccatcctggccgactgccccggtgccttcggctggggagcccggagaagaggcaccttatctcgtcaaggtgcaccaagtctgggcggtcaaagctggaggtctgaagaaagactcgcttctcactgttcgcctcggaacttgggggcacccggcatttccgtcctgtggccgtctgaaggaggacagccgatacatcttcttcatggaaccagacgccaactcgactagccgtgcacctgccgcttttcgcgcatcgtttccaccactggaaaccggacgcaacttgaagaaggaggtgtcacgggtgctgtgtaaacgctgtgcgcttcccccgaggttgaaggagatgaagtcacaggagtccgccgccggttcgaagctcgtgcttagatgcgaaacctccagcgaatactcttcgttgagatttaagtggttcaagaacggcaacgaactcaatcgcaaaaacaagcctcagaacattaagatccagaaaaaaccgggaaagtccgaattgcggattaacaaggcctcgttggctgattccggagagtacatgtgcaaagtgatttctaaactgggtaatgacagcgcctcagcgaacatcacgatcgtggaatccaacgcaacttcaacgtcgaccaccggtacctcacacctcgtcaagtgcgctgaaaaggagaaaaccttctgtgtgaacggaggagaatgcttcatggtgaaggacctttcgaatccttcacggtacctctgcaagtgtccgaatgagttcaccggagatcggtgccagaactacgtcatggcgtcgttctacagcacttcgaccccattcctttcgttgccagag

SEQ ID NO: 17551 - DNA, 1266 bp, synthetic construct
  misc_feature 1..1266: note = source = /note="Description of Artificial Sequence: Synthetic coding sequence"
  source 1..1266: mol_type = other DNA
atgagatggagacgggccccacggcggtcaggccgtcccggccctagagcccagaggccgggaagcgctgcacgttcctccccacctctgccgcttctccctctactgcttctgctcggtactgcagccctggcccccggggcagctgccggcaacgaggcagctcctgccggcgcgtctgtgtgttactcttcccccccatcagtcggatccgtacaggagcttgctcagagggccgccgtcgtgattgagggtaaagtgcacccccaacggaggcagcagggagcccttgacagaaaggcagccgccgccgcaggcgaagccggggcatggggaggggatagggagccgcctgccgccgggcctcgggctctggggcctcctgccgaagaaccactcttggctgccaacggaacagtcccgtcatggcccaccgctcctgtgccttcagcgggcgaacccggggaggaagccccatacctggtcaaggtccatcaggtttgggcggtaaaagcaggcgggctaaaaaaagacagtctgctgaccgtacgcctgggaacttgggggcaccctgccttcccatcctgtgggcgactgaaggaagacagtaggtacattttctttatggagcctgacgccaacagcactagtcgtgctcccgccgcctttagagcgagctttccccctttagagactggtcggaacctcaagaaggaggtaagtcgggtgttgtgtaaacgatgcgccctaccccctcgcctgaaggaaatgaagagtcaagagtcagcagcaggaagcaagctggttctgaggtgtgagacaagttccgaatattcttcactacggttcaagtggttcaaaaacggtaacgagctgaacaggaagaacaagccccagaacattaagatacagaagaaacccgggaagtctgagctccgtatcaataaagcctcactagctgactctggcgagtatatgtgcaaggtgatttcaaaactcggcaatgacagtgcgtctgctaacatcacaattgtcgaaagtaacgccaccagtacaagtactaccggcacgagccacctggtgaagtgcgccgaaaaggaaaagactttttgcgtgaacggcggggaatgtttcatggtcaaggatctttcgaaccctagcagatacctctgcaagtgcccgaacgagtttacaggcgacaggtgccagaattacgtaatggcctccttctacagtaccagtactccttttttaagcctgcctgag

SEQ ID NO: 17552 - DNA, 1266 bp, synthetic construct
  misc_feature 1..1266: note = source = /note="Description of Artificial Sequence: Synthetic coding sequence"
  source 1..1266: mol_type = other DNA
atgcggtggcggcgcgctcctaggcgatctggaaggcctgggccgcgggcccagaggcctggatcagcagccagatcttctccaccattgccactgctcccacttctgctgctcttggggacggcagcactagcacccggggcagcagccgggaatgaagccgccccagcaggagcttccgtatgctacagttcacccccatccgtcggatccgtgcaggaactggcccagagagctgctgtggtaatcgaagggaaagtacatcctcaacggcggcaacagggagctctagatcgaaaggccgctgcagcagcaggagaagctggggcctggggaggggacagggaacccccagctgctgggccccgcgcattagggccacctgctgaagaaccattactcgccgctaacggaactgtgccctcctggcctactgctccagtcccttctgctggggaaccaggggaggaagcaccctatttagtcaaagtacatcaggtatgggctgtcaaggctggagggctcaaaaaagattcccttttaacagtgcgcctgggaacatggggacatcccgcatttccctcctgcgggaggttaaaagaagatagtagatacatcttcttcatggaacccgatgcgaactctacttctcgggctcccgctgcttttagagcatcgtttccccctcttgaaactggaaggaaccttaaaaaagaagtcagtcgggtgctctgcaaacggtgtgccctacccccacgacttaaagaaatgaaatcccaggaatcagctgctggaagtaaacttgttctcaggtgcgaaacatcctctgaatactcatctcttagattcaaatggttcaaaaacgggaatgaactgaacagaaaaaacaagccacagaatataaaaattcagaaaaaacccgggaaatctgagctccggataaataaagcctcactagcagatagtggagaatatatgtgtaaggttatttctaaactagggaacgattctgctagtgctaatattactatagttgaatccaatgcgacatctacatcaacaacaggaacttcccacctcgtgaagtgtgccgaaaaagaaaaaacattctgtgtcaatggaggggaatgtttcatggtgaaagatctctctaaccccagtcgctatttatgtaaatgtcctaacgaatttactggggacaggtgccagaattacgttatggcctcattttattccacatctactcccttcttgagtcttcctgag

SEQ ID NO: 17553 - DNA, 1266 bp, synthetic construct
  misc_feature 1..1266: note = source = /note="Description of Artificial Sequence: Synthetic coding sequence"
  source 1..1266: mol_type = other DNA
atgcgatggcgccgggcaccacggcgctcaggaaggccaggcccacgggcccaacgcccaggctccgcggcccgaagctccccccctttgcctctccttcccctcctgctgttattagggaccgcagcactggcaccaggcgcagcagctggcaacgaggccgcaccagccggggctagtgtgtgctacagcagcccaccaagcgtcggctctgtacaggaactagcacaacgtgccgccgtcgtgattgagggaaaggttcatccgcaacggagacaacaaggcgcgctggataggaaggccgcagccgctgcaggagaggctggcgcctgggggggtgatcgcgagccacccgcagccggtcccagggcattggggccccctgccgaggagccattactggccgcgaacggcacagtcccatcctggccgacagccccagtaccttcagctggagagcccggtgaagaggccccctatctggtcaaggttcatcaagtctgggcagtgaaagctggagggctaaagaaggactcgctcctgaccgtgcgcctgggcacttggggccaccctgcttttccatcttgcggcaggctgaaagaggacagcaggtatatcttttttatggagcccgacgctaatagtacctctcgcgccccggccgcctttcgcgcctcatttcctcctttggagaccggaagaaacctgaagaaagaagtttcaagggtgctgtgtaaaaggtgtgccttgcctcctagactgaaggagatgaaatcgcaggagagtgctgccggctcaaaattggtgttgcgatgtgagactagctccgagtattcgagcctgaggttcaaatggtttaaaaacggaaacgaacttaataggaagaacaagccccaaaatattaaaattcagaaaaaacctgggaaatctgagctaaggattaacaaggccagtttagcagatagcggtgaatatatgtgtaaggttatcagtaaattgggaaacgactctgccagtgccaatatcacgatagtagagtcaaacgcaacttccacgtcaacaacgggaacatcccaccttgtgaagtgcgccgaaaaggagaagaccttctgcgtgaatggcggcgagtgtttcatggttaaggatctgagcaatccttctagatacttatgtaagtgcccaaatgagtttaccggggacagatgccagaactatgtgatggcatccttttattcgacatcaactcctttcttaagtctgcctgag

SEQ ID NO: 17554 - DNA, 1266 bp, synthetic construct
  misc_feature 1..1266: note = source = /note="Description of Artificial Sequence: Synthetic coding sequence"
  source 1..1266: mol_type = other DNA
atgcggtggcggcgtgctcccaggcgctccgggcgtccaggtcccagggcccaacgacctgggtctgctgcgcgctcatctccgcctttaccattgctgcccctgctactcctactcggtaccgcagcccttgcgccgggcgccgcagcagggaatgaggcggcaccagctggcgcaagcgtgtgctactcgtcaccgccatccgtggggagtgtgcaggaattggctcagcgggccgctgttgtcatcgagggaaaagtgcacccacagcgccggcagcagggggcactcgatagaaaggccgccgcagccgcaggggaggcgggcgcatggggcggcgatagagagccccctgcagcaggtcctagggctctggggcctcctgccgaagaacctttattggctgctaatgggaccgttccgtcgtggcccaccgcaccagtgccatctgcaggagaaccaggagaagaggctccttacctggtgaaagtgcaccaagtgtgggcagtgaaggcgggcggcctaaagaaggactcactgctgacagtccgcctcggcacgtggggacatccagccttccccagttgcggtagattgaaagaagacagtcgctacatcttctttatggaacccgacgctaactctacaagtcgggcacccgccgcattccgggctagcttcccgcctcttgagactggccggaatctaaagaaggaagtgtcccgagttctttgtaagcgatgtgccctgccgcctaggctgaaggagatgaagtcccaggaatcagccgcagggtcgaaattggttcttcgctgcgaaacatcctccgagtattcaagtctgcgctttaagtggtttaaaaacggcaatgaactgaatagaaagaataagcctcagaacattaaaatacaaaagaagcccgggaagagcgagctgaggatcaacaaagcgtcactggccgattctggagagtatatgtgcaaagtgatttccaagctgggaaatgactccgccagcgctaatatcaccatagttgagtccaatgccaccagcaccagtactaccggtactagccatctcgtaaaatgcgccgaaaaggaaaaaactttttgtgttaatggcggcgaatgtttcatggtgaaagatctaagtaacccctcacgatacctgtgtaaatgcccgaatgaatttactggggacagatgccagaattacgtaatggctagcttctattccactagcactccgtttctgtctctgccagaa

SEQ ID NO: 17555 - DNA, 1266 bp, synthetic construct
  misc_feature 1..1266: note = source = /note="Description of Artificial Sequence: Synthetic coding sequence"
  source 1..1266: mol_type = other DNA
atgcgatggcgacgagccccgcgaaggtctggcaggccaggtccccgcgcccaaaggccaggttcggcagcacgatcgtcaccacccctgcctctgttgcccctgttgttgctcctcggaacggctgccttggccccgggtgctgcggccggtaacgaggccgccccagccggtgcttctgtgtgttattcgtccccgccctccgtcggtagtgttcaggagctggcccagagagctgccgtggtgatcgaaggcaaggttcacccgcagagacgccagcaaggtgcgctggatcgcaaagccgcagccgctgccggcgaggctggtgcttggggaggggaccgtgagcctccggccgccggcccgcgcgcgctgggccctcccgcagaagaacccctgctcgccgcgaatggcactgtgccgagctggccgactgcaccagtgccctcagcaggagaaccgggcgaagaggccccatacctggtgaaggtgcaccaggtctgggcggtgaaggctggcggcctgaagaaagattcactgctgacggttaggctcggcacctggggccaccccgccttcccaagctgcgggcggctgaaggaggattctaggtatatcttttttatggaaccagacgcaaacagtaccagccgcgccccggccgcctttcgggctagcttccccccattggaaactgggcgtaatcttaaaaaggaggtatcgcgggtcctgtgcaagcgttgcgctttgccaccccgtctgaaggaaatgaaatcccaggagagtgccgcgggctcgaagctagtgctacggtgcgaaacgagttccgagtactccagccttcgttttaagtggtttaagaacggcaacgaactgaatcgaaagaacaaacctcagaatatcaaaatccagaagaagcccggaaagagcgaactacgcatcaataaggcgagcttggccgacagtggcgagtacatgtgcaaggtgatctcgaaattggggaacgattccgcttccgcgaatatcaccatagtggagagcaatgcgacgagcacctcgactactggtacgagtcatttggtaaagtgcgctgagaaggagaagaccttctgtgtgaacggcggagaatgctttatggtgaaggatctgtccaatcccagccggtacttgtgcaagtgccccaatgagtttaccggcgaccgctgtcaaaattacgtgatggcctccttctacagcacgagtaccccattcttgagtctgccggaa

SEQ ID NO: 17556 - DNA, 1266 bp, synthetic construct
  misc_feature 1..1266: note = source = /note="Description of Artificial Sequence: Synthetic coding sequence"
  source 1..1266: mol_type = other DNA
atgcgctggaggcgggcaccaagacgctcaggtcgcccgggaccccgcgcccagagacccggcagtgcagctcgcagcagtccccccctccccctgcttccactgctgttgctgctcggcaccgctgccctcgcacctggcgccgccgccggcaacgaagccgcacccgccggtgctagtgtgtgctattcttcacctccgtctgttggttctgttcaggagctcgcacagcgtgccgctgtggttatcgaaggtaaggtgcacccacagaggcgccagcagggggctcttgacaggaaggccgcagcagctgcgggcgaagccggtgcttggggaggggaccgcgaacctccagccgctgggcctagggcgctgggaccacccgccgaagaaccactgcttgcagccaacggtacagtgccttcatggcctactgccccggttccaagtgccggcgaacctggcgaggaggccccctatttggtgaaggtgcatcaggtatgggcggtgaaggctgggggattgaagaaggattccctgttgacggtgaggctgggtacctggggacatcctgctttccctagctgtggcagactgaaggaagatagcagatatatcttcttcatggagcccgacgctaatagcactagcagagctccggcggccttccgagcaagctttccaccactggagactggacggaacttaaagaaggaggttagccgagtgctgtgcaagcgatgtgctttgccaccccgcctgaaggagatgaaaagtcaggaaagcgcagctggatcaaaactggtcttacgatgtgaaacctcgtcagaatactcctccctccggtttaagtggtttaagaacgggaacgaacttaatagaaaaaacaaaccgcagaatatcaagatccagaagaagccagggaaatctgagctgcggatcaacaaagcttctctggcagattccggcgaatatatgtgcaaagtgatatctaaactcggcaatgatagtgccagcgccaacatcactatcgttgaatcaaacgccacctcaaccagcacaaccggaacctctcacctggtcaagtgcgctgaaaaagagaagacgttctgcgtcaacgggggcgaatgttttatggtgaaggacttgtcaaatccatctaggtatctgtgcaagtgtcccaatgagttcactggggacagatgccagaattacgtgatggcctcattttacagcacttcgacgccgttcttgtccctccccgaa

SEQ ID NO: 17557 - DNA, 1317 bp, synthetic construct
  misc_feature 1..1317: note = source = /note="Description of Artificial Sequence: Synthetic coding sequence"
  source 1..1317: mol_type = other DNA
atgccgctgaacgtgtctttcaccaacaggaactacgaccttgactacgacagcgtgcagccctacttctactgcgacgaggaagagaacttttatcaacagcagcagcaatcggaactccagccgccggcgccgtctgaggacatatggaagaagttcgaactcctcccgacccctccgctgtcgccgtctcgccgctccgggctgtgctccccgtcctatgtggccgtgactcctttcagcctgcgcggagataatgacggaggtgggggatcgttctcaaccgccgatcagctggaaatggtcaccgagctgttgggtggagacatggtaaaccaatcgtttatctgtgacccagatgatgaaaccttcatcaagaatatcatcatacaggactgtatgtggtccggcttcagtgccgcagcaaaactcgtgagcgaaaaacttgcctcctaccaggcagctcggaaggattccggatcgcccaatcctgcccggggccattctgtgtgctcaacttcctcgctgtaccttcaagacctgagcgctgcggcatcagaatgcatcgacccatctgtggtctttccatacccgctgaacgactcgagctcacctaagtcttgcgctagccaggattccagcgcgttctccccgtcatcagatagccttttgtcctcgaccgagagctcgccccagggatcgccggaaccgttggtactgcacgaggaaacgcctcccactacctcgagcgactccgaagaagagcaggaagatgaggaagaaatcgatgtggtttccgtggaaaagagacaagcgcctggcaaaaggtccgagtcgggctcgccgtcagcgggaggacattcgaagcccccacactcgccactggttctgaaaagatgccacgtcagtacgcatcagcacaattacgccgcacctccctcaactcggaaagattaccccgccgcgaagcgggtgaagctcgattcagtcagggtgctgcgccagatcagcaacaacagaaagtgtacttcgccacggtcctccgacactgaggaaaacgtcaagcgacgtacccataatgtgctcgagaggcaacggcggaacgaactgaaacgctcgttctttgctctccgcgaccaaattccggaactggagaacaatgagaaggccccaaaggtggtcatcctgaagaaagccacggcctacatcttgtcagtgcaagcggagactcagaagctcatttccgaaatcgacctgctccggaagcagaacgaacagctcaagcacaaattggagcaactccgcaattcctgcgca

SEQ ID NO: 17558 - DNA, 1317 bp, synthetic construct
  misc_feature 1..1317: note = source = /note="Description of Artificial Sequence: Synthetic coding sequence"
  source 1..1317: mol_type = other DNA
atgccgctgaacgtctcgttcacgaatcgcaattatgatctcgattacgattcggtgcagccttacttttactgcgatgaggaggagaatttctatcagcaacaacaacagagcgagttgcagccgcctgcgccaagtgaggacatatggaagaagttcgaattgcttccaacgccccccctctcgccctcccgaagaagcggtctgtgctcgccgagttacgtggccgtcactccattttcgctccgcggtgataacgatggcggaggaggctcgttctccactgcggaccaactcgagatggttaccgaactattgggcggagatatggtcaaccaaagctttatctgcgatccggacgatgagaccttcattaagaacataatcatacaggactgcatgtggtccggcttttcggccgccgctaagctcgtgagtgagaagttggcatcttaccaggctgctcgtaaggactcgggctcccctaaccccgctcgaggccacagtgtttgtagtacctcctcactgtatctacaggacttatctgccgcagcctccgagtgtatcgatccctcggtcgtcttcccgtatcccttgaatgatagcagttctccaaaaagctgcgcgtcccaggactcgtcggcgttcagcccctcctcagactccctcctgtcctcaacagagagtagcccgcagggatcccccgagcccttggtcctccacgaggagacaccccccacaactagcagcgattccgaagaggaacaagaagacgaagaagagattgatgttgtctccgtggagaagcgtcaagcaccgggtaagcgtagcgagtctgggagccccagcgcaggaggccatagcaaaccgcctcacagtcccttggtattgaaaagatgccacgtctcgacgcatcagcacaattacgccgccccaccctccacacgcaaagattatccggccgcgaagcgcgttaaattggattcggtgagggttttgcgtcagatttcgaataacagaaagtgcacgtccccccgtagcagcgataccgaggagaacgtcaaaaggcgcacacataacgtcttggagcggcagcgaagaaacgaacttaagaggtccttttttgcgctacgtgatcagataccggagctggagaataacgaaaaggcacccaaggtggtcatactgaagaaggcgaccgcctacattctttcggtccaagccgaaacccagaagctgatctcagagattgacttgctgcgtaagcagaatgagcagctgaagcacaaattggagcagctgcgaaatagctgtgct

SEQ ID NO: 17559 - DNA, 1317 bp, synthetic construct
  misc_feature 1..1317: note = source = /note="Description of Artificial Sequence: Synthetic coding sequence"
  source 1..1317: mol_type = other DNA
atgcctctgaatgtttcctttactaatagaaattacgacctggactacgattctgtgcagccatatttttattgcgacgaggaagagaacttctatcagcagcagcagcagtcggagctgcagccccctgcaccttcagaagatatctggaagaagttcgagctgctgccaacacccccattatcaccaagtaggcgatcaggcctgtgttcaccctcctatgtggccgtgacccccttttcgctacgcggtgacaatgacggcggaggcggctccttttcaaccgccgaccaactagagatggtgactgaactgctgggaggtgatatggttaatcagtccttcatctgtgacccagacgacgagacatttattaagaatattatcattcaagactgcatgtggagcggcttctccgcagcagcgaagctggtgtccgagaaactggcctcctaccaggccgcccgaaaggactctggaagccccaaccccgcaagaggccattcagtatgttccacaagctcactttacctgcaggatttgagtgctgccgcctcagaatgcatcgatccaagcgtcgtcttcccttatcccctaaacgattcatcttcccccaaaagctgcgcctcccaggatagctcagcttttagcccgagctcggactctttgctgagcagcaccgaatctagcccccaaggctccccggagcccctggtactgcatgaagaaactccacccacgacgtcttccgattctgaagaggaacaggaagatgaagaagagatagatgtggtatccgtggagaagcgacaagcacctggtaaaagaagtgaatccggcagtcctagcgcaggcgggcacagcaagccaccacacagcccgctggtcttgaagcgatgtcacgtgtctactcaccagcacaactacgcagcaccccccagtactagaaaagactatccagcagctaaaagagtgaagctcgattcagtaagggtgcttcgacagatcagtaacaatcggaagtgtaccagccctcgttctagtgatactgaggagaatgtgaagcgacgaacccataacgttctggaacgtcaaaggaggaatgaactgaagcggtcattttttgccttaagagaccagatacctgaactggaaaacaatgaaaaggcgcccaaggtagttatcctgaagaaggctaccgcatacatactttctgtgcaggcagagacgcaaaagctcatttcggaaatcgatctgttgaggaagcagaatgaacaactcaaacacaaactggagcaactgcgtaatagctgcgca

SEQ ID NO: 17560 - DNA, 1317 bp, synthetic construct
  misc_feature 1..1317: note = source = /note="Description of Artificial Sequence: Synthetic coding sequence"
  source 1..1317: mol_type = other DNA
atgccacttaatgtgtcctttaccaatagaaactacgatctggactacgattcagtgcaaccatatttctactgcgacgaggaggaaaacttttaccagcagcagcaacagtcggagttgcaacctccggccccaagcgaagatatctggaagaagtttgagctgctgccaaccccgcccctttccccaagcaggcgctcgggactgtgttccccgtcgtacgtggccgtgactccattctccctcaggggagacaacgacgggggaggaggatcattcagcactgcggatcagctcgagatggttactgagctgctggggggagatatggtaaaccagtccttcatttgcgacccggacgacgaaaccttcatcaagaatatcatcatacaagactgcatgtggtccggttttagcgccgccgccaagctggtttcggaaaaacttgcttcgtaccaagcagcaagaaaggacagcgggtcgccaaacccggcgcggggacattcggtgtgttcaactagctccttgtacctgcaggacctttcggccgcggcctcggaatgtattgatcctagcgtagtgttcccgtacccactcaacgactcatccagccccaagtcgtgcgcgtcgcaggactcctcagcattctcgccctcatccgattccctgctgagcagcacggagagctcgccgcaaggatcacctgagccgctcgtcctgcacgaggaaaccccgcctactacttcatcggacagcgaggaagaacaggaagatgaggaagagatcgacgtggtgtccgtggaaaagcgccaggcgccgggcaaaagatccgaaagcggctctccttcagcgggcggccattcaaagcctccacatagccctctcgtgcttaaacgctgccacgtgagtacccaccaacataactatgcggctccaccgtccaccagaaaggactacccggcagcgaagcgggtcaaacttgatagcgtccgggtgctcagacagatctcgaacaatcgcaagtgtacttccccccgcagttctgatactgaagaaaacgtgaagcgcaggacccacaatgtcctcgaaaggcagcgacgcaacgaactgaagcgctcattctttgctcttcgcgatcagatcccggaactcgaaaacaacgaaaaggcaccgaaggtggtcatcctgaagaaagccacggcgtacatcctgtcggtgcaagctgaaacccagaagctcatttcagaaatcgacctgctgcgcaaacagaatgagcagcttaagcacaaacttgagcaactgcgcaattcgtgcgca

SEQ ID NO: 17561 - DNA, 1317 bp, synthetic construct
  misc_feature 1..1317: note = source = /note="Description of Artificial Sequence: Synthetic coding sequence"
  source 1..1317: mol_type = other DNA
atgccgctcaacgtgtcctttactaatcgtaactacgatctcgactacgacagcgtccagccatacttctactgtgacgaggaagagaacttctaccaacagcagcagcagagtgagctccagcccccggccccttcggaagatatttggaagaagttcgaactccttcctactccgccgctgtccccgtcccgaagatccgggctctgctcgccgtcgtacgtggccgtgacccccttctcgttgcgcggcgataacgacggcggaggaggatcgttctcaaccgccgatcagctcgagatggtgaccgaactcctcgggggtgacatggtcaaccaatcgtttatctgtgaccctgacgacgaaaccttcatcaagaacatcattatccaggactgcatgtggtcaggattttcagcggccgccaagctggtgagcgagaagttggcgagctaccaagccgcgcggaaggactctggctcccccaatccagcccggggacattccgtgtgttccactagctcactgtacctgcaggacctttcagctgctgcatccgaatgcatcgacccatcggtggtgttcccatacccactgaacgacagttcgtctcctaaatcctgcgcatcacaggacagcagcgccttttctccgtcatctgatagccttctgtcctcaactgagtctagtcctcaaggatccccagaaccgctggtcctgcatgaggaaaccccgccgactacttcatcagactccgaagaagaacaggaagatgaggaggaaatcgatgtggtgagcgtagagaagcgccaggctccgggcaagcgctccgaatcgggtagtccatcagctggtggacactcgaagcctcctcactccccactggtgctgaaacgttgccatgtctcgacccatcaacacaattacgcggctccgccttcaacccggaaggattaccccgcagcgaagagggtcaaactcgatagcgtgagagtcctgcgccagatcagcaacaatagaaagtgcactagcccgagatctagtgatacggaagaaaatgtgaagagaaggacccacaatgtgcttgaacgccaacggcggaatgagctgaagcggtcgttcttcgccctgagggatcagattccagagctcgaaaacaacgagaaggccccgaaggtggtcatcctgaaaaaagcgaccgcatatatcctttctgttcaggcagaaacgcagaaactcatctcagagatagacttgctgcgcaaacaaaacgagcaactgaagcacaaattggagcaactgcgcaactcgtgcgct

SEQ ID NO: 17562 - DNA, 1317 bp, synthetic construct
  misc_feature 1..1317: note = source = /note="Description of Artificial Sequence: Synthetic coding sequence"
  source 1..1317: mol_type = other DNA
atgccattgaatgtatcctttactaatcgtaattacgatcttgattatgatagtgtccaaccatacttctattgtgatgaagaagaaaatttttatcaacagcagcagcagtccgaacttcaacctccggcgccatccgaagatatatggaaaaaatttgaattattgccgacgccgccactgagcccgtcgagacgatcagggctgtgttcacccagctatgtggctgttacaccgtttagtttacgcggggataatgacggcggcggaggttctttttctactgcagatcagcttgaaatggtgacagaacttttaggaggcgatatggttaaccaaagtttcatttgcgacccggatgacgaaacatttatcaaaaacattatcattcaggattgcatgtggagtggtttttcagcggcggcaaaattggtgtcagaaaagctggcctcgtatcaggcagcccggaaagattccgggtctccgaacccagcacgtggacactccgtgtgctcaacgagtagtctatatcttcaggatcttagtgctgcagcgagcgaatgtatagatccttctgttgtgtttccatatccactgaatgattcctcaagccctaaatcctgcgcatcgcaggattctagtgcattcagtccttcatctgatagcttgttgtcaagtacagaatcatcgccgcaggggtcgccggagccgctggtgttgcacgaggaaacgccgccgacgacatcatctgattctgaagaagagcaagaagatgaggaagaaatcgacgtggtatcagtcgaaaaacgtcaagcgccaggaaaacgttctgagtctggctcaccatccgcggggggccattcaaaaccgcctcactctcctcttgtactcaaacggtgccacgtgagcacccatcagcataattacgctgccccgccgagtacccgcaaggactatccagcagcaaaacgagtgaagctggatagcgttcgcgtcttgcgtcaaattagcaataatagaaaatgtacttcaccgagatcgtcagacacagaagaaaatgtgaaaagacggacgcacaatgtcttagagagacaacgccgcaatgaattgaaacgttccttctttgcgcttcgggaccaaataccggaactggaaaataacgaaaaagcccccaaggtggtaatcctgaaaaaagccacagcttacattttgagtgtccaagctgaaacacaaaaacttattagcgaaattgaccttcttcgcaagcaaaatgaacaattaaaacataaattggagcaattacgcaattcttgtgcg

SEQ ID NO: 17563 - DNA, 1317 bp, synthetic construct
  misc_feature 1..1317: note = source = /note="Description of Artificial Sequence: Synthetic coding sequence"
  source 1..1317: mol_type = other DNA
atgcctttgaatgtgagttttacaaaccgaaattacgaccttgattacgactcagtgcagccctatttttactgtgatgaagaggagaacttttaccagcagcagcagcagagcgagttgcagcctccggcaccaagcgaggatatctggaagaaattcgagctccttcctactccccctctgagcccatcccggagatctggactgtgcagtccatcttatgtggcggtgacacctttttccttgcgtggggacaatgacgggggtggaggctccttttccaccgcagaccagttagaaatggtaactgaactcctcggcggagatatggtgaatcagtctttcatttgcgacccagacgacgagacctttattaagaatatcatcattcaggactgtatgtggagcggcttctcagccgctgcaaaactggtgtctgaaaaactggcctcctaccaggccgcgcggaaagactcaggaagtcccaaccccgctaggggccattctgtgtgctcgacaagttccctctatttacaggacctgtcagctgctgccagcgaatgtatcgacccttcagtggtctttccctacccactaaacgactcatcatctccaaagtcctgcgctagtcaggattcctctgcctttagtccatcatcagattctctactgtccagtacagagtcaagtcctcagggcagtcccgaaccattggttctgcacgaggagacccccccaaccacatcctccgatagcgaggaagaacaggaggacgaagaggagatcgatgttgtcagtgttgagaaacgccaggcgcccggaaaacggagcgaaagtgggtccccctccgccggtggccacagcaaaccgccccactctcctctggtgctgaaacgctgccacgtgagcacacaccagcacaactatgcggcccccccgtcaacccgaaaggattatcccgccgcaaagcgagtaaagcttgactctgtgcgagtcctgcgccagatttcaaacaatagaaagtgcaccagcccgagaagttccgacacagaagaaaacgttaagaggaggactcataacgtcctggaacggcagcggcggaatgagcttaagcgcagctttttcgccctgcgtgaccaaataccggaattagaaaacaacgagaaggcccctaaagtcgtcatactgaagaaggccacagcttacattctgtcagttcaagcggaaacccagaagttaatctccgagatcgatttgctgaggaagcagaacgagcagcttaagcacaagttagagcaactgcggaattcttgcgct

SEQ ID NO: 17564 - DNA, 1317 bp, synthetic construct
  misc_feature 1..1317: note = source = /note="Description of Artificial Sequence: Synthetic coding sequence"
  source 1..1317: mol_type = other DNA
atgccattaaatgttagctttaccaatcgaaattacgatctggactacgatagcgtacagccatacttttactgcgacgaagaagagaatttttatcaacaacaacaacaaagtgagctgcaaccaccggcgccttccgaagatatctggaagaaattcgaactgctaccgactcctccgttgtcaccatcacgacggtcgggactctgctcgccgagttacgtcgctgtgaccccgtttagtttaaggggagataatgatggagggggggggagcttctcgacagctgatcaactagaaatggtgacagagctgctcggtggagatatggttaatcaatccttcatttgtgatccagatgatgagacattcataaaaaacattataattcaagattgcatgtggtcaggattttccgcagcggctaagttggtttcggaaaagttagcatcatatcaggctgccagaaaagattccggatcaccgaatccggctagaggtcactccgtctgtagtacgtcaagcctctaccttcaagatctttctgctgctgcctcagaatgcatcgatccatctgttgtatttccatatccactaaatgacagttcttcgcctaagagttgcgcgtcccaagattcatcagctttttcgccgtcatcagattccttactttcctcaacagaatcgtcgcctcaaggaagccccgaaccccttgttttgcatgaggaaacgccgcccacaacctcgtcggattcagaagaagagcaagaagatgaggaagaaatcgacgttgtgtctgttgaaaagcgacaagcaccggggaaaagatccgaatccggttcaccgtctgcgggagggcacagcaaacctccacactcaccactggtcctaaaaagatgccatgtgtctactcaccagcataactatgctgcccccccttcaacgcgtaaagattatcccgccgcgaaacgagtgaaactggattcggtgagggttctaagacaaatttcgaataatagaaagtgtacttcaccacgatcttccgatactgaagagaatgtaaagcgaagaacgcacaatgtcctggaacgccagaggcggaacgagcttaaacggagtttttttgcactgcgtgatcaaattcccgaactggagaacaacgagaaggctccaaaggtcgttattttgaaaaaagccacggcttatatcttatcagttcaagccgaaactcagaagctaattagtgaaatcgaccttcttcgaaaacaaaacgaacaactcaaacataagcttgaacaattgagaaattcctgcgca

SEQ ID NO: 17565 - DNA, 1317 bp, synthetic construct
  misc_feature 1..1317: note = source = /note="Description of Artificial Sequence: Synthetic coding sequence"
  source 1..1317: mol_type = other DNA
atgcctctcaacgtttccttcacaaacagaaattatgacctagattacgattccgtgcagccttacttctactgcgatgaagaagagaatttctaccaacaacagcagcaatcagaacttcaaccccccgcaccgagtgaggatatttggaagaaatttgagttgttgcctacccccccgctctccccgtctcggcggtcaggtttgtgttcgccatcctacgttgcagtcacccctttctcgctccggggagacaacgatgggggagggggatctttttccaccgcagaccagcttgaaatggtgaccgaactcctgggcggggatatggtcaatcagtcttttatctgcgatcccgacgacgagacttttattaaaaatattataattcaagactgtatgtggagcggattctcggccgcagcaaagttggtgtctgagaaactagcttcctatcaagctgcgcgcaaggattcaggtagcccgaacccggcgcgcgggcattccgtatgtagcacatcgtcattgtatctgcaagaccttagtgccgctgcgtcggagtgcattgatccctccgttgtctttccttatccgctcaacgattcctcgagcccaaaatcatgtgcaagtcaggattcctcggcattcagcccgtcgtcagacagtctattaagctcgaccgaatccagtccacagggaagcccagaacctctggttctccatgaggaaacacctcccacgacgtcttctgacagcgaggaagagcaagaggatgaggaggagatcgacgtagtttctgttgaaaagcgtcaagctccgggtaagaggtcggagtctggttctccatccgccggtggccactcgaagccgcctcattctccacttgtgttgaaacgttgtcacgtctcgacacaccaacataattacgcagctccccctagcacccgtaaggactatcccgctgcgaagcgtgtgaagctcgactcggtgcgcgtgctccgtcaaataagcaataaccgcaagtgcacatccccccgctcatctgatacagaagaaaacgtcaagagaagaacccataacgtcttggaacgccaacgcaggaacgagcttaaacgttcattcttcgcgctgcgcgaccagatcccggagttggaaaacaatgagaaagcgccaaaagtcgtcattttgaaaaaggccacagcttatatcctgtccgttcaagcagagacccaaaagctcatctcagaaattgatctgctacgaaagcaaaatgagcaacttaagcataaactggaacagttgagaaactcatgcgcg

SEQ ID NO: 17566 - DNA, 1317 bp, synthetic construct
  misc_feature 1..1317: note = source = /note="Description of Artificial Sequence: Synthetic coding sequence"
  source 1..1317: mol_type = other DNA
atgccccttaatgtcagcttcacaaatagaaattatgaccttgattatgacagcgttcagccttacttttactgtgacgaggaggagaacttttatcagcagcaacagcagtctgagctacagcctccagctcccagcgaagatatttggaaaaagttcgaactactgccaactcctcctttgtctccgtctcggcggtccggtctgtgctctccaagctacgttgcagtgactcctttctcactgcgcggggataacgatggcggcggtgggagcttttcgactgccgatcagctggagatggtgacggaattactgggcggggatatggtgaaccagagcttcatctgcgatcctgacgacgagacatttatcaaaaacattatcattcaagattgtatgtggtccggcttttctgcagccgccaaactcgtctccgaaaagctggcctcctaccaagccgcccgtaaagattccggctcccccaatccagctcgcgggcattccgtctgctctacatcgtcactctatctgcaggacctttccgctgctgcgtcagagtgcattgacccatccgttgttttcccatacccactgaatgattcctctagtcccaaatcttgcgccagtcaggattcatcagctttttccccttctagcgatagccttctctcatcaaccgagagctccccacaagggagtcctgaaccccttgtcttgcatgaggagactccaccaaccacctccagtgactccgaggaggaacaagaggatgaagaagaaatcgatgtggtgagcgttgagaaacgccaggctccagggaagaggtctgaatctggaagcccatctgcaggcgggcattcaaagccaccacactcacctctggtacttaagaggtgccatgtgtccacacaccaacataattacgcggcaccaccctccacaaggaaggactaccctgctgcaaagagggtgaaattggatagtgtgcgcgtgctgaggcaaatctcgaataaccgtaagtgcaccagtccgaggtcaagtgatacagaagagaacgtgaagaggcgaacacataacgtcttggagcgtcaacgacggaatgagctgaagcgtagcttctttgcacttagggatcagatacccgaactcgagaataacgaaaaagctcctaaagttgtgattctgaagaaggctacagcctacatactgtcagtgcaggcggagacacagaaactgatctctgagatcgatctgctgcggaagcagaacgagcagctcaaacacaaacttgaacagttgaggaattcgtgcgct

SEQ ID NO: 17567 - DNA, 1317 bp, synthetic construct
  misc_feature 1..1317: note = source = /note="Description of Artificial Sequence: Synthetic coding sequence"
  source 1..1317: mol_type = other DNA
atgcccctcaacgtgagctttaccaaccgcaattatgatttggactacgactccgtgcagccatatttttactgtgacgaggaggaaaacttttaccagcagcagcaacagtccgagttgcagccacctgctccttctgaagacatttggaaaaaattcgaactgctccccactccgccactgtcgccttcaagaagatccggtttgtgctctccaagttatgtggccgtgacccctttctctctgaggggggataacgatggcggtggtggctctttttcaactgcagatcaactcgagatggtgacagagctgctgggaggcgacatggtgaaccagagctttatctgcgaccccgatgacgaaacctttatcaaaaatattattatacaggattgcatgtggtcgggcttcagtgcagcagccaaattggttagtgagaaactagcctcttatcaggctgctcggaaagattccggatcacccaatccggcacgaggacacagtgtctgctcaaccagctctctttacctgcaggacttgtccgcagcagcgagcgagtgtatcgacccgtccgtcgtgttcccctaccccctgaatgactctagctctccaaaaagttgcgcttctcaagacagctctgccttttctcccagtagcgatagcctgttatcttcaaccgagtcttccccacaggggtcgccagagccactggttctgcacgaggagactccacccacgacctcatcagactctgaggaggagcaggaagatgaggaggagatcgacgtggtttcagtcgaaaagcggcaggctcccggcaagcggtctgagtcaggcagtccctcagccgggggtcactcaaagcccccgcactctcccctcgtgctcaagcgctgtcacgtgtcgacccatcagcataactacgcggccccaccctctacccgtaaggattacccagcagccaagagagtgaagcttgactctgttagggtgcttcggcagatcagtaacaataggaagtgcacttcccccagaagctccgacacagaggagaatgtcaaacgcaggactcataatgtgttggaaaggcagagacgtaatgaacttaagagatctttttttgcactccgagatcagatccctgagctcgaaaataatgagaaggctcctaaagtggttattctcaaaaaggccacggcttatatcctatccgtgcaggccgaaactcagaagctaatctcagagatagatcttcttagaaagcagaatgagcagctcaagcacaaactggaacagctcagaaattcctgtgct

SEQ ID NO: 17568 - DNA, 1317 bp, synthetic construct
  misc_feature 1..1317: note = source = /note="Description of Artificial Sequence: Synthetic coding sequence"
  source 1..1317: mol_type = other DNA
atgccactcaacgtttcgttcaccaatcgcaactatgacctggactatgattccgttcagccgtacttctactgcgacgaagaagaaaacttctaccagcagcaacaacagtctgaactgcaacctccagcaccgtcggaggacatctggaagaagttcgagcttctcccaactccgccgctttcaccgtcccgcagatctggactgtgctccccgtcctacgtggcggtgaccccctttagcctgcggggagacaatgacggtggcggaggatcattctccactgctgatcaattggaaatggtcaccgaactgctcggcggggatatggtcaaccagagctttatctgcgacccggacgacgagactttcattaagaatatcatcatccaggactgtatgtggagcggattctcagcggccgcaaaactggtgtcagagaagctcgccagttaccaagccgccaggaaggattctggatcacctaaccctgctcgtggtcactctgtgtgcagcacttcctccctgtaccttcaagatttgtccgcagcggcctctgaatgtattgatccttcagtggtctttccgtaccccttgaacgatagttcatctccgaagtcgtgcgcgtcccaggattcatccgcgttttcgccatcgagcgactccttgctctcgtcaactgaaagctcacctcagggttccccggagcccctggtgcttcacgaagaaactccgccgacgacctccagtgactcggaggaagagcaagaagatgaagaagagatcgacgtggtttccgtagagaagcgccaggcaccaggaaagagatcggagtcgggctccccctcagccggaggccattcgaaaccgccgcactccccgctggtcctgaaacggtgccacgtctcgacccaccagcacaactacgcagccccaccttcgacccgaaaggactaccctgctgctaagcgcgtgaaacttgactccgtccgggtgctgcggcagatctcaaacaataggaaatgcacctcgcctcgcagctcggatacggaagaaaatgtgaagcgtcggacccacaacgtgctggagcgtcagcggcgcaacgagctcaaacggtcctttttcgcgttgagagatcagatccccgagctggaaaacaatgagaaggccccgaaggtggtgatcctgaagaaagctaccgcctacattctctcagtgcaggccgaaactcaaaagctgatcagcgaaatcgatctgctgcggaaacaaaatgagcagctcaaacataaactggagcagctgagaaacagctgtgcc

SEQ ID NO: 17569 - DNA, 1317 bp, synthetic construct
  misc_feature 1..1317: note = source = /note="Description of Artificial Sequence: Synthetic coding sequence"
  source 1..1317: mol_type = other DNA
atgcctctgaacgtctccttcactaatcggaattacgatctggactacgattccgtgcagccatatttctactgtgatgaagaggaaaatttctaccaacaacagcagcagtctgagctgcagcctcccgcaccgagcgaggatatttggaaaaaatttgaattgctgccgaccccacctcttagcccatccagaaggtcaggcttgtgcagcccgagctacgtggcggtgacccccttttcgctgcgcggtgataacgatggtggaggtggcagcttcagcacggcggaccaactcgagatggttacagaacttctgggcggcgacatggtgaatcagagctttatatgcgatccggatgacgaaacgttcattaagaacattattatccaagattgcatgtggtccgggttcagcgccgccgcgaagctggtgagcgaaaaactggcgtcctatcaggcagcccgaaaggattccggtagccctaacccggcgcgtggacactcagtgtgttccaccagctctctatacctgcaggatctgtctgccgccgcgtctgagtgcattgatccttctgtcgtgtttccctacccgcttaacgactcctcgtcgcccaagagctgtgccagccaggactctagcgccttctcaccgtcgtccgacagccttctctctagcactgaatcaagcccacagggctcccctgagcctctggtgcttcacgaagagacacctcctacaacctcaagcgattcggaagaggagcaagaggacgaggaagagatcgacgtagttagtgtcgaaaagcgccaggcacccggtaagcgctcagaaagcgggagcccttccgctggtggccacagcaagccacctcattctccactggttcttaagcgttgccacgtcagcacccaccagcacaattatgcagcccctcctagcactagaaaggattacccggccgccaaacgcgtcaagctggatagcgttagagttctacgccagatctcaaacaataggaaatgcaccagccctcgcagctctgacacggaggaaaatgtaaagcgccgcacccacaatgtcctagaaagacaacgcaggaacgaactgaagagatcctttttcgcgcttagagaccagatccctgagctggagaataatgagaaagcgccgaaagttgtgattctgaaaaaggcgactgcctatattctgtcagttcaggcagaaacccaaaagctcatttctgagattgatctgctgcgcaaacagaacgagcagctgaaacacaagctggagcaactgcgcaattcatgtgcc

SEQ ID NO: 17570 - DNA, 1317 bp, synthetic construct; identical to SEQ ID NO: 17563
  misc_feature 1..1317: note = source = /note="Description of Artificial Sequence: Synthetic coding sequence"
  source 1..1317: mol_type = other DNA

SEQ ID NO: 17571 - DNA, 1317 bp, synthetic construct
  misc_feature 1..1317: note = source = /note="Description of Artificial Sequence: Synthetic coding sequence"
  source 1..1317: mol_type = other DNA
atgcctctaaatgtctcttttacaaatcggaactatgatttagactacgattccgtgcagccttacttttattgtgacgaagaagaaaatttctatcagcagcagcagcagtcagagctccaaccccctgctccctctgaagacatatggaaaaaatttgaactccttccaacacctccgctaagtccttcaaggaggagtgggctctgttccccatcctatgtggcagtcacacccttttccttgcgcggggataacgacggaggggggggatccttttctacagccgaccagctcgagatggtgactgaactcctcgggggggatatggtgaaccagtctttcatatgcgatcctgatgatgaaactttcatcaaaaatattataatacaggattgcatgtggagtggattctccgcagccgcaaagctcgtgtctgaaaaacttgcaagttaccaagctgcaaggaaagattccggaagtccaaatcctgcccgggggcattctgtgtgttcaacaagtagtctatatctccaagatctctctgcggcagcctccgaatgtatcgatccaagtgtggtctttccatatccccttaatgactcatcttctccaaagagttgtgcctcccaggattcctccgctttctctccctcctcggatagtttgctgagttccacggaatcatcaccccagggatccccagaacccctcgtcctacatgaagaaacaccacctacaactagttctgattccgaagaggaacaggaagatgaagaggaaatagatgtagtctctgtcgaaaaaaggcaggcacccgggaagaggtccgaaagtgggtctccctccgctgggggacattctaaacctcctcactctcctctggtattaaagagatgtcacgtgtcaactcaccagcataattatgctgctcccccctctacgcgaaaagattaccctgctgctaaacgagtgaaactcgattctgtcagggtccttcggcagatttctaataataggaaatgtacaagtccgaggtcctcagatacagaagaaaatgtgaaacggaggactcataatgtgctagaacggcagcgcagaaatgagctgaaacgcagtttttttgctcttcgcgatcagattcctgaactggaaaacaacgaaaaggctccaaaagtggtgatactcaaaaaagctacagcatatatcctttctgtccaggctgagactcaaaaactgatttccgaaatcgatctgctaagaaaacagaatgaacagttgaaacataaactggagcagctcaggaacagttgtgca

SEQ ID NO: 17572 - DNA, 1317 bp, synthetic construct
  misc_feature 1..1317: note = source = /note="Description of Artificial Sequence: Synthetic coding sequence"
  source 1..1317: mol_type = other DNA
atgccattaaacgtttcatttactaatagaaattacgatttagattatgattctgttcaaccttatttttattgtgacgaagaagaaaatttttatcaacaacaacagcaatcggaattacaacctcctgcaccatcagaagatatttggaaaaaatttgaacttcttccaacaccaccattatcaccttcaagaagatcagggctttgtagtccatcatatgttgcagttactccattttcacttagaggagataatgatggaggaggaggaagtttcagtactgcagatcaacttgaaatggttacagaacttttaggtggagatatggttaatcaatcttttatttgtgatccagatgatgaaacatttataaaaaatattattattcaggattgtatgtggtcaggttttagtgcagctgcaaaattagtttctgaaaaattagcttcataccaagctgcacgaaaagattctggtagtccaaatccagctaggggacattcagtttgttctacctcaagtttatatcttcaagatttatcagctgcagcaagtgaatgcattgacccatctgttgtttttccatatccacttaacgactcatcttcacctaaatcatgtgcatcacaagatagttcagcattcagtccatcatctgattctcttctttcttctactgaatcttcaccacaaggttccccagaaccattagttttacatgaagaaactcctccaactacttcatcagattcagaagaagaacaagaagatgaagaagaaattgatgttgtatctgtagaaaaaagacaagctccaggtaaaagatccgaatctggatcaccatcagcaggagggcattctaaaccaccacattcaccacttgttttaaagagatgtcatgtttcaactcatcaacataattatgcagcaccacctagtactagaaaagattatccagcagcaaagagagttaaacttgattctgtacgtgttttaagacaaatttcaaataatagaaaatgtacttctccaagaagttcagatacagaagaaaatgtaaaaagacgaacacataatgtcttagaacgtcaaagacgaaatgagttaaaaagaagtttttttgcattaagagatcaaattccagaattagaaaataatgaaaaagccccaaaagttgttatcttaaaaaaggctacagcttatattttatcagttcaagcagaaactcaaaaacttatatctgaaattgatttacttagaaaacaaaatgaacaactcaaacataaacttgaacaattaagaaattcatgtgct

SEQ ID NO: 17573 - DNA, 1317 bp, synthetic construct
  misc_feature 1..1317: note = source = /note="Description of Artificial Sequence: Synthetic coding sequence"
  source 1..1317: mol_type = other DNA
atgccactgaacgtgagcttcaccaatcgtaactatgacctggactacgactccgtgcagccatacttttactgtgatgaagaggagaatttctaccaacaacagcagcaatctgaactgcagccgcctgctccctccgaagatatttggaagaagtttgagctgctgcccactccgcctctgtcccctagccgccggtccgggctctgttctccaagctacgtggcagtgaccccattttcgctcagaggagataatgatggtgggggtggctctttttcaaccgcggatcagctcgaaatggtgactgagctgctcgggggcgacatggttaaccagagcttcatttgtgatccagacgatgaaaccttcattaagaacatcataatccaagactgcatgtggtccggttttagcgctgcagcaaagctcgtgtcggaaaaacttgcctcctatcaggcagcgcgaaaagattccggttcgcccaatcccgcacgcggacattcagtgtgctcaaccagcagcctgtaccttcaagatctgtcggccgcggcgtcggaatgtatagaccctagcgtggtgtttccatacccactgaacgatagctcatcccctaagtcctgcgcctcgcaggattcttccgcattcagccctagctccgatagcttgctgtcctcaaccgagtcgtcaccacaaggttcccctgagcctttggtgcttcatgaggaaaccccacctaccacctcatcggatagcgaagaagaacaggaggacgaagaagaaatcgatgttgtgtcagtggaaaagagacaagcacccggaaaaagatctgaatccggttcccctagcgcaggaggacattcaaagccacctcattcccctctcgtcttgaaaagatgccacgtgtcaacccatcaacataactacgcagcaccaccttcaactaggaaggactaccctgcggcaaagcgcgtcaaacttgactcagtgcgggttcttcgccaaatcagtaacaaccgaaagtgtacgtcccctagatccagcgataccgaagaaaacgtgaagagacgaactcataacgtgctggaacgccagcgtagaaacgagctcaagaggtcattctttgctctgagagatcagatcccagaactggaaaacaatgaaaaggctcctaaggtggtcatcctgaaaaaggctactgcatacattctctcagtgcaggctgaaacgcagaagctcatttctgagatcgaccttcttcgcaagcaaaacgagcaacttaagcacaagctggaacaattgagaaactcgtgtgca

SEQ ID NO: 17574 - DNA, 1317 bp, synthetic construct
  misc_feature 1..1317: note = source = /note="Description of Artificial Sequence: Synthetic coding sequence"
  source 1..1317: mol_type = other DNA
atgcctctgaacgtgagctttacgaaccgcaattacgacctggactacgattccgtgcagccttacttctactgcgacgaagaagagaatttttaccagcagcagcaacagtccgagctgcaaccccccgcccctagtgaggacatttggaagaaattcgagttgctgcccacgccacctctgtctcctagcagacggtcaggactgtgttccccgtcctacgtcgccgtcacaccctttagtctcagaggtgataacgacggtggtggcggcagctttagtactgctgatcagttggagatggtgacggagcttctgggcggtgacatggttaatcagagcttcatttgtgatccagatgacgagacattcatcaagaatattatcatccaggactgcatgtggtccgggttttctgcagccgccaagctggtgagcgagaaactcgccagttaccaggccgcccggaaggactctggctccccaaacccggcaaggggacactcagtgtgttccacaagctccctgtacctgcaggacctctctgccgctgcgtccgagtgcattgacccttcagttgttttcccataccccctgaacgattcctctagtccgaagagctgcgcatcccaggactcctctgctttctctcccagtagtgactctctgctgagcagtaccgaaagtagccctcaggggtcccctgagcctctggttttgcacgaggagactccccccaccacttccagcgattccgaggaggagcaggaagatgaggaggaaatcgacgtggtgtcagttgagaagaggcaggcacccggcaagcgcagcgaatcagggagccccagtgccggggggcattctaagcctccgcactccccactcgtgctcaaaaggtgtcatgtgtctactcatcagcacaactacgctgccccaccatctactcgcaaagattaccccgcggctaagcgggttaagttggacagtgttcgggtcttgcgacagatctcaaataatcgaaaatgcacttccccccggagctcagataccgaggaaaacgtgaagcggcggacacataatgttcttgagaggcagcgccgaaacgaacttaagaggagcttcttcgcccttcgggatcagatacccgagcttgagaataacgaaaaggcccccaaagtcgtaatactgaaaaaggcaaccgcctatattctgagcgtgcaggcggaaactcagaagctgatctccgaaatcgatttgctccggaaacagaatgagcagcttaagcacaagcttgaacagctgagaaacagttgcgcc

SEQ ID NO: 17575 - DNA, 1317 bp, synthetic construct
  misc_feature 1..1317: note = source = /note="Description of Artificial Sequence: Synthetic coding sequence"
  source 1..1317: mol_type = other DNA
atgccattaaacgtctctttcaccaatagaaactatgatcttgactacgactccgtacaaccttacttttactgcgatgaagaggaaaacttctatcaacagcagcagcaaagcgaactccagcccccagctccttcggaggacatttggaagaaattcgaactcttgccaactcccccactgtctccctctaggagatccgggctatgttccccttcttacgtggctgtaacaccgtttagcctgcggggtgataacgacggaggaggcgggtcattctcgactgctgaccagctggagatggtcacagagctgctggggggagacatggttaaccagagcttcatctgtgacccggatgatgaaacatttattaagaacatcattattcaagattgcatgtggtccgggttttctgccgccgccaagctggtgtccgagaaacttgcaagctaccaggccgcaagaaaggattctggctcccccaaccccgcccgcggacactccgtgtgttctacatcgtctctgtacctccaagatctttctgccgctgctagcgaatgcatcgacccctcggtggttttcccataccctcttaatgatagcagtagccctaagagctgcgcctcacaagacagttctgctttctctccttctagtgattctttgctcagctctaccgagtcatctcctcagggatcccccgagcctctcgtgcttcacgaagagacgccacctacgaccagcagcgactctgaagaggagcaggaagatgaagaggagattgatgtggtaagcgtggaaaaacggcaagcgccagggaaaaggtctgagtcgggctccccgagcgctggtggccactcaaagcccccacacagtccgcttgtgttgaaacgctgtcacgtttccacgcaccagcataactacgccgcccctccctccactagaaaagattacccggccgctaagagagtgaaactggactcagtacgtgtgctgcgtcaaatatctaataacaggaaatgcacgtcgcctagatcttctgatacagaggaaaacgttaagagaaggacgcacaacgtcctggaaagacagcgccgcaatgaactcaagcgatccttcttcgcgctcagagaccagattccggagctggaaaacaacgagaaggcacccaaggtagtgatccttaaaaaggccacagcctatattctgtcagtgcaggcagaaacacagaaattaattagcgagatcgatttgctgaggaagcagaacgagcagctgaagcacaagcttgagcagctccgcaattcttgtgcc

SEQ ID NO: 17576 - DNA, 1317 bp, synthetic construct
  misc_feature 1..1317: note = source = /note="Description of Artificial Sequence: Synthetic coding sequence"
  source 1..1317: mol_type = other DNA
atgcccctgaacgtgagctttacgaacaggaactatgacctggactatgattccgttcagccatacttctactgtgatgaggaagaaaatttctatcaacagcaacagcagtccgaactccagcctccagctccttctgaggacatttggaagaagtttgaactgttgcccaccccacctctgagcccctcacggcgcagtggtttgtgctcaccgtcctacgtcgctgtgacccccttcagcctccgcggagataacgatggcggaggaggatccttctccaccgccgaccagctggaaatggtcaccgaactcctcgggggagacatggttaaccagtccttcatatgcgaccccgatgatgaaacctttattaagaatattattattcaggactgtatgtggagcgggttctctgccgctgcaaagcttgtctccgagaagctggccagctatcaggcggctcggaaagatagcggaagccctaatcccgcccggggccattctgtttgttctacttccagtctgtatcttcaggacctgtcagcggcagcttccgagtgtatcgacccttcagtagtgttcccttaccctctcaatgactcttcatcaccaaagtcatgtgcaagccaggatagctccgcgttctctccttcctcagactctctcttgtcttccactgaaagcagtccgcaaggaagccccgagcctttggtacttcacgaggagaccccaccgactacatcatcagacagcgaggaggaacaggaggacgaggaggagattgatgtggtctcagtcgaaaaacggcaggctccgggtaagagatccgaatccggctctccttccgctggggggcactccaagccaccgcactcccctcttgtgctgaagcgatgccacgtctcaacccaccaacacaactatgctgcaccaccgagcacacgaaaagactacccggcggccaagagagtcaaacttgatagtgtgcgcgtgctgaggcagatttccaacaatagaaagtgcacttctccaagaagctctgacaccgaagagaacgtgaaaagaagaacacacaacgttctggaaagacagcgaagaaacgagttgaagcgctcattttttgctcttcgagatcagatccccgaacttgaaaacaatgagaaggcccccaaggtagtcatcctgaaaaaagcgacagcttacatcctgtccgttcaggccgaaacccagaaactgatatctgaaattgacctgctgagaaagcagaacgagcagctgaagcataagcttgagcagttgaggaactcctgcgca

SEQ ID NO: 17577 - DNA, 1317 bp, synthetic construct
  misc_feature 1..1317: note = source = /note="Description of Artificial Sequence: Synthetic coding sequence"
  source 1..1317: mol_type = other DNA
atgccacttaatgtgtccttcaccaaccgcaactacgaccttgactacgattcggtgcagccctacttctattgtgacgaagaagagaatttctaccagcaacaacaacaaagcgaacttcagcccccggccccatccgaagatatttggaagaagtttgagcttcttcctactcccccactctcgcctagccggaggtccggattgtgttcgccctcgtacgttgcagttacccctttttccctgagaggagacaacgacggtggcggcggttcgttctccaccgcagatcagcttgaaatggtgaccgaactgctcggtggtgatatggtgaatcaatcgttcatttgcgatccagatgacgaaacctttatcaaaaacataatcattcaggactgtatgtggtccggatttagcgcggcggctaaattggtgagcgaaaagctggcctcgtaccaagcagcaagaaaagactcaggaagcccaaacccagctcgtgggcatagcgtgtgtagcactagctccctttaccttcaggacctgtcggccgctgcaagcgaatgtatcgatccctcggtggtgttcccatatccattgaacgattcttctagccctaaatcgtgtgcatcgcaggactcctccgcgttttcaccgtcatctgacagcctgttgtcctcaactgagtcgagcccccagggatcgcctgaaccccttgtgctccatgaagaaactccacctactacctcctcggatagcgaggaggaacaggaggatgaagaagaaattgacgtggtgtcggtagaaaaacggcaggcaccaggtaaaaggtcagaatcgggttcgccaagcgcaggcggtcattcaaagcctcctcactctcctctcgtgttgaagaggtgccatgtctcgacccatcaacataactatgcagcaccaccttccacgcgcaaagattacccagccgcaaagcgcgtcaaactggattcagtgagagtcctgcgccaaatttcaaacaatcgaaagtgcacttcaccccgttccagcgatactgaggaaaacgtgaagcgtcgaacccacaatgtgctcgaacggcaacggcggaacgagctgaagagatcatttttcgctcttagggatcagatcccggaactcgagaataacgaaaaggcgccgaaagtggtcatcctgaagaaggccacggcgtacattctgtcagtccaagcggagactcaaaagctcatctctgaaatcgatcttctccgcaagcaaaatgaacagcttaaacataaacttgaacaattgaggaacagctgcgca

SEQ ID NO: 17578 - DNA, 1317 bp, synthetic construct
  misc_feature 1..1317: note = source = /note="Description of Artificial Sequence: Synthetic coding sequence"
  source 1..1317: mol_type = other DNA
atgcctttgaacgtgagcttcacaaacaggaattacgatcttgattacgatagtgtgcaaccatatttctattgcgatgaggaggagaatttctaccaacagcaacagcaatccgaattacagccacccgctccaagcgaggatatttggaaaaaatttgagctcctcccaaccccgcccctctccccgtctagacgctccggcctttgctctcccagctatgtcgcggtaactccgttttctctgaggggagataatgatggaggtgggggcagctttagcacagccgaccaactggagatggttaccgagctgcttgggggcgacatggtgaaccagtctttcatatgcgatcctgatgatgaaacatttattaaaaacattattatccaggattgcatgtggtctggattttccgcagcagctaagctggtgagcgaaaagctggcctcttaccaggctgcgcgaaaagacagcggttcacccaacccggcccgggggcacagcgtctgcagcactagcagcctatacctgcaggacctttctgcagccgcctccgagtgtatcgacccatctgtggttttcccttaccccctgaatgattcaagctccccaaagtcatgcgcaagccaggacagctcagccttttcaccttcaagcgattcccttttatccagtactgaatcttccccccaggggagccctgaacctctggttctgcatgaggagacccctccaaccacttcttccgattcagaggaggaacaggaagatgaggaggagattgatgtcgttagcgttgagaagcgacaagcgccgggcaaaaggagtgaaagcggcagcccaagcgctggaggacattctaaacctccacactctcctttggtattgaaacgttgtcacgtctccactcatcaacacaattacgctgccccgcctagcactcgaaaggactatccagccgcaaagcgggtgaaactcgatagcgtgcgcgtgctcaggcaaataagtaataacaggaaatgcacctcaccaagatcgagcgatactgaggaaaacgtcaaacgacgcacccacaacgtgctggaacgtcagcgtagaaacgagcttaagagaagcttcttcgctctgagagatcagataccagagctggaaaacaatgaaaaagcaccaaaggtggtgatcctgaagaaagctactgcgtacatcctttcagtgcaggctgagactcagaaattgatcagtgagattgatctcctgcgcaaacagaatgagcagttgaagcacaaactggaacaactgaggaactcttgtgcc

SEQ ID NO: 17579 - DNA, 1317 bp, synthetic construct
  misc_feature 1..1317: note = source = /note="Description of Artificial Sequence: Synthetic coding sequence"
  source 1..1317: mol_type = other DNA
atgccactgaacgtgagcttcactaacagaaactacgatttggattacgactcggtgcaaccttacttttactgtgacgaggaggagaacttctaccaacaacagcagcaatcggagctgcagccacctgcgccgagcgaggatatttggaagaagtttgaacttctcccaactccgcccctctccccatcgagacgcagcgggctctgtagcccgtcatacgtcgccgtgactcccttttcgcttcggggcgataatgatggcgggggcggctccttctcgaccgcagatcaactcgaaatggtgactgagttgctgggaggcgatatggtcaaccagtcatttatctgtgaccctgacgatgagacttttatcaagaacatcattatacaggattgtatgtggtcaggattctccgctgcggccaagctcgtctccgagaaactggcttcttaccaggcagcccggaaagatagcggatctcctaaccctgcacgtggtcatagcgtgtgttcgactagctccctttacctgcaagacctctcggcagccgcaagcgaatgtattgatccttccgtggtctttccttaccctcttaatgattcatcgtcgccaaaatcatgtgcgtcacaggattcaagcgccttttcgcctagcagcgattcccttctgagctcaactgaatcgtcgcctcagggttcgcctgagccactcgttctgcacgaagaaaccccgcctaccactagctccgactcagaggaagaacaggaggatgaagaagagatcgacgtggtgtcggtcgaaaagcgccaagcgccaggaaagcgctcggagtcaggctcgccttcagccggtggacattcgaagcctccccattcgcctctcgtccttaagcgttgccacgtgagcacccatcagcataactacgcagcgcctccttctacccgcaaagattaccctgccgcgaagagggtcaagctggattccgtgagggtgcttagacaaatcagcaacaaccgtaagtgtacttccccacggtccagcgacaccgaggaaaatgtgaaacgacggactcataatgtgctggaacgacaacgccgcaacgagcttaaacgttctttcttcgcacttcgagatcaaataccggagcttgagaataacgagaaggcccccaaggtcgtgattttgaaaaaggcaaccgcctacattctgtccgtgcaggcagaaacccaaaaacttatttccgaaatcgaccttctgagaaagcagaacgagcagcttaagcataaacttgaacaacttagaaattcctgtgca

SEQ ID NO: 17580 - DNA, 1317 bp, synthetic construct
  misc_feature 1..1317: note = source = /note="Description of Artificial Sequence: Synthetic coding sequence"
  source 1..1317: mol_type = other DNA
atgcccctgaatgtgagcttcaccaataggaactacgacctcgattatgatagcgtacagccctatttttattgtgatgaggaggagaatttctaccagcagcagcaacagagtgagctccagccaccggcaccttctgaggatatttggaagaagtttgagttactgccaacgccaccacttagcccaagccggcgatccgggctgtgctccccctcttatgtggcggtcaccccttttagcctgaggggagataatgacggcggtggcgggtcatttagcaccgcagaccaactggaaatggtgaccgagctgcttggaggtgatatggttaatcagagcttcatctgcgatcccgatgacgagacatttatcaaaaacattattatccaagattgcatgtggtccggtttctctgccgcagccaagctggtgtctgagaagcttgcttcctaccaggcggcccgaaaggatagcggatcccccaaccccgcaagaggacactcagtgtgcagcacctcctccctatatctccaggacttgagcgccgctgcaagcgaatgcattgacccgagtgtggtctttccataccctttgaacgattcgagttcgccaaaatcctgcgccagtcaggacagttctgcttttagtccatctagcgatagcctgcttagcagcactgagtctagccctcagggatcaccagagccactagtgctacatgaagagactcctcctaccaccagtagcgatagcgaggaggagcaggaagacgaagaggaaatcgatgtggtgtccgtggaaaagaggcaggcccccggaaaaaggtctgaaagtgggtctccgtcagccgggggacatagcaaacctccgcattctcctttagtgcttaagaggtgtcacgtgagcactcaccaacataactacgctgctcctccctcaacacgcaaggactacccggccgctaaacgtgtgaaactagattccgtaagggtacttaggcagattagtaataacaggaaatgtacgtcgccaaggtctagcgataccgaggagaacgtcaaacgtcggacccacaacgtcctcgaacgacagagacgcaacgaactgaaacggagtttctttgccctccgagatcagatacccgagctggaaaacaacgagaaggcccccaaggtcgttatcttaaagaaagctaccgcttacatcctctccgtccaggcggagacacagaaactgatttcggagatcgacctgctgcgcaagcaaaacgagcagctcaaacataagttagaacagctgaggaactcttgcgcc

SEQ ID NO: 17581 - DNA, 1317 bp, synthetic construct
  misc_feature 1..1317: note = source = /note="Description of Artificial Sequence: Synthetic coding sequence"
  source 1..1317: mol_type = other DNA
atgccgcttaatgtttctttcaccaacagaaactacgatttggactacgactccgtccagccatacttttactgcgatgaggaggaaaacttctaccagcaacagcagcaatctgagctgcaaccgcccgcgccgtccgaggatatctggaagaagtttgaactcctgcctactccgcccctgtccccgagcaggcgttccggactctgctcgccctcgtacgtggctgtcacccccttcagcttgcgcggcgacaatgatggcggcggtggttctttctccactgcggaccaactggaaatggtgactgagctgctgggcggagatatggtgaaccagagcttcatttgcgatcctgatgatgaaaccttcatcaagaacataatcatccaggattgcatgtggtcgggcttttcggcagctgctaaactggtcagcgaaaaactcgcctcataccaagccgcacgcaaggacagcggaagccctaatccagcgcgcggacattcagtctgcagcacctcctcgctttacctgcaggacctctcggcggccgcgtcagagtgtatcgacccgtcggtggtgttcccataccctctgaacgactcctcctcaccaaagtcttgcgctagccaggattccagtgccttctcaccgtcctcagacagcctgctgtcctccacggagtcgagcccacaagggtccccggaaccgttggtgctgcacgaagagacgccacccactacttcatcagactcggaggaggaacaagaggacgaggaagaaatcgacgtggtatccgtcgagaaacgacaagcgccagggaagagatccgagtcgggatcgccatcagcgggaggccacagcaagccaccacactccccgcttgtgctgaagcgctgccatgtgtccacgcatcaacataactatgccgcaccgccttcaactcgcaaggactatccggcagccaagcgggtcaagctggactccgtgagggtgctgagacaaatctctaacaatcgcaagtgtacctccccacgctcctccgataccgaagaaaatgtaaagcggcgcactcacaacgtgcttgaacggcaacggagaaatgagctgaagcgatcattctttgccctgcgggatcaaatcccggaactggaaaacaacgaaaaagccccgaaagttgtgatcctgaagaaagctactgcatacatcctgagcgtgcaggctgagactcagaaactcatctccgaaattgacttgctgcggaaacaaaatgaacagctcaagcacaaactcgaacagctgcgcaactcgtgtgcg

SEQ ID NO: 17582 - DNA, 1317 bp, synthetic construct
  misc_feature 1..1317: note = source = /note="Description of Artificial Sequence: Synthetic coding sequence"
  source 1..1317: mol_type = other DNA
atgccgctgaatgtgtccttcaccaacagaaattacgatctcgactacgactcggtgcagccgtacttctactgcgatgaggaagagaatttctaccagcagcaacagcagtctgagcttcagccgcccgcgcctagcgaggacatctggaagaagtttgaactcctgcccactccgccactctcaccctcgcggaggtcgggcctttgctcaccgtcatacgtcgccgttacgcctttctcgctgcggggagacaacgatggcggaggtgggtcattctccacggccgaccagttggagatggttaccgaattgctgggaggcgatatggtgaaccagtcgttcatctgcgatccggatgacgagactttcatcaagaatatcatcatccaggactgcatgtggagcggattctccgcggctgcaaagttggtgtcggagaagctggcttcctaccaagcggcgcgtaaggacagcggaagcccgaacccggcccgcggtcactcagtctgctccacttcgtctctgtatctgcaagacctgtccgccgcggcctcagaatgcattgatccgagcgtggttttcccatacccacttaacgactcctcctcacctaaatcgtgtgcatcccaagactcgtccgccttttcaccatcgtcggactcgcttctctcctcaacggaatcgtcgccgcaagggtcccccgagccgcttgtgcttcacgaggaaaccccacctaccacctcctcggactccgaagaggaacaggaagatgaggaggaaatcgacgtcgtctcggtcgaaaagcgccaggcacccgggaaaagatcagaatccggctcgccgtcggctggaggacacagcaagccccctcattcaccacttgtgctcaagcggtgtcacgtgtccactcatcaacacaactatgccgccccaccgtccacccgcaaggattacccagccgcaaaaagagtgaagctcgattcggtgcgcgtgttgcgccaaatctccaataaccgcaaatgcacttctccacggtcatccgacactgaagaaaatgtgaagagaagaacccataatgtgctcgaacgacaacgcagaaacgagctgaagcggtcgtttttcgctctccgggaccaaatccctgaattggagaacaacgaaaaagcccctaaggtggtcattctcaaaaaggcgaccgcttacatactgagcgtgcaggcagagactcagaaactgatttcggaaatcgatctcttgcgcaaacaaaacgagcagcttaagcacaagctcgagcagcttaggaactcgtgtgcg

SEQ ID NO: 17583 - DNA, 1317 bp, synthetic construct
  misc_feature 1..1317: note = source = /note="Description of Artificial Sequence: Synthetic coding sequence"
  source 1..1317: mol_type = other DNA
atgcccctcaacgtttccttcacaaaccggaactacgaccttgactacgattctgttcagccgtacttttattgtgacgaggaggagaatttctaccagcaacagcaacagtccgagctgcagccccctgccccttcggaagacatttggaagaaatttgaactgcttcctacgccccctctctctccctccaggcggagtgggttatgctcacccagttacgttgcagtgactccctttagtctgcgcggcgacaacgacggaggtgggggctctttctctacagccgaccagcttgaaatggtcacagagctgcttggcggggacatggtaaatcagtccttcatctgtgatccagatgatgaaacatttatcaagaatatcattattcaggattgcatgtggtcagggttctctgcagccgccaagttggtctccgaaaagctcgctagctaccaagctgcccgcaaggattcgggatcccccaatccagcaagaggacactctgtgtgtagcacaagctctttatatctacaagatctgtcggcggcagcatccgaatgcattgatccgagcgtcgtgtttccttacccgctgaacgactcaagtagtccgaagtcttgcgcttcccaggattcctccgcattcagtcctagtagtgacagtcttctatcttctaccgaaagtagtccgcaaggatctccagagccactcgttctgcacgaagagaccccccctacaacttccagcgacagcgaggaggagcaggaggatgaagaggagatcgacgtggtctccgttgagaagcggcaagccccgggcaagcgcagcgagagcggaagcccctcagcgggaggacattcaaagcctcctcacagtcccctggtgctgaagcggtgccatgtgagcacccaccagcataactatgcagcccctccaagcactcggaaggactatcccgcggcgaagagagtcaaactggacagtgttagggtgcttcgacaaatttcaaacaatcggaaatgtactagcccgcggtcgagcgacaccgaggaaaatgtgaagcgaagaacacacaacgtgcttgaacgacagagacgcaacgagctcaagagatctttttttgctcttcgggaccaaatacccgagctggaaaacaacgaaaaggcccccaaagtcgtgatattaaaaaaagccacggcctacatattaagtgtgcaagctgaaacccagaaactgatcagcgaaatcgatctgttacgtaaacagaacgagcagctcaaacataagctggagcagctcaggaactcatgcgcg

SEQ ID NO: 17584 - DNA, 1317 bp, synthetic construct
  misc_feature 1..1317: note = source = /note="Description of Artificial Sequence: Synthetic coding sequence"
  source 1..1317: mol_type = other DNA
atgccccttaacgtgtcttttactaatagaaactacgacttggactacgatagcgtccagccttacttctattgtgatgaagaagaaaacttttaccaacaacagcagcaatccgaacttcaacccccagcaccaagcgaagatatctggaagaagttcgagcttcttccaacccctcctctctcgccctcgcgtcgtagcggcctttgttcgcctagctacgtggcagtcactcctttctcgctgcggggagataatgacggtggaggagggagcttcagcaccgccgatcaacttgagatggtgaccgagctcttgggtggagatatggtgaaccaatcgtttatctgtgaccctgatgatgaaactttcataaagaacatcataatacaggattgtatgtggagcggtttttccgcagcagccaagctcgtctcagagaagttggcatcgtaccaggcggcccggaaagattcgggctcgccgaatccagcgcgcggacactcggtctgctccacttcgagcctgtatctccaagatctctcagccgcagcctcagagtgcatcgatccttcggttgtgtttccttaccctctcaacgacagctcatccccaaagtcctgtgcatcccaagattcctcggccttctccccgtcgagcgactcgctcctttcgtccacggaatcctctcctcaagggtcgcctgagcccttggtcctccacgaagaaaccccaccgacgaccagctccgatagcgaagaagaacaagaggatgaagaggaaattgatgtcgtgagcgtcgagaaaagacaagcgccgggaaaaagaagcgaatccgggtcaccttcagcaggcggacattcgaagccaccccattccccactggtgctgaagagatgccacgtgtcgacccatcagcacaattacgcggcacctccatccaccaggaaagactacccagcagcaaagcgcgtcaagctggactccgtgcgagtcttgcgccagatcagcaataaccggaagtgtacgtccccgcggtcgtcagacactgaagagaacgttaaaagacggacccataatgtgctggaacgccagagacgaaacgagctgaagagatccttctttgcactccgtgaccagatcccagagctggaaaacaacgaaaaagcacccaaggtggtgatactcaagaaagctactgcttacatcctttccgtccaggcagaaacccaaaaactcatttccgaaatcgacttgcttcgaaaacagaatgagcagctgaagcataagctggagcaacttagaaattcatgcgca

SEQ ID NO: 17585 - DNA, 1317 bp, synthetic construct
  misc_feature 1..1317: note = source = /note="Description of Artificial Sequence: Synthetic coding sequence"
  source 1..1317: mol_type = other DNA
atgccccttaatgtgtcgtttacaaaccgcaactatgatttggactacgattctgtgcaaccatacttctactgcgatgaggaagagaacttctaccagcagcagcagcagtccgagctccagccacccgccccatcggaggatatttggaagaagtttgaattactacccacaccgccgctttcaccttctagacgctccggtctctgtagcccaagttacgtcgccgtgaccccgtttagcttgaggggtgataacgacgggggaggaggtagcttttcaaccgcagatcagctggagatggtgactgaactgcttggtggcgacatggtcaatcagtcattcatttgcgatccggacgatgaaaccttcatcaaaaacataatcattcaggattgtatgtggtctggcttcagcgccgctgctaagctggtgtccgagaaactcgccagttaccaagcagcgaggaaagactccggctcgccaaacccggcgagggggcactccgtgtgtagcacaagtagtctgtatctgcaggacctgtctgcagctgcctcggaatgtatcgacccgtctgtggtcttcccttaccccttgaacgattcgagtagcccaaagagctgcgcaagccaggactcttcagctttctctccgtcgtctgactcactgctgtcctcaacggagtccagtcctcagggctctcccgaacccctagtgctgcacgaggagacacctccgaccacttctagtgacagtgaggaagagcaagaagatgaggaagagatagacgttgtgagcgtcgagaaaagacaggcacccggcaagcgctcagagtcagggagtcccagtgctggaggccactccaaacccccgcactccccgcttgtcctcaagcgttgccacgtctcaacccatcagcataattacgccgctcccccttccacccggaaggactaccccgccgctaaaagagtgaagttggacagtgtcagggtccttcgacagatctcaaataatcggaagtgtacctcccctaggagcagcgataccgaggaaaatgtgaaaagacggacccacaatgttctagaacgtcagcgccggaatgagttgaagcgcagcttcttcgctctgagggaccagattcctgagctagaaaataatgaaaaggcgccaaaggtcgtcatcctgaaaaaagccactgcctatatactatctgtgcaggcagaaactcagaaactgatcagtgaaattgatcttttgcgcaagcagaatgaacagcttaagcataagctggagcagctgaggaatagttgcgct

SEQ ID NO: 17586 - DNA, 1317 bp, synthetic construct
  misc_feature 1..1317: note = source = /note="Description of Artificial Sequence: Synthetic coding sequence"
  source 1..1317: mol_type = other DNA
atgccactgaacgtcagctttaccaacaggaactatgacttagattacgattctgttcagccctatttctactgcgatgaggaagaaaatttctatcagcaacagcaacagtcggagttacagccccccgctccgtctgaggacatttggaaaaaattcgagctgctgcctacacccccattaagcccatctcgtcgcagtggtttatgttcccctagctatgttgcggttacaccttttagtctaaggggggacaatgacggcggcggaggtagttttagtaccgctgaccagctagaaatggtgactgagctgctgggaggggatatggtgaatcagtcattcatatgtgaccccgacgatgaaacgtttattaaaaacatcattatccaggactgtatgtggtcaggtttttccgccgcagccaaattagtgagcgaaaagctggccagctaccaggcagctaggaaagattccgggtcgccaaaccctgcccgggggcacagcgtttgcagcactagctccctgtacttgcaagatctctctgcagctgcaagcgagtgtatagatccctcagttgtcttcccttatcccctgaacgactcatcttccccaaagtcctgtgccagtcaggactcctccgcattttctccttcgtcggattcacttttgagcagcacagagagctctccgcaagggagccccgaaccactggtcttgcacgaagagacccccccaaccaccagcagcgactcagaagaggaacaagaggacgaagaggagattgatgttgtatccgtggagaaacgacaggctccaggcaagagatcagagtcgggctcaccctctgccggaggccactccaagccgcctcatagcccccttgtgcttaagcgttgccacgtctcaactcaccagcacaactatgccgcccccccatcaacccgcaaggattatcctgccgctaaaagggtgaaactggatagcgtgcgcgtgctaagacagattagcaataacagaaagtgcacttctcctagatccagcgatacggaagaaaatgtgaagcgccgtacccacaacgttctggagcggcagcgaagaaacgagctgaaaagatcctttttcgcgctgcgggatcagataccagaactagagaataatgagaaggctcctaaagtggtgattctgaagaaggctaccgcatatatattgtcagttcaagccgagactcagaagcttatctccgagattgacttgctccgaaaacagaatgaacagctgaaacacaaactggagcagcttagaaatagttgtgct

SEQ ID NO: 17587 - DNA, 1317 bp, synthetic construct
  misc_feature 1..1317: note = source = /note="Description of Artificial Sequence: Synthetic coding sequence"
  source 1..1317: mol_type = other DNA
atgcctcttaatgtcagcttcaccaacaggaattacgatctcgattacgactcggtgcagccatacttttactgcgatgaagaagaaaacttctaccagcaacagcaacagtcggaattgcaacctcctgcgccttccgaggacatctggaagaaattcgaacttcttcctactcctcccctctcgccctcgagacgctcgggtttgtgtagcccatcctacgtggctgttaccccattctcacttcggggagataacgatggagggggaggcagcttttccactgctgatcaattggagatggtcactgagttgttgggtggagatatggtgaaccagtcattcatttgcgatccggatgacgaaaccttcattaagaatatcattatccaggactgcatgtggtcgggtttttcggcagcagccaagctcgtgtcggagaagttggcatcctaccaggcagcacgtaaagattccggttccccaaatccagcgcgtggccactcggtgtgttcgacgtcgtcgctgtacctgcaagacttgtccgcggcagcgtcagagtgtatcgacccatccgtcgtttttccataccccttgaacgactcatcatcacccaagtcctgtgccagccaggatagctcagcgttcagcccctcctcggattcgcttctgtcatccaccgagtcatcaccacagggatcaccagaacctctggtcctgcatgaagaaactccaccgactacttcatcagactcagaggaagaacaagaggatgaggaagaaattgatgtcgtgtccgtcgaaaagcgacaagcacctggaaaacgatcagaatccggatcgccttctgcaggcggccactcgaagcccccacactcgccgctggtgcttaaacggtgccatgtgagcacccatcaacataactatgcggcccctccttcgacccgcaaggactatcccgctgcaaagcgcgtgaagctcgactccgtgcgtgtgctgcggcaaattagcaataacagaaagtgtacctcacctagatcgtcagatacggaggagaacgtcaagcgccgcactcataacgtgttggaacgccagcgtaggaacgagctcaagagatccttttttgcactgcgggatcaaattccggagctggaaaacaatgaaaaagcccctaaggtggtgatactgaagaaagcaacggcatacatcctgtccgtgcaggcagaaacccaaaaacttatcagcgaaatagacctgctgcgtaagcaaaatgagcagctgaaacacaaacttgagcagctgcggaactcgtgtgct

SEQ ID NO: 17588 - DNA, 1317 bp, synthetic construct
  misc_feature 1..1317: note = source = /note="Description of Artificial Sequence: Synthetic coding sequence"
  source 1..1317: mol_type = other DNA
atgccgcttaatgtgagctttaccaaccggaactacgatttggattacgactctgtacagccttacttttattgcgacgaggaggagaatttctatcagcagcagcagcagtctgagctgcagcctcccgcacctagcgaggacatctggaagaagttcgaactgctgccgaccccaccgctctcaccctcccggagatctggactgtgttccccgtcttacgtagcagtaactcccttcagccttagaggggacaatgacggcggcggtggaagctttagcaccgctgaccagctggaaatggtaacggaattactgggcggggatatggtgaaccagtctttcatctgcgaccctgatgacgaaacctttatcaagaatattataatacaggactgtatgtggagcgggttctccgcggccgccaagcttgtatccgaaaaactcgcctcgtaccaggctgctcggaaagacagtggtagccctaatccagcacgaggccatagtgtgtgttccaccagcagtctctacctacaggacctgtccgcggcagcctctgagtgcattgacccttccgtagtctttccttacccccttaatgacagtagctcgccaaagagttgcgcaagtcaagatagttctgccttctcccccagtagcgactctttgttatccagcaccgaaagttcccctcagggctcccctgagccgcttgtgctgcatgaagagactccgcccaccacctccagcgatagtgaggaagaacaggaggacgaggaggaaattgacgttgtatcggtcgaaaaacgccaggctcctggtaagcgatctgagagcggctctcccagtgctgggggccactctaaacccccacatagccctctggttttaaaaaggtgccacgtgtcgacacatcagcacaactacgccgcacccccaagcacccgtaaagactatcccgccgccaaacgagtgaagcttgattcagtccgcgtgcttcggcaaatctccaataaccgcaagtgtacctctccacggagctcagataccgaggagaatgttaaacgaaggactcacaatgtgctggaacgccagaggcgtaatgagctcaagcgcagtttcttcgccctaagagatcagataccagagctcgaaaacaatgagaaggccccaaaagtagtcatcttgaaaaaagctacagcctatattctgtccgtccaggccgaaacccagaagctgatttcagaaatagacctactgagaaagcaaaatgagcagctgaaacataaactggaacagctgcgcaattcctgcgcg

SEQ ID NO: 17589 - DNA, 1317 bp, synthetic construct
  misc_feature 1..1317: note = source = /note="Description of Artificial Sequence: Synthetic coding sequence"
  source 1..1317: mol_type = other DNA
atgcccctgaatgtgtcctttacgaatcgcaattacgaccttgactacgattcggtgcaaccttacttttactgcgatgaggaagagaacttctaccagcagcaacagcagtccgagctgcaacctcctgccccaagcgaggacatttggaagaagttcgagctgttgccaacgccccctctctcgccatcaagaagaagcggactttgttctcccagctacgtggccgtgactcctttcagtctgagaggtgacaacgatggaggaggaggatcgttctcgactgcggatcagctggaaatggtcaccgagctgcttgggggcgacatggtgaaccaatcgttcatctgtgatccagatgatgaaactttcattaagaatatcattatacaggactgcatgtggagcggattttcagcagcagcaaagctggtcagcgaaaagctcgcatcataccaagccgctagaaaagacagcggctcacctaaccctgcacggggtcattccgtgtgttcgaccagctcgctttacttgcaagatctctcggctgcagcctcggaatgcattgacccatcagtggtgttcccttaccctctgaatgattcctcatcccctaagagctgcgcctcgcaagattcaagcgcattttcaccatcatcggacagcctcctgtcatccaccgagtcgagccctcaaggctcacctgaaccccttgtcctccatgaggaaacgcccccaacgacttcctcggattcggaagaagaacaggaggacgaagaagaaatcgacgtcgtgtcagtggaaaaaaggcaggcgcccggaaagagaagcgagagcggttcaccctcagccggaggccatagcaaaccccctcactcgcctctggtccttaagagatgtcatgtgagcacccaccaacataactacgccgccccaccttccactaggaaggactaccctgcagctaagcgagtgaagctggactccgttagagtgctcaggcaaatatcgaacaaccgcaagtgtacgtcgcccagatccagcgataccgaagagaacgtcaagaggagaactcacaacgtgcttgaaaggcaacggaggaacgagctgaaacggtccttttttgcactgcgggaccagattccggaactggaaaacaatgaaaaggcacctaaggtcgtgattctcaagaaagcaactgcctatattctgtccgtgcaagcagaaacgcagaagctgatttccgagattgaccttttgagaaagcaaaacgagcaactgaaacataagctcgaacaacttcgcaactcttgtgcg

SEQ ID NO: 17590 - DNA, 1317 bp, synthetic construct
  misc_feature 1..1317: note = source = /note="Description of Artificial Sequence: Synthetic coding sequence"
  source 1..1317: mol_type = other DNA
atgccgctgaacgtgtcgttcaccaatagaaattacgatcttgattacgattccgtccagccttacttttactgtgatgaggaagaaaacttctaccagcagcaacagcaaagcgaattgcaaccacccgcgccatccgaggatatttggaagaagtttgaactgcttcccactccgcctctgtcgccaagcagaaggtctggtctgtgttccccatcttatgttgccgtgaccccatttagcctccgaggcgataatgacggcggcggaggcagcttcagcactgctgaccaacttgaaatggtcactgagcttctcggaggagatatggtgaaccaatcgtttatctgcgacccagatgatgaaacgtttatcaagaacatcattatccaggattgtatgtggtcgggatttagcgcagctgcaaagctcgtctcagagaagctggcaagctaccaagcagcaagaaaagattctggtagccctaatccagcacgagggcatagcgtttgctcgacctcctccctctatctgcaagacctttcagcagcagcatccgaatgtattgatccaagcgtggtgttcccttaccctcttaacgattccagctcacctaagtcatgtgcatcccaggattcatcggcattctcgcctagctcggattcgcttctgtcatcgaccgaaagctcacctcagggtagccccgagccactggtgctgcatgaagaaactccccctactacttcctcagactccgaggaagaacaagaagatgaagaagaaatcgatgtcgtctcagtcgagaaacggcaggcccctggtaagaggtcggaatcgggatcaccttcggctgggggtcattcgaaacccccacattcccctctcgttcttaagcggtgtcatgtgtcgacccatcaacataactacgccgctcctcctagcacccgcaaagattatccggcagcaaagcgggtgaagctggactctgtgcgtgtgcttcgacaaattagcaacaatagaaagtgtacctccccccgtagctccgatactgaagagaatgtgaaacggcgtactcacaatgtgctggaaagacaaagaagaaacgagctgaagagatcgtttttcgctcttcgcgatcaaatccctgagctggaaaacaacgaaaaggcaccaaaggtggtgatactgaaaaaggcaaccgcgtatattctgtcagtgcaggcagaaactcagaaactcatctcggaaattgatctgctgagaaagcaaaacgaacaactgaaacacaagctcgagcaacttagaaactcctgcgcc

SEQ ID NO: 17591 - DNA, 1317 bp, synthetic construct
  misc_feature 1..1317: note = source = /note="Description of Artificial Sequence: Synthetic coding sequence"
  source 1..1317: mol_type = other DNA
atgccgttaaatgtttcgtttacgaatcgtaattatgatctagattatgattcggtacaaccgtatttttattgtgatgaagaagaaaatttttatcaacaacaacaacaatcggaactacaaccgccggcgccgtcggaagatatatggaaaaaatttgaactattaccgacgccgccgttatcgccgtcgcgtcgttcgggtctatgttcgccgtcgtatgtagcggttacgccgttttcgctacgaggtgataatgatggtggtggtggttcgttttcgacggcggatcaattagaaatggtaacggaactactaggtggtgatatggtaaatcaatcgtttatatgtgatccggatgatgaaacgtttataaaaaatataataatacaagattgtatgtggtcgggtttttcggcggcggcgaaattagtttcggaaaaattagcgtcgtatcaagcggcgcgaaaagattcgggttcgccgaatccggcgcgtggtcattcggtatgttcgacgtcgtcgttatatctacaagatttatcggcggcggcgtcggaatgtatagatccgtcggtagtttttccgtatccgctaaatgattcgtcgtcgccgaaatcgtgtgcgtcgcaagattcgtcggcgttttcgccgtcgtcggattcgttactatcgtcgacggaatcgtcgccgcaaggttcgccggaaccgttagtattacatgaagaaacgccgccgacgacgtcgtcggattcggaagaagaacaagaagatgaagaagaaatagatgtagtatcggtagaaaaacgacaagcgccgggtaaacgatcggaatcgggttcgccgtcggcgggtggtcattcgaaaccgccgcattcgccgctagttttaaaacgatgtcatgtatcgacgcatcaacataattatgcggcgccgccgtcgacgcgtaaagattatccggcggcgaaacgtgtaaaattagattcggtacgtgttttacgtcaaatatcgaataatcgtaaatgtacgtcgccgcgatcgtcggatacggaagaaaatgtaaaacgacgaacgcataatgtactagaacgacaacgacgtaatgaattaaaacgttcgttttttgcgttacgagatcaaataccggaattagaaaataatgaaaaagcgccgaaagttgttatattaaaaaaagcgacggcgtatatattatcggttcaagcggaaacgcaaaaactaatatcggaaatagatttattacgtaaacaaaatgaacaactaaaacataaactagaacaattacgtaattcgtgtgcg

SEQ ID NO: 17592 - DNA, 1317 bp, synthetic construct
  misc_feature 1..1317: note = source = /note="Description of Artificial Sequence: Synthetic coding sequence"
  source 1..1317: mol_type = other DNA
atgccgctgaacgtgagcttcaccaaccgcaattacgacctggactacgatagcgtccaaccgtacttctactgcgacgaggaggagaacttctaccaacagcagcagcagtccgaactgcaaccgccagccccctcagaggacatctggaagaaattcgagttgttgccgactccgccactgagcccctcgcgccggagcgggctgtgctcaccaagctacgtcgcggtgaccccgttcagcttgcgcggcgacaacgatggcggagggggatcgttctctactgccgaccaactcgaaatggtcactgaactcctgggcggagacatggtgaaccaatcatttatttgcgaccctgacgacgaaactttcatcaagaacatcattatccaggattgtatgtggtcgggtttctccgccgccgcaaaactggtgtcggaaaagctggcctcctatcaggcggcacggaaggacagcggatcgccgaacccggcccgcggtcattcagtgtgctcgacttcgtcactctacctccaagatctgtcggccgctgcttccgaatgcatcgacccctcagtggtgttcccataccctcttaacgacagcagttcgcctaagagctgtgcctcgcaggactcctcggcgttttctccatcctcagattcccttctgagctcgaccgagtcctctcctcagggatcgccagaacctttggtgctccacgaggaaaccccaccgaccacctcgtcggatagcgaggaagagcaagaggatgaagaggaaatcgatgtggttagcgtggaaaagcgccaggcgccaggcaagagatccgaatcagggtccccaagcgcgggaggacactccaaaccgccccattcccctctggtcctcaaaagatgccacgtctcaactcaccaacataactacgctgccccgccgtcaacgaggaaggattacccggctgctaagcgcgtcaaactggacagcgtgcgggtgctgcggcagatttcaaacaatcgaaagtgcacctcgccccggtcctcagataccgaagaaaatgttaagaggagaacgcataatgtgctggaacggcaacgcagaaatgagctcaagaggtccttttttgcactgcgcgaccagatccctgaacttgagaacaacgagaaggccccgaaagtggtcatcctgaagaaagcgaccgcatacatcctctccgtgcaggcagaaactcagaagctgatctccgaaatcgatctgctgagaaagcagaatgagcagctcaaacacaagctcgagcagttgcgtaattcgtgtgcc

SEQ ID NO: 17593 - DNA, 1317 bp, synthetic construct
  misc_feature 1..1317: note = source = /note="Description of Artificial Sequence: Synthetic coding sequence"
  source 1..1317: mol_type = other DNA
atgccactgaatgtttcatttacaaataggaactatgacctggattacgatagcgttcagccctacttctattgtgatgaggaggagaacttctatcagcagcaacagcagagtgaacttcagcctcctgcccctagtgaagacatctggaagaagttcgagctgcttcccacaccacctctctccccctctcgtcgtagcgggctgtgcagcccatcatatgttgcagtaactcccttttccttgcgcggcgacaatgacggaggcggtgggtctttttcaacggctgatcagctcgagatggtgacggaattattgggcggcgacatggtgaatcagtctttcatctgcgacccagacgacgaaacatttatcaagaacataatcatccaggattgtatgtggtccgggttcagcgccgccgccaagctggttagcgaaaagctcgcctcctaccaagcagccagaaaagatagcggttccccaaaccctgcgcgaggtcattcagtttgcagcacttcatctctgtacctgcaggatctgtccgcagccgcgtcagagtgcatcgacccatccgtggtgtttccatatcccttaaacgactcgtctagccccaagtcgtgtgcgagccaggacagttctgcgttctcccccagcagtgactctctgttatcatctacagagtcctccccccaaggatcccccgagccactagtactccatgaggaaaccccccccaccaccagcagcgattccgaggaagaacaggaggacgaagaggagatagatgtcgtctctgtggagaaaaggcaagccccaggcaagcgctccgaatctgggtctccctccgccggaggacacagcaagcccccgcactccccgttggtgttaaagaggtgccacgtgtcgacacatcagcacaactacgcagcccccccctccacccggaaagattacccagccgccaagagagtgaagcttgacagtgtccgggtactcaggcagatcagcaacaatcgaaagtgcacaagtcctaggagttcagatacagaggagaatgtcaaacgccgcactcacaacgtgttagagagacagcgccgaaacgagctcaagcgttctttctttgcccttcgggaccaaatacccgagctagaaaataatgagaaggcccccaaggtcgtgatcctgaagaaggcaaccgcttatatcctctccgtacaggccgagactcagaagttaatcagcgaaattgacctactaagaaagcaaaacgagcagctgaagcacaaactcgagcagctgcggaatagctgtgcg

SEQ ID NO: 17594 - DNA, 1317 bp, synthetic construct
  misc_feature 1..1317: note = source = /note="Description of Artificial Sequence: Synthetic coding sequence"
  source 1..1317: mol_type = other DNA
atgccccttaacgtgagcttcaccaataggaactacgatctggattacgattcagtgcagccatacttttactgtgatgaagaagaaaacttttaccaacagcaacaacagagcgaacttcagcccccggcaccatcagaggatatttggaaaaagtttgaactgctgccgactccgccactctccccatcgagacgatcgggactttgctcgccttcatacgtagccgtgacgcctttttcattgaggggggataacgatggtgggggtggatcattcagcactgccgatcaacttgaaatggtcactgaattgctgggaggagatatggtgaaccagtcgttcatttgcgaccctgacgacgaaaccttcataaagaacattatcatacaagattgtatgtggtccggtttttcggcagctgcaaaacttgtctccgagaagctggcctcatatcaggcagctcggaaggattcgggctcccccaacccggcgagaggtcattccgtgtgttccacttcgtcactctatttgcaagatctgagcgcagcagcatccgagtgcatcgatccgtcggtcgtgtttccttaccctcttaacgactcctcatccccaaaatcctgcgcttcacaagactccagcgccttttccccatcatcagactcactcctttcaagcactgaatcgagccctcagggatcgcctgaacctctggtgctccacgaggaaacccctcccaccacttcatcggattcggaagaagaacaggaggatgaagaggagattgatgtggtgtcggttgaaaagagacaagcaccaggaaagcggtcggaatcaggatcgccatcagcaggaggacacagcaaaccaccacattcgccacttgtgcttaaacgctgtcatgtgtcgactcatcagcataactacgccgcccctccttcaaccagaaaggactacccggccgcgaagagagtcaaactggacagcgtgagagtgctgcggcagatcagcaacaatagaaaatgtacgtctcccagatcgtcagacactgaagagaacgtgaagagaagaactcacaacgtccttgagagacaacgccgcaacgaactgaaaagatcattcttcgcgctgcgggaccagattccagaactcgaaaacaacgaaaaggcaccaaaggtggttattctcaagaaggccactgcatacatcctttcggtccaggcggagacgcaaaagctgattagcgaaatcgacctgctccgcaaacaaaatgagcaactcaagcacaagctcgaacagcttcgcaactcctgtgcc

SEQ ID NO: 17595 - DNA, 1317 bp, synthetic construct
  misc_feature 1..1317: note = source = /note="Description of Artificial Sequence: Synthetic coding sequence"
  source 1..1317: mol_type = other DNA
atgcctttaaatgtttctttcaccaatagaaactacgacctcgattatgactcagttcagccatatttctattgtgacgaagaagaaaatttctatcagcagcaacaacagagtgagctgcagcccccagccccgtcagaggacatctggaagaagttcgaattactcccgacacctcccctctctccatccagaagatctggcttgtgttccccgagttacgtcgctgtgacacctttcagcttgcgcggggacaacgatggcggaggaggatccttcagtacagcagaccagcttgagatggtcacagaactcctcggaggtgatatggtgaaccaaagttttatctgcgaccccgatgacgaaacctttatcaaaaacatcatcatccaggattgcatgtggagcggatttagcgctgctgccaaactggtgagcgaaaaacttgctagctaccaagccgcccgcaaggattccgggtctcctaaccccgcgcggggtcattctgtgtgctcaacatctagcttgtacctacaagacttaagcgccgcagctagcgagtgcattgaccccagcgtcgtcttcccttacccacttaacgatagctcttctcctaaatcctgcgcctcccaggacagtagcgctttctcccccagttctgacagcctcctgtctagcacagagagtagtccccagggatctccagaaccactggtcctccatgaggagacgcccccaacaacttctagtgatagcgaggaggagcaggaagatgaagaggagatcgacgtggtgagcgtggaaaagaggcaagctcctgggaaaaggtctgaatctggtagcccttctgcaggaggacatagtaagccccctcacagccccctggtcctgaagaggtgccacgtgagcacacatcaacacaactacgcagcgcccccatccacacgcaaagactaccctgccgcaaaaagagtcaaattggacagcgttcgtgtgctgcggcagatcagcaataatcggaaatgcacaagccccaggtccagtgacacagaggagaacgtaaagagaagaacccataacgtcctcgaacggcagcgtcgcaatgagctcaaaaggtcttttttcgctctaagagatcaaatccccgaattggagaacaacgagaaggctcctaaggtggtcattctgaaaaaagcaactgcctatatattatcagtccaggccgagacccagaagctgatctccgagatcgacctgttgaggaaacaaaatgagcaactcaagcataagttggagcagcttagaaattcttgtgca

SEQ ID NO: 17596 - DNA, 1317 bp, synthetic construct
  misc_feature 1..1317: note = source = /note="Description of Artificial Sequence: Synthetic coding sequence"
  source 1..1317: mol_type = other DNA
atgcccctgaacgtttcgtttactaacaggaattacgacctggattacgactcagtgcagccctacttctattgtgacgaggaagaaaatttctatcagcaacagcagcagtctgaactacagcctcctgctccgtccgaggacatttggaagaaattcgagctgctgccgactccgcctttaagtccttccaggcgaagcggattgtgcagccctagctacgtggcggtcacccctttcagtctgcggggcgataatgatgggggcggcggaagtttcagcaccgctgatcagctggaaatggtcacagagctcttagggggcgacatggtaaatcagagttttatttgtgaccccgatgacgagaccttcatcaaaaacattatcattcaggattgcatgtggtcaggattttccgccgccgcaaagctggtgtctgagaagctagcgtcctaccaggctgccagaaaagactcaggctcccctaaccctgcgcggggtcactccgtctgtagcacatcgagcctctatctgcaagacctgagtgcagcagcctcagaatgtatcgacccctcggtagttttcccatatcctcttaacgattctagcagtcccaaatcctgcgcttcccaggactcaagcgccttcagcccttctagcgactccctgttatcctccaccgagtcatctccgcaagggagccctgagcccctcgttctacacgaggagactcctcccacaactagctctgactccgaagaagaacaagaggacgaggaggaaattgacgtcgtgtctgtggaaaagcggcaagctcctggaaagcgatccgagagcggctcgccgtccgcaggcgggcactctaaacctccgcattctccattggtgctgaaaagatgtcatgtgtcaacgcatcagcacaattatgcagcacctccttctactaggaaggactacccagccgcaaagcgagtgaaactggactcggtgcgagtgctcaggcaaatcagtaacaaccggaaatgcacgtctcctagaagttctgacaccgaagagaatgttaaacgacgcacacataacgtgctggaacgacagcgacgtaatgagcttaagcggtctttcttcgctctgcgcgatcagatccccgagcttgaaaataatgagaaggcacccaaagtggttattctgaaaaaagctaccgcgtatattctgtcagtacaggccgagacacagaagttgatcagcgagattgatctgttgcggaaacagaacgagcagcttaagcacaaattggaacagctgcgaaacagctgtgcc

SEQ ID NO: 17597 - DNA, 1317 bp, synthetic construct
  misc_feature 1..1317: note = source = /note="Description of Artificial Sequence: Synthetic coding sequence"
  source 1..1317: mol_type = other DNA
atgccgcttaatgtctcgtttaccaaccgtaactacgatttggactacgactcagtgcagccttacttctactgcgatgaagaagagaatttctaccaacaacaacaacagtcggaactccagcctcccgccccttcggaagatatctggaagaagtttgaactgctcccaaccccgccactttccccatcccgaaggtcgggactctgttccccctcgtacgtcgccgtgactccattctcacttcggggagataacgatggaggaggcggatcattttcaaccgctgatcaacttgaaatggtgactgagctgcttggtggtgatatggtgaatcagtcctttatctgcgatccagacgatgagacttttatcaagaacatcatcatccaggactgcatgtggtcgggtttttcggcagcggcaaagctggtgtccgagaagctcgcatcataccaggcagcacgcaaggattcgggttcccccaatccggcacgtggacattccgtgtgtagcacttcatcgttgtacctgcaagatcttagcgccgcggcttcagaatgcatagacccatccgtggtgttcccttacccactgaacgactcctcctcgcccaagtcctgtgcatcgcaggatagcagcgcattttcgccctcctcagactccctcctttcgtcaactgaaagctcgcctcaaggaagccccgagcctctcgtgctgcatgaggaaacgcccccgactacttcttcagatagcgaagaggagcaagaggatgaagaagaaattgatgtcgtgtccgtcgaaaaaagacaagctcccggcaagaggtcagaatcggggagcccgagcgccggaggccacagcaaaccacctcattcaccacttgtgctgaagagatgccatgtgtccacccatcagcataactacgccgcacccccttcaacccggaaagactacccggcagcaaagagggtgaagctcgactccgtgcgcgttctgcgccagatatccaataaccgcaagtgcaccagccccagatcatccgacactgaggaaaacgttaaaagacgtacccataacgtgcttgagcggcaacggagaaatgaactgaaacgttcgttttttgccctccgcgaccagattcctgaacttgaaaacaacgaaaaggcaccgaaggtcgtcatcctcaaaaaagcaaccgcctacattctttccgtccaggccgaaactcagaagctgatctcggaaattgatctcctgcgaaagcaaaacgagcagctcaagcataagctcgaacaactccgcaattcgtgtgca

SEQ ID NO: 17598 - DNA, 1317 bp, synthetic construct
  misc_feature 1..1317: note = source = /note="Description of Artificial Sequence: Synthetic coding sequence"
  source 1..1317: mol_type = other DNA
atgcctctgaacgtgagcttcaccaaccgcaattacgatttagattacgattccgtgcagccttacttttattgcgacgaggaggagaacttctatcaacagcaacaacaatccgagctccagcctccagccccttcagaggatatttggaaaaaattcgagctgctcccaacacctccactgtctccatcccgccgctccggtctctgttccccgtcctacgtggcggtgactccattctcactgcgcggtgataacgatgggggaggaggctcgttctcaacagccgaccaactcgagatggtcaccgagctactaggaggcgacatggtgaaccagtctttcatctgcgatcccgatgacgagacattcattaagaatatcattatccaggattgcatgtggtccggatttagtgcggcagccaagctggttagcgagaagcttgccagctatcaagcagcaagaaaggactcaggaagtcccaatccagctcgcggccattccgtgtgctctacctcctccctgtatcttcaagacctcagtgccgctgccagcgagtgcatcgacccctccgtggtctttccctatcccctcaatgatagctccagccctaagtcttgcgcgtctcaggactcctcagcatttagtcctagctctgatagcctgctttcgtctactgaaagctctccgcagggtagcccggaaccactagttctccatgaggagactccccccaccacatcttccgatagcgaagaagagcaggaggacgaagaggagatcgacgtggtgagtgttgagaaacgtcaggcacccgggaagagatcggagagcggtagcccctcagccgggggacattctaaacctccacattctccactggtgctcaaaagatgccacgtgtcaacccaccagcacaattacgcagctccaccaagcaccagaaaggattaccccgccgccaagcgtgttaaactggatagcgtgcgcgtactgaggcaaatttctaataataggaagtgtactagtcctaggagtagtgacaccgaggaaaacgtaaaacgcaggacacacaacgtgctggagcggcagaggcgtaacgagctgaaaagaagctttttcgccttaagggaccagatccccgaattagagaataacgagaaggctcccaaagtggttattcttaagaaggctacggcctacatactgagcgtccaggcagaaacccagaaattgatttctgagattgatttgctgagaaagcagaacgaacagctgaagcataaactagagcagctcagaaattcctgcgcc

SEQ ID NO: 17599 - DNA, 1317 bp, synthetic construct
  misc_feature 1..1317: note = source = /note="Description of Artificial Sequence: Synthetic coding sequence"
  source 1..1317: mol_type = other DNA
atgcctctcaacgtgtcgtttactaatagaaactacgacctcgactacgactcagtccagccgtacttttactgcgatgaggaggaaaacttctaccagcagcaacagcaatcggaattgcaacccccggccccctcagaggacatatggaaaaagttcgaattgctgccgactccgccactgtcaccgtcacgccgcagcggactctgctcgcctagctacgtggcagtgacccctttttcactgcgcggagacaatgacggtggagggggatccttctccacggcagaccagctcgaaatggtgaccgagcttctgggcggagacatggtcaatcaatcgttcatctgtgatccggatgatgaaacctttatcaagaacatcattatccaggactgcatgtggagcggattcagtgcagcggcaaagctcgtctcagagaagctggcgagctatcaggcggctaggaaggatagcggatcgccgaacccggcacgcggtcactcggtgtgcagcacgtccagcctgtacctgcaggatctctcagccgcagcctcggagtgcatcgacccgtcggtggttttcccgtacccgctgaacgattcctcgtcgccgaagtcctgcgccagccaagattcgagcgctttctcgccaagcagcgactcattgctctcctccaccgaaagctcaccgcagggtagccccgaaccgctggtgctgcacgaggaaactccaccgacgacctcatccgactccgaagaggagcaagaggatgaggaagaaattgatgtggtcagtgtggaaaaaaggcaggctcctggtaaacggtctgagtctggatcgccctccgcgggcggacatagcaagccgccacactcacctctggtgcttaagcgctgtcacgtgagcactcatcaacacaattacgccgctccgccgtcgacgcgtaaggactaccccgccgctaaacgcgtcaagctcgactcagtgcgggtgttgcgccaaatctccaacaacagaaagtgtacgagccctcggagttcagataccgaagagaacgtgaagagaaggactcacaatgttctcgaaaggcagcgcaggaacgagctcaaacgctctttcttcgcgctgcgggaccagatcccggaactggagaataacgagaaagcacctaaagtcgtcattctgaaaaaggccactgcctacatcttgagcgtgcaagccgaaactcagaagctgatctcggagatcgacctgctccgcaagcaaaatgaacaactgaagcataagctcgaacaacttcgcaatagctgtgcc

SEQ ID NO: 17600 - DNA, 1317 bp, synthetic construct
  misc_feature 1..1317: note = source = /note="Description of Artificial Sequence: Synthetic coding sequence"
  source 1..1317: mol_type = other DNA
atgccattgaacgtgtcctttacgaatcgtaactacgacctggactacgattccgtgcagccctacttttactgcgacgaggaagaaaacttttaccaacagcagcaacagtcagagcttcagcctcctgccccatcggaagatatttggaagaaatttgaacttctgccgaccccgcccctgtccccttccagaagaagcggattgtgtagcccgtcgtacgtggcggttaccccgttttcactcagaggagataatgacggcggagggggttcattctccaccgcagatcaactggaaatggtcactgaattgttgggtggcgatatggtgaaccagagcttcatctgcgatcccgacgacgaaacttttatcaagaatatcattattcaggattgtatgtggagtgggttcagcgccgccgctaagctggtgtccgaaaaacttgcctcctaccaagccgcaagaaaggactcaggatcgcctaacccggcacggggacactcggtgtgttcaacttcgtcgctttacctgcaagatctcagcgctgctgcgtcagagtgtattgatccgtcggtggtctttccgtaccctctgaatgactcctcgtctccaaaatcctgcgcatcacaagattcttcggccttttcaccttcctctgacagcttgctgagttccaccgagtcatctccccaagggagccctgagccactggtgctgcatgaggagactccacctactaccagtagcgactcggaagaggagcaggaagatgaggaagagatagacgtggtgagcgtcgaaaaacgccaagcacctggaaagaggagcgaatcaggtagccccagcgcaggaggacactcaaaaccaccacactcacccttggtgctcaagcgctgtcatgtctcgacccatcagcacaactacgcagcaccaccttccaccagaaaggactatcccgcggccaagcgtgtgaaattggattccgttcgcgtgcttcgccagatatcgaacaacaggaagtgcaccagcccccggtcgtcagacactgaagaaaacgtgaagaggagaacccataacgtgcttgaaagacaacgaaggaacgaactcaaacgctccttcttcgcactgagagatcaaatccccgaactggagaacaatgagaaggcacctaaggtcgtgattctgaagaaggcgactgcatacatccttagcgtgcaggcggaaacccaaaagctcatctcggaaattgatttgcttcgcaagcaaaacgaacagttgaagcataagctggagcaactccgcaactcatgtgca

SEQ ID NO: 17601 - DNA, 1317 bp, synthetic construct
  misc_feature 1..1317: note = source = /note="Description of Artificial Sequence: Synthetic coding sequence"
  source 1..1317: mol_type = other DNA
atgcctctgaacgtttcgtttaccaaccggaactacgacttagattacgacagcgttcaaccctatttttattgcgatgaagaagagaatttttatcagcagcagcaacagtcagaactgcaacctcctgccccctctgaagacatctggaaaaaattcgagctgctccctactcctcctttgtcccctagtagacgttccggtctttgcagcccctcctacgtcgccgtgacaccctttagcctgcggggggacaacgacggaggtgggggatctttctccacggccgaccagctggaaatggtgacagagctgctcggaggtgatatggtgaaccaaagtttcatttgtgatccggacgacgaaaccttcattaagaatatcatcatccaggattgtatgtggagcggcttcagtgctgccgccaagctagtgtcggagaagctggcttcctaccaggctgctagaaaagacagcggatccccaaatcctgctcgaggccactccgtatgttcgacatcgtctctgtacctccaggacctctctgctgcggctagcgagtgtattgaccccagcgtggtgttcccttatccactgaatgactcatcatccccaaaaagttgcgcttcgcaggatagtagcgccttctcgccatcgtctgattctctcttaagctctaccgaaagttctcctcaaggatctccagagcccctagtgctccatgaggagacaccccccacaacctcatccgattcagaggaggagcaggaagacgaggaggagatcgatgtggtgtccgtcgaaaagcgacaggccccgggcaagaggtccgagtcaggcagcccaagcgccggtgggcatagcaagcccccacactctccactggtgttaaagagatgtcacgtttccacccaccaacacaactacgctgccccaccctccacccggaaggattaccccgccgctaagcgcgtgaaacttgattccgtccgcgtcctgcgccagatctccaacaacagaaagtgcacgtccccacgatcttccgatactgaggaaaacgtgaaaagacgcactcacaatgtgcttgagcggcagaggcggaatgagctgaagcggtccttcttcgctctgagggaccagattcctgaactcgaaaacaatgagaaagccccaaaagtggtgatcctcaaaaaggcgacggcgtacatcttgtccgtccaggctgagacccagaagctcataagtgagatagatctgttgcgaaaacaaaacgaacagcttaaacataagcttgagcagcttcggaattcctgtgcc

SEQ ID NO: 17602 - DNA, 1317 bp, synthetic construct
  misc_feature 1..1317: note = source = /note="Description of Artificial Sequence: Synthetic coding sequence"
  source 1..1317: mol_type = other DNA
atgcccctcaatgtctccttcaccaaccgcaactatgacctggactacgattccgtccagccgtatttctactgcgatgaggaagagaacttctaccaacagcaacagcagtcagagcttcaaccacccgccccgtccgaagatatatggaagaaattcgaattgctgcccacgccaccgctttcgccgtccaggcggtccggactgtgctctccatcctacgtggccgtcactcccttttcccttcggggtgataacgacggtggaggcggctcgttttcgactgctgaccagctggagatggtcacggagctgctcggaggagacatggtcaaccagtcatttatctgcgacccagatgatgaaaccttcatcaagaacatcattatccaggactgcatgtggagcgggttctccgcagccgcgaaacttgtgtcagaaaagttggcatcataccaggcggcgcgcaaggactcaggttccccgaacccggcccgcgggcactcggtgtgtagcacctcgtcactgtaccttcaagacctttcagccgcggcttcggaatgtatcgaccctagtgtggtctttccctacccgctcaatgacagctcgtcaccaaaatcttgcgcctcccaggacagctcagccttctccccatcctcggatagtttgctgtcctccaccgaaagcagcccgcagggatcgccagaacctctggtcctccatgaagaaaccccgccaactacttcgagcgatagcgaagaggaacaggaggacgaagaggagatcgatgtcgtgtccgtggagaagcggcaagcgccgggaaagcgatcggagtccggatcgccctcagcaggcggtcactccaagccgccacatagcccgctcgtgctcaaacggtgccatgtctcaacgcaccagcataactacgcggctccacctagcaccagaaaggattacccagcagcaaaacgcgtgaaactcgactcagtgcgcgtgctgcgccaaatctcaaacaatcgtaagtgcacctccccgcggtccagcgacactgaggagaatgttaaaagaagaacccacaacgtgttggaaaggcagcgcagaaacgagcttaaacgcagcttctttgctctgcgggatcagatcccggagctggaaaacaatgagaaggccccgaaggttgttatactgaagaaagccaccgcatacattttgagcgtgcaagctgagactcaaaagctgatttcggaaatagacctcttgcgaaagcagaatgaacaactcaagcacaagttggaacagctcaggaattcatgtgcc

SEQ ID NO: 17603 - DNA, 1317 bp, synthetic construct
  misc_feature 1..1317: note = source = /note="Description of Artificial Sequence: Synthetic coding sequence"
  source 1..1317: mol_type = other DNA
atgcctctgaatgtttccttcacaaatcgaaattatgaccttgattatgactccgtgcagccatatttctactgtgatgaagaagaaaatttctaccagcagcagcaacagtctgagctacagcccccagctccctcagaagacatctggaagaaatttgaattgctgcccaccccacctctctcccccagccgcagaagtgggctgtgtagcccctcttacgtcgcagttactccgttttcactgaggggagacaatgacggcggcggcgggtcattcagcacggccgaccaattggagatggtaaccgagctgcttggcggtgatatggtgaatcaatccttcatttgcgaccccgacgatgagacctttattaagaatattattattcaggactgcatgtggtccgggttttcagcagccgcgaagctcgtgtcagaaaaactagcttcttatcaggcagcaagaaaagattctggatctcctaatcccgcccgtgggcactcagtgtgtagtactagctcactgtaccttcaggacttgtctgctgcagcctctgagtgcatcgacccctctgtcgtgttcccttatcctcttaatgacagttcctcacctaaatcctgtgcatcccaggattcaagcgccttctctcccagtagtgactctcttctgtcctcaactgaatccagccctcagggcagcccagagcccctggtgctgcacgaggaaactccccctactaccagcagcgacagtgaggaagaacaggaggacgaagaggagattgacgtggtatccgtggagaaaaggcaagccccgggcaagcgctccgagagcggctccccatccgcgggtggacatagtaaaccaccacactcgccactggtgcttaagagatgtcatgtttcaacccaccagcacaattacgccgcaccaccgtccactaggaaggactacccagccgctaaaagggtgaaactggactcagtgagggtacttaggcagatctccaacaaccgaaagtgcacctctccacggtcaagtgacactgaagaaaatgtgaagcggcgaacacataatgtactcgagcggcaaagacgcaatgagctcaaaaggtccttctttgctctgcgtgatcagatcccggaactcgagaacaacgagaaagcacccaaagtcgtgatccttaagaaggccaccgcttacatattgagcgtccaggccgaaacacaaaagctgattagcgaaatagacctgctgcgcaagcagaatgagcaactgaaacacaaactcgaacagctcagaaacagttgcgct

SEQ ID NO: 17604 - DNA, 1317 bp, synthetic construct
  misc_feature 1..1317: note = source = /note="Description of Artificial Sequence: Synthetic coding sequence"
  source 1..1317: mol_type = other DNA
atgcctcttaacgtgtcgttcaccaaccggaattacgacttagattacgactcagtgcagccatatttctactgcgatgaagaggagaatttctatcagcagcagcaacagagcgagctccagcctccggccccctctgaagacatctggaagaaatttgagctgttaccaactcctcctttgagtccttcccggaggtctggcctatgcagccctagttacgtcgctgttaccccattcagcctgagaggcgacaatgacggaggtggaggctcgtttagtaccgccgatcagctggagatggttacagagctgctcgggggtgatatggtgaatcagtcattcatctgtgacccagacgacgaaacattcattaagaatattatcattcaggattgtatgtggtcaggcttctccgctgccgccaagctagtgtccgaaaagctggcctcgtaccaggccgctcgcaaagattctggaagccccaatccagcacggggccactctgtgtgctcgacatcctccctatacctacaggacctctcagctgccgcatccgaatgtatcgaccccagtgttgtgttcccctaccccctaaatgattcatcgtcccccaagagctgtgccagtcaggactccagcgccttttccccttcctctgacagtctgttgtcgagtaccgagtccagccctcaggggtcccccgaacccctagtgctgcacgaggaaacacccccaactacttcttcagattctgaagaggagcaggaggatgaagaagaaattgatgttgtgagcgtggaaaagcgacaggccccggggaagagaagcgagtcaggcagcccctccgccggtgggcacagcaaaccaccacactccccgcttgtcctaaaacggtgccacgtgtcaactcatcagcacaattatgctgccccgccaagcacaagaaaggactatcctgcagcgaagcgggtcaagcttgactccgtgagggtgctccgacagatctccaataaccgtaaatgtactagcccgcggtcatctgataccgaggaaaacgtgaaaaggcggacacacaacgttttggagcgacagcggagaaatgaacttaagcgcagcttctttgctctccgcgatcagatcccggaattggagaataacgaaaaggcccccaaagtggtgattctgaagaaagctacggcttacatcctatctgtgcaggctgaaacgcaaaaattgatcagcgagatcgatctcctgcgcaaacagaacgagcagctaaaacataagctcgagcaactccggaactcctgtgcc

SEQ ID NO: 17605 - DNA, 1317 bp, synthetic construct
  misc_feature 1..1317: note = source = /note="Description of Artificial Sequence: Synthetic coding sequence"
  source 1..1317: mol_type = other DNA
atgcctctgaacgtctcgtttaccaacaggaactacgatctcgactacgattccgtccagccctacttttactgcgatgaagaagaaaacttttaccagcagcaacaacaatcggagctgcagcctcctgcaccttcagaagatatctggaagaagtttgaactgctcccgacccctccactctccccatccagaaggtccgggctctgctcgccttcatacgtggcagtcaccccattttccctgcggggtgataatgacggtggcggtggtagcttttcgaccgccgatcagttggaaatggtcaccgagcttctgggaggcgatatggttaaccagtcgttcatttgtgatccagatgatgagactttcattaagaacataatcatccaagattgtatgtggagcggattctcggcagcagccaaacttgtgtcagaaaaacttgcgtcgtaccaggccgccagaaaggattccggatcgcccaacccggcccgagggcattcggtgtgtagtactagctccctttaccttcaggacctctccgccgccgcctccgagtgcatagatcccagcgtggtattcccctacccattgaacgactcctcctcacctaagtcatgcgcaagccaagattcgagcgcattctcaccaagctccgacagtctcttgtcgagcaccgagtcctcacctcagggctcgccagagcctctggtcctgcatgaggaaactcctccgacgacttcatcggactcagaggaggaacaggaggatgaagaggaaattgatgttgtctcggtggaaaagcggcaagccccaggaaaacggtcggaatccgggtccccatcggcgggaggtcactcgaagcctccacactctccattggtgctcaagagatgccatgtgagcactcaccaacacaattacgcagctccaccatcaactaggaaggattaccctgccgcaaagagggttaagttggattcggtgcgagtgctgcggcagatcagcaacaatcgaaagtgtacttcgcccagatcctcggataccgaagaaaacgtgaagcgcagaactcataacgtgcttgaaaggcagagaaggaacgagctcaagcggtccttttttgcacttcgggaccaaatccccgaacttgagaacaatgaaaaggctcctaaagtggtcattctgaagaaggcaaccgcatatatcctttccgtccaagctgagacgcagaagctgatttcagaaatcgatcttcttcggaagcaaaatgagcagcttaagcacaagctggagcaacttcggaattcatgcgca

SEQ ID NO: 17606 - DNA, 1317 bp, synthetic construct
  misc_feature 1..1317: note = source = /note="Description of Artificial Sequence: Synthetic coding sequence"
  source 1..1317: mol_type = other DNA
atgcctctgaacgtgtccttcactaacaggaactacgatttggactatgactccgtccagccctatttctattgcgacgaggaggagaatttctatcaacaacaacagcaaagcgaacttcaaccccctgcaccttcagaggatatctggaagaaatttgaattgctgcccaccccaccactgtccccctcccgtcgcagcggcctgtgttcacctagttacgtggccgtgacccctttctctctccgtggtgacaacgacggaggtggtggctccttttccactgccgaccagttggagatggtaaccgaactcctcggcggtgacatggtgaaccaatcattcatttgtgatcctgacgacgagacattcattaagaacattatcattcaagactgtatgtggagcggcttcagtgccgctgctaagttggtgtccgagaagctggcttcttaccaagctgctagaaaagattccggatcacccaaccccgccaggggtcattccgtctgcagcacatcttcactgtacctccaggatctgtcagctgctgcctccgaatgcatcgacccatcagtggtgttcccataccctttgaatgattcaagctcccccaagtcctgcgcttctcaggacagctcagctttcagtccttcttctgattccttgctcagctccactgagtcatcacctcagggcagccctgagccattggttctgcacgaggagaccccccccaccacctccagtgattccgaggaagaacaggaagatgaagaggaaattgatgtcgtatctgtggagaagagacaagcaccaggtaagaggagtgaatctggtagcccctccgctggaggtcattctaagcccccccactcaccccttgttctgaaacgttgtcatgtgtccacccaccagcacaactatgctgcaccaccatccacaagaaaggattatccagcagcaaagagggtgaagttggattctgtaagagttttgagacagatctcaaacaatagaaaatgcacatcaccacgttcaagcgacaccgaggaaaatgtcaagagaagaactcacaacgttttggagcgccagcgtcgcaatgagctgaagaggagtttcttcgcactcagggatcaaatcccagagttggaaaacaacgaaaaggctcctaaagtagtgatcctgaagaaagcaaccgcatacatcctctccgttcaggccgagacccaaaaattgatctctgaaatcgatttgctgagaaagcagaacgaacaactcaagcacaaattggagcagttgcgtaacagctgcgct

SEQ ID NO: 17607 - DNA, 1317 bp, synthetic construct
  misc_feature 1..1317: note = source = /note="Description of Artificial Sequence: Synthetic coding sequence"
  source 1..1317: mol_type = other DNA
atgccactaaacgtgtcattcacaaacagaaattacgatctggactacgactctgttcagccatacttttactgcgatgaggaagagaacttctaccagcagcagcagcagtcagaactgcagccccccgcaccttccgaggacatctggaaaaagttcgaactgctgccaacgcctcccctgtctccttcacgacggtccggactgtgtagcccgtcctatgtggccgttactcccttctctcttaggggcgacaatgatggcgggggaggctcattttccacagctgatcaattagagatggtgacggagctgcttggcggggacatggtcaatcagtcctttatttgtgatccggacgacgagactttcattaaaaacatcattattcaggattgcatgtggtccggatttagtgccgcggcaaaacttgtgtccgagaagttagcctcttaccaggctgcccggaaagactctgggtccccaaaccctgcccgcgggcatagcgtttgctcaacttcatccttgtatctccaggacctcagcgccgcagcctctgaatgtattgatcctagtgtagtgttcccctaccccctcaacgactccagcagcccaaaatcatgcgcctctcaagacagttcagcgttctccccctcatctgacagcctgctcagctcaactgaatcaagtccccagggcagccctgagcctctggtcttacatgaagagacacctccaaccacatcttctgactctgaagaagagcaagaagacgaggaggaaatcgacgtcgtttcagtggagaaaagacaggcccctggcaaacggtcagagagcggaagcccctcagccggaggtcactcgaagccaccccacagccccctggtgctcaagcgatgtcatgtcagcactcaccagcacaattacgccgctcctccatctactcgcaaagattaccctgctgctaaacgcgttaagctggatagcgtgcgagtgcttagacaaatctcaaacaaccgtaaatgcacatctccgcgcagcagtgacaccgaggaaaacgtgaaacgacgaacacataacgtactagagcgccagagaaggaacgagctcaagcggagctttttcgctctcagagaccagatccctgaactcgaaaataatgagaaggctcccaaagtcgtgatcctgaagaaggctactgcttacatcctcagtgtgcaggcagagacgcagaaattgatctccgagatcgacctgctgagaaagcaaaatgaacagcttaaacataagctggagcaactgcggaactcatgcgcg

SEQ ID NO: 17608 - DNA, 1317 bp, synthetic construct
  misc_feature 1..1317: note = source = /note="Description of Artificial Sequence: Synthetic coding sequence"
  source 1..1317: mol_type = other DNA
atgccacttaacgtgtcgttcactaatagaaattacgaccttgattacgactccgtgcagccttacttttactgtgatgaggaagagaacttctaccaacaacaacagcaatcagagcttcagcccccggcccctagcgaggacatctggaagaagttcgagctgctgcctacgccgccactgtctccatctaggcgctccggcttgtgctcgccatcctacgtggccgtcactcctttctccctgagaggagataatgatggcggaggtgggagtttttcgaccgcagaccagctggaaatggtgaccgagttgctcggaggcgatatggtgaatcagtcatttatctgcgacccggatgacgagactttcattaagaacatcataattcaggactgtatgtggtccggtttttcagccgcagcaaaacttgtctcggagaagctggcctcctaccaagcagcacgtaaggattccggaagcccgaaccctgcaagaggccactcggtgtgcagcacttcaagcctctaccttcaggacctgtccgctgcagcatccgagtgcatagacccctctgtcgtctttccttatcccttgaatgacagcagctcgcctaaatcgtgtgcaagccaagatagcagcgctttctcaccttcgagcgattcacttctgagctccactgagtcctcgcctcagggatcgccagagccgttggtgctgcacgaagaaacccctcctaccacttcatccgactcggaagaggagcaggaggacgaggaagaaattgacgtggtgtccgtggagaagagacaagcacccggaaagagaagcgaatccggatcaccatcggcgggcgggcattccaaacctcctcattcaccgctggtgctcaagcggtgtcatgtgtccacccatcagcacaactacgcagctccgccctccactagaaaggattacccagcagcgaagagagtgaagctcgactcggtgcgagtcctgcggcagatcagcaacaaccggaagtgtacctcccctagatcgagcgacacggaagaaaatgtcaagcgtcgcacccataacgtgctggaaagacaaaggcggaacgaacttaagagatccttctttgcccttcgcgatcagatccccgaactggaaaacaacgaaaaggcacctaaggtggttattctcaagaaagcgaccgcctacatactttcggtgcaagccgaaacccaaaagttgattagcgaaattgacctgttgaggaagcaaaacgaacagttgaagcataaacttgaacagttgagaaattcgtgtgca

SEQ ID NO: 17609 - DNA, 1317 bp, synthetic construct
  misc_feature 1..1317: note = source = /note="Description of Artificial Sequence: Synthetic coding sequence"
  source 1..1317: mol_type = other DNA
atgccattgaacgttagtttcactaatagaaactatgaccttgactacgactcagttcagccatatttctactgcgacgaagaggagaatttctatcagcaacaacagcagtcagaactgcagccgccagctccgagcgaagacatctggaagaaatttgaactcctgcccactcccccgctgagccctagccgcaggtcgggtctctgtagcccttcctacgtggcagttacacctttctctttaaggggagacaatgatgggggtggcgggagcttctccaccgctgaccagctcgagatggttacagaacttttagggggtgacatggtgaatcagtccttcatctgtgatcccgacgacgaaacctttattaagaatatcatcattcaggattgcatgtggagcggattcagcgctgcggccaaactagtcagcgaaaagctggcttcgtatcaagcagcccgaaaggacagtgggtcccctaaccccgctagagggcactccgtctgttccacatccagcctctatttgcaagatttgtctgccgcggcgagcgaatgtatcgatcccagcgtagtgttcccatacccgttgaacgattcctcctcgccaaaaagttgtgcctctcaggacagctcagctttttctccatcaagcgattcactgctaagttctactgaaagctccccccaaggctcgcctgaacccctggtattgcacgaggagacccctcctaccacaagctccgattctgaagaagaacaggaggacgaagaggagatcgatgtcgtgtctgtggaaaagaggcaggccccgggaaaacgatctgaaagcggtagtcctagtgccggagggcactcaaaaccgccacattcacctctcgtgctgaagagatgccacgtgtcaacgcatcagcataactacgcagcgcctcccagcacacggaaggattatcccgctgccaagagagttaaactggactccgtgagagttcttagacagatctccaataaccggaaatgcacctcccctagatcatctgacacagaagagaatgtgaaacgccgcacacacaacgtgctggagcggcagcgccggaacgagctcaagcggtcattctttgcactgcgggaccagatcccggagctcgaaaataacgagaaggctccaaaggttgtgatactaaaaaaggccactgcttacatcctgagcgtacaggccgaaacacaaaagctgatctctgaaattgacctccttagaaagcaaaacgaacagctcaaacacaagcttgaacagcttcgcaactcttgcgca

SEQ ID NO: 17610 - DNA, 1317 bp, synthetic construct
  misc_feature 1..1317: note = source = /note="Description of Artificial Sequence: Synthetic coding sequence"
  source 1..1317: mol_type = other DNA
atgccactgaacgtgtccttcactaaccgtaactacgatctggattacgacagcgtgcagccatacttttactgtgatgaagaggagaacttttaccaacagcagcagcaatcggagctgcaaccgcctgcgccgtcggaagatatttggaaaaagtttgaactcctgcccactcctcctctgtcgccctccaggagatcgggactttgcagcccttcatacgtcgcagtcacgcctttctcactgagaggcgacaacgatgggggcggaggatcgttctcgactgcagaccaactggaaatggtgactgaactgctcggaggtgatatggtgaatcagagctttatctgtgacccagacgatgaaaccttcattaagaatatcatcattcaggattgtatgtggtcgggattcagcgccgccgcaaaactcgtgtccgaaaaactggcatcctaccaagcagcacgaaaggattccgggagcccaaatcctgcaagaggccacagcgtctgttcgactagctccctgtacctccaagacctgtcggcagctgccagcgagtgtatcgatccatcggtcgtgtttccatacccccttaacgactcctcatcccctaaatcatgcgcatcacaagattcgagcgcattttcgccatcgtcagattcacttctgtcatcaacggaatcgtcgccgcaggggagcccagaaccactcgtactccacgaagagactccgcctacgacctcgtccgattcagaagaagagcaagaggacgaggaagaaattgacgtcgtctcagttgagaagagacaggcaccaggaaagagatcagagagcggatcgccctccgccggaggtcatagcaagcccccacattcgccattggttttgaagaggtgtcatgtcagcactcatcagcataactacgccgctcccccaagcacccgtaaggattaccctgctgccaagcgtgtgaagctcgactcggtgcgggtgctgagacagatttctaacaataggaagtgtacctcgcctaggtctagcgacactgaggaaaacgtgaaacggcgcacccataacgtccttgagaggcagcggagaaacgaactgaagcgctccttcttcgcacttcgcgaccaaattcctgaactggagaataacgagaaggccccaaaggtagtgatactcaagaaagcaactgcatacattcttagtgtgcaagctgaaacccagaagctcatttccgaaatagacctcctgcggaaacaaaatgagcaactcaagcacaagctggagcagcttcgcaactcgtgtgcc

SEQ ID NO: 17611 - DNA, 1317 bp, synthetic construct
  misc_feature 1..1317: note = source = /note="Description of Artificial Sequence: Synthetic coding sequence"
  source 1..1317: mol_type = other DNA
atgcccttgaacgtatcctttactaaccgaaactatgatctagactatgatagcgtgcagccctacttctactgcgatgaggaggaaaacttctaccagcaacagcagcagtccgaactgcagccccctgccccaagcgaagatatctggaagaagttcgaactgctgcctactcctcccctgagtcctagtcggcggtctggcctttgtagcccctcatacgtcgctgtgaccccgttttccctgcgtggagataatgacgggggcggagggtcattctccacagcagatcagttagagatggtgacagaactcctgggtggggatatggtcaatcagtcattcatttgtgaccccgacgacgagacctttatcaagaacattattattcaggattgcatgtggtccgggttcagcgccgccgccaagctggtcagcgaaaagcttgcgtcttaccaggccgccagaaaagatagcggctcacctaatccagctaggggccattctgtgtgttccacctcatcattatacctccaggacctgagtgccgcagcatccgagtgcatcgacccatcggtagtgttcccttatccactgaacgatagctcatctcctaaaagctgcgcttcacaagacagttcagctttctctccttctagcgattcacttctgagctctaccgaatcctcaccacaggggtcccccgagccactggtcctgcacgaggagacgcctccaacgacttcctcagactctgaggaagagcaggaggacgaggaggaaatcgatgtcgtcagtgttgagaaacgccaagcgcccggcaagaggagcgaaagcggcagcccctccgccggaggtcactcaaaaccaccgcacagcccactagtgctaaagaggtgccatgtgagcacacaccagcacaattacgcagcccctccaagtacccgtaaggactatcccgccgcgaagcgagtgaaactcgattccgtgagagtgcttaggcaaatttcaaataaccggaagtgcacgtcgccaaggagtagcgatactgaggaaaatgtgaagagacgtactcacaacgttcttgagcggcagcggaggaacgaactcaagaggagtttctttgctctaagggatcagatccctgaactggagaataatgaaaaagctcccaaggttgtcatattgaaaaaagctacagcttatattctgtccgtgcaggccgagactcagaaactgatctccgagatcgatctcctgcgcaagcaaaatgaacaattaaagcataaactagagcagctacgaaattcttgtgca

SEQ ID NO: 17612 - DNA, 1317 bp, synthetic construct
  misc_feature 1..1317: note = source = /note="Description of Artificial Sequence: Synthetic coding sequence"
  source 1..1317: mol_type = other DNA
atgccactcaacgtctctttcaccaaccgcaattatgatcttgactacgacagtgtgcagccgtatttctactgtgatgaagaggaaaatttctatcagcagcaacagcagagcgagctgcagccccccgccccctccgaggacatctggaagaaatttgagttactgcccaccccacctctttccccaagcaggaggtccggcctgtgttccccatcatatgtcgcggtgacacctttctcgctgagaggagataacgatggaggcgggggctcgttttccaccgctgaccaactagagatggtcaccgaactactgggcggtgatatggtcaaccaaagctttatttgcgaccccgatgatgaaacctttattaaaaacattattatccaggactgcatgtggtctggattctcggcggccgcgaagctcgtctcagagaagctcgcatcataccaggcagcccgaaaggacagcggctcacccaacccagcgagaggtcactcagtgtgctctaccagtagcctctatctccaggacctttccgccgcggccagcgagtgcatcgacccctcagtggtgtttccataccccctcaatgatagctccagtccaaaatcctgcgccagccaagactcatcagcttttagtccgagcagtgattctttgctaagcagtactgagtcttccccacaaggctctcctgagccactcgttcttcatgaggagactcctcccaccacttcatctgatagcgaggaggagcaggaggacgaggaagagatcgatgtcgtgtccgtggagaaaagacaagctcccggcaagaggagcgaatcaggttccccctctgccggaggacatagcaagcctccacacagtcccctcgttctgaagcgatgtcatgtctcaacccaccagcacaactatgcggcgcccccatcaacccgaaaggattatcctgctgctaagcgggtaaagttagacagcgtgcgtgtgttgagacagatttctaataataggaaatgcacaagcccaaggagtagcgacaccgaagaaaatgtcaagcggcggacacacaatgtgcttgagcgtcagcgccgcaacgaactgaagcgatccttcttcgccctccgagaccagatccctgaactggagaataacgagaaggcccccaaggtcgtgatcctgaagaaggctaccgcttatatcctgtcagttcaggcagagacacaaaagctcatcagtgaaattgatctcctgaggaaacagaacgagcagctgaagcataaactggagcaactgcggaacagctgcgct

SEQ ID NO: 17613 - DNA, 1317 bp, synthetic construct
  misc_feature 1..1317: note = source = /note="Description of Artificial Sequence: Synthetic coding sequence"
  source 1..1317: mol_type = other DNA
atgccactgaatgtcagcttcaccaatcggaactacgacttggattacgactccgtccagccctatttctactgtgacgaggaggagaacttctaccagcagcagcagcaaagcgaattgcagcccccggccccgagcgaggacatctggaagaaatttgaactgcttccaactccgcctctgtcgcctagcagaagaagcggtctgtgctccccatcgtacgtcgccgtcaccccgttttcactgaggggagacaacgacggaggaggcggatccttttcaaccgctgaccaactggaaatggtgactgaactgttggggggagacatggtgaaccaatccttcatctgcgatccggacgatgaaaccttcatcaaaaacatcattattcaagattgcatgtggtcgggtttttctgctgccgccaagctcgtgtcagaaaaactggcctcataccaagccgcccgcaaggacagcggatccccaaacccggcccggggacattcggtgtgtagcacctcctccctctacctccaagacttgtctgctgctgcgagcgaatgcatcgacccgtccgtggtgttcccgtacccgctgaacgactcgagcagccctaagtcctgcgcgtcccaagattcatcagcctttagcccatcctcggactcgcttctttcctccactgaaagctccccgcaggggtcgcctgagcccttggtgctgcacgaagaaactccaccgaccacctcaagcgatagcgaggaagagcaggaggacgaggaagagatcgacgtcgtttccgtggaaaaacgccaagcaccaggtaagaggtccgaatcgggatcaccctcggccggaggacactcaaagccgcctcattcgcctctcgtgctcaagaggtgccacgtgtccactcaccagcacaactacgcagcgccgccttcaacgagaaaggattacccagccgcaaagcgggtgaaactcgatagcgtgcgcgttttgcggcagatctcgaataaccggaagtgcacgagcccgagatcgagcgacaccgaagaaaacgtgaaaaggagaacccacaacgtcctcgagagacaacgcaggaacgaacttaagagatccttctttgccctccgcgatcaaatcccggagttggaaaacaatgaaaaggcaccaaaggtggtgatcctcaagaaggcaactgcttacattctctcggtccaggctgagacgcagaagctgatcagcgagatcgacttgctgcgcaagcagaacgaacaattgaagcacaaactcgagcagcttcgcaactcgtgcgcc

SEQ ID NO: 17614 - DNA, 1317 bp, synthetic construct
  misc_feature 1..1317: note = source = /note="Description of Artificial Sequence: Synthetic coding sequence"
  source 1..1317: mol_type = other DNA
atgccactcaacgtctcatttaccaaccgcaactatgacctagactacgacagtgtgcaaccatatttctactgcgatgaggaagagaacttttaccagcagcagcagcagtctgagcttcaaccccctgctccctccgaggatatctggaagaaattcgagctcctacccacacctccactgtctcctagccgcaggtcagggttgtgcagtccgagctatgtggccgtcacccccttttcactgcgtggggacaacgatggcggtggaggaagtttttcaacagctgaccaactggaaatggtgaccgagctccttggcggggacatggtgaatcagagctttatatgtgaccctgatgacgaaaccttcatcaagaacataatcatacaggactgtatgtggtcgggtttcagcgccgccgccaagctggtttcagagaagctcgccagctaccaagctgcccgaaaggattcggggtccccaaatcccgcgagaggacattcagtctgctcgactagcagcctgtacctgcaggacctgagcgccgctgccagcgaatgtatcgatccgtcagtggtattcccctatcctctgaatgatagctcgtcgcccaagagctgtgctagccaggactctagcgccttcagtccgtcctctgatagcctactgagctctactgagtcaagtccacaaggctctcctgaaccgctggtgctgcatgaggagactccacccaccacctctagcgatagtgaggaagagcaagaagacgaagaggagatagacgtagtgtctgtcgaaaaacggcaagctccaggaaagcgatcagaaagtggtagtcctagtgccggtgggcacagtaagcctccgcacagtcctctagtcctgaaacggtgtcacgtctctacacatcagcataactacgctgctccaccgtccactcggaaagactaccccgcagcaaagagggtgaagctggattctgtacgtgtcctccggcagatttctaataatcgaaaatgcaccagccctcgctccagtgatactgaggaaaatgtgaaaaggcggacccataacgtgcttgagcggcagcgtaggaatgaactgaaaaggtcattcttcgcactgcgggatcaaattcccgagctcgagaataacgaaaaggccccaaaagtggtgattttgaaaaaggcaactgcctacattctgtcagttcaggcggaaactcagaaactgattagtgagatcgacctgctccgcaagcaaaatgagcagctgaagcataagctggagcagttgcgcaatagctgtgcc

SEQ ID NO: 17615 - DNA, 1317 bp, synthetic construct
  misc_feature 1..1317: note = source = /note="Description of Artificial Sequence: Synthetic coding sequence"
  source 1..1317: mol_type = other DNA
atgccgcttaacgtgagctttaccaatagaaactacgatctggactacgactcagttcagccttacttttactgtgatgaagaggagaacttctaccaacaacagcaacaatcggaactgcagcctccagcaccctcggaggatatttggaaaaagttcgagctgttgccaacgccacctctttcgccttccagacggtcgggcttgtgctccccttcgtacgtggcagtcaccccgttttcactccgcggtgacaacgacggaggaggtggttcctttagcaccgcggatcagctggaaatggtgactgagcttcttggtggggatatggttaaccagtccttcatctgcgaccctgatgatgaaacctttatcaaaaacatcattattcaagattgtatgtggagtggcttttctgcagcggcaaagctcgtcagcgagaagctggccagttaccaagcggctaggaaagatagcggatcgcccaatcctgcgcgcggtcatagtgtctgttcgacctcaagcctttaccttcaggatctgtcggcagcagcatccgaatgtattgatccctcggtggtgttcccctatcctctcaacgacagctcgtcgcctaagtcatgtgcaagccaagatagcagcgcattcagcccatcctccgattcattgcttagctccactgaatcctctccccaaggctcaccagagcctctggtcctgcacgaagaaactccaccaaccacgtcatccgactcagaggaggaacaggaagatgaagaagaaatagacgtcgtgagcgtggaaaagcggcaagcaccgggaaagcgatcagaatccggcagtccctcggcaggagggcattctaaacccccgcacagcccacttgtgctgaagcggtgccatgtctccactcatcagcataactacgcagctcctccatccacccggaaagattaccctgcagctaagcgcgtgaaactcgattcagtaagggtgctccgccaaattagtaataacagaaagtgtacctctccgagaagctctgataccgaggaaaatgtaaagcgtagaactcataatgttcttgaaagacaacgtagaaacgaactgaagcgatccttttttgcccttagggaccagatcccagagctggaaaacaatgagaaggccccaaaagtggtgattctcaagaaggccactgcctacatactgtctgtgcaagccgaaactcaaaagctcatttcggagatcgacctcttgcgaaaacaaaatgaacagctgaagcacaagctcgaacagctccggaactcctgcgca

SEQ ID NO: 17616 - DNA, 1317 bp, synthetic construct
  misc_feature 1..1317: note = source = /note="Description of Artificial Sequence: Synthetic coding sequence"
  source 1..1317: mol_type = other DNA
atgccattaaacgtaagtttcaccaatcggaactacgaccttgattatgacagtgttcagccctacttttactgtgacgaagaagagaacttctatcagcaacagcagcagtccgagctgcagcctccagctccatcggaggacatttggaagaaattcgaacttctgccaaccccgccactgagcccctcccgacgcagcggcttatgttctcccagctacgtggccgtgacccctttctctttgcggggcgacaatgatggcgggggaggcagctttagcacagcagaccagttagagatggtcacagagcttttgggaggtgatatggtaaaccagagctttatatgcgaccccgacgacgaaacctttatcaaaaacatcattatccaggattgcatgtggtctggcttctccgcggcagccaagctggtgtcggagaaactagcctcttatcaggctgcgcgcaaagattccgggagccccaaccccgcgagaggacactccgtttgcagcacctcctccttgtacttacaggatttgagtgccgcggcctcagagtgcatcgatccctccgtggttttcccctatcctctcaacgactccagctcccccaagtcttgtgctagccaggatagtagtgctttctccccttccagcgactcactgctgagctctactgaatccagcccgcaaggcagccccgagccattggttctacacgaggagaccccaccaactacaagcagtgactccgaggaggagcaggaagatgaagaagaaattgacgtcgtgagtgtcgagaaacgacaagcacccggcaagcggagcgaatccggtagtccctccgcaggcggacactccaaaccaccgcacagtccattggtcctgaagagatgtcatgttagcacacaccaacataactatgctgcgcctcccagcacaagaaaagactatccggcggccaagagggttaagctggactctgtcagagtattacgccaaattagcaacaataggaagtgtacctctccccgcagttccgacaccgaggaaaatgtgaagcggagaacacataacgtcctggaacggcagaggcgaaacgaactgaagcgctccttctttgctttaagggaccagatacccgaattagagaacaacgagaaggcacccaaagtggtgatactgaaaaaagccacagcttacatcctaagcgtccaggctgaaacacagaagctgatcagtgagatcgatctgctgagaaagcagaacgagcagctcaaacataagctggagcagctccgtaatagttgcgct

SEQ ID NO: 17617 - DNA, 1317 bp, synthetic construct
  misc_feature 1..1317: note = source = /note="Description of Artificial Sequence: Synthetic coding sequence"
  source 1..1317: mol_type = other DNA
atgccgctgaatgtgtccttcactaatcgtaactacgatctggactacgactccgtacaaccctacttctactgtgatgaggaggagaacttctaccaacagcagcagcaatcggagctgcagccaccagctccgagcgaagatatctggaaaaagtttgagcttctgccaactccgcctctctcaccgagtaggagatccggactgtgctccccgagctacgtcgcggtgacgcctttttctctgcggggcgataatgatggaggaggaggtagcttctccaccgcggaccagctcgaaatggtgaccgagctcctgggaggagacatggtcaaccagtcgttcatttgcgacccggatgacgagactttcattaagaacatcatcatccaggattgtatgtggagtggtttttccgcggccgccaaattggtgagcgaaaaactggcgtcatatcaagccgcgcgaaaagattccggatccccgaaccctgcccgcggccatagcgtgtgctccacttcttctctgtatctgcaggaccttagcgcggcagcctcggagtgcatagacccgtcagtggtatttccatacccgctcaacgactcttcgtctccgaagtcttgcgcatcgcaggattcaagcgcattcagcccgagctcggattcacttctctcctcgaccgagagctcaccacagggatccccggaacctttggtgctccatgaggaaacccctccaactacctcctcggactccgaagaagagcaggaggacgaggaagagatcgacgtggtcagcgtggagaaacggcaagcacccggcaagaggagcgaatcggggtcgccaagcgccggcgggcattccaagccgccccacagtcccctggtcctgaagcgctgtcacgtcagcacccatcagcacaattacgccgctcccccttcaacccggaaggactacccagcagcaaagagagtcaagctcgatagcgtgagggtgctgaggcaaatctcgaacaatagaaagtgcacttcgccccggagctctgacacggaagaaaatgtgaagcgtcggacccacaatgtgctggagcgccaaagacgcaacgaactgaagcgctcattcttcgccctgagggaccaaatcccagaattggaaaacaacgaaaaggctcccaaagtcgtgatcctgaagaaagccaccgcttacattctgtcggttcaggcggagacgcagaagctgatctccgaaatcgatcttttgagaaaacaaaacgagcagttgaaacacaagctggagcagcttcggaactcctgcgca

SEQ ID NO: 17618 - DNA, 1317 bp, synthetic construct
  misc_feature 1..1317: note = source = /note="Description of Artificial Sequence: Synthetic coding sequence"
  source 1..1317: mol_type = other DNA
atgccgcttaatgtatcctttaccaacaggaattacgatctcgactatgattcggttcagccctacttttactgcgatgaggaagaaaatttttatcagcagcagcagcagagcgagttacagccgcctgctccatccgaggacatctggaaaaaatttgagcttcttccaacaccaccgctctccccttcgaggcggagtgggctctgctctccatcctacgttgcagtcacaccatttagtctccgtggtgataatgatggcgggggaggcagttttagcaccgctgaccagctggaaatggttactgagttgttgggaggagatatggtgaaccagtcctttatctgtgatcccgatgacgagaccttcattaagaatattatcatccaggattgtatgtggagcggatttagcgccgcagccaagctggtgagcgaaaaactggcgagctaccaagcggcaaggaaagattcgggcagcccaaaccccgcgcgcgggcatagtgtgtgctccacatcgtctctttacttacaggacctgtctgccgctgctagcgaatgtatagatccgtcagtggtgttcccttacccactcaatgattcctcctccccgaaaagctgtgcgagccaggactccagcgccttctctccaagttccgactcccttctgtcaagtacggaatccagcccacagggctcccccgagccattggtgctgcacgaggaaacacctcccactaccagcagtgactctgaggaggaacaggaggacgaggaggagatcgatgtggtttccgtcgagaaaaggcaggctccagggaagcgttccgagtccggcagcccttcggctggtggacattccaagccccctcactcaccattggtccttaaacgatgtcacgtttcgacccaccagcataattacgccgcccctcctagtaccaggaaagactaccctgccgccaagcgggtgaaactggacagtgtgcgagtacttagacagatctcaaataacaggaagtgcacgtctcccagaagctctgatacagaagaaaacgtgaaacggcgcacccacaatgtgttagagcgccagcgacgaaacgagcttaagcgcagtttttttgcactgagagatcaaatccccgagttagaaaacaacgagaaggccccaaaggtggttattcttaaaaaggcaacggcatacatcctgtcagtccaggcagaaactcagaagttaattagtgaaatagaccttctccggaaacagaacgagcagctgaagcacaaactggaacagctgaggaacagttgtgct

SEQ ID NO: 17619 - DNA, 1317 bp, synthetic construct
  misc_feature 1..1317: note = source = /note="Description of Artificial Sequence: Synthetic coding sequence"
  source 1..1317: mol_type = other DNA
atgcccctcaacgtcagttttaccaacagaaactatgacctcgattatgactcggtgcaaccgtacttctactgtgatgaggaagaaaacttttaccagcaacagcaacaatccgagttgcagccccccgcccctagcgaggatatctggaaaaagttcgagctcctgcccacacccccactcagcccttcccggaggtcaggcctctgttccccaagttatgtggccgtgacgcccttcagcctccgtggggacaacgatggaggcggaggatctttcagtaccgctgaccagcttgagatggtcaccgagctgctcggaggagacatggtgaatcagtcctttatctgtgacccagatgatgaaacattcataaaaaacatcatcatacaggactgcatgtggagtgggttctccgctgcggccaagcttgtgagcgagaaactggcttcctaccaagccgcgcggaaagactccgggtctccaaaccctgcgcggggccacagcgtctgttccacttcttcgctttatctgcaggatctctccgccgccgcttcagaatgtattgacccaagtgttgtgtttccgtaccctctcaatgactcttcctcccctaagtcatgcgcttctcaggacagttctgcgttcagcccttctagtgactccttacttagtagtacagagagtagccctcagggctccccagaaccactcgtcctccacgaggagaccccccctacaacaagctctgactcagaagaggagcaggaagatgaggaggagatcgatgtggttagcgttgagaagcgccaggccccaggcaaaagatcggagtctggctcaccaagtgctggagggcactcgaagccgccacattcccccctggtactgaagagatgtcacgtgtctacacatcagcacaactatgccgcccctccttctacaaggaaggactaccctgctgccaaaagggttaaacttgactctgtcagggtgctcaggcaaataagcaataataggaagtgtacttctcccaggtcttctgacactgaggagaacgtgaagaggcgcactcacaacgttctggagcggcagcgtagaaacgagctgaagaggtctttctttgccttgcgcgaccagattccagaactggaaaacaacgagaaagccccaaaagtggtcattctgaaaaaggccactgcttatatcctgtctgtgcaggcggagacacagaaattgatctctgaaatagaccttctccgaaagcaaaacgaacagttaaaacacaaattagagcagctgcgtaactcatgtgcg

SEQ ID NO: 17620 - DNA, 1317 bp, synthetic construct
  misc_feature 1..1317: note = source = /note="Description of Artificial Sequence: Synthetic coding sequence"
  source 1..1317: mol_type = other DNA
atgccgttgaatgtgagtttcacaaaccgaaattatgacctggactatgatagtgtccagccatatttctactgcgatgaggaggagaatttctatcagcagcagcagcagtctgaactgcagccacccgcaccatccgaagatatatggaagaagttcgaactcctgcccaccccaccgctgtctcccagccgcagatctggactctgttctccttcttacgtggcagttacgcccttttcgctgcggggggacaacgatggtggtgggggcagtttctcaaccgccgatcagctggaaatggttacagagctgttgggaggcgatatggtgaaccaatcatttatctgcgacccagatgacgaaacttttatcaagaatatcatcatccaggactgcatgtggtccggcttctcagctgccgcaaagctggtgagcgaaaagttagcttcatatcaggccgcccgcaaggacagcgggtcccctaatcccgctcggggccactccgtgtgtagtacaagctcactgtacctgcaggatttgagcgcagctgcctctgaatgcattgatccaagcgtggtgttcccttacccactgaatgacagctcatcacctaaatcatgtgcttcccaggactccagcgcgttcagcccctcctctgacagcttgctgtcttccactgagagtagtccacagggatctcccgagccgctggtgctgcacgaggagacgccccccacaacctccagtgacagcgaggaggaacaagaggatgaggaggagatcgacgttgtgtctgtggagaagagacaggcccctggcaaaagatctgaaagtggctccccctcagcaggggggcactcaaagcctccacactctccattagtgctgaagaggtgtcacgtgtctacccaccagcataactatgcagcaccaccctcgactagaaaagattatccagccgctaaacgggttaagcttgacagtgtcagagttttaaggcaaatctctaataataggaagtgcactagcccgcgtagctctgacacagaagagaacgtgaagcgccggacccataacgtcctcgagcggcagcggaggaatgagctgaaaaggtcctttttcgcgctgagagatcagatcccagagcttgagaataacgaaaaagcccctaaagtggtaattctgaagaaagcgaccgcttacatactaagtgtgcaggcagagacccagaagttaatttccgaaatcgatctcttacgcaagcaaaacgaacagttaaaacacaaactggagcagctccgcaatagctgtgca

SEQ ID NO: 17621 - DNA, 1317 bp, synthetic construct
  misc_feature 1..1317: note = source = /note="Description of Artificial Sequence: Synthetic coding sequence"
  source 1..1317: mol_type = other DNA
atgccacttaacgtgagcttcaccaacagaaattacgacctggattacgacagcgtgcagccttacttctactgtgacgaagaagaaaacttttaccagcaacagcaacagtccgagcttcagcctccagctccctcagaggacatatggaagaagtttgagcttcttccaaccccgcctctctcgccatcgagaaggtcgggactgtgctccccatcgtatgttgcagtaacgccttttagcctgcggggagacaatgacggtggaggtggatccttttcaaccgcagaccaacttgagatggtcactgagctgcttggcggcgatatggtaaatcaatcattcatctgcgatccagatgatgaaaccttcataaagaacattatcattcaggattgtatgtggtccggttttagcgcagcagcaaagctggtgtccgaaaaacttgccagctaccaggcggcaagaaaggattccggtagcccgaatccagcgcggggacattcagtgtgctcaacctcatccctgtacttgcaggacctctcggcggcagcctcggaatgcattgatccatcagtggtttttccatatcctcttaatgattcatcgtctcctaagtcatgtgcctcacaagattcgtccgctttttccccctcctcagactccctgctgtcgagtaccgagagttcacctcaagggtcgcccgaacccctcgtcctccacgaggaaactcccccgaccacttcatcggacagcgaggaagagcaagaggatgaagaagagattgatgtggtgtcagtcgaaaaaaggcaggcacctggcaagcgtagcgaatcgggctcgccctcggcagggggacactcgaagcctcctcactcgccgcttgtgcttaaaaggtgtcatgtgagcactcatcaacataactacgccgcccctccgagcaccagaaaagattaccccgcagccaagcgtgtgaagttggattcagtccgggtgttgagacaaatttccaacaaccgcaaatgtaccagcccccgatcaagcgatactgaagaaaacgtgaagaggcgcactcataatgtactggaacgacaacgccggaacgaactcaagagaagtttctttgcactgcgcgatcagatcccagaactggaaaacaacgaaaaggcacctaaggttgtgattctgaagaaagcaactgcatacattctgtcagtccaagccgaaacgcagaagctcatctccgagatcgatctgctgcggaaacaaaacgaacaactcaagcataagctcgagcaacttagaaattcctgtgca

SEQ ID NO: 17622 - DNA, 1317 bp, synthetic construct
  misc_feature 1..1317: note = source = /note="Description of Artificial Sequence: Synthetic coding sequence"
  source 1..1317: mol_type = other DNA
atgcctctgaacgtatcttttaccaaccggaattacgaccttgactatgattccgtgcaaccctacttctattgcgatgaggaggagaatttttaccagcaacagcagcaaagcgaactccagccaccggcgccatccgaagacatttggaagaagttcgagcttctgcccactcccccactgtcgccttccaggcgttccggcctttgttcccctagttacgtagctgtcactcccttttcccttagaggcgacaacgatggtggaggaggcagtttctcgacagcggaccagctcgaaatggtcactgaactgttggggggtgacatggtcaatcagagcttcatatgcgaccctgatgacgagaccttcataaagaacataattatccaggactgtatgtggagcgggttctctgccgccgctaaacttgtttccgagaaactcgcaagttatcaggctgccagaaaagattccgggtcccccaatccagcaagaggacatagcgtttgctcgacgagcagcctctacctccaggacttaagcgcagcagcctcagagtgcatcgatccttcggtcgtattcccttatccgttaaacgacagcagttcccctaagagttgcgcatctcaagactccagtgccttctctccctcttcagacagtctgctttcctcgacagagtctagcccgcaggggtctccagagccgttggtcttgcatgaagaaacgcctcccactactagttcagactccgaggaagagcaggaagacgaggaagagatcgacgtggtcagcgttgaaaagcggcaagcccctggaaaacgctctgagtctgggtccccctccgccggtggccactccaagccgccacactcccctcttgtcctgaagcgctgtcacgtgagcacccaccagcataattacgcagcaccacctagcacaagaaaggactatcccgccgccaaaagggttaaattagactcggtcagggtgcttcgtcagatttctaacaatcgaaagtgtacctccccaaggtcttccgacactgaggagaatgtgaaacggcgtacccacaacgtattggagagacagagacggaacgagctgaagagatcttttttcgccctccgcgatcaaatccctgagctggagaataatgagaaggcgcctaaggtagtcatcttaaagaaggccactgcctatatcttgagtgtgcaggctgaaacccagaaacttataagtgaaatcgatctgctgagaaaacagaatgagcagcttaaacataaactggagcagctgaggaatagctgtgct

SEQ ID NO: 17623 - DNA, 1317 bp, synthetic construct
  misc_feature 1..1317: note = source = /note="Description of Artificial Sequence: Synthetic coding sequence"
  source 1..1317: mol_type = other DNA
atgccattgaatgtgtcattcactaaccgcaattacgacctggattacgatagtgtgcagccttacttttactgcgacgaagaggaaaacttctaccagcaacagcagcaatccgagttgcagccgccggcaccatcagaagatatctggaagaaattcgagttgttgcccactccacccctgtccccatcccggaggtcgggcctgtgctccccgtcctacgtggccgtgactccattctcgctgaggggtgataacgacgggggcggaggttcgttctccaccgctgaccagcttgaaatggttaccgagctcctgggtggcgatatggtgaaccaatcgtttatctgcgaccctgatgacgaaaccttcatcaagaacattatcatccaggactgtatgtggagtggattctcggcggccgccaaactggtgagcgagaaactggcctcgtaccaggccgccagaaaggactccggcagccctaaccctgcaagggggcactcagtatgctcgactagctcactgtacctccaggacctgtcggccgctgcctccgaatgcatcgacccgagcgtggtctttccgtacccgctgaatgattcgtcctcaccgaagagctgtgctagccaagacagctcagctttttcgcctagcagcgacagccttctctcatcgaccgaatcgtcaccacagggtagccctgaaccgctcgtgctccatgaagaaaccccgccgacgaccagcagtgactcagaggaagaacaggaagatgaagaagagatcgatgtcgtgtcggtcgaaaagagacaggcgccgggcaagcgctcggagagcgggtcgccgtccgcaggcggacattccaaaccaccgcacagcccgctggtgctcaagaggtgccatgtctcaacccatcaacacaattatgcggcgccgcccagcactcgcaaagactacccggcagccaaaagagtgaaacttgattcagtgcgggtgctgcgccagatcagcaacaatcgcaagtgcacttcccctagatccagcgacactgaagaaaatgtgaagcgccgaacccacaatgtgttggagcggcagcgccggaacgagctgaagcgctcgttcttcgcacttagagatcaaatccctgaattggagaacaatgaaaaagccccgaaggtggtgatcctgaaaaaggctactgcttacattctgagcgtgcaggctgagacgcaaaaattgatttctgagattgacctcctgcggaaacagaacgaacaactgaagcacaagctggaacaattgcggaatagctgtgcc

SEQ ID NO: 17624 - DNA, 1317 bp, synthetic construct
  misc_feature 1..1317: note = source = /note="Description of Artificial Sequence: Synthetic coding sequence"
  source 1..1317: mol_type = other DNA
atgcctctgaatgtgtcatttacaaacaggaattacgacctggattacgactctgtacagccatacttttattgtgatgaggaggaaaatttttatcagcagcagcagcagtcagagctgcaacctccagcaccttctgaggatatttggaagaagtttgaactgttgccaactcccccactgtccccctctaggcgttcaggactctgttctccttcgtacgtggcagttacccctttttcactgcgaggggataatgatggtggcggcggtagtttcagtacagctgaccagttggagatggtgaccgagctgttgggcggcgatatggtgaaccagagctttatttgcgatcccgacgatgaaaccttcattaagaatatcatcatacaagattgcatgtggagcgggttttctgccgccgccaagctagtgtccgaaaagcttgcgagctatcaggctgcaaggaaggatagtggcagtcctaatcccgcccgaggccatagtgtttgttctacatcatcgctgtacttacaagatctcagcgccgcagccagcgagtgcatagatccctccgtggtgtttccctatccacttaacgacagctcatcgccgaagtcttgcgcttcccaggactcaagcgcattcagtcctagctcagacagccttctcagtagtaccgagtcaagtccacaggggtcgccagagcctttggtgttgcacgaggagaccccccctaccacatccagcgattccgaagaagaacaggaagatgaagaggagatcgacgtcgtgtcagtagagaagaggcaggctcctggcaaacggtccgagtccggatccccatccgcaggcgggcattctaagcctcctcactcgcccctggtcctgaaaaggtgccatgttagtactcatcagcataactatgccgctcctcctagcacccgtaaggactaccctgccgccaagagagtaaaattagactctgtgcgtgttttgagacagattagtaacaacagaaagtgtacgagcccacgctcatctgacaccgaggaaaacgtgaaacggaggacccacaacgtgctggagagacaaagacgaaatgagctcaagcggtcattcttcgccctgagagatcaaatccccgaactggaaaataacgaaaaagcccccaaggtggtcatccttaaaaaggccaccgcatatatcctatcggtgcaggctgagactcagaagctcatcagtgagatcgacctcctgcggaagcaaaacgaacagctgaagcataaactcgaacagctgcgcaactcgtgtgcc

SEQ ID NO: 17625 - DNA, 1317 bp, synthetic construct
  misc_feature 1..1317: note = source = /note="Description of Artificial Sequence: Synthetic coding sequence"
  source 1..1317: mol_type = other DNA
atgccgctgaatgtgagcttcactaaccgcaactacgatctggactacgattcagttcaaccgtacttttactgtgatgaggaagagaacttctaccaacaacagcaacagtcagaattgcagccaccagctccctcggaggatatttggaagaaattcgagctcctgccgactccgccacttagcccttcgcgccgctcaggactgtgttccccgagctacgtcgccgtgactcccttctctctgcgcggggacaacgacggtggcgggggctccttttctaccgccgaccaactggagatggtgaccgagttgctcggaggggacatggttaatcagtccttcatctgcgaccctgatgacgaaacgttcatcaagaacatcatcattcaggactgcatgtggtcgggattcagcgcagccgccaagctcgtaagtgaaaagctggcctcctaccaggcggctcgtaaagactcgggatctcctaacccagcgcgcggacatagcgtctgcagcacttcatccctctatttgcaggacttgtccgcagccgcttcggagtgcatcgacccatccgtcgtgtttccatacccgcttaacgatagctcttcgccaaaatcgtgcgcgagccaggattctagcgccttttccccgagctccgattcgctgctctccagcaccgagtcatccccgcaggggagcccggaaccgcttgttctgcacgaagaaaccccgcctaccacctctagcgactccgaagaagagcaggaggacgaagaggaaatcgatgtggtgtcggtggaaaaacggcaggcgccaggaaagcgcagcgaaagtggcagcccctcagccggaggccacagcaagcccccgcattccccgctggtgttgaagcggtgccatgtgtccactcaccaacacaattacgctgccccaccaagcaccagaaaggactaccccgcagccaagcgcgtcaaactcgattcggtgagagtgctgcggcagatctctaacaatcgaaaatgcacttcacctcgttcttccgatactgaagaaaacgtgaagcggagaacccacaacgtccttgaaagacaaagacggaacgaactcaaacgatccttcttcgctctgcgcgatcagatccctgaactggagaataatgagaaggcgccgaaagtggtgattttgaagaaagccaccgcctatatcctgtcagtccaggcagaaacgcaaaagctgatctccgagatcgacctgctcagaaagcagaacgagcagttgaagcacaagctggagcaactgagaaactcctgtgcc

SEQ ID NO: 17626 - DNA, 1317 bp, synthetic construct
  misc_feature 1..1317: note = source = /note="Description of Artificial Sequence: Synthetic coding sequence"
  source 1..1317: mol_type = other DNA
atgcccttaaacgtgagctttaccaatcgaaactacgatctcgactacgacagcgtgcaaccctatttttactgtgatgaggaagagaacttctaccagcagcagcaacagtccgaattacagccaccagcccctagtgaggatatctggaagaaatttgagctgctgccaacccctcctctaagcccatctcgccggagcggcctgtgctcaccatcttatgttgcagttacccccttctcactgcgcggagacaatgatggagggggtgggtctttttccacagctgaccagctcgagatggtcactgagctgctagggggagatatggtgaatcagtcatttatctgcgaccctgatgacgaaacttttatcaagaacatcattattcaagactgtatgtggtctggcttttctgctgccgctaagctcgtgagtgaaaagctagcttcttatcaggctgcccggaaagattctggatccccaaatcccgcccgcggccatagcgtttgctctacaagcagtttgtatctccaggacctgagtgcagcagccagcgaatgtattgatcccagcgtggtgtttccttaccctctgaacgatagttcctctcctaagtcctgtgcttcccaggactccagcgcattcagcccatctagtgatagtctgctcagtagtactgaatcttctcctcagggcagcccagaaccactagtgctgcacgaggaaactcctcccacaacctccagcgatagcgaggaagaacaggaggatgaagaagaaattgatgtggtgtcagtggagaagcggcaggctccaggcaaaagaagcgagtctggctctccatctgccggcggccacagcaagccaccccactccccacttgtgctgaagagatgtcatgtctctacccaccaacacaactacgctgctccaccatctactcgcaaagattaccctgctgcaaaaagggtgaaactagattctgtgcgggtgctgaggcagatcagcaataatcggaaatgtaccagcccaagaagttctgacactgaggaaaacgttaaacggcgcacacacaacgtgttggagcgacaacggcgcaacgaactgaagcgcagctttttcgccctgagagaccagatcccagagctggaaaataacgagaaagcccccaaggtggttatactgaagaaggcaaccgcttatattctgagcgtgcaagctgagacccagaagcttattagcgaaatcgatctgctccgtaagcagaatgaacagctgaaacacaaattagagcagctgaggaattcctgcgcc

SEQ ID NO: 17627 - DNA, 1317 bp, synthetic construct
  misc_feature 1..1317: note = source = /note="Description of Artificial Sequence: Synthetic coding sequence"
  source 1..1317: mol_type = other DNA
atgccgctgaatgtctccttcaccaaccgcaactacgatttggactacgattcggtgcaaccgtacttttactgcgacgaggaagaaaacttctaccagcagcaacagcagtcggagctgcaacccccagcgccatccgaggatatatggaagaaattcgaactgttgccaaccccgccgctgtccccttcacgaagaagcggactttgctcgccgtcctacgtggccgtgactccgttctccttgcggggagacaatgacggaggagggggatccttctccacggcagatcagttggaaatggtgaccgagctgctgggcggagacatggtcaatcagtcatttatctgcgaccctgacgatgagacgttcatcaaaaacatcatcatccaggattgcatgtggtcgggattctccgcagccgccaaattggtgtcggagaagctcgctagctaccaggcagcgcgcaaggactctggaagcccaaacccggctcgcggacactccgtctgctcgacttcatcgctgtacctccaggacctgtccgctgccgcgtcagaatgcatcgatcctagcgtcgtgttcccgtacccgctgaatgattcctcatcccctaagtcgtgtgccagccaggactcctcggcgttctccccatcgagcgactcgcttttgagctccactgaatcgtccccgcagggatcgcccgaacccctggttcttcacgaggagacgcccccaaccacctcgagcgattcagaagaggaacaggaggatgaagaagaaatcgacgtcgtgtccgtcgaaaagcggcaggcacccggcaaacggagcgaatcaggttccccgtcggccggagggcattccaaaccacctcattcccccctggtgttgaaacgctgtcacgtgtccactcaccagcacaactacgctgcaccacctagcacccgcaaagactacccagctgcgaaaagggtgaaactggacagcgtgagggtactgcggcaaatctctaacaaccgcaagtgcacctcgccgcggtcctccgacactgaggaaaatgtgaaacggcgcactcacaacgtcctcgagcgccagaggagaaacgagctgaaacggtccttttttgctctgcgtgaccaaattccagaactggagaataatgagaaggcccccaaggtcgtgattctgaagaaagccactgcctacatcctgtcagtgcaagccgaaacccagaagctcattagcgaaattgacctcctgagaaagcaaaacgagcagctgaagcacaaactggaacagctgcggaattcctgtgct

SEQ ID NO: 17628 - DNA, 1317 bp, synthetic construct
  misc_feature 1..1317: note = source = /note="Description of Artificial Sequence: Synthetic coding sequence"
  source 1..1317: mol_type = other DNA
atgccgctgaacgtcagctttaccaatcggaattacgacctcgactatgattcagtgcaaccctacttctactgcgacgaagaagaaaacttttaccagcaacagcagcagtcagagctgcaaccgccagcaccgtccgaggacatctggaagaagttcgaactcctccccacccctccactgagcccatcaagacgaagcggactctgttcgccttcctacgtcgccgtgactcctttctcgcttcggggcgataatgacgggggaggaggatcattctcaaccgctgaccagctcgaaatggtgaccgagctcctgggcggagacatggtgaatcagtcatttatctgcgacccagacgatgagacttttatcaagaacatcatcatccaagattgtatgtggtcgggcttctcggcggcagcgaaattggtgtcggaaaaacttgcaagctaccaagctgcacggaaggacagcggctcaccgaacccggcccgcgggcattccgtctgctcaacgtccagcctctaccttcaagatctctcagcagccgcgagcgagtgtatcgacccttcagttgtgttcccgtaccctctgaatgacagctcgtcgccaaagtcatgcgcctcacaagatagctcggctttcagcccctcctccgattctctcctctcgagcaccgaatcctcgcctcagggatcgccggaacccctcgttctgcatgaggaaactccgccgacgacttcttcagactccgaagaggaacaagaagatgaggaggagattgatgtggtgtccgtggagaagcggcaggcgccgggcaaacgctccgaatccggatcgccgtcggccggtggccattcgaaaccaccgcattccccgctggtgcttaaacggtgtcacgtgtcaacccaccaacacaattacgctgccccaccgtcgactcgcaaggattaccctgccgcaaagcgcgtgaagctggactcggtgcgggtcctccggcagatttcgaacaacagaaagtgcaccagcccgagatcatcagataccgaagagaacgtgaagcggagaacccacaatgtcttggagcgccaaaggcgcaacgagctgaagcgctccttcttcgctcttcgcgaccaaatcccggaactggaaaacaatgagaaagcccccaaagtggtcatactgaagaaggcgactgcgtacatcctgtccgtgcaggcagaaactcaaaagctcatctcggagattgacttgctccggaagcagaacgaacaactgaagcataaactcgagcagcttcggaactcgtgtgct

SEQ ID NO: 17629 - DNA, 1317 bp, synthetic construct
  misc_feature 1..1317: note = source = /note="Description of Artificial Sequence: Synthetic coding sequence"
  source 1..1317: mol_type = other DNA
atgcccttgaatgtaagctttacaaacagaaattacgaccttgattacgactctgtccagccgtacttttattgtgacgaggaggaaaatttctatcagcagcagcagcaaagtgagcttcagcctccagctccttcagaggacatttggaagaaattcgagctgttgcccactcctccattgtctccttccagaaggtccggactttgttctcccagttatgtggcagttaccccttttagcttgagaggcgataatgatgggggaggcggcagtttctccaccgcggatcagctggagatggtgaccgagcttctcggaggagacatggtcaatcagagtttcatatgtgaccccgatgatgagacattcatcaagaatattatcatacaagattgcatgtggagtggattctctgcagccgccaagctcgtttccgaaaagctggcatcttaccaagctgcacggaaggactcaggatctcccaacccagccagaggccatagcgtctgcagcaccagcagcttgtatctgcaggacctctctgcagcagcctctgaatgtattgatccctctgtggtctttccttaccccctgaatgactcttccagccctaagtcctgtgcttctcaggacagcagtgccttcagcccttcctccgactctcttctctcctccactgagagctcacctcagggctccccagaacctcttgtgctccatgaggagacccctcccacaacttctagtgatagcgaggaagagcaggaagacgaggaggagatcgacgttgtcagtgtggagaagcgacaggcgcccggaaagagatccgagtccgggagtccgtctgctggaggccacagtaaaccaccgcatagccctctcgttctgaaacgctgccatgtgtctacccaccagcataactacgccgcacccccttccaccagaaaggactatcctgcggccaaaagagtgaaactggatagtgtccgggtccttaggcagataagcaacaatcgcaagtgcacctctccacgctcctccgataccgaagagaacgttaagcgccggacccacaacgtgctggagcggcaacggcgcaacgagttgaagcggagttttttcgccctgcgggatcagatccccgagctggagaacaatgagaaggcacccaaggtcgtgatcctcaaaaaggctacggcctacatccttagtgtgcaagccgaaacacaaaaactcatcagcgagattgacctccttagaaagcagaatgagcagcttaaacataagctggagcaacttagaaacagttgcgcc

SEQ ID NO: 17630 - DNA, 1317 bp, synthetic construct
  misc_feature 1..1317: note = source = /note="Description of Artificial Sequence: Synthetic coding sequence"
  source 1..1317: mol_type = other DNA
atgccccttaacgtgtccttcactaatcgcaactacgatctggactacgacagcgtacagccatacttctactgcgacgaagaggaaaacttttaccagcagcagcaacagagcgaactccagccacctgctccgagcgaagatatctggaagaaattcgaactgctgccgaccccgccgctcagcccgtcgaggagaagcggactttgttccccatcgtacgtggccgttacgccgttttccttgcgtggagataatgacggaggaggtggttccttctctaccgccgatcagctggagatggtgaccgaacttctcggaggcgacatggtgaaccagtccttcatttgcgaccccgacgatgaaaccttcatcaagaacatcatcatccaagattgcatgtggagtgggttctccgccgcagccaagctggtgtcagaaaagctggcctcataccaagcggcgcgcaaagatagcgggtcccctaacccggcgcggggccactccgtgtgctccacttcatccctttacttgcaagatctcagcgcggcggcatctgagtgcatcgacccttctgtggtgttcccttatccactcaacgactcaagctctccgaagtcatgtgcttcgcaagactcctccgcattctcgccaagctccgatagcctgctcagcagcactgagtcgtcccctcaaggatccccggagcctctggtgctccacgaagaaactccgccaaccactagctccgactcggaagaagagcaggaggacgaggaggaaatcgatgtggtcagcgtggaaaaacgccaagcaccggggaaacggagcgaatccggatcgccgtcagcggggggccattccaagccgccgcactcgccacttgttctcaagcgctgtcatgtgtctacccaccagcataactatgccgcgccgcccagcacccggaaggactacccggctgctaagagggtgaagctcgattccgtccgcgtcttgcgccaaatttcgaataacaggaaatgcacgtctccgcgcagctccgataccgaagagaatgtgaagcggaggactcacaatgtgttggaacgccaacggcgaaacgaattgaaaagatccttctttgccctgagggaccagatcccagagctggagaacaatgagaaggcgccaaaggtcgtcatcctgaaaaaggcaaccgcgtacatcctgagtgtccaagcggagactcaaaaactgatctccgaaatcgacttgctgcggaagcagaatgagcaactgaagcataagttggagcagctccgcaatagctgcgct

SEQ ID NO: 17631 - DNA, 1317 bp, synthetic construct
  misc_feature 1..1317: note = source = /note="Description of Artificial Sequence: Synthetic coding sequence"
  source 1..1317: mol_type = other DNA
atgccacttaatgtgtcctttactaaccggaactatgacctggattacgacagcgtgcagccatatttctactgtgacgaggaggagaacttctaccagcaacaacagcagtcggaactgcagccgccagccccaagcgaagatatctggaagaaattcgagctgctgccaaccccgccgcttagcccgtccaggcgcagcgggctgtgttcaccgtcgtacgtcgcagtcaccccgttctccttgcgcggagacaacgacggcggaggcgggtccttcagcaccgcggaccaattggaaatggtgactgaactgctcggcggagacatggtgaaccaatcgtttatctgtgatccagatgacgagacttttatcaagaacatcatcattcaagattgcatgtggtcaggattctccgcagcagccaaactggtatcggagaagctcgcgtcttaccaggctgctagaaaggattccggttccccaaacccggcccgcggccacagcgtgtgcagcacttcaagcctgtacctccaagacctgtcggcggctgcttccgagtgcatcgatccatcggtggtgttcccttacccgctgaacgattcgtcctcacctaagtcgtgcgccagccaggactcgtcagcgttctcgccatcgagcgacagcctgctgtcatcaaccgagtcatctccgcagggaagcccggagccgctggtgttgcacgaagagactccaccgaccacttcgtcagactcagaagaagagcaggaagatgaagaggaaatcgacgtggtgtccgtcgagaagaggcaggcgccaggaaagcggtccgagagcggatcaccgagcgctggtggacacagcaagccacctcattccccactcgtgctcaagcggtgccatgtctcgacccaccagcacaattacgctgctccgccatcgactcgtaaggactaccccgccgcgaagcgggtcaagctcgactccgtgcgcgtccttagacaaatctcaaacaaccggaagtgcacgtctccccggtcatccgacactgaagaaaatgtgaaacgccggacccacaacgtgttggaaagacaacgccgcaacgagttgaagagatcatttttcgcgctgagggaccaaatcccagaactggaaaacaacgaaaaggctcccaaggtggtgatcctcaagaaggccaccgcgtacatcctttctgtgcaggccgagactcagaaacttatttcggaaatcgatctgctgcgcaagcagaacgaacagctgaaacacaagttggagcaactgcgtaattcgtgcgcc

SEQ ID NO: 17632 - DNA, 1317 bp, synthetic construct
  misc_feature 1..1317: note = source = /note="Description of Artificial Sequence: Synthetic coding sequence"
  source 1..1317: mol_type = other DNA
atgcctctgaacgtgtcctttacgaatagaaattacgacctcgactacgactccgtgcaaccatacttctattgtgatgaagaagagaatttctaccagcaacagcaacaatcggaacttcagccccccgcgccctccgaggatatctggaaaaagtttgaattgttgcctacccctccgctctctccaagcagacgctcaggtctgtgttccccttcatacgtcgctgtgaccccattttcacttcggggcgataatgatggcggcggaggatcgttctcgactgcagatcagctggaaatggtcaccgagctccttggaggagatatggtcaaccaatctttcatttgtgaccctgacgacgaaaccttcattaagaacatcattattcaggactgcatgtggtcaggtttctcggcagcagcaaagctggtcagcgaaaaacttgcgtcataccaggccgcaaggaaggattcaggttcccctaaccctgcacgaggccattccgtgtgttccaccagctcactgtaccttcaagatctttcggcagccgcaagcgaatgtattgatccatccgttgtgtttccctacccgctcaacgactcctcctcgccaaagtcatgcgcctcgcaagactcctccgcatttagcccaagcagcgattctcttcttagctccaccgaaagttcgccccaagggtcgccagagccactggtgctgcatgaagaaacccctcctactacttcctccgattctgaagaggaacaggaagatgaagaggaaatagatgtggtgagcgtggagaagcgacaagcacctggcaagcggtccgagtcgggatcaccttcagcaggtggacattccaagccccctcactcgccactcgtcctcaagaggtgtcatgtgtctacgcatcaacacaactatgcagcgcccccaagcacccgaaaggactacccagcagcaaagagggtgaagctggattctgtcagggtgcttaggcagatttctaacaatagaaaatgcacgtccccgcgctcatccgataccgaggagaacgtgaaacgccgtacccataacgtgctggaaaggcagagacgaaacgaactcaagcgatcgttctttgctcttcgggaccagattcctgagcttgagaacaatgaaaaggcccctaaagtggtgatccttaagaaggcaaccgcatacattctgtccgtgcaagcggaaacccagaaacttatctcggaaatcgaccttcttaggaagcaaaatgagcagctgaagcataaactcgaacagcttcgtaacagctgcgca

SEQ ID NO: 17633 - DNA, 1317 bp, synthetic construct
  misc_feature 1..1317: note = source = /note="Description of Artificial Sequence: Synthetic coding sequence"
  source 1..1317: mol_type = other DNA
atgccgctgaatgtttcttttaccaaccgcaattacgacctggattacgattcggtccaaccgtacttttactgcgacgaggaagaaaacttctaccaacagcagcaacagtcggagctgcagccgccggccccatcggaagatatctggaagaagttcgagctgctgccgactccgccattgtcaccttcccgccggtcaggattgtgctcaccgtcctatgttgcagtcacgcctttctccctccgcggagataatgatggcggaggcgggtcgtttagtactgcagaccaattggaaatggtgactgagctgctcggcggtgatatggtgaaccagagcttcatctgtgatccggatgacgaaaccttcatcaaaaacattatcatccaggattgcatgtggtcgggattctcagcagctgctaagctcgtctctgaaaaactcgcgagctaccaagctgcccgcaaggattcgggctcgccgaatccggcccgcgggcattccgtctgttcaacgtcctccctttacctccaggacctctcggcggctgcttcggagtgtattgatccatcggtggtgtttccgtacccactgaacgactcctccagcccaaaatcgtgcgcatcgcaagactcctccgcgttttcgccttccagcgacagcctcttgtcctccaccgagagctcgcctcaaggtagccctgaaccgttggttttgcacgaggagactccgccgaccaccagctcggattcggaagaagaacaggaagatgaggaagaaatagatgtggtgtctgtggagaagagacaggccccgggaaaacggagcgagtccggatcaccttccgcggggggacattccaagccacctcacagcccacttgtgctgaaacgctgtcacgtctctactcaccaacacaactacgcggccccgccaagcaccagaaaggactacccagccgccaagagggtgaagctggatagcgtgcgggtgctgcgccagatctcgaataaccgcaagtgtacttcgccgcgatcgtcagacactgaggaaaatgtgaaacgtcgcacccataacgtcctcgagcgccaacggcgcaacgaactgaagcggtcgttctttgcgctgagggaccagatcccggaactggagaataatgaaaaagcgccaaaagtggtgattctgaagaaagccactgcgtacatcttgtccgtgcaagcggaaacccagaaattgatcagtgaaattgacctcctgaggaagcagaatgagcagctgaagcacaagctggaacagctgaggaacagctgcgct

SEQ ID NO: 17634 - DNA, 1317 bp, synthetic construct
  misc_feature 1..1317: note = source = /note="Description of Artificial Sequence: Synthetic coding sequence"
  source 1..1317: mol_type = other DNA
atgccactgaacgtgagcttcacaaaccggaactatgatcttgactacgattctgtgcagccatacttttactgcgacgaggaagagaacttctaccagcaacagcaacagtccgaacttcagcctcccgccccatcggaggacatctggaagaagttcgaactgttgcccactcctcctttgtctccaagccgcagatcaggtctctgctcaccaagttacgttgcagtgactccctttagcctacgaggtgataatgacgggggtggcgggagctttagcaccgcagaccagctcgagatggtcacagagttgctgggcggggacatggtgaatcagagcttcatttgcgaccctgacgatgaaaccttcatcaagaacattataatccaggactgtatgtggtccggtttttccgctgcagccaaacttgtgtcagagaagctggcgtcctaccaggcggctcggaaagacagcggttctcctaatcctgctagaggacactccgtttgctccaccagcagtctgtatctccaggatttatccgctgccgcctccgaatgcatagaccccagtgtggtgtttccatacccactgaatgactcttcatcaccgaaatcctgtgcctcacaagatagttctgctttctctccctcctcagacagcttgctgtcctcaaccgagagtagccctcagggatcccctgaaccacttgtcttacacgaagagacaccaccaacgacctcttctgactcggaggaggaacaggaagatgaggaagagatcgatgttgtttctgtagaaaagcggcaggcaccgggaaaacggtctgagagcggctcaccttccgctggcggtcactctaagccaccccatagcccactggttcttaagcgctgtcacgtgtccacccatcagcataactacgcagcacccccctctacgcggaaggactaccccgccgctaagcgcgtgaaactcgatagtgttcgcgtacttcgtcaaatctctaacaacaggaaatgcacaagtccccgtagctcagacaccgaggagaatgttaaacggaggacccacaacgtgctggaacggcaacgccgaaacgaactaaagcggtcttttttcgccttacgagatcaaattcccgagcttgagaataacgagaaggcccctaaggtcgtgatcctgaaaaaggcaactgcctacatcctgagtgtgcaggccgaaacacagaagctcattagtgaaatcgatctgctccggaagcaaaacgagcagcttaagcataagctggagcagctacggaacagctgcgcc

SEQ ID NO: 17635 - DNA, 1317 bp, synthetic construct
  misc_feature 1..1317: note = source = /note="Description of Artificial Sequence: Synthetic coding sequence"
  source 1..1317: mol_type = other DNA
atgccactgaacgtgtcgttcactaacagaaactacgacctcgattacgattctgtgcaaccgtacttctactgcgacgaagaagagaacttctaccaacagcagcagcaaagcgagctccagcctccggccccatcagaagatatttggaaaaagttcgaactcctcccgaccccaccgttgtcgccgtcacggcgcagcggactgtgctcaccctcctacgtggcagtcaccccattctccctgcggggagataacgatggcggtggaggttccttcagcacggccgaccaactggaaatggtcaccgagctgcttggcggagatatggtcaaccaaagttttatctgcgacccggacgatgaaacgtttatcaagaatatcatcatccaggattgcatgtggtccggcttctcggctgccgccaagctcgtgtcagaaaagctcgcctcctaccaggcagcccgcaaggactcgggaagcccaaatccggcacggggacattccgtgtgctcaacctcgtcactctacctccaggatctctccgccgcagcttcagagtgtattgacccatcggtggtgttcccctacccgctcaacgattcgagctcaccgaaatcttgtgcctcgcaggattcatctgcgttttcgccaagctccgactcccttctgtccagcaccgaatcatcgccacagggctccccagaaccgctggtcctccacgaggagactccaccaaccacttcatccgactcagaggaagaacaggaggatgaggaagaaatcgatgtggtgtcagtcgagaagcgacaggctcccggtaaacgctcggagtccgggtcgccctcggcgggaggtcactccaagccaccgcactcaccgcttgtgctgaagagatgccatgtgtcgactcaccaacataactacgccgccccaccttccacccgcaaggattacccagcggctaagcgggtgaaactcgactcggtccgcgtcctgcgacagatctccaacaatagaaaatgcaccagccctcgatcatcggacactgaagagaatgtgaaacgcagaacccacaacgtcctggaacggcaacggcgcaatgagttgaagcggtcattctttgcgctgcgggaccagatcccagagcttgagaataatgagaaggcaccaaaagttgtgatcttgaagaaggctactgcatacatcctgtcggtgcaagccgaaactcaaaagctgatctccgagatcgacctccttcgcaaacagaacgaacaactcaaacacaaactggagcagctgagaaactcatgcgcg

SEQ ID NO: 17636 - DNA, 1317 bp, synthetic construct
  misc_feature 1..1317: note = source = /note="Description of Artificial Sequence: Synthetic coding sequence"
  source 1..1317: mol_type = other DNA
atgcccttaaatgtttcttttaccaatagaaactatgatttggactacgattctgtgcagccctacttttactgtgatgaagaggagaatttctaccaacagcagcagcagtcagagctgcagccacccgccccttctgaagatatctggaaaaagtttgagctcttaccaacgccgcccctgagtccttctcgaaggagcgggctttgtagcccatcgtatgtggcggttacccccttcagcctgagaggagataacgatggcggcgggggcagtttttccactgcagaccagctagaaatggtaactgaacttctcggcggcgacatggtcaaccagtcttttatttgcgacccagatgatgaaacattcatcaagaacatcataatacaggattgtatgtggtcaggttttagcgcagccgccaaactcgtgagcgaaaaacttgctagctatcaggccgcaagaaaggatagtggaagcccgaacccagcaagaggacactcagtttgttccactagctcactttatttgcaggacctctctgctgcagccagtgaatgcattgaccctagcgtggtttttccctaccctttaaatgactcctctagccccaagtcatgtgcttctcaggattcttcagcgttcagcccaagttctgattcccttctgtctagcaccgaaagttcaccccagggatcccccgaacctctcgtcctccacgaagaaacacctcccactacctccagcgactcggaggaggagcaggaggacgaggaggagatagatgtagtgtcggttgagaagaggcaggctccgggcaagagatccgaatcgggcagcccttccgccggcggacattccaagccgcctcacagccctcttgtgctgaaacggtgccacgtgagcacacatcagcacaattacgccgccccacctagcacgcgtaaggactaccccgcggccaaacgtgtgaagttggatagcgtgcgtgtcctaagacaaatctctaataatagaaaatgtacctccccaagatcaagtgataccgaagagaacgtaaaacggagaactcacaatgtgctggagagacaaaggcgaaatgagctcaagagatccttttttgccctccgtgatcagattcctgagctcgagaataacgagaaggcaccaaaggttgtgattctcaaaaaagctaccgcttacatcctctctgtacaggctgagactcagaaactcatcagtgaaattgatttgctccgaaaacagaacgagcagctaaagcacaagctcgaacagctgcgaaattcgtgtgcc

SEQ ID NO: 17637 - DNA, 1317 bp, synthetic construct
  misc_feature 1..1317: note = source = /note="Description of Artificial Sequence: Synthetic coding sequence"
  source 1..1317: mol_type = other DNA
atgccactcaacgtgagctttacgaaccgtaattatgacctggactacgactctgtccagccatacttctattgtgatgaggaggagaacttttaccagcagcagcagcaatcagaactccagccacctgccccttccgaagacatttggaaaaagtttgaactactgccgacccctccattgtcacctagtaggaggtctggcctctgcagcccgagctatgtggcggttacaccgttcagtctgcggggtgacaacgacggggggggcggcagctttagcacagcagatcaactggaaatggtcactgaactgttgggcggcgatatggtaaaccagtcctttatttgcgaccctgacgacgagaccttcattaagaacataataatccaggactgtatgtggagtgggttctctgccgctgccaagctggtatcggagaaacttgcttcttaccaggcagctaggaaagatagtggatcaccgaacccagccagagggcattctgtgtgtagcaccagttccctctatttgcaggatttaagcgccgctgcctccgagtgcatcgacccgagcgtggtcttcccttacccactgaatgactcaagctcccccaaaagttgtgcttctcaggactcctccgccttcagcccgtccagcgactccctgctttcttccaccgagtctagcccacaaggaagccctgagcccctggtgctacatgaggaaactcccccaactacctcgagtgacagcgaagaggagcaagaggatgaggaagaaatcgacgtggtgtctgtggagaagcgacaagctcccggcaaacggtccgagtccggatcacctagtgccgggggacacagtaagcctccgcacagtccacttgtgctcaagaggtgtcatgtcagcacccaccaacacaactacgccgctcccccctccactagaaaggattatcccgctgcaaagcgggtgaaactggactcagttagggtattgcggcagatcagcaataatagaaagtgcacatcccctcgatcatctgacaccgaggaaaatgtgaagcgaaggactcataatgttttggaaaggcagaggaggaatgagctgaaacgctccttcttcgctcttagggaccagatcccagaactggaaaataatgagaaagctccgaaagtggtgatcctgaagaaagcaacagcctacatactatcagtgcaggccgagacccaaaagctcattagcgaaattgatctgctgcgcaagcagaacgaacagctgaagcacaaattggagcagctccggaactcctgcgct

SEQ ID NO: 17638 - DNA, 1317 bp, synthetic construct
  misc_feature 1..1317: note = source = /note="Description of Artificial Sequence: Synthetic coding sequence"
  source 1..1317: mol_type = other DNA
atgccattgaatgtatcattcacgaatagaaattatgacctggactacgatagtgttcagccttacttctattgcgatgaagaagagaatttttatcagcagcaacagcagagcgaattacagcctcctgcgcccagtgaagatatttggaaaaagttcgaactgctccctactccaccactcagtccttcaaggcgatccgggctttgctcaccatcctatgtcgctgttacaccttttagtctcaggggtgacaatgatggtgggggtgggtcttttagcaccgcggatcagcttgaaatggttactgagcttttaggtggggatatggttaatcagtcattcatatgcgatcccgacgacgagacgttcatcaaaaacattattatccaggattgcatgtggtcaggcttttctgctgctgctaagctcgtgagcgaaaagctagcctcatatcaagctgctcgcaaggattcaggtagtcctaatccagcacgtgggcattctgtatgttcaacatcgtctttatatctacaagaccttagtgctgctgcgtccgagtgtattgatccatcagttgtgttcccatatcctttgaatgattcttcctctccgaagtcctgcgcaagtcaggactcttccgctttttcgccttcttccgacagccttcttagcagcactgagagttcaccccaaggctcgcctgaaccgctagtgcttcacgaagagactcctccaaccaccagctctgacagcgaggaagaacaggaggatgaggaagagattgatgtggtgtcagttgagaagagacaagcgcctggcaagcgctctgagagtgggtctccttctgcgggcggtcacagtaaaccccctcattcaccgctggtgcttaagcgttgtcatgtttctacacatcagcacaactacgccgccccacctagtacacggaaagattatccggccgcaaagcgagttaagctcgacagtgtgagggtcctcaggcaaattagcaacaacaggaaatgcacctctcccagatcatcagacaccgaagagaatgttaaaaggcggacccataatgttctagaacgtcaaaggaggaatgagcttaaacgaagcttttttgctctgcgtgatcagattcctgagcttgaaaacaacgaaaaggctcctaaggttgttattcttaagaaagctacggcatatattctttcggtgcaggcagaaacgcagaagcttatatctgaaatcgaccttcttcggaagcaaaatgaacagcttaagcataaattagaacagttacgtaattcctgtgct

SEQ ID NO: 17639 - DNA, 1317 bp, synthetic construct
  misc_feature 1..1317: note = source = /note="Description of Artificial Sequence: Synthetic coding sequence"
  source 1..1317: mol_type = other DNA
atgcctctgaacgtatcatttactaaccggaattacgaccttgattacgacagcgtgcagccgtacttctattgtgatgaagaagaaaacttctatcaacagcagcagcaatcagagctgcaacctccggccccttcagaagatatttggaagaagtttgagctcctccctacccctcctctgagcccgtcaaggagatcgggactgtgctcgccatcatacgtggctgtgacgcctttcagcctgcggggtgataacgatggagggggagggagcttttcaaccgcagaccaactcgaaatggtcaccgagctcctcggcggagatatggtgaaccagtcctttatctgcgacccagatgatgagacttttatcaagaatatcataatccaagattgtatgtggtccggattttccgcagctgcaaagctggtgagtgagaaattggcatcttaccaagcagcacgtaaagactctgggtcccctaatccggcacgtggacacagcgtttgttctacgtcgtccctttaccttcaagacctttccgccgctgcgtcggaatgtattgacccatccgtcgtgtttccgtacccactgaatgattcatcatctccaaagagctgtgcctcccaagattcgagtgcattcagcccgtcgtcggatagtctgctgtcctcaacggaatcaagcccccagggatccccagaaccactcgtgctgcatgaagaaactcccccaaccacctcttctgactcggaagaggagcaggaggatgaggaagaaattgacgtcgtatccgtcgaaaagaggcaagcacctggcaagagatcagaatccggttccccatcagccggtggtcacagcaagccaccacattctcccctggtgctcaagcgctgtcacgtcagcactcatcaacacaattacgccgcacctcccagcaccagaaaggattacccagcagccaaacgggtcaagctggattcagtgcgggtcctccgacagatttcgaataaccgcaagtgcacctcccccagatcgtcagatacggaggaaaacgtgaaaaggagaacccataatgtgcttgaacgccagcgtagaaacgaattgaagagatctttcttcgcactgcgggatcaaattccagagcttgaaaacaacgagaaagcgcctaaagtggtgattttgaagaaagcgactgcatacattctctcggtgcaagctgaaactcagaaactcatatccgaaatcgaccttcttcgcaagcagaacgagcaactgaagcataaactcgaacagctgaggaactcgtgcgca

SEQ ID NO: 17640 - DNA, 1317 bp, synthetic construct
  misc_feature 1..1317: note = source = /note="Description of Artificial Sequence: Synthetic coding sequence"
  source 1..1317: mol_type = other DNA
atgccccttaatgtgagctttaccaatcgcaattacgatctggactatgacagcgtccagccgtacttctactgcgatgaagaggagaacttctaccagcagcaacagcagtcagagttacaaccccctgccccttcagaggacatctggaagaagttcgagctgctgcctacccctcccttgtcacctagccgccgcagtggactttgctccccttcatacgtggcagtcacccccttttctttgagaggcgacaatgatggcggtggaggcagcttctctaccgcggatcaactggagatggtaactgagctgttgggcggtgacatggttaaccagagctttatctgcgacccggacgacgagaccttcattaagaacatcattatccaggactgtatgtggtccgggttctccgcggccgcaaagttggtctccgagaagctggcttcttaccaagccgctcggaaggactcgggttctcctaaccctgctcgtggccacagtgtctgctccacgtcctcactttatttgcaggaccttagcgccgcagctagcgagtgcattgatcccagcgtggtctttccatacccactgaacgactcgagctcacctaagtcgtgtgctagtcaagattcgtcggcattctcgccctcgtccgattctttactgagcagcactgaatcttcgccgcaaggatcaccagagccacttgtgctccatgaagagactccgcctaccaccagtagcgacagcgaggaagaacaggaggacgaggaagagatagatgtggtatcggttgagaaaagacaagcaccgggtaaacggtccgaatccggctcgccctcagccgggggtcactccaaacctccgcattcgccgctcgtcttgaagcgttgtcacgtctccactcatcagcataactatgcagctcctccctccacccgcaaagactatccagctgccaagcgtgttaagctagactctgtaagggtgctacgccagatctcgaacaaccgcaaatgcacctccccccgcagcagtgacaccgaagagaacgtcaagcgtcgcacgcataacgtcctcgagcgccagcgtcgcaacgagcttaagcgttcgttcttcgcgctccgcgaccaaattcccgagttggagaataacgagaaggccccaaaggtcgtcattctgaagaaggccaccgcatacatcctgtcagttcaggcggagacccagaagctgataagcgagatcgacctgctcagaaagcagaacgaacaacttaagcataagcttgaacaactccgtaatagctgcgca

SEQ ID NO: 17641 - DNA, 1317 bp, synthetic construct
  misc_feature 1..1317: note = source = /note="Description of Artificial Sequence: Synthetic coding sequence"
  source 1..1317: mol_type = other DNA
atgccgctcaacgttagctttaccaatcgaaactacgatttagattacgatagcgtccagccttatttttactgcgacgaagaagagaacttttatcagcagcagcagcagtctgagctgcaacccccagccccctctgaagatatatggaaaaagttcgaactgttaccaacacctcccctaagccccagccgccggtccgggctgtgttccccttcatacgtcgccgtaacaccattctcattgaggggcgacaatgatgggggtggtgggtcttttagtacagcggatcagctggaaatggtcacggagctgctagggggcgacatggttaatcaatctttcatttgtgacccagacgacgaaacgttcattaagaacatcatcattcaagattgcatgtggagcggattcagtgcggccgcaaaactagttagtgagaagcttgcttcttaccaggccgcaagaaaagattccggctccccaaatcccgcccggggccatagtgtctgctccacctctagtctgtatcttcaggaccttagcgccgcagcatctgagtgcattgatccatccgtggtgttcccttatcccctgaacgacagtagctcacccaaatcgtgcgcatcccaggattccagtgccttctcccctagctctgactccttgcttagttcaacagaatctagcccccaaggcagtcccgaacctctagtacttcacgaggaaaccccgccaaccacatcatcggattcggaggaagagcaggaagacgaggaggagatagacgtggtgtctgtagagaaaagacaggctccaggaaagcgtagtgagagcgggtctccttccgcaggcggacacagcaagcccccccacagtccactggtgttaaaacgctgccacgtgtccacccatcagcacaactatgccgcacctccctccacccggaaagactaccctgccgccaagcgtgtcaagctggacagcgtgagagtgctgaggcagattagcaataatagaaagtgtaccagccccaggtcttccgatacggaggagaacgtcaagcgccggactcataatgtgttggagcgccagagacgcaatgaactaaaaaggtccttttttgccctcagggatcagatcccagagctggaaaataacgaaaaagcacctaaagtggtgatattgaagaaagcgacagcttacattctttctgttcaggctgagacgcagaaattaatttctgaaattgacctgctgcggaaacagaatgagcagttgaagcacaagctcgaacagctgagaaattcgtgcgcg

SEQ ID NO: 17642 - DNA, 1317 bp, synthetic construct
  misc_feature 1..1317: note = source = /note="Description of Artificial Sequence: Synthetic coding sequence"
  source 1..1317: mol_type = other DNA
atgcctctcaatgttagcttcaccaaccgcaattacgaccttgactatgacagcgtgcagccctacttctattgtgatgaagaggagaatttttatcagcagcagcagcagtctgagcttcagccaccggccccatccgaggacatctggaaaaagtttgaactgctgcccacccccccactgtccccgagtaggcgctcaggactctgcagcccctcctacgtcgctgtgacacccttcagcctgagaggtgataatgatggaggaggcggatctttcagtaccgctgaccagcttgagatggtcacggaactgctgggaggtgacatggtcaatcagagcttcatctgtgaccctgatgacgaaacttttatcaagaacatcatcatccaggattgcatgtggtctggattctccgcagccgccaagttggtctcagagaagctggctagctaccaagcagcacgcaaggactccggcagtcctaacccagctaggggacattcagtatgctccacttcctccctgtacctgcaggacctgtcagctgctgcaagtgagtgcatcgatccatctgtagtatttccatatcccttgaacgactcttcctcacccaagagttgtgcatcacaagacagcagtgccttctctccctctagcgactccttgttgtcctccactgaaagctctccgcagggctcaccggaacctctcgtactccacgaagagaccccaccgactacatctagcgactccgaggaagagcaagaagacgaagaagaaatcgacgtggtgtctgtagagaaaagacaagcgccaggaaagaggtccgagtccggatcccctagtgcgggaggacactcaaagcctccacatagtccgctcgttctgaaaagatgccacgttagcactcaccagcacaactacgcagcccccccttctacaagaaaggactacccggcggcgaagcgcgtaaagctggactccgtgcgcgtcttgcgccagatttccaacaacaggaagtgcacgagtccaaggagctcagacaccgaagagaatgtcaagagaagaactcataacgttctcgagagacagcgccgcaatgagctcaagaggagtttttttgcgctgagggaccagatcccggagttggagaacaacgaaaaagcgcccaaagtggttattctgaagaaggccaccgcttatatcctgtctgtccaggcggaaacccagaagttgatctccgaaatcgacctgcttaggaagcaaaacgaacagctgaagcacaagcttgagcagctgcgcaactcctgcgct

SEQ ID NO: 17643 - DNA, 1317 bp, synthetic construct
  misc_feature 1..1317: note = source = /note="Description of Artificial Sequence: Synthetic coding sequence"
  source 1..1317: mol_type = other DNA
atgcctcttaacgtatcctttacgaacaggaattatgatctcgattacgattcagtccaaccatatttttactgcgatgaagaagaaaatttctatcagcagcagcagcaatcagaactccagcccccagctccctccgaagatatctggaaaaaattcgaactgctccccactccaccactttccccatcaaggagatctgggctctgttccccatcttacgtagctgtaactccattctctctcaggggagataacgacggagggggaggatctttttctactgccgatcagctagagatggtcacagaactgctgggaggagacatggttaatcagagtttcatttgcgatccggatgatgaaacattcattaaaaacataatcatccaggattgtatgtggagtgggttctccgcagctgccaagcttgtcagtgaaaaactggcatcttatcaggcggcccggaaagactccgggtcgcctaacccagccagagggcatagtgtatgttcaacatcttctctgtatctccaagatctgtccgccgctgcctccgagtgtattgatccctcagtggtgttcccctatccgctaaacgactcctcctccccgaaatcttgtgcatctcaggattcttcggcgttctccccgtccagtgattccttgctctcttccacagagagttccccccagggatcccctgaacctttggttctgcacgaagaaacgccaccaacaacatcttccgattccgaagaggagcaggaagatgaagaagaaattgatgttgtgagtgtggaaaaaaggcaggcccccggaaaacggtccgaatctgggtccccttccgcaggggggcattctaagcccccccattcgccccttgtgctgaaaagatgccacgtttccactcaccaacacaattatgcagctcctccaagtacgaggaaagattatccagctgctaagcgagtcaaactggattctgttagggtactgcgacagatcagtaataatcgcaaatgtactagtccacgttcctctgatacagaagagaacgtcaagcgccggacacacaatgtcctcgaacgacagcggcgcaacgagctcaaacgaagtttcttcgctctcagggatcagatccctgaacttgaaaacaacgagaaagcgcccaaagtcgtcatactcaaaaaagcaacagcttatatactgtcagttcaagccgagactcagaaattaattagtgaaatagacctcttgaggaagcagaacgaacagctaaagcacaaactagaacagctgcggaatagttgtgcc

SEQ ID NO: 17644 - DNA, 273 bp, synthetic construct
  misc_feature 1..273: note = source = /note="Description of Artificial Sequence: Synthetic coding sequence"
  source 1..273: mol_type = other DNA
atgactgaggaaaacgtgaagaggcggacccacaacgtcctcgaacgccaaagaagaaacgaactgaagcgctcattctttgctctccgcgaccaaatcccggaactggagaataacgaaaaagccccaaaagtcgtgatccttaagaaagcgaccgcatacattttgtccgtgcaagcggaaactcagaagctcatcagcgagatcgatctgctgcggaagcagaatgagcagctgaagcataagctcgagcagctgcggaattcgtgcgcc

SEQ ID NO: 17645 - DNA, 273 bp, synthetic construct
  misc_feature 1..273: note = source = /note="Description of Artificial Sequence: Synthetic coding sequence"
  source 1..273: mol_type = other DNA
atgaccgaggaaaacgtcaagcggaggactcacaatgtgctggaaagacaacgtcgaaacgaactcaaacgctcctttttcgctcttagagatcaaatccctgaacttgaaaacaatgagaaagcaccaaaggtcgtgatacttaagaaggcgaccgcatacattctgtcggtgcaagccgaaactcagaagctgattagcgaaatcgacctgcttcgcaaacaaaacgagcagttgaagcataagctggagcagctccggaattcatgtgca

SEQ ID NO: 17646 - DNA, 273 bp, synthetic construct
  misc_feature 1..273: note = source = /note="Description of Artificial Sequence: Synthetic coding sequence"
  source 1..273: mol_type = other DNA
atgaccgaagaaaatgtcaagagacgcacccacaacgtgctcgaacggcaaaggagaaacgagctgaaacggagcttctttgctctgcgcgaccagatcccggaacttgagaataacgaaaaggcgccaaaggtggtcattctcaagaaagccactgcatacatcctgtccgtgcaggccgagactcagaagttgatctcagagatcgatctgctccgcaagcagaacgaacaactgaaacataagctggagcaactccggaattcgtgcgcg

SEQ ID NO: 17647 - DNA, 273 bp, synthetic construct
  misc_feature 1..273: note = source = /note="Description of Artificial Sequence: Synthetic coding sequence"
  source 1..273: mol_type = other DNA
atgaccgaagagaatgtgaagaggagaacccacaatgtgctggagcgacaaagacgtaatgagctgaagcgctcattctttgcattgcgcgaccagatcccagaactggaaaacaacgaaaaagctcctaaggtggtcattcttaagaaggcaactgcatacatactgagcgtccaggcggagactcaaaagctgatctcggaaattgatcttcttcggaaacaaaacgaacagctcaaacataagctcgaacaacttcggaactcctgtgcc

SEQ ID NO: 17648 - DNA, 270 bp, synthetic construct
  misc_feature 1..270: note = source = /note="Description of Artificial Sequence: Synthetic coding sequence"
  source 1..270: mol_type = other DNA
atgaccgaggaaaatgtgaagcggaggacgcacaatgtgcttgaaagacagaggaggaatgagctcaaaaggagtttttttgctctcagagaccagattccggagctggagaacaacgagaaggcgccgaaggtggtgattctgaagaaggctaccgcatacatcttatctgtgcaagcagaaacgcagaagttgatttccgaaatcgacctgttaagaaagcaaaacgaacagctgaagcacaagttagaacagctacggaactcatgc

SEQ ID NO: 17649 - DNA, 270 bp, synthetic construct
  misc_feature 1..270: note = source = /note="Description of Artificial Sequence: Synthetic coding sequence"
  source 1..270: mol_type = other DNA
atgacagaggaaaacgtgaaaaggcgcacacataacgttctggaacggcagcgacgcaatgagcttaaacgtagcttcttcgcactccgcgaccaaattccagagctagaaaacaacgaaaaggccccaaaggtggtaattttgaaaaaggctaccgcatatattttaagcgtacaagccgagacgcagaagttgatctctgaaatagatctgctgcgcaaacagaatgagcagctgaaacacaagctggagcagcttcgaaactcgtgc

SEQ ID NO: 17650 - DNA, 270 bp, synthetic construct
  misc_feature 1..270: note = source = /note="Description of Artificial Sequence: Synthetic coding sequence"
  source 1..270: mol_type = other DNA
atgaccgaagaaaacgtgaagagaagaacccataatgtgctggagaggcaacgacggaacgaattgaaaagatccttttttgcgctcagggatcagattcctgagcttgagaataatgagaaggcccctaaggtggtgattcttaagaaagccactgcctacatcctgtccgtgcaagcagagactcaaaagctcatttcggaaatcgatcttctgcggaaacaaaacgaacaacttaagcacaaactcgagcagctgcgaaattcctgt

SEQ ID NO: 17651 - DNA, 270 bp, synthetic construct
  misc_feature 1..270: note = source = /note="Description of Artificial Sequence: Synthetic coding sequence"
  source 1..270: mol_type = other DNA
atgactgaggaaaatgtcaagcggagaactcacaacgtcctcgagcgccagcgccggaacgagctcaagagatcctttttcgccctgcgcgatcaaatcccagaactggagaacaatgaaaaagcgccaaaagtggtgatcctgaagaaggccactgcctacatcctgtcggtgcaggccgaaacccagaaactgatcagcgaaatcgatctgcttcgcaagcagaacgaacaactgaagcataagttggaacaattgcggaactcgtgc

SEQ ID NO: 17652 - DNA, 270 bp, synthetic construct
  misc_feature 1..270: note = source = /note="Description of Artificial Sequence: Synthetic coding sequence"
  source 1..270: mol_type = other DNA
atgactgaggagaatgtcaagaggcgcactcacaatgttttggaacgccagagaaggaacgagctcaagagaagttttttcgctctgagggaccagattcctgaattggagaataacgaaaaggctcctaaggtggtgattctgaagaaggctactgcatatattcttagcgtacaggctgaaactcaaaagcttattagcgagattgacctcctgcgcaagcaaaatgaacagcttaagcacaagttggagcagttgcgcaattcatgt

SEQ ID NO: 17653 - DNA, 270 bp, synthetic construct
  misc_feature 1..270: note = source = /note="Description of Artificial Sequence: Synthetic coding sequence"
  source 1..270: mol_type = other DNA
atgacggaggaaaacgtcaaacgcaggactcacaacgtgctcgaaagacagaggcgcaatgagttgaagaggtcattcttcgcgttgagggaccaaattccggaactggagaacaacgagaaggctccaaaggtcgtgatccttaagaaggccactgcctacatcctctccgtacaagcagagacgcagaagcttatctcagaaatcgacctcctgagaaaacaaaatgaacaactgaagcataaattggagcagctgaggaacagttgc

SEQ ID NO: 17654 - DNA, 270 bp, synthetic construct
  misc_feature 1..270: note = source = /note="Description of Artificial Sequence: Synthetic coding sequence"
  source 1..270: mol_type = other DNA
atgactgaagagaacgttaaaagacgtactcacaatgtgctggagcggcaaaggcgcaacgaactgaagcggtctttctttgctcttcgcgaccaaattcccgaactggagaataacgaaaaggccccgaaagtggtgatccttaagaaggccaccgcatacatcttgtcggtccaggcggaaacccagaagctgatctccgaaatcgatttgcttagaaaacagaatgagcagctcaaacataagctcgagcaactccgcaacagctgt

SEQ ID NO: 17655 - DNA, 270 bp, synthetic construct
  misc_feature 1..270: note = source = /note="Description of Artificial Sequence: Synthetic coding sequence"
  source 1..270: mol_type = other DNA
atgactgaggaaaatgtgaaacgccggacgcacaacgtcctggagcgtcagagaagaaacgagctgaaaaggtcttttttcgcactgcgagaccagatccctgagctggagaacaacgagaaggcacctaaggtcgtcatactgaaaaaggccacagcttacattctgtcggtacaagcagagacccagaagctaattagcgaaatcgacctcctgaggaaacagaacgaacagctaaagcataagttagagcagttacggaattcatgc

SEQ ID NO: 17656 - DNA, 270 bp, synthetic construct
  misc_feature 1..270: note = source = /note="Description of Artificial Sequence: Synthetic coding sequence"
  source 1..270: mol_type = other DNA
atgaccgaagagaacgtcaaaaggaggacacacaacgtgctggaacggcagcgcagaaacgagttgaagcgcagtttctttgcccttagagaccagatacccgagctggagaataatgaaaaggcccctaaagtcgtcattctcaagaaagcaaccgcctacatcttgagtgtacaggcggaaacccagaaactcatcagtgagattgatctgctgaggaagcaaaatgaacagcttaagcacaagttggagcagctgagaaactcatgc

SEQ ID NO: 17657 - DNA, 270 bp, synthetic construct
  misc_feature 1..270: note = source = /note="Description of Artificial Sequence: Synthetic coding sequence"
  source 1..270: mol_type = other DNA
atgacagaagaaaacgttaagagaaggacacataatgtgctcgagcgccagaggcgcaatgagctgaagcggagcttcttcgccctgagagaccagatccccgagttggagaacaatgaaaaggcgccaaaggttgttatactgaagaaagcaacggcatatattctcagcgtgcaagccgagacacagaagctgatctccgagatcgatctgctcagaaagcagaacgaacagcttaaacacaaactcgaacaattgagaaattcttgc

SEQ ID NO: 17658 - DNA, 270 bp, synthetic construct
  misc_feature 1..270: note = source = /note="Description of Artificial Sequence: Synthetic coding sequence"
  source 1..270: mol_type = other DNA
atgaccgaggagaacgttaaacgccggacgcataacgtgctcgagcgtcagcgtagaaacgagctaaagcgcagcttcttcgcactgcgcgatcaaatccccgaactagagaacaacgagaaggcccctaaggtggtaatattaaaaaaggcaactgcctatatactttccgttcaggccgagacgcagaagcttatcagcgaaatagatctccttcgcaagcagaacgagcagctcaaacacaagctagaacaattacggaatagttgt

SEQ ID NO: 17659 - DNA, 270 bp, synthetic construct
  misc_feature 1..270: note = source = /note="Description of Artificial Sequence: Synthetic coding sequence"
  source 1..270: mol_type = other DNA
atgacggaagagaatgtgaaacgaagaactcacaacgtcctcgaaagacaaaggcgcaacgagctgaaaagatccttctttgcacttagagatcaaatccccgagttggagaacaatgagaaggcacctaaggtcgtcattctgaaaaaggcgactgcatacattctctcggtgcaggcggaaacccaaaagctcattagcgaaattgatcttctcagaaaacaaaacgaacagctgaagcataagctcgaacaacttcgtaactcgtgt

SEQ ID NO: 17660 - DNA, 270 bp, synthetic construct
  misc_feature 1..270: note = source = /note="Description of Artificial Sequence: Synthetic coding sequence"
  source 1..270: mol_type = other DNA
atgaccgaagaaaacgtgaaaaggcggacgcataacgtgctggagcgacaacgcagaaatgagcttaagcggagcttttttgcgctcagagatcagatcccggaactggagaataacgaaaaggcgccaaaggtggtgatccttaagaaagccacggcttacattcttagcgtgcaagccgagactcaaaagctgatctccgaaatcgacctgcttcgtaagcagaatgaacagcttaaacataagctggaacaactgcgaaactcatgt

SEQ ID NO: 17661 - DNA, 270 bp, synthetic construct
  misc_feature 1..270: note = source = /note="Description of Artificial Sequence: Synthetic coding sequence"
  source 1..270: mol_type = other DNA
atgacggaggaaaacgtcaagagacgaacccataacgtgctcgagcgacagaggcgaaatgaactcaagcgatcatttttcgccttgagggaccagatccccgagctggaaaacaacgagaaggccccgaaggtggtcatcctcaagaaggcaactgcttatatcctgagtgtccaggcggaaactcagaagctgattagcgagatagatctcctgcgcaaacaaaacgaacagctgaaacacaaactggagcagctgagaaattcttgc

SEQ ID NO: 17662 - DNA, 270 bp, synthetic construct
  misc_feature 1..270: note = source = /note="Description of Artificial Sequence: Synthetic coding sequence"
  source 1..270: mol_type = other DNA
atgactgaagaaaacgtaaagagacgcacccataatgtcctggagcggcaacgccgaaacgagctgaagagatctttctttgccctccgcgatcagatcccggagcttgaaaacaacgaaaaggcacccaaggttgtgatccttaagaaagcgaccgcttacattttgagcgtgcaggccgagactcaaaaactcatctccgaaatcgaccttctgaggaagcagaacgaacagctgaaacacaaactggaacaactgcggaattcctgc

SEQ ID NO: 17663 - DNA, 270 bp, synthetic construct
  misc_feature 1..270: note = source = /note="Description of Artificial Sequence: Synthetic coding sequence"
  source 1..270: mol_type = other DNA
atgacggaggaaaatgtgaaacgccgaacccacaatgtgctggagcggcagaggcgtaacgaactgaagcgatcctttttcgccttgagagatcaaattccggagctcgagaacaacgaaaaggccccaaaggtcgtcatcctgaagaaggctaccgcatacatcttgtcggttcaggcggaaacgcagaaacttatcagtgagatcgacctgcttcgcaaacaaaacgaacaactcaagcataagctcgaacagctgagaaatagctgc

SEQ ID NO: 17664 - DNA, 270 bp, synthetic construct
  misc_feature 1..270: note = source = /note="Description of Artificial Sequence: Synthetic coding sequence"
  source 1..270: mol_type = other DNA
atgacagaagagaatgttaaaaggaggacacataacgtgctggaaagacagagacgaaacgagctaaaaagatctttctttgctctgcgcgatcagatccctgaactggagaataacgagaaggccccgaaggttgtcattctcaagaaggccacggcttacattctctccgtacaggccgaaactcagaagctgatctccgagatcgacctgctccgtaaacagaacgagcagctcaaacacaaattagagcagctccgcaactcctgt

SEQ ID NO: 17665 - DNA, 270 bp, synthetic construct
  misc_feature 1..270: note = source = /note="Description of Artificial Sequence: Synthetic coding sequence"
  source 1..270: mol_type = other DNA
atgaccgaggagaacgtaaagcgaaggacacacaatgttctggagcgacagcgcagaaacgaacttaagagatcctttttcgctctacgagatcagatccctgagcttgagaataacgagaaggcaccaaaagtcgttatcctgaaaaaggctaccgcgtacattcttagtgtacaagcagagacccagaaactcattagcgaaatagatctgcttcgaaaacagaacgaacaactgaagcataagctggaacagctcagaaatagctgt

SEQ ID NO: 17666 - DNA, 270 bp, synthetic construct
  misc_feature 1..270: note = source = /note="Description of Artificial Sequence: Synthetic coding sequence"
  source 1..270: mol_type = other DNA
atgactgaagagaacgtgaagagacggactcataatgtcctcgagcggcagcgcagaaacgaacttaagcgtagcttctttgcacttagagatcaaattccggagctcgaaaacaatgaaaaggcaccaaaggtggtcatacttaagaaggctactgcatacatactcagcgtccaagcggagacgcagaagctgatttccgagatcgatttgcttaggaaacagaacgaacaactgaaacacaaactggaacagctgcgcaattcttgt

SEQ ID NO: 17667 - DNA, 270 bp, synthetic construct
  misc_feature 1..270: note = source = /note="Description of Artificial Sequence: Synthetic coding sequence"
  source 1..270: mol_type = other DNA
atgaccgaagagaatgttaagaggcggacccataacgtcctggagagacagagaaggaatgagctcaaacgatcttttttcgctttgcgagatcagatcccggagctggaaaacaatgagaaggctcccaaggtggtcatcttgaagaaggccaccgcctatatcctgagtgtgcaggcggaaacccagaagttaatcagtgaaattgacctgctgcggaagcagaatgaacaactgaaacacaaactggaacagttgaggaacagctgc

SEQ ID NO: 17668 - DNA, 270 bp, synthetic construct
  misc_feature 1..270: note = source = /note="Description of Artificial Sequence: Synthetic coding sequence"
  source 1..270: mol_type = other DNA
atgacagaagagaatgtgaagaggcgcacccacaacgttctagaaaggcaacggcgcaacgagctgaagcggtcttttttcgccctacgggatcagatcccggagctcgagaacaatgagaaggctccgaaggtggttattctgaaaaaggccacagcgtatattctctctgtgcaggcggagacacagaaactgatatcagagattgacctgcttcggaaacagaacgagcaactgaagcacaaactcgagcaactgagaaattcatgt

SEQ ID NO: 17669 - DNA, 270 bp, synthetic construct
  misc_feature 1..270: note = source = /note="Description of Artificial Sequence: Synthetic coding sequence"
  source 1..270: mol_type = other DNA
atgaccgaggagaacgtgaagagaagaacgcacaacgtgctggagcggcaacggaggaacgagctgaagagatctttcttcgccctccgcgatcaaatccctgagctggaaaataacgagaaagcccctaaagttgtgattctgaagaaagcgaccgcctatattctgtctgtccaggcagaaactcaaaagctcatttccgagatcgacttgctgcggaagcagaacgaacaactgaagcacaagctggagcagctgcgcaacagctgc

SEQ ID NO: 17670 - DNA, 270 bp, synthetic construct
  misc_feature 1..270: note = source = /note="Description of Artificial Sequence: Synthetic coding sequence"
  source 1..270: mol_type = other DNA
atgaccgaggagaatgtgaaacgccgtacccataacgtgcttgaacgacagcgcagaaacgaactgaagcgctcatttttcgcactcagggatcaaatacccgagctcgagaataatgaaaaggcgccgaaagtcgtgattctcaagaaggcaaccgcctatatcctctccgtgcaagcagaaacgcagaagttgatttccgaaattgatctccttagaaagcagaacgaacagcttaagcataagctggagcaactgcgtaattcgtgt

SEQ ID NO: 17671 - DNA, 270 bp, synthetic construct
  misc_feature 1..270: note = source = /note="Description of Artificial Sequence: Synthetic coding sequence"
  source 1..270: mol_type = other DNA
atgacggaagagaatgtcaagaggcggacccataacgttctcgaaagacagcgccggaatgagctgaaacgctcattctttgccctccgagatcagatccctgagctggagaacaacgagaaagccccgaaggtggtgatcctcaaaaaggccactgcttacatcctgtcggttcaagcagaaacccagaagctcatttccgagatcgatctgttgcgcaagcaaaacgaacagttgaagcacaaactggaacagctgagaaactcatgt

SEQ ID NO: 17672 - DNA, 270 bp, synthetic construct
  misc_feature 1..270: note = source = /note="Description of Artificial Sequence: Synthetic coding sequence"
  source 1..270: mol_type = other DNA
atgactgaagaaaacgtgaaacgccgaactcataacgtgctggaaaggcaaaggaggaacgaactcaagcgctcatttttcgcactcagagatcaaataccggaacttgagaataacgagaaggcaccaaaggtggtgatccttaagaaggcaaccgcgtacattctgagcgtccaggcagagacgcagaagctgatctcggagatagatttgttgcgaaaacagaacgaacaacttaaacacaaactcgaacagcttagaaactcatgc

SEQ ID NO: 17673 - DNA, 270 bp, synthetic construct
  misc_feature 1..270: note = source = /note="Description of Artificial Sequence: Synthetic coding sequence"
  source 1..270: mol_type = other DNA
atgactgaagagaatgtaaagcgcaggacacacaacgtgcttgagcggcagcgtcgtaatgaacttaagagaagcttctttgcccttcgggatcaaattccagagctggagaacaacgaaaaagcaccaaaggtagtgatcctcaagaaggctacggcttacattctttcagttcaggccgaaacgcagaagctgataagcgaaattgacttactcagaaagcagaatgagcagcttaaacataagctggagcagctgaggaatagctgc

SEQ ID NO: 17674 - DNA, 270 bp, synthetic construct
  misc_feature 1..270: note = source = /note="Description of Artificial Sequence: Synthetic coding sequence"
  source 1..270: mol_type = other DNA
atgacggaagagaacgtgaaacggcgaacccacaatgtcctggaaaggcaaaggcgaaatgagctgaaacgctccttcttcgcacttcgggatcaaataccagagctggaaaacaacgagaaagctccgaaggtggtgattctgaaaaaggccacggcgtacatcctctcggtgcaggcggagactcagaaactcatctcagagatcgacctccttcgcaagcagaatgagcagttgaagcataagctggaacagttgcggaattcatgt

SEQ ID NO: 17675 - DNA, 270 bp, synthetic construct
  misc_feature 1..270: note = source = /note="Description of Artificial Sequence: Synthetic coding sequence"
  source 1..270: mol_type = other DNA
atgacggaggagaacgtaaagcggcgcactcataacgtactcgagcgccagcggaggaacgagctcaagcgaagcttcttcgcactgcgcgaccaaattcccgagcttgagaacaatgagaaggcaccaaaggtagtgatactaaagaaggccactgcctatatcctgagtgttcaagccgagacgcaaaaactgatatcggagattgacttactgcgaaagcagaacgaacaactaaagcataaactggagcaattgcggaactcgtgc

SEQ ID NO: 17676 - DNA, 270 bp, synthetic construct
  misc_feature 1..270: note = source = /note="Description of Artificial Sequence: Synthetic coding sequence"
  source 1..270: mol_type = other DNA
atgactgaagaaaacgtgaagcgtcgcacccacaatgttctggaacgacagagaaggaacgaactgaaaagatccttttttgctctgagagatcaaattccggaactggagaataacgagaaggcgcctaaggtggtgatccttaagaaggccactgcatacatcctttcggtccaggctgaaacccagaagctgattagcgaaatcgacctcctgcggaagcagaatgagcaactgaagcataaactggagcaattgaggaatagctgt

SEQ ID NO: 17677 - DNA, 270 bp, synthetic construct
  misc_feature 1..270: note = source = /note="Description of Artificial Sequence: Synthetic coding sequence"
  source 1..270: mol_type = other DNA
atgaccgaagaaaacgtgaagcgaaggacgcacaacgtcctggagagacaaagacgcaatgagctcaagcgttctttcttcgctcttcgtgaccagatcccggagctggagaacaatgaaaaagcaccgaaggtggtcatccttaaaaaggccaccgcctacatcctgagcgtgcaggcagagacacagaagctcatatctgaaatcgacctactgagaaaacagaacgagcagctgaagcataaacttgagcagctgaggaactcttgt

SEQ ID NO: 17678 - DNA, 270 bp, synthetic construct
  misc_feature 1..270: note = source = /note="Description of Artificial Sequence: Synthetic coding sequence"
  source 1..270: mol_type = other DNA
atgacagaagaaaatgtcaaaagaagaacacataatgttcttgaaagacaaagaaggaatgaattaaaaagaagtttttttgctcttagagaccagattccagaattagaaaataatgaaaaagctccaaaggttgttattttaaagaaagccactgcttatattttgtcagttcaagctgaaacacaaaaacttatctcagaaatagatttacttagaaaacaaaatgaacaattaaaacataagttagaacaattaagaaattcttgt

SEQ ID NO: 17679 - DNA, 270 bp, synthetic construct
  misc_feature 1..270: note = source = /note="Description of Artificial Sequence: Synthetic coding sequence"
  source 1..270: mol_type = other DNA
atgactgaggagaatgtcaagcgccgcactcataatgtgttggaacgccaaagacggaacgaactcaagcggtcgtttttcgccctgagggatcagatcccagagctcgagaacaacgaaaaggcaccgaaggtggtgattctgaagaaagcgaccgcttacatcctgtcagtccaagccgaaacccaaaaacttatctccgaaatcgacctgctgcggaagcagaacgagcagctgaagcacaaactcgaacagctcagaaatagctgt

SEQ ID NO: 17680 - DNA, 270 bp, synthetic construct
  misc_feature 1..270: note = source = /note="Description of Artificial Sequence: Synthetic coding sequence"
  source 1..270: mol_type = other DNA
atgacagaagaaaacgtcaaaaggaggacacacaatgtgctggaacggcagaggcgcaatgaactcaaaagaagtttctttgccttacgggatcagatacctgaactcgaaaacaatgaaaaggctcccaaagtagtaatcctcaagaaagccactgcttatatactatcagttcaggccgaaacacagaaactcatttcagaaatagatctgcttcgcaaacagaatgagcagttaaaacataaactcgaacagcttcgcaacagttgc

SEQ ID NO: 17681 - DNA, 270 bp, synthetic construct; identical to SEQ ID NO: 17657
  misc_feature 1..270: note = source = /note="Description of Artificial Sequence: Synthetic coding sequence"
  source 1..270: mol_type = other DNA

SEQ ID NO: 17682 - DNA, 270 bp, synthetic construct
  misc_feature 1..270: note = source = /note="Description of Artificial Sequence: Synthetic coding sequence"
  source 1..270: mol_type = other DNA
atgaccgaggaaaatgtgaaacgtcgtacgcataacgtcctggagcgccaacggcgtaacgaacttaagaggtcatttttcgcgctccgggaccagatccccgagctcgagaacaacgaaaaggctccgaaggtagtcatcctgaagaaagcaaccgcctatatcttgtccgttcaggctgagactcagaagcttatcagcgagatcgacctgctccgcaagcaaaatgagcagctcaagcacaagctcgagcagctccgcaactcttgc

SEQ ID NO: 17683 - DNA, 270 bp, synthetic construct
  misc_feature 1..270: note = source = /note="Description of Artificial Sequence: Synthetic coding sequence"
  source 1..270: mol_type = other DNA
atgaccgaagaaaacgtgaaaaggagaacacataacgtgctcgagagacagagacggaatgaactgaaacgaagctttttcgctttgcgggaccaaattcccgagctggaaaacaatgagaaagcccccaaggtggtgatcctcaagaaggctactgcctatatcctctcagttcaggctgagacgcagaagctgatctccgagatcgacctactcaggaagcagaacgaacaattgaagcataagcttgagcagctccgtaattcatgt

SEQ ID NO: 17684 - DNA, 270 bp, synthetic construct
  misc_feature 1..270: note = source = /note="Description of Artificial Sequence: Synthetic coding sequence"
  source 1..270: mol_type = other DNA
atgaccgaagagaatgtcaaacgccggacccataatgtgttagagcgacaaagaagaaatgaattgaaaaggtcttttttcgctctgagagatcagattcctgagttggagaacaatgaaaaagcccccaaggttgtgattctcaagaaagctactgcgtatattctgtccgtgcaagccgaaacccaaaagctgatttccgagatcgatctgctgcgaaaacaaaacgaacagctgaaacacaaactcgaacaactccggaacagctgt

SEQ ID NO: 17685 - DNA, 270 bp, synthetic construct
  misc_feature 1..270: note = source = /note="Description of Artificial Sequence: Synthetic coding sequence"
  source 1..270: mol_type = other DNA
atgacagaggagaacgtgaaaagaaggacccacaatgtccttgaacgacagcgaaggaacgaactaaaacgcagtttctttgcactaagagaccaaatccctgaactagaaaacaatgagaaggcccccaaagtagtaattcttaagaaggcaactgcctatatcctgagtgtgcaggctgaaactcagaaacttatctctgagatcgacctacttaggaaacagaacgaacaactgaaacataaattagagcagctcagaaatagttgt

SEQ ID NO: 17686 - DNA, 270 bp, synthetic construct
  misc_feature 1..270: note = source = /note="Description of Artificial Sequence: Synthetic coding sequence"
  source 1..270: mol_type = other DNA
atgaccgaggaaaacgtgaaaaggcgcactcataacgtcctggagagacagcgccggaatgagcttaagagatccttctttgccctgcgcgaccagatccctgaactggagaataacgaaaaagcacctaaggtggtgattctgaagaaggccactgcctacatcctctctgtgcaggctgagactcaaaagctgatttcggaaatcgacctgttgcggaagcagaacgagcaacttaagcacaaactcgagcaattgaggaatagctgc

SEQ ID NO: 17687 - DNA, 270 bp, synthetic construct
  misc_feature 1..270: note = source = /note="Description of Artificial Sequence: Synthetic coding sequence"
  source 1..270: mol_type = other DNA
atgacggaagaaaatgtgaagagacgtactcataatgtgcttgagagacaacgtagaaatgaacttaaacgcagtttcttcgccttgagagaccagattccagagcttgaaaataatgaaaaggcccctaaggttgtgatcttgaaaaaggctactgcatatattttgtcagttcaggccgaaactcagaaactgatttcagagattgatctcctgcgaaagcagaacgagcagctcaaacataaacttgagcaattacgtaacagctgt

SEQ ID NO: 17688 - DNA, 270 bp, synthetic construct
  misc_feature 1..270: note = source = /note="Description of Artificial Sequence: Synthetic coding sequence"
  source 1..270: mol_type = other DNA
atgactgaggagaatgtcaaaagaagaactcataatgtcctcgagagacagcgccgaaatgagctgaagcgctcgttcttcgcgctcagagatcaaatcccggagttggagaataatgaaaaagcaccgaaggtggtgatcctcaagaaggccaccgcctacattctgtccgttcaggctgaaacccaaaaactgatcagcgaaattgacctcttgcgcaagcagaacgaacaattgaaacataagctggagcaactgcggaactcctgt

SEQ ID NO: 17689 - DNA, 270 bp, synthetic construct
  misc_feature 1..270: note = source = /note="Description of Artificial Sequence: Synthetic coding sequence"
  source 1..270: mol_type = other DNA
atgactgaggaaaatgtgaagcggaggactcacaatgtgctggaaaggcaaagacggaacgagcttaagcgaagcttctttgccctgagagaccaaattccggaactggagaataatgagaaagctcctaaagtggtgattttaaagaaggctactgcctatatcctgtcagtacaggcagagactcagaaattgatatctgagatcgacctgttgaggaagcagaatgagcagctcaagcacaaactggaacaattgcgaaattcatgt

SEQ ID NO: 17690 - DNA, 270 bp, synthetic construct
  misc_feature 1..270: note = source = /note="Description of Artificial Sequence: Synthetic coding sequence"
  source 1..270: mol_type = other DNA
atgactgaagaaaatgtgaaacggcggacccataacgtgctcgaacgccagaggcggaacgaactgaagaggagcttcttcgccctgcgcgaccagataccggaactggagaacaacgagaaagctccaaaagtggtcatcctgaagaaggctaccgcttacatcctgtcagtccaagcagaaactcagaagttgatctcagaaattgatctgttgcgaaaacaaaacgaacaactcaaacacaagctggaacagctcaggaactcctgc

SEQ ID NO: 17691 - DNA, 270 bp, synthetic construct
  misc_feature 1..270: note = source = /note="Description of Artificial Sequence: Synthetic coding sequence"
  source 1..270: mol_type = other DNA
atgaccgaggagaatgtgaagcgccggactcataacgtcttggaacggcaacgccgcaacgagctgaagaggtcgtttttcgcgctcagggaccaaatccccgaactggaaaacaatgaaaaagccccgaaggtggtgattcttaagaaagccactgcgtacatcctttcagtgcaggccgagactcagaagctcatcagcgagatagatctcctgagaaagcaaaacgagcagcttaaacacaaattggaacaactccgcaattcctgc

SEQ ID NO: 17692 - DNA, 270 bp, synthetic construct
  misc_feature 1..270: note = source = /note="Description of Artificial Sequence: Synthetic coding sequence"
  source 1..270: mol_type = other DNA
atgacggaagagaacgtgaaaagacgcactcataatgtcctggaaagacagagacgaaacgagctcaagaggtcattctttgcgcttagagatcagatacctgagctcgaaaacaacgagaaggcgccgaaagtggtgatacttaagaaggccaccgcttacattctttcggtccaggctgagactcaaaagctgatttcagaaatcgatctgctccgaaagcagaatgaacagctcaagcacaaactcgaacaacttcggaactcctgc

SEQ ID NO: 17693 - DNA, 270 bp, synthetic construct
  misc_feature 1..270: note = source = /note="Description of Artificial Sequence: Synthetic coding sequence"
  source 1..270: mol_type = other DNA
atgaccgaagaaaacgtgaaacgccgtacgcacaacgtgctggagaggcagcggaggaatgaactcaagaggagcttcttcgctctgagggaccagatccctgagctggaaaacaacgagaaagcacccaaggtagttatcttgaaaaaggcgacagcgtatattttgtcggtgcaggctgagacacagaaactgatctcagagatcgatctgttgcgcaaacagaatgagcaactgaaacataagcttgaacagctacggaattcctgt

SEQ ID NO: 17694 - DNA, 270 bp, synthetic construct
  misc_feature 1..270: note = source = /note="Description of Artificial Sequence: Synthetic coding sequence"
  source 1..270: mol_type = other DNA
atgacggaggagaacgttaagagacgtacccataacgtgctggaaagacaacggcgcaacgagctcaaacgcagcttttttgcgctgcgcgaccagatccctgagctcgagaataatgaaaaagccccaaaggtcgttatcttgaagaaggcgactgcctatatcctgagcgtccaggccgaaacccagaagctgatttccgagatcgacctgttgcgcaaacagaacgagcagttgaagcacaagctggagcagctgcgaaactcatgt

SEQ ID NO: 17695 - DNA, 270 bp, synthetic construct
  misc_feature 1..270: note = source = /note="Description of Artificial Sequence: Synthetic coding sequence"
  source 1..270: mol_type = other DNA
atgactgaggaaaacgtcaagcgccgtacccacaacgtgctggaacgacagcgtcgcaatgaactgaaacgttcgttcttcgcacttagagatcaaatccctgaactggaaaacaacgagaaggccccgaaggtggtgatccttaagaaggcgactgcctacatcctttcggtgcaagccgaaactcagaaacttattagcgaaatcgatctcctccggaaacaaaatgaacagctgaagcataagttggaacagctgaggaactcatgt

SEQ ID NO: 17696 - DNA, 270 bp, synthetic construct
  misc_feature 1..270: note = source = /note="Description of Artificial Sequence: Synthetic coding sequence"
  source 1..270: mol_type = other DNA
atgaccgaagagaatgtcaagcgccggactcataacgtgctcgagaggcaacgtcggaatgagttgaaacggtccttcttcgcactgagggaccaaattcccgagctggagaataacgagaaagcaccgaaggtcgtcatcctcaagaaggcaaccgcgtacatcctcagcgttcaggccgaaacgcagaaattgatttcggaaatcgacctgctgcgcaaacaaaacgagcaacttaaacacaagctggaacagcttagaaactcatgt

SEQ ID NO: 17697 - DNA, 270 bp, synthetic construct
  misc_feature 1..270: note = source = /note="Description of Artificial Sequence: Synthetic coding sequence"
  source 1..270: mol_type = other DNA
atgactgaggagaatgttaagcggaggacccacaacgtgcttgaaagacagcgtcgaaacgaactgaagagatcattctttgccttgcgtgatcaaatccctgaactggaaaacaatgaaaaagcaccgaaggtggtcatactcaagaaagcgactgcttacattctgtcggttcaggcagaaacccagaagctcatcagtgagattgacctgctgagaaaacagaacgaacagcttaaacataaacttgagcaactgcgcaactcctgc

SEQ ID NO: 17698 - DNA, 270 bp, synthetic construct
  misc_feature 1..270: note = source = /note="Description of Artificial Sequence: Synthetic coding sequence"
  source 1..270: mol_type = other DNA
atgaccgaggagaacgtgaaaagaagaacgcataacgtcctggaacggcaaaggcgaaacgagctcaagagatcgttcttcgcacttcgcgaccagatccccgagctggagaataacgaaaaagcgccaaaggtggtcattttgaagaaggctactgcctacattttgagcgtccaagccgaaactcagaagttgatctcagaaattgatctgctccggaaacagaacgaacaattgaaacacaaacttgagcagctgaggaattcatgc

SEQ ID NO: 17699 - DNA, 270 bp, synthetic construct
  misc_feature 1..270: note = source = /note="Description of Artificial Sequence: Synthetic coding sequence"
  source 1..270: mol_type = other DNA
atgactgaggaaaacgtcaaacggcgaactcataacgtgctcgaacgccaacggcgcaatgagcttaagcgctccttcttcgcgctgcgtgatcagattccggaactggaaaacaatgagaaggcaccaaaggtggtcattctcaagaaggcaacggcttacatcctcagcgtccaagccgaaacccagaaactgatttcagaaatcgaccttctgagaaagcaaaacgagcagctcaagcacaaattggaacaactgcgtaattcgtgt

SEQ ID NO: 17700 - DNA, 270 bp, synthetic construct
  misc_feature 1..270: note = source = /note="Description of Artificial Sequence: Synthetic coding sequence"
  source 1..270: mol_type = other DNA
atgaccgaggaaaacgtgaaaaggagaacccataatgtcttggaacggcaaagaagaaacgaattgaagcgctccttttttgctctgagagatcaaattcctgagcttgaaaacaacgaaaaggcacccaaggtggttattctgaagaaggcgaccgcatacattctgtccgttcaggcagaaactcagaaactgatttcggaaatcgatctgctgaggaagcaaaatgaacaacttaagcacaaactggagcagcttcgaaacagctgc

SEQ ID NO: 17701 - DNA, 270 bp, synthetic construct
  misc_feature 1..270: note = source = /note="Description of Artificial Sequence: Synthetic coding sequence"
  source 1..270: mol_type = other DNA
atgaccgaggaaaatgtgaaaaggcgcacgcataatgtgctagaacggcaaaggcggaacgagctgaagcgcagtttttttgccctcagagaccagatccccgagcttgagaacaacgagaaagctcctaaagtggtcatccttaaaaaggccactgcatatatcctctccgtgcaggccgagactcagaaactcatctccgaaatcgacctgctacggaaacaaaacgaacagttgaagcataaactggagcagttgaggaatagttgc

SEQ ID NO: 17702 - DNA, 270 bp, synthetic construct
  misc_feature 1..270: note = source = /note="Description of Artificial Sequence: Synthetic coding sequence"
  source 1..270: mol_type = other DNA
atgaccgaagaaaatgttaaacgcaggacgcacaatgtgctggagaggcagagacgcaacgagctgaaacgcagtttcttcgcgctccgtgatcagatccctgagctggagaacaacgaaaaggccccaaaggtggtgatcctcaaaaaggcaacagcctatatactctccgtgcaggccgaaacacagaagcttatttccgaaatcgatctgctaaggaagcagaatgagcagcttaagcacaagctggaacagctgcgtaacagttgc

SEQ ID NO: 17703 - DNA, 270 bp, synthetic construct
  misc_feature 1..270: note = source = /note="Description of Artificial Sequence: Synthetic coding sequence"
  source 1..270: mol_type = other DNA
atgacggaggaaaatgtgaaaagacgaacacacaacgtgcttgagcgccagcgaaggaacgagctgaagcgttcttttttcgcacttcgcgatcagatccccgagttagaaaataacgaaaaggctccaaaagtagtgatacttaagaaggccacagcttacatcctgagtgtgcaggctgagactcagaaactgatcagtgagattgatcttttgaggaaacaaaatgagcagctgaaacataagctggagcagctcagaaattcctgc

SEQ ID NO: 17704 - DNA, 270 bp, synthetic construct
  misc_feature 1..270: note = source = /note="Description of Artificial Sequence: Synthetic coding sequence"
  source 1..270: mol_type = other DNA
atgactgaagagaatgtcaagagacgaacccataacgtgttggaaagacagagacgcaacgagcttaagaggtccttctttgcactcagagatcaaataccagagcttgagaataatgaaaaggcgccaaaggtggtgatcctgaagaaagccaccgcctacattctgtcagtgcaagcagagactcagaaactgatatccgagatcgacctcctccggaaacagaatgaacaactgaagcataagctggaacaactgcggaattcatgt

SEQ ID NO: 17705 - DNA, 270 bp, synthetic construct
  misc_feature 1..270: note = source = /note="Description of Artificial Sequence: Synthetic coding sequence"
  source 1..270: mol_type = other DNA
atgactgaggagaacgttaagagaagaactcacaatgtcctggaaaggcagcgccgtaacgaactgaagaggtccttttttgcactgagggaccagatccccgagctggaaaacaacgaaaaggccccgaaggtggtgatcctgaaaaaagctacagcatacatcctatctgtgcaggccgagacccagaagttaatatcggagatcgacttgctgcggaagcagaacgagcagctcaagcacaagctggagcagctcaggaactcctgt

SEQ ID NO: 17706 - DNA, 270 bp, synthetic construct
  misc_feature 1..270: note = source = /note="Description of Artificial Sequence: Synthetic coding sequence"
  source 1..270: mol_type = other DNA
atgaccgaggagaacgtcaaaaggaggactcataatgttttggagcgacagcggagaaacgagttgaagcgcagtttcttcgccctgagagatcagatccctgagctggagaataacgagaaggccccgaaggttgtgatcttgaaaaaagcaaccgcatacattctttcagtacaggcagaaactcagaagctgatctcagagatcgatctgttgcgcaagcagaacgaacagctcaaacataaactcgagcaactgaggaattcctgt

SEQ ID NO: 17707 - DNA, 270 bp, synthetic construct
  misc_feature 1..270: note = source = /note="Description of Artificial Sequence: Synthetic coding sequence"
  source 1..270: mol_type = other DNA
atgacagaagaaaatgtcaaaagaagaacgcataatgttctggagcgccaaagacggaacgagctcaagcggtcgttcttcgccctgagagaccagattcccgagctggagaataatgaaaaggcgccaaaggtggtcattctgaaaaaggcgaccgcgtatattctgtctgtgcaagcggagacccagaagctcatcagcgagatcgatctcttacgaaagcagaacgaacagttgaagcataagctggagcagctcagaaatagttgc

SEQ ID NO: 17708 - DNA, 270 bp, synthetic construct
  misc_feature 1..270: note = source = /note="Description of Artificial Sequence: Synthetic coding sequence"
  source 1..270: mol_type = other DNA
atgacagaggagaacgttaaacgtcgaacccataacgtactggagagacagcgccgaaatgaattaaaacgttcattcttcgctctgagagatcagattccagaactagaaaataacgaaaaagcgccgaaagttgtcatcttaaaaaaagcgacggcgtatatccttagtgtccaagccgaaacacaaaaattgatatctgagatcgatctgttgagaaaacaaaatgaacaattaaaacacaagcttgaacagctccgcaattcgtgt

SEQ ID NO: 17709 - DNA, 270 bp, synthetic construct
  misc_feature 1..270: note = source = /note="Description of Artificial Sequence: Synthetic coding sequence"
  source 1..270: mol_type = other DNA
atgaccgaagagaacgtcaaacgtaggactcacaatgtgttagaacggcagcgacgcaatgagctgaagcggagttttttcgctcttcgagatcaaatccccgagctggagaataacgaaaaggcccctaaggtagtgattttgaagaaagcaaccgcttacatcctgagtgtgcaagctgagacccagaagctcatcagcgagattgatttgctccggaaacagaacgagcagctgaagcataagctggagcagttacgcaattcatgc

SEQ ID NO: 17710 - DNA, 270 bp, synthetic construct
  misc_feature 1..270: note = source = /note="Description of Artificial Sequence: Synthetic coding sequence"
  source 1..270: mol_type = other DNA
atgactgaagagaacgtcaaacgcaggacccataatgtgttggagcggcagcggagaaatgaactgaagagatcgtttttcgccctgagagatcagattcctgaactggaaaacaacgagaaggcacctaaggtcgttatacttaagaaggccacggcgtacatactctccgtgcaagcagagactcagaagttgatctccgaaattgaccttctccgaaagcaaaacgagcaactgaagcacaaactggaacagctgaggaattcgtgc

SEQ ID NO: 17711 - DNA, 270 bp, synthetic construct
  misc_feature 1..270: note = source = /note="Description of Artificial Sequence: Synthetic coding sequence"
  source 1..270: mol_type = other DNA
atgacagaggaaaacgtgaaaagacggacacataatgtgcttgagcgacagcggaggaatgagctgaagcgaagtttctttgcattgcgagatcagatccctgaactcgagaacaatgaaaaggccccgaaggtggtcatcttaaagaaagcaaccgcttacatcctctctgtgcaagcggaaacccagaaactcattagtgaaattgacctgctgcgtaagcagaatgaacagctcaagcataagctcgagcagcttaggaatagctgc

SEQ ID NO: 17712 - DNA, 270 bp, synthetic construct
  misc_feature 1..270: note = source = /note="Description of Artificial Sequence: Synthetic coding sequence"
  source 1..270: mol_type = other DNA
atgacggaagagaacgtcaaacgccgcactcacaatgtcctcgagcggcagcgccgcaatgagctcaagaggtccttttttgccctgcgagatcaaattccagaacttgagaataatgagaaggcacctaaggtggtgatcctgaaaaaagcgaccgcctacatcctttccgtgcaggccgaaacccagaagttgatcagcgaaattgaccttctgcggaaacagaacgagcagctgaaacacaagctggagcaactgcggaactcctgt

SEQ ID NO: 17713 - DNA, 270 bp, synthetic construct
  misc_feature 1..270: note = source = /note="Description of Artificial Sequence: Synthetic coding sequence"
  source 1..270: mol_type = other DNA
atgactgaagagaatgtgaaacggagaacccataatgtcctggagagacaaagaaggaatgagttgaaacggagcttcttcgccctgcgagaccagattcccgagttagagaacaatgaaaaagccccaaaagtggtgatcctgaagaaggccaccgcctatatcctcagcgtgcaggccgaaacgcagaagttgatctcagagatcgacctgcttcgcaaacagaacgagcagctcaagcacaaattggaacagctccggaatagttgt

SEQ ID NO: 17714 - DNA, 270 bp, synthetic construct
  misc_feature 1..270: note = source = /note="Description of Artificial Sequence: Synthetic coding sequence"
  source 1..270: mol_type = other DNA
atgactgaggagaatgtgaagcgcagaactcacaatgtcctcgaaaggcagcggcgcaatgaactcaagcggtcattcttcgcgctgcgcgaccaaatcccagaattggagaacaatgagaaagccccgaaagtcgtcatcctcaagaaagcgactgcctacattctttcggtgcaggccgaaacccagaagctcatctcggaaatcgacctgctcagaaaacagaatgagcagctgaagcacaagctggagcaattgcggaattcctgc

SEQ ID NO: 17715 - DNA, 270 bp, synthetic construct
  misc_feature 1..270: note = source = /note="Description of Artificial Sequence: Synthetic coding sequence"
  source 1..270: mol_type = other DNA
atgacagaagaaaacgtgaaacgccggacacacaacgtactggaaaggcagcgccggaacgaactgaaaaggtcttttttcgctttgagggatcagatccccgagcttgaaaacaatgaaaaagcccctaaagttgtgatactgaaaaaagctacggcttatatccttagtgtgcaggcagagactcagaagcttataagtgagatcgatcttctacgaaaacagaacgaacagcttaaacacaagctagagcagttaaggaatagttgc

SEQ ID NO: 17716 - DNA, 270 bp, synthetic construct
  misc_feature 1..270: note = source = /note="Description of Artificial Sequence: Synthetic coding sequence"
  source 1..270: mol_type = other DNA
atgactgaggaaaatgtgaagcgccgcacgcataatgttctggagcggcaacggcgcaacgaactgaaacggagttttttcgcccttagagatcagatcccggaactggagaataatgaaaaggctccaaaggtggtcatactgaaaaaggccaccgcgtacatcctgtccgtgcaggcagagactcagaagttgatctcagaaattgatcttttgcgaaaacagaacgaacaactgaagcacaaactcgagcagctgagaaacagctgt

SEQ ID NO: 17717 - DNA, 270 bp, synthetic construct
  misc_feature 1..270: note = source = /note="Description of Artificial Sequence: Synthetic coding sequence"
  source 1..270: mol_type = other DNA
atgacagaagaaaatgtgaagaggcgaacacataacgtcctcgaacggcagaggcgcaacgagctcaaacggtctttcttcgcgctgcgcgaccagatccccgagctcgaaaataatgagaaggcccccaaagtggtgatcctaaagaaagctacggcttatatcttgtccgtccaagcagagacacagaagctgataagtgagatcgatctccttcgtaaacagaacgagcagctgaaacacaagttggaacaactgagaaactcttgc

SEQ ID NO: 17718 - DNA, 270 bp, synthetic construct
  misc_feature 1..270: note = source = /note="Description of Artificial Sequence: Synthetic coding sequence"
  source 1..270: mol_type = other DNA
atgaccgaggagaatgtgaagcgtcggacccataatgtcctggaacggcaacgtagaaatgaacttaagcggagcttttttgctctcagagatcagatcccagaactggaaaacaatgagaaggcacccaaagtcgtgattctgaaaaaggccactgcatacattctttccgtgcaggccgagactcagaagctcatatcagaaatcgatctgcttcgaaagcagaacgagcaattgaaacacaaactcgaacaacttcgaaattcatgc

SEQ ID NO: 17719 - DNA, 270 bp, synthetic construct
  misc_feature 1..270: note = source = /note="Description of Artificial Sequence: Synthetic coding sequence"
  source 1..270: mol_type = other DNA
atgactgaggagaacgtgaaacgcagaacccacaatgtgctggaaaggcagcggcgcaacgaattgaaaagatccttcttcgccctgcgtgaccagataccggaactggagaacaacgagaaggcccctaaagttgtcatactcaagaaagctactgcatatatactgagtgtgcaggctgagacccaaaaacttatcagcgaaatcgatttgttgcgaaagcagaatgaacagcttaaacacaagcttgagcagttgcgcaacagctgc

SEQ ID NO: 17720 - DNA, 270 bp, synthetic construct
  misc_feature 1..270: note = source = /note="Description of Artificial Sequence: Synthetic coding sequence"
  source 1..270: mol_type = other DNA
atgacggaagagaacgtgaaaagaagaacccataacgtgcttgaacggcaacgtaggaatgaactgaagcggagcttcttcgccctccgcgaccaaatccctgagctggagaacaatgaaaaagccccaaaggttgtgatcctgaaaaaagctaccgcgtacatcctcagcgtgcaagctgaaacccagaaactgatcagcgaaatcgatctgcttcgcaagcagaacgagcaactgaagcacaagctggaacagctcagaaactcgtgc

SEQ ID NO: 17721 - DNA, 270 bp, synthetic construct
  misc_feature 1..270: note = source = /note="Description of Artificial Sequence: Synthetic coding sequence"
  source 1..270: mol_type = other DNA
atgacggaagaaaatgtgaagcgccgaacccacaacgtgttagagcggcagcggcgcaacgagctcaaacggagcttcttcgctctccgggaccagatccctgaactcgaaaacaacgagaaggcacccaaagtggtcatcctgaagaaagcaaccgcctatatcttgagcgtccaggcagagacccagaagttgatatctgagatcgatctgcttaggaagcagaatgagcaacttaagcacaagctagagcaactgagaaactcctgc

SEQ ID NO: 17722 - DNA, 270 bp, synthetic construct
  misc_feature 1..270: note = source = /note="Description of Artificial Sequence: Synthetic coding sequence"
  source 1..270: mol_type = other DNA
atgacggaagaaaatgtaaaacgtcgtacgcataatgttttagaacgacaacgacgtaatgaattaaaacgttcgttttttgcgttacgagatcaaataccggaattagaaaataatgaaaaagcgccgaaagttgttatactaaaaaaagcgacggcgtatatactatcggtacaagcggaaacgcaaaaactaatatcggaaatagatctattacgtaaacaaaatgaacaactaaaacataaattagaacaattacgtaattcgtgt

SEQ ID NO: 17723 - DNA, 270 bp, synthetic construct
  misc_feature 1..270: note = source = /note="Description of Artificial Sequence: Synthetic coding sequence"
  source 1..270: mol_type = other DNA
atgactgaggagaacgtgaagcggcggacccacaatgtgcttgagcggcagcgcaggaacgagctgaagcggagctttttcgcgcttagagatcaaattcccgagcttgagaataacgaaaaggcacccaaggtggtgattctcaaaaaggccaccgcatacatcttgagcgtgcaggcagaaacccaaaaacttatttcggaaatagatctcttgcgtaagcagaacgaacaactgaaacataagctggaacaactccgcaacagctgt

SEQ ID NO: 17724 - DNA, 270 bp, synthetic construct
  misc_feature 1..270: note = source = /note="Description of Artificial Sequence: Synthetic coding sequence"
  source 1..270: mol_type = other DNA
atgaccgaggagaatgtcaaaagaagaactcataacgtgctagagagacagcggagaaatgaacttaagcggagcttcttcgccctgcgggaccagattccggagcttgagaacaacgaaaaagctccaaaagtggtcattctaaaaaaggcgactgcttacatcctgtctgtccaggctgagacccagaaactcattagcgagattgacctcctaagaaagcaaaatgagcagcttaaacataagctagagcagttgcggaatagctgt

SEQ ID NO: 17725 - DNA, 270 bp, synthetic construct
  misc_feature 1..270: note = source = /note="Description of Artificial Sequence: Synthetic coding sequence"
  source 1..270: mol_type = other DNA
atgaccgaagaaaatgtcaagaggcggacccataacgtgctggaacgccaaaggagaaacgagctcaaacgttcctttttcgcactgagggatcagatccctgaattggagaacaacgagaaggcaccaaaggtcgtgattcttaagaaggccactgcgtacattttgagcgttcaagctgagacgcaaaagctgatcagcgaaatcgacctgctgcgtaaacagaacgagcaacttaagcacaaacttgagcagcttcgcaactcatgt

SEQ ID NO: 17726 - DNA, 270 bp, synthetic construct
  misc_feature 1..270: note = source = /note="Description of Artificial Sequence: Synthetic coding sequence"
  source 1..270: mol_type = other DNA
atgacggaagaaaacgtgaagcgcagaactcacaacgtactcgaaagacagcgtcgtaacgagcttaaaagatcttttttcgcgttgcgggaccaaattccagagcttgaaaataatgagaaagcaccgaaagttgtgattctgaagaaagccacagcttatatcctgagcgttcaagccgaaacacaaaagcttatttcagaaatcgacttactaaggaaacaaaacgagcaattaaaacataaacttgaacagttacggaattcttgt

SEQ ID NO: 17727 - DNA, 270 bp, synthetic construct
  misc_feature 1..270: note = source = /note="Description of Artificial Sequence: Synthetic coding sequence"
  source 1..270: mol_type = other DNA
atgacggaggagaacgtgaaaaggaggacacataatgtgcttgagagacagcggcgaaatgaattaaagaggtctttctttgctctgcgcgaccagatccctgagctggaaaataacgaaaaggctccaaaggtggtcatactcaagaaggcaaccgcatatatattgagcgttcaagcagagacacagaagttgattagtgaaattgacttacttcgcaaacaaaatgagcaactgaagcacaaactcgaacagctgcggaactcatgt

SEQ ID NO: 17728 - DNA, 270 bp, synthetic construct
  misc_feature 1..270: note = source = /note="Description of Artificial Sequence: Synthetic coding sequence"
  source 1..270: mol_type = other DNA
atgaccgaagaaaatgtgaagaggcgcactcataacgtcctcgagcgccagcggagaaacgagctcaagaggagcttcttcgccctgagggaccagattccagagcttgagaataacgaaaaggctcccaaagttgtgatcctgaaaaaagccactgcatacattcttagcgtccaggctgaaacccagaagctgatctcggaaatcgacttgctgaggaagcaaaatgagcagctcaagcataagctggagcagctccgcaactcctgc

SEQ ID NO: 17729 - DNA, 270 bp, synthetic construct
  misc_feature 1..270: note = source = /note="Description of Artificial Sequence: Synthetic coding sequence"
  source 1..270: mol_type = other DNA
atgaccgaggagaatgtcaagcggcgcactcataacgtcctagagaggcagaggcggaatgaactgaagcggtccttcttcgcgctgcgggaccaaatccctgagctggaaaacaatgagaaggcccccaaagtagtgatattgaaaaaagcaacagcctacattctgtctgttcaggccgaaacccagaagctgattagcgagattgacttgctgcgcaagcaaaatgagcagttgaagcacaaactggagcaactgagaaacagctgt

SEQ ID NO: 17730 - DNA, 270 bp, synthetic construct
  misc_feature 1..270: note = source = /note="Description of Artificial Sequence: Synthetic coding sequence"
  source 1..270: mol_type = other DNA
atgacagaagaaaatgtcaaacggcggacacataatgtgctggagagacaacggagaaacgagctcaaacggtcattttttgcactaagagaccagattccggagctggagaacaacgagaaggcccctaaagtcgtcattctcaaaaaggccacagcctacattttgagtgttcaggccgagacccagaaactgatcagcgagatagatttgcttagaaagcaaaacgagcagctaaaacacaagctggaacagctgcgaaattcctgc

SEQ ID NO: 17731 - DNA, 270 bp, synthetic construct
  misc_feature 1..270: note = source = /note="Description of Artificial Sequence: Synthetic coding sequence"
  source 1..270: mol_type = other DNA
atgaccgaggaaaacgtcaagcgaaggacacataacgtgctggaaagacagcgtaggaatgaactgaaaaggtctttttttgccttaagggaccagataccggagcttgagaacaacgaaaaggctcctaaagtcgtcatcctaaagaaagctactgcttacatcctgagcgtccaggccgagacccaaaaacttatctctgaaatagatttgcttcgcaagcagaacgagcagttgaaacacaaactcgagcagttaaggaacagctgc

SEQ ID NO: 17732 - DNA, 270 bp, synthetic construct
  misc_feature 1..270: note = source = /note="Description of Artificial Sequence: Synthetic coding sequence"
  source 1..270: mol_type = other DNA
atgaccgaggaaaatgtcaaacgtcggactcataacgtgctcgaaaggcagcggagaaacgaactaaagagaagtttctttgccctgcgcgaccagatcccagagttggagaacaacgaaaaggcccccaaggttgttattctcaagaaagctaccgcttacatactctcagtgcaggccgagacacagaagctcatttctgaaatagatctgctgcgtaaacagaatgaacagttgaagcacaaactggaacaattacgcaacagctgt

SEQ ID NO: 17733 - DNA, 270 bp, synthetic construct
  misc_feature 1..270: note = source = /note="Description of Artificial Sequence: Synthetic coding sequence"
  source 1..270: mol_type = other DNA
atgaccgaggagaacgttaaacgaaggacgcataacgtgctggagcgacagaggaggaacgagctgaagcgcagcttctttgctcttcgggatcagatacctgaattggaaaataatgagaaggcacccaaagtcgttatactgaagaaagcgacagcatacatactgtcagtccaggctgagacacagaaattgatctctgaaatcgacctgctgagaaagcagaacgagcagcttaagcacaagctggaacagcttcgtaattcctgt

SEQ ID NO: 17734 - DNA, 270 bp, synthetic construct
  misc_feature 1..270: note = source = /note="Description of Artificial Sequence: Synthetic coding sequence"
  source 1..270: mol_type = other DNA
atgaccgaggaaaatgtcaaaagacgcacccacaacgtgctcgagcggcagcgcaggaacgaactgaagcgctccttctttgcgcttcgggaccaaataccagaattggaaaacaatgaaaaggcaccgaaggtggtgatcctgaagaaggctacggcatacatcctgtcagtgcaggccgagactcagaagctgatctcagaaatcgacttgctccggaaacaaaacgagcagcttaagcataaactcgaacaattgagaaactcgtgt

SEQ ID NO: 17735 - DNA, 273 bp, synthetic construct
  misc_feature 1..273: note = source = /note="Description of Artificial Sequence: Synthetic coding sequence"
  source 1..273: mol_type = other DNA
atgactgaagagaacgttaagcgccgcacccacaacgtgttggaacgccagcgtcgcaatgaattgaaacgaagcttctttgcgctgagggaccagatcccagaactggaaaacaatgaaaaggctccaaaggttgtgatcctcaaaaaggcaaccgcctatatcctgtccgtgcaagcggagacccagaagttgataagcgagatcgatttattgagaaaacaaaatgaacagctgaaacacaaactggagcagctgcgaaattcctgcgcc

SEQ ID NO: 17736 - DNA, 273 bp, synthetic construct
  misc_feature 1..273: note = source = /note="Description of Artificial Sequence: Synthetic coding sequence"
  source 1..273: mol_type = other DNA
atgacagaagaaaatgtaaaacggcgtacacataatgtgcttgaacgacaaagacgcaatgagttgaaacgatcattcttcgctctaagggatcagatacccgaactcgaaaataacgaaaaagcacccaaagtagtcattcttaagaaagccacagcctatatactctctgtgcaagccgaaacacaaaaattaatatctgagatagatcttctgcgaaaacagaatgagcagcttaaacataagctggaacagctccggaattcctgtgcg

SEQ ID NO: 17737 - DNA, 273 bp, synthetic construct
  misc_feature 1..273: note = source = /note="Description of Artificial Sequence: Synthetic coding sequence"
  source 1..273: mol_type = other DNA
atgacagaggaaaacgtgaaacgacgcacacataacgtgctggaaaggcagcggaggaatgaactcaaacggtctttttttgctctcagagaccagatacccgaattggagaacaacgagaaagcacccaaagtagtcatactcaaaaaggccactgcttatatcctgtctgttcaggctgaaactcagaaactcataagtgaaatagatctcctcaggaagcagaacgaacagctgaagcataaacttgaacagctgcgaaattcttgcgca

SEQ ID NO: 17738 - DNA, 273 bp, synthetic construct
  misc_feature 1..273: note = source = /note="Description of Artificial Sequence: Synthetic coding sequence"
  source 1..273: mol_type = other DNA
atgactgaagagaacgtcaagcggaggactcacaacgtgctcgagaggcagcggcgcaatgaactgaaaaggtccttctttgcactacgcgatcagatccctgaattggaaaacaacgaaaaagccccaaaagtcgtcatacttaaaaaagccacagcttacattctaagtgttcaggctgagacacagaaactgatcagtgaaatagatttattgcggaaacagaatgaacagctcaaacacaaacttgaacagttaaggaattcttgcgca

SEQ ID NO: 17739 - DNA, 273 bp, synthetic construct
  misc_feature 1..273: note = source = /note="Description of Artificial Sequence: Synthetic coding sequence"
  source 1..273: mol_type = other DNA
atgaccgaagaaaacgtcaagcgacggactcataatgttctggagcgccaacgacgtaatgagcttaagagatcgttcttcgcacttagggatcagattcccgaactcgaaaataacgaaaaggctcctaaagtggtcatcctgaagaaggcgaccgcttacatcctgtcagttcaggcagaaacacagaagctgatatcggaaatcgatcttttgagaaaacaaaatgaacagcttaaacataaactcgaacagctcagaaacagttgtgca

SEQ ID NO: 17740 - DNA, 273 bp, synthetic construct
  misc_feature 1..273: note = source = /note="Description of Artificial Sequence: Synthetic coding sequence"
  source 1..273: mol_type = other DNA
atgaccgaggagaatgtgaaaaggaggacacacaacgtgttggagagacaacgacgaaatgaacttaagcgctctttctttgccctcagggatcagattcctgagttggagaataatgagaaagccccaaaagtggtgattttgaagaaggctacggcttacatccttagcgtacaggcagagacccagaagctcataagtgaaatagacctgttgagaaaacagaatgagcagttgaaacataagcttgagcagctgaggaatagctgtgcc

SEQ ID NO: 17741 - DNA, 273 bp, synthetic construct
  misc_feature 1..273: note = source = /note="Description of Artificial Sequence: Synthetic coding sequence"
  source 1..273: mol_type = other DNA
atgacagaggagaatgtgaaacgccgtacccataacgtgctggagagacagagaagaaacgaattgaagaggtccttcttcgctcttcgcgatcagatcccagagctggagaataatgagaaagcccccaaggtggtgatactgaagaaggcaactgcttacatactgagtgtccaggctgaaactcagaaactgatttccgaaatagatcttctgcggaagcaaaatgagcagctgaaacacaagctggagcagctacgcaactcttgcgct

SEQ ID NO: 17742 - DNA, 273 bp, synthetic construct
  misc_feature 1..273: note = source = /note="Description of Artificial Sequence: Synthetic coding sequence"
  source 1..273: mol_type = other DNA
atgaccgaggagaacgtgaagcgccgtacacacaatgttttggaaagacaaagacggaatgagcttaagcgcagcttcttcgcgcttcgcgatcagatcccagaactggaaaacaatgagaaggcaccaaaggtcgtgatcttgaaaaaggccaccgcatacatcctgagcgtccaggctgaaactcagaaattgattagcgagattgacctccttaggaagcaaaacgaacaactgaagcacaagttagagcagctgcgcaactcatgcgca

SEQ ID NO: 17743 - DNA, 273 bp, synthetic construct
  misc_feature 1..273: note = source = /note="Description of Artificial Sequence: Synthetic coding sequence"
  source 1..273: mol_type = other DNA
atgaccgaggagaacgttaagcgacgcacgcacaacgtgttggaaagacaaaggcgcaacgaactcaaaagatcgttcttcgcactgagagaccaaatccctgaacttgaaaataacgaaaaggcccctaaggttgtgatcttgaaaaaggcaaccgcctatattctttcggtgcaggccgaaacacagaagcttatcagcgagattgacctcttgcggaaacagaatgagcagcttaagcataaacttgaacaattgcggaacagctgtgca

SEQ ID NO: 17744 - DNA, 273 bp, synthetic construct
  misc_feature 1..273: note = source = /note="Description of Artificial Sequence: Synthetic coding sequence"
  source 1..273: mol_type = other DNA
atgaccgaggagaacgtcaaacgacgaacacataatgtcctggagcggcagcgccggaatgagctgaaacgcagcttctttgccctgcgggaccagatccctgagttggagaataacgagaaggctcctaaggtggtgatcctcaaaaaggctaccgcatatattctgtctgtacaggctgaaacccagaagctgataagcgagatcgatctcctgcgaaaacagaacgagcagctgaagcacaagctcgagcagctcaggaacagttgcgcc

SEQ ID NO: 17745 - DNA, 273 bp, synthetic construct
  misc_feature 1..273: note = source = /note="Description of Artificial Sequence: Synthetic coding sequence"
  source 1..273: mol_type = other DNA
atgaccgaagagaacgtcaagcgccggacccacaacgtcctggagaggcaacggaggaatgaattgaagaggagcttcttcgccctgagggatcaaatcccagagttagagaataacgagaaagcccccaaggtcgtgatcttgaagaaagctaccgcgtatatactgtccgtgcaagctgaaactcagaaactcatatctgagatcgatttgctcaggaaacagaacgaacaactgaagcacaagcttgagcaacttagaaactcctgtgcg

SEQ ID NO: 17746 - DNA, 273 bp, synthetic construct
  misc_feature 1..273: note = source = /note="Description of Artificial Sequence: Synthetic coding sequence"
  source 1..273: mol_type = other DNA
atgacagaggaaaacgtcaagcggcggactcacaatgtgttggagcggcagagaaggaacgaacttaagcgaagcttcttcgcactgcgggatcagatccccgaactggagaataatgaaaaggcacccaaggtcgtaattctcaaaaaagctactgcatacattctcagcgtccaggcagaaacacagaagctgattagtgaaatcgatttgctgcgaaagcaaaatgaacagttgaagcataagctcgagcagctcagaaacagctgcgca

SEQ ID NO: 17747 - DNA, 273 bp, synthetic construct
  misc_feature 1..273: note = source = /note="Description of Artificial Sequence: Synthetic coding sequence"
  source 1..273: mol_type = other DNA
atgactgaagaaaacgttaagagaagaactcacaacgtgctggagcgacagaggagaaatgaactgaaacggagtttcttcgcccttagggaccagatacctgaacttgaaaacaatgaaaaagctcctaaagttgtgattcttaaaaaagccacagcctatatcctctctgtgcaggctgagacacagaaattaatctcagaaatagatttgctccggaagcaaaatgaacagctcaaacacaagttggaacaactcaggaatagttgcgct

SEQ ID NO: 17748 - DNA, 273 bp, synthetic construct
  misc_feature 1..273: note = source = /note="Description of Artificial Sequence: Synthetic coding sequence"
  source 1..273: mol_type = other DNA
atgaccgaagagaacgtcaagcgccgaacacataacgtcctcgaaaggcagcggcggaatgaactcaagaggtctttttttgccttgagggatcagatacctgaactggaaaacaacgagaaagccccaaaggtcgtcatcctgaagaaagctacagcgtacatcctgagcgtgcaggcagaaacacagaaactcatctctgagatcgacctgctcagaaaacaaaatgagcaactgaagcataaactcgaacagctcaggaattcatgcgct

SEQ ID NO: 17749 - DNA, 273 bp, synthetic construct
  misc_feature 1..273: note = source = /note="Description of Artificial Sequence: Synthetic coding sequence"
  source 1..273: mol_type = other DNA
atgaccgaagaaaatgtcaagagaaggacacataatgtgttggagcgacagcgtcggaacgaattaaagagatccttctttgccctcagagatcaaataccggagctcgagaacaacgagaaggcccccaaggttgtgattttgaaaaaggctactgcctacatccttagcgtccaggccgaaacccagaaattgataagcgaaattgacctgctgagaaagcagaacgagcaattgaagcataaacttgaacagctccgaaattcatgcgca

SEQ ID NO: 17750 - DNA, 273 bp, synthetic construct
  misc_feature 1..273: note = source = /note="Description of Artificial Sequence: Synthetic coding sequence"
  source 1..273: mol_type = other DNA
atgacagaagagaatgttaaacggcgcacacataacgtgttggagcggcagcggcgaaatgagctgaagcggagcttttttgcgcttcgcgaccaaataccagagctggagaacaacgagaaggcccccaaagtggttatcctcaaaaaggcgacagcctacatacttagcgtgcaagcagaaacacagaaactgatctcagagattgatctgctccgcaagcaaaatgaacagctgaagcataaactggagcagttgagaaattcttgtgcc

SEQ ID NO: 17751 - DNA, 273 bp, synthetic construct
  misc_feature 1..273: note = source = /note="Description of Artificial Sequence: Synthetic coding sequence"
  source 1..273: mol_type = other DNA
atgactgaggagaatgtgaaaagacgaacccacaacgtgttagagagacaacgccgaaacgaattgaaaaggagtttcttcgcacttcgagatcagattccggaactcgagaacaatgaaaaagcccccaaagtggtaatcctgaaaaaagcaaccgcctacatattatctgtccaggcagagacacagaagttaattagcgaaatagatctgctgcgcaagcagaatgaacagcttaaacataagctggagcagctgagaaactcttgcgct

SEQ ID NO: 17752 - DNA, 273 bp, synthetic construct
  misc_feature 1..273: note = source = /note="Description of Artificial Sequence: Synthetic coding sequence"
  source 1..273: mol_type = other DNA
atgaccgaggagaacgtgaagcgccgtacacacaatgtattggagaggcagcgtcgcaatgagcttaagagaagcttcttcgcgctgagagaccagatacccgagctggagaacaacgagaaagcacccaaagttgtaattttgaaaaaggccactgcgtatattctgtcagtgcaggcagaaacccagaaactcatatctgagatcgacctactccgcaaacagaacgagcagctcaagcacaagctcgagcagctgaggaactcctgcgca

SEQ ID NO: 17753 - DNA, 273 bp, synthetic construct
  misc_feature 1..273: note = source = /note="Description of Artificial Sequence: Synthetic coding sequence"
  source 1..273: mol_type = other DNA
atgactgaagagaacgtgaaacgaaggacccacaacgtgcttgaaagacagagaagaaatgaattaaaacggagcttcttcgcactgcgggaccagataccagaattggagaataacgagaaggcccctaaggtggtgatcctgaaaaaagctacagcatatatcctctccgtgcaggctgagacacagaagcttatttctgaaattgacctactcagaaagcagaatgagcagctcaagcacaaacttgagcagcttaggaacagttgtgct

SEQ ID NO: 17754 - DNA, 273 bp, synthetic construct
  misc_feature 1..273: note = source = /note="Description of Artificial Sequence: Synthetic coding sequence"
  source 1..273: mol_type = other DNA
atgactgaggaaaacgtaaagaggcgcactcataacgtgctggagagacagaggagaaatgagctgaagcgctctttcttcgccctgcgagatcaaatcccagaactggaaaataacgagaaagctccaaaggtggttattctcaagaaggcgacggcctatattctctctgtgcaagccgaaactcagaaactcatttccgagatcgatctgctgagaaagcagaacgagcaactgaaacacaagctggagcaactgagaaactcctgcgct

SEQ ID NO: 17755 - DNA, 273 bp, synthetic construct
  misc_feature 1..273: note = source = /note="Description of Artificial Sequence: Synthetic coding sequence"
  source 1..273: mol_type = other DNA
atgaccgaggagaacgtaaaaagacggacccacaacgtactggagaggcaacgcaggaacgagctgaagcgtagctttttcgcattgcgagaccaaatccccgagctggagaacaatgagaaggccccaaaggtagtcatcctgaagaaagctaccgcatatattctgagtgtgcaagcagaaacccagaagttgatttcggaaattgatcttttgcgcaagcagaacgagcagcttaagcataaattagaacagctcagaaactcttgcgcg

SEQ ID NO: 17756 - DNA, 273 bp, synthetic construct
  misc_feature 1..273: note = source = /note="Description of Artificial Sequence: Synthetic coding sequence"
  source 1..273: mol_type = other DNA
atgactgaggaaaatgtcaaaagaagaacacacaacgtgttggagaggcagcgccgaaatgagctcaagcggagcttttttgcactgcgcgaccagatccccgagctggagaataacgaaaaggcacctaaagtggtaatcctgaaaaaggccacggcttatatcctctctgtgcaggccgaaactcagaagttgatctctgaaatagatctcctcaggaagcaaaacgaacagcttaaacataagctggaacagctgaggaacagctgcgcc

SEQ ID NO: 17757 - DNA, 273 bp, synthetic construct
  misc_feature 1..273: note = source = /note="Description of Artificial Sequence: Synthetic coding sequence"
  source 1..273: mol_type = other DNA
atgacagaagagaatgtcaagaggagaactcacaatgttctggagcgacagaggagaaacgagttgaagcggtcctttttcgcacttagagatcagatacccgaactggagaacaacgagaaggcccccaaggtggtcattttgaagaaagccactgcctacatcctgagcgtccaggccgagacccagaagctcatttcagagattgacttgctccggaagcagaacgagcaactcaaacacaaacttgaacagttgagaaactcatgtgcc

SEQ ID NO: 17758 - DNA, 273 bp, synthetic construct
  misc_feature 1..273: note = source = /note="Description of Artificial Sequence: Synthetic coding sequence"
  source 1..273: mol_type = other DNA
atgacagaagaaaatgtcaaacggagaactcacaatgttctcgaaaggcagcggcggaacgaactgaaacggtcgttctttgctctacgcgatcagataccagaattggagaacaatgagaaagcccccaaagtcgtgatcctcaaaaaagcaacagcctacattctgtctgtgcaggccgagacacagaaactgatctccgaaatcgatctcctaaggaagcagaacgaacagcttaaacataagctggaacagcttaggaattcctgcgct

SEQ ID NO: 17759 - DNA, 273 bp, synthetic construct
  misc_feature 1..273: note = source = /note="Description of Artificial Sequence: Synthetic coding sequence"
  source 1..273: mol_type = other DNA
atgacagaggagaacgtcaagcgtagaacccacaacgtcctagagaggcaaaggagaaatgagctgaagaggagctttttcgcccttcgggatcagatccctgaacttgaaaataatgagaaggctcctaaggtggtgatactgaaaaaagctacggcatacatcctgtctgtgcaagccgagacccagaagttgatttcagaaatcgacctgctacggaagcagaatgaacagctcaagcataaactggagcagttacgaaattcctgcgcc

SEQ ID NO: 17760 - DNA, 273 bp, synthetic construct
  misc_feature 1..273: note = source = /note="Description of Artificial Sequence: Synthetic coding sequence"
  source 1..273: mol_type = other DNA
atgaccgaggagaacgtcaagcggcggactcataacgtactggagagacaaagacgaaatgaactaaagcggagcttttttgcgctgcgcgaccagatacctgagttggagaataacgaaaaggcccctaaagtggtaatcctgaaaaaagctactgcctatattctctcagtccaggccgaaacacaaaaactgatatccgagatcgacttgttgagaaaacaaaacgagcagctaaaacataagctggagcagttgcggaatagctgtgcg

SEQ ID NO: 17761 - DNA, 273 bp, synthetic construct
  misc_feature 1..273: note = source = /note="Description of Artificial Sequence: Synthetic coding sequence"
  source 1..273: mol_type = other DNA
atgaccgaagagaacgttaagagacgcacccataacgtgcttgagagacagaggagaaacgaactgaagaggagcttctttgccttgagagatcaaatcccagaacttgaaaacaatgagaaagcgcccaaggtcgtgatcttaaaaaaagcgactgcatacatcctgtcagttcaggccgaaactcaaaaactgatcagtgaaatcgacctgcttcgaaaacaaaacgagcagcttaagcacaaactggagcaacttagaaactcatgcgca

SEQ ID NO: 17762 - DNA, 273 bp, synthetic construct
  misc_feature 1..273: note = source = /note="Description of Artificial Sequence: Synthetic coding sequence"
  source 1..273: mol_type = other DNA
atgacagaagaaaatgtcaaaaggcggacacataacgtgctggaacggcagcgaaggaacgaactcaagcggagttttttcgcactacgggatcagataccagaactggaaaacaacgaaaaggcaccaaaagtagttatcctcaaaaaagctacagcttacattctctcagtgcaggcagaaactcagaaattaatctctgaaatagatttgttgagaaaacagaatgaacagctgaaacataaactggaacagctcaggaattcttgcgca

SEQ ID NO: 17763 - DNA, 273 bp, synthetic construct
  misc_feature 1..273: note = source = /note="Description of Artificial Sequence: Synthetic coding sequence"
  source 1..273: mol_type = other DNA
atgacagaagagaatgtaaaacgtcgaacccacaatgtgctggagcgccaaaggagaaacgaactgaaaaggtccttctttgccttgcgagatcagatccccgagctggaaaacaacgagaaagcacctaaagttgtgatcctgaagaaggctaccgcctacattctgtctgtccaagccgaaacccagaagcttatctccgagatcgatctcctccgcaaacagaacgagcagctgaaacacaagttagaacagcttcggaattcatgtgca

SEQ ID NO: 17764 - DNA, 273 bp, synthetic construct
  misc_feature 1..273: note = source = /note="Description of Artificial Sequence: Synthetic coding sequence"
  source 1..273: mol_type = other DNA
atgacagaggagaacgtgaaacggcggacccacaacgttttggagcggcagcgaagaaacgagctgaaaagaagtttcttcgccctcagagaccagattcccgaactggaaaataacgaaaaggctcccaaagtcgtgatcttaaaaaaagccaccgcatatatcctttctgttcaggctgagacgcagaagttgatcagtgagatcgaccttctaaggaagcagaacgagcaactaaaacacaagctggagcagctgagaaactcctgtgcc

SEQ ID NO: 17765 - DNA, 273 bp, synthetic construct
  misc_feature 1..273: note = source = /note="Description of Artificial Sequence: Synthetic coding sequence"
  source 1..273: mol_type = other DNA
atgacagaagaaaatgtgaaacgcagaacacataacgtgctggagcgtcagcgtagaaatgagctcaaaaggtcgttttttgcgcttagggatcagatcccagaactcgaaaataacgagaaggcgcctaaagtggtcatcctgaagaaggccacagcatacatcctttcagtgcaagcagagacacagaaactgatcagtgagattgacctattgaggaagcagaacgagcagttgaaacataagttggaacagctgagaaatagctgtgca

SEQ ID NO: 17766 - DNA, 273 bp, synthetic construct
  misc_feature 1..273: note = source = /note="Description of Artificial Sequence: Synthetic coding sequence"
  source 1..273: mol_type = other DNA
atgacagaggaaaacgttaaaaggcggactcacaatgtgctcgagcggcagcgccgcaacgaactgaagaggagctttttcgcccttcgcgatcaaattccggagctcgagaataatgagaaagcccctaaggtggttatcctcaagaaggccacagcttatatactctctgtccaagcggagacccagaagctcataagtgagatcgatctcctccggaagcagaatgagcagctgaaacacaagctagagcaactacggaatagctgcgcc

SEQ ID NO: 17767 - DNA, 273 bp, synthetic construct
  misc_feature 1..273: note = source = /note="Description of Artificial Sequence: Synthetic coding sequence"
  source 1..273: mol_type = other DNA
atgacagaagagaacgtgaaacgccgaacccacaacgttctggagcgacagcgccggaacgaactcaagcgctcattttttgccctgagggaccaaatacctgagctggagaacaatgagaaagcaccaaaagtcgtaatcctgaaaaaagcgactgcttacattctgtcagtccaggctgagacccagaaactcatatccgaaattgacctgctgcggaaacagaacgagcagctgaaacacaaattggaacagctgaggaattcttgtgcc

SEQ ID NO: 17768 - DNA, 273 bp, synthetic construct
  misc_feature 1..273: note = source = /note="Description of Artificial Sequence: Synthetic coding sequence"
  source 1..273: mol_type = other DNA
atgacagaagaaaatgtgaagcggcgcacacacaacgttttggagcgccaaaggagaaacgaactgaaacgaagtttttttgctctccgggatcagatccctgaactggaaaacaatgaaaaagcacccaaagtggttatactcaaaaaagccactgcctatatactcagtgtacaagccgaaacacagaaactcatcagtgagatcgacctgctacggaaacagaacgaacagcttaaacacaaactcgaacagttgcgtaatagttgtgcc

SEQ ID NO: 17769 - DNA, 273 bp, synthetic construct
  misc_feature 1..273: note = source = /note="Description of Artificial Sequence: Synthetic coding sequence"
  source 1..273: mol_type = other DNA
atgacggaagagaacgttaagaggcggacacacaacgtgctggaaaggcagaggagaaacgaactgaagcgcagcttttttgcgctgagggaccagattcctgaactcgagaacaacgagaaagcccctaaagtggtgatcctcaaaaaggccactgcctacatactgtccgtgcaggcagagacacaaaaactgataagcgaaatcgatctcctgcggaagcagaacgaacaactgaaacacaagttggagcaactcagaaactcttgcgcc

SEQ ID NO: 17770 - DNA, 273 bp, synthetic construct
  misc_feature 1..273: note = source = /note="Description of Artificial Sequence: Synthetic coding sequence"
  source 1..273: mol_type = other DNA
atgactgaagagaacgttaagcgcagaacccacaacgtgcttgagcggcagcggcggaacgagctaaagcgaagttttttcgccctgcgagatcagatccccgaactggagaataacgaaaaagctcccaaagtcgtcatcttgaagaaagctactgcatatatcctgtccgtgcaagcagagacacagaagctgatcagtgagatagatcttctgcgcaagcagaatgaacagctgaaacacaaactggagcagttgcgcaacagctgcgca

SEQ ID NO: 17771 - DNA, 273 bp, synthetic construct
  misc_feature 1..273: note = source = /note="Description of Artificial Sequence: Synthetic coding sequence"
  source 1..273: mol_type = other DNA
atgaccgaagaaaacgtgaaaaggagaacacacaacgtgttggaaagacagaggcgtaacgagctgaaacgctctttctttgccctgcgagatcagatccctgagttggagaacaatgagaaggctcccaaggtggtgatcctgaaaaaggctaccgcttatatactatccgtgcaggcagagacacagaagttgatttcggaaatagacctgttgaggaaacaaaatgagcagctgaaacacaagctggagcagcttagaaactcttgcgca

SEQ ID NO: 17772 - DNA, 273 bp, synthetic construct
  misc_feature 1..273: note = source = /note="Description of Artificial Sequence: Synthetic coding sequence"
  source 1..273: mol_type = other DNA
atgacggaggagaatgtgaagcgtcgcacacataatgtactcgaacggcagcgccggaatgagctaaaaagatctttctttgccctccgggatcagatacccgaactggagaataacgaaaaagcacccaaagtggtaattctgaagaaggctacagcatatattctctctgtgcaagcagagacccagaaactcatcagtgagatcgatcttctcagaaaacagaacgagcagcttaagcataagttagagcagctcaggaactcctgcgca

SEQ ID NO: 17773 - DNA, 273 bp, synthetic construct
  misc_feature 1..273: note = source = /note="Description of Artificial Sequence: Synthetic coding sequence"
  source 1..273: mol_type = other DNA
atgactgaagaaaacgtcaaaagaagaacacataatgtgttggagcggcagagacgaaacgaactgaaacgctcctttttcgccctacgggatcagatcccagaactcgagaacaacgaaaaggcccccaaagtcgtgatattaaaaaaggccactgcctatattctctccgtgcaggcagagactcagaaacttatctccgaaattgatctgctgcggaaacagaatgaacagcttaaacataaactcgaacagctccggaattcttgcgca

SEQ ID NO: 17774 - DNA, 273 bp, synthetic construct
  misc_feature 1..273: note = source = /note="Description of Artificial Sequence: Synthetic coding sequence"
  source 1..273: mol_type = other DNA
atgaccgaggaaaacgtaaagagaagaacccacaacgtgttagaaagacagaggagaaacgaacttaagagatcattttttgctctgcgggatcaaatccccgagttagagaacaacgagaaggcacctaaggtggttatactaaagaaggctacagcctacatattgtccgtacaggcggagactcagaagctcatctccgaaatcgatctgctgcgcaaacaaaacgaacagctgaagcacaagttggagcaactgcggaactcctgcgca

SEQ ID NO: 17775 - DNA, 273 bp, synthetic construct
  misc_feature 1..273: note = source = /note="Description of Artificial Sequence: Synthetic coding sequence"
  source 1..273: mol_type = other DNA
atgacagaggagaatgtaaagaggaggacccataatgtgctggagcggcaaaggagaaatgagctcaagagatcatttttcgctctgcgggaccaaatccctgagctggagaacaacgagaaagcaccaaaagtggtgatcctcaagaaagccaccgcctacattttgtcagtacaagctgaaactcagaaactcatcagcgagatcgatctcctgagaaaacagaacgaacagctgaagcacaagctcgaacaacttaggaatagctgcgct

SEQ ID NO: 17776 - DNA, 273 bp, synthetic construct
  misc_feature 1..273: note = source = /note="Description of Artificial Sequence: Synthetic coding sequence"
  source 1..273: mol_type = other DNA
atgaccgaagagaatgtgaaaagacgaacacataacgtgctggagcggcagcgccggaacgagttaaagaggtccttcttcgccctgagggatcagattccagagctggagaataatgaaaaggcaccaaaggtggtgatactgaagaaggccacagcttacatcttgtctgtgcaggccgagacacagaaactgatatcggagatcgacctcctccggaagcagaatgagcagcttaaacacaagctcgagcagctgcgcaatagctgtgcc

SEQ ID NO: 17777 - DNA, 273 bp, synthetic construct
  misc_feature 1..273: note = source = /note="Description of Artificial Sequence: Synthetic coding sequence"
  source 1..273: mol_type = other DNA
atgaccgaggagaacgtgaaacgtagaactcacaacgttctcgagaggcagaggcgcaacgagctgaaacggagcttctttgcccttagagaccagatcccagagctggagaacaacgaaaaagcccccaaagtggtaatactgaagaaggcaacggcttacatcctgagtgtgcaggcagaaactcagaagctgattagtgagatcgatctgctacgaaaacagaacgagcagttaaaacacaaactggagcagctaagaaattcgtgtgcc

SEQ ID NO: 17778 - DNA, 273 bp, synthetic construct
  misc_feature 1..273: note = source = /note="Description of Artificial Sequence: Synthetic coding sequence"
  source 1..273: mol_type = other DNA
atgactgaagaaaacgtgaaacggcgcacccataatgtgctcgagcggcagagacggaacgagctcaagcggagtttcttcgcactgcgggaccagatcccagagttggagaacaatgagaaggcgccaaaagtagttattcttaagaaggcaaccgcatacattctctctgtccaggctgagacacagaagctgatttccgagattgacctgctccgaaagcagaatgagcaactgaagcacaaactggaacagcttagaaattcctgcgct

SEQ ID NO: 17779 - DNA, 273 bp, synthetic construct
  misc_feature 1..273: note = source = /note="Description of Artificial Sequence: Synthetic coding sequence"
  source 1..273: mol_type = other DNA
atgacagaggaaaacgtcaaaagaagaactcacaacgtactagaaaggcagagacggaacgaactcaagagatcctttttcgcattgcgggatcagatacccgagctcgaaaacaatgagaaagcacctaaagtcgtgatccttaaaaaagcaacagcttacatcttgagtgtgcaggcagaaacacagaaattaatctccgaaatcgatttgctcagaaaacagaatgaacaactgaaacacaaactagaacagctgaggaactcgtgtgcg

SEQ ID NO: 17780 - DNA, 273 bp, synthetic construct
  misc_feature 1..273: note = source = /note="Description of Artificial Sequence: Synthetic coding sequence"
  source 1..273: mol_type = other DNA
atgacagaagagaacgtgaagcgcaggacgcacaatgttctcgagcgccagcggcgcaacgaactcaagcggagtttcttcgcactcagggaccagatccccgagctggagaacaatgaaaaggcacctaaggtcgtcatcctgaagaaggccacagcctatatactgtcagtgcaggcagagacccagaaacttatcagtgagattgatctgctaaggaaacagaatgaacagctgaagcacaagctggagcagctgaggaactcgtgcgcc

SEQ ID NO: 17781 - DNA, 273 bp, synthetic construct
  misc_feature 1..273: note = source = /note="Description of Artificial Sequence: Synthetic coding sequence"
  source 1..273: mol_type = other DNA
atgaccgaagagaacgtgaagagaagaacacacaacgtcctggagcgccaaaggagaaatgagctgaagcgctctttcttcgctctccgagatcagattccagaattagagaacaacgagaaagccccgaaggtggtcatccttaagaaggctacggcatacatactttcagtgcaggctgaaactcaaaaactgatatcagaaatcgaccttcttcgcaaacagaacgaacagttgaaacacaaattggagcagcttaggaacagttgtgct

SEQ ID NO: 17782 - DNA, 273 bp, synthetic construct
  misc_feature 1..273: note = source = /note="Description of Artificial Sequence: Synthetic coding sequence"
  source 1..273: mol_type = other DNA
atgacagaggaaaatgtaaaacgcagaacccacaatgttctagaaaggcagaggaggaacgagttaaagcgatccttcttcgccctgagagatcagatcccagagctggaaaacaacgaaaaggctccgaaagtagtgatcctcaagaaggccaccgcgtacatcctgtcagtgcaggcagagactcagaaactgatcagcgagatagacctgctccgtaagcagaacgagcaactgaaacacaagctcgaacagctacgaaactcctgcgct

SEQ ID NO: 17783 - DNA, 273 bp, synthetic construct
  misc_feature 1..273: note = source = /note="Description of Artificial Sequence: Synthetic coding sequence"
  source 1..273: mol_type = other DNA
atgacagaagaaaatgtgaaacggcggacacataatgtgttagaaagacagaggaggaatgagcttaaacggtctttctttgctctaagggatcagatccctgagctcgaaaacaatgaaaaagcccccaaagtagtaatacttaaaaaggctacagcttatatcctctctgtgcaagcagaaactcagaaactgattagtgagatagatttgctgaggaaacagaatgaacagctcaaacataaattagagcagctacgcaattcatgcgct

SEQ ID NO: 17784 - DNA, 273 bp, synthetic construct
  misc_feature 1..273: note = source = /note="Description of Artificial Sequence: Synthetic coding sequence"
  source 1..273: mol_type = other DNA
atgacagaagagaatgtgaaaaggcgcacccacaacgtcctggagcgccagagacgcaacgaattgaaacgctctttcttcgcgctccgcgatcaaatccctgagctggagaacaatgaaaaagccccaaaagtggtgatcctcaagaaggccaccgcctacatactgtctgttcaggctgagacgcagaagttgatctctgagattgaccttctgaggaagcagaatgagcagctcaaacataagctggagcagttgcgcaactcctgcgcg

SEQ ID NO: 17785 - DNA, 1062 bp, synthetic construct
  misc_feature 1..1062: note = source = /note="Description of Artificial Sequence: Synthetic coding sequence"
  source 1..1062: mol_type = other DNA
atgctgttcaatctccgcatcctacttaacaacgcagcgtttaggaatgggcataacttcatggtgaggaactttcggtgcggacagcctctccagaacaaggtccagctcaagggccgcgatctgttaactctgaagaattttacaggggaagagattaagtacatgctctggctcagcgctgacctcaagtttcggattaaacagaagggcgagtatttacccctgctgcaaggaaagagtctgggtatgatttttgagaagagatctacacggacaaggctgtcgacagaaactggcttcgctctgctgggtggccacccttgcttcctgaccactcaagacatccatctcggagttaacgagtcgcttacggacactgctagagttctcagctctatggctgacgcagtcctggcacgagtctataaacagtcagatcttgatacgctcgctaaggaagcttctatacccataatcaacggtctgtctgatctgtatcaccctattcaaatcctggctgattatcttaccttgcaggaacactactctagccttaaaggacttacgctttcctggattggtgatggcaataacatactccactcaataatgatgagcgcagcaaaattcggcatgcaccttcaggcggcgacgccaaaggggtacgagccggacgcttctgttaccaaactcgccgaacagtatgccaaagaaaacgggactaagctactacttacaaacgaccccctggaggccgcacatggtggcaacgtactgatcaccgatacatggatcagtatggggcaggaagaggagaaaaagaagcgcttgcaagctttccaggggtatcaggtgaccatgaaaaccgccaaggtggcagctagtgattggacgttccttcactgccttccgaggaagccagaggaagtcgacgatgaagtcttttactctcctcgctccttggtcttcccggaagccgaaaatagaaagtggactatcatggccgtgatggtgagtttgctcaccgactactccccacaattgcaaaaacctaagttc

SEQ ID NO: 17786 - DNA, 1062 bp, synthetic construct
  misc_feature 1..1062: note = source = /note="Description of Artificial Sequence: Synthetic coding sequence"
  source 1..1062: mol_type = other DNA
atgcttttcaacttacggatactcctgaacaacgctgcatttcggaacgggcacaattttatggttcggaacttccgctgtggccaacctctgcagaataaggttcaacttaagggccgtgatctattgaccctgaagaatttcaccggggaagagatcaaatacatgctgtggttgtctgccgacctgaaattccgtatcaaacagaaaggtgagtacctgcccctgctgcagggtaaatcactcgggatgattttcgagaagaggtccactaggacaaggctgagtacagaaactgggttcgcactgctaggcggtcatccttgtttcctcacaacacaggacattcatctgggcgttaacgagtcactgactgacaccgccagagttttgtcaagcatggcggatgcagtgctggcccgggtgtacaaacagagtgacctcgatactcttgccaaggaggcatcaatccctattatcaacggcctatccgatctttatcatcccatccaaatcctggctgattatctcacgctgcaggagcactacagttcactcaaaggccttacactgagctggattggcgacggtaacaatattctgcactccatcatgatgtcagcagctaaatttgggatgcacttacaagcagccacacctaagggctacgaaccagacgccagtgtgactaaactggccgagcagtacgccaaggagaacggcaccaagctgctcctcaccaatgatcctttagaagccgcacatgggggaaacgttctgattactgacacatggatttccatgggacaggaagaagagaagaaaaagaggctacaggcattccagggctatcaagtgacaatgaagactgcaaaagtggccgcctccgactggacatttttgcactgcctgcctaggaaacccgaggaagtcgatgatgaggtattctatagtcccaggagtctggttttccccgaagccgaaaaccgtaagtggacaatcatggcagtgatggtgagtctgttgacagactactcccctcagcttcaaaaaccaaaattc

SEQ ID NO: 17787 - DNA, 1062 bp, synthetic construct
  misc_feature 1..1062: note = source = /note="Description of Artificial Sequence: Synthetic coding sequence"
  source 1..1062: mol_type = other DNA
atgctattcaacctgcgcattctacttaacaatgctgcgtttcgaaacggccacaatttcatggtcagaaattttcggtgcggacagccattgcagaacaaggtccaattgaaaggacgcgacttgctgacgcttaaaaacttcacaggagaggaaatcaaatacatgctctggctgagcgcagacttgaaatttcgcatcaagcaaaaaggggaatacctccctctgctgcagggaaaatcactcggtatgattttcgaaaagcgaagtacacggacaaggctgtccacagagacggggtttgctctcctgggcggacacccctgcttcctcaccacacaggatatccatctgggcgtgaacgaatccttgaccgacaccgcccgcgtgttgtcctcaatggcagacgctgttctggctcgcgtgtacaaacagagcgacctggacacactggcaaaggaagcgtccatccccatcattaatggtctgtccgatttgtaccacccaattcagatccttgcagactatctgactctgcaagaacattactcatccctgaaggggcttaccttgtcctggatcggggacggcaacaacattctgcatagtatcatgatgtcagctgcaaagtttggcatgcatttgcaggccgccactccgaagggctacgagccggatgccagtgtgacaaaactcgccgagcagtacgcaaaagagaacgggacaaagctgttgttaacaaacgatcctctcgaggctgctcacgggggtaatgtactcatcacagatacctggatcagcatgggtcaggaagaggaaaaaaaaaagcggctccaggcttttcagggctaccaggttaccatgaagactgccaaggtggccgcttccgactggacatttttgcactgtctaccccgcaaacctgaggaggtggacgacgaggtcttttacagtcccagatctcttgtgttccccgaggccgagaacagaaaatggaccatcatggcggtcatggtctccctgcttaccgattattcaccccagctccagaaacctaagttt

SEQ ID NO: 17788 - DNA, 1062 bp, synthetic construct
  misc_feature 1..1062: note = source = /note="Description of Artificial Sequence: Synthetic coding sequence"
  source 1..1062: mol_type = other DNA
atgctctttaacctgagaattcttttgaataatgcagcctttcggaatgggcacaacttcatggtcaggaatttccgctgcggacagccgctgcagaacaaggtgcaactgaagggccgggatttgctgactctgaagaacttcactggtgaagaaatcaagtacatgctgtggctgtccgctgatctgaagttccggatcaagcagaagggagaatacctgcccctgctgcaaggaaagagcttgggaatgatcttcgaaaagcggtccacccggacccggctctccactgaaactggtttcgcgctgttggggggtcacccgtgttttctcaccactcaggatatccacctcggagtcaacgagagcctgaccgataccgcccgcgtgctgtcgtcaatggccgacgctgtgctggcaagagtgtacaaacaaagcgacctcgacaccctcgcgaaggaggcttcgatcccgatcatcaacggactctccgatctgtaccatccgattcaaatcctggctgattacttgactctgcaggaacactacagctcgcttaaggggcttactctgtcgtggatcggcgacgggaacaatatactgcactctatcatgatgtccgcggctaagtttggaatgcacctgcaggcggcaaccccgaaggggtacgaacctgacgcttctgtgaccaagctcgccgagcagtacgccaaggaaaatggaaccaaactgctgctgacgaatgacccactcgaggccgcccacggaggcaacgtcctgatcaccgatacttggatctccatgggccaagaggaagaaaagaagaagaggctccaggcattccagggctaccaggtcactatgaaaactgccaaggtcgctgcctcagactggaccttcctgcactgcctcccccggaagcccgaggaagtggacgatgaggtgttctactcccctcgctcgctcgtgtttccggaagcggagaatcgcaagtggactatcatggcggtcatggtgtcacttctgaccgactactccccgcaactgcaaaagccgaagttc

SEQ ID NO: 17789 - DNA, 1062 bp, synthetic construct
  misc_feature 1..1062: note = source = /note="Description of Artificial Sequence: Synthetic coding sequence"
  source 1..1062: mol_type = other DNA
atgctctttaatcttcgtatactgttgaacaatgctgcgttcagaaacggtcacaactttatggtgcggaacttcagatgcggtcagccgctccaaaacaaagtgcaacttaagggcagggatctgctcactctcaagaatttcaccggagaagagatcaagtacatgttgtggctttcagcagacctcaagttcagaatcaaacaaaagggagaataccttcctcttctgcagggaaagtcccttggcatgatttttgaaaaacgctcgaccaggacgagactgtcaaccgaaaccggattcgctttgctcgggggacatccgtgttttcttactactcaagacatccacttgggtgtcaatgaaagcctgactgatactgccagagtgctctcatccatggctgatgccgtgctggcacgcgtgtataagcagtcggatttggacacccttgcaaaggaagcaagcattccaatcattaacggactttcagacctttatcaccctattcagattctggcggattaccttacccttcaagagcattacagcagccttaaaggccttactctcagctggattggagatgggaacaatatacttcatagcattatgatgagcgcagcaaagtttggaatgcatttgcaagctgcaaccccaaaaggatacgagcccgatgcgtcggttaccaaacttgcagagcaatacgctaaagaaaacgggactaaacttcttctgaccaacgatcccctggaagccgctcatggcggaaacgtcttgattaccgacacctggattagcatgggtcaagaggaagaaaagaagaagcgtttgcaggcctttcagggctaccaagtcaccatgaaaaccgcaaaagtggccgcctcggattggacgtttctgcattgtctgccgcgcaagccagaggaagttgatgacgaagtgttttactctcctcgctcacttgtgtttcctgaggcagagaatcggaagtggaccataatggcagttatggtgtcgctgctgactgactacagtcctcagcttcaaaagcccaagttt

SEQ ID NO: 17790 - DNA, 1062 bp, synthetic construct
  misc_feature 1..1062: note = source = /note="Description of Artificial Sequence: Synthetic coding sequence"
  source 1..1062: mol_type = other DNA
atgctgttcaacctccggattctgctgaataatgccgctttcaggaatgggcacaacttcatggttagaaactttagatgcgggcagcctctacagaataaggtgcagctcaaaggcagggatctcctgactctcaagaacttcactggtgaggagatcaagtatatgctgtggctgtccgcagatttgaaatttcgcatcaagcagaagggagagtatctacccttgttgcagggcaagagcctcggcatgattttcgagaagaggtcaacccgcactcggctatcgaccgaaactggcttcgcattgttgggcggacatccatgttttcttacgacgcaagacatccatctcggagtaaacgaatctctgactgacaccgcgcgagtactgtctagcatggccgatgcagtcctggcccgggtttataagcagagtgatcttgacaccctggctaaagaagcatctattcccatcattaatggcctgtctgatctgtaccaccctattcagattttggcagattatctgaccctccaggaacactattcttctctgaaaggactgaccctgtcctggatcggagacgggaacaatatactgcattctatcatgatgagcgccgccaagttcggaatgcacctccaggccgctacccctaaggggtacgagccggatgccagcgtgaccaaactcgccgagcaatacgccaaggagaatgggaccaaactgctgttgacaaatgaccctttggaggccgctcatgggggcaacgtactgattaccgacacctggataagcatgggacaggaggaggaaaaaaagaaacggctgcaagcgtttcaggggtaccaggtgactatgaagactgcgaaagtggccgcttccgattggacctttctgcactgtctcccacgaaaacccgaggaggtggatgacgaagtgttctactctcctcgtagcctagttttcccggaagctgagaaccgaaaatggaccatcatggctgttatggtgtcgctgctgaccgattattcaccccagctacaaaagccaaagttc

SEQ ID NO: 17791 - DNA, 1062 bp, synthetic construct
  misc_feature 1..1062: note = source = /note="Description of Artificial Sequence: Synthetic coding sequence"
  source 1..1062: mol_type = other DNA
atgcttttcaacctcaggatactgttgaacaatgccgcctttaggaacggacacaactttatggtccggaacttcagatgtggtcagccactgcagaacaaggtccagcttaaaggtcgcgatctgctcacccttaagaatttcactggggaagagattaagtacatgctgtggctcagcgccgatcttaagtttaggatcaagcaaaaaggagagtatcttcctctgctccagggaaagtcacttgggatgatttttgaaaaacggtccaccaggacccgactgtctaccgaaacgggctttgcccttttgggaggacacccctgctttttgactacccaggatattcatctgggagtgaatgagtcgcttacggatacggcacgtgtgctttcaagcatggccgacgcggtgttggcacgtgtgtacaagcaatccgatcttgacaccttggcgaaagaagcgtctattcctattatcaacggcctgtccgatttgtaccatcctatccaaatactcgcagactacctcactctgcaagagcactacagctctctgaagggtctgaccctgtcgtggattggagatggaaacaacatactgcattcgattatgatgagcgcagcaaagtttggaatgcatctgcaagcggctacccctaaggggtacgagccagatgccagcgtcacgaaacttgccgagcaatacgcgaaggagaacggaactaagctccttctcaccaatgatccactcgaagcggcacatgggggaaatgtgcttattaccgatacgtggatctcaatgggccaagaggaagaaaagaagaaacggcttcaggcatttcaaggctaccaagtgaccatgaaaacggctaaggtcgcagcatccgactggacctttctgcattgtctgcctcgaaaaccagaagaagttgacgacgaggttttctacagcccgagatccttggtgttcccagaagcagaaaaccgcaaatggactattatggcagtgatggtgtcgcttctgactgactattcaccacagctccaaaagcccaaattc

SEQ ID NO: 17792 - DNA, 1062 bp, synthetic construct
  misc_feature 1..1062: note = source = /note="Description of Artificial Sequence: Synthetic coding sequence"
  source 1..1062: mol_type = other DNA
atgttgtttaacctccggattttactgaacaatgccgcatttcggaatggacataattttatggttcggaactttagatgtggccaacccctacagaataaagtgcagctgaaaggacgcgatctgctgaccttaaagaactttacaggtgaggaaataaaatatatgttatggctgtccgcagatcttaagtttagaattaagcaaaaaggtgaatacctgcctctgctccaggggaaaagcttaggaatgattttcgagaagaggagtaccaggacaagactgagcacagagactgggttcgcacttctgggaggtcacccatgttttctcacaacccaagatatacacctgggcgtcaacgagtccctcaccgacacagcccgagtgctcagtagtatggcagatgctgtgctggctagggtctataagcagtccgacttagatactctggcaaaagaggcctccatacctatcatcaacgggctgtcagacctgtaccatcctatccagattctagcagattacctgacactgcaggagcactactcttcactcaagggactcactctgagctggattggagatggaaacaacattttacactcaattatgatgagcgcagccaagtttggaatgcacctgcaggctgctaccccaaagggctatgagccagacgccagtgtaaccaaattagccgagcaatacgcaaaagaaaatggcacaaagcttctgctgaccaatgatccactggaggccgcccacggggggaacgttctgatcaccgacacttggatttctatgggccaggaagaggagaagaagaagcgattgcaggcatttcagggttaccaggttactatgaagacagctaaagtggcagctagtgactggacctttctgcattgcttgccacgtaagcctgaggaggtggatgatgaggtgttctatagccctaggagcctagttttcccagaggctgaaaatagaaaatggactataatggcagttatggtttccctgctgaccgattatagcccccagctgcagaagccaaaattc

SEQ ID NO: 17793 - DNA, 1062 bp, synthetic construct
  misc_feature 1..1062: note = source = /note="Description of Artificial Sequence: Synthetic coding sequence"
  source 1..1062: mol_type = other DNA
atgctctttaacctgcgtatcctcctcaataatgccgctttccgaaatggacacaactttatggtgcgaaatttccgttgtggccaacccctgcagaataaggtgcagctgaagggccgcgacctactcaccctgaagaacttcacgggcgaagagattaagtatatgctttggctttcggctgatctaaagttcagaattaaacagaagggtgagtatctccccttgctccagggcaaatccctcggaatgatctttgagaagcggagcacgcggacaagactgtcaacggagaccggattcgctctccttgggggccatccttgcttcttgacaactcaggatatccaccttggggtgaacgagtccctgactgatactgcacgcgtcttatcttcaatggccgacgcagtattggcccgggtctacaagcagtctgacctcgatactttggcaaaagaagcgagcatccctattataaatggcttgtcggacctatatcatcccatccagatcctcgccgattaccttactctccaagaacactattcttccctgaagggcttgactctgtcctggatcggcgatggtaataacattctccatagtataatgatgtctgctgctaagtttggtatgcatcttcaagctgccactccaaaaggatacgagcctgacgccagcgtcactaagctggcagaacagtatgcaaaagaaaacgggaccaaactccttttgactaacgacccgttggaggctgcccatggaggaaatgttcttatcaccgacacctggatctcgatgggacaagaagaagagaagaagaagcggctgcaggcgttccagggttaccaggttactatgaaaacagcaaaggtggctgcgtcagactggacattcctccattgcctcccacgaaaacccgaagaagtggacgacgaagtcttctactccccacgttctcttgtctttccagaggctgaaaatcggaagtggacgatcatggccgtgatggtcagcctgcttactgattactccccacagcttcagaagccaaagttc

SEQ ID NO: 17794 - DNA, 1062 bp, synthetic construct
  misc_feature 1..1062: note = source = /note="Description of Artificial Sequence: Synthetic coding sequence"
  source 1..1062: mol_type = other DNA
atgcttttcaatttaagaatacttcttaataatgcagcattccgtaatggtcataattttatggttagaaatttcagatgtggacaaccattacaaaataaagttcaattaaaaggtagagatttattaacattaaaaaatttcacaggagaagaaattaagtatatgttatggttatcagctgatttaaaatttagaatcaaacaaaaaggagaatatcttccacttcttcagggtaaatcattaggaatgattttcgaaaaacgttcaacaagaactcgactttctactgaaactggatttgcattattaggtggacatccatgctttttaacaacacaagatatacatttaggagttaatgaatcattaactgatacagctagagttttatcttcaatggctgatgctgttcttgcaagagtatataaacaatcagatttagatacgttagctaaagaggcatcaataccaattattaacggtttatctgatttatatcatccaattcaaattcttgcagactaccttacacttcaagaacattatagttctttgaaaggacttacactttcatggataggagatggaaataatattcttcattcaattatgatgtcagctgcaaagttcggaatgcatcttcaagcagctactccaaagggatacgaaccagatgcatcagttactaaattagcagaacaatatgctaaagaaaatggaactaagcttcttcttacgaatgaccctctagaagctgctcatggaggtaatgtacttattacagatacatggatttcaatgggacaagaagaagaaaaaaagaaaagattacaagcatttcaagggtatcaagttacaatgaagacagctaaagttgcagcatctgattggacattcttacattgtttacctagaaaaccagaagaagttgatgatgaagttttttattcaccacgatcattagttttcccagaagcagaaaatagaaaatggacaattatggcagttatggtatcattactaacagattattcaccacaattacaaaaaccaaaattt

SEQ ID NO: 17795 - DNA, 1062 bp, synthetic construct
  misc_feature 1..1062: note = source = /note="Description of Artificial Sequence: Synthetic coding sequence"
  source 1..1062: mol_type = other DNA
atgctgttcaacctgcgcattcttctgaataacgcagccttcaggaacggccataacttcatggtgcgaaactttaggtgcggacagcccttgcaaaacaaggtgcagctcaaaggccgggatcttcttacgctgaagaacttcaccggagaagaaatcaaatacatgctctggctgagcgcagacctgaaattccgcatcaagcagaagggagaatacctgccgctgctgcagggaaagagtctcggaatgatcttcgagaaacggagcacccgcacccggctgtcaaccgaaactggcttcgccttgctgggaggtcatccgtgctttcttacgacccaagacattcacttgggcgtcaacgagtcgctgaccgacactgccagagtgctgtcctccatggccgacgctgtcctcgcgagagtgtacaaacagtcagatctggatactctggcaaaggaagcctccattcccatcatcaatggactgtcggacctgtaccaccccattcaaatcctggcagattacctgaccctgcaggagcactactcctccctgaaaggactgacgctttcatggatcggagacggcaataacatccttcactcgatcatgatgtctgctgcgaaattcgggatgcacttgcaagctgccactccaaaggggtacgaacctgacgcctccgtcactaagctcgccgaacaatacgccaaagagaacggtaccaagctgcttctgaccaacgatccgctggaggcagcccatggaggaaacgtcctcatcaccgacacctggatcagcatgggtcaagaagaagagaagaagaagaggctgcaggccttccagggatatcaagtgaccatgaaaaccgcgaaggtggccgctagcgactggaccttcctccattgcctgccaagaaagcccgaagaagtggatgacgaggtcttttactcgcctcgatcgctggtattccctgaagctgagaatcgcaagtggaccatcatggccgtgatggtgtcgcttctgaccgactactcgcctcagctgcagaaacctaagttt

SEQ ID NO: 17796 - DNA, 1062 bp, synthetic construct
  misc_feature 1..1062: note = source = /note="Description of Artificial Sequence: Synthetic coding sequence"
  source 1..1062: mol_type = other DNA
atgctgtttaacctgcgcattctacttaataacgccgccttcaggaatggccataacttcatggtgcgaaactttcggtgtggccagcctcttcaaaacaaagtgcaactgaaggggcgagacctgctgaccctgaagaattttaccggtgaagagattaagtatatgctgtggttgtcagcagatttgaagttcaggattaagcagaagggagaatacctccccctgctgcaggggaagagcctcggtatgatttttgaaaagcgctcaaccaggacgagattgtcgaccgagacagggttcgcactgctgggcgggcatccctgtttcctgaccactcaggatattcacctgggcgtgaacgaaagcttaacagatacggcacgcgttctgagctccatggccgacgcggtcttggctagagtatataagcagagtgatttggacaccctggcaaaggaagctagcatccccatcattaatgggctgtctgatctgtatcaccctatccagattctggccgattacctaacactgcaagagcactactcatctctgaaaggtctgaccctgtcctggataggcgacggcaacaacattctccattccatcatgatgtctgcggccaagttcggtatgcatctccaggccgccacccctaaaggatacgagcctgatgcaagcgtaactaagctggctgagcagtacgcaaaggagaacgggacgaagctgctccttacaaatgacccgcttgaggctgcacacggcggcaacgtgctgattacagatacatggatctctatgggccaagaggaggagaagaaaaagcggctgcaggcctttcaaggctatcaggtgacaatgaagactgctaaggtagccgcctccgattggacttttctccattgtttgccaagaaagcctgaagaggtggatgatgaggtgttttactcccctcgatccctagtgtttccagaagcggaaaataggaaatggaccatcatggccgtgatggtgtccttgctgaccgactactcaccacagctccaaaaaccaaagttt

SEQ ID NO: 17797 - DNA, 1062 bp, synthetic construct
  misc_feature 1..1062: note = source = /note="Description of Artificial Sequence: Synthetic coding sequence"
  source 1..1062: mol_type = other DNA
atgctgtttaacttgcgcatcctgctgaataacgccgccttcagaaacgggcacaattttatggtaagaaacttccggtgcggtcagcctctccaaaacaaggtgcaactgaagggacgtgacctcctgacgctcaagaactttactggagaggagattaagtacatgctctggctgtccgcagatctcaagttccgcatcaaacagaagggagagtatttgccgctgctgcaggggaagtcgctcggcatgatcttcgagaagagatcaacccgcactcgactcagcacggaaacgggattcgctctgctgggcggccatccctgcttcctgactactcaagatatccatctgggcgtgaatgaatcgctgaccgacaccgctcgggtcttgagctctatggccgacgctgtgctggcccgcgtgtacaaacaatcagaccttgacactctggccaaggaagcgtccatcccgattatcaatggactctccgatctttaccatccaatccagattcttgctgattacctgactctccaggagcactacagctcattgaagggactgaccctctcctggatcggagatggcaacaacatcctccactcaatcatgatgtcggccgcaaaattcggtatgcacctccaggcagcgacccccaaaggatacgagccggacgcttcggtgactaagctcgcggaacagtacgcgaaagaaaacggaaccaagctgctgctgaccaacgaccctctggaagcagcgcacggtggaaatgtcctgatcaccgacacttggatcagcatggggcaggaggaagaaaagaagaaaaggcttcaggccttccaaggctaccaggtgactatgaaaaccgcaaaggtggcggcctccgattggaccttccttcattgtttgcctcggaaaccagaggaagttgacgatgaggtcttttactccccgcggagcctggtgttcccggaagccgaaaatcgcaagtggactatcatggccgtcatggtgtcgctgctcaccgactactcgccacaactgcagaagccgaagttc

SEQ ID NO: 17798 - DNA, 1062 bp, synthetic construct
  misc_feature 1..1062: note = source = /note="Description of Artificial Sequence: Synthetic coding sequence"
  source 1..1062: mol_type = other DNA
atgctgttcaacctcaggatacttctgaacaacgcagccttcagaaacgggcataacttcatggtcagaaacttcagatgcggacagccactgcagaacaaggtgcagctcaaggggagagatcttctaacacttaagaacttcacaggggaagaaattaaatatatgctgtggttatcggctgatcttaaattccgaatcaaacagaaaggagaatatcttcctttgcttcaggggaaatcccttgggatgatcttcgaaaaaaggtctacacgcacaagactgagtacagagactggatttgctctcctaggagggcatccctgttttctcacaactcaggatatccatttgggagtgaatgaatccttaactgatacagcaagggttctgtcctctatggccgatgcagtccttgctagggtgtacaaacagtccgatctggacactcttgccaaagaagctagtataccaatcattaacggactctctgatctttatcatcctatacagatattagccgattatctaacactgcaggaacactattcatcactaaaagggcttactttgtcttggattggggatgggaacaatatattgcactcaatcatgatgtctgccgcgaaattcgggatgcatttgcaagcggccactcccaaaggatacgaacccgatgcttctgtgacaaaactcgctgagcagtatgctaaagagaacggaacaaaactcctactgactaacgatccactggaagccgctcacggaggaaatgtgctgattactgatacgtggatctctatgggacaggaagaagaaaaaaaaaaaaggctccaggcattccagggataccaagtaacaatgaaaacagcaaaagtagccgcaagtgattggacttttttacattgcttaccacggaaaccagaagaagtggacgacgaagtattttatagtccaaggtccctggtcttccccgaagccgagaaccggaaatggactatcatggctgtgatggtgtccctcctgacagattactctccccaacttcagaaacccaaattt

SEQ ID NO: 17799 - DNA, 1062 bp, synthetic construct
  misc_feature 1..1062: note = source = /note="Description of Artificial Sequence: Synthetic coding sequence"
  source 1..1062: mol_type = other DNA
atgctgttcaatcttcgtatcttgcttaacaacgccgctttccgcaacggtcataatttcatggttcgcaatttccggtgcggacagcccctgcagaataaggtgcagctgaagggccgcgacctgctgaccctaaagaacttcacaggcgaggaaattaagtatatgttgtggctgtcagctgacctgaaattccgaatcaagcagaaaggtgagtatctacctcttctccagggaaaatctctgggtatgatcttcgaaaagcggtccacacgtacgcgcttgtccactgagacgggctttgcccttctcgggggtcacccatgcttcctgaccacacaggatatacacctgggggtcaacgagagtctgactgatacagctcgggtcctgagtagcatggctgatgctgttttagcccgagtgtacaagcaatctgacctggatactttggcgaaggaggccagtataccaataatcaatgggttgtcggatttgtaccacccgatccagatactcgccgactatttaactttgcaagagcactacagttcactcaagggactcaccctgtcctggattggtgatggtaataatatcctgcactcaattatgatgtctgccgccaaattcggcatgcacctccaggctgccacacccaaggggtatgaaccagatgccagcgtaaccaagttggccgaacagtacgcgaaagaaaatggcaccaagttgttgctgacaaacgacccattagaggccgcccatggggggaacgtattaattacagatacttggatctccatgggccaagaggaggagaagaagaagcgactgcaagccttccaagggtaccaggtgacaatgaaaactgcgaaagtggctgcttccgactggacctttttgcactgcctgccgcgcaagcccgaagaggtggatgatgaggtgttttactcacctcgctccctggtgttccccgaagccgagaaccggaagtggaccatcatggctgtcatggtctccttgttgaccgactatagccctcagctgcagaagcctaagttc

SEQ ID NO: 17800 - DNA, 1062 bp, synthetic construct
  misc_feature 1..1062: note = source = /note="Description of Artificial Sequence: Synthetic coding sequence"
  source 1..1062: mol_type = other DNA
atgctgttcaatctgcgaatcctccttaacaatgctgcctttagaaacgggcacaatttcatggtcaggaattttcgttgcgggcaaccactgcagaacaaggttcagctgaaaggacgggacctcctcacattaaaaaactttacgggcgaagagatcaagtatatgctgtggttgtccgccgatctaaagtttcgaattaagcaaaaaggcgagtatctgcccttgcttcaggggaagtctctggggatgatctttgaaaaacgttcaacccgaacgaggctctcaaccgaaaccgggtttgcccttttgggaggccatccctgcttcctcactacccaggacatccatctgggggttaatgagtcactgactgacacggccagggtcctgtccagcatggcagatgcagtgctggcacgcgtctacaagcagtcagatttggacactctcgcaaaagaggcatcaattcccatcatcaatggcctcagtgatctgtaccaccctatacagatcctcgctgactatttaactttgcaagagcactactcaagcctaaaaggtctgactttgtcctggattggcgatgggaacaacattctccacagcattatgatgtcagcggcgaagtttggcatgcacttgcaagccgcaacacctaagggctacgaacccgatgcaagtgtcaccaaactggccgaacagtatgccaaagaaaacggaacaaaattgttgctcaccaacgatcctctggaagcagcgcatggaggcaatgtgctcatcacagacacctggattagcatgggtcaggaggaagagaagaagaaacgactccaggcctttcaaggctatcaagttacaatgaaaactgccaaggtagccgcaagtgactggacttttctccactgcctaccacggaaaccggaagaggtagatgatgaggtgttttattcgccaagatccctggtttttcccgaggcggagaacaggaagtggacaattatggctgtaatggtgtcactgttgaccgactactcccctcagctgcagaaacccaaattc

SEQ ID NO: 17801 - DNA, 1062 bp, synthetic construct
  misc_feature 1..1062: note = source = /note="Description of Artificial Sequence: Synthetic coding sequence"
  source 1..1062: mol_type = other DNA
atgttgttcaacctccgcattctgctgaataatgccgccttccgaaatggacacaatttcatggttagaaatttcaggtgcggccagccactacagaacaaagtgcagctcaagggacgggacctgttaacactgaagaattttaccggggaagagattaaatacatgctgtggctgtctgcagacttaaagtttaggatcaagcaaaagggagaatacctcccgctcttgcagggaaagtcattgggaatgatctttgaaaagcgtagcacacgcactcgcctcagtacggaaacagggttcgcacttctgggtggacatccatgttttctgacgacccaggacatccacttaggggtcaacgagagccttacagataccgccagggttctcagttctatggccgacgccgtgctggcaagagtgtataagcagtcggacttagatactcttgccaaggaggcctcaattcctattatcaacgggctaagtgatctctatcatcccattcaaattttggccgattatcttaccttacaagaacattattcgtctctgaagggactgactctctcctggattggcgacggaaacaacattctccattctatcatgatgtcagccgcaaagttcggcatgcatctgcaggccgccacccctaaaggctacgaacccgatgcctcagtgacaaaattggccgaacagtacgcaaaagagaatggaacgaaactgctgctgacgaacgaccccctggaggcagcccatggaggcaacgttttgatcaccgacacatggatatccatggggcaagaagaggaaaagaagaagcgccttcaagccttccagggataccaagtcacgatgaagacggctaaagtcgccgcgagtgattggacattcctgcactgcctgcctcgcaaacccgaggaggtggatgatgaggtcttctacagccctaggtccctggtttttcctgaagcggaaaataggaaatggactattatggcagttatggtcagccttcttacagactattccccacagttacagaaaccgaaattt

SEQ ID NO: 17802 - DNA, 1062 bp, synthetic construct
  misc_feature 1..1062: note = source = /note="Description of Artificial Sequence: Synthetic coding sequence"
  source 1..1062: mol_type = other DNA
atgctgtttaatttaagaatactgctgaataatgccgcctttaggaatggccataactttatggtgagaaattttagatgtggtcagcccctgcaaaacaaggtgcagctcaagggaagggatctgctaactctcaagaacttcacaggcgaagagattaaatacatgctttggctgagtgcagacctgaaatttagaatcaagcagaaaggggaatacttgcccctgctgcaaggcaaaagtctgggcatgatttttgaaaagcgatccactaggactcggctgtccactgaaactggtttcgccctgctaggcggccacccatgcttcctgacaactcaagatatccatctcggagtgaacgagtctctgaccgataccgcacgtgtcctttccagcatggctgacgccgtcctcgccagggtctacaagcagagtgatctggacacgttagctaaagaagcttccatacccataatcaacgggctcagtgacttgtaccaccccatacaaatactggcagattacttgactttgcaggaacactactcgtccctgaaggggctcactctctcttggattggggatggaaataatatcttacattctattatgatgtctgctgcaaagttcgggatgcacctacaggccgcaacccccaaggggtacgaacccgacgcctccgtgactaagctggccgagcagtatgccaaggaaaacggtaccaagctccttctgactaatgaccctctggaggcggcccacggaggcaacgttcttataacagacacatggatcagtatgggccaggaggaagaaaaaaaaaagagactgcaggctttccagggctaccaggtcacaatgaaaacggcgaaggtcgctgcctccgactggacctttctgcactgtctgcctagaaaaccggaggaagtggatgacgaggtgttttattcccccagatccctcgtgttccccgaagccgaaaatcgaaaatggacaattatggccgttatggtcagtctcctgaccgactatagccctcagcttcagaagcctaaattc

SEQ ID NO: 17803 - DNA, 1062 bp, synthetic construct
  misc_feature 1..1062: note = source = /note="Description of Artificial Sequence: Synthetic coding sequence"
  source 1..1062: mol_type = other DNA
atgctgtttaacctgcgcattctgctaaacaatgccgcgttccgcaacgggcacaattttatggtgcgcaattttcgatgtggccagccattgcagaacaaggtgcagcttaaaggccgggatctgttgactcttaagaacttcacaggagaggagatcaagtacatgctgtggctgtctgccgatcttaaatttagaatcaagcagaaaggcgaatacctccctctgctgcagggcaagtcattgggtatgattttcgagaagcggagtacaagaaccagattaagcactgagactgggttcgcccttcttggcggccatccctgtttcttgacaacgcaggatatacatctcggcgtaaacgaaagcttgaccgatacagcgagggtgctgtcttccatggcagatgcggttctagcccgggtgtataagcagagtgatcttgataccctggcaaaagaagcctcaattcccattattaatggtttgtcggacctctatcaccccattcagatattagccgactacttgactcttcaggagcattattctagccttaaaggtctgaccctgtcttggatcggcgatggaaataacattctccattctattatgatgtctgccgccaagtttggcatgcacttgcaagccgcaaccccgaagggatacgagccagatgcttcagtcacaaagctagcagagcagtacgcgaaggagaatggaaccaaacttttgttaacaaatgacccactggaagctgctcatggaggtaacgtgctcatcactgatacctggatctccatgggacaggaggaggagaagaagaaaaggctccaggcctttcaggggtatcaggtcaccatgaaaacggcgaaggtggcggcttcagattggacgttccttcactgcctgcctcgtaagcccgaagaggttgacgacgaggtcttctactcccctcgcagcctggtgtttcctgaggccgaaaatcgcaaatggaccatcatggccgtgatggtctcattgctcacagactactccccgcagctacaaaagccaaagttc

SEQ ID NO: 17804 - DNA, 1062 bp, synthetic construct
  misc_feature 1..1062: note = source = /note="Description of Artificial Sequence: Synthetic coding sequence"
  source 1..1062: mol_type = other DNA
atgttattcaatctgagaatactcctgaacaacgccgcattccgaaatggccataacttcatggttcgcaacttccgatgcgggcagccactgcagaacaaggtgcagctcaaaggaagagatttgttgacactgaagaactttacaggggaggagataaagtacatgttatggctgtccgcagacctgaaattcagaataaaacaaaagggtgagtacctacctctgctgcaaggaaagtccctcggtatgattttcgagaagaggtcgacccgaacacgcctgtcgaccgagaccgggttcgccttattgggggggcacccctgctttctcacaactcaggatatccatctgggagtgaatgagtctctaaccgacaccgctagagtgctcagcagcatggccgatgctgtcctggcgagggtctataagcaatctgacctggataccctcgccaaggaagcttctatccctatcataaacggcctgagtgatctataccatccgattcagatcctggcggattacctaaccctccaggaacactacagttccctaaaaggtttgactttgtcttggattggcgatggtaataatattctccactcgataatgatgtcagcggcaaagttcggcatgcaccttcaggctgcaacccccaaaggctatgaacctgatgcctctgttacaaaactggctgaacagtacgctaaagaaaatgggacaaaactgcttctgacaaacgatccacttgaggcggcccatggaggaaatgtcttaataaccgatacttggatatcgatggggcaggaagaagagaaaaagaagaggctacaggccttccaaggatatcaggttacaatgaaaaccgctaaggttgcggcatctgactggacgttcctccactgcctgcctcgcaaacccgaagaggtggacgatgaggtgttttactcgccacgaagcttagtgttccctgaagccgaaaaccgtaagtggactattatggctgtgatggtttctctgctgaccgattacagcccccagctgcagaaaccgaagttt

SEQ ID NO: 17805 - DNA, 1062 bp, synthetic construct
  misc_feature 1..1062: note = source = /note="Description of Artificial Sequence: Synthetic coding sequence"
  source 1..1062: mol_type = other DNA
atgctcttcaacctccgaattctgttaaacaatgcggctttcagaaacgggcacaactttatggtgcgaaatttcagatgcggtcagcccctccaaaataaggtgcaactcaaaggcagagaccttttgaccctgaagaacttcacaggcgaggaaatcaagtatatgctgtggctctcagccgacctcaagttccggattaagcagaagggagaatatctgcctctgctccaagggaagagcctggggatgatctttgagaaacggtcaactcgcaccaggctgtcaaccgagactgggtttgcgctactcggaggccatccttgtttccttacaacacaggacattcatcttggggtgaacgagtccttgaccgacacagcccgggtgctgagctcaatggccgatgcagttctcgcccgggtctataagcagtctgatctggacaccctggcaaaagaggcttcaataccaattattaacggcctgagcgatctctaccatcctatccagattctcgcggattacctgactctccaggaacactattcatctctcaagggtcttacactctcttggatcggcgacggcaataacattctgcatagcatcatgatgagcgcagccaagttcggcatgcatctccaggccgcaacaccgaagggctacgagccagatgcatccgtgactaagttggccgagcaatatgcaaaggagaatgggacaaagctacttcttaccaatgatccccttgaggccgcccatggcggaaacgtcttaataacagacacatggataagcatgggtcaggaggaggagaagaaaaaaaggctccaagctttccagggctaccaggttaccatgaagactgccaaagtagctgctagcgactggactttcctgcattgtctgccacgtaagccagaagaggtcgatgacgaggtcttctactcgccccgatctctcgtgttccccgaagcggagaacagaaaatggaccataatggcagtgatggtgagtctgctgacagattattcaccacagttgcagaagcccaagttc

SEQ ID NO: 17806 - DNA, 1062 bp, synthetic construct
  misc_feature 1..1062: note = source = /note="Description of Artificial Sequence: Synthetic coding sequence"
  source 1..1062: mol_type = other DNA
atgttgttcaaccttagaatactgctgaacaacgcagccttcaggaatggccataatttcatggtgcggaattttaggtgcgggcaaccacttcagaacaaggtgcagctgaaaggtcgggatctgcttaccctgaaaaacttcacgggagaagaaatcaagtacatgctgtggctgtctgcagatttgaagtttcgaatcaaacagaagggtgagtatctgccactcctacagggcaaatccttgggaatgatatttgagaaacggagcactcgtacacggctgagcaccgagacagggtttgccctgctgggagggcatccatgtttcctcaccacacaggatatccacctgggggtgaacgaatctctgactgataccgctcgggtcctttcatccatggcggacgccgtgctggcccgcgtgtataaacaatcagatctagatacactcgccaaggaggcgtctatccccatcattaacggtctgtctgatctatatcaccccattcagatcttggctgactacctgacattgcaggagcactacagtagcctgaagggattgaccctgagctggataggggatggaaacaatatcctgcactccatcatgatgtccgctgctaagtttggaatgcacttacaggcagctacgccgaagggatatgagcctgatgctagtgtgacaaaactggcagaacagtatgctaaagagaacggaaccaaactgctgctgacgaacgatccattggaagctgcacatggcggtaacgtgctcatcacggacacttggatctcaatgggccaggaagaagaaaaaaaaaaaagactgcaggccttccagggctatcaggtcactatgaagactgccaaagtggcggccagcgactggactttcctgcactgcctgccacgaaagcctgaagaagttgacgacgaggttttttattcgcctcgttccttggtgttccctgaggccgaaaaccgcaagtggacaatcatggcagtaatggtgtcccttcttaccgactactctccacaacttcagaaaccaaagttc

SEQ ID NO: 17807 - DNA, 1062 bp, synthetic construct
  misc_feature 1..1062: note = source = /note="Description of Artificial Sequence: Synthetic coding sequence"
  source 1..1062: mol_type = other DNA
atgttgttcaaccttcggatcctgctcaacaacgcagctttccggaatggacataactttatggtgcggaatttccgctgcggacagcctcttcaaaacaaggttcaactcaagggaagagatctgctcacccttaagaatttcactggggaagaaatcaaatacatgctgtggcttagcgccgacctgaagtttcggattaaacaaaagggggaatacctgccactgctccagggaaagtctttgggaatgatcttcgagaaacgatcaacgcggactcgccttagcaccgaaaccggatttgcgctgctcggtggacacccatgtttcctcactactcaggacatccacctgggcgtgaatgagtccctcaccgacaccgcccgcgtcttgagctcgatggcggatgccgtgctcgctcgcgtgtacaaacagtcggatctggacaccctggccaaggaggcgtcgattccgattatcaatggtctttccgacctgtaccacccgatccaaatcctggccgattacttgactctgcaggagcactacagcagcctgaaggggttgactctctcgtggatcggagacggtaacaatattcttcactcaattatgatgtcggccgctaagttcggaatgcatctgcaggctgctaccccgaagggctacgaaccagatgcatcagtgaccaagctcgcggagcagtacgccaaggagaatgggaccaagctcctgcttactaacgatccactcgaggccgcccacggaggaaacgtcctcattactgacacgtggatctcgatgggccaggaagaggagaaaaagaagcggctgcaagcgttccagggataccaggtgacgatgaaaactgccaaggtggctgccagcgattggactttcctccactgcctgcctcggaagccagaagaagttgacgacgaagtcttttactcgccgagatcactggtgttcccggaagcggaaaaccgcaaatggactatcatggcggtgatggtcagcctgctgactgactactcccctcaactgcaaaagccaaagttc

SEQ ID NO: 17808 - DNA, 1062 bp, synthetic construct
  misc_feature 1..1062: note = source = /note="Description of Artificial Sequence: Synthetic coding sequence"
  source 1..1062: mol_type = other DNA
atgctgtttaatctcagaattcttttgaacaatgccgcatttagaaacggccataactttatggttcgcaacttcaggtgcggtcagccactgcagaacaaggtgcaacttaagggcagggaccttcttacgctgaagaactttaccggtgaagaaatcaaatacatgctgtggctgtccgctgacctgaaatttcgcataaaacagaagggggaatatctgcctctgctgcaaggtaaatccctcggtatgatctttgaaaagcgatcaacccgtactcgactctcgactgagactggctttgcgcttttggggggacacccgtgtttcttgaccactcaagatattcatctgggcgtgaatgagtcactgacggacactgcacgggtccttagcagcatggcagatgcagtgctggcacgggtctacaagcaatcagatctcgacactctggcgaaggaagcctccattcccatcatcaacggtttgtcagacctgtaccatcctattcagattctcgctgattacctgacgcttcaggagcactactcatcgcttaaaggactgacgctgtcatggatcggagacggtaataacattcttcactcgataatgatgtccgcagcaaaattcggaatgcatcttcaagccgccaccccaaagggatacgaaccggacgcctcggtcaccaagctcgccgaacagtacgcaaaggaaaacgggactaagctcctcctgactaacgatccactggaggctgcacatggcggtaacgttcttataaccgatacctggatttcgatgggccaagaagaggagaaaaagaagcggctccaagcatttcagggctatcaggtgaccatgaaaacggcgaaggtggccgctagcgattggaccttccttcactgtctgcctcgcaagccagaagaggtcgatgatgaagtcttttactcccctcgctcactggtgttcccggaagcagaaaataggaaatggaccatcatggcagtgatggtgtcattgctgaccgattattctcctcaactgcaaaagccaaagttt

SEQ ID NO: 17809 - DNA, 1062 bp, synthetic construct
  misc_feature 1..1062: note = source = /note="Description of Artificial Sequence: Synthetic coding sequence"
  source 1..1062: mol_type = other DNA
atgttgttcaatctccggattctactgaacaatgccgcttttagaaatggccataactttatggtgaggaactttcggtgcgggcagcctcttcagaataaggtacagttgaaagggcgcgatctattaacactgaagaatttcactggggaggaaatcaagtacatgctgtggctgtccgccgacctcaagtttcgcattaaacagaagggcgagtatttgcctctccttcaagggaagtccttggggatgatcttcgagaagcgttcaacgagaacacgactgagcacagagacaggtttcgcccttttagggggccacccctgtttcctgaccacacaggatattcatctgggggttaatgagagcctgaccgacacagcgcgggtgctgagtagcatggctgacgccgtcttggcacgcgtgtataaacagtcagatcttgatacactcgccaaagaggcgagtatccccattatcaatggactgtcagacttgtatcaccccattcagattctggccgattacctgaccctgcaggaacattacagttccctcaaaggactgacattaagctggattggcgatgggaacaacatactacacagcatcatgatgagtgctgccaagtttgggatgcacctgcaggccgctactcccaagggatatgagccagacgcatccgtgacaaagctggccgaacagtacgctaaggagaatgggactaagctgctcctgacaaacgatcctttggaggccgctcatgggggaaatgttctgattactgatacgtggattagtatgggccaggaggaagagaagaagaagagattgcaagcctttcagggttaccaggtgactatgaagaccgctaaggtcgcagcgagcgattggacctttctgcattgcctgcctaggaaacccgaagaggtcgacgatgaagttttctattcaccccgatcactggttttcccggaggcagagaatcgcaagtggaccatcatggctgtgatggtctctttgctgaccgattactctccacagttgcagaagcctaagttc

SEQ ID NO: 17810 - DNA, 1062 bp, synthetic construct
  misc_feature 1..1062: note = source = /note="Description of Artificial Sequence: Synthetic coding sequence"
  source 1..1062: mol_type = other DNA
atgctgttcaatctgcgtattctgctgaacaacgctgcatttcgcaacggacataacttcatggtgaggaattttcgctgtggccagccgttgcagaataaggtacaactgaaaggccgagatctgctgacgctgaagaatttcaccggtgaggagattaagtatatgctctggcttagcgcggacctgaagtttcgtatcaaacaaaaaggcgaatacctgcctttgctgcagggtaagagcctcggtatgatcttcgagaaacgtagcaccagaacccgcctgagcacggagaccggtttcgcgctcctgggtgggcacccttgcttccttaccacccaggatatacacctgggcgttaacgaatccctgactgatacggcccgcgtactgtcgtcaatggcagacgcagtactggctcgcgtgtacaaacagagcgacctggacacactggcaaaagaagcttctattcctataattaatggcctgtctgacctttaccaccctattcagattctggctgactacttgacgctgcaggaacactactcgagcctgaaggggctgacgcttagctggattggagacggtaacaatattctccactcaatcatgatgagcgcagccaagtttggcatgcacctgcaggcggccacgccgaaaggttatgagccggatgcttctgtcacgaaactggcagagcaatatgcaaaggaaaacggaacaaaactgttgctgacaaacgatccactcgaggcggcccacggcggtaatgtgttgataacggatacctggattagcatgggccaagaagaagaaaaaaagaagagattgcaggcctttcagggataccaggtgacgatgaaaactgctaaggttgcagcatcggactggacattccttcactgcctgcctcgcaagcctgaggaagtggatgatgaggtgttttattccccgaggtctctggtttttccggaggcagagaatcgtaaatggacgattatggccgttatggtaagtcttctgaccgactattcccctcagctgcagaaacctaagttt

SEQ ID NO: 17811 - DNA, 1062 bp, synthetic construct
  misc_feature 1..1062: note = source = /note="Description of Artificial Sequence: Synthetic coding sequence"
  source 1..1062: mol_type = other DNA
atgctattcaacttgagaatacttctcaataacgctgcgtttaggaatggacataatttcatggttaggaacttcaggtgtgggcagccacttcagaataaagtgcaactaaaaggaagagatctcctcacactaaaaaactttacaggggaggaaataaaatacatgctgtggctaagtgccgatctcaaattcagaatcaaacagaaaggggagtacttgcccctgctgcagggaaaatccctggggatgatatttgaaaagcgctccacacgaactcggctgtcaactgagactggattcgctttactcggggggcacccatgcttcttgacaacgcaggatattcaccttggagtgaacgaatctctgactgatactgcaagggtgttgagttcgatggctgacgccgttttagctcgagtgtacaaacagagtgatctcgacacattagctaaagaagcgtcaataccaatcatcaacggactttctgacctgtatcatcctattcagatcttggccgactaccttacactgcaggaacattactcctctttaaaagggctaactctgtcctggatcggagacggaaataatattctccatagtattatgatgtctgcagccaaattcggaatgcatctacaggcagcaacacccaaaggatatgaacccgatgcgtcagtcactaaacttgccgaacagtacgctaaggaaaacggaactaaacttctcttaacaaatgaccctctggaagctgctcacggggggaatgtcctgatcactgatacttggatcagtatggggcaagaggaagaaaagaaaaaaaggcttcaggcgtttcagggatatcaggttacaatgaaaactgccaaagtcgcagcctctgattggacatttctgcattgcctccctagaaaacctgaagaagttgacgatgaagtgttctattctccccgctccctcgtgttcccagaagccgaaaatcggaaatggacaattatggccgtgatggtctctctcctcactgattatagtccccagctgcagaaacccaaattt

SEQ ID NO: 17812 - DNA, 1062 bp, synthetic construct
  misc_feature 1..1062: note = source = /note="Description of Artificial Sequence: Synthetic coding sequence"
  source 1..1062: mol_type = other DNA
atgctcttcaacctgcggatcctgttgaataacgccgcattccgaaacggtcacaatttcatggtccgcaactttcggtgcggacagcccctgcagaacaaggtgcagctcaagggtcgggatctgcttacgctgaaaaacttcaccggcgaggagatcaagtacatgctgtggctgtcggccgaccttaagtttagaattaagcagaaaggcgagtacctgccgctcctgcaagggaaatcgttgggcatgatttttgaaaagaggtccaccagaacgcggctttctactgaaacgggatttgctcttctgggaggacacccttgtttcctgaccactcaggacattcaccttggtgtgaatgagtcgttgaccgacactgctcgggttctgtcgagcatggccgacgcagtcttggctcgggtgtacaaacaaagcgacctggataccctggcaaaggaggctagcatcccaattatcaacggtttgtcagacttgtaccatcctatccaaatcctggccgactacctgaccctgcaagagcactactccagccttaagggactcacgctctcctggattggagacggaaacaacattctgcattccatcatgatgtccgcggcaaagttcggaatgcaccttcaggccgctacccctaagggctacgaacctgacgcatcggtcaccaaactggccgagcagtatgcgaaagaaaacggaactaagctgctcctgacgaacgatccgctggaagcggcacatggaggcaacgtgctgatcactgatacctggatctccatgggacaggaagaagaaaagaagaagcggctccaggctttccagggatatcaggtgaccatgaaaactgcgaaggtcgctgcgtcagattggactttcctgcactgccttccacggaaacccgaggaagtggatgatgaagtgttttactccccacggagcctggttttcccagaagccgagaatcggaaatggaccatcatggcagtgatggtgtcgctcttgaccgactacagcccgcaactgcaaaagccgaagttc

SEQ ID NO: 17813 - DNA, 1062 bp, synthetic construct
  misc_feature 1..1062: note = source = /note="Description of Artificial Sequence: Synthetic coding sequence"
  source 1..1062: mol_type = other DNA
atgttgttcaacttgcggatcctcctgaacaacgcagcatttcggaatggacataactttatggtcagaaactttcggtgcgggcaaccattgcagaataaggttcaactgaagggaagggacttgctgacgttgaagaactttaccggagaggaaatcaaatacatgctttggctttcggcggacctgaagtttaggatcaagcaaaagggtgaatacctgccgcttcttcagggaaagagcctcggcatgatctttgaaaagcgctccactagaacgagacttagcactgagactggattcgcgctgcttggcggacatccgtgcttccttactactcaagacatccatcttggggtgaacgaatccctcactgataccgcgagagtcctgtcgtccatggcggatgcggtccttgcccgtgtgtacaagcagtctgatctggacaccctggcaaaagaagcatcaatacccataatcaatggactttccgacctgtaccatcctatccagattctggcagactaccttaccctgcaagaacattacagcagcctgaaagggctcactctttcgtggattggtgatggtaataacattcttcatagcatcatgatgagcgcagcaaagtttggaatgcacctgcaagcagcaactccaaaaggatacgaacctgacgccagcgtcaccaagttggcagaacagtacgcaaaggaaaacggcaccaagctcctgctgaccaatgatccactggaagcggcacacggtggaaacgtgctcatcaccgatacctggatatccatgggtcaggaggaagagaagaagaaaaggctccaggcatttcagggctaccaggtcaccatgaaaactgccaaagtcgccgcatcagattggacttttttgcattgtctccccaggaagcctgaggaagtggatgatgaggtgttttactccccaagatcgctcgtgttccctgaagcagagaaccggaagtggactatcatggccgtcatggtcagtctgcttacggattacagccctcaacttcaaaagcctaagttt

SEQ ID NO: 17814 - DNA, 1062 bp, synthetic construct
  misc_feature 1..1062: note = source = /note="Description of Artificial Sequence: Synthetic coding sequence"
  source 1..1062: mol_type = other DNA
atgcttttcaacttgagaatattgctcaataacgctgcctttaggaatggacataactttatggtaagaaactttcggtgtggtcagcctctccagaacaaggttcagttaaagggcagggatctcctcactcttaaaaacttcacgggcgaggaaatcaagtacatgttatggttgtcagcagatctcaagtttagaatcaagcaaaaaggtgagtatctgcctctgctgcagggaaagtctttgggaatgatcttcgagaaaaggtccacgcgcacccggttgtcaactgagactggatttgcgctgctcggcggacatccgtgcttcctgaccacacaagatatacatcttggggtcaacgagtcgctgacagatacagcccgggtcttgtccagcatggcagacgccgttttggcaagagtttataaacaatcagatctcgatactctggccaaggaagcatctatacctattatcaacggtctcagtgacctttatcacccgatccagatactcgctgattatttgaccttgcaggagcactactcttctctcaaaggcctgacactgagctggataggagatggtaataatattctccactcaattatgatgtccgcagccaagttcggcatgcatcttcaggccgccacacccaaaggttacgagccggacgccagtgtgaccaaactggctgaacagtatgctaaagaaaacgggacaaagcttctactgactaatgatccgctggaagctgcccacggagggaacgtgctcattaccgatacatggatctccatggggcaagaggaagagaaaaagaaaaggctccaggcctttcagggttatcaagttactatgaaaaccgcaaaggtagccgcaagcgattggacctttctgcactgcttaccccggaagcccgaggaagttgatgacgaagtgttctactccccccggtctctcgtgtttcccgaggccgagaaccggaagtggaccatcatggccgtgatggtgtccctgctaactgattattccccccagttacagaaacccaagttt

SEQ ID NO: 17815 - DNA, 1062 bp, synthetic construct
  misc_feature 1..1062: note = source = /note="Description of Artificial Sequence: Synthetic coding sequence"
  source 1..1062: mol_type = other DNA
atgcttttcaatcttagaatcctgttgaacaacgctgcatttcgaaacggacataactttatggtccggaacttccgctgtggccagccactgcagaacaaagtgcagctcaaggggcgcgaccttctgaccctgaagaatttcactggggaagaaatcaagtatatgctgtggctgtctgctgatctgaagttccgcatcaagcagaagggagaatacctgccgctcctccaaggtaagagccttggaatgatcttcgagaagcggtcgaccagaacgcgcctgagcaccgaaaccggattcgcactgttgggcggacacccttgtttcctcactacccaagatatccacctcggagtgaacgagtcgctgacggacaccgcccgcgtcctgtcctcaatggcggacgcagtcttggcccgcgtgtacaagcagagcgatctggacacgctggccaaggaggcttccatcccgatcatcaacggcctgtcagatttgtaccacccgatccaaatcctcgctgattacctcaccctgcaagaacactactcgtctctcaagggcctgactctctcgtggatcggcgacggcaataacatactccacagcatcatgatgtcagcagcgaagtttggcatgcacctgcaggctgcgactccgaaaggatacgaacccgacgcgtcagtcaccaaacttgccgagcagtacgccaaggaaaatggaactaaactccttctgaccaacgacccgttggaggcagcgcacggcgggaacgtgctgattaccgacacttggatctccatgggtcaagaggaggaaaagaagaaaaggctgcaagcctttcaaggataccaggtgactatgaaaaccgccaaagtggcggcctctgattggaccttcctgcactgccttccaagaaagcccgaagaggtggacgatgaggtgttctactcgccccggtcgctggtctttccggaggcggagaaccggaaatggacgatcatggccgtgatggtgtcgctcttgactgattactcgcctcagctccagaagccgaagttc

SEQ ID NO: 17816 - DNA, 1062 bp, synthetic construct
  misc_feature 1..1062: note = source = /note="Description of Artificial Sequence: Synthetic coding sequence"
  source 1..1062: mol_type = other DNA
atgctgtttaatctgcgcatacttcttaacaacgccgcgtttaggaacggtcacaacttcatggtgcgcaatttcagatgtggacagcccctccagaacaaggtccagcttaaaggtcgtgatcttcttacccttaagaatttcacgggtgaagaaatcaagtacatgctttggctttcggcggatctcaagtttaggattaagcagaagggagagtatctgcccctgctgcaaggaaaaagccttggcatgatttttgagaagcgctcgactcggacccgtctttccactgaaactgggtttgcactcctggggggacatccttgttttcttactacccaagatatccacctcggggtcaacgaatcgttgactgataccgcacgcgtgctgtcctcgatggccgatgccgttttggctagagtatacaagcaatccgatctcgacactctggcaaaggaagcaagcattcccattatcaatggactgtcagatctgtaccatcctatacaaatcctggctgattaccttactcttcaagaacattacagctccttgaaggggcttacgttgtcctggataggcgatggaaataacattcttcatagcattatgatgtccgccgcaaagtttggcatgcatcttcaagctgcgaccccaaagggttacgaaccagatgcatcagtgaccaaactggcagaacagtacgctaaggagaacggcacgaaactccttttgactaatgacccgttggaagcggcacatggagggaacgtgctgatcactgacacttggatttcgatggggcaggaagaggagaaaaagaagagactgcaagcatttcaaggttaccaagtgacgatgaaaaccgccaaagtcgcagcatcggattggaccttcctgcactgccttcctcggaaacctgaggaggtggacgacgaagtgttctattcgccacggagtctggtgtttccggaagcagaaaacagaaagtggaccatcatggcggtcatggtgtcgctgctcaccgactacagccctcaactccagaagcccaagttt

SEQ ID NO: 17817 - DNA, 1062 bp, synthetic construct
  misc_feature 1..1062: note = source = /note="Description of Artificial Sequence: Synthetic coding sequence"
  source 1..1062: mol_type = other DNA
atgctgttcaatctgaggatcctgctcaacaatgccgccttcagaaatggacataacttcatggtccgcaattttcggtgcgggcagccattgcagaacaaggtccaactcaaggggcgggacctgctgacccttaagaatttcaccggcgaggaaatcaaatacatgctctggctgtcagcagatctgaagttcaggattaagcagaagggagaatacctgccgctgctgcagggaaagtcgctggggatgatctttgagaagcggtcaacccgcacccgactcagcaccgaaactggctttgctctgctcggaggccacccgtgcttcctgaccacccaggatatccacctgggagtgaacgagtcacttacggacactgcccgcgttctcagctccatggcagatgccgtgctggcgcgagtgtacaagcaaagcgacctggacactctcgctaaggaggcttcaatccctatcattaacggactgagtgacctgtaccatcctatccagatcctggcggattacttgactctgcaggaacattactcgtcactcaagggattgaccttgtcctggatcggagacggaaataacattctccactcgatcatgatgtcggccgcgaagttcggaatgcacctgcaggccgctactccaaagggatacgaaccggacgcgtcggtgactaaactggccgagcagtacgccaaagaaaatgggaccaagctgctcctgactaatgacccgctggaggccgcccatggaggaaatgtgctgatcactgatacctggatctccatgggtcaggaggaggagaagaaaaagcggctccaggccttccaagggtaccaggtgacgatgaaaaccgcaaaggtggcggcatcagactggacgtttctccattgtctcccgcgtaagccggaggaagtggatgacgaggtcttttactcgccgaggtcgctggtgttcccggaagccgagaatcgcaagtggaccatcatggccgtcatggtgtctctgctcactgactactcgccacaactgcagaagccaaaattc

SEQ ID NO: 17818 - DNA, 1062 bp, synthetic construct
  misc_feature 1..1062: note = source = /note="Description of Artificial Sequence: Synthetic coding sequence"
  source 1..1062: mol_type = other DNA
atgttgttcaacctgcggatcctgttgaataacgccgcattccgcaacggacacaacttcatggtgagaaactttaggtgcggacagccgttgcaaaacaaggtgcagctcaagggaagggacctgttgaccctgaaaaacttcacgggcgaagaaatcaagtatatgttgtggctctctgctgatctcaagttccgcatcaagcaaaagggtgaatacctgccgttgctgcagggcaaatcgctgggcatgatcttcgaaaagcgctccactagaactcgcctttccactgaaaccggctttgcgctcctcggtggacacccgtgcttcctgaccacgcaggacattcatctgggagtgaacgaatcactgactgacaccgcccgggtgctgtcgtccatggcggacgctgtgctcgccagagtctacaagcagtcggacttggatactctggccaaagaggcatcaatccctatcattaacgggctctcggacctctaccatccaatccaaatcttggcggattacctgaccctgcaagaacactactccagccttaagggactgactctgagctggatcggagacggcaacaatatcctccactccattatgatgagcgcagctaaattcgggatgcacctgcaggccgctaccccgaaagggtacgagccagatgcctcggtgactaagctggcggagcaatacgccaaggagaacggaaccaagctcctgctcaccaacgacccgctggaagcagcacacggcggaaacgtcttgatcaccgatacgtggatcagcatgggacaggaagaagagaaaaagaagcgcctgcaagcgtttcaagggtaccaggtgacgatgaaaactgctaaagtcgcagcctcagattggactttcctgcattgcctcccgagaaagccggaggaagtggacgacgaggtgttctactcgccccggtccctcgttttccctgaggcggagaatagaaagtggaccatcatggcagtgatggtgagcctgttgactgactacagcccgcagttgcagaagccaaaattc

SEQ ID NO: 17819 - DNA, 1062 bp, synthetic construct
  misc_feature 1..1062: note = source = /note="Description of Artificial Sequence: Synthetic coding sequence"
  source 1..1062: mol_type = other DNA
atgctgtttaatctgcggatcctgctcaacaatgccgccttcagaaatggacataacttcatggtgcgaaatttccgttgcggccagccgctgcagaacaaggtccagctcaagggccgtgatctgctaacattgaaaaattttaccggcgaggaaatcaagtatatgctctggctctcggccgaccttaagttccgtataaagcagaagggagagtacctaccattgttgcagggtaaaagtctcggaatgatctttgaaaagcgtagcaccaggacacgcctgtccacagaaaccggctttgctctcttgggcgggcacccctgttttcttacgacccaggatattcacctgggagtcaatgagtccttgactgacactgcccgggtcctgtcatctatggcagacgccgtgctggccagggtctacaaacagtcagacctggatactctcgccaaagaggccagtattccgattattaacgggctgtccgatctctaccacccgatccagatcctggccgactatctgacccttcaggagcactactcttcattaaagggacttacgttgagttggatcggggatggcaataatatcctccattctattatgatgtctgcagccaagttcggtatgcacctgcaagccgcgacgccaaagggctacgagcccgacgcctcagtgaccaagctggctgagcagtatgccaaggagaacgggaccaagctgttgctcaccaacgatccactggaagcggcgcatgggggaaacgtgctgattactgacacatggatatccatggggcaggaggaagaaaaaaagaaaaggctacaggctttccagggctatcaagtcaccatgaagaccgctaaggtcgcagcttccgactggactttcttgcactgtctcccccgtaagccagaggaagtggatgatgaagtgttttacagtcctcgttcactggtcttccctgaagcggagaaccgaaagtggacgatcatggcagtcatggtctcgctcctgactgattatagtcctcaactgcagaagcctaaattc

SEQ ID NO: 17820 - DNA, 1062 bp, synthetic construct
  misc_feature 1..1062: note = source = /note="Description of Artificial Sequence: Synthetic coding sequence"
  source 1..1062: mol_type = other DNA
atgcttttcaacctgcggatacttctgaataacgccgcttttcgtaacgggcacaacttcatggtacgaaacttcaggtgtggacaaccactgcaaaataaggtgcagctcaaggggcgtgacctgttgacgctgaaaaactttaccggcgaggagattaaatacatgctttggctcagcgccgacctgaagttcaggatcaagcagaagggggagtacctgcccttgttacaagggaagtccctaggtatgatattcgagaagagatccactagaacacgtcttagtacagagacgggatttgcactattgggcggccacccctgttttctcaccacacaggacattcatcttggcgtgaacgaaagcctgaccgatacagcaagggttcttagtagtatggccgatgccgttttagctcgtgtatacaaacagtctgatctagacactctggccaaggaggcttccatcccaatcattaacgggttgagtgacctgtaccaccccatccagatccttgctgattacctgacccttcaggagcattattccagcctgaaagggttaacgctgtcctggattggcgatggtaacaacatcttgcactccattatgatgtctgctgccaaatttgggatgcatctgcaggccgccacacctaagggctacgaacctgatgccagcgttaccaagttggccgaacagtacgcaaaggaaaatggcacgaaactcctgctgaccaatgaccctctggaggctgcgcatgggggaaacgtcttgatcaccgatacttggatcagcatgggacaggaggaggagaaaaaaaagcgactccaggcgtttcagggataccaggttaccatgaagacagctaaggtggccgcctcggactggacatttctgcactgcctgccgagaaaaccagaggaagtcgatgacgaggtgttctattccccaagatcactcgtcttccccgaggctgagaataggaagtggacaattatggctgtgatggtgtcactgctgaccgattattccccccagctgcagaagcctaagttc

SEQ ID NO: 17821 - DNA, 1062 bp, synthetic construct
  misc_feature 1..1062: note = source = /note="Description of Artificial Sequence: Synthetic coding sequence"
  source 1..1062: mol_type = other DNA
atgctcttcaacctgcgaattctgctaaacaatgccgcttttaggaatggccacaatttcatggttcgcaactttagatgtggccaaccgctgcagaacaaagtgcagctgaaaggccgcgatttgttgacactgaaaaatttcacgggcgaggaaatcaaatatatgctgtggttgagtgcagatttgaagtttagaatcaaacagaaaggagaataccttcctctccttcagggtaagagtttggggatgatctttgagaaacgaagtaccagaacaaggctgagcacagaaaccggattcgctttactcggcggacacccctgcttcctgacaacccaagacatacatctgggcgtcaatgaaagcctaaccgacactgctcgtgtgctatctagcatggcagatgcagtgctagccagagtttataaacagtccgacctcgacaccctggcaaaggaggcatctatccccatcatcaatggactgtctgatctctaccatcccatccagatcctcgccgactatctcactttgcaggaacattacagtagtcttaaggggttaactctttcctggatcggggacggcaataacatcctccacagtatcatgatgagcgctgcaaaattcggcatgcacctgcaagcagcgacacctaagggctacgagccagatgcatccgtgacgaaacttgccgagcagtacgccaaagagaatggaaccaagctgctcctgacaaatgatcctttagaagccgctcatggagggaacgtcctgattacagacacatggatttcaatgggacaagaagaagagaagaagaagaggttacaagcattccaaggatatcaggtcacaatgaaaaccgctaaggtcgctgcctctgactggacttttttgcactgtctgcctcgaaaaccggaagaagttgacgatgaggtgttttacagcccacgttccctggtttttcctgaagcagagaatagaaagtggaccattatggccgtgatggtaagcctcctgaccgattactccccgcaactgcagaagcctaagttt

SEQ ID NO: 17822 - DNA, 1062 bp, synthetic construct
  misc_feature 1..1062: note = source = /note="Description of Artificial Sequence: Synthetic coding sequence"
  source 1..1062: mol_type = other DNA
atgctgttcaacttaaggatcctgttaaataatgcggccttcaggaacggccataacttcatggttaggaatttcagatgtggccagcctctgcagaacaaagtccagcttaagggacgcgacttgcttacattaaagaattttacaggcgaggaaattaagtacatgctttggctgagcgccgacttgaagtttcgcatcaagcagaagggcgagtacttgccattgcttcagggaaagtctctgggcatgatctttgagaaaaggtccacgagaaccagactctctactgaaaccggatttgccctgctgggcggccacccgtgcttcctgactacacaggatatacacttgggtgtgaacgagtccctgactgacaccgcgcgtgtgctgagttcaatggccgacgcagttctggctcgggtgtacaagcaatctgacttagataccctggcaaaggaggcatcaattcccattatcaacggcttgtccgatctgtatcaccctatccagatattagccgattaccttacgctgcaagaacattattcttcgctgaagggtctgacgctctcctggattggcgatggcaataatattttgcattcaattatgatgagtgctgccaagttcggaatgcacctgcaagctgcgaccccaaaggggtatgagcccgacgcttctgttactaagctagctgaacagtatgctaaggaaaacgggacaaagctccttcttacaaacgaccccctcgaggctgcccacggcgggaatgtgctcattacagatacatggatttccatgggccaggaagaggaaaagaagaaaagacttcaggcctttcagggataccaggtcacaatgaagaccgccaaggtggctgcatccgattggacattccttcactgtctacctagaaaacctgaggaggtggatgatgaggtattttatagccccaggtccctggtttttcccgaggctgagaatagaaagtggacaataatggccgttatggtgagtctcttgaccgactattccccccaactgcaaaagcctaagttt

SEQ ID NO: 17823 - DNA, 1062 bp, synthetic construct
  misc_feature 1..1062: note = source = /note="Description of Artificial Sequence: Synthetic coding sequence"
  source 1..1062: mol_type = other DNA
atgctgttcaacttgcgtattctattgaataatgcagctttccgcaatggacataatttcatggtaagaaatttccgttgcggtcaacccctacagaataaggtgcaactaaaaggacgggacttacttacccttaagaatttcacaggagaagagataaaatacatgttgtggctatccgcggacttgaagtttaggattaaacaaaagggtgaatacctaccattgcttcaaggaaaatccctagggatgatctttgaaaaacgttcaactcggacacgcctgtccactgagactgggtttgcacttctaggaggacacccgtgttttcttacaacacaagatattcacctcggagtgaatgagtcgttgactgacacagcgagagttctctctagtatggcggatgcagtactcgcacgagtttataaacaatctgatttggatactttggctaaggaagcttccattccaatcattaatggtctctcggatttgtaccatccaatacaaattcttgctgattatctcactttgcaagagcactatagctctctaaagggcctgactctttcatggatcggagacggaaataacattctgcactcaataatgatgtcagcggctaagtttggaatgcatctacaagcagctacaccaaagggttacgaaccagacgcatcagttacgaaactcgctgagcagtacgcgaaggaaaatggaactaaacttctcctgacgaatgatccgttggaagcagcacacggtggaaatgttctgattacagatacttggatatcaatgggacaggaggaagagaagaaaaaacggcttcaagcttttcaaggatatcaggtaacaatgaagactgctaaagttgcggctagcgactggacatttctccattgccttccgcgtaaacctgaagaggttgatgatgaagttttttactcgccacggagtctcgtgtttccagaagcagaaaatagaaaatggacaatcatggccgttatggtttcattgctgacagactactcgccacagttgcagaagcctaaattt

SEQ ID NO: 17824 - DNA, 1062 bp, synthetic construct
  misc_feature 1..1062: note = source = /note="Description of Artificial Sequence: Synthetic coding sequence"
  source 1..1062: mol_type = other DNA
atgctgttcaacctgcggatcctgttgaataacgcggcattcaggaacgggcacaactttatggtgcgcaatttcagatgtggtcaaccgttgcagaacaaggtgcagctgaaggggcgcgatctcctcaccctgaagaatttcactggggaagagatcaagtacatgctgtggctgagcgcagaccttaagtttcgaattaagcagaagggtgagtacctccctctgctgcagggaaaatctctcggaatgatctttgagaaacgctccaccagaacccggctgtcgactgaaactggattcgcactgctcggcggtcacccgtgttttctgacgacccaggatatccatctgggcgtcaacgagtcgctgactgatactgcccgcgtgctgtcaagcatggcagatgccgtccttgctcgcgtgtacaagcaatcagatctcgacactctggcgaaggaagcctccattccgatcatcaacggattgtccgacctgtaccaccccattcagatcctggccgattacctcacgctgcaagaacactactcctcgctgaagggactgaccctgagctggattggcgacggaaacaatatcctgcactcaatcatgatgtcggccgcaaagttcggaatgcaccttcaggccgccactcctaaaggatatgagccagacgcctccgtgactaaacttgcggagcaatacgccaaggaaaatggtaccaagttgcttctgactaacgatccactcgaggccgcccatggcggaaacgtgttgatcaccgatacttggatctccatgggacaggaagaagaaaagaaaaagcggctgcaggcattccaggggtaccaggtcacgatgaaaactgcgaaggtggcggcctccgactggacgttcctccattgcctccctcggaaaccggaagaagtggatgacgaggtgttttacagccctcgctcactcgtgttcccagaagcggagaaccggaaatggaccatcatggcagtcatggtttcgctgcttactgactattccccgcagctccaaaagcctaagttc

SEQ ID NO: 17825 - DNA, 1062 bp, synthetic construct
  misc_feature 1..1062: note = source = /note="Description of Artificial Sequence: Synthetic coding sequence"
  source 1..1062: mol_type = other DNA
atgctctttaatctgcggattctgctcaacaacgcagcatttcgtaacggacacaacttcatggtcagaaactttagatgtgggcaacctcttcaaaacaaagtgcaattgaaaggtcgtgatctccttactcttaagaactttaccggtgaagagattaagtacatgctttggctgtccgcagacttgaagtttaggattaagcaaaaaggggaataccttccacttcttcaaggaaagtcgcttggaatgatctttgaaaagcgatctactagaaccaggctgtctaccgaaaccggctttgcactgctgggcgggcatccgtgctttcttactacccaagatatccatcttggtgtgaacgagtccttgaccgacaccgcacgggtgcttagctcaatggcagacgccgttttggcgagagtctacaaacagagcgatctcgataccttggcaaaagaagcatcaataccaataatcaacggacttagcgacctttaccaccccatccagatcttggccgattacctgacgctgcaagaacactactcctcgctgaagggccttaccctgtcctggatcggagatgggaataacatcctgcattcaatcatgatgtcagctgctaagtttggcatgcatctgcaggcagcaacccctaagggttacgaaccagatgcctcagtgaccaagctcgcagaacaatacgcaaaagaaaatggcaccaaactcctgctgactaacgaccctctcgaggcagcccacggtggaaacgtgctgatcactgacacgtggattagcatggggcaagaagaagagaagaagaaaagactccaagcatttcagggctatcaagtgaccatgaaaacggctaaggtggccgcgagcgattggacttttcttcattgtttgccaagaaagccagaggaagtggacgacgaagtcttttactccccacgctcccttgtctttcctgaggcagaaaatagaaagtggaccatcatggcagtcatggtttcgctgctgaccgattattcaccgcagctgcaaaagccgaagttc

SEQ ID NO: 17826 - DNA, 1062 bp, synthetic construct
  misc_feature 1..1062: note = source = /note="Description of Artificial Sequence: Synthetic coding sequence"
  source 1..1062: mol_type = other DNA
atgctgttcaatctccgaattcttcttaacaatgctgcctttaggaacggtcacaactttatggtgagaaactttagatgtggacaaccactccaaaacaaagtgcaactcaaggggcgcgacctgctgactctcaaaaactttactggggaggaaatcaaatacatgctgtggctctcggcagatctgaagtttcggattaaacaaaaaggagaataccttcctctgctgcaaggtaaatcgcttggtatgattttcgaaaagcgtagcaccagaacgcgcctttccaccgaaactgggtttgcgcttttgggagggcatccatgttttctgactacccaggatattcatctcggagttaacgaaagccttaccgatactgcaagagtgctgtccagcatggccgacgctgtgctggctagagtgtacaagcaatcggaccttgatactctggcaaaagaggcatccatccctattatcaacggtctttccgacttgtaccatccgattcaaatcttggcagactacctgactctgcaggaacattacagctctcttaagggcctgaccttgtcctggattggtgacgggaacaatattctccattccatcatgatgtcagctgcaaaattcggcatgcatcttcaagccgcaactccaaagggctacgaacctgatgcgtcggttaccaagctggccgagcagtacgcgaaggagaacggaactaaacttctgctcactaatgacccacttgaagcagctcatggcggaaacgtcctcataaccgatacctggatttccatgggacaggaggaggagaagaagaagagacttcaggcattccaggggtatcaggtgactatgaaaactgcaaaggtggcagctagcgactggacttttctgcattgccttccacggaagcctgaagaagtggatgacgaagtgttctacagtccacgtagcctggtctttccagaagcagagaacagaaaatggacgattatggcggtgatggtgagcctgctgaccgattactcaccccaactgcaaaagccaaaattc

SEQ ID NO: 17827 - DNA, 1062 bp, synthetic construct
  misc_feature 1..1062: note = source = /note="Description of Artificial Sequence: Synthetic coding sequence"
  source 1..1062: mol_type = other DNA
atgttgttcaacttaaggatactgctgaacaatgccgcatttcgaaacggacacaattttatggtcagaaacttccgatgcgggcaaccgcttcagaataaggtacagctgaaggggagggatctgctgacattgaaaaatttcaccggggaagaaatcaaatacatgctctggctcagcgccgatctgaagttcaggataaagcaaaagggtgagtacctccctctgctacaggggaaaagtttaggcatgatctttgaaaaaagaagtacgagaactagacttagcacagaaaccggatttgcactcctgggtggccacccttgtttcctgacgactcaggatatacatctgggagtaaatgagtctctcaccgatacagcccgggtcctgtctagtatggccgatgctgtcctggcacgcgtgtacaagcagtcggacttagataccctggctaaggaagcctctatccccattataaacggactctccgacttgtatcaccctattcagattcttgccgattacctgaccctgcaggagcactattcttccttaaaagggttaaccctgagttggatcggagatggcaataatattctgcactccatcatgatgtctgcagctaagttcgggatgcaccttcaggctgctacaccgaaggggtatgagcccgatgcgtctgtgacgaaactggcggagcagtacgcaaaggagaacggcaccaaattgctgctcaccaacgatccattggaagcggcacatggcggtaatgtgctgatcaccgatacgtggatatctatgggacaggaagaggagaagaagaaacgcctgcaggcgttccagggctaccaagtgaccatgaaaaccgccaaggtggcagcgagcgactggactttcctgcattgcctgcctagaaaaccagaggaggtggacgatgaagtgttttacagtccgcgttctctggtctttccagaggcagagaaccggaaatggacaatcatggctgtgatggtgtcgctgctgaccgactactcccctcagcttcagaagccgaagttc

SEQ ID NO: 17828 - DNA, 1062 bp, synthetic construct
  misc_feature 1..1062: note = source = /note="Description of Artificial Sequence: Synthetic coding sequence"
  source 1..1062: mol_type = other DNA
atgctatttaatctacgtatattactaaataatgcggcgtttcgtaatggtcataattttatggtacgaaattttcgatgtggtcaaccgttacaaaataaagtacaactaaaaggtcgagatttactaacgctaaaaaattttacgggtgaagaaataaaatatatgttatggctatcggcggatttaaaatttcgaataaaacaaaaaggtgaatatttaccgctactacaaggtaaatcgttaggtatgatatttgaaaaacgttcgacgcgaacgcgtctatcgacggaaacgggttttgcgttattaggtggtcatccgtgttttctaacgacgcaagatatacatttaggtgttaatgaatcgctaacggatacggcgcgtgtactatcgtcgatggcggatgcggttctagcgcgtgtatataaacaatcggatctagatacgctagcgaaagaagcgtcgataccgataataaatggtctatcggatctatatcatccgatacaaatattagcggattatctaacgttacaagaacattattcgtcgttaaaaggtttaacgctatcgtggataggtgatggtaataatatattacattcgataatgatgtcggcggcgaaatttggtatgcatctacaagcggcgacgccgaaaggttatgaaccggatgcgtcggttacgaaattagcggaacaatatgcgaaagaaaatggtacgaaactattactaacgaatgatccgttagaagcggcgcatggtggtaatgtactaataacggatacgtggatatcgatgggtcaagaagaagaaaaaaaaaaacgtttacaagcgtttcaaggttatcaagtaacgatgaaaacggcgaaagtagcggcgtcggattggacgtttttacattgtttaccgcgtaaaccggaagaagttgatgatgaagtattttattcgccgcgatcgttagtatttccggaagcggaaaatcgaaaatggacgataatggcggtaatggtttcgttattaacggattattcgccgcaattacaaaaaccgaaattt

SEQ ID NO: 17829 - DNA, 1062 bp, synthetic construct
  misc_feature 1..1062: note = source = /note="Description of Artificial Sequence: Synthetic coding sequence"
  source 1..1062: mol_type = other DNA
atgttgtttaatctgcgcattctcctgaacaacgcggccttccgcaacggccataacttcatggttcggaacttccgctgcggccagccgctgcagaacaaggtgcagctcaaagggcgggacctccttactctcaagaacttcaccggtgaggagatcaaatacatgctttggttgagcgcagacctgaagttccgaattaagcaaaagggcgagtacctgcctctgctgcagggaaagtcactgggaatgattttcgagaagagatcgaccaggacccgtctctccaccgagactggtttcgcgctgctcgggggtcatccatgcttcttgacgactcaggacatccacctgggagtcaacgagagcttgaccgacaccgcgcgtgtcttgtcatccatggccgacgctgtattggcgcgggtttacaagcagagcgaccttgataccttggccaaggaagcctcaatccccataattaatggtctctctgacttgtaccatcctatccagatcctggctgattatttgacactgcaggagcactactcctcgctgaaggggttgaccctctcgtggattggcgatgggaataacatacttcacagcatcatgatgagcgctgctaagtttggcatgcacctccaggctgctacccccaagggctatgagcccgacgcgtctgtaactaagttggctgagcagtacgccaaggagaacggcaccaagctgttgcttacgaacgaccccctggaggctgcccatgggggtaacgtacttatcacagatacctggatctctatggggcaggaggaggagaagaagaagcggctccaagctttccaaggttatcaggtcacaatgaagaccgcaaaggtggccgcgagcgactggaccttccttcactgcctccctcgtaagccggaggaggtcgacgacgaggtgttttactccccccgttctctagtcttccccgaagccgagaatcgcaagtggaccattatggccgtgatggtttcgctcctgacggattatagcccccagctgcagaagccaaagttc

SEQ ID NO: 17830 - DNA, 1062 bp, synthetic construct
  misc_feature 1..1062: note = source = /note="Description of Artificial Sequence: Synthetic coding sequence"
  source 1..1062: mol_type = other DNA
atgttgttcaatctgagaatcctgctcaacaatgcggcattccggaacggacacaatttcatggtgagaaacttcaggtgcggccagccgttgcaaaacaaagtgcagctgaagggccgggatctgcttactctgaagaactttactggagaggaaatcaaatacatgctgtggctgtcagcggatctcaagttccggatcaagcagaagggagagtacctccccctcctgcaaggcaaatccctggggatgatcttcgaaaagcggagcactaggacccgcctgagtactgagactggatttgcactcctggggggacacccgtgctttctgaccactcaggacattcatttgggcgtcaatgaaagcctgactgataccgcccgggtcttgtccagcatggccgatgccgtgctggcacgggtgtacaaacagtcagatttggataccctggcgaaggaggcctccattccaatcattaatggcctgtccgatctgtatcatccgatccagattctggcggactacctcactctgcaagagcattactcctccctgaagggactgacccttagctggatcggagacggcaacaacatcctgcatagcatcatgatgtcagctgcgaagttcgggatgcacctgcaggcggcgacccctaagggatatgaaccagacgcatccgtcaccaaactggcggagcaatacgccaaagaaaacgggacgaaactgttgcttaccaatgaccctttggaggccgcgcacggaggaaacgttctcatcacggacacctggatctcgatgggccaggaagaggaaaagaagaagcggctgcaagccttccagggataccaggtcactatgaaaacggcaaaggtggccgcctcggattggactttcctgcactgcctgcccaggaagccagaggaggtggacgacgaagtgttctactcgcccaggagccttgtgttcccggaagccgaaaatagaaagtggactataatggccgtgatggtgtccctgctcaccgattacagccctcagctgcagaagccaaagttc

SEQ ID NO: 17831 - DNA, 1062 bp, synthetic construct
  misc_feature 1..1062: note = source = /note="Description of Artificial Sequence: Synthetic coding sequence"
  source 1..1062: mol_type = other DNA
atgctttttaacctgcgaatcctgctgaacaatgctgcattccgaaacgggcacaattttatggtacgaaattttaggtgcggccagcccctgcagaataaggtccagctcaagggaagggacctgctcacgctcaagaattttactggtgaggaaatcaagtacatgctctggctgtcagcagacctcaagttcagaatcaagcagaagggcgaatacctgccactgctgcaagggaaaagtctcggcatgatattcgagaaacgatcaacacgcacacgactgtccacagaaactggattcgctctgctgggaggtcatccatgcttcctgaccacacaggatattcaccttggggtcaacgaatctctcacagacaccgctagagttctgagtagcatggcggatgccgtgctcgccagagtgtacaagcaaagcgatctggacacactcgcaaaggaggccagcatccctattatcaacgggctgagcgatctttatcacccaattcaaatcctcgctgattacctgaccctgcaagagcattatagctctctgaaaggcctgaccctttcttggatcggggacggtaataatatattgcactctatcatgatgagcgctgccaaattcggcatgcacctgcaggctgcaactcccaagggctatgagccagatgcatcagtaactaagttggcagaacaatatgccaaagagaacggcaccaaactgctgttgacaaatgatccccttgaagccgcacacggtggaaacgtgttgatcacagatacctggatttctatgggccaggaggaagagaagaagaagcgactccaggcctttcaagggtaccaggtgacaatgaaaaccgccaaagttgccgcttccgactggacttttcttcactgtctgccacggaagccggaagaggtggacgacgaggtgttttactctccccggtccctcgtgtttccagaggctgagaacagaaagtggaccattatggccgtaatggtaagcctgctgaccgactacagcccccagttgcagaaaccaaagttc

SEQ ID NO: 17832 - DNA, 1062 bp, synthetic construct
  misc_feature 1..1062: note = source = /note="Description of Artificial Sequence: Synthetic coding sequence"
  source 1..1062: mol_type = other DNA
atgttattcaatctaaggatcttgctgaataacgccgctttccggaacgggcataatttcatggttcggaatttcaggtgcgggcaaccactgcagaataaagttcagctgaagggccgcgatcttctaactctaaaaaacttcactggagaagaaataaagtatatgctctggctgagtgcagacctgaagtttagaatcaaacagaagggcgagtatctgcctctgctgcagggcaaatctctggggatgattttcgagaagaggagcaccaggacgaggctttccaccgagacaggtttcgcactacttggaggccacccctgcttcctcacaacccaggacatccatctgggcgtgaatgagtccctgacagatacagcgcgcgtgttgagctctatggccgacgccgtgctggctcgagtgtataagcagtccgacctggacactttggcgaaggaagcctccatccccataatcaacggcctgagcgacctgtaccatcccatccagatcttggccgattatctcaccctgcaggagcactattcttctttaaaagggcttacactctcctggatcggagacggtaataatatccttcactcgataatgatgagcgctgctaaattcggcatgcacctgcaagctgccacccctaaaggatacgagcccgacgcctccgtgacaaaactggcagaacagtacgccaaagagaatggcaccaaactgctgctgaccaacgatcctctggaagccgcacatggggggaacgtgctgataaccgacacttggatctcgatgggccaggaggaagaaaagaagaagcgactgcaggccttccagggctatcaggtgacgatgaaaactgcaaaggtagccgcatccgattggacattcctgcactgcctaccacgcaagcccgaagaggtggatgacgaggtgttttacagtccccgcagcctcgtgttccccgaagcagagaatagaaaatggacaatcatggctgtcatggtttcactgttgaccgactatagccctcagctgcagaagcccaaattt

SEQ ID NO: 17833 - DNA, 1062 bp, synthetic construct
  misc_feature 1..1062: note = source = /note="Description of Artificial Sequence: Synthetic coding sequence"
  source 1..1062: mol_type = other DNA
atgctgttcaatctgcggattctcctcaacaacgccgcttttcgcaatggacacaactttatggtgagaaatttccggtgtggacagcccctccaaaacaaggttcagctcaagggaagggacctgctcaccttgaagaacttcacgggggaggaaatcaagtacatgctgtggctctcggccgatttgaagttccgaatcaagcaaaagggcgaatacctgccgctgcttcagggtaagagccttggaatgatattcgagaaaagatcgactagaacgaggctgagcactgaaactggtttcgccctgcttggaggacatccatgcttcctgactactcaagatatccatctgggcgtgaatgagtccctgaccgatactgcccgggtcctctcatcgatggcggacgccgtgctggcccgggtctacaaacaatcggacctggacactctcgcgaaggaagcatcgatcccaatcatcaatggcctttcggacctgtaccacccgatccagatcctggcagactaccttacgctgcaggagcactactcctctttgaagggtttgacgttgtcatggatcggtgacggaaacaacatcttgcactctatcatgatgtccgccgccaaattcggaatgcatctgcaagccgccaccccgaagggctacgaaccagacgcgtcagtgaccaaattggcagaacagtacgctaaggaaaatggtaccaagctgctgctgactaatgatcctctggaggctgcgcatgggggaaacgtcttgatcactgatacttggattagcatgggacaggaggaagagaagaagaaacgcctccaagcgttccagggataccaggtgactatgaaaaccgctaaggtcgctgcgtccgattggaccttcctccactgtctcccgcgcaaaccggaggaggtcgatgatgaagtgttctattcgcccaggagcttggtgtttcctgaagccgagaaccgaaagtggaccatcatggcggtcatggtgagcctcctcactgactacagcccgcagttgcaaaagccgaagttt

SEQ ID NO: 17834 - DNA, 1062 bp, synthetic construct
  misc_feature 1..1062: note = source = /note="Description of Artificial Sequence: Synthetic coding sequence"
  source 1..1062: mol_type = other DNA
atgctcttcaatctccgcatcctcctgaataacgcggccttcaggaacgggcataactttatggtgaggaactttaggtgcggccagccgcttcagaacaaagtgcagttgaagggccgtgaccttctcaccctgaagaatttcaccggggaggagattaagtacatgctttggctgtccgccgacctcaagttccggatcaagcaaaagggagagtacctgccgctgctgcaaggcaagtccctcggaatgatctttgagaagcgcagcaccaggactcggctgtcgactgagactgggttcgccctcttgggcgggcacccatgcttcttgactacccaggacatccacctgggcgtcaacgagtccctgaccgatactgcccgggtcctgtcatccatggcggatgccgttctcgctcgggtgtacaaacaatcggacctcgataccctggccaaagaagcgagcatcccgatcatcaacggactctcagacctgtaccaccccatccaaatcttggccgactaccttacgctccaggaacattactcgagcctcaagggcctgacgttgtcatggatcggggacggtaacaacatcctgcactcgattatgatgtcggccgctaagttcggaatgcatctgcaagccgccaccccaaaaggctatgagcctgatgcgtcggtgaccaagctggccgaacagtacgcgaaggagaatgggaccaagctcctgctgactaacgacccactggaagcagctcacgggggcaacgtgctcatcacggacacctggatttccatgggacaggaagaagaaaagaaaaagcgcctccaggccttccaaggataccaagtgactatgaaaaccgcgaaggtcgctgcatcggactggactttcctccattgtttgcctcgcaagccggaagaggtcgacgatgaagtcttttactcgccaaggtccctggtgttcccggaggcagaaaaccggaagtggacgatcatggccgtgatggtgtcactcctgacggactactccccgcagctgcagaagccgaagttc

SEQ ID NO: 17835 - DNA, 1062 bp, synthetic construct
  misc_feature 1..1062: note = source = /note="Description of Artificial Sequence: Synthetic coding sequence"
  source 1..1062: mol_type = other DNA
atgctcttcaacctgagaatcctgctcaataacgccgccttccggaacggacataattttatggtccggaacttcagatgtgggcagccactgcaaaacaaagtgcagttaaaaggtagggatttgcttacactgaaaaatttcacaggggaggaaattaagtatatgctatggttatccgcagacctgaagtttaggattaagcagaaaggagagtatttacctctgctgcagggcaagtccttggggatgatctttgagaaacgatccactaggacccgactgtctactgagacaggctttgccctgcttggcgggcacccttgctttctgaccacccaagacattcacttgggggtcaacgaatcacttacagataccgcccgagtattgagcagtatggccgatgctgttctggcccgagtttacaaacagagcgacctggacacgctggcgaaggaagcaagtattcccatcatcaacgggttatccgatctgtatcatcctatccagattcttgccgactatctgacgttgcaggagcactattcctccctgaaaggattgaccctgtcctggattggcgacgggaataatatccttcactccataatgatgtctgccgctaagttcggcatgcatcttcaggcagcaacgcctaagggctatgagcccgatgcgtcggttacaaagcttgcagaacagtatgctaaagagaacggaactaagctgctgctgacaaatgaccccctggaggccgcacacggggggaacgtgctcattactgacacctggatatcgatgggacaagaggaggagaagaaaaagaggcttcaggcatttcaggggtatcaggtgacaatgaagactgcgaaggtggcagccagcgattggacatttctgcactgtctgccccgtaagccagaggaagttgatgatgaagtcttctactcaccacgctccctcgtctttccagaggcggagaaccggaagtggacaatcatggctgtgatggtttccctcctgacagactactcacctcagttgcagaagcctaagttc

SEQ ID NO: 17836 - DNA, 1062 bp, synthetic construct
  misc_feature 1..1062: note = source = /note="Description of Artificial Sequence: Synthetic coding sequence"
  source 1..1062: mol_type = other DNA
atgttgttcaaccttagaattttattaaacaatgcagctttcagaaacggacataatttcatggtccgtaatttcaggtgtggtcaaccgttacaaaacaaggtgcaattgaaagggcgtgacttacttacattaaagaactttacaggtgaggagatcaaatatatgctttggcttagtgcggatttaaagtttaggatcaaacaaaaaggggaatatttaccgctccttcaaggcaaaagtctaggaatgatttttgagaaaagatcaacaaggacgcgtttatcaactgaaaccggattcgctcttttaggcggacatccttgttttttaacaacacaagatattcatttgggcgttaatgaatcacttacagacacagcacgcgtgttatcttccatggccgatgcagtgcttgctcgcgtgtataagcaaagtgatttagacacattggcgaaagaagctagcattccgataattaacggcctttctgatctgtaccaccctattcaaattttggcggattatctaacactgcaagaacattatagttccctcaagggccttacgctgtcttggattggggatggcaataacattttacactcgattatgatgtcagctgctaaatttggtatgcaccttcaagctgcaacgccgaaaggctacgagccggatgcttcggtaacaaaacttgcagaacagtatgcaaaagagaatggcactaaattgttgcttacaaacgacccgcttgaggccgcgcatgggggtaatgttctcattactgatacgtggatttcgatggggcaggaagaagagaagaagaaaaggctgcaggcctttcagggatatcaggtgacaatgaagacagctaaagttgccgccagcgattggacgtttttgcattgcttaccgcgtaaaccggaggaggttgatgacgaagtgttttattcaccacgctctctcgtctttccggaggcggaaaaccgcaaatggacgatcatggctgtaatggtctctcttcttacagactattcgccgcagctgcaaaagccgaaattt

SEQ ID NO: 17837 - DNA, 1062 bp, synthetic construct
  misc_feature 1..1062: note = source = /note="Description of Artificial Sequence: Synthetic coding sequence"
  source 1..1062: mol_type = other DNA
atgcttttcaatctcaggatcctgcttaacaacgcagcctttagaaacggtcataactttatggtccggaattttcgttgcggtcagccactccagaataaggtgcaactgaagggtcgcgatcttctgacccttaagaactttactggagaagagattaagtatatgctttggctttccgctgatcttaagttcagaataaagcaaaagggcgaatatctgcccctgctgcagggcaagtcgctgggtatgatctttgaaaaacgatcgactagaaccagactgtcaactgaaaccggttttgcgcttctgggaggacatccgtgttttctgacgactcaagatattcacttgggtgtcaatgagtccctgaccgacactgcaagggtgctgtcgagcatggcagatgcggtgctggccagggtgtacaaacaaagtgatctggatacccttgccaaggaagcctccattccaattatcaacgggttgtccgacctgtaccatccgattcaaattctggcagattacctcacccttcaggaacactactcatcacttaagggccttaccctgtcctggatcggcgatggtaataacattctccatagcataatgatgtcggcagccaaatttggaatgcatctgcaagcggcaacccctaaaggctacgaacctgatgcgtcggtgactaagttggcagaacaatacgcaaaagagaacggaaccaaactgctgctgactaatgatccgcttgaggccgctcatggtggtaacgtgctgatcacggatacttggatttcgatgggtcaagaagaggaaaagaaaaagaggcttcaggcttttcaaggttaccaggtgactatgaaaaccgccaaggttgcagcatcggactggacctttcttcattgtctgcctagaaagccagaggaagtggatgacgaggtgttctactcccccaggtcgttggtgttcccagaggcagaaaatagaaagtggaccataatggcggttatggtcagcctcctgactgactactcgccccaactgcagaagccaaagttt

SEQ ID NO: 17838 - DNA, 1062 bp, synthetic construct
  misc_feature 1..1062: note = source = /note="Description of Artificial Sequence: Synthetic coding sequence"
  source 1..1062: mol_type = other DNA
atgctgttcaacctccgcatccttctgaacaatgccgctttccggaacggacataactttatggtgagaaatttccggtgtgggcaaccactgcagaacaaggtccagttgaaaggcagggatctgctgactcttaagaacttcactggcgaagaaatcaaatacatgctgtggttgagcgccgacctgaagttccggatcaagcagaaaggcgaatacctgccactgctgcaagggaagtccctcggaatgatctttgagaagagatccactcgcactcggctttccaccgaaactgggttcgctctcctcggtggtcacccgtgttttcttacgactcaggacattcatctgggagtgaatgaatcgcttactgatactgctcgggtcctgtcctcgatggcggacgcggtgctcgcgagagtgtacaagcaatccgaccttgacactcttgccaaagaggcatccatccccatcatcaacggactctctgacctttaccaccctatccagatcctcgccgattacttgaccttgcaggaacactactcgtctctgaaaggattgactctctcctggatcggtgatggaaacaacattctccactccattatgatgagcgcagcaaagttcggcatgcacctgcaggccgcaacccccaaagggtacgagccggatgcaagcgtgaccaagctggcagaacagtatgcgaaggagaatggaactaagctgctgcttaccaacgacccgctggaggccgcgcatggcggcaatgtgctgataactgacacctggatctcgatgggacaagaggaagagaagaagaaacgcttgcaggctttccaaggataccaggtgaccatgaaaaccgctaaggtggcggcgtccgactggacctttctgcactgcctgcctcggaagcctgaggaagttgacgacgaggtgttctactcgcctagaagtctcgtgtttccggaggccgaaaacagaaaatggactatcatggctgtcatggtatccctgctgaccgattacagcccgcagctccagaagccgaagttc

SEQ ID NO: 17839 - DNA, 1062 bp, synthetic construct
  misc_feature 1..1062: note = source = /note="Description of Artificial Sequence: Synthetic coding sequence"
  source 1..1062: mol_type = other DNA
atgctttttaacctcagaatcttgctcaacaacgcggcttttcgcaacggccacaacttcatggtgaggaatttcagatgcggacagccactacagaacaaagtgcaactgaagggccgagacttgctgacattgaagaactttaccggggaggaaatcaaatatatgctgtggctgtcagcagatctcaagttcaggatcaagcagaagggcgaatatctgcctctgctgcaaggaaaaagcttaggaatgatcttcgaaaagagatctactaggactaggctgtcaactgagaccggctttgctctgcttggaggccatccttgttttttaacaacccaagatatccacctgggcgtgaatgaaagcctcaccgatactgctcgcgtgctttcctctatggcagacgctgtgctggccagagtatacaaacagagcgatcttgacaccctcgctaaagaggcaagtattcctattatcaacggactcagcgatctttatcatccaatccagatactagcagattacctgacattgcaagagcattactcgagtctgaaaggcctgaccctgtcctggatcggtgacgggaacaatatccttcacagcattatgatgagcgccgctaagttcggcatgcacctgcaagctgcgacaccaaagggctacgagcccgatgcgtccgtcacaaaactagccgaacagtacgccaaggaaaacggaaccaagctgctcttgacaaacgacccactggaggcagcccacggcggaaacgtactaattaccgacacttggattagtatgggacaggaggaggaaaagaagaagaggcttcaggcatttcaaggctaccaggtgactatgaagacagccaaagtggcggctagcgattggacctttctgcactgtcttccacgaaagcccgaagaggtcgatgatgaggttttctactccccacgctcactggtgttcccggaagccgagaataggaagtggactataatggcagtcatggtttctctgctgaccgattatagtccacagctgcaaaaacctaaattt

SEQ ID NO: 17840 - DNA, 1062 bp, synthetic construct
  misc_feature 1..1062: note = source = /note="Description of Artificial Sequence: Synthetic coding sequence"
  source 1..1062: mol_type = other DNA
atgcttttcaatctgagaatcttgctgaacaatgccgcgttccgcaacggccacaatttcatggtccgcaattttcgctgtggccaaccactgcaaaacaaggtgcagctgaagggaagggacctgctcaccctcaagaatttcacgggggaggagattaagtacatgctctggctctccgccgatctcaagttccgaatcaagcagaagggggagtacctgccgctgctgcagggaaagagcctgggaatgatcttcgagaagcgctcaactaggacgcggctctcgactgaaaccggctttgctctgcttgggggtcacccgtgcttcctgaccacccaggacatccacctgggagtgaacgaatccttgaccgacaccgcccgcgtgctctcatctatggcggacgctgtcctggccagagtgtacaagcagtcggacctggacacccttgccaaggaggcctcaatcccgatcatcaacggattgtccgatctctaccatccaatccagatcctggccgactacctgactctccaggaacactacagctcgctcaaaggcctcaccctgagctggataggggacggcaacaatattcttcactcaatcatgatgtcagctgcgaagtttggaatgcatctgcaggccgccaccccgaaaggatacgaaccggacgcgtcggtcaccaaacttgccgagcagtacgcaaaggagaacggcaccaagctcctgctcaccaatgaccctctcgaggccgcacatggcggaaacgtgctgatcaccgatacttggattagcatgggccaagaggaggaaaagaaaaagcgattgcaggcgttccagggctaccaagtgacgatgaaaactgccaaggtcgcggctagcgattggactttcctgcattgcctcccacgcaagccagaagaggtcgatgatgaagtgttttactcaccgagatcgctggtgttccctgaagccgaaaatcgcaagtggactattatggcagtgatggtgagcttgttgaccgattactcgccgcaactgcagaagccgaagttc

SEQ ID NO: 17841 - DNA, 1062 bp, synthetic construct
  misc_feature 1..1062: note = source = /note="Description of Artificial Sequence: Synthetic coding sequence"
  source 1..1062: mol_type = other DNA
atgctctttaacctcagaattctgctgaacaacgcagcattccgtaacggtcacaatttcatggtccggaactttcggtgtggacaaccacttcaaaacaaagtgcaacttaaaggacgtgatcttctcaccctcaagaatttcaccggagaagagatcaagtacatgctctggctgtcagcagatctgaagtttcgtatcaagcaaaagggagagtacctgcctcttctccagggcaaatcgttgggtatgatcttcgaaaagcgatcaaccaggacccgtcttagcactgaaactggctttgcactccttgggggtcatccttgttttctgaccacgcaggatatccacctcggagtgaatgaatcattgaccgatactgccagagttctgtcgtcgatggctgatgcagtcctcgcccgcgtgtacaagcaatcggatctcgatactcttgcgaaggaagcctctatacctatcatcaacggtcttagcgacctgtaccatccaattcaaattcttgccgattacctgactctgcaggagcattattcgagccttaagggtctgactctgtcgtggatcggagatggaaacaatatactgcacagcatcatgatgtcagcagcgaagtttggtatgcatttgcaggccgcaaccccgaaaggatacgaacctgatgcgtcagtcaccaagctggccgagcagtacgcaaaggagaatggcactaagctccttctgaccaatgaccctctcgaagcggcacatggtggcaacgtgctgataacggacacttggatttccatgggccaggaagaggaaaagaaaaagcgcctgcaagcatttcagggataccaggttaccatgaaaaccgcaaaggtggccgcgtcggactggacttttttgcactgtctgcccaggaagccggaagaagtggatgatgaagtgttctactcacccaggtcgcttgtgttccctgaagcagaaaaccggaagtggactattatggctgtgatggtttcacttctgactgattattcaccacagcttcaaaagcccaaattt

SEQ ID NO: 17842 - DNA, 1062 bp, synthetic construct
  misc_feature 1..1062: note = source = /note="Description of Artificial Sequence: Synthetic coding sequence"
  source 1..1062: mol_type = other DNA
atgcttttcaacctccggatcctactgaataacgccgcttttcgaaacgggcacaactttatggttaggaacttcaggtgtggccagcccctgcagaataaggtgcagctgaaggggcgggatctgctgacactgaagaattttactggggaagagataaaatacatgctctggctgtccgcggatctcaagttccgcattaagcagaaaggggagtacctgccactgcttcaggggaaaagcctaggaatgatttttgaaaaaaggtccacacggacccgcctgagcaccgaaacgggcttcgccctgcttggcggccacccctgcttcctgaccacgcaggacatccatctcggcgtgaatgagtcactgaccgacacagccagggtactgagcagcatggcagatgcagtgttagcccgcgtatacaagcaatcagatctagacactctagctaaggaagccagtatcccaatcattaatggtctttccgatctttatcaccccatccagatcttagctgactacctcacgctccaggagcattactcgtccttgaaggggctcacgctgtcctggataggagatggcaacaatatcttgcattccatcatgatgtctgctgccaaattcggcatgcacttacaggcagccactccaaagggttatgaacctgatgcaagcgttacgaaactagcggagcagtatgcgaaggaaaacggtaccaagctcctgctgaccaacgatccacttgaggctgcccatgggggaaacgtcttgattaccgacacctggatatctatgggacaggaagaagaaaagaagaagagactgcaggcctttcaaggataccaagtgacaatgaagacggctaaggttgcagcatctgactggactttcctccactgcctcccccggaagcctgaagaagtcgacgatgaggtgttctactcccctagatccttggtgttcccagaggctgagaatcgtaagtggaccattatggctgtcatggtatcgttactgacagattactctccccaactccaaaagcccaaattc

SEQ ID NO: 17843 - DNA, 1062 bp, synthetic construct
  misc_feature 1..1062: note = source = /note="Description of Artificial Sequence: Synthetic coding sequence"
  source 1..1062: mol_type = other DNA
atgctgttcaacctgcggattcttttgaataatgccgcttttagaaatggtcacaatttcatggtgcgcaacttccgctgtggccaaccactgcagaacaaagtgcagttgaaaggacgcgacctgctcactctcaagaacttcactggggaggagatcaagtacatgctgtggctctcggcagatcttaagtttcgaattaagcaaaaaggagaatacctgcctcttcttcaggggaagtcgctcgggatgatttttgaaaagagaagcacccgtactcgcctgtcaactgaaactggatttgcacttttggggggacatccgtgcttccttaccacccaggatattcatctcggcgtcaacgaaagcctcactgatactgcgagagtcctctcatcgatggcagatgcagtcctggccagagtctacaaacaaagcgatcttgataccctggcaaaagaggcttccatacctataatcaatggtctgtccgatctttaccatccaattcagattctcgcagattaccttacgctccaagaacactactcctcgctcaagggactgaccctttcctggatcggggatggcaataacattcttcactccattatgatgtctgcggcaaagtttggtatgcatctgcaggcagccacccctaagggctacgaaccagacgcatcagtgactaaacttgcggaacagtacgcgaaagaaaatggtaccaagctgcttctgacgaatgaccctcttgaggctgcacatggtgggaacgtcctgataaccgatacgtggatctccatgggacaggaagaggagaagaagaagagattgcaagcattccaagggtaccaggtgaccatgaaaacggctaaggtcgcagcatcggattggaccttcctgcattgtttgccaaggaagcctgaagaagtggacgatgaggtgttttacagccctagatcattggtgtttccagaagcagaaaacagaaaatggaccataatggccgtcatggttagccttcttacggactactccccccaacttcaaaagcccaagttt

SEQ ID NO: 17844 - DNA, 1062 bp, synthetic construct
  misc_feature 1..1062: note = source = /note="Description of Artificial Sequence: Synthetic coding sequence"
  source 1..1062: mol_type = other DNA
atgctgtttaatctcaggattcttcttaacaatgcagcattccgcaacggacacaactttatggtgcgaaactttagatgcggacagccattgcagaacaaagtgcagttgaagggaagagatcttctgaccctgaaaaactttaccggggaggagatcaagtacatgctgtggctttccgcagatctgaagtttaggattaagcagaagggcgagtacctcccacttctccagggcaaatcgctgggtatgattttcgaaaagagaagcaccagaactcgcctgtccactgagactggctttgcactccttggaggacatccatgtttccttactactcaggatattcaccttggagtcaacgaatccctgaccgacaccgcgagagtgctttcgtcaatggcagatgccgtgctggctagagtgtacaagcagagcgatcttgacacccttgccaaggaagcctcgattcctattatcaacgggctgtccgatctctaccatcctatccaaatactggcggattaccttactttgcaggaacattacagctccctgaaggggttgaccctttcatggattggagatggcaacaatatcctgcattccatcatgatgagcgcagcgaagtttggaatgcacctgcaggccgcaacccctaagggttatgaaccggatgcgtccgtcaccaagctggctgagcagtacgcaaaggaaaacggaactaagctgctgctgaccaatgatccacttgaggccgcccacggtggcaatgtcctcattactgatacttggatttcaatgggacaagaggaagagaagaagaagcgcttgcaggcctttcagggttaccaggtgaccatgaaaactgctaaggtggccgcatctgattggacttttctgcattgccttccacgcaaacctgaagaagtggacgacgaggtgttctactcccctaggtcccttgtgtttcctgaagccgaaaatagaaaatggactataatggcagtgatggtgtcgctgttgaccgactacagcccacaactgcaaaagccgaagttc

SEQ ID NO: 17845 - DNA, 1062 bp, synthetic construct
  misc_feature 1..1062: note = source = /note="Description of Artificial Sequence: Synthetic coding sequence"
  source 1..1062: mol_type = other DNA
atgctgtttaatctcagaattctactgaataacgccgccttcagaaacggccacaatttcatggttcgcaattttaggtgcggacagccattgcagaacaaggtgcagttgaagggacgcgatctcctgacattgaagaacttcacgggtgaggagatcaagtacatgctctggctctccgctgacctgaagttcagaataaagcagaagggagagtacctgccgctgcttcaaggaaaatccttgggtatgatattcgaaaagcgcagtactcgcacaagattgagtaccgaaaccggctttgcattgttgggcggccacccctgcttcctgaccacacaagacatccacctcggagtgaacgagagcctgacggacacggcacgtgttctgtctagcatggcggatgctgtgctcgctcgggtgtataagcagtccgacttagatactctggcgaaagaggcatctatcccgatcatcaacggccttagcgatctgtaccatcccattcagatattggccgattaccttacactgcaggagcattattcgtcgctgaagggccttaccttaagctggattggcgatggtaataacatcttgcactcaataatgatgtccgcagctaagtttggtatgcacctgcaagccgctacaccaaagggctacgagccggatgcttcggtgaccaagttggctgagcagtatgcgaaagagaatggtaccaagctcctgttgaccaatgatccgctggaggctgctcacggaggaaatgtgctgataacggacacttggatttcgatgggacaagaggaagaaaaaaagaagagactacaggccttccagggctaccaagtgacgatgaagacagccaaagtggctgcatctgattggacatttctgcactgcctacccaggaaaccggaggaggtcgacgacgaggtgttttacagtccccgcagcctggtcttcccggaggccgagaatcgcaagtggaccattatggccgtgatggtctccctactgaccgattacagtcctcagctgcagaaaccaaaattc

SEQ ID NO: 17846 - DNA, 1062 bp, synthetic construct
  misc_feature 1..1062: note = source = /note="Description of Artificial Sequence: Synthetic coding sequence"
  source 1..1062: mol_type = other DNA
atgctcttcaatctgcgtatcctgctgaacaatgccgcctttcgaaacggccacaacttcatggtgagaaacttccggtgcggacagccgctccaaaacaaggtgcagcttaagggaagagatctgctgactcttaagaacttcaccggagaagagatcaagtatatgctgtggttgtctgctgacctgaagtttcgcatcaagcagaagggagaatacctgccgctgctgcagggcaagtccctgggcatgatcttcgagaaacgctccactcgcacccgcttgtcgaccgagactggattcgcgctgctgggaggacacccttgtttcctgaccactcaagacatccatctgggggtgaacgagtccctcacggataccgcgcgggtcctgtcctcgatggcagacgcagttttggcccgagtctataagcaatcggaccttgatacccttgcaaaggaagctagcatccccatcatcaacggattgagcgacctctaccacccgatccaaatcctggcagattacttgactctgcaagagcactactcatcactgaaggggctgactctctcctggatcggcgacggcaataacatcctgcattcaattatgatgtcggccgcgaagtttggaatgcatctgcaagccgcgactccgaaaggatacgaaccagatgcatccgttaccaaacttgcggaacagtacgccaaggaaaacggaactaagctgttgctgaccaacgatccactggaggcagcccacgggggaaatgtgttgattactgacacctggatttcaatgggtcaagaagaggaaaagaagaaacggctccaggcgtttcaggggtaccaggtgacgatgaaaaccgctaaagtcgcagcctctgactggacttttttgcattgccttccccggaagccggaagaagtggacgacgaagtgttctacagccctcggtcccttgtgttcccggaggctgaaaatcgcaaatggaccattatggccgtgatggtgagcctgctcacggactattcaccgcagctgcagaagcctaagttt

SEQ ID NO: 17847 - DNA, 1062 bp, synthetic construct
  misc_feature 1..1062: note = source = /note="Description of Artificial Sequence: Synthetic coding sequence"
  source 1..1062: mol_type = other DNA
atgctgtttaacctccggatcttgctgaataatgccgcgtttcggaacggacacaatttcatggttcggaactttaggtgtggtcaaccactgcaaaacaaggtgcagctcaaaggaagagacttgctgaccctgaaaaactttaccggagaagagattaagtacatgctgtggctcagcgcagatctgaagtttagaatcaagcaaaagggtgagtacctgcctcttctgcaggggaaatctctcggaatgattttcgaaaaacggtcgacccgaacccgcttgtcgactgaaactggatttgcactcctggggggacatccttgcttcctgactacccaagacattcatcttggagtcaacgagtcgctgaccgatactgcccgtgtgctctcatcaatggctgatgcagtgcttgcgcgagtgtacaaacaaagcgacctggatacgttggccaaggaggcatcaatccccattatcaacggactcagcgacctctaccatccaatacaaattctggccgattacctcaccctgcaagagcactactcgtcgctcaaggggcttactctctcgtggataggcgatgggaacaacatccttcattccataatgatgtcggcggctaagtttggtatgcacctccaagcagccactcctaagggatacgagcctgatgcgtccgtcaccaaacttgcagaacagtacgcgaaggaaaacggcaccaagctgcttcttaccaacgacccactggaagcagcacatgggggaaatgttctgataacggatacctggatctcgatgggacaggaagaggaaaagaagaagcggctccaggcatttcaaggttaccaagtgactatgaaaacggcaaaggtcgcagcatccgattggacttttctgcattgtctccctcggaaaccagaagaagtcgatgacgaagtgttctactccccacgttcgcttgtgtttcctgaggcagagaaccgtaaatggactattatggcagtcatggtgtcgctgctgactgattactcgccacaacttcagaagccaaagttt

SEQ ID NO: 17848 - DNA, 1062 bp, synthetic construct
  misc_feature 1..1062: note = source = /note="Description of Artificial Sequence: Synthetic coding sequence"
  source 1..1062: mol_type = other DNA
atgctcttcaacctgagaatccttctgaataacgcagcgtttcggaacggacacaacttcatggtccgcaatttcaggtgcggacaaccactccagaacaaggtccaactgaagggaagagatcttctgacgctcaagaactttaccggtgaagaaataaagtacatgctgtggctgtccgccgacctgaagttccggatcaagcaaaagggtgaatacctccccttgctccaaggcaaatcactcgggatgatcttcgagaagcgctcgactcgaacgaggctctcgaccgagactggatttgccttgctcggagggcatccgtgcttcctcacgacccaggatattcacctcggggtgaacgaatcactcactgacaccgcgagagtgctctctagcatggccgacgccgtcctcgccagagtgtacaaacagtcggacctcgacaccctggcaaaagaggcctccatcccgatcatcaacggtctgtccgatctgtaccacccaatccagattctggccgactacctgactctgcaagaacattactcctccttgaagggcctgaccctgagctggatcggagacggcaataacattctgcactcaattatgatgtcagcagcgaagttcggaatgcatttgcaagcggccactcctaaggggtacgagccggatgcaagcgttactaaactggccgagcaatacgcaaaggaaaacggaacgaagctgcttttgactaacgaccctctggaagccgcgcacggaggaaacgtgctcattaccgatacctggatctcaatgggacaggaggaagaaaagaagaagcggttgcaagcgtttcagggataccaggtgactatgaaaaccgcgaaggtggcggcatcagactggaccttcctgcattgcctccctcgtaaaccagaagaagtggacgacgaggtgttctattcgccgcgctccctcgtgtttccagaagcggaaaataggaagtggaccatcatggcagtgatggtgtcgctcctgactgactactccccccaactgcagaagcctaaattt

SEQ ID NO: 17849 - DNA, 1062 bp, synthetic construct
  misc_feature 1..1062: note = source = /note="Description of Artificial Sequence: Synthetic coding sequence"
  source 1..1062: mol_type = other DNA
atgctgttcaaccttaggattcttttgaataacgccgcctttcggaacggtcataactttatggtgcggaactttagatgtggccaaccacttcaaaacaaggtccagctgaaaggcagggatcttctcactcttaagaacttcactggagaagagattaagtacatgctgtggctttccgcagaccttaagtttcgtatcaagcaaaagggggaatacctgccactgctgcaaggaaagagccttggtatgattttcgaaaagcggtcgacgcgcaccagactcagcaccgaaactggttttgcgctgcttggtggtcatccgtgttttctcaccacccaagacatccatctgggagtgaacgaatccttgactgatactgcccgggtcctttcctcgatggcagatgcagtgctggcaagggtctacaagcagtcagaccttgatactctcgcaaaggaggcatccatcccgatcattaacggtctttctgatctctaccatccaatacagattcttgcagattaccttactctgcaagaacactacagctcgcttaagggacttacgctctcctggattggtgacggaaataacattctgcattcgattatgatgtcggcggcaaaattcggtatgcatctgcaagcagcaacgccaaaaggttacgaacccgacgcatcggtcaccaagctcgcagaacagtacgctaaggagaacggaacgaagttgctgctgaccaatgatccactcgaggcagctcacggcggcaatgtgttgattaccgatacttggatatcgatgggccaagaggaagaaaagaaaaagcgcctgcaagcattccagggataccaggtgaccatgaaaaccgccaaagtggctgcaagcgattggacctttctccattgcctcccacgaaaacccgaagaagtggacgatgaagtgttctacagccccagatcgcttgtctttccagaagcagagaatcgaaagtggactataatggcagtgatggtgtcgctgctgactgactactccccccaacttcaaaaacctaagttc

SEQ ID NO: 17850 - DNA, 1062 bp, synthetic construct; identical to SEQ ID NO: 17804
  misc_feature 1..1062: note = source = /note="Description of Artificial Sequence: Synthetic coding sequence"
  source 1..1062: mol_type = other DNA

SEQ ID NO: 17851 - DNA, 1062 bp, synthetic construct
  misc_feature 1..1062: note = source = /note="Description of Artificial Sequence: Synthetic coding sequence"
  source 1..1062: mol_type = other DNA
atgctgtttaatctgcgcatattgctcaacaacgccgcctttcggaacgggcacaactttatggtcagaaacttccgctgcggccaacctttacagaataaagtgcagctgaagggcagagacctgctgacgctcaagaattttaccggggaggagatcaaatatatgctgtggctctcagcggatctaaaatttagaattaagcagaaaggggagtatttgcccttgctccaaggtaaaagccttggaatgatcttcgaaaagaggtcaacacggactcgcctctccactgaaacagggttcgctttattaggcggccacccctgtttccttaccacccaggacatccacttaggcgtaaacgagtccttaactgatacagcccgggtcctatccagcatggctgacgccgttcttgcacgagtatacaagcaatccgatttggatacactggccaaggaagcctccatcccaattatcaatggactgtcggacttgtaccaccccattcagatcctggccgactacctgacactgcaggaacattactcctctctcaaaggccttacactctcatggattggagacggtaacaacattcttcactccattatgatgtctgccgccaagttcgggatgcacctgcaggccgctactcctaaggggtacgaaccagacgctagcgtgacgaagttggctgagcaatatgcaaaggagaatggaacaaagctcctgctcacaaacgacccactggaggccgcgcatggcggtaatgtccttattactgacacttggatttccatgggccaggaggaggagaagaagaaacggctgcaggcattccaggggtatcaggtgaccatgaagactgcaaaggtggctgcctccgattggacctttctacattgcctcccaagaaaacctgaagaggtcgatgatgaagtgttttattctcccagaagcttggtgttccctgaggccgagaaccggaagtggactatcatggccgtgatggtgagcctcctaaccgattactcaccacagctccagaaacccaagttt

SEQ ID NO: 17852 - DNA, 1062 bp, synthetic construct
  misc_feature 1..1062: note = source = /note="Description of Artificial Sequence: Synthetic coding sequence"
  source 1..1062: mol_type = other DNA
atgctctttaatctgaggatcctgctcaataatgctgccttccggaacggccacaatttcatggtgagaaatttccgatgcggccagcccctccagaacaaggtccaattgaagggacgggacctcttgactctcaagaacttcaccggagaagagatcaaatacatgctgtggttgtccgcagacctcaagttccgtatcaagcaaaagggagaatacctcccgcttctccagggcaagtccctcggaatgattttcgaaaagagaagcactcgcacgcgcctgtcgactgaaactggatttgcactgctcgggggacatccgtgtttcctgactactcaggacattcatctcggcgtcaacgaatcactcaccgacaccgcccgcgtcctgtccagcatggccgatgcggtcctggccagagtttacaagcagtcggacctcgacactctggcaaaagaggcatcgatcccgattatcaatggactctccgatctctaccatcctattcagatcctggcagactacctgaccctgcaggagcattactcatctctgaagggtcttaccctgtcgtggatcggcgatggcaacaatatcctgcatagcattatgatgtcagcagcaaagtttgggatgcacctccaggccgcaaccccgaagggctacgagccggacgctagcgtgactaaacttgcggaacagtacgcgaaagagaacggaacgaaactgctccttacgaatgatcccttggaagctgcgcacggaggtaatgttctgatcaccgatacttggatctccatgggacaggaagaagagaaaaagaagcggctccaggcctttcaagggtaccaggtgaccatgaaaaccgccaaggtggccgcgtcagattggacttttctccattgcctcccccgcaagcccgaagaggtggacgacgaggtgttctactcaccaagatcactggttttcccggaggcagagaatcggaagtggaccatcatggccgtcatggtgtccttgctgaccgattactccccgcagctgcaaaagccgaagttc

SEQ ID NO: 17853 - DNA, 1062 bp, synthetic construct
  misc_feature 1..1062: note = source = /note="Description of Artificial Sequence: Synthetic coding sequence"
  source 1..1062: mol_type = other DNA
atgttatttaatctccggattttacttaacaacgccgccttccgaaatggccataatttcatggtccgtaattttcgatgtggccagcctttgcagaataaggttcaactgaaaggccgggacttactgaccctgaaaaactttactggtgaggaaattaagtatatgctatggttatctgccgacctgaagtttagaataaagcagaagggtgagtacttaccgctgctgcaaggtaagtcgttaggcatgatcttcgagaagcgctccactcggactcgcctgagtactgagacaggcttcgccctcctgggtggccacccttgtttcctgaccacccaggacatccacctgggagtgaatgagtctttgaccgacaccgcaagggtcctttcaagcatggctgacgcagtgctggcccgggtctacaagcagagcgacctggataccctggccaaagaggcgagcattcctataataaatggactctcggacctttatcaccctatccaaatactcgcggactacctgacactacaagagcactactcctccttaaaggggttgacattgagttggataggagacgggaataatatcttgcactccattatgatgtctgctgctaagttcggcatgcatcttcaggctgctacacccaaggggtacgaacccgatgcatcagtgacgaaattggcagagcagtacgccaaggaaaatggaaccaagttgctgttgactaacgaccctctggaggccgcacacggtggcaatgttctgatcacagacacatggatctcgatgggccaggaggaggagaagaagaaacgactgcaggccttccagggctaccaagtaactatgaagacagccaaggttgcagccagcgattggacattcttgcactgtctgccacgcaagccagaagaggtcgacgacgaggtattctactctccgcggagtctggtctttcctgaggcggagaatcgtaaatggaccattatggccgtgatggttagtctgttgactgattattctccacaactgcaaaaacccaagttc

SEQ ID NO: 17854 - DNA, 1062 bp, synthetic construct
  misc_feature 1..1062: note = source = /note="Description of Artificial Sequence: Synthetic coding sequence"
  source 1..1062: mol_type = other DNA
atgttgtttaaccttcgcatcctgttaaataacgccgcttttaggaacggccataattttatggtacgtaactttagatgtggccagcctcttcagaacaaggttcaactgaagggcagagacctgttaacactgaagaacttcaccggagaagagatcaagtatatgctgtggctatcggccgacctgaaattccgtatcaaacagaaaggggaatatttgcctctgctgcagggtaagagcttaggaatgattttcgaaaagagaagcacaagaacaagactctcgactgaaaccggttttgcattactgggggggcatccctgctttctcactactcaagatatccacttgggcgtgaacgagtcacttaccgacaccgcaagagtgctgtccagtatggccgatgctgtgctcgcccgggtctacaagcagagcgatctggataccctcgctaaggaagcttccataccgatcataaacgggttgtctgatttgtaccatcccattcagatccttgcagattacctgactctacaggaacactactctagcctcaagggtctgaccctctcgtggatcggcgacgggaataatatattacactcaatcatgatgtccgctgctaaatttggcatgcatttgcaggccgccactcccaaggggtatgaacccgatgcaagtgtgaccaagctggcggaacagtacgccaaagagaacggaaccaaactgctgctcacgaacgaccccttggaggccgcccatggcgggaatgtcctgatcactgatacatggatctctatgggtcaggaggaggaaaaaaagaaacggctccaggcctttcaggggtaccaggtgaccatgaagacggccaaagtagccgctagtgactggacttttctgcactgcctgccccgtaagcccgaagaggttgacgacgaagttttttactctcctcgttcactcgtgttccccgaggccgaaaacaggaagtggaccatcatggctgtcatggtatctctactgacggactactccccccagttacagaagcctaaattt

SEQ ID NO: 17855 - DNA, 1062 bp, synthetic construct
  misc_feature 1..1062: note = source = /note="Description of Artificial Sequence: Synthetic coding sequence"
  source 1..1062: mol_type = other DNA
atgctttttaatctgcgtatcctccttaataatgctgctttccgaaacggtcacaactttatggttagaaattttcgatgcggacaacctttgcaaaataaagttcaattgaaaggtcgtgaccttctgaccctaaaaaacttcactggtgaggagatcaagtatatgctgtggcttagtgctgaccttaaattcaggatcaagcaaaaaggggaataccttccattactgcaaggtaaaagcttaggtatgatttttgaaaagcggagtacccgaacgcgtctttcgacggagaccggatttgctcttctcggtggtcatccttgcttcctgactacccaggacatacatcttggagtgaacgaatccttgacggacactgcaagggtattgtcgagcatggctgacgcagtacttgctagagtttacaagcagtctgacttggacacacttgctaaggaagcatccattcctattatcaacggattgtctgatttgtatcatccaatccaaatcctggccgattaccttacattgcaagagcactattcttccctcaaggggttaactttgtcctggattggtgatggtaacaacatactccattcgataatgatgagtgccgccaagtttggcatgcatcttcaagctgcaacacctaaaggttacgagccagatgcttcagtgaccaagctggcagagcaatacgccaaggagaatggaactaaactcttgctaactaacgatccattagaggcagcgcatggcggtaatgtgctgatcacggatacgtggatttccatgggccaagaagaagaaaaaaagaagaggcttcaagcattccaagggtatcaggttactatgaaaacagctaaagttgcggcatcggattggacttttctccactgcttgccgaggaagccggaggaggtggatgacgaggtcttttactctcctcgatctttggttttcccagaggctgaaaacaggaagtggactatcatggcagtcatggtctctcttttgaccgattactcacctcagcttcagaagcccaaattc

SEQ ID NO: 17856 - DNA, 1062 bp, synthetic construct
  misc_feature 1..1062: note = source = /note="Description of Artificial Sequence: Synthetic coding sequence"
  source 1..1062: mol_type = other DNA
atgctattcaacctgagaattttgctcaataacgcagcttttcgtaacgggcacaattttatggtccgcaacttccgatgcggacagcccttacaaaacaaggtgcagctgaagggccgtgatctgctcacattgaaaaacttcaccggcgaagagatcaaatacatgctgtggctgtctgctgacttaaaatttcggatcaagcaaaaaggcgagtaccttcccttgctgcagggcaaaagcctgggaatgatatttgagaagcggtcaacccgcacccggttgtcgacggagacagggtttgcactattaggcgggcacccctgtttcctcactacccaggacatccacctgggagtgaatgagtcactcaccgatactgctagagtgctgtcatccatggcagacgctgtgctcgcaagggtatataagcagagtgatctggacacattggcgaaggaagcgtcgatcccgatcatcaacgggctcagtgatctgtaccacccaatccagattctggcagattacttgaccctgcaggaacattattcatccttgaaaggtctgactctttcctggattggtgatgggaataacatcctgcacagcatcatgatgagtgcagccaagttcgggatgcatcttcaggccgccacgccgaagggatatgagcccgacgccagtgtgaccaagttagctgagcagtatgccaaggaaaatggtaccaaactcctgctgaccaacgaccctttggaggcggcacacggcgggaacgtcctgatcaccgatacatggatcagtatggggcaggaggaagagaagaaaaagcggctgcaggcattccaaggttaccaggtgaccatgaaaaccgctaaagtggcagctagcgactggacctttctacactgtttgcctaggaagcccgaggaggttgacgatgaggtgttctattcaccgagatctctggtgtttcctgaggcggagaatcgcaagtggacaatcatggccgtgatggtgagtctgctaacggattattcccctcagttacagaagccgaaattt

SEQ ID NO: 17857 - DNA, 1062 bp, synthetic construct
  misc_feature 1..1062: note = source = /note="Description of Artificial Sequence: Synthetic coding sequence"
  source 1..1062: mol_type = other DNA
atgctgttcaacctgcgcatcctgcttaacaacgcagcttttcggaatggccataactttatggtcaggaactttagatgtggacaaccactgcagaacaaggtgcaactcaaaggacgcgatctcctcactctcaaaaactttaccggcgaagaaatcaagtacatgctgtggctgagtgccgatcttaagttccgcatcaagcagaagggagaatacctgccgctgctccagggaaagagcctgggaatgatttttgaaaaacggtccacccggaccagactgtcgacggaaaccgggttcgcactgcttggcggacatccttgctttctcaccactcaggatatccacctgggtgtgaacgaatccctgacggatacggcacgagtcctgtccagcatggccgatgccgtgttggcgcgcgtgtacaaacagtcagacctggacactctcgccaaggaggcttcgataccgatcatcaacggcctctccgacttgtaccaccccatccagattcttgccgactacctgactctgcaagaacactactcgtcgttgaaagggcttaccctgtcgtggatcggagatgggaacaatatcctccactccatcatgatgtctgctgctaagttcggcatgcatctccaagccgctacgccgaagggctacgagcctgacgcatcagtcaccaagctggccgagcagtacgcaaaagagaacggaactaagctcctcctcaccaacgaccccctcgaagcggcccacggcggaaacgtgttgatcacggacacttggatctcgatgggacaggaggaggagaaaaagaaacgcctgcaagcctttcaaggataccaagtgaccatgaaaacggccaaggtggctgcttccgactggaccttccttcactgcctgccccggaaacccgaagaggtggacgacgaggtgttctactcaccgcgcagcctcgtgttcccagaagcagaaaacaggaagtggacgattatggcggtcatggtgtcactcctgaccgactactccccacagctgcagaagccgaagttt

SEQ ID NO: 17858 - DNA, 1062 bp, synthetic construct
  misc_feature 1..1062: note = source = /note="Description of Artificial Sequence: Synthetic coding sequence"
  source 1..1062: mol_type = other DNA
atgctctttaatctgaggattctgctgaacaacgcagcctttaggaacgggcataattttatggtgagaaactttagatgcggccagcctctccagaataaggtgcagcttaaggggagagatctgctgactctgaagaactttactggggaagaaatcaagtatatgctgtggctctctgcagatctcaagtttcgcataaaacagaaaggggagtaccttcccctgctgcaggggaagtccctcgggatgatttttgaaaaacgcagcacccgcacaaggttgagcaccgagacgggcttcgccctcttgggaggccacccctgcttcctgactacacaggacatccacctcggcgtcaatgagtccctcaccgacaccgccagggtgcttagcagtatggctgatgcagtgctggctcgggtctacaagcagagcgacctggacaccctcgccaaggaagcttctataccaatcattaacggtctgagcgacctgtatcaccctatccagattcttgcggattacctgacactgcaggagcattacagctctctcaaagggttgacacttagctggataggagatgggaataacattctgcactccatcatgatgagtgccgccaaattcggcatgcacctgcaggcggcgacccccaaaggctatgagcctgatgcctctgttaccaagttggcagaacagtacgccaaggagaatggaactaagttgctgctgacaaacgatcccctggaggccgcccacggtggaaacgttcttatcaccgacacatggatctctatgggacaggaagaggagaagaaaaagcggctccaggctttccagggctaccaggttaccatgaagacagccaaagtagctgcctctgattggacctttctgcattgcctgccccgcaagcccgaagaggttgacgatgaagtgttctatagcccccgctcactggtttttccagaagccgagaataggaaatggacaattatggccgtgatggtatctttgctgacagactactcaccccagctgcagaaaccgaagttc

SEQ ID NO: 17859 - DNA, 1062 bp, synthetic construct
  misc_feature 1..1062: note = source = /note="Description of Artificial Sequence: Synthetic coding sequence"
  source 1..1062: mol_type = other DNA
atgttattcaatcttagaatccttcttaataatgccgctttccgaaatgggcacaatttcatggtgaggaattttcgttgcggacagcctctgcaaaataaagttcagctgaaaggaagggaccttttaacactgaagaacttcacaggagaggagatcaaatatatgctgtggctctctgcagacttgaagttcagaataaaacagaaaggggagtatctgcccctgcttcagggaaaatcacttggaatgatctttgagaaaaggagcactcggacccgcttgagcacagaaactggattcgccctgctgggggggcacccttgtttcttgacaacgcaggacatccaccttggtgtcaatgaatccctcaccgatactgcgagagttctgagtagtatggcagatgcagtcctggcaagggtgtacaaacagagcgatcttgacacactagcaaaagaggcgtccattcctatcatcaacggcctgtccgacctgtaccaccccatccagatcctggctgactatctaactctgcaggaacattacagttcactaaaaggtctcactctatcttggattggagatggaaacaatatcctccattctattatgatgtccgccgctaagtttggcatgcacttgcaggccgctacccctaagggatatgaaccggacgcaagtgtgacgaagttggctgagcagtacgccaaagagaatggtacgaagttgctcctgactaatgatcccctcgaggctgctcacggaggaaatgtgctaattacagatacctggattagcatgggccaggaggaagagaagaagaagcgcctccaggcttttcagggttaccaggtgaccatgaagaccgcaaaagtggccgcatctgattggacatttttacattgtcttcctcggaagcccgaagaggtcgatgatgaagtgttttactctccccgctcactggtatttccagaagctgagaataggaaatggacaatcatggcagttatggtctctctgctgacggattacagcccccagttgcagaagcccaaattc

SEQ ID NO: 17860 - DNA, 1062 bp, synthetic construct
  misc_feature 1..1062: note = source = /note="Description of Artificial Sequence: Synthetic coding sequence"
  source 1..1062: mol_type = other DNA
atgttgtttaaccttaggatcctgctgaacaatgcagcatttcggaacgggcataactttatggtacggaactttaggtgcggtcagccgcttcagaacaaggttcagcttaagggtcgtgatcttttgaccctgaagaactttacgggggaggaaatcaaatacatgctgtggctttccgcagacctcaaattcagaataaagcagaaaggcgaatacttgccactcctgcaagggaagagccttggtatgattttcgagaagcgatcaaccaggacgcgcctttcgaccgaaaccgggtttgccctgctcggaggacatccgtgtttcttgaccacccaggatatacatctgggcgtcaacgaatcacttactgacactgcacgcgtcctctcgtcgatggcggacgctgtgctcgcccgtgtgtacaagcaatcggatcttgataccttggcaaaagaagcatcaatccccatcattaatggactttcggacctgtaccacccaattcaaatactcgcggactacttgacgcttcaggaacattacagctcgcttaagggcctgactctctcctggattggagacggcaacaatatccttcactcgattatgatgtccgcggccaagtttggtatgcaccttcaagctgcaacccctaagggctacgagccggatgcatcggtaactaaactggcagaacaatatgcaaaggaaaatggtaccaagctgctcctgaccaatgatcctcttgaagcagcacacgggggtaacgtgctgattactgatacttggatctccatgggccaggaggaagaaaagaagaaacgcctccaagcattccaggggtaccaagtcactatgaaaactgcaaaggtcgcagcaagtgattggacctttcttcattgccttccccgaaagcctgaggaagtggatgatgaggtcttttactccccacgatcgcttgtgttccctgaagctgagaatcgtaagtggaccatcatggcggtcatggtgtcactcctgactgattattcccctcagctccaaaagcccaaattt

SEQ ID NO: 17861 - DNA, 1062 bp, synthetic construct
  misc_feature 1..1062: note = source = /note="Description of Artificial Sequence: Synthetic coding sequence"
  source 1..1062: mol_type = other DNA
atgctttttaatttgcgtattctcctgaacaacgccgcctttaggaacggacacaatttcatggtccgtaacttcaggtgtggccagccccttcaaaataaggtgcagttgaagggtagggacctgctgactcttaaaaattttactggcgaggagatcaaatacatgctgtggctgagtgccgacttgaagttccgcatcaagcagaaaggcgagtacctccctctcttgcaaggcaagtcactgggtatgatcttcgaaaagagatcaacacgtactagattgagcactgaaaccggctttgccctgctgggtggtcatccctgcttccttaccacacaagacatccatctcggcgtcaacgagagtctcacagacacagcccgtgtattgagcagtatggctgatgccgtgctggctagagtgtataagcaaagcgacctggataccctcgccaaggaagcctcaatcccaataataaatggactttctgatctttaccaccctattcaaattctggccgattacctgactctccaggagcactattccagcctgaagggtctgaccctctcatggatcggagatggaaacaatatcctgcactctataatgatgtccgctgctaaattcggtatgcacctccaggccgccacacccaagggatatgagcctgacgcaagcgtcacaaagcttgccgagcagtacgcaaaggagaacggcacaaagctgcttctgactaatgacccactggaggccgctcatggaggcaatgtgctgatcactgatacctggatctccatgggacaagaagaggagaagaagaaaagactccaggctttccagggctatcaagttacaatgaagaccgcaaaggtggcagctagcgactggacattcctgcattgtcttcccaggaaaccagaagaggtggacgatgaggttttttattctccccgctcacttgtgttccctgaagccgagaacaggaagtggactataatggctgtcatggtttctctcctgacagactactccccacaactccagaagcccaagttc

SEQ ID NO: 17862 - DNA, 1062 bp, synthetic construct
  misc_feature 1..1062: note = source = /note="Description of Artificial Sequence: Synthetic coding sequence"
  source 1..1062: mol_type = other DNA
atgctgtttaatctgcgcattctcttgaacaacgcggcattccgcaacggacacaacttcatggtgcgcaactttagatgtggacaacctctgcagaataaagtgcagctcaaggggcgagatcttctgaccctgaagaatttcactggtgaggagattaagtacatgctgtggttgagcgccgaccttaagtttcggattaagcaaaagggagaatacctccctctgctccaaggcaagtcgcttggcatgattttcgagaagcggagcaccaggactcgcctgagcaccgaaaccggttttgcactgcttggaggtcatccttgctttctgactactcaggacatccacctgggcgtcaatgaaagccttaccgataccgcacgagttttgagctcaatggcagatgccgtgctcgcccgggtctataaacaatcggatctcgatactctggcgaaggaagccagcattccgatcattaatggcctttccgacttgtaccatcctatccagattcttgccgactacctgacgctgcaggagcattactcttctcttaagggactcactctctcatggatcggggatggtaacaacatcctgcattcaatcatgatgtcggctgccaagtttggtatgcatctccaggcggccacccctaagggatacgagcctgacgcgagtgtcacgaagttggcggagcaatacgcaaaggaaaacggaaccaagctgttgctcactaacgatccccttgaagctgcacacggcgggaacgtgctcattactgatacctggatttcgatgggacaggaagaagaaaagaaaaaacggctgcaagcgttccaaggctaccaagtgaccatgaaaaccgctaaggtggcagcatcggattggacttttttgcattgccttcctcgcaagccagaagaagttgatgacgaagtgttttactcgcccagatcactcgtgtttcccgaggctgaaaatcgtaaatggaccatcatggccgttatggtcagcctgttgactgattactccccacagcttcaaaaacccaagttc

SEQ ID NO: 17863 - DNA, 1062 bp, synthetic construct
  misc_feature 1..1062: note = source = /note="Description of Artificial Sequence: Synthetic coding sequence"
  source 1..1062: mol_type = other DNA
atgctgttcaatctccgcattctgctgaacaacgcagcttttcgcaatggccacaactttatggtgcgaaatttcagatgcgggcagccactacagaacaaagtacagcttaagggacgggacctcctgacattaaaaaattttactggggaagaaatcaagtacatgttgtggctcagcgctgacctgaagtttaggatcaaacagaagggggagtatctaccgctcctccagggtaaaagcctggggatgattttcgagaaaaggagtacacgaacaagactctccacagaaaccggatttgccttactcggcggccatccttgctttttgacaacccaggatattcatctgggagtgaacgagagtcttactgacaccgcccgtgtcttaagttctatggctgacgcagtactggcacgcgtgtataaacagtctgaccttgacactctggcaaaggaagcatcaattcctattattaacgggctctcggatctctatcatcctattcagatcctggcagattatctgacattgcaggaacactattccagcttgaaagggctgacccttagttggataggcgatgggaacaacatactgcactcaatcatgatgtctgcagccaagttcggcatgcacctccaggctgctaccccaaagggatatgagcccgacgcatctgtcaccaagctggcggagcagtacgcaaaggaaaatgggaccaagctgcttcttactaacgatcctctggaagcagcacatggtgggaatgttctcattacagacacatggatctccatggggcaggaggaggagaagaagaagagactgcaagcgtttcagggctaccaggtgacaatgaagacagcaaaagtggctgcctcggattggactttccttcactgtctgcctcggaaacccgaggaggtagacgacgaggtattctatagtcctcggagtcttgtattccctgaagcagagaatagaaaatggactataatggctgttatggtttccttgttgacagattattcgccacagctgcagaagcctaaattc

SEQ ID NO: 17864 - DNA, 1062 bp, synthetic construct
  misc_feature 1..1062: note = source = /note="Description of Artificial Sequence: Synthetic coding sequence"
  source 1..1062: mol_type = other DNA
atgttgttcaacttgcgtatcctgctgaataacgccgccttccgcaatggacacaactttatggttagaaacttccggtgcggacagccactgcagaataaggtgcaactcaagggtcgcgacctcctcaccctcaagaacttcactggcgaggagattaagtacatgctctggctgtcggcggatctgaagttcaggatcaaacagaagggagagtatctcccactgctgcaagggaaatcgctgggaatgatttttgaaaaacggagcaccagaactaggctgtcgaccgaaactggattcgcactcctgggaggtcacccgtgctttctcactacgcaggatatacatcttggcgtcaatgagtccctgactgacactgccagagtgctctcctctatggccgacgcagtcctggcacgcgtgtacaaacagtcagacttggatactcttgccaaggaagcctcaatcccgatcatcaacggactttcggatctgtaccaccctatccaaatcttggctgactaccttactctgcaggaacactactcctctctgaagggactgactctctcctggatcggagatggcaacaacatcctgcattcgatcatgatgtctgccgctaagttcggaatgcacttgcaggcagcgacccccaaaggatacgagccggacgcatccgtcaccaagctcgccgagcagtacgccaaggaaaacggaactaaacttctcctcactaacgacccattggaagcagcacatggaggaaacgtcctcatcaccgacacctggatttcgatggggcaagaggaggaaaagaagaagagactgcaggccttccagggataccaggtcactatgaaaacggctaaagttgccgcctcggattggactttcctgcactgtctgcctcggaagcccgaggaagtggatgatgaggtgttctactcaccgcggtcgctggtgtttccggaggcggaaaatcggaagtggaccatcatggcagtgatggtatcgctgttgacggactactcaccgcagctccagaagccgaaattt

SEQ ID NO: 17865 - DNA, 1062 bp, synthetic construct
  misc_feature 1..1062: note = source = /note="Description of Artificial Sequence: Synthetic coding sequence"
  source 1..1062: mol_type = other DNA
atgctgtttaaccttagaattcttctgaataacgcagcatttcggaacggacataactttatggtgcgtaatttcagatgtggacaaccactgcaaaacaaagtccagcttaagggtcgggacctccttaccctcaagaatttcacgggggaagagattaagtacatgttgtggctctcagcagaccttaagttccgaataaagcagaagggagagtacctccctctgctccagggaaaatcacttggtatgatctttgaaaagcgcagcactcggactcggctttcgactgaaacgggttttgcccttcttgggggacacccttgttttctgaccactcaagacattcatctcggagtgaatgagtcactcactgataccgcaagagtgctttcgtctatggcagacgcggtgctggctagagtctataagcaatccgatttggatacgttggccaaggaagcatccattcctatcatcaacggacttagcgacctgtaccaccccattcagatcttggcagattacctgactctgcaagagcactactcgtccctcaaagggctcacccttagctggataggagatggtaacaacattctgcattcaatcatgatgagcgcagccaagtttggcatgcatcttcaagcagcaaccccaaaggggtacgaaccagacgcatcagtgaccaaactcgcggagcaatacgcgaaagaaaatgggactaaacttcttctcaccaacgacccactggaagcagcccatggagggaatgtgctgattactgatacctggatctccatgggacaggaagaagaaaagaagaagagacttcaagccttccagggttaccaggttactatgaaaacggccaaggtcgcagcaagcgactggacctttctgcattgccttccaaggaagcctgaggaagttgatgatgaagtcttttactcaccgcgctcacttgtgtttccagaagccgaaaataggaagtggactatcatggcagtgatggtgtcacttctgaccgactactcgccacagcttcaaaagccaaagttt

SEQ ID NO: 17866 - DNA, 1062 bp, synthetic construct
  misc_feature 1..1062: note = source = /note="Description of Artificial Sequence: Synthetic coding sequence"
  source 1..1062: mol_type = other DNA
atgttgtttaacctgaggatacttctcaataatgctgctttcaggaacggtcataacttcatggttcggaactttcgctgtgggcagcctttgcagaacaaggtgcagctgaaaggtagggacctgttgacgcttaagaacttcacaggagaagagataaagtatatgctgtggctgagcgccgacctcaagttccgaatcaagcagaaaggagaatacctgcctctcttgcaaggcaaaagcctgggaatgatcttcgagaaaagaagtactagaacaagactgagcacagaaactggtttcgcactgttgggcgggcacccctgcttcctgaccacacaggacatacatcttggtgtaaacgaaagtcttactgacactgctcgcgtgctttcctcaatggcagacgccgtgcttgcccgcgtctacaagcagtctgacttggatacgctcgctaaagaggcctcaattccgatcatcaacgggctgagtgatctgtatcaccccatacagatcctggccgactatctgactcttcaggaacactatagtagtttgaaggggctgacactgtcatggatcggagatggaaacaacatcctgcacagtatcatgatgtcagctgcgaaatttggcatgcatctgcaggctgcaactcctaaaggctatgagccagacgcaagcgtaactaagttggccgagcagtacgctaaagaaaatggtactaagctgctcttgacaaatgatccactcgaagccgcccacggaggtaacgtgctgattacagatacatggatcagtatggggcaagaggaggaaaagaagaagcggctgcaggcattccagggatatcaggtaacaatgaagacagcaaaggtggccgcgtctgattggacctttctccattgcctgccacggaagccggaggaagttgacgatgaggtcttttatagccccagaagtcttgtgttccccgaggcagagaacaggaaatggaccatcatggctgtcatggttagcttgctcacagactacagccctcagttgcagaagccaaagttt

SEQ ID NO: 17867 - DNA, 1062 bp, synthetic construct
  misc_feature 1..1062: note = source = /note="Description of Artificial Sequence: Synthetic coding sequence"
  source 1..1062: mol_type = other DNA
atgctgttcaacctgagaattctgttgaataatgccgccttcaggaatgggcataacttcatggtcagaaatttccggtgcgggcagccactacaaaataaggtgcagcttaaaggccgtgacctacttactctgaagaatttcaccggggaggaaattaaatatatgttgtggctgagtgccgaccttaaatttcggatcaaacagaagggtgagtatttgcctcttcttcaaggaaagagtctcggtatgatttttgagaagcgcagcacgcgtacacgattatcaactgagacaggtttcgccttgctgggaggccatccttgcttcctcacgacgcaggatattcacctgggcgtgaacgagtctctgaccgataccgctcgggtcctcagttctatggctgatgccgtactggcacgggtctataagcaaagcgatcttgacacattagccaaggaagcctcaattccaatcataaacgggctgtcagatttataccaccctatacagatccttgcggattatctaacgcttcaagagcattattcctccctgaagggcctcacacttagctggataggagatggtaacaacattctgcattcgattatgatgtctgctgctaagttcggtatgcatttacaggcagccactccaaaaggctacgagcctgacgcatctgtcacaaaactggcagagcagtatgccaaagagaatggcactaagctcctgctgacaaatgaccctctggaagccgcccacggaggtaacgtcctgattacggatacatggatcagcatgggacaggaggaggagaaaaaaaagaggctgcaggccttccagggataccaggtgactatgaaaacggctaaagtggctgcatctgactggaccttccttcactgtcttccgagaaagcctgaggaggttgacgacgaggtcttttactctccgaggtctctggtgtttccggaggccgagaatcggaagtggacgatcatggcggttatggtttcactgttaacagattatagcccccagctgcagaagccgaagttt

SEQ ID NO: 17868 - DNA, 1062 bp, synthetic construct
  misc_feature 1..1062: note = source = /note="Description of Artificial Sequence: Synthetic coding sequence"
  source 1..1062: mol_type = other DNA
atgctctttaacctgagaattctactgaataacgccgcattccgaaacgggcataattttatggtgcgaaattttcgttgcggccagccactgcagaacaaggtacagctaaagggaagagatctgctgacgcttaagaatttcactggagaagaaatcaagtacatgctgtggctgagtgccgacttaaagtttaggatcaagcagaaaggcgagtatttgcctttgttgcagggaaaatcactcgggatgatcttcgagaaacgaagcacccgcacacgactttctacagagacagggtttgcgttgcttggcgggcacccttgctttctgactacacaggatatccatttgggagtcaacgagagcctgaccgacactgccagagtgctgtcctctatggcggatgccgtgctcgctagggtgtacaaacaatccgacctagataccctggccaaagaagcttccattccaattattaatggtctgagcgatctctaccatccaattcagatacttgccgactacttgaccttacaggagcattattcgtccctaaagggtctgacgctgtcttggataggggatggaaataatattcttcattccatcatgatgagcgctgctaaattcgggatgcacctgcaagccgccactccgaagggctatgagcctgacgcctctgtgactaagctggccgagcagtatgcaaaggagaacggaaccaagctactcttaaccaacgacccactcgaagccgcccacggaggaaatgtcctgataacagatacctggatctcgatgggacaggaagaggagaaaaagaaaaggctgcaggccttccaaggttatcaagtaacaatgaagacagcgaaggtggccgcttctgattggaccttccttcattgcctgccccggaagcccgaggaagtagacgacgaagtattctattctccacggtccctcgtttttcctgaggcggagaacagaaaatggacaatcatggcggtaatggtttcgcttctgacagactactcccctcagctgcaaaagccgaaattt

SEQ ID NO: 17869 - DNA, 1062 bp, synthetic construct
  misc_feature 1..1062: note = source = /note="Description of Artificial Sequence: Synthetic coding sequence"
  source 1..1062: mol_type = other DNA
atgttgtttaatcttcggatcttgttgaataacgcagcgtttaggaatggtcacaactttatggtgcggaacttcaggtgcggccagccgcttcagaataaagtccagctgaagggaagagatcttctgaccctgaagaatttcactggagaagaaatcaaatacatgctttggctgtccgctgatcttaagttccgcattaaacagaagggggaataccttccgctccttcagggaaaatccctggggatgattttcgagaagagaagcactcgcaccagacttagcaccgaaaccggttttgcactgcttggcggacatccttgctttctcaccacccaagatatacatctcggtgtcaatgagtcgctgaccgacaccgcacgcgtcctcagcagcatggccgacgcagtgcttgcacgggtgtacaaacagagcgaccttgataccctggcaaaggaagcatcgatcccaattatcaacggactgtcggacctgtaccaccctattcagatccttgcagattatctgaccctgcaagagcattactcgtcattgaaaggacttactttgtcctggataggagatggtaacaacatccttcatagtattatgatgtcggcagcaaagttcggaatgcatcttcaggcagcaacccctaagggttacgaaccagacgcatcagtgaccaagttggcagaacagtacgcgaaggagaatgggactaagctcctccttaccaacgatccacttgaagcggcccacggagggaacgtgttgatcactgatacctggatctcgatgggacaagaagaggagaaaaagaagcgactccaagcatttcaaggttaccaagtcactatgaaaacggcgaaggttgcagcatcggactggacctttctgcactgtctgcctcgaaagcctgaggaagtcgatgacgaggtgttttactcgccgcggtcgctggtctttccagaagccgaaaatcgaaaatggactattatggccgtgatggtgagcctcctgactgattactcgcctcaactgcagaagcctaaattc

SEQ ID NO: 17870 - DNA, 1062 bp, synthetic construct
  misc_feature 1..1062: note = source = /note="Description of Artificial Sequence: Synthetic coding sequence"
  source 1..1062: mol_type = other DNA
atgctatttaatctgcgcattctactgaacaatgccgcgttccgtaacggacacaatttcatggttaggaatttcagatgtggccagccgctgcagaataaggtgcaacttaagggcagagacctgctgacgctgaagaactttacaggggaggaaattaagtacatgctgtggttgtctgccgacctgaagtttcgcattaaacagaagggcgaatacctgcctctgttgcagggaaagagcctggggatgatcttcgagaaaaggtccacaaggaccagactgtccaccgagaccggatttgcgctgctagggggacacccgtgttttctgacaacccaggatatccatctgggcgtgaacgagtcattgacggataccgcccgtgtgctgtctagtatggccgacgcggtgctggcgagggtgtataaacagtccgatctggacactttagccaaggaagcatccataccaatcatcaatggccttagtgacttataccatccgatccagatactcgcagattacctgaccctacaagaacactattcttccctgaagggtctgactttgtcctggattggcgacggtaacaatatacttcactcaataatgatgtctgctgctaaattcgggatgcacctccaggctgcgaccccgaagggctacgaacctgatgccagtgtgacaaaactggccgagcagtatgccaaagagaacggtaccaaactgttactgacaaacgacccccttgaggctgctcatggcgggaatgtgctcataaccgatacatggattagcatgggacaggaggaggagaagaaaaaacgcctgcaggccttccaggggtaccaagtaacgatgaaaactgccaaggtggcggcaagtgattggacctttctgcactgtctgccccgaaagcccgaagaggtggatgatgaggtgttctattccccgcgcagtcttgtctttcctgaagctgaaaaccggaagtggaccataatggctgtgatggtcagtctgctcactgactactccccgcagctccagaagccaaaattc

SEQ ID NO: 17871 - DNA, 1062 bp, synthetic construct
  misc_feature 1..1062: note = source = /note="Description of Artificial Sequence: Synthetic coding sequence"
  source 1..1062: mol_type = other DNA
atgctgttcaacctcagaatcctgctgaataatgcggccttcagaaatggccataattttatggtgagaaatttcaggtgtggacaaccactgcaaaacaaggtccaactcaaaggccgcgatttgctcacactgaaaaacttcactggtgaggagatcaaatatatgctgtggctgagcgcggatctgaaattcagaatcaagcagaagggagagtaccttcctctgttgcagggaaagagtttgggtatgatcttcgagaaaaggtctactaggaccaggctttcaaccgaaaccggcttcgccctgctcggaggacacccttgtttcctcaccacgcaggacattcatcttggcgtcaacgagtccctgactgacactgcgagagtgcttagcagcatggctgatgccgtccttgcccgcgtgtacaagcagtctgacctggacaccctggctaaggaagcttcaatacctattatcaatggactctctgatctgtaccacccgatacagatactggccgactacctgactctgcaagaacactattccagtctgaagggcttgaccctgagctggatcggtgacggtaataatatcttgcatagcatcatgatgtctgccgctaagtttggtatgcacctgcaggcggccacccccaagggctatgagcccgacgcttctgtgactaaactcgcggagcaatacgctaaggagaacggcacgaagcttctgcttactaacgatcctttggaagccgcgcacggcggcaacgtactgatcactgacacatggatctccatgggtcaagaggaagagaagaaaaagaggctccaggccttccaaggttaccaggtgacaatgaaaaccgcaaaggtagcggcctccgactggacctttctccactgcctcccccgcaagccggaagaagtggatgatgaagtgttctacagcccaagatctctggtcttccccgaagcagagaaccgcaaatggaccattatggccgtgatggtcagtctgctcaccgattattccccccagttgcagaagcccaagttc

SEQ ID NO: 17872 - DNA, 1356 bp, synthetic construct
  misc_feature 1..1356: note = source = /note="Description of Artificial Sequence: Synthetic coding sequence"
  source 1..1356: mol_type = other DNA
atgtctaccgctgtgttggagaaccctggactcggcaggaaactgtccgactttggccaagagacaagttatattgaggacaactgcaaccagaacggtgcaatttcccttattttctcccttaaagaggaggtaggcgcactggccaaggtcctgcgcctcttcgaagagaacgatgttaacctgacacacatcgaaagtaggcccagtcgtctcaagaaggacgaatacgagttctttacccacctggataagagatccctacccgctctgaccaacatcataaagattctgaggcatgatattggagctacagtgcacgaattgagccgcgacaaaaagaaggacacagtcccatggttcccgagaactattcaggagcttgatagatttgccaatcaaattctgtcatacggcgcggagctagacgctgatcaccccggatttaaagaccccgtgtatagagcgcggaggaagcagtttgccgatatcgcctataactaccggcacggccagccaattccaagagttgaatatatggaggaagaaaagaaaacctggggaaccgtgtttaagaccctcaaatcactttacaaaactcacgcctgctacgagtataatcacatctttcctctgctggagaaatattgtgggttccatgaagataatattcctcaactggaagacgtcagccagtttctgcagacctgtaccggattcaggcttcgacctgtggccggcttgttgtcgagcagagatttccttggaggattagctttccgggtgttccattgcacacagtacatccgtcacgggagcaagcctatgtacacaccagaaccggatatctgccacgaattacttggtcacgttcccctcttttcagacagaagtttcgcccagttttcacaggagattgggcttgcttccctgggagctcctgatgaatacatcgagaaactggctaccatttactggttcaccgtcgagtttggcctttgtaagcagggcgatagcatcaaggcctacggggctgggttactgagtagtttcggagagctgcaatattgcctttctgaaaagccaaaactgctgccactggaattggagaagaccgccatccagaactatactgttacggagttccagcccctctactacgtggcagagtcctttaacgatgccaaagagaaggttaggaacttcgccgcaacaataccccggccattttccgtaagatacgacccctacacccagcggatcgaagtgctggataacacccaacaacttaagatccttgcagactctatcaactctgaaatcggcattctgtgtagcgctctgcaaaaaatcaag

SEQ ID NO: 17873 - DNA, 1356 bp, synthetic construct
  misc_feature 1..1356: note = source = /note="Description of Artificial Sequence: Synthetic coding sequence"
  source 1..1356: mol_type = other DNA
atgagcaccgcggtgctggagaatccgggtctggggagaaaactgtcagattttggtcaggaaacctcctatatcgaggacaactgcaaccaaaatggcgctataagcctgatcttcagcctgaaggaagaagtaggggctcttgcaaaagtgctgcggctgtttgaggagaatgacgtgaatctcacccacatagaaagccgccctagccgtctgaaaaaagacgaatacgagtttttcacccacttggataaacggtccctgcccgcactgacgaatatcattaagattcttcgccatgatattggtgccacggtgcacgagctgagccgggacaaaaaaaaggataccgtgccttggttcccacgcactattcaggagctggatcgcttcgctaatcagatcctgagctatggcgcagagctggatgccgaccatcctggcttcaaggatcctgtttatcgcgcccgtcgtaaacagttcgctgatatcgcctacaattatcgccatggacagccgatcccgcgcgtggagtacatggaagaggagaaaaagacatggggtactgttttcaagactctcaagagcctgtataagacccacgcgtgttatgagtacaatcacattttcccactgcttgaaaaatattgcggcttccacgaagacaacatcccgcagctggaggatgtctcccagtttcttcagacgtgcaccggatttaggctgcgcccagtcgcggggctgcttagcagcagggactttctaggtggtctggcttttcgcgtgttccattgtactcaatacatcaggcacggttccaaaccgatgtataccccagaaccagacatctgtcacgagctactgggccacgttccgttgtttagcgaccgcagcttcgcccaattctctcaagaaattggattggcttctctaggagcgcctgacgagtacatagaaaagctggcgacgatttattggttcacggtggaatttggtctgtgtaagcagggcgatagcatcaaggcatatggcgccggcctcctaagctcattcggggagctgcagtactgtctgagtgaaaaaccaaagctgctgccactggaactggagaagaccgcgatacaaaactacaccgttactgagttccagcccctgtattacgtggccgagagtttcaatgacgctaaagaaaaagtccgtaattttgctgccactattcctcgcccattctctgtgcgttacgatccatatacgcagcgaatcgaggtgctggataacacgcagcagctaaagatcctggctgacagcattaactctgaaattggaattctgtgctcggctctccagaaaataaag

SEQ ID NO: 17874 - DNA, 1356 bp, synthetic construct
  misc_feature 1..1356: note = source = /note="Description of Artificial Sequence: Synthetic coding sequence"
  source 1..1356: mol_type = other DNA
atgtctacggctgtcctggagaatcctggtctgggacgcaagctgagcgatttcgggcaggagaccagctacattgaggacaactgtaaccagaatggtgccatatctttaattttttcattgaaggaggaggttggtgcattggctaaggttttgaggctgttcgaggaaaacgacgtcaatcttactcacattgagtctcgcccatcccgcctaaaaaaagacgaatatgagttcttcacccacctggataaacgcagcctcccagccctgacaaatataattaaaattttaagacatgacatcggcgcgacggtgcatgagctgtcaagagataaaaaaaaagatacagtgccatggttcccccgcaccatacaggagctcgatcgcttcgcaaaccaaatcctgagttatggcgcagaactggacgctgaccatcccggattcaaggaccccgtctaccgcgcccgaagaaagcaatttgccgacatcgcttataactacagacatggccaaccgattccccgagtagaatacatggaggaggaaaagaagacttggggaactgtcttcaagactttaaagtcgctttataaaacccacgcctgttacgagtacaatcacatttttccactgttagagaagtattgcggatttcatgaggataatattcctcagctggaggatgttagccagttcttgcagacctgcacgggctttcggctgcggcctgtggctggactcctttcaagcagagactttcttggcggcctggccttccgcgtgttccattgtactcagtatatccgacacgggtcaaagccaatgtacacacccgaaccagatatttgtcacgaattgctgggccatgtgccactgttctcagataggagctttgctcaattctctcaagaaatcggcctggccagcctaggagcaccagacgaatacattgagaaactggctacaatctactggttcacggtcgagtttgggttgtgtaagcagggcgattccatcaaagcttacggggcagggctgctttcgtctttcggtgaattgcaatattgcctttctgagaaaccaaagctgctacctctggaacttgaaaagaccgctatccaaaactacacggtaacggaatttcaacccctctactacgtggcggagtccttcaatgacgctaaggagaaggtccgcaatttcgcagcaactattccacggcctttctcggtgcggtatgacccgtatacgcagcgcatcgaggtcctagacaatactcaacagctgaaaatactggccgattccattaatagcgagattgggattctgtgctctgcactgcagaagatcaag

SEQ ID NO: 17875 - DNA, 1356 bp, synthetic construct
  misc_feature 1..1356: note = source = /note="Description of Artificial Sequence: Synthetic coding sequence"
  source 1..1356: mol_type = other DNA
atgagtactgccgtcctggaaaatcccggtctgggccgtaagttgtcagattttggccaggaaacctcctacattgaagacaactgtaaccagaacggtgctattagcctgatatttagcctgaaagaggaagtgggcgcactcgccaaagtattgcgattattcgaagaaaatgacgtaaatctgacccatatcgagagtcgcccatcacgactcaagaaggacgagtacgaattttttactcacctggataagagaagtcttccggctctcacaaacatcatcaagattctgcggcacgacattggggccacggtgcacgagctgtccagagataagaagaaggacacagtcccatggtttcctaggacaatccaggaattagacagattcgccaaccaaatcctaagctatggcgctgagctggacgcggatcaccccggatttaaggatccagtgtatcgggcgcggagaaagcaattcgctgacatagcttacaactatcgccacggccagccaatcccaagagttgaatacatggaggaggagaagaaaacctgggggacggtgttcaagactctcaaatccttgtataaaacacacgcatgttatgagtataatcatatatttcctctgctggagaagtactgtgggttccacgaagataatattccgcagctggaagatgtctctcagtttctacaaacgtgtacgggctttaggctccgaccagttgccgggttgctgagtagccgtgactttctggggggactggcattcagggtattccactgcactcagtacattcgacacggtagtaaacccatgtacacaccagagcccgatatctgccacgagcttcttggccatgtgccacttttctccgatcgtagcttcgctcagtttagtcaggagatcggactcgcttccctgggtgcccctgacgagtatattgaaaagttggcaacaatctactggttcacagttgaatttggcctgtgcaaacaaggggattccatcaaggcatacggcgctggactgctcagcagtttcggggagctgcagtattgtctgagcgaaaagccaaagttattaccacttgagcttgagaagaccgctatccagaactataccgtgaccgagtttcagccactttattatgtggccgaatctttcaatgatgccaaggagaaggttcgcaactttgccgcgaccattcctcgtcccttctcggtcagatatgacccctatactcagcgcatcgaagttctcgacaacacccaacagctaaaaatcttagccgactcaatcaattcagagatcggcattttgtgttcagccttacagaaaatcaag

SEQ ID NO: 17876 - DNA, 1356 bp, synthetic construct
  misc_feature 1..1356: note = source = /note="Description of Artificial Sequence: Synthetic coding sequence"
  source 1..1356: mol_type = other DNA
atgtcgaccgcggtgctggaaaatccagggcttggaagaaaacttagcgacttcggacaagagacttcatacatcgaggacaactgcaaccagaacggtgcgatctccctcatctttagcctgaaggaggaggtgggagccctggctaaagtcctgcggctgttcgaagagaatgacgtgaatctgactcacatcgagtcgcgcccgtcccggttgaagaaagatgaatacgagttctttacgcatctggacaaaaggtccctgccggcacttaccaatatcatcaagatcctgaggcatgatattggggctaccgtgcatgaattgtccagagacaagaagaaggatactgtcccgtggtttccgagaaccattcaggaactcgaccggttcgctaaccagatcttgtcctacggagccgaactcgacgccgaccacccgggattcaaggacccggtgtaccgcgcacgccggaagcagttcgcggatatagcctacaactatagacacggacaaccaatcccgcgcgtggaatacatggaagaagaaaagaaaacttggggcaccgtattcaagaccctcaaatcgttgtacaagacccacgcctgttatgaatacaatcacatttttccattgttggagaagtactgcggcttccacgaggataacatcccgcaactggaagatgtctcgcagttcctccaaacctgcaccggcttccgactgaggccggtggcaggactgctgtcatcacgcgacttcctcggcggcctggccttccgcgtctttcattgcacgcagtacataagacatggtagcaagccaatgtacactccagagcccgacatctgtcacgagctgctggggcacgtaccactgttctcggatcggtccttcgcgcagttctcacaggaaattggacttgcttctctgggagcccctgacgagtatatcgagaaactcgccacgatctactggttcacggttgagtttggtttgtgcaaacagggtgattcgataaaggcatacggggcgggacttcttagcagctttggggaattgcaatactgcctctcagaaaagcctaagctgctgcctctcgagctggagaaaactgcaatccaaaactacaccgtcaccgaattccaaccattgtattacgtggctgagtcattcaacgacgccaaggaaaaggtgcgcaatttcgccgcaactatccctcgaccgttcagcgtgcggtatgatccctacacccagcgcatcgaggtcttggataacactcagcaactgaagatcctcgcggatagtatcaactcggagatcgggatcctgtgttcggcgctccagaagatcaaa

SEQ ID NO: 17877 - DNA, 1356 bp, synthetic construct
  misc_feature 1..1356: note = source = /note="Description of Artificial Sequence: Synthetic coding sequence"
  source 1..1356: mol_type = other DNA
atgtcaaccgcggtgcttgagaacccgggactgggtcgcaaactgtcggatttcggacaggaaactagctacatcgaggacaactgcaaccaaaatggtgccatctccctgatcttctccctcaaagaggaggtcggagcgctggcgaaggtgctgagactttttgaggagaatgacgtgaatttgacgcacatcgaatcacggccgagcagactgaagaaggatgaatacgagttcttcacccatttggataagcggagccttcccgccctcaccaacataatcaaaatcctcagacacgacatcggagcaactgtgcatgagctgagccgagacaagaaaaaagataccgtgccgtggttcccgcgtaccattcaggaactggaccggttcgcgaatcagattctgtcgtacggcgcggagctggatgctgatcatccaggcttcaaagacccggtctaccgggcccggcgcaaacaattcgcggacatcgcctacaattaccgccatggacaaccgatcccacgggtggagtacatggaggaggaaaagaaaacctggggaactgtctttaagacgctcaagtcactgtacaagacccacgcctgttacgaatacaaccacatcttccctttgttggagaagtattgcggatttcacgaggacaatattccacaattggaggacgtctcacagtttctgcagacttgtactggctttaggcttcgtccggtcgctggactgctctccagcagagactttcttggaggactcgccttccgagtgttccattgtacccagtacatccggcacggctcgaagccgatgtacactccagaaccggatatctgccacgagctcctgggacatgtgccgctcttctccgaccgctcgttcgcgcagttctcgcaagaaattggacttgcctccttgggcgctccagacgagtacatcgaaaagctggcgactatctactggtttactgttgagtttggactgtgcaagcagggagactccatcaaggcctatggcgctgggctgttgtccagctttggcgagctccaatattgtctgtcggaaaagccgaagctcttgcctctggagctggaaaagaccgccattcagaactacaccgtgaccgaattccagcccctctactacgtcgccgaaagttttaacgacgcgaaggagaaagttagaaatttcgcagcaaccattccgcgcccgttctcggtcagatacgacccttacacgcagcggattgaggtactggataacacccaacagctcaagatccttgccgactccatcaattccgagatcggaatcctgtgctcggccctgcaaaagatcaag

SEQ ID NO: 17878 - DNA, 1356 bp, synthetic construct
  misc_feature 1..1356: note = source = /note="Description of Artificial Sequence: Synthetic coding sequence"
  source 1..1356: mol_type = other DNA
atgtcaaccgccgtgctggagaacccagggctcgggaggaagctgtctgatttcggtcaggagaccagctatattgaagacaactgcaatcagaatggcgcaatttctcttatattcagtttgaaggaggaggtgggggccctggccaaggtgctgaggttgtttgaggaaaacgatgtcaacctgacccatattgagtcccggccgagccggcttaaaaaggacgagtatgaattttttacccacttagacaaaaggagcctgcctgcactgactaacataattaagatcttaagacacgatatcggagcgacggtgcacgaattgagtcgcgacaagaagaaggatacagtgccttggttccctcgtactatccaggagctagatcggtttgctaatcagatcctgtcctatggggcagagttggacgcagatcaccctggcttcaaagaccccgtgtacagggcccgacggaagcagttcgcagatattgcttataattatcgccatggccagcctattccccgggtcgagtacatggaagaagagaagaagacctggggcacggtttttaaaactctgaaatccttgtacaagacgcacgcttgttatgaatataatcacatatttcctctgcttgagaagtattgtggttttcacgaggataacatcccgcagcttgaggatgttagtcagtttcttcagacctgtactggcttcagattgaggccagtggccggattgctttcaagccgcgacttcctcggtgggttggcttttcgggtgtttcactgtacacaatatattagacacggcagtaagcccatgtacactcctgagcccgacatctgtcacgagctgctggggcatgtgcccctgtttagtgaccggtctttcgcccagtttagccaagagattgggctggcctcacttggcgctccggatgaatacattgagaagctggctactatttattggttcaccgtagaatttggcctttgcaaacaaggagacagcattaaagcctatggggctggcttgcttagttcttttggagaattacagtactgtcttagcgagaagcccaagctcctaccactcgaactggagaagacggctatccagaactataccgtcaccgaattccaaccactctattacgtcgcagagagctttaatgacgccaaggaaaaggtccgcaatttcgccgcaacaattcctcggccgttcagtgtccgttatgatccctatacccagcgaatcgaggtactggacaacacacagcagctgaaaatcttggcagactccatcaactcagagatcgggatactctgttctgctttacagaaaatcaaa

SEQ ID NO: 17879 - DNA, 1356 bp, synthetic construct
  misc_feature 1..1356: note = source = /note="Description of Artificial Sequence: Synthetic coding sequence"
  source 1..1356: mol_type = other DNA
atgtcaactgctgtactcgaaaatccagggctcgggcgcaaactgtctgacttcggacaggaaacaagttatatcgaagataactgtaatcagaatggagcaatttccctgatattctccctaaaagaggaggtgggggctctcgctaaagtactgcgcttatttgaagaaaacgacgtcaatttaacacacatcgaatcaagaccttcacggctcaaaaaagacgagtacgaattttttacacacctagataaacggtcgctgcctgcactcacaaatataataaaaatactcagacacgatattggagccactgttcacgaactgtcccgcgataaaaaaaaagacacagttccctggtttcctcgcactattcaggaacttgatagattcgccaatcagattctatcctacggagctgagctcgacgctgatcatcccggatttaaagatcctgtctatagggcacggcggaagcagttcgctgatatcgcttacaattaccggcacgggcagcccattccaagggtggaatacatggaagaagagaaaaaaacatgggggacagtttttaaaacactgaaaagtttgtataagacacacgcctgctacgaatacaatcacatttttccactgctggaaaaatattgcggatttcatgaagataacatccctcagctcgaagatgtttcccagtttctccagacttgtactgggtttagacttagacccgttgcagggcttctttcatcaagagatttcttgggaggactcgcatttcgggtgttccattgtacacagtatattcgacacggatcaaaacctatgtatacacctgagccagatatctgtcatgaattgcttggacatgtgcccctgttctcagatagatcctttgctcagttctctcaggagattggactggcctcccttggggctccagatgaatacatagaaaaacttgctactatatactggttcacagtcgagttcggactgtgtaagcagggagattccataaaagcatatggggcaggactgttaagttcctttggggaactgcagtactgtctatccgaaaaacccaaactcttaccactggaactggaaaagactgctatccagaattatacagtcacagaattccagcccctgtattatgttgcggaaagtttcaacgatgctaaagaaaaagtgcggaactttgctgccactattccgcggccctttagtgtgcgatatgatccctatactcagcgcatcgaagtgcttgataacacacagcagctaaagatacttgcagactctattaactctgaaatcggaatcctgtgctctgcactccagaaaataaaa

SEQ ID NO: 17880 - DNA, 1356 bp, synthetic construct
  misc_feature 1..1356: note = source = /note="Description of Artificial Sequence: Synthetic coding sequence"
  source 1..1356: mol_type = other DNA
atgtcaactgcggtgctcgaaaatccgggtctgggccggaaattgtcggacttcgggcaggaaacctcatacatcgaggataactgcaatcagaatggcgccatcagcctgatcttctccctgaaggaggaggtgggagcattggcaaaagtgctccggttgttcgaagaaaatgacgtcaacctgactcacattgagtcaagaccgagccggctgaaaaaggatgaatacgagtttttcacccacttggacaagcggtcgcttccggctctgactaacatcatcaaaatcctgcgccacgacatcggagccactgtgcatgaactgagccgcgacaagaaaaaggacaccgttccatggttcccacgaacgatccaggaactcgatcggttcgctaaccaaattctctcctacggagccgagctcgacgcagaccatccgggattcaaagatcctgtgtatagagcgcgccgcaagcagttcgcagacatcgcctacaactaccggcatggccagccgatcccgcgcgtggaatacatggaagaggagaaaaagacgtggggtaccgttttcaaaactctgaagtcactgtacaagactcacgcttgttacgagtacaatcatatcttcccactgctcgaaaagtactgcggatttcacgaggacaatatcccccaactcgaagatgtgtcgcaatttctccagacctgtaccggattcagactgaggcctgtggccggactgctcagctccagggacttccttgggggattggcattccgcgtctttcactgcactcaatacatccggcatggatccaagccaatgtacaccccagagcccgatatctgtcatgaactgctcggtcacgtcccgctgttcagtgataggtccttcgcccagttcagccaggaaatcggactcgcgagcctgggagcgccggatgagtacatcgagaagctggcgacgatttactggttcactgtggaattcggcctctgcaagcagggcgacagcatcaaggcatacggagctggattgctgtctagctttggagagctccagtactgtttgagcgagaagcctaagctcctgccgcttgagctcgagaaaaccgcaatccagaactacactgtgactgagtttcaaccattgtactatgtggccgaatccttcaacgatgccaaggaaaaagtgagaaatttcgccgccactatcccgaggccgttttccgtgcgctacgacccgtacacccagaggatcgaggtgctggacaatacgcagcagctgaaaattctggccgactcgatcaatagcgaaatcggaatcctctgctcggctctgcagaagatcaaa

SEQ ID NO: 17881 - DNA, 1356 bp, synthetic construct
  misc_feature 1..1356: note = source = /note="Description of Artificial Sequence: Synthetic coding sequence"
  source 1..1356: mol_type = other DNA
atgtcaactgcggtcctggaaaatccaggactgggtcgcaaattgagcgattttggccaagagacatcatatatagaggacaactgcaatcaaaacggggcaatttcacttattttcagcttgaaggaggaagtgggtgccctcgcgaaagtcttgcgactattcgaggaaaatgatgtaaatctgacacacatagagtcccgccctagtagattaaagaaagacgagtatgaattcttcacccatctggataaacggagtctaccagccctcacaaatattataaagattctgcgtcatgacatcggtgctaccgttcacgaattgagccgggacaaaaagaaggacaccgtgccctggtttccccgcaccatacaagagttggatcgcttcgcgaatcaaatcctaagttacggcgcggagctagacgcggaccatccaggctttaaggacccggtctatcgtgcgaggcgaaagcagttcgccgatattgcgtataactatcgtcacggtcagccgataccgagggtggaatatatggaagaggagaagaagacctggggcaccgtgtttaaaactttgaagtccctctataagacccacgcgtgctacgaatataatcacatcttcccgttactggagaagtactgcggctttcacgaagacaacatcccgcagctagaggacgtgtcacaattcctccaaacctgcacgggttttcgtctgcgaccagtagccggcctgctgagcagtcgtgatttcttgggtggactggccttccgagtgtttcactgcactcaatatatccgccacggtagcaaacccatgtacacgcctgaacccgacatctgccacgagctactcggccacgtcccactgttttcggatcgcagctttgcgcagttctcacaggagattgggttggcaagtctgggtgcaccggacgagtacatcgagaagctggccacgatctattggttcaccgtggaatttggtctatgcaaacagggcgacagcattaaagcgtacggtgccggactgttgagctcgtttggcgagttgcaatactgcctcagcgagaagccaaaactgttgcctctggagttggagaagaccgccatccagaactacaccgtaaccgaattccagccgttgtattacgtcgcagaaagcttcaacgatgcaaaggagaaagtacggaactttgcggccacaattccacgcccattctctgtacgctatgacccgtacacccagcgcatcgaggttctggataacacccagcaactaaagatactagccgatagtatcaactccgagataggcatcctgtgctccgcattgcagaagattaag

SEQ ID NO: 17882 - DNA, 1356 bp, synthetic construct
  misc_feature 1..1356: note = source = /note="Description of Artificial Sequence: Synthetic coding sequence"
  source 1..1356: mol_type = other DNA
atgtccacggccgtccttgaaaaccccggcctgggccgcaagttaagcgacttcggtcaagaaacgtcgtatatcgaggataattgtaaccagaacggagctatcagcctgatcttctccttgaaggaggaggtcggtgccttggccaaggtactgcgtctcttcgaagaaaatgacgttaacctcacacacatcgagtcccgcccctcccgtttgaagaaggacgagtacgagtttttcacacacctcgacaagaggagcctgcctgccttgacgaatataatcaaaatcctgcgtcatgacattggagcaaccgtacacgagctcagtcgtgacaagaagaaggacacagttccttggttccctcgaaccattcaagagttggatcgcttcgccaatcagattttgtcttatggcgcagaactcgatgctgaccaccccggcttcaaggatcccgtctaccgtgctcgtcgcaagcaattcgcggatatcgcgtacaactaccgacacggtcagcccatcccccgcgtagagtacatggaggaggagaagaagacctggggaaccgtgttcaagacgctgaagtccctctacaagacgcatgcttgttacgagtataatcacatcttcccgctgctggaaaagtattgcggcttccatgaagataatatccctcagctcgaggatgtctctcagtttcttcaaacgtgtactggctttcgcctccggcccgttgccgggttgctcagctcccgtgacttcctcggcggtctcgccttccgggttttccactgcacccagtacatccgccacggcagcaagcccatgtacacaccggaaccagacatctgccacgaactactgggccatgttcccctgttctccgataggtcattcgcgcagttctcacaggaaatcggcctggcatcgctgggagcacccgacgagtacatcgagaagttggcgaccatttactggttcaccgttgaattcggcctttgcaagcagggggatagcatcaaggcctacggtgctggcctcttgagctcctttggcgaactgcagtactgcctatccgaaaagccgaagctgctgcctctggaactcgagaagaccgctatccaaaactatacagttacggagtttcagcccttgtactacgtggccgagtccttcaacgacgcaaaggagaaagtgcgtaactttgcggctaccattcctcgtccgttttctgtccgttacgacccctacacccagcgtatcgaggttcttgataacactcagcagctgaagattctggccgactctattaattccgagattggcatcctttgtagtgcccttcagaagatcaag

SEQ ID NO: 17883 - DNA, 1356 bp, synthetic construct
  misc_feature 1..1356: note = source = /note="Description of Artificial Sequence: Synthetic coding sequence"
  source 1..1356: mol_type = other DNA
atgagcaccgcagttcttgaaaaccctggtttgggcaggaagctgtcggattttgggcaggaaacctcatatatcgaggacaactgcaaccaaaacggggcaatatcccttatcttttcattgaaggaggaagtgggcgccctcgctaaagttctgagactgttcgaagagaatgatgtcaatctgacacacatcgagtcacggcccagtcgtctcaaaaaggacgagtatgagtttttcacccacctggacaaaaggagtctgccagcattgacgaacataatcaagatcttacgacacgatataggcgccacagttcacgagctgtctcgggataaaaaaaaggatacagttccttggtttcctagaacaatccaagagcttgaccggttcgctaaccagatcctctcatacggcgctgagctggacgccgaccatcccggtttcaaagacccagtgtatagagcccggcgcaaacagttcgcggatatcgcttacaactatagacatggacagccaatccccagagtggagtacatggaagaagaaaagaagacctgggggacagtttttaaaacattgaagagcctgtacaagacacacgcttgctacgaatataaccatatattccctctactcgaaaaatactgtgggttccatgaagataatatacctcaactggaggatgtcagccagttcctccagacttgtactgggtttaggctgaggcccgtggcgggcctgctctcctcaagagactttcttggaggactcgcctttcgtgtgttccattgcacccaatatattagacacggcagtaagcccatgtatactcctgagccagacatttgtcatgagctgctggggcatgtgcccctgttctccgatagatctttcgcccaattcagtcaggagatcggattggcctctctgggggctcccgatgaatacattgagaagctggccaccatatattggtttacagtggagttcgggctatgcaagcagggcgactctatcaaagcctatggcgccgggctgttgtcatcctttggcgaacttcagtactgcctctccgagaagccaaagttgctgccgctggaactggaaaaaactgctatccagaattataccgtgaccgaattccagcccctttactacgtagccgaaagcttcaatgacgcgaaggaaaaggtgaggaatttcgcagcaacaattccacgacctttctccgtcaggtatgacccttacacgcaaaggatcgaagtgctggataatacacagcagttgaagatcttagctgattcgatcaattccgagatcgggattctgtgctctgcactgcagaaaatcaag

SEQ ID NO: 17884 - DNA, 1356 bp, synthetic construct
  misc_feature 1..1356: note = source = /note="Description of Artificial Sequence: Synthetic coding sequence"
  source 1..1356: mol_type = other DNA
atgtccaccgccgtgttagagaacccgggtctggggcgaaagctgtctgatttcgggcaggaaacatcatacattgaggacaattgtaaccagaatggcgccatctcactaattttctccctcaaggaagaggtcggggcgcttgccaaagtgctgcgcctgttcgaggaaaatgatgtcaacctgacccacattgagtctagaccaagtcgattgaaaaaggatgagtatgagttttttacacaccttgacaagaggtcactaccggctcttaccaatattattaaaatcctgcggcatgatattggcgctaccgtgcacgagctgtcgagagacaaaaaaaaggacacagtgccgtggtttccccggaccatacaggagttggaccgctttgctaatcaaatattgtcttacggcgctgagctcgatgccgaccacccagggtttaaagatcctgtttacagagctaggagaaagcaattcgctgacatagcctataattatagacatggccaacccatcccacgtgtggagtatatggaggaagagaagaagacttggggcaccgtgttcaagaccctgaaatctttatacaaaacacacgcctgctacgaatataatcacattttccctttgctagaaaaatattgcggctttcatgaagataacatccctcaattagaggatgttagtcagttcttgcaaacttgtaccggattccgcctgagacctgtggctgggctactctcaagccgggacttcctcggtggactggcgtttcgtgtctttcattgcacccaatatattcggcacggctccaagcccatgtatacccctgaacccgacatctgtcacgagctgctgggccatgtgcctctcttcagcgatagaagttttgctcaattctcccaggagataggcctggcgtcactgggggcccctgacgagtatatcgagaagctcgcgactatttattggtttaccgtggaattcggcttgtgcaaacagggcgatagtatcaaagcctatggagctgggctcttatcttccttcggcgagttgcaatactgcctctccgagaagcctaagttgctgcccttggaacttgaaaagacagccatacagaactatactgtaaccgaatttcaacctctttattatgtggccgagtcatttaacgatgccaaagagaaagtgaggaacttcgccgctaccattcccagaccgttctccgtgagatatgatccctacactcagaggattgaggttctagacaatacccagcagcttaagatcctcgccgactcaatcaactcagagatcggcatcttatgtagtgcgttgcagaagataaag

SEQ ID NO: 17885 - DNA, 1356 bp, synthetic construct
  misc_feature 1..1356: note = source = /note="Description of Artificial Sequence: Synthetic coding sequence"
  source 1..1356: mol_type = other DNA
atgagcactgcagttttagagaatccaggacttggaagaaagttatccgacttcggtcaagagacatcatatatcgaagacaactgtaaccagaatggagctatttcgctgattttttctctcaaagaggaagtgggtgccctagcaaaggtgctccgactgtttgaggagaacgatgttaatctcacacacatagagagccgaccatcaagacttaaaaaagatgaatacgagttctttacgcatctggacaaacgtagtcttccagcgcttacaaatataataaagattcttagacacgatatcggagctacagtacacgagctcagccgagataagaagaaagatactgttccatggtttccgcggacaatccaagaattggaccgatttgcaaaccaaatattgtcttacggggctgaactcgatgctgaccaccctggttttaaggatccagtttaccgggctagacgtaagcaattcgcggatattgcttataattatcgacatggtcaaccgattccacgagttgaatacatggaggaggaaaaaaagacgtgggggacggtgttcaaaaccttaaaatccctttataaaacgcacgcttgctatgaatacaatcatatattcccacttttagaaaaatattgcggattccacgaagacaatattccacaactagaagacgtgtcccagttcctccagacctgcacgggatttagactcagaccagtggccggattgctttcttcgagagacttcctgggtggacttgcttttcgcgtctttcattgcacccaatacataaggcatggttccaaaccaatgtacacccccgaaccggacatttgccatgaacttttagggcatgtgccacttttttctgaccggtcctttgcgcaattttcacaggagatcggacttgcatcattgggagcgcccgatgaatacattgaaaagttggccacaatttattggttcacagtcgaattcgggctttgcaaacaaggagattcaattaaagcatatggagccggccttttgtcgagctttggagagttgcaatattgcctttcagaaaagccgaaattattgcctctggaactagaaaagactgctatccaaaattatactgtgacagaatttcagccattgtattatgtggctgagtcttttaatgatgccaaggaaaaggtgagaaattttgcagctactatcccaaggccattcagcgtccgatacgatccatacactcagcgcattgaggtgttagataacactcaacagctaaaaatccttgctgattccattaacagtgaaatcgggatcctctgctcggcattgcaaaaaattaaa

SEQ ID NO: 17886 - DNA, 1356 bp, synthetic construct
  misc_feature 1..1356: note = source = /note="Description of Artificial Sequence: Synthetic coding sequence"
  source 1..1356: mol_type = other DNA
atgtccacggctgtgctggagaacccggggttgggaagaaagctctcggacttcgggcaggagacgtcctacatagaggacaattgcaaccaaaacggggccatctcactgatcttctcgctcaaggaagaagtgggagcgctggctaaggtgctccgcctctttgaagaaaacgatgtcaatctgactcacattgagtcgcggccaagccgactcaaaaaggatgagtacgagttcttcacccatcttgacaaaagaagcctcccagcactgactaacatcattaagatcctccggcacgatatcggcgcaactgttcacgaattgtcgcgggacaagaagaaagacactgtgccgtggttcccacgcaccattcaggagctggataggttcgccaaccaaatcctgtcttacggtgccgagctggacgcagaccacccaggattcaaagacccagtctacagagcgcgcaggaaacaattcgcggacatcgcgtacaactacaggcatggacaaccgattccgcgcgtggaatacatggaggaagagaaaaagacttggggtactgtgtttaagactcttaagtcgctgtacaagactcacgcgtgctacgaatacaatcacatctttcctttgctggaaaagtactgcggatttcatgaggacaacatcccgcagttggaagatgtgtcgcaattcctgcagacttgcactgggttccgcctccgcccagtcgcgggcttgctgtcgtcccgggacttcctgggaggtctggctttccgggtttttcattgcacccagtacattcgccatgggtcgaagccgatgtacactcctgaacccgacatctgccacgagttgctgggtcatgtgccactcttctctgatcgctcatttgcacagtttagccaggagatcggactggcgtccctgggcgccccagacgaatacatcgaaaaactggccacgatttactggttcactgtggaattcggactgtgtaagcaaggagacagcatcaaggcctacggagccgggcttctttcctcgttcggtgaactgcagtattgtctgagcgaaaagccgaagctgcttccccttgagctggaaaagaccgcgatccagaattacactgtgacggaatttcagccgctctactacgtggctgagtcgtttaacgacgccaaagaaaaggtgaggaattttgcggctacgatccctcgccccttttcggtccggtatgatccatacactcaaaggatcgaggtgctggacaacactcagcagcttaagatcctcgccgattccatcaactcggagatcggaatcctctgctcggccctgcaaaagatcaag

SEQ ID NO: 17887 - DNA, 1356 bp, synthetic construct
  misc_feature 1..1356: note = source = /note="Description of Artificial Sequence: Synthetic coding sequence"
  source 1..1356: mol_type = other DNA
atgtctacggctgtgctcgaaaacccagggttgggccgaaaattgtcggattttgggcaagaaacctcatacatcgaggacaattgtaatcagaacggagccatttcgttaatattttcgctgaaggaggaggttggagcgttggccaaggtgcttcggctattcgaagagaacgacgtcaatctgacacatatcgaaagtagaccctcacggctgaagaaagatgaatacgaattcttcactcatctcgataaacgatctttaccagccctgactaacataatcaaaattctgcgacatgacatcggcgccaccgtgcacgaactcagtcgagacaagaaaaaagatacagtcccttggtttccacggacaattcaagagctcgatcgatttgccaaccagatcctgagctacggtgccgagcttgacgctgaccaccctggttttaaggatcccgtctaccgggcgcgccgcaaacaatttgcagatattgcttacaactaccggcacgggcagccaattccaagagtcgagtacatggaagaggaaaagaaaacctggggcacagtctttaaaacattgaaatccctgtataaaacacacgcgtgttatgaatacaatcacatctttccactgctggaaaaatattgcggttttcacgaggacaacattccccagctggaggatgtttctcagtttctgcagacctgcaccgggttccgtctgcggccggtggccggcctactcagttcacgggacttcctcggcgggctcgctttcagggtgttccattgtactcagtatataagacatggatccaagcctatgtatacccccgagcccgatatatgtcacgaactgctgggccatgttccactgttcagcgaccgctcttttgcccagtttagtcaagagataggcctggcctctctgggggccccagacgagtacatcgagaaactcgccaccatatactggttcaccgtagaatttgggttatgcaaacaaggagattcaatcaaggcttatggcgcgggactcctctcttcctttggcgagctgcaatattgtctgtccgaaaagccaaagcttctgcctttagaattggaaaaaacagcaatccaaaactataccgtcaccgagtttcaaccgttatactatgtggcagagagtttcaatgacgctaaggaaaaggtgaggaattttgctgccaccataccacgcccgttctccgtgagatatgacccatacacgcaacgaatcgaggtgttggataacactcagcagctgaaaatcttggccgactccattaatagcgagattggtatcctatgctcggccctgcagaaaattaag

SEQ ID NO: 17888 - DNA, 1356 bp, synthetic construct
  misc_feature 1..1356: note = source = /note="Description of Artificial Sequence: Synthetic coding sequence"
  source 1..1356: mol_type = other DNA
atgagtacagctgtccttgaaaaccctggtctgggccggaaactgagtgattttgggcaagaaacttcgtacattgaggataattgtaaccagaatggagccatcagcttgattttctccctgaaggaggaggttggggccttggccaaggtgttgcgactgttcgaagagaacgatgtgaacctgacccacattgaatcccgaccttcaagactcaaaaaggacgagtacgagtttttcacccatctggataagcgatctctgcccgcgctgaccaacatcataaagattctacgacacgacatcggggccactgtgcatgagttgtcaagggacaaaaaaaaggatacagtgccatggtttccaagaacgatacaggaactggacagattcgcaaatcagatcctaagttacggggctgagctagatgcagatcacccggggtttaaagaccccgtgtaccgtgcaagaaggaagcagtttgccgatatcgcttataattaccgccatgggcagcctatcccacgggtggaatacatggaggaggagaagaagacttggggaactgtgtttaagacactgaagagcttatacaaaactcacgcctgttacgagtacaatcatatattccccttgctggaaaaatactgtggattccacgaggacaatatacctcagctggaggacgtctcacagttcctacagacctgcacagggttccgattgcgtcccgtggctgggcttctatctagcagagactttctgggtggtctggcattcagagtgttccactgcactcagtacattaggcacggatccaaaccgatgtatacaccagaaccagacatatgtcatgaactgctcggacacgtgcctctgttctccgatcggagcttcgcgcagttctctcaagagattggtctggcatcgctgggtgcccccgacgaatacatcgagaaactcgccacgatctattggtttaccgtggagtttggcctgtgcaagcaaggcgatagtatcaaggcctacggcgccggcctgctctccagtttcggcgaactgcagtactgcctgtctgaaaaacccaagctgctaccactagagcttgaaaagaccgccattcagaactacaccgtgacagagttccagcctctatattatgtggctgaatctttcaatgacgctaaagaaaaggtcagaaactttgccgccaccattccaaggccattcagtgttcggtacgacccctatactcaacgaatagaggttttagataacacacagcaactgaaaatcttagccgatagtataaactccgagattgggatcctgtgttccgctctgcaaaaaataaag

SEQ ID NO: 17889 - DNA, 1356 bp, synthetic construct
  misc_feature 1..1356: note = source = /note="Description of Artificial Sequence: Synthetic coding sequence"
  source 1..1356: mol_type = other DNA
atgtcgacggcggttctagaaaatccgggtctaggtcgaaaattatcggattttggtcaagaaacgtcgtatatagaagataattgtaatcaaaatggtgcgatatcgctaatattttcgttaaaagaagaagttggtgcgttagcgaaagtactacgattatttgaagaaaatgatgtaaatctaacgcatatagaatcgcgtccgtcgcgattaaaaaaagatgaatatgaattttttacgcatttagataaacgatcgttaccggcgctaacgaatataataaaaatactacgtcatgatataggtgcgacggtacatgaactatcgcgagataaaaaaaaagatacggtaccgtggtttccgcgtacgatacaagaattagatcgttttgcgaatcaaatattatcgtatggtgcggaactagatgcggatcatccgggttttaaagatccggtatatcgtgcgcgtcgaaaacaatttgcggatatagcgtataattatcgtcatggtcaaccgataccgcgtgtagaatatatggaagaagaaaaaaaaacgtggggtacggtatttaaaacgttaaaatcgttatataaaacgcatgcgtgttatgaatataatcatatatttccgctattagaaaaatattgtggttttcatgaagataatataccgcaactagaagatgtatcgcaatttctacaaacgtgtacgggttttcgtttacgaccggttgcgggtttattatcgtcgcgagattttctaggtggtctagcgtttcgtgtatttcattgtacgcaatatatacgtcatggttcgaaaccgatgtatacgccggaaccggatatatgtcatgaattattaggtcatgtaccgttattttcggatcgttcgtttgcgcaattttcgcaagaaataggtttagcgtcgttaggtgcgccggatgaatatatagaaaaactagcgacgatatattggtttacggtagaatttggtttatgtaaacaaggtgattcgataaaagcgtatggtgcgggtctattatcgtcgtttggtgaattacaatattgtttatcggaaaaaccgaaactattaccgttagaactagaaaaaacggcgatacaaaattatacggtaacggaatttcaaccgctatattatgtagcggaatcgtttaatgatgcgaaagaaaaagtacgaaattttgcggcgacgataccgcgtccgttttcggtacgatatgatccgtatacgcaacgtatagaagtattagataatacgcaacaactaaaaatattagcggattcgataaattcggaaataggtatattatgttcggcgctacaaaaaataaaa

SEQ ID NO: 17890 - DNA, 1356 bp, synthetic construct
  misc_feature 1..1356: note = source = /note="Description of Artificial Sequence: Synthetic coding sequence"
  source 1..1356: mol_type = other DNA
atgtccaccgccgtgctggagaatcctggactgggacggaaactttccgatttcggacaggaaaccagctacatcgaggacaactgcaaccagaacggcgcgatctcgctgatcttctctctcaaggaagaagtcggcgccctcgccaaagtgttgcgcctgtttgaagagaatgatgtgaacctgactcacatcgaatctcgtccttcccgcctgaaaaaggacgaatatgaattcttcacccacctggataagcgctcgctgccggcgctgactaacatcatcaagatcctcagacatgacatcggagcgaccgtgcatgagctctcacgcgacaagaagaaagacacggtgccgtggttcccgagaactatccaagaactggacagattcgccaatcaaatcctgtcctacggggccgaactcgatgcggaccaccctggattcaaggatcccgtctaccgcgcacggcgcaagcagttcgcagacatcgcatacaattaccggcatggccaaccgatcccccgggtcgagtacatggaggaagagaaaaagacctggggtaccgtgtttaagaccttgaagtccctgtacaagacgcatgcgtgctacgagtacaatcacatctttccactgcttgagaagtactgcggatttcacgaagataacatcccacaactggaggacgtgtcccaattccttcagacctgcaccggatttcgacttagacccgtcgctggactgttgtcgagccgcgactttctgggaggactcgccttccgcgtgtttcactgcactcagtacatcagacacggaagcaaacctatgtacacccctgaacctgacatctgccatgaactgctcggtcatgtcccgctgttttctgaccggtcatttgcccagttttcgcaagagatcggactcgctagcctgggtgcccctgacgagtacatagaaaaactcgcgaccatctattggttcactgtcgagttcgggttgtgtaagcagggagacagcatcaaggcctacggagcaggactgctgtcctcgttcggagaactccagtactgcctgtcggagaagcccaagctcctgccgcttgaactggaaaaaaccgctattcagaactacactgtgaccgagttccagcctctctactacgttgccgaatcattcaatgatgcaaaggagaaagtccggaacttcgcggcaactattcctcgcccattctcagtgcggtacgatccatacacgcagaggatcgaagtgttggataatacccagcagctgaaaatcctggcggactcgatcaattccgaaatcggcatcctctgctctgcattgcaaaagatcaag

SEQ ID NO: 17891 - DNA, 1356 bp, synthetic construct
  misc_feature 1..1356: note = source = /note="Description of Artificial Sequence: Synthetic coding sequence"
  source 1..1356: mol_type = other DNA
atgtcgacggccgtgctggaaaatccgggccttgggagaaaactcagcgacttcggtcaagaaacttcctacatcgaggacaactgcaaccagaatggagcaatttcgctgatcttttctctcaaggaagaagtgggcgcactggcaaaagtgctgcggctttttgaagagaacgacgtcaacctcacccatattgagtcacgcccatccaggctgaagaaagatgaatatgaattctttacgcatctggataaacgaagcctccccgcgcttactaacatcatcaaaatactccgccatgatataggagcaaccgtgcacgaactgagccgggataagaaaaaggatactgtcccgtggttcccaagaaccatccaggagctggatcggtttgcaaatcagatcctttcatacggtgccgaacttgatgcagaccatcctggctttaaggacccggtgtacagggcaagacgcaaacaattcgcagatattgcatacaattatcgacacggtcagccgatacccagagtggaatacatggaagaggagaaaaagacctggggaaccgtgttcaaaacccttaagtcgctctacaagacccacgcctgttatgagtataatcatatctttccacttcttgagaaatactgtggatttcatgaagataacattccccagctcgaagatgtgtcccaatttcttcaaacctgtactggtttccgccttcgaccagtcgcgggtctgctcagctctcgggatttccttgggggtctggcctttagagtgttccactgcactcagtacatcaggcacggatccaagccaatgtacactcctgagccggacatatgccatgaacttctgggtcatgttccattgtttagcgatcgttcttttgcacaattttcgcaggaaattggactcgcctcactcggggccccagatgagtacatcgagaaactggccaccatctactggttcactgtcgagttcgggctttgtaagcagggcgattccattaaggcatacggagcaggtttgttgtccagctttggcgaactgcagtactgcctgtcggaaaagccgaagctgcttcctcttgaactggaaaagacggcgatacagaattacacggtgaccgaatttcaaccactttactacgtggcggaatcctttaacgatgcgaaagagaaggtgcgcaatttcgcagccaccatccctcggccgtttagcgtccgctacgatccatacacgcaaagaatagaagttctcgataacactcagcaacttaagatcctggcagactcaattaactccgaaattggtatcttgtgctccgcactgcaaaagattaaa

SEQ ID NO: 17892 - DNA, 1356 bp, synthetic construct
  misc_feature 1..1356: note = source = /note="Description of Artificial Sequence: Synthetic coding sequence"
  source 1..1356: mol_type = other DNA
atgtcgaccgccgtgcttgaaaaccccggactgggtcgcaagttgagcgattttggacaagaaacttcgtacatcgaggacaattgtaaccagaatggcgccatctccctcatattcagcctcaaagaggaagtgggggcccttgccaaggtgcttcgcctgttcgaggagaacgatgtgaaccttacccatatcgagtcgcgtccgtcacgacttaagaaggacgaatacgagttctttacgcacctggataagcgttcgctgccagcactcaccaacatcatcaaaattctgcggcatgatataggcgccaccgtccacgaactgtcgcgggataagaaaaaggacactgtgccatggttcccccgcactattcaagagttggaccgctttgcaaaccagatcctgagctatggagccgaacttgacgctgaccaccccgggtttaaagaccctgtgtaccgcgctcggagaaagcaatttgccgacattgcctacaattaccgtcatggacagccaattcctagggtggaatacatggaggaagagaaaaagacgtggggcaccgtgttcaagactttgaaatcgctttacaaaactcacgcatgttatgaatacaaccatatcttccctctcctggagaaatactgtggcttccatgaagataacattcctcaactggaagatgtctcgcagttcttgcagacttgtaccggttttcgtttgaggccagttgcaggcctgcttagctcccgagatttcctgggaggtcttgcatttagagtctttcactgcactcaatacattagacatggatcgaagcccatgtacaccccagaaccagacatctgccatgaacttctggggcatgtgcctcttttctctgatagatcgtttgcacaattctcgcaggaaattggcctggcatctctgggggccccggacgaatacattgaaaaactggctacgatctactggtttaccgtcgaatttgggctttgcaagcaaggcgattccattaaggcatacggggcggggcttctgtccagcttcggagagctccaatactgccttagcgagaaacctaagctccttccactcgaactggaaaagaccgcaattcaaaactacaccgtgacggaatttcagcctctgtactatgttgctgagtcatttaacgatgcaaaggaaaaggtccggaattttgccgcgacgattccaaggcctttttcggtccgttacgatccttacacccaacggatagaagttttggataacacccaacagcttaagatattggccgattccatcaatagcgagattggaattttgtgtagtgcactgcaaaagatcaag

SEQ ID NO: 17893 - DNA, 1356 bp, synthetic construct
  misc_feature 1..1356: note = source = /note="Description of Artificial Sequence: Synthetic coding sequence"
  source 1..1356: mol_type = other DNA
atgtccaccgctgtgctggagaaccctgggttgggtcggaagctgtcggacttcggccaagaaacctcctacatcgaggacaactgcaatcaaaacggtgcgatttcgctgatcttctccctgaaggaagaagtgggagctctggcgaaggtcctgcggctctttgaggagaacgacgtcaacctcacccacatcgaatcgcgtccatcacgcctgaaaaaagatgagtatgagttctttactcatctggacaaaagatcgctgcctgcgctcaccaacatcatcaaaatcttgaggcacgacatcggtgcgaccgtgcatgaactgtcccgggataagaagaaagatactgtgccctggttccccagaaccatccaggaactggaccgcttcgctaaccaaatcctgtcatacggcgccgaactggatgccgaccacccgggtttcaaggatcctgtgtaccgcgcccgcagaaagcaattcgcggacatcgcatacaactaccgccacgggcaaccgattcccagagttgagtacatggaagaagagaagaaaacctggggcaccgtgtttaagacgctgaagtccctgtacaaaacccatgcctgttacgaatacaaccacattttcccactcctcgagaagtactgtggattccatgaagataacatccctcagctggaagatgtctcacagtttctgcagacttgcactggattccgcctcagaccggtcgccggcctgctctcgtcgcgggacttcctgggaggcctcgcgttcagagtgttccactgcacccaatacatcagacacggatcaaaaccgatgtacaccccagagcctgatatatgccatgaacttctgggacacgtcccgctgttctcagataggtcgtttgctcagttctctcaagagatcgggctggcctcgctgggagctcctgacgagtacatcgaaaagctcgcaactatttactggttcaccgtggagtttggcttgtgcaagcaaggcgattcgatcaaggcctacggcgccggacttctgtcctccttcggcgaactccaatactgtctgtcggagaaaccgaagctgctccctctggaactcgaaaagaccgccatccagaactacactgtgaccgaattccaacccctctattacgtcgcggagtccttcaacgacgcaaaggaaaaggtgcgcaatttcgcggcaaccatccccagaccgttttccgtgcggtacgacccctatactcagcggattgaggtgcttgataacacccagcagctgaagattctggccgactccatcaacagcgagatcggaatcctgtgctctgcactgcagaagatcaag

SEQ ID NO: 17894 - DNA, 1356 bp, synthetic construct
  misc_feature 1..1356: note = source = /note="Description of Artificial Sequence: Synthetic coding sequence"
  source 1..1356: mol_type = other DNA
atgtcgactgctgtgctggagaatcccggtctgggtcgcaagctcagcgacttcgggcaggaaacctcatacatcgaggacaactgtaatcagaatggagcgatcagccttatcttcagcctcaaggaggaggtgggagccctggcgaaagtgcttaggctgttcgaggaaaatgacgtgaacctcactcacatcgagagccgcccgtcccgcctgaagaaagatgaatacgagtttttcacccacctcgataagcggtcactgccggccctgaccaatatcatcaaaattctgcgccatgacattggcgccaccgtgcacgaactgtcccgtgacaagaagaaggataccgtcccgtggttcccaagaaccatccaggaactggaccggtttgcgaatcaaatcttgtcctacggagccgagctggacgctgaccacccgggttttaaggatccggtataccgcgctagacgcaaacagttcgcggacatcgcatacaactaccgccatgggcagccgatccctcgggtcgagtacatggaagaggaaaagaaaacgtggggaactgtctttaagactttgaagtcactgtacaaaacgcatgcctgctacgaatacaaccatatcttcccgctcttggagaagtactgcggatttcacgaggataacatacctcaactggaggacgtgtcgcaattcctgcagacttgtactggcttccgccttagaccggtggcgggactcctgtcctcgcgggactttctcgggggcctcgcgttccgcgtgttccattgcacgcagtacatcagacatggatccaaaccgatgtacactccagagccggatatctgccatgagttgctgggccatgtgcctctgttcagcgaccgcagctttgcccagttcagccaggaaattggtctggcctccttgggagctcctgatgagtatatcgaaaagctggcaactatctactggttcacggtggagttcggactctgcaagcaaggtgactcgatcaaggcctacggcgcgggactgctctcgtccttcggcgagctgcagtactgcctctcggaaaaacctaaactgcttcccctggaactggaaaagaccgcaatccagaattacacggttacggaatttcagccactctactacgtggcagaatcgttcaacgatgcaaaggaaaaggtgaggaattttgccgccaccatcccgcgtccgttttccgtgcggtacgatccttacacccagcgcatcgaagtgctggacaacacccagcagctgaaaatcttggccgattccatcaacagcgaaatcggcatcctctgcagcgccctgcagaagatcaaa

SEQ ID NO: 17895 - DNA, 1356 bp, synthetic construct
  misc_feature 1..1356: note = source = /note="Description of Artificial Sequence: Synthetic coding sequence"
  source 1..1356: mol_type = other DNA
atgtccactgcagttctggagaatcccggcctggggcggaagctgtctgacttcggtcaggaaacttcatatatcgaagataattgcaaccagaacggagccataagcctgatcttcagcctgaaggaggaggtcggtgcacttgctaaggttctgcgacttttcgaggagaacgatgttaacttgacccatatagagtctcggccctcccggctgaaaaaggatgaatatgagtttttcacgcacctggataaacgcagtctgcccgctttgacaaacattatcaagattctcaggcatgatatcggggcgacggtgcatgaattgtcccgggataaaaagaaggataccgtcccgtggttccccaggacaattcaggagttggataggtttgctaaccagatcctctcctacggcgcagagcttgacgcagaccaccctgggtttaaggaccctgtttaccgagcacgcagaaagcagttcgccgacatagcttacaactatagacatggacagcctatccctagggttgaatacatggaggaggagaagaaaacatgggggacagtttttaaaacacttaaaagcctctacaaaacgcacgcgtgttacgaatacaatcacatttttccacttctggagaagtattgcggattccatgaagacaatatcccgcagctcgaggacgtctcacagttcctgcaaacctgcacgggattcagactgagacccgtggcaggcctgctatcatcacgggatttcctgggcgggcttgccttccgcgtctttcactgcacacagtacatccgccacggatcaaaacctatgtatacgccagagcctgatatctgccatgagttgctcgggcacgtgcctctgttctcggaccgcagtttcgcccaattctctcaggaaattggcctagcttcacttggggctccggacgaatatattgaaaagctggcaactatatactggttcactgtagagtttgggctttgcaaacaaggcgatagcattaaagcctatggcgctggccttttatctagtttcggggaactccaatactgtctgagtgagaagcccaagctgcttcctttagaactggagaagacagcaatccagaactatacagtcaccgagttccagcctttgtattacgtggcggagtccttcaacgatgctaaggagaaagtgaggaatttcgccgccactattccaaggcccttttcagtccgctacgacccctacactcaaagaattgaggtcctggacaatacccagcagcttaagatattggctgactcaatcaacagcgagatcggaatcctctgctctgccctgcagaagatcaaa

SEQ ID NO: 17896 - DNA, 1356 bp, synthetic construct
  misc_feature 1..1356: note = source = /note="Description of Artificial Sequence: Synthetic coding sequence"
  source 1..1356: mol_type = other DNA
atgtcgaccgccgtgctggagaaccccggactcggacggaagctgtccgacttcgggcaggagacgagctacattgaggacaactgtaatcagaacggggccatctcccttatcttttcactgaaggaggaggtcggggcactggccaaggtgctgcgtttgttcgaggagaacgatgtgaatcttactcacatcgagtcgcggccgagcaggctcaagaaggatgaatacgagtttttcacccacttggataagagatccctgcccgcgctgaccaatatcatcaaaatcctgcgccatgatatcggagcgactgtgcacgaactgtcgcgggacaagaagaaagataccgtcccgtggttcccacggactatccaggagttggaccgcttcgcgaatcaaattctgtcctacggcgcagagctggacgccgaccatcctggcttcaaggacccagtgtaccgcgcacggcgcaaacagtttgccgacatcgcctacaactatcgccatggacagccgatacccagagtggaatacatggaagaagagaagaaaacgtggggcacggtattcaagaccttgaagtccttgtacaagacccacgcgtgctacgagtacaatcatatctttccgctgctcgagaagtactgcggatttcacgaggacaatattccgcaactggaggacgtgagccaattcctccaaacctgtactggctttcgccttaggccggtggccggcctgctcagctcaagagatttcctgggcggcctggccttccgggttttccactgcactcaatacatcagacatggatccaagccaatgtacaccccggagcccgatatctgccacgaactgctgggacatgtgccgctcttctcagatcgctcattcgcccaattctcccaagaaatcgggttggcctcgctgggtgcacctgatgagtacatcgaaaaactcgctaccatctattggttcacggtggaattcgggctctgcaagcaaggggactcaattaaggcgtacggagccggcttgctgtcgtcctttggcgaactgcagtactgcttgtcggaaaagcctaagctgcttcctctggaactcgaaaagaccgccattcagaattacaccgttacggaattccagccgctgtactacgtcgctgaatcgtttaatgacgccaaggagaaagtgaggaatttcgccgcaacgatcccacggccgttcagcgtgcgatacgatccttatacgcagcgcatcgaagtcctggacaacacccagcagcttaagatcctggcggacagcatcaacagcgagatcggaatcttgtgctccgcactccaaaagatcaaa

SEQ ID NO: 17897 - DNA, 1356 bp, synthetic construct
  misc_feature 1..1356: note = source = /note="Description of Artificial Sequence: Synthetic coding sequence"
  source 1..1356: mol_type = other DNA
atgagcaccgctgtgttggagaatcctggactggggaggaagctcagcgacttcggtcaagaaacttcgtacatcgaggacaactgtaatcaaaacggagcaatttcgcttatcttctctctgaaggaggaagtcggagccctggcaaaagtgctgagattgttcgaagagaatgatgtcaacttgacgcatatagaatcgcggccttcgagactcaagaaggacgaatacgagttcttcacccatctcgacaagcgctcgcttccggcccttaccaacatcatcaaaatcctccgccatgatatcggagccaccgtgcatgaactgtcacgggacaagaaaaaggacactgtgccctggtttccccgcactattcaggagcttgaccggttcgctaaccagatcctgtcgtacggtgccgaactggatgccgatcacccaggcttcaaagatccagtttatagggcaaggcgcaaacagttcgcagacatagcgtacaattaccgacatggccaaccaatcccaagagtggaatacatggaggaggagaaaaagacttggggaacggtctttaagactttgaaaagcctgtacaagactcatgcttgctacgagtacaaccatatcttccctcttctcgaaaagtactgcgggtttcacgaggataacatcccacaattggaagatgtgtcacagttcctccagacgtgtaccggctttcggctcaggccggtcgcagggcttctgtcctcacgggacttccttggaggactggcgttcagggtgttccactgcacccagtacatccggcacggatccaaaccgatgtacactccggagccggatatctgccacgaactcctggggcacgtgcctcttttcagcgacaggtcattcgcgcaattttcccaagaaatcggactcgcgagcctgggcgcccctgacgaatacatcgaaaaactggccaccatatactggttcaccgtggaattcggcctgtgcaagcaaggagatagcatcaaggcgtatggcgccggactgctgtcgagctttggagagctgcaatactgcctctccgaaaagccgaagctgctgccgctcgaactcgaaaagactgccatccagaactacactgtcaccgaattccaaccgctgtattacgtggcagaatcctttaatgacgcgaaggagaaggtgcggaactttgctgctaccatccctcggccattctccgtccgctacgacccctacactcaacgcattgaagttctcgataacacccagcagctcaagatcctggcggactccatcaactcagagatcggcattctgtgcagcgccctccaaaagattaaa

SEQ ID NO: 17898 - DNA, 1356 bp, synthetic construct
  misc_feature 1..1356: note = source = /note="Description of Artificial Sequence: Synthetic coding sequence"
  source 1..1356: mol_type = other DNA
atgtctaccgccgtgctggagaaccctggactcggacgaaaactttcggactttggacaggagacttcgtatattgaagataattgtaaccagaacggtgctatttcgctgattttctctctgaaggaggaagtcggggcactggccaaagtccttcggctttttgaagagaacgatgtgaatcttacccatatcgaatcgaggccttccagattgaagaaggatgaatacgaattcttcacgcacttggacaagaggtcccttcctgcgctcactaatatcataaagattcttcgccatgatattggcgctactgttcatgaattgtcgagagataagaaaaaagatactgtgccatggtttccacgtacgatacaagagctcgatcgctttgcaaaccagattctttcctatggcgcggaactcgatgccgaccaccctggatttaaggaccccgtgtaccgagcgagacggaagcaatttgctgacatcgcctacaactaccgacatggtcaaccaatcccgcgggtggagtacatggaagaagaaaagaaaacctggggcaccgtgtttaagactctcaagtctctgtacaaaacgcatgcatgttacgaatacaatcacattttcccacttctcgagaaatactgcgggttccatgaagataacatacctcagctggaagatgtgtcccaatttcttcagacctgcaccggctttagactgaggcctgtggctggactcctctcctcaagagatttcctgggaggcctggcttttcgggtatttcactgcactcaatacattcgccacggcagcaagcccatgtacacgcccgagcctgatatctgccacgagttgctcggccatgtacctctgttttcagatcgctcgttcgcacaattttcgcaagaaatagggctggcgtcactgggagccccagacgagtacattgaaaagctcgcaactatttactggtttactgtggaatttggtctgtgtaagcaaggtgatagcattaaggcatacggagcaggacttttgtccagctttggtgagctgcagtactgtctttcggagaaaccaaaactccttcccttggagcttgagaaaactgcaattcaaaactacaccgttaccgaatttcagcctctgtactacgtcgccgaatccttcaatgatgcaaaggaaaaggtgaggaacttcgccgccactattcctagaccctttagcgtccggtacgacccatacacccagaggatcgaagttcttgacaatacgcaacaactcaagatccttgcagattcaatcaacagcgagatcggaatcctgtgttcagcacttcagaagattaaa

SEQ ID NO: 17899 - DNA, 1356 bp, synthetic construct
  misc_feature 1..1356: note = source = /note="Description of Artificial Sequence: Synthetic coding sequence"
  source 1..1356: mol_type = other DNA
atgagtacagcagtcctggagaatcccgggctggggcggaaactgtccgactttgggcaggaaactagctacatcgaggacaattgcaatcagaatggagccatctcgttgatcttcagtctcaaggaggaagtcggcgccttggcaaaggtgctgcgcttattcgaggagaacgacgtcaacctcacccatatcgagtcccgcccttccagactcaaaaaggatgagtatgagttttttactcatcttgataagaggagtctgcccgcactgacaaacataatcaaaattctgcggcacgatatcggggccaccgtccacgaactctcacgggacaagaaaaaggataccgtcccatggtttcctcgcacaatccaagaactggacagattcgcaaatcagattctctcatatggggcagagctagacgctgatcatcctgggtttaaagacccagtatatagggcgaggcgcaagcaattcgcagatatagcctataactatcgacacggacagcccatcccccgagtggaatacatggaggaagagaagaagacatggggcacggtttttaaaaccttgaagtcattgtacaagactcacgcatgctacgagtacaatcatatttttccactgctcgaaaagtactgcggcttccacgaggataacatcccacaacttgaggacgtgagtcagttccttcagacctgcacaggattccggctgcgacccgttgccggcctgctctctagccgagattttcttgggggtttagccttccgcgttttccactgtacacagtatatccgtcacggctccaagccaatgtatacgccggaacccgacatctgtcacgagctcttgggccatgtgccattattctctgacaggtcttttgcccagttttcacaggaaatcggactggctagtctcggcgcaccagatgagtatatcgaaaagttggcaaccatctattggtttacagttgagttcggcctttgcaaacagggtgactcgattaaggcctatggagcggggctactgagctcctttggagagctccagtattgcttaagcgaaaagcctaagttgctgcctctggagctcgagaagacagccatccaaaactataccgtgaccgaattccagcctctttattacgtcgcagagtcatttaacgacgcgaaggagaaggtgcgtaactttgccgcaacaatcccccgccccttcagcgtccgctatgatccttatacgcaacggattgaggtgctggataacactcagcaactcaagatactggcagattcaataaactccgaaatcggcatcctctgttccgctttgcaaaagatcaag

SEQ ID NO: 17900 - DNA, 1356 bp, synthetic construct
  misc_feature 1..1356: note = source = /note="Description of Artificial Sequence: Synthetic coding sequence"
  source 1..1356: mol_type = other DNA
atgagcaccgccgtactcgaaaatccgggcctagggcgcaaattgtccgactttggccaagagaccagttacatagaggataactgcaatcagaacggtgctataagcctgatcttcagtctgaaggaggaagtcggcgcccttgctaaggtgctcagacttttcgaggagaacgacgtgaacctcacacacatagagtcccgtccaagtcgcctgaaaaaagacgagtatgagttttttactcatttggacaagcggtctctgcccgctctgaccaacatcatcaaaattcttcgacatgatatcggcgccactgttcatgaattgtcacgcgacaagaaaaaagacaccgtcccatggtttccccgcactatccaagagctggaccggttcgctaatcagatcctgagttacggcgccgaactagacgcagaccatcctggctttaaagaccccgtgtatagagcgcgcaggaagcaatttgctgacatcgcatacaactatcgccacgggcagcccatcccccgggttgagtatatggaggaggaaaagaagacctggggcacggtattcaagacactcaagtccctgtataaaacacatgcatgttatgagtacaatcacatcttccccctgctggaaaaatattgcggctttcacgaggataacattccccagttggaggacgtttctcagtttttgcagacttgtaccggctttcggttgcgtcctgtggcaggtctgttgtcatcccgggattttcttggagggcttgctttccgggtgtttcattgtacgcagtacattcggcacggcagcaaacctatgtatactcccgagcctgacatctgccacgaattgctgggtcatgtgcccctgttctctgatagaagcttcgcacaattctctcaagagatcgggttagcttccctaggggcaccagacgagtatattgagaagctcgctaccatttattggttcaccgtggagttcggcttgtgtaaacagggggattccattaaagcctacggggccgggctactaagtagcttcggggaactccagtactgtctcagcgagaaaccgaagttactacctctcgagctcgaaaagacggccattcagaattatacagtgactgaatttcagccactgtattatgtggcagagtcatttaatgatgccaaggagaaggttaggaactttgcagctactatcccgcggccgttctcggtgcgctacgatccttacacacagcgcatcgaggttctggacaacacgcagcagctgaagattctggccgattctatcaactcagaaatcgggatcctctgcagtgccctgcagaagattaag

SEQ ID NO: 17901 - DNA, 1356 bp, synthetic construct
  misc_feature 1..1356: note = source = /note="Description of Artificial Sequence: Synthetic coding sequence"
  source 1..1356: mol_type = other DNA
atgtcgactgctgtgctggagaatccgggactgggaagaaagctgtcggacttcggacaggagacgagctacatcgaagataactgcaatcagaacggtgcgatctcactgattttctccctgaaggaggaagtgggcgctctggctaaggtgctccgcctgttcgaagaaaatgatgtgaatctgactcatatcgagtcgaggccctcacgcctgaagaaggatgaatatgagtttttcactcacctcgacaagcgctccttgccggccctcaccaacatcatcaagattctgcggcacgacatcggcgccactgtgcatgagctgtcacgcgataagaagaaagacacggtgccatggttcccccgcactatccaggaattggaccgtttcgcaaaccaaatcctctcgtacggagctgaactggacgcggaccatcctggattcaaggacccagtctaccgcgccaggagaaagcagttcgcggatattgcctataactaccggcacggacaaccaatccctcgcgtcgagtacatggaagaggagaaaaagacctggggcactgtgttcaagactctcaagtcgctctacaaaactcacgcgtgctatgagtacaatcacatctttccgttgttggaaaagtactgcggcttccatgaagataacatcccccagctggaggacgtgtcacagttcttgcagacctgcactgggttccgcctccgccccgtcgcaggcctgctgtcaagccgggacttcctgggaggactggctttccgcgtgtttcactgtacccagtacatccggcacggatcaaagccgatgtacacgcctgaaccggacatttgccacgagctgctggggcatgtgccgctcttctccgatcgcagcttcgcccaattctcgcaagaaatcggcttggcttccctgggcgccccggacgagtacatcgagaaacttgcgaccatctactggttcaccgtggagttcggcctgtgcaagcagggagattcgatcaaggcctacggggccggactcctgtcgtcgttcggcgaacttcagtactgcttgtcggaaaagccgaaactgctccccctggaactggaaaagacggcgatccagaactacaccgttaccgaattccaaccgttgtactacgtggccgaatcatttaacgatgccaaggaaaaagtgagaaatttcgcggcaaccatccctagacctttctccgtgcgctacgatccatacacccagcggatcgaagtgctggacaacacccagcagctcaaaatcctggcagactcaatcaattccgaaatcggaatcttgtgttccgcgctccaaaagatcaaa

SEQ ID NO: 17902 - DNA, 1356 bp, synthetic construct
  misc_feature 1..1356: note = source = /note="Description of Artificial Sequence: Synthetic coding sequence"
  source 1..1356: mol_type = other DNA
atgtctacggcagtgcttgaaaatcccggactcggacgcaagctcagcgacttcggccaagaaacctcatacattgaagataactgcaatcaaaacggtgctatttccctcatcttttcacttaaagaggaagtgggagcacttgctaaggtgcttcgtctctttgaggaaaacgacgtgaacctgactcatatcgagtcccgaccgagcaggctcaagaaagatgaatacgagtttttcacccaccttgacaagcgcagcctccctgcccttactaatatcattaagatactgcgccacgacataggtgcaacggtgcacgaactgtctcgggataagaagaaagatacggtcccttggtttccacgtactattcaggaattggataggtttgcgaatcaaattctcagctacggagccgaactggatgcagaccatcctggttttaaggatcctgtctatagagctcggagaaagcagtttgcagatatcgcatacaactacaggcacggacagccaatccctagagtggaatacatggaagaggagaaaaagacctggggcactgtgtttaagaccctgaaatctctgtacaagacgcatgcttgttacgaatacaatcacattttcccactgcttgaaaagtactgtggattccatgaggacaacattcctcaactcgaagatgtttcgcaattccttcagacttgcaccggcttcagacttagacccgtggcaggcctgcttagctcccgcgatttcctgggtggactcgcgtttagagtctttcactgtacccagtacattagacatggatcgaagcctatgtacacccctgaaccggatatctgtcacgaactgctcggacacgttcctttgttctcggataggtcatttgcacaattcagccaggaaattggccttgcctccctcggagcacccgatgagtacatcgagaagctggccaccatttactggtttaccgtcgaattcggcttgtgcaaacaaggtgattcgataaaagcatacggcgccggccttctgtccagcttcggtgaactgcaatactgcctttcggaaaaaccgaagctcctcccactggaactggaaaagaccgcaattcaaaactacaccgtgactgagtttcaacctctttactacgtggcggaatcgtttaacgatgcaaaggagaaagtccggaatttcgcagccactatcccaaggccattttcagtgcggtacgacccctacactcagcgtatcgaggtgctcgacaacacccagcagctcaagatccttgcagactccattaactcggaaataggcattctttgttcggcactccaaaagataaag

SEQ ID NO: 17903 - DNA, 1356 bp, synthetic construct
  misc_feature 1..1356: note = source = /note="Description of Artificial Sequence: Synthetic coding sequence"
  source 1..1356: mol_type = other DNA
atgtccaccgcggtgctcgaaaacccgggattgggaagaaaactgtcggactttggccaggagactagctacatcgaagataattgtaaccagaatggagccatctccctcattttcagcctcaaagaagaggtgggagctctggctaaggtgctccgcctcttcgaggagaacgacgtaaacctgacccatatcgaaagccgcccttcacgtttgaagaaggatgaatacgaattcttcactcacctcgataaaaggtcgttgcctgcgttgacgaatatcattaagatcctgagacacgacattggggctactgtccacgaactctcgagagacaagaaaaaggataccgtgccatggtttccgcgcactatacaagaactggatcggttcgccaatcagatcctgtcctatggagctgagcttgacgcagaccacccaggctttaaggacccggtgtaccgcgcgaggcgcaagcaattcgccgacatcgcctacaactaccggcatggacagccgatcccccgggtcgaatacatggaagaagagaaaaagacctggggaaccgtattcaagacgctgaagtccttgtacaagacccacgcctgctatgaatacaaccacattttccctctgctggagaagtactgcggctttcatgaggacaacatcccgcagttggaagatgtgagccaattcttgcagacgtgcaccgggttcaggctgcgcccggtcgcgggactccttagctcgcgggacttcctcggaggactggcctttagggtgttccattgtactcagtacatccgccacggttctaagccgatgtacacccctgagcccgatatctgccatgaactgctgggccacgtcccactgttttcggatcgcagcttcgcgcagttctcccaggaaattgggctggcatcactgggtgcacctgacgaatacatcgagaagctggccaccatctattggtttactgtggagttcggcctctgcaaacaaggagattccatcaaggcctacggtgccggccttctgagttcgtttggcgagctgcaatattgtctgtccgagaaacccaagctgctgccactggaactggaaaaaactgcgattcagaactacacggtcaccgagttccagcccctttactacgtggcagagtcgttcaatgacgcaaaggagaaggtgcggaacttcgcggctactatcccgcggcctttcagcgtgcgctacgatccttacactcagagaatcgaagtgctcgacaacactcaacaactgaaaatcctcgctgactcaatcaattcggaaataggaatcctttgcagtgcccttcagaaaatcaag

SEQ ID NO: 17904 - DNA, 1356 bp, synthetic construct
  misc_feature 1..1356: note = source = /note="Description of Artificial Sequence: Synthetic coding sequence"
  source 1..1356: mol_type = other DNA
atgtcaacagccgtactggagaaccccggcttgggacgtaagttgtctgatttcggccaagagacctcatatattgaggacaattgtaatcagaacggcgctatatccctgatcttttcccttaaggaggaggtaggagccctggctaaggtccttaggctgtttgaagaaaacgacgtcaacctgactcacatcgaaagtcgccccagccgtctcaaaaaggacgagtatgaattcttcacccacctggacaaaagatcacttccagctttgaccaacatcatcaagatcctgagacatgatattggtgctaccgtgcacgagctcagccgtgacaaaaagaaggacaccgtgccttggttcccaaggaccattcaagagttggaccgctttgcaaaccaaattttgtcttacggcgccgagctggacgccgatcaccccggattcaaggatcccgtgtaccgcgctcgccgtaaacaatttgccgacattgcctacaactaccgccacggccagccaatcccacgtgtcgagtacatggaagaggaaaagaagacttggggtaccgtgttcaaaactctgaaatctctgtacaagacccacgcttgctatgagtataaccatatctttcccctgttggagaaatactgcggtttccacgaagacaacataccacagttggaggacgtgagtcagtttcttcaaacctgcactggtttcaggctgcgtcccgtggcaggtttgctctccagtagggacttcctgggcggcctcgcattcagggtgttccattgtacccagtacattcgtcatggctccaagcctatgtatacccccgaaccagatatttgtcacgagttgttgggccacgtgccactcttcagcgacagatcattcgcccagttttctcaagaaataggactggcttctctgggtgctcctgacgaatatattgaaaaactcgctactatctactggttcactgtagaattcggattgtgtaagcagggagacagtatcaaggcttatggtgcaggtctccttagcagcttcggcgagcttcagtattgcttgagcgagaaacctaagttgctgccactggaactggaaaagactgctatccaaaattacactgtcaccgaatttcagcccctctactacgtcgcagagtctttcaacgatgctaaagagaaggtaaggaatttcgctgccactatcccaaggccattctccgtcagatatgacccctacactcaacgtatcgaagtcctggataacacccagcagctgaagattctggccgatagtatcaactctgagattggcatcctgtgtagcgccttgcaaaagataaaa

SEQ ID NO: 17905 - DNA, 1356 bp, synthetic construct
  misc_feature 1..1356: note = source = /note="Description of Artificial Sequence: Synthetic coding sequence"
  source 1..1356: mol_type = other DNA
atgagcactgccgtgctcgaaaacccgggactgggccggaaactgtcggattttggacaagagacttcgtacatagaagataactgcaaccagaacggcgccatttctctgatcttctcgctgaaggaggaggtcggggcgctcgcgaaggtcctcaggcttttcgaagagaatgatgtcaatcttactcatattgagtcgcgcccttcaaggctgaagaaggacgaatacgagtttttcacccatctggacaaacgctctctcccggccctcactaatatcatcaagatccttcggcacgacatcggagctactgtgcacgaacttagccgcgacaagaaaaaggataccgtgccatggttcccacgcacgattcaggaattggatagattcgcgaaccaaatactgtcctacggagccgaactcgacgccgatcacccaggcttcaaggaccctgtgtaccgcgcccgcagaaagcagttcgcggacatcgcgtacaactacagacacgggcagcctatcccacgggtggagtatatggaggaagagaaaaagacttggggaaccgtgttcaagactctgaagtcgttgtacaagacccacgcatgctacgagtataatcacatctttccgctgctggaaaagtactgcggattccacgaggacaatatccctcaactggaggacgtttctcagttcctgcagacgtgcaccggatttcgtctgcggccagtcgcagggctgctctcttcacgcgatttcctcggtgggttggcatttcgcgtctttcattgcactcagtacatccggcatggttccaagcctatgtacaccccggaaccggacatttgtcacgaattgctcggacatgtgcctttgttttcggatcggtcctttgcccaattctcgcaggaaatcggcctggcgtccttgggagctcccgacgagtacatcgaaaagctcgccaccatctactggttcactgtggaattcgggctgtgcaagcagggagattcgattaaggcctacggcgccggcctgttgtcatcatttggtgagctgcagtattgtctgtcggagaaaccaaagctcctgcctctggagctcgaaaagactgcgatccagaactacaccgtgaccgagttccaaccgctgtactacgtcgctgaatcgtttaacgacgcgaaagaaaaagtccgaaacttcgccgcaaccatcccacggccatttagcgtaagatacgacccgtatactcaacggatcgaagttctggataacactcagcagctgaagatcttggccgactccatcaattcggagatcggaatcctttgtagtgcgctgcagaaaatcaag

SEQ ID NO: 17906 - DNA, 1356 bp, synthetic construct
  misc_feature 1..1356: note = source = /note="Description of Artificial Sequence: Synthetic coding sequence"
  source 1..1356: mol_type = other DNA
atgtctacagctgtgctggaaaaccccggattgggcagaaagctctccgactttggacaggaaacgagctacattgaagacaattgcaatcagaatggcgcgatttcactgatcttctcactgaaggaggaggtcggcgcccttgccaaggtgctgagactgttcgaggagaacgatgtgaacttgactcatattgagtcgcgaccctctcgactgaagaaggatgaatacgaattcttcacccacctcgataagcggtccctccccgccctgaccaacattataaagatcttgcggcacgatatcggagccactgtccacgaacttagtcgcgataagaaaaaagacaccgttccctggtttccccggaccattcaggagctggatagatttgccaaccagattttgtcttacggggctgagctggatgccgaccacccaggcttcaaggatcccgtctaccgcgctcggcggaaacaatttgcagacatcgcatataattacaggcatggccagcccattccacgggtggaatatatggaagaagagaagaaaacatggggaactgtgtttaagacactgaagagtctctacaaaacccatgcatgctacgagtacaaccatatcttccccctgctggagaagtattgcgggttccacgaggacaatattcctcagctggaagatgttagtcagttccttcagacctgcacagggttcaggctgaggcccgtcgccgggctgctgagttctcgtgatttcctggggggcctcgccttcagagtgttccattgcacacaatacatccggcatgggtccaagcctatgtacacgcccgagcccgacatttgccatgaactgcttggtcacgtgccattgtttagcgataggtcatttgctcagtttagtcaggagattggcttagctagtctgggcgcacctgacgagtatatagagaagctggctactatttactggttcacagtagagttcggattgtgtaagcaaggcgactccattaaggcatatggagccggactcctatctagcttcggagagctccagtactgcctgtctgagaaacccaagttactgcctctagaattggaaaagaccgcaatccagaactacacagtcacagagtttcagcccttgtattatgtggcagaatcattcaatgatgcaaaagagaaagtaagaaactttgccgctacaatcccaaggcccttttccgtccgctatgatccatacacacagcgcattgaggtcttagacaatacgcagcagctgaagatcttagccgattccataaatagcgagatcggaatcttgtgtagcgcgctgcaaaagattaaa

SEQ ID NO: 17907 - DNA, 1356 bp, synthetic construct
  misc_feature 1..1356: note = source = /note="Description of Artificial Sequence: Synthetic coding sequence"
  source 1..1356: mol_type = other DNA
atgtccactgcagtgctggaaaacccaggtttgggtaggaagctgtcggacttcggacaagagacttcttacatagaggataactgcaaccagaatggagctatctccctgatctttagccttaaggaagaagtgggtgcacttgcaaaggtcctccgcttgttcgaagagaacgatgtgaacctcacgcatatcgaatcccgcccttcgcggctgaagaaggacgaatacgaattcttcacgcatctcgacaagaggagcctgcctgctctgaccaatatcatcaagatcctgagacatgacatcggcgcgaccgtgcacgaactgagtcgggacaagaaaaaagataccgtgccgtggttcccacggacgatccaagaacttgacagatttgcgaatcaaatcttgagctacggcgccgaactggacgctgaccacccgggcttcaaggacccggtctaccgggccagacgcaaacaatttgcagatattgcctacaactatcggcacggccagcccatccctcgggtggagtacatggaggaggagaagaagacttggggaactgtgtttaagactcttaagtccctgtacaaaacccacgcctgttacgagtacaatcacatctttccgctcctcgagaagtactgcggatttcacgaagacaatattcctcaactcgaagatgtgagccagttcctgcaaacttgtactggattccgactccgccccgtcgccggactgctgtcgtcccgagatttcctcggaggacttgcttttagagtgtttcattgtactcagtacatcagacacggaagcaaaccgatgtacaccccagagcctgatatctgccatgagctcctcggacacgtgccgcttttcagcgatcgttcgtttgcgcagttctcgcaggaaattggactcgcctccctgggcgcgccggacgaatacatcgaaaagctggcaaccatttactggttcactgtggaatttggcctgtgcaagcagggcgactcgattaaggcctatggagcgggtctgctctcgtctttcggggagctccagtactgcctctccgagaagcccaagctcctgccgctggagctcgagaagaccgcgatccagaactacacggtgactgaatttcagccgctctattacgtggcagagtcattcaacgacgccaaagaaaaggtgagaaacttcgctgccactatccccaggccattctcagtaagatacgatccctatactcagcgaattgaggtgctggataacacccaacaacttaagatcttggctgattcgattaactcggagataggcatcctctgctccgccctgcagaagatcaaa

SEQ ID NO: 17908 - DNA, 1356 bp, synthetic construct
  misc_feature 1..1356: note = source = /note="Description of Artificial Sequence: Synthetic coding sequence"
  source 1..1356: mol_type = other DNA
atgtccaccgcagtcctggagaacccaggacttggtaggaagctctcggattttggccaagaaaccagctacattgaagataattgtaatcaaaatggtgccatcagccttatcttttccctcaaggaagaggtgggggcactcgctaaggtcctgagactttttgaggagaatgacgtgaatctgacccacatcgagtcgaggcctagcagacttaagaaggatgaatacgaattcttcactcatcttgataaacggtcgctgccagcacttactaatatcatcaagatcctgagacacgatattggagctaccgtgcatgaactttccagggataagaagaaagacaccgtcccttggtttcctcgcaccattcaagaacttgatcgattcgcaaatcaaatactgtcatacggtgcggaactggacgcggatcatcctgggtttaaggatcccgtgtacagagcccggagaaagcagtttgctgatatcgcgtacaactaccgtcacggccaacctatacctcgagtggaatacatggaggaagagaaaaagacgtggggtactgtgtttaagaccttgaagtcactgtataagacccacgcatgctatgaatacaaccacattttcccgctgctggagaaatactgcggttttcatgaagataacatacctcagctggaggatgtcagccaatttctccaaacctgcacgggttttaggcttcgtccagtggcgggactgctttcatcgagggactttctcggaggccttgcattccgggtgtttcattgtacgcagtacattcgccacggttccaaaccaatgtatacccctgaacctgatatatgtcatgaacttttgggacatgtgcctttgttttcggatcgctcgtttgcacagttttcccaggagattggcctcgcatcccttggagcaccggacgaatacattgaaaagttggctacgatctactggtttaccgtcgaatttggcctttgtaagcaaggggattccattaaggcctacggagcaggtctgctgtcatcgttcggggaactgcagtactgtttgtcggaaaaacctaagttgcttccgctcgaactggagaaaaccgccatacaaaactacacggtgactgagtttcaacctctgtactacgtcgcggaaagttttaacgatgcaaaggagaaggtgcgcaactttgcagcaaccattccacgcccatttagcgtgcggtacgatccctatacccaacggattgaggtgcttgataatactcagcaactcaagattctggcggacagcattaacagcgagataggaatcttgtgctcggcacttcagaagataaaa

SEQ ID NO: 17909 - DNA, 1356 bp, synthetic construct
  misc_feature 1..1356: note = source = /note="Description of Artificial Sequence: Synthetic coding sequence"
  source 1..1356: mol_type = other DNA
atgagcactgccgtgctggagaaccccggacttggccgcaagctgtcggatttcggacaggaaacttcctacatagaagataattgtaaccagaacggagcgatttcacttatcttttcgctcaaggaggaagtcggtgccctcgcgaaagtgctgagactgtttgaagagaacgatgtcaatcttacccatattgaatccaggccaagcagactcaagaaggacgaatacgagttctttacgcatctggataagcgctcgcttcctgcgttgaccaacatcatcaagatcctccgccatgatattggcgctaccgtgcatgaactgtccagggataagaagaaggatactgtgccttggttcccgagaactatccaggaactggaccgcttcgcaaaccagattctctcgtacggtgcagaacttgacgcagaccatccaggttttaaggatcccgtgtaccgtgcacgtcgtaagcaatttgccgatattgcgtacaactacagacatggtcaaccaattccacgggtggagtatatggaagaggagaaaaagacgtggggcactgtgtttaagaccctcaagagcctgtacaagactcatgcctgttacgaatacaatcacatatttccactcctggaaaagtactgcgggtttcacgaggacaatatcccccagcttgaggatgtgtcccaattcctgcaaacttgtactggatttaggcttaggccagtggcagggctgcttagctccagagattttcttggcgggctcgccttcagagttttccattgcacccaatacatcagacacggttccaagccgatgtacactccagaaccagacatttgtcatgaacttctgggacacgtgcccctgttttccgatcgatcgtttgcccaattttctcaagagataggactggcatcccttggcgcccctgatgagtatatcgagaaactggccaccatatactggtttaccgtcgagtttgggctttgtaaacaaggcgatagcataaaggcttatggtgcgggcttgctctcctcgtttggggagcttcagtactgtctttccgagaagccgaagctcctcccactcgaactggaaaaaaccgcgattcaaaactacactgtgactgagtttcaacctctttactacgtcgccgaatcgttcaacgatgcaaaggaaaaggtgcggaactttgcagcaacgattccccgccctttctcggtgcgttacgacccctacactcaacggatcgaggtccttgataatacgcaacaactcaagatcttggcagattccattaactccgaaatcggcattctgtgttcggccctccagaagataaag

SEQ ID NO: 17910 - DNA, 1356 bp, synthetic construct
  misc_feature 1..1356: note = source = /note="Description of Artificial Sequence: Synthetic coding sequence"
  source 1..1356: mol_type = other DNA
atgtcgactgcagtgctcgaaaacccaggactgggtcgcaaactttcagactttggacaagagacgtcgtacatcgaggataactgtaatcaaaatggtgcaatcagccttatcttttcccttaaggaagaagtgggagcacttgcaaaggttctgcggctgtttgaggaaaatgatgtcaatcttacccacattgaatccagaccaagcagacttaagaaggatgaatatgagttctttacccacctcgataagcgttcactgcccgcgctgactaatatcataaagatcctccggcacgatattggagcaaccgtgcatgaactctccagggataagaaaaaggataccgttccgtggtttcccaggacgatacaggagctggaccgctttgccaaccagatcttgagctacggggccgaactggatgcagaccaccctggatttaaggatcccgtctaccgtgccagacggaagcaattcgctgacatcgcatacaactacaggcacggtcaacccattcctcgcgtggagtacatggaagaagagaaaaagacttggggtaccgtgttcaagacccttaagagcttgtacaagacgcacgcatgctacgaatacaaccacatttttcctcttcttgagaaatactgtggtttccatgaagataacatacctcagttggaagatgtgtcacaatttctccagacttgtactgggtttcgcctgcggccggtcgcaggcctgctgtcatcgcgcgactttctcggcggactcgccttcagggtgtttcattgcacccagtacattcggcatggaagcaagccaatgtacaccccggaacctgatatctgtcacgaactgcttgggcatgtgccgctgttctcggatagatcgtttgcccaattttcgcaagagattgggctcgcctcacttggagcccctgacgaatacatcgaaaagctggcaacgatttactggtttactgtggagtttggcctgtgcaagcagggagattcgattaaggcctacggagcaggccttttgtcctcgttcggcgaactgcagtactgtctgtcggaaaagccaaaacttctgcccctggagctggaaaagactgccattcagaactacactgtcaccgaattccaacctctttactacgtggcagaatcatttaacgatgcaaaagagaaagtgcgaaacttcgcagccactatacctagacctttttccgtgcgatacgacccatacacccaacggatcgaggtccttgataacacccaacagctgaaaattctcgccgactcaatcaactcggaaataggaatactttgctccgcccttcaaaagatcaag

SEQ ID NO: 17911 - DNA, 1356 bp, synthetic construct
  misc_feature 1..1356: note = source = /note="Description of Artificial Sequence: Synthetic coding sequence"
  source 1..1356: mol_type = other DNA
atgtctacagcagtccttgaaaatcctggtttaggacgaaaattgtcagattttggacaagaaacatcatatatagaagataactgtaatcaaaatggtgctatctctttaattttttcacttaaagaagaagtcggagcattagcaaaggttttaagactttttgaagagaatgacgttaatttaacacatattgaatctcgaccatctagattaaaaaaagatgaatatgaatttttcactcatttagataaaagatctttgccagctttaacaaatattattaaaattttacgacatgatattggagctactgttcatgaactttctagagataaaaaaaaagacacagttccatggttcccaagaacaattcaagaacttgatagatttgcaaatcaaatattatcatatggagctgaattagatgctgatcatcctggatttaaagatccagtttatagagctagaagaaaacagttcgctgatattgcatataattatagacatggacaaccaattccaagagtagagtatatggaagaagagaaaaaaacatggggaactgtatttaaaacattaaaatctctctataaaactcacgcatgttatgaatataatcatatttttccattacttgaaaaatattgtggttttcatgaagataacataccacaattagaagatgtctcacaattcttacaaacttgtactggatttagattaaggccagtagcaggacttttatctagtagagattttttaggtggtttagctttcagagtatttcattgtacacaatatattagacatggatcaaaacctatgtatacaccagaaccagatatttgccatgaattattaggacatgttccattatttagtgatagatctttcgcacaattctcccaagaaattggactagctagtcttggagctccagatgaatatattgaaaagttagcaacaatctattggtttacagtcgaatttggtctttgtaaacaaggagattcaattaaagcttatggagcaggattgttgagttcctttggagaattacaatattgtttaagtgagaaaccaaagttattgccattagaacttgaaaaaacagctattcaaaattatacagttacagaatttcagccattatattatgtagcagaatctttcaatgatgcaaaggaaaaagttcgaaattttgctgctacaatccctagaccattctcagttagatatgatccatatactcaaagaatcgaagttttagataatacacaacaattgaaaattcttgcagattcaatcaactcagaaattggaattttatgtagtgcacttcaaaagattaaa

SEQ ID NO: 17912 - DNA, 1356 bp, synthetic construct
  misc_feature 1..1356: note = source = /note="Description of Artificial Sequence: Synthetic coding sequence"
  source 1..1356: mol_type = other DNA
atgtctaccgcagtactggaaaacccaggcctggggagaaagctgagcgattttggacaggagacttcatacattgaggataattgtaatcagaatggcgcgatctcccttatcttctctctgaaggaggaagtgggcgccctggctaaagtcctgagactgtttgaagaaaatgatgtgaacctgacacacatcgagtcacgcccgagtcgactcaagaaagacgaatatgaattcttcacgcacctcgacaagaggagcttgcccgctctcactaacatcatcaagatcctcagacacgacattggggccaccgtccatgaactgagtcgcgacaagaaaaaggacaccgtaccgtggttcccccggacaatccaggagttggaccgcttcgccaaccagatcctctcttacggcgcagaactggatgcggatcatccaggattcaaggatcccgtgtaccgcgcacgaagaaagcagttcgctgatatcgcttacaattacagacacggtcagcctatccctagggtggagtacatggaggaagaaaagaaaacatgggggaccgtgttcaagactctgaaatccctgtacaagacccacgcatgctacgaatacaatcatatatttcccttgctcgagaagtactgcgggtttcacgaggataacataccgcagctggaggacgtgagtcagttcctgcagacttgcaccggttttcggctcagacccgtagccggtttgctctcaagcagggactttttgggaggattggccttcagagttttccactgcacccagtacatcaggcatggaagtaagcccatgtatactcctgaacccgacatctgccacgaactgctgggtcacgttccactgttctctgaccggtcattcgcccagttttcacaggaaatcgggcttgcctctctgggggcacctgacgagtacatcgaaaaactcgctaccatctattggttcaccgtggagtttgggctttgcaagcagggagattccattaaggcttacggggctggactgctgagctcattcggcgagttgcagtattgcttgtccgaaaagccaaaactgctccccctggagctggagaagacagctatacagaattacaccgttactgagtttcagcccctctactatgtggccgaaagctttaacgacgccaaggagaaggtacgcaattttgccgcgactattccccgaccattcagcgtgcgctacgatccatacacgcagcgcatcgaggtgctcgacaacactcagcagctcaagatccttgctgatagcatcaacagcgagatcggcatcctgtgcagtgccctgcagaagatcaag

SEQ ID NO: 17913 - DNA, 1356 bp, synthetic construct
  misc_feature 1..1356: note = source = /note="Description of Artificial Sequence: Synthetic coding sequence"
  source 1..1356: mol_type = other DNA
atgtcgaccgccgttcttgagaacccagggctgggacgaaagttgtccgattttggacaagaaacctcgtatatcgaagataattgcaatcaaaacggcgcgatatcactcatcttttcccttaaggaggaagtgggggcacttgcgaaggtcctcagactttttgaggaaaacgatgtgaacctgactcatattgagtcacgcccttcgcggctcaagaaggatgaatacgagttctttacccatcttgataaacgctcgctcccagcactcactaacattatcaaaattctgaggcacgacattggcgcgaccgtgcacgagctttcccgggataagaaaaaggatactgtgccttggtttcctagaactatccaagaacttgatcgttttgccaatcagatactgtcgtacggtgcagagcttgacgcagatcacccgggatttaaggatcctgtgtacagggcacgcaggaaacaattcgcagacatcgcctacaattacagacatggtcaaccaatcccccgcgtcgagtacatggaggaggagaaaaagacctggggaaccgtgttcaagactcttaaaagcctttacaaaactcacgcttgttacgaatacaaccacatttttcccctcctggaaaagtactgtggctttcacgaggataacataccacaactggaagatgtgtctcaatttcttcaaacgtgcactggattccggctcagaccagtggcagggcttctttcctcgcgtgattttcttggaggtcttgcatttcgggtgtttcattgtacccaatacattaggcatgggtcgaagcctatgtacacccccgaacctgatatttgtcatgagctcctcgggcacgtgccattgtttagcgatcggtcgttcgcacagttctcgcaggaaatcggactcgcttcgctgggagccccagatgaatacatcgaaaaacttgcaactatatactggttcaccgtggaattcggattgtgtaaacagggcgactcaatcaaggcatacggagcaggtttgctgagctcctttggtgaactccaatactgcctttccgagaagccaaagctcttgccacttgagctggaaaagaccgcaatccagaactacactgtgactgaatttcagcccctttactatgtggcagagtcattcaacgatgcaaaggaaaaggtccgcaattttgcggcaaccatcccaagacccttttcggtccgttacgacccatacactcagcgcatcgaggtgctggataatacgcagcagcttaagatactcgcagactcaatcaactccgaaattgggattttgtgttctgcccttcaaaagatcaag

SEQ ID NO: 17914 - DNA, 1356 bp, synthetic construct
  misc_feature 1..1356: note = source = /note="Description of Artificial Sequence: Synthetic coding sequence"
  source 1..1356: mol_type = other DNA
atgtccacagccgtgctggaaaaccccggactgggtaggaagttgagcgatttcggccaggagacatcctacattgaggataattgcaaccagaacggggcgatctctttgatattcagtctgaaggaggaagtaggggcactcgctaaagttttgcgacttttcgaggaaaatgatgttaatctgacccacatcgagtcccgcccatcgcggctgaagaaggatgaatacgagttcttcacgcatcttgataagaggagtctgcccgctctcactaatataatcaaaattctccggcacgacatcggggccacagtgcacgaattgagtcgcgacaagaaaaaagacaccgtgccttggttcccgcgcacaatacaggagctcgacaggtttgctaaccaaatactctcatatggggccgaattggatgccgaccatcctggcttcaaagaccctgtgtatcgagctagacgcaaacaatttgcggacatcgcttacaattacaggcatgggcagcctattcctcgcgtggagtacatggaggaggagaaaaaaacatggggaacggtgttcaagacgcttaagagtctctataagacccatgcatgctacgaatacaaccacatcttccccttgctcgaaaaatattgcggattccatgaagataacatcccccaactggaggatgtttcacagttcctgcaaacatgcacaggttttaggcttagaccagtggccggcctgctgtccagtcgcgactttctgggcggcctggcctttcgagtattccattgcacacaatatatcaggcacgggagtaaacccatgtatactcctgagcctgatatttgccatgagctactggggcacgtgcccctcttcagtgacaggtcctttgcccagtttagccaggagatcggcctagcctcccttggggctcccgatgaatatatagagaagctggcgaccatatactggtttacagtcgaattcggtctctgcaaacagggtgactctattaaggcatacggcgccggcctcctttcctcctttggcgaattacaatactgcctgtcagaaaaacctaaactcttgcctttggaactggagaagactgcgattcaaaattacactgtgactgaatttcaaccactatattatgtcgcagaatcatttaatgatgcaaaagagaaagtgcgcaacttcgctgcaaccattccccgccctttttccgtccgctatgatccctacacacaacgcatagaggtgctggataatactcagcagcttaagatcctggccgattccatcaattcagagatagggattctgtgttctgcgctgcagaagattaag

SEQ ID NO: 17915 - DNA, 1356 bp, synthetic construct
  misc_feature 1..1356: note = source = /note="Description of Artificial Sequence: Synthetic coding sequence"
  source 1..1356: mol_type = other DNA
atgagtacagccgtcctggaaaacccaggcctaggtagaaaactgtccgactttggtcaggagacgagctatatcgaggacaactgtaatcagaatggcgctatctctttaattttcagcctcaaggaggaggtgggtgctctcgctaaggtgcttcggctctttgaggagaacgacgtgaatctcacccacatagagtctaggccctctaggctaaagaaggatgagtacgagttctttacacatttggacaagagatcattaccggcactcacaaacattattaagattctgcgccacgatatcggcgccaccgtgcacgaactgagtcgcgacaagaaaaaagacaccgtcccttggtttccacgcacaatacaggaattggacaggtttgccaatcagattttgagctatggcgcagagctcgacgccgatcaccctggctttaaagatcccgtttatcgagcaagaagaaagcagttcgccgatatcgcctataattaccggcatggtcagccaatacctcgcgtagagtatatggaggaggagaagaagacatgggggactgtttttaaaactctcaagagtttatataaaacacacgcttgttatgaatataaccatattttccctctgctcgaaaaatactgcggttttcacgaagataatataccacagctggaggacgtgtcccaattcctgcagacatgtactggctttcggctgcgccctgtggctggcctgttatcaagccgcgactttctgggaggcctggcctttcgagtgttccactgcacccagtacatcagacacggatccaagcccatgtacacacctgagccagacatttgccatgagctgctggggcatgtgcctctgttttccgaccgaagtttcgcacagttttcccaagaaatcggactggcatccctaggcgccccagacgagtacatagaaaagctggccacgatttattggtttacagtggagtttggcttatgtaagcagggggattcaatcaaggcttacggcgccggtctcctgtcatcctttggagaactgcaatactgcctctcggaaaagcctaagttgcttcccctggagttggagaaaaccgctatccaaaattatacggtgacagagtttcaacccctctactacgtggcggaatcctttaacgacgcgaaagaaaaggtaagaaatttcgccgccacaattccccggcctttcagcgttaggtacgacccctatacccaacgcatcgaggtgttggataatactcagcaactgaagattctcgctgactccatcaatagcgagattgggatcctgtgcagcgctctgcagaaaattaaa

SEQ ID NO: 17916 - DNA, 1356 bp, synthetic construct
  misc_feature 1..1356: note = source = /note="Description of Artificial Sequence: Synthetic coding sequence"
  source 1..1356: mol_type = other DNA
atgtccaccgccgtgctggaaaaccctggcctgggtcggaagctgtccgattttggtcaagaaacatcctacatcgaggataactgcaatcagaacggtgccataagtctgatttttagtttaaaggaggaagtgggtgcgctggccaaggtactacggctgttcgaggagaacgacgtgaatctaacccatatcgaatcaaggccgtctagactgaagaaggacgagtatgagttctttacccacctcgacaagcgttcacttcctgcgctgacaaatatcatcaagatccttaggcatgacatcggtgccaccgtgcacgaactctcccgggacaaaaaaaaggataccgtcccttggttcccgcgcaccatccaggaactggaccggtttgctaaccagattctgtcctatggagctgagctggacgccgatcaccctggcttcaaggacccagtgtatcgggcccggcggaagcagtttgctgacatcgcttacaactataggcatgggcagccaatacccagggtggagtacatggaagaggaaaaaaagacttggggtaccgtctttaagacactcaagtctctttacaagactcatgcatgctacgagtataaccatatattccctctgctagagaagtattgtggcttccatgaagacaatattccacagcttgaggacgtgagccaatttctgcagacctgcaccgggttccggctccggccagtagccggactgctctcgtctagagactttctcggcggcctggccttcagagttttccactgcacccagtacattagacacggctccaagcctatgtatacacctgagccagatatatgccatgaactcctggggcacgtcccgttgttcagtgacagaagcttcgcacagtttagccaggagatcggactcgcttctctgggagcccccgacgaatatatcgaaaagctcgcaacaatttactggtttactgtcgaatttggcctgtgcaaacagggtgactctataaaggcttacggagccggtctgctaagttccttcggcgagctgcaatattgtctctccgagaagcctaagctacttcctctcgagctggagaaaaccgccattcaaaattatacagtgacagagttccagcctctgtattatgttgccgagagcttcaatgacgccaaggagaaggtccggaactttgccgccactataccacggcctttcagcgtgaggtatgatccctatacccaaagaatagaggttctggataacacacagcaacttaagattctcgccgattcaatcaacagcgagatcggtatcttgtgctccgcactccaaaaaatcaag

SEQ ID NO: 17917 - DNA, 1356 bp, synthetic construct
  misc_feature 1..1356: note = source = /note="Description of Artificial Sequence: Synthetic coding sequence"
  source 1..1356: mol_type = other DNA
atgagcacagctgttttggaaaatccaggactgggccgcaagctgagtgacttcggccaggaaaccagttacatcgaggacaattgtaatcagaacggtgccatctccctgatcttttccctcaaagaagaggttggagctcttgccaaagttcttaggctctttgaagagaacgacgtgaacctgacccacatcgaaagcaggcccagtaggctgaagaaggatgaatatgagtttttcacccacctcgacaagaggtccctcccagcactgaccaatattatcaaaatccttcgccatgatatcggcgcaacggtgcacgagctgtccagagacaaaaaaaaggacacagttccgtggtttcctaggacgatccaggaactggacagatttgctaatcagattctcagttatggcgctgaactggacgcagaccaccccggctttaaagaccctgtgtacagagctagaagaaaacagttcgccgacattgcttacaattaccgccatggacaacctatcccacgcgtcgagtacatggaggaagagaaaaagacgtggggaaccgtcttcaagaccctgaaatctctttataagacccatgcctgctatgagtacaaccatattttccctctgctcgaaaaatactgtggtttccacgaggacaacatacctcagctcgaagacgtatcccaatttctgcagacatgcacaggatttagactcagacccgtggccggactgctctcttcaagagactttctgggaggccttgcattcagggtctttcattgtacccaatacatcagacacggcagcaaacctatgtacaccccagagcccgatatatgccatgagctccttggccatgtgccgctcttctcagatcgcagcttcgcgcaattcagccaagagattggactggcttctctcggcgctccagacgaatacatcgaaaagctcgctactatctattggtttacagtggaattcggtttgtgcaaacaaggagacagtatcaaggcctatggagcgggactgcttagtagtttcggcgaacttcaatactgcctttcagagaaacccaagcttcttcccctggagctcgaaaagactgcgattcaaaattacactgtcactgagttccaacccctctattacgtcgctgagtcttttaatgacgccaaggaaaaggtgagaaattttgctgccactattccaagaccattttcagtccgctatgacccctacacccagagaatagaagtgttggacaacacccagcagctgaagatactggcagacagtatcaattctgagatcggaatcctgtgcagtgcactgcagaagattaag

SEQ ID NO: 17918 - DNA, 1356 bp, synthetic construct
  misc_feature 1..1356: note = source = /note="Description of Artificial Sequence: Synthetic coding sequence"
  source 1..1356: mol_type = other DNA
atgagcactgcagtgctggaaaaccctggtctgggcagaaagctgtccgatttcgggcaggaaacctcttatattgaggacaactgtaaccagaacggcgcgatctccctgattttctccctaaaggaagaggttggcgccctggcaaaggtactgagactctttgaagagaatgatgtgaacttgacacatatcgagtcaaggcccagccggcttaaaaaggatgaatacgaattcttcacacatctagacaagcgaagtcttccagctcttaccaatatcatcaagatcctccgacatgacatcggagctacagttcacgaattgtctagagataagaagaaggacacagttccttggtttcctcgaacaattcaggaactggatcgtttcgcaaaccaaatacttagttatggtgccgaacttgatgccgaccatcctggcttcaaggacccagtctaccgagccaggcgaaaacaattcgcagacatcgcttacaattatcgtcacggacagcccatacctagagtggagtatatggaggaagagaagaaaacatggggcaccgtctttaagacgctcaaatcattatacaagacacacgcatgctacgagtacaaccacatcttcccactactcgagaagtactgtgggttccatgaagataacatccctcagctggaagacgtaagccagtttctgcaaacttgcacgggcttcagattgcgccccgttgctgggctgcttagtagccgtgactttctgggagggttggcgttccgagtgttccactgcacgcagtatatcagacacggaagcaagccaatgtatactcccgagccagatatctgccatgaactcttggggcacgtgccacttttttccgaccggtctttcgcccaattcagtcaagagattgggttggccagcctgggcgcccccgacgaatacatcgaaaagctggcgacgatttattggttcactgtagaattcggcctgtgcaagcagggtgactcaatcaaggcctacggtgctgggttgctgagctcatttggtgaactgcagtattgtttgagcgagaaaccaaagcttctgccccttgagctagaaaaaactgccatccaaaactacacggttacagagttccagccgctttactatgtagctgaatcatttaacgacgccaaggaaaaagtgaggaatttcgcagccaccataccaaggcctttctcggtgagatacgatccttacacacagagaatcgaagtgcttgataatactcaacagctcaaaattctggcggactcaattaattccgagattggaatcctatgttctgcgctccagaagattaaa

SEQ ID NO: 17919 - DNA, 1356 bp, synthetic construct
  misc_feature 1..1356: note = source = /note="Description of Artificial Sequence: Synthetic coding sequence"
  source 1..1356: mol_type = other DNA
atgtccacagccgtgctggagaatccaggtctcggacggaaactctccgattttggccaggaaacctcgtacatcgaggacaattgcaatcagaacggcgccatctccctaatcttttccctgaaagaggaggtaggagccctcgctaaagtacttcggctttttgaggaaaacgacgttaacctgacacacatagaatcaaggccctctcgcctgaagaaggacgaatacgaattcttcactcatctggataagcgaagcctgcctgccctcactaatatcatcaagattctgagacatgacattggagctactgtccacgagttgagcagggataagaaaaaggataccgtgccttggtttccacgcacaatccaggagttagatcgcttcgcgaatcagatattatcttacggcgccgagcttgatgccgatcatcctggcttcaaggaccctgtgtatagggcacgccgtaaacagttcgccgatatcgcgtacaactatcggcacgggcaaccaatcccaagggtggaatatatggaggaagaaaaaaagacttgggggacagtgtttaagaccctgaagtcactgtacaagacccatgcgtgctatgagtataatcacatttttccccttctggagaaatattgtggttttcacgaagataacataccccagctcgaggatgtgagccagttcctgcaaacatgcactgggtttaggctgcgacctgtggcggggcttctgagttcacgtgactttctcggagggctggcttttagagtcttccactgcacgcagtatatacggcatggctctaagccaatgtacaccccagaacccgacatttgccatgagctgctggggcacgtccctctgttttctgaccgcagctttgcacagtttagccaagagatcggcctggcttctctgggagctccagacgaatatatcgaaaaacttgcaaccatttactggttcaccgttgagttcgggttgtgcaagcagggcgacagtattaaagcctacggcgccggactgctttcctctttcggggagctgcagtactgcctaagcgaaaaacctaaactgctccccctagagctagagaagaccgcaatacaaaactatacggtcaccgagtttcaacctctctactacgtggccgagagcttcaacgacgcaaaggaaaaagttagaaacttcgccgccacgataccacggcccttctcagtcaggtatgatccgtatactcagaggatcgaagttctggacaacacacagcaattaaaaatcctggccgactcgatcaattccgaaattggaatcctctgttccgctctccaaaaaattaag

SEQ ID NO: 17920 - DNA, 1356 bp, synthetic construct
  misc_feature 1..1356: note = source = /note="Description of Artificial Sequence: Synthetic coding sequence"
  source 1..1356: mol_type = other DNA
atgtcgacagctgtcttggagaatcccggattaggacgaaagctctccgacttcggccaggagacctcctatattgaggacaactgtaaccagaatggtgccatatcgttgatctttagcctgaaggaagaggtgggagctctcgcaaaagtcctgagactttttgaagaaaatgatgtgaacctgacccacattgagtcacggccatctcggctgaagaaggatgagtatgaatttttcacccacttggacaaaagatcattgcccgccctgaccaacatcatcaagatcctgcgccacgatatcggcgccacagtccacgagttgagccgcgacaagaaaaaggataccgtgccctggttcccgcgaactattcaggagctcgaccggttcgccaatcaaattttgtcctatggggccgagttagatgctgaccaccctggcttcaaggaccctgtgtacagagcgcggcgcaaacagttcgccgacattgcatacaattatcgccacggacagcctatcccccgggtcgaatatatggaagaggagaagaagacatggggaaccgtgtttaagaccttgaaaagcctctataagacacatgcctgctatgagtacaatcatatctttccactgctcgagaaatactgtgggttccacgaggacaatattccccagctcgaggatgtctcccaattcctccagacttgcaccggattccgattgcggcctgtggccggtttactctccagtcgggatttcttgggtggccttgcattcagggtattccactgtactcaatatataaggcacgggagtaagcccatgtacacccccgagccagacatctgtcacgagctcttgggccacgtgcccctattttccgatcggtcctttgcgcagttcagccaggagataggcctcgcctccctgggcgcacctgacgaatacattgagaaacttgctaccatctactggttcacagtggaattcggactgtgcaaacagggtgatagcatcaaggcctacggcgccggtctgttatctagtttcggagagttgcaatactgcctgtccgagaagcccaaacttcttcctctcgaattagaaaaaaccgctatacagaactatactgtcaccgagtttcagcccctgtactacgtcgcggaatcttttaacgacgctaaggagaaggtacgcaatttcgctgctacaattcctcggcccttttccgtacggtacgacccctacacccagcggatagaagtcttggacaacacgcagcagctgaagattttggcagacagcataaattccgaaatcggcatcctgtgttccgccctgcagaagatcaaa

SEQ ID NO: 17921 - DNA, 1356 bp, synthetic construct
  misc_feature 1..1356: note = source = /note="Description of Artificial Sequence: Synthetic coding sequence"
  source 1..1356: mol_type = other DNA
atgtccaccgccgtcctggagaacccgggcctcggccgtaagctgagtgattttggccaggaaacttcatatatcgaagataactgcaatcaaaatggggccatcagcctcatcttcagcctgaaggaggaagttggagctcttgctaaagtgctgaggctctttgaagaaaacgatgtaaatctgacccacatcgagagccgaccctctcgcctcaagaaggatgaatatgagttttttacacacctggataaacgaagcctccccgccctcactaacattataaaaatcctacgccacgatataggtgccacagttcacgaactatcccgcgacaagaagaaggatacagtgccttggtttcctcggaccatacaggaactggatcgatttgccaaccagatactgagttacggtgcagagctggacgcagaccaccccgggttcaaggaccccgtatatagagcccggcgtaagcaattcgcagacattgcttacaattaccggcacggacagccaataccgcgagtggaatacatggaagaggagaaaaaaacctgggggaccgtgttcaagacactgaaatcactttataagacacatgcatgttatgaatataaccatattttcccactgctggagaagtattgtggatttcacgaggataatattcctcagctagaggacgtgtctcaatttctccagacctgtaccgggttccggctgagaccagtcgcaggtctcttaagcagtagagattttctcgggggactcgccttcagagtgtttcattgcacccagtacataagacatggttctaaaccaatgtacacccccgagccggatatctgtcatgagctgctgggccacgtgcccctattcagcgataggtctttcgctcaattcagccaggagatcggtcttgcatccctgggggcccccgacgagtacattgagaaacttgcaaccatctactggtttaccgtagagttcggcctctgtaagcagggcgattctatcaaggcatatggagctggtctgctcagcagctttggggagttgcaatactgtctgagcgagaagcccaagttgctgccactggagctagagaaaacggccattcaaaattatacagtgactgagtttcagccattgtactatgtggcagaaagttttaatgacgccaaagagaaagtgagaaattttgcagcaacaatccctaggcccttttctgtgcgttatgatccatatactcagaggatcgaggttcttgataatacccagcagctcaagatcctggccgattccattaactcagagatagggattctgtgctctgcactgcagaagatcaaa

SEQ ID NO: 17922 - DNA, 1356 bp, synthetic construct
  misc_feature 1..1356: note = source = /note="Description of Artificial Sequence: Synthetic coding sequence"
  source 1..1356: mol_type = other DNA
atgagcaccgcggtcctcgaaaacccgggactgggccgaaaactctcagatttcggacaagaaactagttacattgaggacaactgcaatcaaaatggggctattagcctgattttttccttaaaggaggaggtaggggcactggctaaagtgctcaggctttttgaggagaatgatgtcaacctgacacacatcgagtctcgcccttccaggcttaagaaagatgagtatgagttttttacacacctcgataagaggtcactgcccgcactgacgaatataatcaaaatactccgtcacgatataggtgctacggttcacgagctgtcacgggataaaaagaaggatacagtgccatggtttccacgaacgatccaagagctggatcgatttgccaaccagatcctgtcctacggagccgagctggatgcagaccaccccgggtttaaggatcctgtgtaccgcgcccgacgaaagcagtttgccgacattgcctataactaccgacacgggcagccaattcctagggttgaatatatggaagaagaaaagaagacgtgggggacggtcttcaagacactgaaaagtctgtacaaaacccacgcatgttatgaatataaccacatcttcccactgctagagaagtattgcggattccatgaggataatattccccagctggaagatgtgtcccagtttttacagacatgcaccggattccgactgcgacctgtggccggcctgctcagctcccgagattttttgggtgggctagctttcagggtgttccattgcacacagtacatcagacatgggtccaagccaatgtatacgcctgaaccagatatctgtcatgagctcctcggacacgtgccactctttagtgatcgcagctttgcccaatttagccaagagatcggactcgcctcattgggcgcacccgatgagtacatcgaaaagctggcgacgatttactggttcactgtggagtttggtctgtgcaaacagggggactctatcaaggcttatggggccggcttgttgagttcattcggagaactgcagtattgcttgtccgagaagccaaaactgcttccattggagctagagaaaactgccatccagaactacacagtcaccgagtttcagcccctctactacgtcgctgaatcctttaacgatgctaaagagaaggtgaggaactttgcagcaactattcctcggccattctcagtgaggtatgacccctacacccaacgcatcgaggtccttgataatacgcagcagctgaagatcctagctgattcaattaactctgagatcggaatcctctgtagcgctctccagaagataaaa

SEQ ID NO: 17923 - DNA, 1356 bp, synthetic construct
  misc_feature 1..1356: note = source = /note="Description of Artificial Sequence: Synthetic coding sequence"
  source 1..1356: mol_type = other DNA
atgtcaactgcggtgttggagaatcccggtctgggcaggaagctgtcggactttgggcaggagacgtcgtatatcgaagataattgcaaccagaacggcgcgatttcgctcattttcagcctcaaagaggaggtgggagccctggcgaaagtgttgaggctgttcgaagaaaatgacgtcaacctcactcatatcgagagcagaccgtcgcgtctcaagaaggatgagtacgagttctttactcatctcgataagcgctcccttccagccctcactaatatcatcaaaatccttcggcatgacattggcgccacggtgcacgaactgtcccgggataagaagaaggataccgtgccatggtttccgcgcactatccaggaactggaccgctttgcgaatcagatcctgtcatacggagcagaattggacgctgatcacccaggatttaaggatccggtctaccgcgcgcgccggaagcaatttgcggacattgcctacaactaccggcacggtcagccaatcccgcgcgtggagtacatggaagaagaaaagaaaacttggggaactgtgttcaagaccctcaaatcgctctacaaaactcacgcctgctacgagtacaatcacatttttccactgctggagaaatactgtgggttccacgaggacaacatcccgcagctcgaggatgtgtcacagttcctgcaaacctgcaccggatttcgcctccggcctgtggcgggtctgctgtcaagccgggacttcctcggaggcctggcgttccgcgttttccactgcacgcaatacattcgccacggatcaaaaccgatgtacaccccagagccagacatctgtcatgaactcttggggcacgtcccgctgttctccgatcgctcattcgcccagttcagccaggagatcggactggctagcctgggagctccggacgaatacatcgagaagttggcgacgatctattggtttaccgtggaatttggactttgcaaacaaggagactcaatcaaggcatacggcgcaggcctcttgtcctccttcggagagctccagtactgcctttcagagaagccgaaactgctgccacttgaattggaaaagactgcgatccaaaactacaccgtcactgagttccagccgttgtactacgtggccgagtcctttaatgacgcgaaggaaaaggtgaggaatttcgctgccaccatcccgcgcccctttagcgttaggtatgatccctacactcaacggattgaagtcctggataatacccagcaacttaagattctggccgattcaatcaatagcgaaatcggaatcctgtgttcggctctgcagaagattaag

SEQ ID NO: 17924 - DNA, 1356 bp, synthetic construct
  misc_feature 1..1356: note = source = /note="Description of Artificial Sequence: Synthetic coding sequence"
  source 1..1356: mol_type = other DNA
atgagcacggcggtcctcgagaatcctggcctgggacgcaagctgtcggatttcggacaagaaacttcatacattgaagataactgtaaccaaaatggcgcaattagcctgattttcagcttgaaggaagaagtgggagcacttgcgaaggtgcttagattgtttgaagaaaacgatgtgaaccttactcacattgaatcacggccatcgagactgaaaaaggatgagtacgaattctttacccaccttgacaagcgctccctcccagccctgactaacatcattaagattctccgacacgatattggggcaactgtccatgaactttcgagagacaagaaaaaggacaccgtgccttggttcccacgaactattcaagaacttgatcggttcgctaatcagattctttcatacggagctgagcttgatgcagatcatcccggcttcaaggatcctgtgtaccgcgcgaggcgcaaacagttcgcggatatcgcctacaattaccggcacggacagcccatcccccgcgtcgaatacatggaagaagagaagaaaacttggggcaccgttttcaaaacccttaaatcgttgtacaaaacgcatgcctgctacgaatacaaccacatctttcctcttcttgaaaagtactgcggtttccacgaggataacattccccaacttgaggacgtgtcgcagtttttgcaaacttgtaccggatttcggctccgccccgtggcaggtctgctgtcgagccgcgattttctcgggggacttgcattccgagtgtttcattgcacccagtacattaggcatggatccaagccaatgtatacccctgaacccgatatatgccacgagctgttgggtcacgtcccgctcttttcggacagatcgtttgcccaatttagccaggaaattgggctggcaagcctgggtgcacctgacgaatacatcgaaaagttggccaccatttactggttcactgttgagttcggactgtgtaagcaaggagattccattaaggcatacggtgcagggctcctctcatccttcggcgagctccaatactgcctttcagaaaaacccaagctgctgcctctggaactggaaaagacggcaattcagaattacacggtgactgaatttcaaccactctactacgtggccgaatcctttaatgacgccaaggagaaggtgcgcaattttgcagcgaccatccctcgcccatttagcgtgagatacgatccttacacccagcgtattgaagtgctggataacacccaacagttgaaaatacttgccgattccatcaactccgaaatcggaatcctttgtagcgctctgcaaaagattaag

SEQ ID NO: 17925 - DNA, 1356 bp, synthetic construct
  misc_feature 1..1356: note = source = /note="Description of Artificial Sequence: Synthetic coding sequence"
  source 1..1356: mol_type = other DNA
atgtccactgccgtgctggaaaacccggggctcggcaggaaactttccgatttcggacaagaaaccagctacatagaggacaattgtaaccaaaatggggccatctcgctcatcttttcactgaaggaggaagtgggggcactcgctaaggtgcttagactgttcgaagaaaacgatgtcaacttgacccacattgaatccaggccttcccgcctgaagaaagacgagtatgagttctttacccatctggacaagcggtcccttcctgcgctgactaatatcattaagatcttgcggcacgacattggcgcaaccgtgcacgaactgtcgcgagataagaaaaaggatactgtgccctggttccctaggaccatccaagagctggatagattcgcaaaccagattctgtcctacggagcagaactggacgcagatcatccaggatttaaggaccctgtgtaccgggcacggcggaagcaattcgcagatattgcgtacaattaccgccatggccaacctatccctagagtcgagtacatggaggaagaaaagaaaacctggggtactgttttcaaaactttgaagtccctgtacaaaactcacgcgtgttacgaatacaaccatatctttccactgctcgagaagtattgtgggtttcatgaagataacatccctcaacttgaggatgtgtcgcagtttctgcagacttgcacggggtttagactgaggcccgtcgcaggcctgctgagctctcgggattttcttggaggactggcatttcgagtctttcattgcactcaatacattaggcatggatcaaagcccatgtacacccctgaacctgatatttgtcatgaacttcttggccatgtgcctctgttctcagaccgttccttcgctcaatttagccaggagattggtctggcttcgcttggtgccccagacgaatacattgagaagctcgcgaccatttactggtttaccgttgagtttggcctttgcaagcaaggtgacagcataaaggcatatggagcaggtctgctctccagtttcggtgaacttcagtactgtctttcagagaaacctaagctccttccgctggagctggagaaaactgccatccagaactacaccgtgacggaattccaacctctttactacgtagcagaatcatttaacgatgctaaggaaaaggtcagaaatttcgcagccaccattcctagaccgttctcggtacgctacgatccctacacgcaacgtatcgaagtgcttgacaacactcagcagcttaagatacttgctgacagcatcaactccgaaattggaatcctgtgttccgcacttcagaagataaaa

SEQ ID NO: 17926 - DNA, 1356 bp, synthetic construct
  misc_feature 1..1356: note = source = /note="Description of Artificial Sequence: Synthetic coding sequence"
  source 1..1356: mol_type = other DNA
atgtcgaccgctgtgctggaaaacccgggcctcgggcgaaagctgagcgacttcggacaagaaacctcctacatcgaggacaattgtaatcagaatggggctatttcactcatattctcgcttaaggaagaagtgggcgcactggcaaaggtgctccgcctgttcgaagaaaatgacgtgaacctgacgcacatcgagtcacggccaagcagactcaaaaaggacgaatacgagttcttcacccacctggacaagcgcagcttgccggccctgactaacattattaaaatcctcagacatgatatcggagcgaccgtccatgaactgagcagagacaagaagaaagataccgtgccttggttccctcggactatccaggagctggaccgtttcgccaaccaaatcctgtcgtacggggccgaactggacgcagaccaccctggctttaaggacccggtgtaccgcgccaggaggaagcagtttgccgacatcgcgtacaattaccgccacggacagcccattccaagggtggaatacatggaggaggagaaaaagacgtggggcactgttttcaagaccctcaagtccctgtacaagactcatgcctgttacgagtataaccatatctttccgctgctggagaaatactgcggcttccacgaggataatattccacaactggaggacgtctcccagttcctccagacttgcactggattccggctgcggccggttgctggtttgttgagtagcagagattttctgggaggcctcgcgttccgggtgttccactgcacccagtacatccgccacgggtccaagccaatgtacaccccggaacccgatatctgccacgagctcctcggacatgtgccgctgttctcggatcgctcatttgcgcaattctcccaggaaatcggactcgcgagcctgggtgccccggatgaatatatcgagaaacttgctactatctactggtttaccgtcgagttcggactgtgcaaacaaggagattcgatcaaagcctacggtgcgggactgctgtcgtccttcggagaactccagtactgtttgtcggaaaagccgaagctgcttccactcgaactggaaaagactgcaatccagaactacaccgtgacggaattccaaccgttgtactatgtggccgaatcctttaacgatgctaaagaaaaggtccgcaacttcgccgcgactatccctagacccttttcagtccggtacgatccatacactcaacgcatcgaggtgcttgacaacacccagcagctgaagatcttggccgactctattaactcagagatcggaatcctctgctcggcacttcagaagatcaag

SEQ ID NO: 17927 - DNA, 1356 bp, synthetic construct
  misc_feature 1..1356: note = source = /note="Description of Artificial Sequence: Synthetic coding sequence"
  source 1..1356: mol_type = other DNA
atgagcactgcagtccttgagaaccccggcctgggaaggaaactgagtgactttggacaggagacctcttatattgaagataactgtaatcagaacggcgccatttcccttatctttagcctgaaagaggaggtgggggcactggctaaggtgctgcgactgttcgaggaaaacgacgtgaatctcacacatatcgagtctaggccgtcaaggttgaaaaaggatgagtatgagttttttacacatttggacaagagatccttgcccgccttgacaaatatcattaagatcctccggcatgacatcggggccaccgtgcacgagctttcacgcgataagaaaaaggacacagtcccttggtttccccgaacgattcaggagcttgataggtttgccaaccagatcctctcttatggcgctgagctggacgctgatcaccccggatttaaagaccccgtgtacagagctcgcaggaaacagttcgccgacatagcatacaattatcggcacggccaacctatcccaagagttgaatacatggaagaggagaaaaagacttgggggacggttttcaagactttgaagagcctctataaaacccatgcttgctatgagtacaatcatatctttcctctcctggaaaaatactgtgggttccacgaggataatattcctcagctggaagacgtaagccagtttctgcaaacatgtactggctttcgcctgcgacctgtggccgggcttctgtccagcagagatttcctcggaggcctggcatttcgagtgtttcattgtacccagtatatccggcatggcagcaagccaatgtataccccagaacctgacatttgccatgagctccttggccatgtacctctgttctctgaccggtctttcgcgcagttttcacaggagatcggtctggcgagcttgggcgctcccgatgagtacatagaaaaacttgccactatctactggttcacggtggaattcggactgtgcaaacagggcgatagcattaaggcatacggggccggactccttagctctttcggtgagctgcagtactgcctcagtgagaaacctaagttgctcccgctggaactggagaaaaccgccattcaaaactataccgtcacagagttccagccattgtattatgttgccgagagctttaacgacgctaaagagaaggtcaggaacttcgccgctacaatcccgaggccgtttagtgtgagatatgacccatatacacagagaatcgaagtgctggataacacgcagcagctcaagattctggctgattctataaattcagaaattggaattctgtgcagtgcccttcagaaaattaag

SEQ ID NO: 17928 - DNA, 1356 bp, synthetic construct
  misc_feature 1..1356: note = source = /note="Description of Artificial Sequence: Synthetic coding sequence"
  source 1..1356: mol_type = other DNA
atgtcgaccgccgtcctcgaaaacccgggattgggacgtaagctcagcgacttcggtcaggaaaccagctacattgaagataactgtaatcagaacggagccatctccctcattttctcgctcaaggaagaggtcggtgcactggcgaaggtccttagactgttcgaagagaatgatgtgaatctgactcatatcgaatcaaggccaagccggttgaaaaaggatgaatacgaattcttcacgcatctggacaagcggtcactgccggccctgactaacatcataaagatccttagacatgacatcggggctaccgtgcacgagctgagccgcgataagaagaaggacaccgtgccgtggtttccgcggaccatacaagagttggaccgctttgccaaccaaatcctgagctatggagcggagctggatgcggaccaccccggattcaaggacccggtttaccgggccaggaggaagcagttcgctgacatcgcgtacaattaccggcacggacagccaatcccgagagtggaatacatggaagaggagaaaaagacctggggcactgtgttcaagacccttaaatcgctgtacaagacccatgcgtgctatgaatacaaccacattttcccgttgctcgagaagtactgtggcttccacgaggacaacatcccacagctggaggacgtgagccaattcttgcagacctgtactggattcagactcagaccagtggcaggactcctgtcaagccgggatttccttgggggactggcctttcgcgttttccattgcacccagtacattagacacggatccaagccaatgtacacgccggaacctgatatctgtcacgagctcctggggcacgtcccgctgttctcagaccggtcctttgcacagttctcccaagaaattggcctggcgtctctcggagccccggacgagtacatcgaaaaacttgcaactatctattggttcactgtggaattcgggttgtgcaagcagggagattctatcaaggcctacggagcaggactgctgtcctcctttggcgaactgcaatactgcctcagcgagaagccaaagctgctgccgctcgaactcgaaaagactgccatccaaaactacaccgtgaccgagttccaacctctgtactatgtggccgaatcgtttaatgacgctaaggaaaaggtgcgcaatttcgccgctaccattccaaggcctttttcggtccgctacgacccttacactcagcgcattgaggtgctggataacactcagcagctgaagattttggcggattcaattaactcggagatcggtattctgtgttccgcactccaaaagatcaag

SEQ ID NO: 17929 - DNA, 1356 bp, synthetic construct
  misc_feature 1..1356: note = source = /note="Description of Artificial Sequence: Synthetic coding sequence"
  source 1..1356: mol_type = other DNA
atgagcaccgccgtactggaaaacccggggctggggcgcaagctgtcggacttcggacaggaaactagctatatcgaggataattgcaaccaaaatggggccatcagcctgattttctcactgaaggaagaggtcggagccctggccaaggtgctcagactgttcgaagagaacgacgtgaacctgacccacatcgaatcccgcccatcacgcctcaaaaaggatgaatacgaattcttcacccacctcgacaaaaggagcctgccggccctcactaacattatcaaaatcctcagacatgacatcggtgcgactgtgcatgaactctcacgggacaagaaaaaggacaccgtgccgtggttccctcgcaccatccaggaactggatcgcttcgcaaatcaaatcctgtcatacggcgcggagctcgatgcggaccaccccggctttaaggacccagtgtaccgagcacggagaaagcaatttgccgacatcgcgtataactaccgccacggtcagccgattcctcgcgtcgagtacatggaagaggaaaagaaaacttggggaactgtgttcaagactctgaagtcgctgtacaagacccacgcatgctacgagtacaatcatatctttccactgctggagaaatactgcggtttccatgaggacaatatcccgcagttggaggatgtgagccaattcctccagacttgtactggtttcagactcagacctgtcgcggggctgctgtcgtccagggattttctcggtggactggcgttccgggtctttcactgcacccagtatatccgccacggctcaaaacctatgtacactccagaacccgacatctgccatgaactcttgggacacgtcccgctcttctccgaccgctcgtttgcacagtttagccaagaaatcggactggcatcgctcggagcacctgacgagtacatcgaaaaactggccactatctactggttcactgtcgagttcgggctgtgtaagcagggagattcgatcaaggcctacggtgctggactcctgtcatcatttggtgagctgcaatactgcttgagcgagaagccaaaacttctgccacttgagctggaaaagactgcaattcagaattacaccgtgaccgaattccagcccctctactacgtggccgagtcctttaacgacgctaaagagaaggtgcgcaattttgccgctaccatcccgcgaccgttctccgttaggtacgatccgtatacgcaacgcatcgaagtcctcgataatacccagcagctgaagatcctcgccgattccatcaatagcgaaatcggaatcctgtgcagtgcccttcaaaagatcaaa

SEQ ID NO: 17930 - DNA, 1356 bp, synthetic construct
  misc_feature 1..1356: note = source = /note="Description of Artificial Sequence: Synthetic coding sequence"
  source 1..1356: mol_type = other DNA
atgtccacagctgttcttgagaaccctgggcttgggaggaaattgtccgattttgggcaggaaactagttacattgaagataattgtaaccagaatggggccatctcactgatcttcagtctgaaagaagaggtgggggcactggccaaggtgctccgcctgttcgaagaaaatgacgtgaatctaactcacatcgaatcacggccttctcggctcaagaaagatgagtacgaattctttactcatctcgacaaacgctctctccctgctctaacaaatatcatcaaaattttacgccatgacatcggggcaacagtgcacgaactgtctagagataaaaagaaagatacagtgccatggttcccgcggacaatccaggaacttgatcgctttgctaaccagattctgtcatacggggcagagcttgatgccgaccacccagggttcaaagatccagtttatcgggctcgacggaaacagtttgctgatatagcttacaattatcgacatggacaacctatcccacgagtcgaatacatggaagaagaaaaaaaaacatgggggactgtgtttaaaacgctcaaatctctgtacaaaactcacgcctgctacgaatataaccatatattccctcttctggaaaaatattgtggatttcatgaagataacataccccagttagaagatgtgagtcagtttctgcagacgtgcacaggatttcgcttgagacctgtagcaggactactctcctcgagagatttcttgggagggctcgcctttcgcgtgttccactgcacacagtacatacggcatgggtcgaaaccaatgtacacacctgaacccgatatctgccacgaactactggggcacgtgcctcttttttctgatcgaagttttgcacagttctcccaggagataggactggcttcactgggagccccagatgaatatattgaaaaactcgcaacaatctattggtttacagtggaattcgggctctgtaaacagggggatagtatcaaagcatatggagccgggctgctctctagttttggggaacttcagtattgtttatcagaaaaacctaaacttttgcccctcgaactcgagaagacagccatccagaactatacagtgactgaatttcagcccctttattatgtcgctgagtcattcaatgatgcaaaagaaaaagtgaggaacttcgccgctacaatccctcgaccctttagtgtgagatatgatccctatactcagagaatcgaagtgctcgataatacacagcagctgaaaatactagcagacagtattaattctgagataggaatactctgctctgctctgcagaaaatcaaa

SEQ ID NO: 17931 - DNA, 1356 bp, synthetic construct
  misc_feature 1..1356: note = source = /note="Description of Artificial Sequence: Synthetic coding sequence"
  source 1..1356: mol_type = other DNA
atgtccacagcggtacttgagaatcctggcttgggccgcaaactttctgactttggacaggaaacatcatatatcgaggataactgcaaccagaatggagcgatctctctcatcttttcactgaaggaggaagtgggcgccctcgccaaagtgttacgacttttcgaagaaaacgacgttaacctcacacacatcgaatcccgcccttctagactgaagaaagacgagtacgagttctttacccacctggacaagcgatccctgcctgccctgacgaacataatcaagattctgagacatgatatcggtgccacagtacatgaactgagtcgcgacaaaaagaaggatacagtgccgtggttcccacgtacaattcaggagcttgaccgcttcgcaaaccaaattctgtcttatggagcagagctggacgcagaccatccgggctttaaggacccggtttatagagctcggcgtaagcaattcgcggatattgcatacaactaccggcacgggcaaccaattcccagggtggaatacatggaagaagagaagaagacttgggggaccgtcttcaagacgctgaaatccttgtataaaacgcacgcgtgttacgaatacaaccacattttccccctgctggagaagtattgcgggtttcatgaggacaacatcccacagcttgaggatgtttcgcagtttctgcagacgtgcaccggctttcgactcaggccagtcgcgggtctcctcagttctagggacttcttgggagggctggccttccgggtctttcactgtacgcagtacatacgacacggctcaaaacccatgtatactccagagccagatatctgtcacgagctgttgggacacgtgcccctgtttagcgaccgaagcttcgctcagttttctcaagagattggattggcctcactcggggctcccgacgagtatatcgaaaaattggccactatctactggttcacagtggaattcggcctatgcaagcagggagattccattaaagcctacggggccggcctcttgagctcattcggcgagctccaatactgcctgtccgagaaacccaagttattgccgctggagctagaaaaaacagctatccagaattataccgtaactgaatttcagcccttgtactatgtggcagagtccttcaatgacgccaaggagaaagtccggaactttgccgcaacaatacctaggccatttagtgtgcgctatgatccatatacacagcggatcgaagtcctcgataacactcagcaactgaagattcttgccgattcaatcaattcagagatcgggatcctgtgttcggcgctccagaaaattaag

SEQ ID NO: 17932 - DNA, 1356 bp, synthetic construct
  misc_feature 1..1356: note = source = /note="Description of Artificial Sequence: Synthetic coding sequence"
  source 1..1356: mol_type = other DNA
atgtctacggccgtcttagagaaccccgggctgggccgtaaactgtctgactttggacaagaaacatcttatatcgaggacaactgtaaccaaaacggcgcaatttcgcttattttttccctgaaggaggaagtgggagccctggcgaaggtcctgaggttgttcgaggaaaatgacgtgaatcttacccacatcgaatctcgcccttcacgcttgaagaaggatgagtatgaatttttcacccatctcgataaacggtctttgcctgccctcacaaatattattaagatcttgagacatgatataggcgccactgtgcatgagctatcacgggacaagaagaaagataccgtcccttggtttccacgaacaattcaagaactggaccggtttgccaatcagattctatcctatggagccgagttagatgccgaccacccgggattcaaggacccggtatatcgcgctcgccgaaaacagttcgccgatatcgcatataattaccgccatggtcaaccaatacccagagtcgagtacatggaggaggagaaaaagacctggggcaccgtgttcaagacacttaagagcttatataagacacatgcttgctatgaatacaatcatatctttcccttgctggagaaatattgcggcttccacgaggataatattccccaactggaagacgtgtcacagttcctgcagacatgcaccggttttagactgagaccagtggccggcctgttgtccagcagggattttctcggaggtctggcattcagagtgtttcactgcacccagtatatacggcatggaagtaagcctatgtacactcctgaacccgatatatgtcacgagctacttgggcacgttccactattctcggacaggtccttcgctcagttcagtcaagaaatcggtctggcatcactaggggcccccgatgagtatattgaaaaacttgccacaatatactggtttacagtcgagtttggtctgtgcaagcagggggactcaatcaaggcctatggagccggacttctgtccagcttcggcgagctgcagtactgccttagtgagaaacccaagttgctccctctggagctcgagaagactgccatccagaactacacagtaaccgaatttcaaccgctctattacgtggctgagtcattcaacgacgcgaaggaaaaagtgaggaactttgcagcgactattccacggcctttttcagtgcgttacgacccttacactcagcggatagaggtgctggacaatacacagcaactcaagattctggctgatagtattaactctgaaattggcatcctgtgtagcgctctgcaaaagatcaaa

SEQ ID NO: 17933 - DNA, 1356 bp, synthetic construct
  misc_feature 1..1356: note = source = /note="Description of Artificial Sequence: Synthetic coding sequence"
  source 1..1356: mol_type = other DNA
atgtcgactgccgtattggagaatccaggacttggtcgtaagctgtctgattttggccaggagactagctacatcgaagacaactgcaatcagaatggtgcgattagcctgatattttcgctcaaggaagaagtgggtgcactcgcaaaggttttgaggctgttcgaggagaacgacgtgaacctcacccacattgagtcgcgaccatcaagacttaagaaagacgaatacgaattcttcactcatctcgataaacgctcgctaccagccttgacaaatattatcaagatcttgcggcatgacattggtgcgacagtgcatgagctgagccgagacaagaaaaaagataccgtcccttggtttccacgaacgatccaggaactggacaggtttgcgaaccagatcctaagctatggtgctgaacttgacgcggatcatcccggctttaaggacccggtgtaccgcgctcgcagaaagcagtttgccgacattgcatataattaccgccacggtcagcctatcccgcgggtcgagtacatggaagaagagaagaagacgtggggtaccgtcttcaagaccctgaagagtttgtataagacccatgcttgttatgagtataaccatatttttccacttctcgagaagtactgcggcttccacgaggataacattcctcagttggaagatgtttcgcaattccttcagacttgcactggtttcaggcttcgtccagtggccggacttttaagttctcgcgacttcctaggagggttagcttttcgagtcttccactgtacccagtacatacgtcatggctcgaagccgatgtacacaccggagccagacatttgccatgagttgcttggtcacgtcccgctattctccgataggtccttcgcccaattttcccaagagattggtttggcaagtctcggtgccccggacgagtatatcgaaaaactcgcaaccatttactggttcacagttgaattcggtctgtgcaagcaaggagattctataaaggcatacggcgcagggctactgtcttcatttggcgagcttcagtattgcctctcggaaaagcccaaactgttgccattagaactggaaaaaactgctatccagaattacaccgtgacagaattccagccgttgtactatgtggcggagagtttcaacgatgcaaaggagaaagtgcgaaatttcgctgcgactataccccgtcccttttccgtccgctatgacccttacacgcaacgaattgaggtcctggataacacccaacagctaaaaattctggctgatagcatcaactctgagatcggcattctttgctccgctttacagaagataaag

SEQ ID NO: 17934 - DNA, 1356 bp, synthetic construct
  misc_feature 1..1356: note = source = /note="Description of Artificial Sequence: Synthetic coding sequence"
  source 1..1356: mol_type = other DNA
atgtcaaccgcagtgcttgagaaccccggtcttggccggaaacttagcgactttggtcaggagacttcttacattgaagataattgtaatcaaaacggagcaatttcgctgattttctcgctcaaggaagaagtgggagcgcttgcaaaagtgctgcggctctttgaagaaaacgacgtgaacctgactcacattgagtcgaggccgagccgactcaagaaggatgaatacgagtttttcacgcacctcgataagcgctcccttcctgctctcacgaacattatcaaaatcctcaggcatgatattggagctaccgtgcatgagctgagcagagacaagaagaaggatactgtgccttggtttcctcggaccatacaggaactcgataggttcgccaatcagatcttgtcgtacggcgcagaacttgacgcggatcaccccggctttaaggaccccgtctacagggcacggagaaagcaatttgcagacattgcgtacaactaccgacatggacaaccgattcctcgcgtggaatacatggaggaagaaaagaaaacttggggtactgtgttcaaaactcttaaatccctttacaagactcacgcatgttacgaatacaatcatatcttccctctcctggaaaagtactgtgggttccatgaagataacattcctcaactggaagatgtgtcgcaatttcttcaaacctgcaccgggtttagactgcgccctgtggcgggacttctttcatctcgggattttcttggagggctggcctttcgcgtttttcattgcactcagtacatacgccatggcagcaagcctatgtacacccctgagccggacatctgtcacgagctgctcggacatgtgccattgttttcggaccgctcttttgcacagttctcacaagagatcgggctggcatctctgggcgctcctgacgagtatatcgagaaacttgccaccatttactggtttaccgtggaatttggactgtgtaagcagggagattcgattaaagcatatggtgcgggcctcctctcatcctttggagagctccagtactgcctgagtgaaaagcccaagttgcttcccctggaactcgaaaagacggcaattcaaaactataccgtcaccgaatttcagccactgtactacgtagcggagtcctttaacgatgctaaggagaaggtgcgaaactttgcagcaaccatacctcgacctttctcagtcagatacgatccttatactcaaagaattgaagttcttgataacacccaacaactgaaaatcctggccgactcgatcaattccgagatcgggatcctttgttcagcactgcagaagattaaa

SEQ ID NO: 17935 - DNA, 1356 bp, synthetic construct
  misc_feature 1..1356: note = source = /note="Description of Artificial Sequence: Synthetic coding sequence"
  source 1..1356: mol_type = other DNA
atgtctactgctgtcctggaaaacccaggcctggggagaaagctgtccgattttggccaggagacgagctatatcgaagacaattgcaatcagaatggtgccattagcctgatcttctcactgaaggaggaagttggcgctttggctaaagttctgcggttgttcgaggagaacgatgtaaatctgactcatattgagagtcgccctagtaggttaaaaaaggacgagtacgaatttttcactcacctcgataagcgtagcctccccgccctcacaaatattatcaaaattttaaggcacgatatcggagcaacagtccacgagctgtcgcgggacaaaaaaaaagacaccgttccttggtttccgcggaccattcaggagttggaccggtttgcaaatcagatccttagctatggcgctgaattggatgctgaccatccaggttttaaagatccggtctacagagcacggcgcaaacagttcgccgacatcgcttataattacaggcatggccagccaattccccgcgtcgaatacatggaggaggaaaaaaaaacgtggggcaccgtgtttaagactctgaagagtctgtacaagacccatgcctgttacgagtacaatcatatatttccactgttagagaaatactgcggtttccacgaggacaatatcccccagctggaggatgtgagtcagttcctgcagacctgtactggctttaggttgcgcccagtcgctggactgctctcctccagagatttcctgggaggactcgctttcagagtatttcactgtactcagtacataaggcacggctcgaagcctatgtatacacccgagcctgacatctgccacgagcttctcggtcacgtgcccctgttctccgacagatctttcgctcagttcagtcaggagattgggctagcctcccttggcgcaccagatgaatacatagaaaagctagccaccatctactggttcactgtcgagttcggtctttgcaagcagggagatagcataaaagcttacggcgctgggctgctgtcctcattcggagaactgcagtactgccttagcgagaagccaaagctgctgcctctggagctggaaaagactgcgattcaaaattacaccgtgactgaatttcagcctctgtactacgttgctgagtcatttaatgatgctaaggaaaaggtccgcaacttcgccgctacaatacccagacctttctccgtgcgatatgacccctacacgcaaaggatcgaagtgctcgataacacccaacagctgaaaattttggcagatagtatcaactcagaaatcgggatactgtgtagtgctctgcaaaagatcaag

SEQ ID NO: 17936 - DNA, 1356 bp, synthetic construct
  misc_feature 1..1356: note = source = /note="Description of Artificial Sequence: Synthetic coding sequence"
  source 1..1356: mol_type = other DNA
atgagcacggcagtgctggagaacccgggactgggaaggaagctgtccgattttggtcaagagacttcctacatcgaggacaattgcaaccagaacggggcgatctcactcatcttcagcctcaaggaagaagtcggagctctggcgaaggtcctgcggctctttgaagaaaatgacgtgaacctgacgcacatcgagagccggccttcgcgcttgaagaaggacgagtatgaattcttcacccatctcgacaagcggtcgctgccagccctgacgaacattatcaaaatcctgaggcacgacatcggagcaactgtccatgaactgtcgagagataagaagaaggatacggtcccgtggttcccgcgtaccatccaggagcttgataggttcgccaaccagatcctgtcctacggcgcagaactggatgcggatcaccctgggtttaaggatccagtgtaccgcgcccgccgaaagcaattcgctgacatcgcatacaactacagacatggacagccgataccgcgcgtggagtacatggaagaagaaaagaaaacctggggcactgtgtttaagactctgaagagcctgtataagacccacgcatgctacgagtataatcacatcttcccgctgctggaaaagtattgtgggttccacgaagataacatcccacagctggaggatgtgagccagtttctgcagacctgtaccggctttcggctccggcccgttgctggtttgctgagctcgcgggacttcctcggaggcctcgcctttcgggtgttccattgcactcaatacatccggcacggatccaaacctatgtacactccagaaccggatatctgccacgaacttctgggccatgtcccgctcttctcagacagatccttcgcacagttctcccaagagatcggtttggcttcgctgggggctccggatgagtacattgagaaactcgcgaccatctattggttcaccgtggaattcggattgtgcaagcagggggatagcatcaaagcatacggggcaggattgctgtcatcgtttggtgaattgcagtactgcctgtcagaaaaaccaaaattgctcccactggaattggaaaagactgccatccagaattacaccgtcactgaattccaacctctgtactacgtcgctgaatcgtttaacgacgcgaaggagaaagtgcgcaactttgcggccaccatcccacggccgttctccgtgcggtatgatccgtatactcagaggatcgaggttctggacaacacccagcagctgaagatcctggccgacagcatcaatagcgagatcggcatcctctgcagcgctctccagaaaatcaag

SEQ ID NO: 17937 - DNA, 1356 bp, synthetic construct
  misc_feature 1..1356: note = source = /note="Description of Artificial Sequence: Synthetic coding sequence"
  source 1..1356: mol_type = other DNA
atgagtacagctgtactggagaaccctgggctgggacgcaagttgtcagatttcgggcaggaaaccagctacattgaagacaattgcaatcaaaacggggccatcagtttgattttcagcctgaaagaggaggttggagctcttgcaaaggtgctccggctgtttgaagagaatgacgtgaacctgactcacattgaaagccgcccatcccggctgaagaaagacgagtacgagtttttcacccatctggacaagaggtcactgcctgctttgacgaatattatcaagatcctcaggcatgacatcggtgctaccgtgcatgagctttcccgggacaaaaagaaagacacagtgccctggttccctaggactatacaggagcttgatagattcgcaaaccagatactgtcctacggcgcagagctggacgccgaccatcctggattcaaagaccctgtgtacagagctcggcgaaagcagttcgccgacatcgcatacaattataggcacggccagcctattccccgggttgaatatatggaagaggagaagaaaacatggggcaccgtcttcaagacactgaaatctctgtacaagacacatgcatgctatgagtataatcacatcttccccctgctcgagaaatactgcgggttccacgaagacaatatccctcaactggaggacgtgagccaattcttgcaaacctgcaccggctttagactgcgcccagtcgctgggctgctgtcttctcgagatttcctcggcggtctcgctttccgggtcttccattgcacacagtacattaggcacgggtctaaacccatgtacactcctgaacctgatatttgtcacgagctgctcggacatgtgcccctgttttcagaccgcagtttcgctcaattctcacaggaaatcggactggcctcacttggagcccccgatgagtatattgagaagctggcgacgatctactggtttacagtcgaatttggcctgtgcaaacaaggggattccattaaggcctacggggctggcctgctgagctccttcggagagctgcagtactgtttgagcgagaaacctaagctgctccctcttgaactggaaaagaccgccatccagaactacacagtaaccgagttccagcccctgtattacgtggctgagtcttttaacgatgccaaagagaaggtgcggaatttcgctgccaccattccccggcctttttcagtccggtacgacccgtatacacagcggatcgaagtcctcgacaatacccagcagctcaagattctcgcagactccattaatagtgaaatcgggatactgtgcagcgctctgcagaagatcaag

SEQ ID NO: 17938 - DNA, 1356 bp, synthetic construct
  misc_feature 1..1356: note = source = /note="Description of Artificial Sequence: Synthetic coding sequence"
  source 1..1356: mol_type = other DNA
atgtcgaccgctgtgctggagaatccaggactgggaagaaaacttagcgattttggtcaggaaacgtcatacatcgaagataactgtaatcagaacggagctatttcgttgatcttctctctgaaggaagaggtgggcgcactggcaaaggtcctgcgactcttcgaggagaacgacgtcaacctgactcatatcgaaagccggcctagcagattgaaaaaagatgaatacgaattctttacccatcttgataaaagatccctgccggcacttactaacataatcaagattttgcggcatgatataggagcaaccgtgcatgaactctcgcgggataagaagaaggataccgtaccgtggtttccacgcacgattcaagagcttgacaggttcgctaaccagatactttcctacggggccgaactggacgccgatcacccaggttttaaggaccccgtctaccgcgcacgcagaaagcaattcgctgacattgcatacaattacagacacggtcaacctataccgcgagtggagtacatggaggaagagaaaaagacttgggggaccgtctttaagactcttaagtcgctttacaagacccacgcgtgctacgagtacaatcacatttttccccttctcgaaaagtactgcggattccatgaggacaacatccctcaactggaagatgtgagccagtttctccaaacttgtacgggtttcagactgcgtcctgtggccggccttctgagctccagggattttcttggcggtctggcttttcgggtttttcattgtacgcagtacattcgtcatggatcaaagccaatgtatactcccgaaccagatatatgccatgagctgctcggccacgtacctctttttagcgatcgctccttcgcccaattttcccaagaaatcgggcttgcatcacttggcgcgcctgatgagtacatcgaaaaacttgcaaccatttactggttcacggtcgaattcggtctttgcaagcaaggcgactccatcaaggcgtacggcgccggattgctgagcagcttcggtgaattgcaatactgtctgtcggaaaagccaaaactgctccctctggagcttgaaaaaactgcaatacaaaactatactgtgaccgagtttcagcctctttactatgtggccgaatcctttaacgacgcgaaggaaaaggtgcgcaattttgcagcaactatcccccgccctttcagcgtgagatacgatccatacacccagcgcatagaagttttggataatacccagcagctgaagattctggccgatagcatcaactccgaaattggaatactctgttcagcacttcaaaagattaaa

SEQ ID NO: 17939 - DNA, 1356 bp, synthetic construct
  misc_feature 1..1356: note = source = /note="Description of Artificial Sequence: Synthetic coding sequence"
  source 1..1356: mol_type = other DNA
atgagcacagccgtgctagaaaaccctggcctgggacgaaagctatccgactttggccaggagacatcctacatagaagataactgcaaccagaacggggcaatttccctgatattcagcctaaaggaggaggtgggcgctctagctaaagtcctgagactgttcgaggaaaatgatgtgaacttaacccacatcgaaagtcgtccttctaggctcaagaaggacgaatatgaattctttacacacctcgacaaaaggtctcttcctgcattgaccaatatcattaagatactcaggcatgatatcggagccacggtgcacgagctgagcagggataaaaagaaggatactgtgccctggttcccccgtaccattcaggagctggaccgtttcgccaaccagatcctttcttacggcgcagaactggacgccgaccaccctgggtttaaagaccctgtatatcgtgcccgaaggaaacagttcgcagatattgcttacaactaccggcatgggcagcccatcccccgcgtcgagtatatggaggaagagaagaagacctggggcaccgtgtttaaaacacttaaaagcctttacaagacacatgcctgctacgagtataatcatatcttccctctgctggagaaatattgtgggtttcacgaggacaacatcccccagctagaagacgtgagccagttccttcagacatgtaccggatttaggcttcgccctgtggcagggctgctgagcagccgggatttccttgggggtctggcctttagggtattccattgcactcagtatatacgacacggctctaaaccaatgtataccccagagccggacatttgccacgaattacttggccacgtacccttatttagcgaccggtccttcgcccagtttagccaggagatagggctggcctctctaggcgcccctgatgaatacattgaaaaacttgccaccatctattggttcaccgtggaatttgggctctgcaaacagggtgactccatcaaggcttatggggcagggcttttgagctcttttggggaattacagtattgtctctccgagaagcccaagctattacccctagagcttgaaaagactgcaatacagaactatacggtaaccgaattccagcccctgtactatgttgctgagagcttcaatgacgccaaagagaaggttcggaatttcgcagcaacaatccctcggccattcagcgtgaggtacgacccctacacccagagaatagaagtgctggataacacccagcagctgaaaattctggccgacagcattaactccgagataggtatcctttgcagcgcactccaaaagatcaaa

SEQ ID NO: 17940 - DNA, 1356 bp, synthetic construct
  misc_feature 1..1356: note = source = /note="Description of Artificial Sequence: Synthetic coding sequence"
  source 1..1356: mol_type = other DNA
atgtccaccgcagtgcttgaaaatcccggactgggaagaaagctctcggattttggccaagagacttcctacatcgaagataactgtaatcagaatggagcaatctcgctcatctttagccttaaagaagaggtgggggcactggcaaaagtgttgcgcctgtttgaggaaaatgacgtgaatctcacccatattgaatccagaccatcgcggctgaagaaagatgaatacgagttcttcacccatctcgacaagcgctccttgcctgcgctgaccaacattatcaagatacttcggcacgatattggcgcaaccgtgcatgaattgtccagagacaagaaaaaggatactgtcccctggtttccgcgaaccatccaagaacttgatcgttttgccaaccagatcctttcgtacggtgcagagcttgatgcagaccatccaggatttaaggatcctgtgtatcgggcgaggaggaagcagttcgcagatattgcctacaactaccgacacggtcaacctatccctcgcgtggagtatatggaagaggagaaaaagacctgggggaccgtgttcaagactcttaagtcattgtacaaaacccacgcatgctacgaatacaatcacatctttcctctccttgaaaagtactgtggttttcatgaagataacattccacaactcgaggacgtgagccaattcctccagacgtgtacgggattccgcctcagacctgtggcaggattgctgtcatcaagagattttcttgggggactggcatttcgggtctttcactgcactcaatacattaggcatggttctaagcctatgtacacccccgagcccgatatttgtcatgagcttctcgggcatgtgccccttttctccgatagatcgtttgcacaattttcccaggagattggacttgcgagcctgggagctccagatgaatacattgagaaattggcaactatctactggtttaccgtggagttcggactgtgtaaacaaggagacagcatcaaggcatacggtgcaggcttgctcagctcctttggtgagcttcagtactgtctctcggaaaagccaaaactgcttccccttgaactcgaaaagaccgcaattcaaaactacaccgtcaccgaattccaacctctttactacgtggcagaatcctttaacgacgctaaagaaaaggtgagaaacttcgcagctaccatcccccggccttttagcgtgcgctacgacccatacactcaacgcattgaggtgcttgacaacactcaacaactgaagattttggcggattccattaactcagaaatcggaattctgtgttcggcactgcagaagattaag

SEQ ID NO: 17941 - DNA, 1356 bp, synthetic construct
  misc_feature 1..1356: note = source = /note="Description of Artificial Sequence: Synthetic coding sequence"
  source 1..1356: mol_type = other DNA
atgtccaccgcagtgctcgagaaccccggattgggacgaaagctcagcgattttggccaagaaacttcctacatcgaggataactgtaaccagaatggagccatttccctcatcttttcgctgaaagaagaagtcggggcgcttgcaaaagtgttgcgactcttcgaggagaacgatgtgaacctgacccatatcgaatccagaccgtcgcggcttaagaaggacgaatacgagtttttcactcatctggataaacggtcgctgccagcactcactaacattatcaagatcctgcggcacgatattggtgccactgtgcatgagctcagccgggacaagaaaaaggacacggtcccgtggtttcctaggactattcaagaactggatcgcttcgccaaccagatccttagctacggcgcagaactggatgcagatcatcctggctttaaggatccagtctaccgggcgagacggaagcaatttgcagacattgcctacaattacagacacggacaacctattcctagagtggaatacatggaagaagaaaagaaaacctggggtactgtgttcaagacgcttaagtccctctataagacccacgcgtgttatgaatacaaccacatatttcctcttctggaaaagtactgcggttttcatgaggacaacatcccacagttggaggatgttagccagtttctccaaacctgtactggattcagactgcgccccgtggctggactcctcagctcacgcgattttcttggagggctggcatttagggttttccattgcacccaatacattcgccacggttcgaaaccaatgtacacccccgaacctgatatctgtcacgagcttctcggacatgtgcccttgttttccgatcgctccttcgcccagtttagccaggaaatcgggcttgcatcccttggagccccagatgaatacatagagaagctggcaaccatttactggtttaccgtggaattcggattgtgcaagcaaggcgactcaattaaggcatacggagccgggctcctgtcgtcgtttggagaacttcagtactgcctgagcgagaaaccaaaactccttccactcgaacttgagaaaactgcgatccagaattacaccgttaccgaattccaaccgctgtactacgtcgcggaatcctttaacgatgccaaggagaaggtgcgcaactttgcggcaaccatcccacgccctttttcggtgaggtacgatccatacacccaacggattgaagtgctggacaacactcaacagctgaagattcttgcagattcaattaacagcgagatcggaattctttgtagcgcactgcaaaagattaag

SEQ ID NO: 17942 - DNA, 1356 bp, synthetic construct
  misc_feature 1..1356: note = source = /note="Description of Artificial Sequence: Synthetic coding sequence"
  source 1..1356: mol_type = other DNA
atgtcgactgctgtacttgaaaaccccggtctgggtaggaagttgtcagatttcgggcaggagacctcatacattgaagataactgtaatcagaacggagccatctctcttatcttctccctcaaggaagaggtgggggcactcgctaaggtcctcaggcttttcgaggaaaacgatgtcaaccttacccacatcgaaagcagacctagccggctcaaaaaagatgagtatgagttttttacacatctggacaagcgatcccttcctgctctcactaatatcattaaaattcttaggcatgacataggggctaccgttcacgagctctcacgggataaaaagaaagatactgtgccatggtttcctcgtacaattcaagagttggatcgattcgcaaaccaaattcttagttatggtgctgaactcgatgccgatcacccagggtttaaagatccggtgtatagggcaaggcgtaagcaattcgctgatattgcttacaattacaggcatggccaaccaattccacgtgttgaatatatggaggaagaaaagaaaacctggggtacggtatttaaaacactcaagtcactatacaagactcatgcttgctacgagtacaaccatatttttccattgctggaaaagtactgtggatttcatgaagataatatccctcaacttgaggacgtatctcagtttttgcaaacgtgtaccggctttaggcttagaccagtggcaggtttgctgagcagccgtgatttcctgggcggactcgccttcagagttttccattgtactcaatatatccgtcacggttcgaagccaatgtacacccctgaacctgatatctgccatgagcttttagggcatgtccccttattttcagatagatcttttgctcaatttagtcaggagattggtttagccagtttgggcgccccggatgagtacatcgaaaaattggccacaatctattggtttacagtcgagttcggactgtgcaagcagggtgattctattaaggcttatggggctggattgctttcttcctttggagagctccaatattgtctttctgagaaacctaaactgctccctctggagcttgagaaaactgccatccaaaactatacagtcactgagttccagcctctttactatgtggctgaaagtttcaatgatgccaaggaaaaggttagaaattttgcggcaacaattcctcgaccatttagcgtacgttatgatccttatacccaacgtatagaggtgctcgataacacgcaacagttgaagattctcgctgactccataaattctgagatcggcatattgtgttccgctcttcagaaaatcaag

SEQ ID NO: 17943 - DNA, 1356 bp, synthetic construct
  misc_feature 1..1356: note = source = /note="Description of Artificial Sequence: Synthetic coding sequence"
  source 1..1356: mol_type = other DNA
atgtcgactgccgttctagagaaccctggcctaggtagaaaactaagcgacttcggacaggagacctcatatattgaggacaactgcaaccaaaacggcgcgatttcactgattttctccctgaaggaggaagtgggtgctttggccaaagtccttagactcttcgaggagaacgacgtgaacttgacccacattgaaagtaggccttctcggttgaagaaagacgagtatgagttcttcacccatctggacaagcggtccttacctgctctgactaatataataaagatacttcggcacgacataggtgccacagtccacgagctgagccgggacaagaagaaagacaccgtgccctggttcccgcgcactattcaggaactggaccgcttcgccaaccagattctgagttatggggccgagcttgacgctgaccatccggggttcaaggatccggtgtaccgtgcgcggcgcaagcagtttgcggatatcgcctataattatagacacggccagccgatccctagggtggagtacatggaagaagaaaagaaaacctggggtactgtattcaagaccctgaaatctctgtataaaacccatgcctgctacgaatacaatcacatcttccccttactagaaaagtactgcggtttccatgaagataacataccacagctggaggacgtgtcccaatttttacagacatgcactgggttcagactccgtcctgtggctgggctgctgagcagtagagacttccttggcggtcttgccttccgtgtatttcactgtacccagtacatccggcatggctcaaaacctatgtacacaccggaacctgacatctgtcacgagcttttgggccacgtccccttattctccgaccgcagcttcgcacaattctcacaggaaatcggtctggctagtctgggtgcccctgacgagtatattgaaaagctggctactatctattggttcactgttgagttcgggctctgcaaacagggggactcaatcaaagcttacggcgctggccttctctcctcatttggtgagctgcagtattgcctcagtgaaaagccaaaactactgcctctagaactggagaagaccgccatccagaattatacggtgacagagtttcagcctctgtactacgtggcagaatctttcaatgacgcaaaagagaaggttcgaaactttgccgcgacgattccgcgccctttttctgtaaggtacgacccgtatacccaacggatagaagtgcttgataacactcagcagctcaaaatccttgcagacagcatcaattccgagataggcatcctatgtagcgccctccaaaaaataaaa

SEQ ID NO: 17944 - DNA, 1356 bp, synthetic construct; identical to SEQ ID NO: 17900
  misc_feature 1..1356: note = source = /note="Description of Artificial Sequence: Synthetic coding sequence"
  source 1..1356: mol_type = other DNA

SEQ ID NO: 17945 - DNA, 1356 bp, synthetic construct
  misc_feature 1..1356: note = source = /note="Description of Artificial Sequence: Synthetic coding sequence"
  source 1..1356: mol_type = other DNA
atgagcaccgcagttttagagaatcctggtttaggccgtaaactttccgatttcggacaggagacgtcctacatcgaggataactgcaaccagaacggggccatatccctgatcttttctcttaaagaagaggtgggggcgctagccaaggttcttaggctctttgaggaaaatgatgtcaatctcactcacatcgaatccaggccatccagactcaagaaagacgaatacgaatttttcactcatctcgataagagatccctgccagcgttaactaacattatcaagatcctcagacacgatataggggcaaccgtacacgagttgagtagggacaaaaaaaaggacacagtgccttggtttccccgtactattcaagagttggaccgttttgctaaccaaatcctttcttacggtgccgagctcgacgccgaccaccctggatttaaggatcccgtctatagggcaagacgcaagcagttcgccgacatcgcctataattacagacacggccagcctatccctcgagtggagtatatggaagaggagaaaaagacgtggggtacagtgttcaaaaccctgaagtctttgtataagactcacgcctgctatgagtacaaccatatttttccacttctggagaagtactgtgggttccatgaggacaacatcccacagctggaggacgtgtctcagttcttgcagacctgtactgggttcagactgcgccccgttgccggcctactgagcagcagggattttcttggaggacttgcgttcagggtcttccattgtacgcagtatatccggcatggatcaaagccaatgtacacaccagagcctgacatctgccacgagctcctgggacatgtaccgctgttctccgacaggagctttgctcagttttcacaggaaatcgggctggcttctctgggagcgcctgatgagtacattgagaagctcgccaccatctactggttcacggtggagttcggactttgtaaacagggagattccattaaggcatacggtgctgggttgctgagctcctttggtgaactgcaatattgcctcagcgagaagccaaagcttctgcccctggagctggaaaaaactgctattcagaattacaccgtcacagagtttcagcctctgtactacgtcgctgagtctttcaacgatgccaaggagaaggtaaggaatttcgcagcaactatacctcgccccttctctgtccgttatgatccttatacccagagaatcgaggttctcgataacactcagcaactgaagatcctggccgactccatcaatagcgaaattggcattctttgtagcgctctgcagaagataaag

SEQ ID NO: 17946 - DNA, 1356 bp, synthetic construct
  misc_feature 1..1356: note = source = /note="Description of Artificial Sequence: Synthetic coding sequence"
  source 1..1356: mol_type = other DNA
atgtcaactgcagtgttagaaaatccaggcttaggaaggaagctctcagacttcggacaagagacctcatatattgaggataattgcaatcaaaatggagcgatcagtcttatcttttcgcttaaggaagaagttggggcgctggctaaagtgctccgtctttttgaggaaaacgacgtcaatttaacacatattgaatcacgtccgtcacgactcaaaaaagatgagtacgagtttttcactcatttggacaagagaagcctgccggcgttgaccaacataatcaaaatcttacggcacgatataggagcgacggtgcatgaattgtctcgcgataaaaaaaaggacacagtaccttggtttccccgaaccattcaagagctggatcgatttgcgaatcagattttgtcttatggcgcggaactggacgctgatcatcctggttttaaggatcctgtgtaccgagcacgccggaaacaattcgcggatatcgcgtataattacaggcacggtcagccgattccacgcgtcgaatatatggaagaagaaaaaaaaacgtggggcaccgtctttaagacgttgaaatctctttataagacgcacgcgtgttatgagtacaaccatatctttccattgctggagaaatattgcggttttcacgaagataatattccgcaattagaggatgtatcccagttcttacagacgtgcaccggctttcgcttaagacctgtggccggactgttatcgagccgggactttcttggtggcttggcttttcgtgttttccactgcacacaatatatacggcatggctcaaaacctatgtacaccccggaaccggatatttgtcatgaacttcttggccatgtcccacttttttctgatcggtcttttgcgcagttttctcaagagatcggcctcgcgagccttggcgctccagatgagtatattgagaaactggccacaatctactggttcactgttgaattcggattatgtaaacaaggagattccattaaagcgtatggagcaggcctcctgtcatcttttggggaactacaatattgcttatcagagaagccgaagctgctgccgttagaattagagaaaacagccattcagaattacaccgtgactgaattccaaccgctctactatgtcgcagaatctttcaacgatgctaaagaaaaagtgcggaatttcgcggccacaatcccgcggccgttctcggtacgttacgatccatatactcagcgcatcgaagtgcttgataatacgcagcaattaaaaattctggccgattctatcaactcagaaatcgggattctctgcagcgcattacaaaaaatcaaa

SEQ ID NO: 17947 - DNA, 1356 bp, synthetic construct
  misc_feature 1..1356: note = source = /note="Description of Artificial Sequence: Synthetic coding sequence"
  source 1..1356: mol_type = other DNA
atgtcgactgcagtgctggaaaaccccgggttgggtcgtaagctcagcgatttcggccaagaaacctcttacattgaagataactgcaatcagaacggcgcaattagcctgatctttagccttaaggaagaggtgggagcccttgcaaaagtgctgcgcctttttgaagagaacgacgtgaaccttactcacattgaatcaaggccatcaaggctgaagaaggatgaatacgagttctttactcatcttgataagaggtccctcccagcactgaccaacataatcaaaatcttgaggcacgatatcggagcaaccgtgcatgaactctcgagagacaagaagaaggacactgtcccttggttcccgagaaccatacaagagctggatcgctttgcaaatcagattctgtcatacggcgcagaacttgatgcagaccatcctggattcaaggatcctgtgtaccgcgcaagacggaaacagtttgccgatatcgcatacaattacagacatggccaaccgattccaagagtggaatacatggaagaggagaaaaagacgtggggtaccgtctttaagactctgaagtccctgtacaaaactcatgcgtgttacgagtacaatcatatctttcctctgctcgaaaagtactgtggatttcatgaagataacattccgcaattggaggatgtgtcacagtttcttcagacttgtaccggcttccgactgcgaccagtggcaggtctgctgtcatcgcgggactttcttgggggactggcattcagggtgtttcattgtactcaatacattcgacatggctccaagcccatgtacacccctgaaccagacatttgccacgaactcctcggacatgtgccactgttctcggataggagctttgcacaattttcccaagagatcggactcgcgtccttgggtgccccagatgagtacattgaaaaactggccacgatttactggttcaccgtcgaatttgggctgtgcaaacagggcgacagcattaaagcctacggggcaggcctgctctcatcattcggagagcttcagtactgtcttagcgaaaagccaaaacttcttccacttgaactggagaaaaccgcaattcagaactacacggtcacggaatttcagcctctctactacgttgcagaatcgtttaatgacgcaaaggagaaggtgcgcaattttgcagcaactatccctaggccgttttcagtcaggtacgatccttacacccagcggatagaggtgctggacaacacccaacaacttaagatacttgcagattcaatcaactccgagattgggattctgtgttcggcgctgcaaaagatcaag

SEQ ID NO: 17948 - DNA, 1356 bp, synthetic construct
  misc_feature 1..1356: note = source = /note="Description of Artificial Sequence: Synthetic coding sequence"
  source 1..1356: mol_type = other DNA
atgagcaccgctgtgctggaaaatcctggcctgggaagaaaattgagtgactttggacaggagacctcttatatcgaagataactgtaaccaaaacggggcaatctctcttattttctcattgaaagaagaggtgggagctctggctaaggtcctgcggctattcgaggagaacgacgtgaatctgactcacattgagagtagaccaagtcgactcaaaaaagacgaatatgagttcttcacccaccttgacaaacggtctctgccggctctgacaaacataatcaagatcctgaggcacgatataggcgcgacggtccatgaactttctagggacaaaaaaaaagacaccgtgccttggttccctcgaacaatacaggaactcgataggttcgcaaaccagattctgagctacggcgccgagctggacgcagaccatcctgggtttaaagaccctgtctacagagcacgcagaaaacagtttgctgatatagcttacaattacaggcacgggcagccaattccaagggtcgaatacatggaagaggaaaagaaaacttgggggactgttttcaaaaccctcaaaagcttatataaaacccatgcttgctatgaatacaatcacatctttccacttctggaaaaatactgcggatttcatgaggacaacattcctcaacttgaagacgttagccagttccttcagacctgcaccgggtttcggctcagaccagtcgcgggcctactttcctcgagggattttctgggaggcctggcattcagggtcttccactgcacccagtacatcaggcacggtagtaaacccatgtacaccccagagcctgacatctgccatgagctcctgggccacgttccgcttttcagcgatcgttcatttgcccagttttcccaggaaattggactggctagcctgggagctcctgatgaatatatcgagaagttagcgaccatttactggttcacagtcgagtttggcctctgtaagcagggtgatagcataaaggcttacggagctggactgctgtcaagttttggagaacttcagtattgtctcagcgaaaagcctaaactactgcctctggaactggagaagacagctattcagaactacacggtgaccgaatttcagccgctctattacgttgccgagtcttttaatgatgccaaagagaaggtcaggaatttcgccgccacaataccaaggcctttctcagtcagatatgatccatacacccaaagaatcgaagtactggacaacacacaacagcttaagatcctggctgacagcatcaatagtgaaatcgggattctgtgctctgctttacaaaaaatcaag

SEQ ID NO: 17949 - DNA, 1356 bp, synthetic construct
  misc_feature 1..1356: note = source = /note="Description of Artificial Sequence: Synthetic coding sequence"
  source 1..1356: mol_type = other DNA
atgtcgacggcagttcttgaaaatccgggacttggtagaaagctgagcgactttggacaggagacttcctacatcgaagataattgcaaccagaacggagcaatctccctgatcttttccctgaaagaggaagtgggtgcgcttgcaaaggtgctcagacttttcgaagaaaacgatgtgaatttgacccatattgagtcacgtccgtcgcgcctgaaaaaggatgaatacgaattctttacgcatctggacaaaagaagccttcccgcactgaccaatatcattaagatcctgagacatgatatcggtgccactgtgcatgagctttcaagagacaagaagaaggacactgtcccgtggttcccaaggactatccaggagctggaccgttttgcaaatcaaattctgtcatacggagcagagcttgatgcagaccacccaggcttcaaggatcccgtgtatcgggctcgccgaaagcagtttgccgatatcgcctacaactacagacatgggcaaccaattcctagggtcgagtacatggaagaagagaaaaagacgtggggaaccgttttcaaaactcttaagagcttgtacaagacccacgcttgttacgagtacaaccatatctttccccttcttgagaaatactgtggattccatgaagataacatcccgcaactcgaagatgtgtcgcaatttctgcaaacctgtactggctttagacttagacctgtggccgggctcctctcgagccgagatttccttggaggtctggcatttcgcgtgttccactgtacccagtacattagacatgggagcaagccaatgtacacccccgaacctgatatctgtcatgaactgcttggacacgtcccactgttttcggaccggtcattcgcccaattttcgcaggaaattggacttgcgtccctcggagccccagatgagtacatagaaaaacttgctaccatttactggttcactgtggaattcggactttgcaagcagggcgactcgattaaggcatacggcgcagggctcctctcttccttcggggagcttcaatactgtctgtcggaaaaaccaaagctcctgccccttgaacttgaaaagactgccatccaaaactacaccgtgaccgagtttcagccactctattacgtggccgagtcgtttaacgacgcgaaggagaaagtccgtaatttcgcagcgactattcctcgtccattttccgtgcgctacgacccttacactcagagaattgaagttcttgacaacactcagcagcttaagattctcgccgactccattaactcggaaatcgggattctgtgtagcgctcttcaaaagattaag

SEQ ID NO: 17950 - DNA, 1356 bp, synthetic construct
  misc_feature 1..1356: note = source = /note="Description of Artificial Sequence: Synthetic coding sequence"
  source 1..1356: mol_type = other DNA
atgagcactgctgtactggaaaacccaggactgggccgcaaattatcagactttggccaggagactagttatattgaggacaattgcaaccagaatggtgccatttccctcattttcagcctcaaagaagaggtcggggctttggcgaaggtgttgcgactgttcgaggaaaatgacgttaacctgactcacatagaatccaggccatccagacttaaaaaagacgagtacgaattttttacccatcttgataagcggtcactccccgcactgaccaacatcatcaagatattaaggcatgacattggagcaacagtgcatgaactgtccagagacaaaaagaaggataccgtgccctggtttcctcgcactatccaggagctcgacagattcgccaaccaaatcctgagttatggtgccgaattggatgctgatcatccaggtttcaaagacccggtgtatagggctcgacgaaagcagttcgctgatatcgcctacaactataggcatggccagccaatcccgcgagtggagtatatggaagaggagaaaaagacatggggtacagtgtttaaaacactgaaaagtctgtacaaaactcatgcttgttacgagtacaaccacatcttccctctattggagaagtattgcggctttcatgaagacaatatcccacaactggaagatgtgtcacaattcctacaaacttgtaccggcttcagactcaggcccgtggcaggcctgctctcaagcagagacttcctaggaggcttagccttccgagtgtttcattgcacacagtacattagacacgggagcaagccaatgtatacgcccgagccagatatctgtcatgaactgttggggcacgtgcccctttttagtgatcgatccttcgcacagttcagtcaggaaattggactcgcctcactcggggctccagacgaatacattgaaaaattggcaaccatttattggtttacagtggagtttggtctctgcaagcaaggggactcaataaaagcgtatggggcgggtctcctttcatcatttggcgaacttcaatactgcctctcagaaaagcccaaactgctacctctggagttggagaagactgcgatccagaattacaccgtgacagaattccagcctctttactatgtggccgaaagctttaacgacgctaaggaaaaagtaaggaactttgctgcaacgattcctcggcctttttccgtcagatacgatccctacacccagaggattgaagtcctagacaatacccaacagctgaagatcctggccgattcaataaactccgagatcggaatattgtgttccgctctccagaaaatcaag

SEQ ID NO: 17951 - DNA, 1356 bp, synthetic construct
  misc_feature 1..1356: note = source = /note="Description of Artificial Sequence: Synthetic coding sequence"
  source 1..1356: mol_type = other DNA
atgagtactgccgttctagagaatcctggcctgggaagaaagctgagcgattttggccaagaaacgtcttatatcgaggataactgcaatcaaaatggggccatctccctgatcttctccctaaaggaggaggtgggcgcactggccaaggtcctgcggctttttgaggaaaacgacgttaatctcacccatatcgagtctagaccctcccgattgaagaaggacgaatacgagtttttcactcacctggataagagaagtctgccggctctgactaatatcatcaagatcttaaggcacgatattggtgcgaccgtccacgagctgagcagagacaaaaaaaaggacacggtgccttggtttccccgcaccattcaagaattggaccgatttgcgaaccagatactttcctatggtgccgaattggacgcggaccacccggggttcaaggatcctgtgtacagggcaaggcggaagcagttcgcagacatcgcgtacaactatcggcacgggcagccgatccctagagtggaatacatggaggaagagaagaagacttggggcaccgtgttcaagacccttaagtccctctacaagacccacgcttgttacgaatataaccatatctttccattgcttgagaagtattgcggctttcacgaagataacattccccagctggaagacgtttcccagtttctgcagacgtgtaccggatttcggctgagacctgtggcgggcttgctgtcttctagggatttccttggcggtcttgcatttagggtttttcattgcactcagtatattcgccacggttccaagccgatgtacacacctgagcccgatatctgtcatgagctgcttgggcacgtgccacttttttcagatagatccttcgcccagtttagccaggaaatcgggctggcttccctgggggctcccgacgaatatatcgagaagctggccaccatatattggtttacagtggagttcggactttgcaaacaaggcgacagcattaaagcttacggggcgggcttgttatcatctttcggagaactacagtattgtctttcggagaaacccaagctgctccctctcgaactcgaaaagaccgcgatacagaactatacagtaactgagtttcagccactctactatgtagctgagagcttcaatgatgcgaaagagaaggtgagaaacttcgctgctaccatccctcgtcctttttcggtgcgctatgatccatacactcagagaattgaagtgctcgataacacccagcagctgaagatccttgctgacagcatcaactcagagattggaatattgtgcagcgcgctgcagaagatcaaa

SEQ ID NO: 17952 - DNA, 1356 bp, synthetic construct
  misc_feature 1..1356: note = source = /note="Description of Artificial Sequence: Synthetic coding sequence"
  source 1..1356: mol_type = other DNA
atgtcaacagcagtgttagaaaaccccggcttgggcaggaagttgagcgacttcgggcaggagacatcctatatcgaagataactgcaatcaaaacggtgcaataagcctaatcttcagccttaaagaagaggttggagcattagcaaaggtcttgcgtctgttcgaagagaatgacgttaacttgactcacattgagtcaaggccatcacgactgaaaaaagacgagtacgaattctttacacatctggacaagcggagcctgccagcacttacaaatattatcaaaatcctgagacacgatatcggtgccaccgtgcacgaactgagtagagacaagaaaaaagatacagtgccatggtttccacggacaatacaagagttggacaggtttgctaatcaaatcttgagctacggggccgagctagacgcggatcatcctgggttcaaggacccagtttaccgcgccagaaggaagcaatttgctgatatcgcttataattatcgtcacgggcagccaatcccccgggtcgaatacatggaggaggaaaaaaaaacttggggtacagtgttcaaaacactgaagtcactctacaaaacgcacgcctgctatgagtacaaccacatattccccctgcttgagaaatactgtgggttccacgaagacaacataccacagctggaggacgtttcacagttcctgcagacttgcacgggctttaggctccggcctgtggccggcctcctctccagccgagatttcctggggggtctggccttccgcgtatttcactgcacacagtacattcgacatgggtccaaacccatgtacacacctgaaccagatatctgccacgaactgctaggacatgtgccactgttctcggataggtccttcgctcagttctcgcaggaaatcggccttgcttcgttaggggctcctgatgaatatatcgaaaagctcgctaccatctactggtttacggtcgagttcggcctgtgtaaacagggcgatagtatcaaagcatatggtgctggtttgctgtccagttttggcgaacttcagtactgtctgtcggaaaagcctaagcttctgcctcttgagctagaaaaaacagccatacagaactataccgtgacagagttccaaccactttactacgtagccgaatccttcaacgatgcaaaagagaaagtcagaaatttcgctgcaacaattcctagacctttctctgtgcgatatgatccgtacacacagagaattgaggtgcttgataatactcagcagttgaagatactcgccgattccataaattccgaaatcggaattttgtgcagcgccctgcagaaaataaag

SEQ ID NO: 17953 - DNA, 1356 bp, synthetic construct
  misc_feature 1..1356: note = source = /note="Description of Artificial Sequence: Synthetic coding sequence"
  source 1..1356: mol_type = other DNA
atgtccacagcggtgttggagaatcctggtcttggacggaagctgtctgacttcggccaggagacttcatacattgaggataactgcaatcagaacggcgcaattagcctcatattttccctgaaagaggaagtcggcgccctggctaaagtactaaggctgtttgaggaaaacgatgtcaacctgacacatatagaaagccgaccatccaggctgaagaaagacgaatacgagttcttcactcacctcgataagcggagtcttccagcactgactaatataattaagatcctgagacacgatattggggccacagtacacgagctaagtcgcgacaaaaagaaggacactgtgccctggtttccccgcacaattcaggaactggatagatttgccaatcaaattctttcctatggggccgaactggacgccgaccatccaggattcaaggacccagtgtaccgcgctcggcgcaaacagttcgccgacattgcctacaactaccgccacggacagcctatacccagagttgaatacatggaagaggagaaaaagacctgggggaccgtattcaagacactaaaaagtctctataaaacgcacgcttgctatgagtataaccatatattccctctcctggagaaatactgcggattccatgaggataatatcccacagctggaggatgtgagtcaattcctgcaaacgtgtaccggctttaggttacgaccagtcgccggcctactgtcttctagggatttcctagggggcctggctttccgggtattccattgcacccagtacatccgacacgggtctaaacccatgtataccccagagcccgacatctgccatgaactgttgggacatgtacctctgtttagcgatcgaagttttgcccagttctcccaggaaatcggactcgcttccctcggtgcccccgatgagtacattgaaaagcttgctaccatctattggtttaccgtcgagttcggcctctgcaaacaaggggattcgataaaggcatatggagccggcttgttgagttcatttggtgaacttcaatattgcctctctgaaaagccaaaactcttgccccttgagctcgagaaaaccgccattcagaactacactgtgacagagttccaacctctgtactatgtggccgaatcattcaacgacgccaaggagaaggttcggaactttgcggccaccatcccccgcccgttctccgtcagatacgacccctacacacaaagaattgaggtcctcgacaatacgcaacagcttaaaatactggcggattccatcaattccgagattggcatcttatgcagcgccctccagaagatcaag

SEQ ID NO: 17954 - DNA, 1356 bp, synthetic construct
  misc_feature 1..1356: note = source = /note="Description of Artificial Sequence: Synthetic coding sequence"
  source 1..1356: mol_type = other DNA
atgtccactgccgtgctggaaaacccgggcttgggtcgaaagttgtcagatttcggacaggagacttcctacatcgaggacaattgtaatcaaaacggcgccatcagcctgatctttagcctgaaagaggaagtcggagccctggcaaaggtgcttagattgtttgaagaaaacgacgtgaatttgacccatatcgaatcacgcccgagccgcctgaaaaaagatgaatacgagttcttcacccacctggataagaggtcactcccggccctgaccaacatcatcaagattcttaggcatgatatcggagccaccgtgcatgaactttcgagagataagaaaaaggataccgtgccttggttcccacgcacgatccaagagctcgaccgtttcgcaaatcaaatcctttcctacggtgccgaactcgatgcagaccatcccgggttcaaggacccggtgtaccgggcccggcggaagcagttcgcagacatcgcgtataactaccgccacggacagccaatcccgagggtggagtacatggaggaggagaagaaaacgtgggggacggtctttaagaccttgaagagcttgtacaagacccacgcgtgctacgagtacaaccacatttttcccttgttggagaagtactgcgggttccacgaggataacatcccacagctggaagatgtgtcgcaatttctccagacctgcactggattccggctgcgcccagttgcgggcctgctctccagccgggacttcctgggaggtctggcatttagagtgtttcattgcactcaatacatccggcacggatcgaagccgatgtacacgccggaacccgacatttgtcacgagctcctgggacacgtgccgttgttctcggaccgatcgttcgctcaattcagccaagaaatcggactggcatcgctcggagcgccggatgaatacattgaaaaactggccactatctactggtttactgtcgagttcggtttgtgcaaacagggagacagcatcaaggcgtacggcgcgggactgctctcctccttcggggaactgcagtactgtctctcagaaaaaccaaaactgctcccactggagctggaaaagaccgcaatacagaattacactgtcacggaatttcagcccctgtactacgtggccgagagcttcaacgatgcgaaggaaaaagtccggaacttcgcggccaccatcccgcgacccttctcagtgagatacgacccgtacacccagcggatcgaagtccttgacaacacgcagcagcttaagatactcgccgactcaatcaattctgaaatcggaatcctgtgctcggcgttgcagaagatcaaa

SEQ ID NO: 17955 - DNA, 1356 bp, synthetic construct
  misc_feature 1..1356: note = source = /note="Description of Artificial Sequence: Synthetic coding sequence"
  source 1..1356: mol_type = other DNA
atgagcaccgcagtgctcgaaaatcccggcctgggaaggaagttgagcgacttcggacaggaaaccagctacattgaagacaattgtaaccaaaacggggccattagtttgattttctccttgaaggaggaggttggggctctggctaaggtcctccgacttttcgaagagaatgatgtgaatctcacccatatcgagtctagaccgtcaaggttgaagaaggacgagtatgaattttttacccacctggataaaagaagccttcccgcccttacaaacatcattaagatccttaggcacgacattggagcaactgtgcatgagctgtctcgtgataagaaaaaggacacggttccatggttcccaaggacaatccaagaactcgacagattcgctaatcagatcctctcctacggagcagaactcgatgccgatcaccccggattcaaagaccccgtttatagggctcgccgtaaacagtttgccgatattgcatacaactacagacatggtcagcccatcccacgcgtcgaatatatggaggaggagaaaaagacatggggcaccgtattcaagacgcttaaaagtctctataagacgcacgcatgctacgagtataaccacattttcccgttgttggagaaatactgtggctttcacgaagataatattccacaactagaagacgtgagtcaatttcttcaaacctgcacaggttttagactgagacccgtcgctggcctcctcagctctcgtgacttccttggcggcttggcctttcgcgtgtttcattgcacacagtatatccgtcacgggtccaagccaatgtacacccctgaacctgatatatgccatgagcttctaggtcacgtgcccctgttctctgatcggtctttcgcgcagtttagccaggagatcggactagccagcctcggagctcccgatgaatacatcgagaaactggcaaccatttattggttcactgtggaattcgggctctgcaagcagggcgattccatcaaagcttatggggccggcctgctatcgtccttcggagagctgcagtactgtctgagtgagaagcctaaacttctccctttagagctcgagaaaacagccatccagaactacactgtaacagaattccagcctctctactacgttgctgaaagcttcaacgacgccaaggaaaaggtgcggaattttgccgcaaccattccgcggcccttttcagtgaggtacgacccgtacacacagcgaatcgaagtgttggacaacacacagcagcttaagattcttgctgacagcataaactcagaaatcggcatcctgtgctcagccctccagaaaattaag

SEQ ID NO: 17956 - DNA, 1356 bp, synthetic construct
  misc_feature 1..1356: note = source = /note="Description of Artificial Sequence: Synthetic coding sequence"
  source 1..1356: mol_type = other DNA
atgtcaacggcagttctggaaaatccgggacttggccgtaaacttagcgactttgggcaggaaaccagctatattgaggacaactgtaatcaaaacggagcaatatcgctgattttcagtctgaaggaagaggtgggggcactggccaaagtcctgcgtctttttgaggagaacgacgtgaatctcacccatatcgaatcaagaccatcgagattgaagaaagatgagtacgaattctttacgcatctcgataagcgctcgctcccggcactcactaacattatcaagattcttcggcacgacattggagcaaccgtgcacgaactttctcgagataagaaaaaggacactgtcccgtggtttccaagaaccattcaggaactggatcgctttgcaaatcaaatactgagctacggcgcagagctggatgcagatcatcccggctttaaggaccccgtgtaccgagctcgccgcaagcaattcgcagacattgcatacaattacagacacgggcaacctatcccgcgcgtcgaatacatggaggaagagaagaaaacctggggtaccgtctttaagacgctcaaatcgctgtacaagactcatgcctgctacgaatacaaccacatcttccccctgctggagaagtactgtggctttcatgaggacaacatcccacaactcgaggacgtgagccagttcctgcaaacctgtactggcttcagactccggcctgtcgcaggattgctgagctcccgagactttcttgggggcttggcttttagggtgttccactgtacccagtacataaggcacggttcaaagcctatgtatactccggaaccggacatctgccatgaactgcttggccacgtcccactgttttcggataggtcgtttgctcagttctcccaggaaattggactggcatcattgggagcgcctgacgaatacattgaaaagttggccaccatatactggtttacggtggaattcggactctgcaaacagggtgactccatcaaggcatacggcgcaggccttctgtcgtcatttggcgagcttcagtactgtctcagcgagaagcccaagctccttcctctcgagctggaaaagactgccatccagaactataccgtgaccgaatttcaaccactttactacgtggcggaatcgttcaacgacgcgaaagagaaggttaggaattttgctgccacgattccccgcccattctcggtgagatatgatccttacactcaacggatcgaagtgttggataacactcaacagctgaagattcttgctgactcgattaactccgaaattgggatcctttgctccgcactgcaaaagataaag

SEQ ID NO: 17957 - DNA, 1356 bp, synthetic construct
  misc_feature 1..1356: note = source = /note="Description of Artificial Sequence: Synthetic coding sequence"
  source 1..1356: mol_type = other DNA
atgagtaccgctgtgctggaaaaccccggacttggacgtaaattgagcgatttcggacaggaaactagttatatcgaggacaactgtaatcagaacggcgccatctcacttatcttttccctgaaagaggaggtgggggccctcgctaaggtcctgcgcctgtttgaagagaacgacgtgaatctaacacatatagagagtcgcccttcccgtctgaaaaaagacgaatacgagttctttacccacctcgacaagagatctctacctgctctcaccaacatcataaaaatcttgagacacgatataggtgccactgttcatgagctgtcccgcgacaagaaaaaagataccgtgccttggtttccaaggaccatccaagagctggatagattcgccaaccagatactgtcctatggggctgaactggatgccgatcaccccggctttaaagacccagtgtatagggccagacgaaagcagttcgccgacattgcatacaactacagacacgggcagcccataccccgtgtcgagtacatggaggaagaaaagaaaacctgggggaccgtttttaaaactctaaaatctctatacaaaacacatgcttgttacgagtataatcatatattccccctgcttgaaaaatactgtggtttccacgaggataatatcccacagttagaagacgtctcacagttcctgcagacctgcactggcttcaggcttcgcccagtggctggactcctaagctcacgggacttcttaggaggcctggcattcagggtgtttcactgtacccagtacatccggcacggctccaagcctatgtatacacccgaacctgatatctgccacgaactcttagggcatgttccactgttcagtgaccgatcattcgcacagttttcccaggagataggtctggccagcctaggcgctccagacgaatacattgagaagctagccaccatttattggtttaccgtggagttcgggctgtgtaagcagggcgatagcataaaggcctatggcgccggtctgttaagctctttcggcgagctgcaatactgtctaagcgagaaacctaagctgctgcccttagaactagaaaaaaccgcaatacagaattacaccgtgaccgagttccagccactgtactacgtcgccgaaagctttaacgacgccaaggagaaggttcgtaactttgccgcaaccattccaaggcccttctctgtgaggtacgatccatatacacagcgcattgaggtgctggataatacccagcagctgaagattctagccgattctatcaatagcgaaattggcatattatgctccgcccttcagaaaataaag

SEQ ID NO: 17958 - DNA, 1356 bp, synthetic construct
  misc_feature 1..1356: note = source = /note="Description of Artificial Sequence: Synthetic coding sequence"
  source 1..1356: mol_type = other DNA
atgtcaaccgccgtcctcgagaatccaggactaggtaggaaactgagtgacttcggtcaggagacctcgtacatcgaggacaattgtaaccaaaacggagccatctccctcatattttctctgaaggaggaggtgggggcccttgccaaggtccttaggctgttcgaagagaacgacgtgaatctcacgcacattgagtccaggccatcacggctcaagaaggacgagtacgaattcttcactcacttggataaacgctcattgccagctctcactaacatcattaagattctcagacacgatatcggggctacggtgcacgagctctcaagggataagaagaaggacacggttccttggtttcctaggacgatccaggagctagacagattcgcaaatcagatccttagttacggagcggaactcgacgcagaccaccccggcttcaaagaccccgtgtaccgtgccagaaggaaacagttcgctgacattgcctacaactataggcatggccaaccgatcccccgtgtagagtacatggaggaagaaaagaaaacttggggcactgtctttaaaacattgaagagtctgtataagacccatgcttgttacgaatacaatcacatctttccactgctcgagaaatactgtggcttccatgaggacaacatacctcagttggaagacgtttcacaattcctccagacctgtacaggctttcggctcagaccagtggcgggccttctctcaagccgggacttcctcggcggactcgcgtttcgggtctttcattgcactcagtacatacggcacggttccaaacctatgtacactccagaaccagatatttgccacgaattgttgggacatgttcctctgttttctgacagatccttcgcacagttctcccaggagatcggtctggccagcctgggagcgccagacgagtatatagagaagctggctactatctattggtttaccgtggaattcggcctgtgtaaacagggggactcaatcaaagcttatggagctggcctcctgagttcctttggcgagctgcagtactgcctgtcggaaaagcccaaacttttgcccctcgaactagagaaaacggccatacagaactatacagtaaccgaatttcaacccctgtattacgtggctgaatccttcaacgatgcgaaagagaaagtgagaaatttcgcagctacgattcctaggcctttttcagttaggtacgacccatatacccaaaggatagaagtattggacaacacacagcaactgaagatcctggccgactccatcaattctgaaattggtatcctgtgctccgctctgcagaagattaag

SEQ ID NO: 17959 - DNA, 1218 bp, synthetic construct
  misc_feature 1..1218: note = source = /note="Description of Artificial Sequence: Synthetic coding sequence"
  source 1..1218: mol_type = other DNA
atgacattagacgtagggcccgaagacgaactgcccgactgggcggccgcaaaagagttctaccagaagtatgatcccaaagatgttatagggcgcggcgtgagctccgtagtgcggcggtgcgtgcaccgtgcgaccgggcacgaattcgccgtgaagatcatggaggtgacagcagaacgtttatctccagaacagctggaggaagttagagaggcgacccggcgagaaactcatattctgcggcaggtggccggtcacccacatattatcacactgatcgatagctacgaatcaagctcattcatgttcctggtgtttgatcttatgcggaagggcgagctgtttgattacctcaccgagaaggtcgccctgagtgagaaagagactcgcagcataatgcgaagcttgctggaggcagtctcctttctacatgccaacaacatcgtgcacagggacctgaagcccgagaacatcctcctggatgataatatgcaaatacgattatcggacttcggttttagttgccatctggaaccgggggagaagcttcgagagctctgtggaacgcccggttacctggcaccagaaatcttgaagtgctctatggacgagacccacccggggtatggcaaagaggtcgacctttgggcctgtggcgtcatcctgttcactctcttggccggaagcccaccattttggcacagaagacagatcctcatgttacgcatgatcatggaagggcagtatcagttctcatcaccggaatgggacgaccgaagtagtacggttaaggatttgatctctcggctcctgcaggtcgatcctgaggcccgactcacagcagagcaggccttgcaacacccgttcttcgagcgttgcgagggcagccagccctggaatttgacgccccggcaacgcttccgtgttgcggtatggaccgtgctcgcggccgggcgcgtggcgctgagcacccaccgggtgcgccccttaactaaaaatgcgctccttagggatccctatgctcttagaagtgtgcggcatttgatcgacaactgtgcgttcaggttgtatggccactgggtgaagaagggggagcagcagaaccgggcggccctgttccagcataggccccctggtccattccccataatgggccccgaagaagagggcgattcagccgcaattaccgaggacgaggctgtgcttgtactgggc

SEQ ID NO: 17960 - DNA, 1218 bp, synthetic construct
  misc_feature 1..1218: note = source = /note="Description of Artificial Sequence: Synthetic coding sequence"
  source 1..1218: mol_type = other DNA
atgacgctggacgtcgggcccgaggacgagctgcctgactgggctgctgctaaggagttctatcaaaagtacgatcctaaggacgtaattggccggggagtgtcctcagtcgtgcggaggtgcgtgcatagagcaactggtcatgaatttgccgtcaaaatcatggaagtgactgcagagagactttcccctgagcagctggaagaggtgcgcgaagcaacgcgccgcgaaacccatatccttagacaggtggcaggtcaccctcacattatcactcttattgactcgtacgaaagctcatcgtttatgtttcttgtctttgatcttatgagaaagggcgagctctttgattacctgacggaaaaggtggcactttcagagaaggaaaccagatccattatgagatcattgctcgaagcagtgtccttcttgcacgcgaacaatatagtccaccgggacctgaagcccgagaatatacttctggatgacaacatgcaaatccgcctctctgattttggattctcgtgtcacctggaacctggagaaaaacttcgagaactttgtggaacccctggatacctggcaccagaaatccttaagtgttcaatggatgaaactcacccagggtacggaaaggaagtcgacctttgggcctgtggggtgatcttgtttactcttcttgcaggctcgccaccgttctggcatagacgacagattcttatgctgcgaatgattatggaaggacaataccaattctcatccccagaatgggatgacaggtcgagcactgtgaaggaccttattagccgactcctgcaggtggacccagaagcccgtttgaccgcagaacaagccctgcagcatccattctttgaacggtgtgagggctcacaaccttggaacttgactcctaggcagcggttccgcgtggcagtgtggactgtgctggccgccggccgcgtggcactgtccacgcatcgcgtgcgtcctctgactaagaatgccctcctgagggacccatacgccctgaggtccgtgcggcatctgatcgataactgtgcatttcggctctacggccattgggtcaagaagggagaacagcagaaccgcgcagctctctttcaacatagaccacccgggccttttcctatcatgggaccagaagaagaaggtgactccgctgcaattacggaagatgaggcagtgctggtcctggga

SEQ ID NO: 17961 - DNA, 1218 bp, synthetic construct
  misc_feature 1..1218: note = source = /note="Description of Artificial Sequence: Synthetic coding sequence"
  source 1..1218: mol_type = other DNA
atgacgttagacgttgggcctgaagacgagctacctgactgggcggcggccaaagaattctatcagaaatacgatccaaaagacgtcatcggccgtggagtgtcttccgtagtccgcagatgcgtccatcgcgcaacaggccacgaattcgcagtaaagatcatggaagtgacagccgaacgtctgtctccggaacagctggaagaggttcgcgaagccacaaggagggagacacacatactacgccaagtagctgggcatcctcacattatcactttgattgattcgtatgaatctagctcattcatgtttctggtcttcgatctaatgaggaagggcgaattatttgactatttgacagagaaagtggctctgagcgagaaagaaacccgctcaattatgcgatctctcctggaagctgttagcttcctgcatgccaacaatattgttcaccgcgatctcaaaccagaaaatattctgcttgatgacaacatgcagatccggttgagcgatttcggcttcagctgtcatctcgaacctggagagaaacttcgagaactctgcgggactcctggatatctggctcctgaaatactgaagtgctcaatggacgaaacacatcccgggtatggaaaagaggtagacttgtgggcttgcggagtgatactctttacacttttagccggctcgcctcctttctggcacagaaggcagatcctgatgctcagaatgattatggagggacaatatcagttctccagcccggagtgggatgatcgatcctccacggtcaaagacctgattagtaggctcctgcaggtggatccagaggccagactaactgcggaacaggctctgcaacacccatttttcgagagatgtgagggcagtcagccttggaacctgacaccccgccagcggttccgcgtcgccgtctggactgttctggcggccgggagagtggccctgagcactcacagggtgcgcccattgaccaagaacgcactcctaagggacccttatgcgctgcgttcggttaggcacctgatagacaactgtgcatttcgtctgtacggtcactgggttaaaaagggagagcagcagaaccgagcagctttgttccagcaccgcccccccggaccctttccaatcatggggccagaagaagagggagattctgccgccatcactgaggatgaggcagtgctcgttttggga

SEQ ID NO: 17962 - DNA, 1218 bp, synthetic construct
  misc_feature 1..1218: note = source = /note="Description of Artificial Sequence: Synthetic coding sequence"
  source 1..1218: mol_type = other DNA
atgactctcgacgtgggtcctgaggatgaattgcctgattgggcagctgcaaaagagttttaccagaagtacgatccaaaggatgtgatcggacgaggtgtttcgagcgtggtgaggcgatgtgtccaccgtgcaaccggtcacgagttcgcagtgaagatcatggaagtgaccgcagaaaggctctcacctgaacagcttgaagaagtgagggaggcaacccgccgggaaactcatattctgcgccaagtggccggacacccacacataatcaccctgatcgatagctatgagtcctcctccttcatgtttctggtgttcgatctgatgcgcaaaggggagctctttgactaccttactgagaaggtcgcactttcagaaaaagaaaccagatccattatgcggagcctgctggaggcagtgtcttttctgcacgcaaacaacattgtccatagagatctgaaaccggagaatattctgcttgatgataacatgcaaattcgactttccgattttggattttcgtgtcatctcgaacctggcgaaaaactgcgggaactctgcgggactccgggttacttggcacctgagatcctgaagtgctcgatggacgaaacccacccaggctacgggaaggaggtggacctttgggcctgtggtgtgattctgtttactctgctggcgggttccccgcctttctggcatcgtcggcagattttgatgcttcggatgattatggagggtcagtaccaattctcgtcgccggaatgggacgaccggagctccaccgtgaaggatcttatctcccgtctgctccaggtggacccggaagcccggctgacggcagaacaggcactgcaacacccctttttcgaacgttgtgaaggaagccagccctggaatctgactccacggcagagattccgggtcgccgtctggacggtgcttgcagcagggcgcgtcgcattgagcactcacagagtaagaccactgactaaaaacgcactcttgagggatccatacgccctcagatcggtcagacacctcatagataattgcgcatttcggctttacggtcattgggtcaagaagggcgagcaacaaaacagggcagcgctttttcaacaccgacctcccgggccatttcctatcatgggtccggaagaagagggggactcggccgctattactgaggatgaagcggtgctggttcttgga

SEQ ID NO: 17963 - DNA, 1218 bp, synthetic construct
  misc_feature 1..1218: note = source = /note="Description of Artificial Sequence: Synthetic coding sequence"
  source 1..1218: mol_type = other DNA
atgacattagatgtgggaccagaagatgaactgccggattgggctgcggccaaagaattctatcagaagtacgaccctaaagatgtgataggcagaggtgtatcatcggtcgttcgaagatgcgtccatcgtgctacgggacacgagttcgcggttaaaattatggaggttactgctgaaagactaagtccagagcagcttgaagaagttcgtgaagccacccgacgagaaacgcatattttgcgacaagttgctgggcatccacacatcatcacgttgatcgatagttacgagagcagcagtttcatgttcctggttttcgatcttatgcgtaaaggagagcttttcgattatcttacagaaaaagtcgcactgagtgaaaaagagaccagatcgatcatgagatccttgttagaagccgtatcctttcttcatgcaaataatatcgttcacagagatcttaaaccggaaaatattctcttggatgataatatgcagattagattgtcagattttggattctcctgtcatctggaaccaggtgaaaagttaagagagttatgtggaaccccgggatatttggctcctgaaatcctaaagtgctcaatggatgaaacccaccccggatacggaaaagaggttgatctttgggcgtgcggagttatactcttcactctgttggctggaagcccaccgttttggcatcggagacaaatcctcatgctgagaatgatcatggaaggacaatatcaattctcatcgcccgagtgggacgaccgaagctccacggtgaaggatcttatttccagacttctacaagttgatccagaagcgaggctaactgctgagcaagctttgcaacatccatttttcgaaagatgtgaaggatcccaaccatggaacttaactccacggcaacgattcagggttgcagtttggaccgtgctcgcagcaggaagagtggcactaagcactcatcgagttagaccacttacaaaaaacgcacttctccgtgatccatatgcactcagatccgtacgtcacctcattgataactgcgcatttagattgtacggtcattgggtgaagaagggagaacagcaaaacagagcggcgttattccaacaccgtcccccaggacctttcccaattatgggccctgaagaggaaggagactcagcagcaattactgaagacgaagccgttcttgtcctgggg

SEQ ID NO: 17964 - DNA, 1218 bp, synthetic construct
  misc_feature 1..1218: note = source = /note="Description of Artificial Sequence: Synthetic coding sequence"
  source 1..1218: mol_type = other DNA
atgacacttgatgtagggccggaggacgagcttccggactgggcggcggctaaggagttttatcagaaatatgacccgaaagacgtgataggccgcggagtgagtagtgtggttcggagatgcgtccaccgtgcgacaggacacgagtttgccgtaaaaattatggaagtgacggctgagagactgtccccggagcaacttgaggaagtacgggaggccacgcggagagaaacgcatattcttcgtcaagtggctggacaccctcacattatcaccctgatcgacagctacgaaagctcttcattcatgtttctggtatttgaccttatgcgtaagggagagctgttcgactatcttaccgaaaaagtggccttgtcagaaaaagaaacacgcagcattatgcggtctcttttggaagcagtctcctttttacacgcaaataacattgtgcatagggatctgaaaccagaaaacatactgcttgatgataatatgcagattcggcttagtgactttggcttttcgtgtcatttagaacctggggagaaattacgcgaactgtgtgggacacctggttaccttgcgccggaaattctgaaatgctctatggatgagacacacccaggctatggaaaggaagtggatctgtgggcatgcggtgtgattttatttacattgttagctggatcgccgccgttttggcaccggcggcagatactcatgttacgcatgatcatggaaggacaatatcagtttagctctccggagtgggacgatagatcctcaactgtcaaagatcttatctctcgcctgcttcaggttgaccctgaggctcgccttacagcagaacaagccttacaacatcctttttttgaaagatgcgagggcagccaaccatggaacttaactcctcgccagcggtttcgtgtcgctgtttggacagtgctcgcagcaggacgcgtggcgttgtcgacccacagagtccgcccattgacaaagaatgcattgttacgtgatccgtacgcattgcggtcggtgcgtcatttgatcgataactgtgcatttagactttatggccattgggttaaaaaaggagagcaacagaatcgtgcagcgctttttcagcatcgcccgccgggtcctttccctattatgggacctgaggaggagggtgattcagccgcaattacggaagatgaggcagtcctcgtccttgga

SEQ ID NO: 17965 - DNA, 1218 bp, synthetic construct
  misc_feature 1..1218: note = source = /note="Description of Artificial Sequence: Synthetic coding sequence"
  source 1..1218: mol_type = other DNA
atgacactggacgttggacctgaagacgagctacccgactgggcagccgcaaaggagttttatcagaagtatgacccgaaagacgtcatcggacggggggtctcatctgtagtccggcggtgcgttcacagggctaccggacacgagtttgcggttaagatcatggaagttaccgcagaacgactgtcacccgaacagctagaggaagtcagagaggctacgaggcgcgagacccacattctacgacaggtggcaggccatcctcatataataacactgatagattcttatgagtcgagcagtttcatgttcctcgtgttcgatctaatgcggaagggagagctattcgactacctgacagagaaggtcgcgctgtccgagaaggagaccaggtcaatcatgcgaagcctcttggaggctgtgtcctttctgcacgccaataacattgtgcaccgtgatctgaaacccgaaaatattctgttggatgataatatgcagattaggctatcagacttcggattctcgtgtcacctcgagccgggtgagaaattgagagagttgtgtggcaccccgggatacctcgccccagagatactcaagtgcagcatggatgagacccatcccggctacggcaaggaggttgatttatgggcctgtggggtgatcctctttaccttactcgcgggttcgcctcctttttggcacaggcgccaaattcttatgctgagaatgatcatggaggggcagtatcagtttagctcgcccgagtgggacgacaggagcagcactgtgaaggatctgataagccgacttctacaggtggaccctgaggcgcgcctgacagcagaacaggccctccagcacccatttttcgaacggtgtgagggcagtcagccttggaatttgactcccaggcagcggttcagggtggctgtgtggaccgttcttgcagccgggcgagtggcccttagtacgcacagggtgaggccgctcacaaaaaacgcattgctgcgagacccttatgctcttcgaagcgttaggcatctcatcgacaactgcgcttttcgcttatacggacactgggtgaagaagggagaacagcagaaccgcgcagccctgttccagcataggcctcctggtccttttcccatcatgggacccgaggaagagggcgactctgccgccattaccgaagacgaggctgttctcgtacttggg

SEQ ID NO: 17966 - DNA, 1218 bp, synthetic construct
  misc_feature 1..1218: note = source = /note="Description of Artificial Sequence: Synthetic coding sequence"
  source 1..1218: mol_type = other DNA
atgacccttgatgtggggccagaggatgagctgccagactgggctgcagcaaaggaattctaccagaaatacgatcccaaggatgttatcgggaggggggtctcctctgtggtgagaagatgcgtacacagggccacgggtcacgaattcgcggtgaaaatcatggaagtcacagcagagagactctcgcctgagcagctagaagaagtgagggaggccacacgccgtgaaacccatatcctgaggcaggttgccggccacccccacattatcacgttaatcgactcatatgaatcatccagtttcatgttcctggtgtttgatctgatgcggaagggcgaactgttcgactacctgaccgagaaggttgctttgtccgaaaaagaaacacggagcatcatgcggagtttactggaagctgtatcttttctgcacgccaacaatatagtgcatcgggatctgaagccagagaacattctgcttgacgataacatgcagatcaggctgtccgatttcggcttctcgtgtcacctcgaaccaggcgaaaaactgcgcgaactttgcgggacacccggttaccttgcgcccgagatcctcaagtgtagcatggacgaaacgcacccaggttacgggaaggaagtggatctgtgggcgtgcggggttattctctttacactgctggctggaagccctcccttctggcatcgaaggcagattctgatgctacgcatgattatggagggtcagtaccagttctcttcaccagaatgggatgatcggagctcaaccgtcaaagacctgatcagcaggctgctgcaagtcgacccagaggcccgtctgactgcagagcaagcactccagcatccattcttcgagcgctgtgaggggtctcagccttggaatctaaccccgcgccaacgattccgagtggccgtgtggacagtgttggcagcagggagagtcgccttatccactcatagagtgagacctctgaccaagaatgcattgctgcgggacccttacgctctgcgctccgtaagacacctgatagataattgtgcttttcgactgtacggacactgggttaagaaaggcgaacaacaaaatagagctgccctgttccagcatcggccgccagggccgttccccatcatggggcccgaggaagagggagattctgctgctataacggaagatgaagccgttctggtgctcgga

SEQ ID NO: 17967 - DNA, 1218 bp, synthetic construct
  misc_feature 1..1218: note = source = /note="Description of Artificial Sequence: Synthetic coding sequence"
  source 1..1218: mol_type = other DNA
atgaccctggacgttgggcctgaggatgaactgcccgattgggcagccgctaaggaattttatcaaaagtacgacccaaaggatgtcatcggccgtggcgtctcatctgtcgtccgccgatgcgtccaccgtgcaaccggccacgagtttgcagtcaaaatcatggaggttactgctgagcgacttagtcctgaacagcttgaagaggtcagagaggcgacccggcgtgagacccacatattgagacaggttgctggccatccccatatcattacattgattgattcatacgagagctccagctttatgtttctagtgtttgatctgatgcggaaaggcgagctgttcgactacctcactgagaaagtggcgctatctgagaaggagacgcgctctattatgaggagtctgctggaagcagtgtcttttttgcatgcgaataacatcgttcatcgcgatctaaaacccgagaatattttactggacgacaacatgcaaatacggctgtccgactttggcttttcctgtcatctcgagcctggagagaagttacgtgaattgtgcgggacaccggggtatttggcaccagaaatcttaaagtgctccatggatgagacgcacccgggatatgggaaagaggtggatttgtgggcatgtggggtgattttattcacgctccttgccggaagcccccccttttggcacaggagacagatcctgatgctgcgtatgatcatggagggccagtaccagttctcaagcccagaatgggatgatcggtcaagcaccgtcaaagatctgattagtaggcttctccaggtggaccctgaagctagactcaccgccgagcaggctctgcagcatcctttcttcgagagatgtgaagggagccaaccctggaacctgaccccacggcaacggtttagggtagccgtatggaccgtgcttgccgcaggacgagtagcactttcaacccaccgggtgcgtccccttactaaaaacgccctgctccgagacccctacgcgctccgctccgtgcgccatctgatcgacaattgcgcattcagactctatggacactgggtgaaaaagggtgagcaacagaaccgtgccgctctgttccagcaccgaccccccgggccattccctattatgggtcccgaggaggaaggtgatagcgccgcaataacagaagacgaagctgttctggtccttggt

SEQ ID NO: 17968 - DNA, 1218 bp, synthetic construct
  misc_feature 1..1218: note = source = /note="Description of Artificial Sequence: Synthetic coding sequence"
  source 1..1218: mol_type = other DNA
atgaccttggacgtaggccctgaggacgagttacccgactgggctgccgccaaagagttctatcagaaatacgaccctaaagatgtgatcggaagaggcgtttccagcgttgtccggaggtgtgtgcatcgcgccacaggacatgagttcgctgtgaaaattatggaggtgacggctgaacggctctcaccagaacagctggaggaagtccgggaagcaacaaggcgggaaacgcatatactcagacaggtggccgggcacccacatataattacactgattgactcctacgaatcctcctcctttatgtttctggtgttcgatctgatgcgcaagggggaactgtttgactaccttaccgagaaagtggccctgagcgagaaagagacccggtcgatcatgagaagtttactggaggcagtgtctttcctgcatgcgaataatatcgtacatcgggatttaaagccggaaaatattttactggacgacaacatgcagattagactgagcgactttgggttcagctgccacctggaacccggtgaaaaactgcgtgagctgtgcggcactcccggctacctggctcctgaaatattgaagtgctcaatggatgagacgcatccaggatatggcaaagaggtggatctgtgggcatgtggcgtcatactgtttacgctgctcgcaggaagcccacccttttggcacaggagacagattctgatgctgcgcatgattatggaggggcagtaccaatttagtagccccgaatgggacgaccggtcctcaaccgtgaaagatctgatatctaggcttttgcaggtggaccccgaggctagattaacggctgagcaggctctgcaacacccgttctttgagaggtgcgagggttcccagccatggaacctaactcctcggcagcgttttcgcgtggctgtgtggaccgtgctggcagcagggagggtggctctctctacacaccgcgtgcgccccctgaccaaaaacgctctccttagagacccttacgccttgcggagtgtgcgacacctcatcgataattgtgcatttcgtctttatggacactgggtgaagaagggtgagcagcagaaccgagcagccctgtttcagcatagacctccaggccctttccccatcatgggaccagaggaagagggcgacagcgccgccattactgaagacgaggctgtactggtgctcgga

SEQ ID NO: 17969 - DNA, 1218 bp, synthetic construct
  misc_feature 1..1218: note = source = /note="Description of Artificial Sequence: Synthetic coding sequence"
  source 1..1218: mol_type = other DNA
atgactttggacgttggacctgaagacgagctaccagactgggcggcggcaaaggagttttatcagaagtacgaccctaaggatgtgatagggagaggtgtgagcagcgtagtcaggagatgtgtccacagggcaaccggtcatgagtttgcggtgaagatcatggaggtgaccgccgagcgcttgagcccagagcagttggaagaagtcagggaggctacaagacgcgaaacccacatcctgagacaagtcgcaggacaccctcatattatcactctgatcgacagttacgaatcgtcttcctttatgttcttggtgttcgaccttatgcgcaaaggggagctgtttgattacctcaccgagaaagtggctctatcagagaaggagaccaggtcgataatgcggtccctgttggaggcggtctcctttctgcatgccaacaacatcgtccatcgcgatcttaagccagagaacatcctgctggacgataacatgcagatccgcctctccgattttggtttttcatgccacttagaacccggcgaaaagctccgtgagctgtgtggaactccaggctatctagctcccgagatcctgaagtgttctatggacgaaacgcaccctggctatggaaaggaggtagacctctgggcttgcggggtgattctttttaccctcctggcgggcagtcctcctttttggcaccggcggcagatactgatgctccgaatgatcatggaggggcaataccaatttagcagccccgagtgggatgaccgcagttcaacagtgaaggacttaatttctagactattacaggtcgatcccgaggcccggctgaccgcagagcaagctctccagcaccccttcttcgagcgatgtgaggggagccagccctggaatctcaccccgcgtcagcggttcagagtcgcagtgtggaccgttctcgctgctggccgcgtagccctaagcactcaccgcgtccgacccttgaccaagaatgcgttactcagggacccctatgctctgagatcagttagacatcttattgacaactgtgcttttagactgtacggccactgggtcaagaaaggagagcagcagaatagagctgctctattccagcacaggccccctgggccatttccaatcatggggcctgaagaggaaggcgactctgcagccatcacagaggacgaagccgtgcttgtgctagga

SEQ ID NO: 17970 - DNA, 1218 bp, synthetic construct
  misc_feature 1..1218: note = source = /note="Description of Artificial Sequence: Synthetic coding sequence"
  source 1..1218: mol_type = other DNA
atgacacttgacgtgggcccggaggatgagctgcctgattgggcagctgccaaagagttctaccagaaatatgaccctaaagacgttatcgggcgtggcgtgtccagcgtagttaggagatgtgtgcatcgtgccacaggccacgagttcgcagtgaagatcatggaagttactgcagagaggctctctcccgagcaacttgaggaagtgagggaggccacccgacgcgagacccatattttgaggcaggttgccgggcacccccatatcatcacactgatcgacagttacgagagctcctctttcatgttcttagtgttcgacttgatgcggaagggagagctctttgactatctcaccgagaaggtcgccttgtctgaaaaggagacacgctcaattatgagatcactgctcgaagcagtgtcattcttgcatgcgaacaatatcgtacaccgggacctaaaaccagagaacattctgctggatgataacatgcagatccgactgtctgacttcggtttttcctgccatctggagccgggtgaaaagctccgggaactgtgtgggacacccgggtacctggctcctgagatcttaaagtgcagcatggatgaaactcatcctggatatggcaaggaggtggacctgtgggcatgtggcgtaattctcttcactttactcgccgggtcaccaccgttttggcatagaagacagatcttgatgctgagaatgatcatggaaggccagtatcaattttcctctccagagtgggacgacagatcctcaaccgtcaaagacctgataagccggctgttgcaggttgatcccgaagcccgcctcactgcggaacaagccttgcagcaccctttttttgagaggtgcgaagggagtcaaccctggaacctaaccccacggcagcgcttccgagtggcggtgtggacagtgctggccgcgggtcgggtggccttaagcacacatcgagtgagaccgttgaccaagaatgcactcttacgtgatccgtatgcgctgaggtctgttcggcacctcattgacaactgtgcttttaggctctatggtcactgggtcaagaaaggggagcagcagaacagggcagcgttgttccaacaccgtcctccaggtccatttccaatcatggggcctgaggaggagggggactctgctgcaatcacagaagacgaggcggtgctggtgttggga

SEQ ID NO: 17971 - DNA, 1218 bp, synthetic construct
  misc_feature 1..1218: note = source = /note="Description of Artificial Sequence: Synthetic coding sequence"
  source 1..1218: mol_type = other DNA
atgacgctcgatgtcggacctgaagatgaattgcccgattgggcagcggctaaggagttctatcagaagtatgacccaaaggacgtgatcggacgcggagtttcctccgtcgtaagacggtgtgttcatcgggccacaggccatgagttcgcggttaaaattatggaagtcacagccgagcggcttagtccggagcaactcgaggaggtccgtgaagcgacccgccgtgaaacacacatccttcgacaggtggctggacatccccatattatcacattaatcgatagctatgagtcatcgagcttcatgtttcttgtgttcgatctgatgcgcaagggtgagttgtttgactacctaacagagaaggtcgccttatcggaaaaagaaactaggagcatcatgcgctccttgctcgaagcagtttcctttcttcatgccaacaacatcgtacaccgcgatttgaagccggagaacatcctattggacgacaacatgcagatacggctttcggattttgggttctcgtgccacctggagccgggtgagaagctccgggagctttgtggaacccccgggtacctcgcacctgagattctgaaatgttccatggacgagacgcatccaggttatggtaaagaagtcgacctgtgggcttgcggggtgattctgtttacccttctggcagggtcaccccccttctggcaccgtcgccagatactgatgctgcgtatgattatggaggggcaataccagttcagttctccggaatgggatgaccgatcctctaccgtcaaagacctgatctctagactgttgcaggtcgatccagaggcccggctgaccgctgagcaggctcttcagcacccattcttcgaacgttgcgaaggttcgcaaccgtggaacttaacaccgcgtcagcgattccgcgtagcagtttggacagttcttgctgctggccgagtggcgctcagtactcaccgcgtacgcccattgactaaaaacgcgctgttgcgcgatccttacgcgctgcgtagcgtccggcacctaatcgataattgcgcgtttaggctgtacgggcactgggtgaagaagggtgagcaacaaaacagagccgcgctctttcagcatcgtcctccaggtccatttccgatcatgggccctgaggaggagggagattccgccgccatcacggaggatgaagcagtgctcgtgctcggc

SEQ ID NO: 17972 - DNA, 1218 bp, synthetic construct
  misc_feature 1..1218: note = source = /note="Description of Artificial Sequence: Synthetic coding sequence"
  source 1..1218: mol_type = other DNA
atgacgctggatgtgggtcctgaagatgagctgcctgattgggctgcagcaaaggagttctaccaaaagtacgatccgaaggacgtcatcggtcgaggagtgagctcagtagtccgcagatgtgtccatcgcgcgaccggtcatgagttcgccgtgaaaatcatggaggtgaccgccgaaagacttagccctgagcaacttgaagaggtgagagaggcaactagaagagaaacccatattcttaggcaagtcgcagggcatcctcatatcatcactctgattgactcatacgaatcatcgtccttcatgttcctggtgtttgaccttatgcgcaagggagagctgttcgattacctgactgagaaggtcgcactttccgaaaaggaaacccgtagcatcatgcggtccctgctggaagcagtgtccttcctccacgcaaacaacattgtgcaccgtgatcttaagccagagaatatccttcttgatgacaatatgcaaattagactgtcggactttggtttttcgtgtcatctggaaccaggggaaaagttgcgggaactttgcggaaccccgggatacctggcacccgagattctcaagtgttcgatggatgaaactcaccctggctatggaaaagaagtcgatctgtgggcatgcggggtaatcctttttaccctgctggccggctccccaccattttggcacagacggcaaatacttatgctccgcatgatcatggaaggacagtaccagttttcctcgcccgaatgggatgaccgctcaagcacggtgaaagatctgatatcgcgattgctgcaggttgaccctgaagcacggctcactgcggagcaggcactgcagcatccttttttcgaaagatgtgaaggtagccaaccctggaacctcactccccgtcagagatttcgagtggctgtatggactgtgcttgcggcaggaagggtggcactgagcacccatagagtgcgtccactcaccaagaacgcactgctgcgcgatccatacgccctgagatccgtgcgccatcttattgacaattgcgcgtttagactctacggccactgggtgaagaaaggggaacagcaaaaccgggcagcactttttcaacaccgccctcctggtccattccctattatgggccctgaagaagagggagactcggccgcgattaccgaagatgaggctgtcctcgtcctgggt

SEQ ID NO: 17973 - DNA, 1218 bp, synthetic construct
  misc_feature 1..1218: note = source = /note="Description of Artificial Sequence: Synthetic coding sequence"
  source 1..1218: mol_type = other DNA
atgactttagacgtaggccccgaggatgaacttcccgactgggccgccgcaaaagaattctatcaaaaatacgacccaaaagacgtgatcggacgtggcgttagctcggtcgttcgtcggtgcgtccaccgagccactggacatgaattcgccgtcaagattatggaggtgacagcggagcgactgagcccggagcagctagaggaggtgcgagaagctacccgccgagaaacccacattctgaggcaggttgcgggacatccacatatcatcactcttattgattcctacgagtctagtagttttatgtttctggtgtttgacctcatgagaaagggcgagttgttcgattatctgacagaaaaagttgcgctctcggagaaggaaacacgatccatcatgcgatctttgctcgaagccgtatcattcctgcacgctaacaatattgtgcacagagacttgaaacctgaaaatatactcctggacgacaacatgcagatcagactctccgatttcggcttcagttgccatctcgagcccggggagaagcttagagaactctgtgggacccctggatatctagcccctgagattcttaagtgctctatggacgaaactcacccaggatacggaaaggaagttgatctttgggcatgcggtgtgattcttttcaccctgctcgcgggatccccccccttctggcataggcgccagatccttatgttgcggatgataatggagggccaataccagttcagctcgcctgagtgggatgataggtcgtctaccgtgaaagacctgatttccaggctcctgcaggttgaccctgaggctagactgaccgcagaacaagcactgcagcacccattttttgaaaggtgtgagggatcccagccatggaacctgacacctcgacagcgtttccgagtggccgtctggacagtgttggccgccgggcgagtggcattgtctacacatagggttcggccgctgactaaaaatgcactcctccgagacccgtacgccctacgctcagttcgacacctgatcgataattgtgcgttccgcctttatggtcattgggtaaaaaagggagagcagcagaatagagcggcactcttccagcaccgtcctccgggaccctttcctatcatggggcccgaagaggagggcgatagcgcagcaataaccgaggatgaagccgtgttagtgttgggt

SEQ ID NO: 17974 - DNA, 1218 bp, synthetic construct
  misc_feature 1..1218: note = source = /note="Description of Artificial Sequence: Synthetic coding sequence"
  source 1..1218: mol_type = other DNA
atgaccctggatgtcgggcctgaggacgagctcccagactgggctgcggcgaaggaattctaccaaaagtacgatccgaaggatgtcatcggacgcggagtctcgagcgtggtccggcggtgcgtgcaccgggcaactggccatgaatttgccgtgaagatcatggaagtgactgcggagcgactctcgccggagcagctggaggaagtgcgcgaggcaacgcgccgggaaactcacattctgcgacaagtggcgggacacccgcatatcatcactctgatcgattcctacgagtcctcctcgttcatgtttctggtgtttgacctgatgcggaagggagaactgtttgattacctcaccgagaaagttgcactgtcggaaaaggaaacccggagcattatgcgctccctccttgaagctgtctccttcctgcacgctaacaatatcgttcatcgggatctcaagccagaaaacatccttcttgacgataacatgcaaatccggctgtctgatttcgggttctcatgccacctggagccgggggaaaagctgcgcgagctttgcggaactcctggctacctggcgcccgaaatcttgaagtgctcaatggacgagactcacccaggttatggaaaagaggtggacctctgggcctgcggcgtgatcctgttcaccctgctcgctggctccccgcctttctggcaccggagacaaatactcatgctgcggatgattatggagggtcaataccagttctcctcgccggaatgggatgaccggtcctctactgtgaaagatctcatctcacggcttctccaggtggaccccgaagcgcgcctgactgccgagcaggcgctgcagcatccgttttttgaacgctgcgagggatcccaaccctggaatctcactccgcgccaacgcttcagagtggcagtgtggactgtgctggccgccggcagagtggcactttccactcaccgggtgaggccactgaccaaaaatgctctcctgcgggatccatacgccctccggtccgtgagacatcttatcgacaattgtgcgttcagactctacggacactgggtgaagaagggcgagcagcaaaaccgcgctgcgctcttccagcatagacctccaggtcctttcccaattatgggaccagaggaagaaggggattcggccgcaatcacggaggacgaagccgtactggtcctggga

SEQ ID NO: 17975 - DNA, 1218 bp, synthetic construct
  misc_feature 1..1218: note = source = /note="Description of Artificial Sequence: Synthetic coding sequence"
  source 1..1218: mol_type = other DNA
atgacactagacgtgggtcccgaagacgagctgcccgactgggccgccgccaaggaattctaccagaagtatgacccaaaagacgtcatcggacgcggcgtgtcttccgtggtgaggaggtgcgttcatcgagccacaggccacgagttcgccgttaagataatggaagtgacggccgaacgtctttcacccgagcagctggaagaagtgagggaagcaaccagacgggaaactcacattctgagacaggtggcagggcacccacacatcatcacactgatcgattcttacgagtctagctccttcatgttcctggtctttgacctgatgcgaaagggtgaactgtttgattacctcaccgaaaaagtggcattgagtgagaaagagacacgttcaatcatgcgctctttactggaagccgtttcgttcctccacgccaataacatcgtgcatcgtgacctgaagcctgagaatattctcctggacgacaacatgcagatccgcctgagcgacttcggattcagttgtcatttagaaccaggggaaaagttgcgggagctatgtgggactccggggtacctagcccctgaaatcctgaaatgcagcatggatgagactcatcccggctatggcaaggaggtagatctctgggcatgcggtgttatcttatttaccttactcgcaggttccccacccttttggcaccgacgccagattcttatgcttcggatgatcatggaaggccaataccagttttcttcccccgaatgggacgatcggtcctctacagtcaaagatcttatctctcgactgttacaagtcgatccagaggccaggttgaccgccgagcaggccctgcagcatcctttcttcgagcgatgtgaaggatcccagccctggaacctgactccacgccagcgattccgtgttgcggtgtggacagttctggcagcagggcgggtcgcactatcaacccatcgcgtgcgcccactcacgaaaaacgccttactgcgggatccctatgcacttagaagcgtacggcatcttatcgataattgcgcatttagactctacgggcactgggttaagaaaggagaacagcagaatagagcggcgttgtttcaacacaggcctccggggccatttccgataatgggccccgaggaggagggagatagcgcagccattacagaggatgaagccgtgctggttctcggg

SEQ ID NO: 17976 - DNA, 1218 bp, synthetic construct
  misc_feature 1..1218: note = source = /note="Description of Artificial Sequence: Synthetic coding sequence"
  source 1..1218: mol_type = other DNA
atgacactggatgtggggccagaggatgaactgccagattgggcagcagcgaaggaattctaccagaagtatgatcctaaggacgtgattgggcggggggtgtcttctgtggtcaggagatgcgtacacagggctactggccacgagttcgcggtaaagataatggaggtaaccgccgaacggctgtctccggaacagctggaagaggtccgagaggctacacgacgcgaaactcacattttgcggcaagtcgcaggccacccacatattatcacattgatcgattcttacgagtcatctagcttcatgttcttggttttcgatctgatgcgcaagggagaactcttcgactacctaactgagaaagtcgccctctctgaaaaggaaactcggtctattatgagaagcctgctcgaggcggtgtccttcctccatgcaaacaatatagttcaccgcgacctgaaacctgaaaacatcctgctagacgacaatatgcagatccgcttatccgatttcgggtttagctgtcacctggaacctggagaaaagctccgcgaactatgcggcacccctgggtacctggcacctgagatactcaaatgctccatggacgaaacccaccccggatatgggaaagaagttgatctttgggcatgcggagtgatactgttcaccttgttggccggttccccgcctttttggcatcggcggcaaatcttgatgctgagaatgattatggaggggcagtaccagttctcaagccccgagtgggatgacaggagctcaaccgttaaggatttgatcagtagattactccaggtggacccagaggcgcgcctgactgcagaacaggcactccagcatccctttttcgagcggtgcgagggatcccagccctggaatcttacaccaaggcaacgcttccgggttgctgtgtggaccgtgctggcggccggaagagtggcgctttcaacacatcgcgtcaggccattgaccaagaatgccctactgagagatccctatgcccttcgaagcgtccggcacctgattgacaactgtgcatttagattgtatggccactgggtcaagaaaggtgagcagcagaacagggcagcactgtttcagcatagaccccctggtccattccccataatggggccggaagaggaaggcgattccgctgctattactgaggatgaggccgtactggtactgggg

SEQ ID NO: 17977 - DNA, 1218 bp, synthetic construct
  misc_feature 1..1218: note = source = /note="Description of Artificial Sequence: Synthetic coding sequence"
  source 1..1218: mol_type = other DNA
atgaccctggacgttggaccggaggacgagctgccggattgggcggctgcaaaggagttctatcaaaagtacgatccaaaagacgtgatcggaaggggagtgtcctcggtcgtgaggcgttgtgtgcatagggcgaccggacacgagttcgccgtcaaaatcatggaggtcaccgcagaacggctgagcccagaacaactggaagaggtgcgggaggcaactagaagggaaacccatattctgcggcaggtggccgggcaccctcatatcattactctgattgactcctacgaaagcagcagcttcatgttcctggtgttcgacttgatgagaaagggggaacttttcgactacctgactgagaaggtcgccctttcagagaaggaaaccagaagcatcatgcggtccctgctcgaggcggtgagctttctgcacgccaacaatatcgtccaccgcgatctcaagccggaaaacatcctcctggacgacaacatgcagattagactttcagacttcgggttttcatgtcaccttgaaccaggagagaaactccgggagctgtgcggcacgccgggatacctcgctcctgaaatcctgaagtgctcaatggacgaaactcacccaggctacgggaaggaagtggacctgtgggcgtgcggcgtcatcctttttactctgctcgcgggaagcccacccttctggcaccgccggcagatcctgatgctccgcatgatcatggaaggacagtaccagttctcgtccccggaatgggacgatcggagctctactgtgaaggatctgatctcacgactgcttcaagtggacccggaagcacgccttaccgccgaacaggcgctgcagcacccgttcttcgagagatgtgaaggttctcagccatggaatctgacgccaagacagcggttccgggtggcggtctggaccgtgctggccgcgggtcgggtggcactgtccactcatagggtccgcccgctcaccaagaacgcactcttgagggatccgtatgctctgcgctcggtgcgccacctgattgacaactgcgccttccgcctgtacggacattgggtgaaaaagggcgaacaacaaaacagagcggcactcttccaacatagacctccaggacctttccccatcatgggaccggaagaggagggggattcggccgccatcaccgaggacgaagcagtcctcgtcctggga

SEQ ID NO: 17978 - DNA, 1218 bp, synthetic construct
  misc_feature 1..1218: note = source = /note="Description of Artificial Sequence: Synthetic coding sequence"
  source 1..1218: mol_type = other DNA
atgacgctcgatgtgggaccggaagatgagttgcctgactgggcagccgctaaagaattctaccaaaagtacgacccaaaggatgtgatcgggcggggggtgtcatccgtggtgcgccggtgcgtccacagagcgaccggacatgaatttgctgtgaaaatcatggaggtcaccgccgagcggctgtccccggaacaactggaggaagttcgggaggccactagacgcgagactcatatccttcggcaggtcgcagggcacccgcatatcatcaccctcatcgactcctacgagtccagctcattcatgtttcttgtgttcgacctcatgcgtaagggcgagctctttgactacttgacggagaaggtcgctctctctgagaaagagactaggtcgataatgaggtcactgcttgaggccgtgagcttcttgcatgctaacaatatcgtccaccgggacctgaagccggagaatatcctcctggatgacaacatgcagatccgcctgtccgacttcggcttcagttgtcacctggagccaggagagaagctccgcgaactgtgtggaactccgggctacctggctcctgaaattctgaagtgcagcatggacgaaacccacccgggttacggaaaagaagtggatctgtgggcctgcggcgttatccttttcaccctcctggccggaagcccgccattttggcaccgacgccagatcctgatgctgagaatgatcatggaaggacagtaccagttctcgtcccctgaatgggacgaccgctcatcaaccgtgaaggacctcatcagtcggctcctccaggttgatcctgaagctcgcctgactgcagaacaggcgcttcagcatccgtttttcgaacggtgcgaaggatcgcaaccgtggaacttgaccccccgacaacgcttccgtgtggcggtatggactgttctggcggccggtcgcgtggcattgtctactcacagagtgaggccgctgacgaagaacgccctgctgcgcgacccctacgcccttcggtcggtccggcatcttattgacaactgcgcgttccggctgtatgggcactgggtcaaaaagggagaacagcagaatagagcagcccttttccaacaccgcccgcccggcccatttcctataatgggtcctgaggaggaaggggatagcgcggccattaccgaagatgaggcggtgctcgtgctggga

SEQ ID NO: 17979 - DNA, 1218 bp, synthetic construct
  misc_feature 1..1218: note = source = /note="Description of Artificial Sequence: Synthetic coding sequence"
  source 1..1218: mol_type = other DNA
atgactctggatgtcggtcccgaagacgaactccccgattgggctgccgctaaagagttttaccagaagtacgacccaaaggacgtgatagggaggggtgtgtcgtcggtggttcgtcgctgtgttcatcgtgcgacaggccatgagtttgccgtcaaaattatggaggtaactgccgagcgactgtcacctgaacagctggaggaggtccgagaggccaccaggcgggagacccatattctgcgacaggtagccggacatccccacatcatcaccctgatagacagctacgagtcctccagcttcatgttcctcgtgtttgatttgatgaggaagggcgagctattcgattacctgactgaaaaggttgccctgtcggaaaaagagacaagatctattatgagatctcttttagaagccgtgtcctttctgcatgcaaataacattgttcatagggacctgaagcccgaaaatattttgttggatgataacatgcaaatcaggctgtcggattttggatttagttgccatctcgaacccggagaaaagctgcgcgaactctgtggaaccccggggtaccttgcccctgagatcctgaagtgctctatggacgaaactcacccaggctacgggaaggaggtcgatctgtgggcgtgcggtgtaatcttattcaccttgctggcaggtagcccccccttttggcaccgccggcagatccttatgctgagaatgattatggaagggcagtaccagtttagttctcccgaatgggacgaccgcagctccacagtcaaagaccttataagccggctgttgcaagtcgatcccgaagctcgtctcacagctgaacaggccctgcagcaccccttctttgaacgctgcgagggtagccagccttggaacctcactccacgccagcgttttcgggtggcggtctggaccgttctcgcagccggacgagtcgccctgagcacccatcgagtccgaccactgacaaagaatgccctgctgagggacccctatgcgctgaggtctgtgcgccacttaattgataattgcgctttcaggctctacggccactgggtgaaaaagggcgagcaacagaatcgggctgccctgtttcagcatcggccacccggtccatttccgatcatgggccctgaagaagagggcgattccgcagcgatcaccgaggacgaagccgttctcgtcttaggg

SEQ ID NO: 17980 - DNA, 1218 bp, synthetic construct
  misc_feature 1..1218: note = source = /note="Description of Artificial Sequence: Synthetic coding sequence"
  source 1..1218: mol_type = other DNA
atgacccttgacgtgggacccgaggatgagctcccagattgggccgcagcaaaggagttttaccagaagtacgacccgaaggacgtcatcggtcgcggggtgtcgagcgtcgtgcgcaggtgcgtgcaccgggcgactggccacgagttcgcggtcaagattatggaagtgaccgctgaacggctgtccccggaacaactggaggaggtcagggaagcaaccagacgcgagactcacatccttcgccaagtcgccggacatccgcacatcatcactctcatcgactcatacgagagctcgtcctttatgttcctcgtgttcgaccttatgcggaaaggggagctgttcgactacctgacggaaaaggtggcgctgagcgaaaaggaaactcgcagcattatgaggtcactcctggaagcggtgtcattcctgcatgcgaataacatcgtgcaccgcgatctcaagccggagaacatcctgctcgacgacaatatgcagatccggctgtccgatttcggtttctcctgccacctggagccaggcgagaagctgcgggagctgtgtggaacgccgggatatttggcgcctgaaatcctgaagtgctcgatggatgaaactcacccaggctacggcaaggaagtggatctgtgggcttgcggcgtgatcctcttcaccctcctggcaggatccccgcccttctggcatcggcgccagatactgatgttgcgaatgatcatggaaggccagtaccagttcagctcaccggaatgggacgaccgctcatcaaccgtgaaggacctgatcagccggctgctgcaggtggacccggaggcccggctgactgcggaacaagccctgcagcatcctttcttcgaacgctgcgaaggctcgcagccgtggaacctcaccccgaggcagcgctttcgggtcgccgtgtggaccgtgctcgcggcgggcagggtggccctctcgacgcacagagtgcgcccgcttaccaagaacgccctcttgcgcgatccgtacgccctccgatctgtcaggcacctgattgacaactgtgcctttcgcctgtacggtcactgggtgaagaagggagaacagcagaatcgtgccgccttgtttcagcatcggccaccggggccgttccctatcatggggccggaagaagagggcgactcagctgctatcaccgaggatgaagcagtgttggtgctggga

SEQ ID NO: 17981 - DNA, 1218 bp, synthetic construct
  misc_feature 1..1218: note = source = /note="Description of Artificial Sequence: Synthetic coding sequence"
  source 1..1218: mol_type = other DNA
atgacgctggacgtagggccagaagatgagctcccggactgggcagccgccaaagaattctaccaaaagtacgacccaaaggacgtcatcgggcgcggcgtctcttccgtggttaggaggtgcgtgcaccgggccacaggccacgaatttgctgttaagattatggaggtaaccgccgagcgcctgtctccggaacagttggaggaggtgcgcgaggccacacggcgagaaacgcacatcctccggcaggtggctggtcacccccatatcatcaccctgatcgattcttatgaatccagcagctttatgtttcttgtgtttgacctgatgcgcaagggcgagttgtttgattacctcactgagaaagtcgcattgtccgagaaagagacacggagtatcatgagatcgctgctggaggctgtatctttcctccacgccaacaatatcgtacacagggacctaaagccagagaatatacttcttgatgacaacatgcagataagactgagtgatttcggcttctcttgccacctagaacctggggagaaactgcgcgaactgtgtggtacaccaggctacctagcccccgaaatcctcaaatgttccatggacgagacccatcctggttatgggaaagaagtggacctgtgggcatgcggggttattctcttcacattgttggccggctcacctcccttttggcaccgccgtcagatacttatgcttagaatgataatggagggtcaatatcagttctcatccccagagtgggacgaccgttcttctaccgtgaaagacttaatctcccgcttgttacaggtcgacccagaggcccggctgaccgccgagcaggcactgcagcatccgttttttgaacgctgtgagggatctcaaccatggaacctcacaccacgtcagaggtttagggttgccgtttggacggtccttgcagctggccgagtggcactgagcacccatagggtcagaccattgaccaagaatgccctgcttcgggatccttatgccctccggtcggtaagacatctaatcgataattgcgcatttcgcctgtacggacattgggtgaaaaagggcgagcagcagaatcgagctgccttgtttcagcacaggcctcccggtcccttccctatcatgggtcctgaagaggagggagatagcgccgccatcactgaagacgaggcagtactcgtactcggt

SEQ ID NO: 17982 - DNA, 1218 bp, synthetic construct
  misc_feature 1..1218: note = source = /note="Description of Artificial Sequence: Synthetic coding sequence"
  source 1..1218: mol_type = other DNA
atgaccctggatgtcggacccgaggacgagctgccggattgggccgcagcaaaggagttctaccagaagtacgatccaaaggatgtgatcgggcgcggagtctcgagcgttgttagaagatgtgtgcacagagcaactggccacgaattcgcagtgaagattatggaggtgactgcggagaggctgtccccagaacagctggaagaggtgcgtgaagcaaccagacgagaaactcatatcctgagacaagtcgcaggacatccccacatcattaccctgatagattcctatgagtcgtcatcctttatgttcttggtctttgatttgatgcggaaaggagaacttttcgactacctgaccgaaaaagtggcgctctccgagaaggaaacccgctcgattatgcgttcgctgcttgaagctgtctcctttcttcacgccaataacatcgttcatagagatctgaagccagaaaacattctccttgacgataacatgcaaatccgcctttccgattttggctttagctgtcacctcgagcccggagaaaagctgcgcgaactttgtggtaccccaggatacctggcccctgagattctcaagtgttcgatggacgaaacgcatccaggctacggcaaagaggtggatctttgggcctgtggggtgatcctttttacgctgctcgcgggaagccctccattctggcaccggcggcaaatcctgatgctgcgcatgatcatggagggccagtaccagttttcaagccctgaatgggatgatagatccagcacggtgaaggatctgatttccagactgcttcaggtcgaccctgaggctcgccttaccgcggagcaggcactccaacacccgttttttgaacgatgcgagggatcgcaaccctggaacttgactcctagacaacgcttccgagtggccgtctggaccgtgctcgcagcaggccgggtcgcactgagcacccatcgggtgcggcctctgacgaagaatgcactcctgagagatccttacgccctgaggtccgtgaggcacctcattgataactgtgctttccgcctttatggccactgggtcaagaagggagaacagcaaaatcgcgcggccctgtttcaacatcggcctccaggaccgtttccaatcatgggtcctgaggaagaaggcgattccgcagcaataaccgaggatgaagcagtcttggtcctggga

SEQ ID NO: 17983 - DNA, 1218 bp, synthetic construct
  misc_feature 1..1218: note = source = /note="Description of Artificial Sequence: Synthetic coding sequence"
  source 1..1218: mol_type = other DNA
atgaccctcgatgtgggccctgaggacgagcttccggattgggccgctgcgaaagagttctaccagaagtacgacccgaaggacgtcatcggaagaggcgtgagctcggtcgtgagacggtgcgtgcacagagcgaccggacatgaattcgctgtcaaaatcatggaagtcactgccgagcggctgagccctgagcagctcgaagaagtgagagaagcgaccagacgcgaaactcacatcctgaggcaagtcgcgggacacccgcacatcattactcttatcgactcgtacgaatcaagctcgttcatgttcctggtgttcgacctgatgcgcaagggagagctgtttgactacttgaccgaaaaagtcgccctgtccgagaaggaaacccgcagtatcatgcgctcactgttggaagccgtgagcttcctccacgcgaataacatcgtgcaccgggacctcaagccggaaaacatcctgctcgatgataatatgcaaattaggctgtccgatttcggattttcctgtcatctcgagccaggagaaaaactccgtgagttgtgcgggactccaggataccttgcccctgagatcttgaaatgctcaatggatgagactcatccaggctacgggaaggaagtggatctgtgggcctgtggtgtcattctgttcaccttgctcgcgggctcaccgccattctggcatcgccgccagatcctgatgctccgaatgataatggaaggccagtaccaattttcgtccccggaatgggacgaccggtcctctactgtgaaggacctgatctcgcgcctgctgcaagtggaccccgaggcacggctgaccgcagaacaggctctgcaacacccgttcttcgaaagatgcgagggaagccaaccgtggaacctgacccctcggcagaggttccgagtggcggtgtggaccgtgctggctgccgggcgcgttgcactgtccactcatcgcgtgaggccgctcacgaagaacgcccttctgcgcgatccctatgcacttagatcggtccgccacctcatcgacaattgcgcctttcggctctacggacattgggtgaagaagggagaacagcagaaccgggccgcactgttccagcaccggcctcccggaccatttccaatcatgggtccggaggaagagggcgactccgccgcaatcacggaggatgaagctgtgctggttctcggt

SEQ ID NO: 17984 - DNA, 1218 bp, synthetic construct
  misc_feature 1..1218: note = source = /note="Description of Artificial Sequence: Synthetic coding sequence"
  source 1..1218: mol_type = other DNA
atgactctggatgtgggacctgaagatgagctcccggactgggctgccgcaaaggagttttaccaaaagtacgacccaaaggatgtgattggaagaggagtatcctccgtggtgagacggtgtgtgcaccgagccaccggccatgaatttgcagtgaaaatcatggaagtgactgcagaacgactcagcccagaacaactggaagaggtccgtgaggctacccggagagaaacgcatatccttagacaagtcgcagggcatcctcatatcattactctgattgatagctacgagagctcgtcatttatgttcctggtgttcgacctcatgcgcaagggggagctgttcgactatctgactgagaaggtggccctgtcggagaaggaaaccagatcgattatgaggtcgctgctggaagccgtgtcttttcttcatgcaaacaatattgtgcatcgcgatctcaagcctgagaacattctgcttgacgataacatgcaaatccgcctttccgattttggcttttcctgtcacctcgaaccgggagaaaagctgagggagttgtgcggaactcccggctatttggccccagaaattctgaaatgctccatggatgaaactcatcctggctacggtaaggaagttgatctttgggcgtgcggcgtgattctgttcactctgctggcaggcagcccacctttttggcatcggcgacagatcttgatgctgcgcatgataatggaaggccaatatcaattctcaagccctgaatgggacgaccggtcatcgacggtgaaggacctcataagcaggcttctgcaagtggaccctgaagcaaggcttaccgcagaacaggctcttcagcatccttttttcgagcgatgcgaaggaagccagccatggaatcttacgcccagacaacggtttcgcgtggccgtgtggactgtgctcgccgcaggtagggtggcactgtcaacgcatcgggtgcgtcccctcactaagaacgcccttcttcgggatccatacgccctccgtagcgtgagacatcttattgacaactgtgcattcaggctctacggccactgggtgaaaaaaggtgaacagcaaaatagagcagcattgttccagcacagacctccaggcccttttcctatcatgggtcctgaagaggaaggggactcggcagcgatcactgaagatgaagcagtgctggtgttggga

SEQ ID NO: 17985 - DNA, 1218 bp, synthetic construct
  misc_feature 1..1218: note = source = /note="Description of Artificial Sequence: Synthetic coding sequence"
  source 1..1218: mol_type = other DNA
atgaccctcgatgtgggtccagaagatgaactcccagactgggcggccgcgaaggaattctaccagaaatacgatcctaaggatgttatcggaaggggcgtgtccagtgttgtacgcaggtgcgtccaccgcgccaccggccacgagttcgccgtgaagattatggaagtgaccgctgagaggctgagccccgaacagcttgaggaagttagggaagcaaccaggagagagactcacattttgagacaggtggccggccacccacacattatcaccctgatcgattcttatgaatccagcagcttcatgtttctggttttcgatctgatgcgcaagggagaactgttcgactaccttaccgagaaggttgctttgtccgaaaaagaaacccgctcaattatgaggagcctcctcgaggctgtatccttcttgcatgcaaacaacatcgttcatagggacctgaagcctgaaaacattttgcttgacgataacatgcagattaggctttccgattttggcttctcatgccacctggagccgggagagaaactcagggagctctgtggaacacccggatacttggccccggagatccttaagtgctccatggacgagacccaccccggatacggtaaggaggttgatttgtgggcttgcggtgtgattctgtttactctgcttgccggctctccaccgttctggcaccgccgccagattcttatgctgagaatgatcatggagggccagtatcaattctcttcacctgagtgggatgacagatctagcactgttaaggacttgatctccagactcctccaggtcgaccctgaggccaggctcacagccgagcaagcccttcaacaccccttcttcgagaggtgcgagggctcccagccttggaatctgacccccagacagagatttagggtcgccgtgtggacagtgcttgctgcaggtagagtggccctgagcacacaccgcgtgaggccgttgacaaagaacgccctgctgagagacccttatgctctgagatctgtccgccacctgattgacaactgtgcatttaggctctacggtcattgggttaagaagggcgagcaacagaacagggccgctctgtttcagcacagaccccccggaccatttcccatcatgggccctgaggaagaaggtgacagcgcagctattaccgaggacgaggctgtgttggtgctcggc

SEQ ID NO: 17986 - DNA, 1218 bp, synthetic construct
  misc_feature 1..1218: note = source = /note="Description of Artificial Sequence: Synthetic coding sequence"
  source 1..1218: mol_type = other DNA
atgacacttgatgtaggtcccgaagacgaactccccgattgggccgccgccaaagaattttatcagaagtatgatcctaaggacgtgatcggaagaggggtgagcagcgttgtgcgtagatgtgttcatagagccacaggacatgagtttgctgtgaaaattatggaggtgaccgccgagagattgagtcctgagcaacttgaggaagtgcgcgaggcaacccgcagagagacccatattctgaggcaggtagcaggtcaccctcacataattaccctgattgatagttacgaatctagctcatttatgttcctggtttttgatctgatgaggaaaggcgagctgtttgactatctaaccgagaaagtggccttaagtgaaaaggaaacccgctctattatgcgctcattgctggaggctgtctccttcttgcatgctaataacattgttcatcgcgatttgaagcctgaaaacatcctcctggatgacaatatgcagattcggctttctgacttcgggttctcttgccacctcgaacctggtgaaaaattacgcgaactatgcgggacaccaggatatcttgcacccgagatactcaagtgttcgatggatgagacccatcctggttatggcaaggaggtggacctctgggcctgtggagtaatcctcttcacactgttggcaggtagtcccccgttttggcaccgcaggcagattctgatgcttagaatgatcatggaaggacagtatcaattctctagtcccgagtgggacgacagatcctccacagtgaaagatctgatctctcggttactgcaggtggatcccgaggctcggctaaccgcagaacaggctttacaacatccctttttcgaaagatgcgagggaagtcagccttggaatttgaccccgaggcagcgattcagggtggcggtctggacagtgctggctgcgggacgagtggcattgagtactcatagagtccgccccctgactaagaacgccctactccgggatccgtatgctctgagatctgtacggcatctgattgacaactgcgcctttaggctatacggccattgggtcaaaaaaggcgagcaacagaatagagctgcactgttccagcatagaccacccggcccatttcccattatgggcccggaggaggaaggcgattccgcagctattaccgaagacgaagcagtcctagttctgggc

SEQ ID NO: 17987 - DNA, 1218 bp, synthetic construct
  misc_feature 1..1218: note = source = /note="Description of Artificial Sequence: Synthetic coding sequence"
  source 1..1218: mol_type = other DNA
atgacccttgatgtggggcctgaggatgagctgcctgattgggccgcggccaaggaattctaccagaagtacgatccgaaggatgtcatcggaagaggcgtcagctcggtcgtgagacgttgcgtccaccgcgccaccgggcacgaattcgcggtgaagattatggaagtgactgcggagcgtctgtcgccggaacaactcgaggaagtccgggaggcaaccaggagagaaacccatatcctgcggcaggtcgcaggtcacccgcacatcatcactctgatcgattcatacgaatcctcgtcgttcatgttcctcgtctttgatctcatgcgcaagggagagctgttcgactatctgaccgagaaggtcgcgctgtcggagaaggagactcggtcaatcatgcgatcgctcctggaggccgtctccttcctgcacgccaacaacatcgtgcaccgagatctcaaaccggagaatatcctgctggacgacaatatgcagatccgcttgtccgacttcgggtttagctgccaccttgaacctggcgagaagctcagggagctgtgcggtacccctggatacctcgctcctgaaatccttaaatgttcaatggatgagactcacccaggttacggaaaagaagtcgacctgtgggcatgtggagtgatcctgttcactctcttggcagggtcgccgccattttggcaccgcagacagatcctgatgctgcgcatgatcatggaggggcagtaccagttcagctccccagaatgggatgaccggagctcaaccgtcaaggatctgattagcaggctgctgcaggtggatccagaggcacgcctcactgccgagcaagcccttcagcatccgtttttcgaaagatgcgaaggctcgcagccgtggaatctcaccccacggcaaagattccgggtggcggtttggaccgtactggccgccggaagggtcgcattgagcacccatcgggtgcgcccgctgacgaaaaacgctctgttgcgcgatccttacgcgctgagatccgtccgacacctcatcgataattgcgctttccggctgtacgggcactgggtgaaaaagggagaacagcaaaaccgggcggcattgttccaacatcgcccccctggaccgttccctatcatgggtcctgaggaggaaggagacagcgcggccatcactgaggacgaagcagtgctggtgctcgga

SEQ ID NO: 17988 - DNA, 1218 bp, synthetic construct
  misc_feature 1..1218: note = source = /note="Description of Artificial Sequence: Synthetic coding sequence"
  source 1..1218: mol_type = other DNA
atgacgcttgacgtgggtccagaagatgagcttccagattgggccgccgcgaaggagttttaccagaagtacgatccgaaggatgttatcggtcggggagtgtcctcggtggtgaggagatgcgtccatagagccactggacacgagtttgctgtgaagatcatggaagtgactgccgaacggctctcacccgaacagctcgaagaagtgcgcgaggcaacccgacgggaaactcacattctgcggcaggtcgcaggacacccgcatatcataacccttatcgactcgtacgaatcgtcctccttcatgttcctggtgttcgacttgatgcgcaagggagaactgttcgactacctgaccgaaaaagtggcgctctccgagaaggaaaccaggtcgatcatgcggtcgctcctggaagcggtgtctttcctgcacgccaacaatattgtgcaccgggacctcaagccggagaacattctgctggatgacaacatgcagatccgcttgtcggacttcggattctcatgccacttggagccaggggagaagctcagagaattgtgcggtaccccaggctacctggcaccagaaatcctgaaatgctccatggatgaaacccacccggggtacggcaaggaggtcgacctgtgggcttgtggagtgatcctcttcactctgctggccggaagcccaccattctggcaccggcggcagattctcatgctgcgcatgatcatggagggccagtaccaattttcatccccggagtgggatgatcggtctagcaccgtcaaggacctcatctcgcgattgttgcaagtggaccctgaagcacgtttgacggctgagcaggcgcttcaacacccgttttttgaaaggtgcgaaggaagccagccgtggaatctcactccgcggcaaagatttcgcgtggccgtgtggaccgtgcttgccgcggggcgggtggccctgtctactcaccgcgtgcgccccctgaccaaaaacgcactcctccgcgatccttacgccttgcggagcgtgcgccatctcatagataactgcgctttccgcctctatgggcactgggtgaagaagggagagcagcagaaccgggccgccctgttccagcaccgaccaccaggcccattccctatcatgggacctgaagaagaaggagactccgcggcgatcactgaggatgaggctgtactcgtcctcgga

SEQ ID NO: 17989 - DNA, 1218 bp, synthetic construct
  misc_feature 1..1218: note = source = /note="Description of Artificial Sequence: Synthetic coding sequence"
  source 1..1218: mol_type = other DNA
atgaccctcgatgtggggccggaggatgaactcccagattgggccgcagctaaggagttctatcagaagtatgaccctaaagacgttatcgggaggggagtgagttcagtggtgagaaggtgcgtgcatagagcaacgggccatgaattcgctgtaaagatcatggaggtgactgctgaacggctgagccctgaacaactcgaagaagtaagagaggccacgcgccgggaaacccatatcctgcgtcaagtggctggacatccccacattatcacattaatcgatagttatgagagctcaagtttcatgtttctggtgtttgatctcatgcgcaaaggagaactgtttgactaccttacagaaaaagtcgctctgtctgagaaggaaacccggagcatcatgagatcattgctggaagcagtgtcatttctgcatgctaataatattgtgcaccgcgatcttaaacctgagaatatcctgttggatgataacatgcaaattcgcctgagtgattttggattcagttgccatttagagcccggcgagaagttgagggagttgtgcggcacccctggctatctggctcctgagatattgaaatgcagcatggatgagacccatccgggctacggtaaagaggtggacttgtgggcctgcggcgtcatccttttcacactgcttgccgggtccccacctttttggcacagaagacagattttaatgttgagaatgatcatggagggacaatatcagtttagtagcccagaatgggacgataggtcttcgaccgtgaaagatctcattagtcggctcttacaggtggatccagaggctcggctgaccgctgaacaggccctgcagcatccgtttttcgagcgctgcgaagggtctcagccgtggaaccttaccccacgccaacgctttagagtcgccgtgtggactgtccttgcagcaggcagagtggcactcagcacccatcgtgtgcgccctcttaccaaaaacgcactgctgcgggacccatacgctcttaggtccgtgaggcatctgatcgataattgcgcttttagactttacggacattgggttaagaagggcgaacaacagaatagggccgccttatttcagcatcgcccgccaggccctttcccaattatggggcctgaggaagagggtgacagcgcggcgatcacagaagacgaagcagtcctcgttctggga

SEQ ID NO: 17990 - DNA, 1218 bp, synthetic construct; identical to SEQ ID NO: 17986
  misc_feature 1..1218: note = source = /note="Description of Artificial Sequence: Synthetic coding sequence"
  source 1..1218: mol_type = other DNA

SEQ ID NO: 17991 - DNA, 1218 bp, synthetic construct
  misc_feature 1..1218: note = source = /note="Description of Artificial Sequence: Synthetic coding sequence"
  source 1..1218: mol_type = other DNA
atgaccctggatgtgggacctgaagacgagctacctgactgggctgccgcaaaggagttttatcagaagtatgatcctaaggacgtgatagggaggggtgtgtcaagcgttgtgagaagatgtgtgcacagggccactggccacgaatttgccgtaaagataatggaggtgaccgccgagcgcttgtctccagaacaactagaggaggttagagaagctacccgaagagaaacccatatactgcgacaggtggccgggcatccccatatcatcacactgattgactcctatgagagcagtagtttcatgttcctcgtcttcgatctgatgaggaaaggagagctgtttgactacctgactgagaaagtggccttaagcgaaaaggaaacaaggtcaatcatgcggagcctgctggaagcagtgtctttcctacacgctaacaatatagtgcaccgggatctgaaaccagagaacatcctgctggacgataatatgcagattaggctttctgactttggcttcagctgccatcttgaaccaggagaaaagctgagagaactgtgcggaacccccggatacctggcaccagagatattaaaatgctcaatggacgagacacatcctggctatgggaaggaagtggacctgtgggcttgcggcgtaatactattcaccctcctcgccggctctccacctttttggcaccgaagacagattctgatgctgcgaatgataatggaggggcagtaccagttctcttcccccgagtgggatgaccgcagtagcaccgtcaaagacctgattagtcgtttgcttcaagtggatcccgaagcaagattaacagccgagcaagctctccagcaccctttcttcgagcggtgcgagggcagccaaccatggaatttaaccccccggcaaaggtttagggtggcagtctggaccgttctcgctgctggaagagtagcactaagtacacaccgcgttcgtcctttgaccaagaacgccctgctgcgggatccctatgctctaaggtctgtaaggcacttgattgacaattgcgccttcaggctgtacgggcactgggtgaagaagggagagcagcaaaatagggccgccctgtttcagcacaggccacccggcccctttccaatcatgggccctgaggaggaaggggacagcgcagccatcaccgaggatgaggccgtgctggtgctgggc

SEQ ID NO: 17992 - DNA, 1218 bp, synthetic construct
  misc_feature 1..1218: note = source = /note="Description of Artificial Sequence: Synthetic coding sequence"
  source 1..1218: mol_type = other DNA
atgaccctcgatgtgggaccggaggatgaactccctgactgggctgccgcgaaggaattctaccagaaatacgacccaaaggacgtgatcggacgcggagtgagctcggtggtccgccgatgcgtccaccgcgcaactggacatgagttcgcagtcaaaatcatggaagtgactgcggagcgcctgtcgcccgagcagctcgaagaggtgcgggaagcaaccaggcgggaaactcacattctgagacaggtggccgggcacccccacatcattaccctgatcgactcctacgaatcgtcctcctttatgttcctggtgttcgacctgatgcgtaagggagagctcttcgactacttgaccgagaaggtggcattgtcagagaaggaaactagatcgatcatgcgctccctgctggaagcagtgtcattcctgcacgcgaataacattgtgcacagggacctgaagccggaaaacatccttcttgacgataacatgcagatcaggctttcagatttcggattttcgtgccatctcgaaccgggcgagaagctgcgcgaactgtgcggtactccgggatacctggctccggagatcctcaagtgttccatggacgagacgcacccgggatacggaaaagaggtggatctctgggcatgcggcgttatactttttactctcctcgccggatcaccaccgttctggcatcggcgccagatccttatgctcagaatgattatggagggccagtatcaattcagttcgcctgaatgggacgacagatcctcgactgttaaggatcttatcagcaggctgctgcaggtggatccggaagctcgccttactgcagaacaggccctgcagcaccccttctttgaacgctgcgaggggagccagccgtggaacctgaccccacggcagagattccgggtggcagtgtggaccgtgctggccgcagggcgggtggcacttagcactcatcgggtgcggccgctgactaaaaacgcgctgctgagggacccatacgcactgaggtcagtaagacatctgatcgacaattgtgcatttcgcttgtacggccactgggtgaagaagggagaacagcaaaatcgagcggcgctcttccagcatagacctcctggaccattccctatcatggggccggaagaagaaggagactccgcagccattaccgaggacgaggcggtgctggtcttgggt

SEQ ID NO: 17993 - DNA, 1218 bp, synthetic construct
  misc_feature 1..1218: note = source = /note="Description of Artificial Sequence: Synthetic coding sequence"
  source 1..1218: mol_type = other DNA
atgactttggacgttggaccagaagatgaattgcctgactgggctgctgctaaagaattttatcaaaaatatgatccaaaagatgttattggaagaggagtttcatctgtagtaagaagatgtgttcatagagctactggacatgaattcgctgttaaaattatggaagttacagcagaaagattgtctccagagcaattagaagaagttagagaagctacaagaagagaaacacatattcttcgacaagttgctggacatccacatattattactcttattgattcttatgaatcatctagttttatgtttcttgtttttgatttaatgcgtaaaggagaattatttgattatttaacagagaaagttgctttaagtgagaaagaaacaagatcaattatgcgttctttattggaagcagttagtttcctccatgcaaacaatattgtacatagagatttaaaaccagaaaatattttattggatgataatatgcaaattagattatcagatttcggattttcatgtcatcttgaaccaggtgaaaaattacgtgaattatgtggaacaccaggttatttggctcctgaaattcttaaatgtagtatggatgaaacacatccagggtatggaaaagaagttgatttgtgggcatgcggtgttattctttttactctcttagcaggttcgcctccattttggcatcgaagacaaattcttatgcttagaatgattatggaaggacaatatcagttcagttcaccagaatgggacgatagaagttcaactgttaaagatttaatatctaggcttttacaagttgaccctgaggctagattgactgctgaacaagcacttcaacaccctttttttgaaagatgtgaagggtcacaaccatggaatttaactccaagacaaagatttcgtgtagcagtctggactgtattagcagctggaagagttgcattatctacacatagagtaagaccattgactaaaaatgctcttcttagagatccttatgcattaagaagtgttagacatctaattgataattgtgcttttagattatatggtcattgggttaaaaaaggtgaacaacagaatcgtgcagctttatttcaacatcgaccaccaggaccatttcctattatgggaccagaagaagaaggagatagcgctgcaattactgaagatgaagctgtattagtcttgggt

SEQ ID NO: 17994 - DNA, 1218 bp, synthetic construct
  misc_feature 1..1218: note = source = /note="Description of Artificial Sequence: Synthetic coding sequence"
  source 1..1218: mol_type = other DNA
atgacgctggatgtggggcccgaagatgaactgccagattgggcggctgccaaggagttttaccagaagtacgacccaaaggacgtcattggccgcggagtctcctccgtggtgaggaggtgtgtgcacagggctacgggccatgaatttgcggtcaaaatcatggaagttactgcagagcggctgagcccggagcagctcgaggaagtgagggaagccacccggcgcgaaactcatatcttgcgccaagtcgcgggacacccacatatcatcaccctgatcgactcctacgagtcgtcgtccttcatgttccttgtgttcgacctgatgcgaaaaggtgagctgttcgactatctcactgagaaagtagcattgtcagaaaaggaaacccgaagcatcatgcgctcgttgttggaggccgtctcgttcttgcatgcaaataacattgtgcatcgggatcttaagccggaaaacatcctgctggacgacaatatgcaaattcgtctttcggatttcggcttttcttgccacttggaaccaggggaaaagctcagagagctgtgcgggacgccgggatacctggcgcctgaaatcctgaagtgttctatggatgaaactcacccgggctacggtaaagaagtcgacctctgggcatgcggagtgatactgtttaccctgttggccggaagtccacctttttggcaccgcaggcaaatccttatgctgaggatgatcatggaaggtcagtaccagttctcatccccggagtgggacgatcgctcgtcgaccgttaaagacctgatctcgagactcctgcaagtggatccggaagcccggctcactgccgagcaggccctccagcacccgttcttcgaacgctgcgaggggtcgcagccttggaaccttaccccgagacaacgctttcgggtggcggtctggactgtgctggccgcgggaagggtggccctgtcgacccaccgggtccggcccttgaccaagaacgcactcctccgggacccttacgccctgaggtcggtgcgccacctgatcgataattgcgctttccgcctctacggtcattgggtgaagaagggagaacagcagaaccgggcggctctgttccagcacagaccaccgggaccattcccgatcatggggcccgaggaggagggagatagcgctgccataaccgaggacgaggccgtgctggtgctcggc

SEQ ID NO: 17995 - DNA, 1218 bp, synthetic construct
  misc_feature 1..1218: note = source = /note="Description of Artificial Sequence: Synthetic coding sequence"
  source 1..1218: mol_type = other DNA
atgacgttggatgtggggcccgaggacgaattgcctgattgggcagcagccaaagaattctaccaaaaatacgacccaaaagatgttatcggtagaggggtctccagcgtagttcgccggtgtgtccatcgtgcaactggccacgagttcgcggtgaagattatggaagtcacagcagaaagactgagcccagagcaactagaagaggtcagggaggcaaccaggagagagacacacattcttaggcaggtcgctggacacccgcatattatcacgctgatagattcttatgagtcgagttccttcatgttcctcgtctttgacttgatgaggaaaggagaactcttcgactaccttactgaaaaggtcgccctttccgaaaaggaaacccgttctattatgaggtctttactggaagctgtgtcattccttcatgcaaacaatattgtgcacagagacttgaagcctgaaaacatattgcttgatgacaacatgcagatcaggctctctgattttggcttctcatgtcatttggaacctggggagaagctacgggaactgtgcggtacaccagggtacctggcccccgaaatcctgaaatgtagtatggacgagactcaccccggatatggaaaggaggtggacctgtgggcttgcggagtgatattatttactttgctggccggctctccgcccttctggcaccgcaggcagattctgatgctgcggatgattatggagggtcagtatcagttctcatctcccgagtgggatgaccgatcgagtaccgtaaaggacctgatcagtcgattactgcaggtggacccggaagcccgattaacagccgaacaggccctgcagcacccttttttcgagagatgcgaggggtcacagccctggaacctcacgccgcgccaacgattccgggtggcggtttggactgtactggcggccggtcgagtggcactgtctacacatcgggtgaggcctctcacaaaaaacgccctgttgagagacccttacgcgttgcgctcagtgcggcatttaatcgataattgtgctttccgcctctacgggcactgggtaaagaagggagagcagcagaaccgggctgcccttttccagcatcgtcctcctggcccttttccaattatgggcccggaggaagagggggactccgcggccataaccgaggatgaggccgtacttgtgctgggc

SEQ ID NO: 17996 - DNA, 1218 bp, synthetic construct
  misc_feature 1..1218: note = source = /note="Description of Artificial Sequence: Synthetic coding sequence"
  source 1..1218: mol_type = other DNA
atgactcttgatgttggacctgaggacgagcttccagactgggcagcggccaaggaattctaccagaaatacgaccctaaggatgtgatcggacggggggtgtcctccgtggtccgacgatgcgtgcacagggccaccggacatgagttcgccgtgaagattatggaagtgactgcggagcgccttagcccagaacagcttgaggaagtgagggaagcgactagacgcgagactcacatcctcagacaggtcgcaggacacccacatatcattacgctgattgattcgtatgaatcgagctcttttatgttcctggtgtttgacctgatgcgcaaaggggagctcttcgattaccttaccgaaaaggttgctctgtctgagaaagaaaccagatcaatcatgcgatcgctgcttgaggcagtgtcctttctccacgctaataacatcgtccatcgggatctgaagcctgagaatattcttctggatgacaatatgcagattcggctcagcgattttggcttttcctgccacctggagccgggcgaaaagctccgggaactgtgtggtactcccggatacctcgctcctgagattctgaagtgttcaatggacgaaacgcatcccggttacggtaaggaagtggacctgtgggcatgtggcgtgattctcttcactctgttggcaggttcacctccattttggcatcgcagacaaatactcatgcttcgcatgataatggagggtcaataccagttcagcagccctgaatgggacgacaggagctcaaccgtgaaggatctcatctctcgccttctgcaagtggacccagaggcaaggcttacggccgaacaggcgctccagcacccttttttcgagcggtgtgaaggatcgcaaccttggaaccttaccccaagacaaaggtttagagtggcagtgtggaccgtccttgcagccggcagagtagcactgtctacccatcgggtccggccgctcactaagaacgcacttctcagggatccttacgcccttaggtccgtcaggcatttgattgataactgtgcatttcgcctttacggacattgggtcaagaaaggtgaacaacaaaaccgtgcagcactctttcaacatcggccccccggccctttccctattatgggcccggaagaagaaggcgattccgctgcaatcaccgaggatgaggcagtgctggtgctcggg

SEQ ID NO: 17997 - DNA, 1218 bp, synthetic construct
  misc_feature 1..1218: note = source = /note="Description of Artificial Sequence: Synthetic coding sequence"
  source 1..1218: mol_type = other DNA
atgaccctcgacgtcggcccggaagatgagctgcctgactgggctgcagccaaggaattctatcaaaagtacgacccgaaagatgtcattgggcggggagtgtcatctgtggtccggcggtgcgtgcatcgcgcgaccggacatgaattcgccgtgaagatcatggaggttaccgctgagcgcctgtcaccagagcagctcgaggaagtgcgcgaagctacgagacgggaaacccacatcttgagacaagttgcgggtcatccacatatcattactctgatcgacagctacgagtccagctcgtttatgttcctcgtgttcgatctgatgcgcaagggggaactgttcgactacttgactgagaaagttgcactttcggagaaagagactagatccatcatgaggtcgctgctggaggcggtgtctttcctccacgcgaacaacatcgtgcaccgggacctcaagcctgaaaacatcctgctcgacgacaatatgcaaattcggctgtcggatttcggattttcctgtcacctggagcccggcgaaaagctgcgagagctgtgcggcaccccgggatacttggctccggagatcctgaagtgcagcatggatgaaacgcacccaggctatgggaaagaggtagatctgtgggcttgcggagtcatcctgttcaccctgcttgcaggaagccctcctttctggcaccgtcggcagatactgatgttgagaatgatcatggaaggacaataccagttctcatccccagagtgggacgaccggagctcgactgtgaaggacctcatctcacgccttctgcaggtggatccggaagctcgcttgactgccgaacaggccctgcagcatccgtttttcgaaagatgcgaggggagccagccctggaatctcactccacgccagagatttcgggtggcagtctggacggtgctggcagcaggaagagttgcgttgtcgacgcatagggtcaggccgcttaccaaaaacgccctgctccgggatccgtatgctctgcgctcagtgcgccatctgatcgacaactgtgctttccggctctacggccactgggtcaaaaagggagaacagcaaaacagggctgcgcttttccagcatcggccccccggaccattcccaataatgggaccggaagaggaaggggactcggcagccattaccgaagatgaggccgtgctggtgctggga

SEQ ID NO: 17998 - DNA, 1218 bp, synthetic construct
  misc_feature 1..1218: note = source = /note="Description of Artificial Sequence: Synthetic coding sequence"
  source 1..1218: mol_type = other DNA
atgacactcgatgtcggccccgaagacgagctgcctgactgggcagcagctaaggagttctaccaaaagtatgatcccaaagacgtcatcggcaggggggtttcctccgtggttagaagatgtgtgcacagagctaccggccacgagtttgcagtaaagattatggaggttaccgccgaacggctgagcccagaacagctggaagaggtaagagaggcaacccgcagggagacccatatcttgaggcaggtggctgggcatccacacataatcacgttaatcgattcatatgagtcaagcagcttcatgttcctggtctttgacctcatgaggaaaggggagctttttgactacctcaccgagaaggtcgccttatcggagaaggagactcggagcattatgagatctctacttgaggctgtgtctttcctgcatgccaataatatagtgcacagggacctaaagccggagaacatcctgctcgacgataacatgcagatccgcctgagtgattttgggttttcctgtcaccttgagcccggagagaagttgcgcgaattgtgcgggacacccggctaccttgcaccagagatcctcaaatgtagcatggatgagacccatcccggttacggcaaggaggtcgacctgtgggcatgtggcgttatcctgttcaccctcctcgcagggtccccgcctttttggcataggcgccagatcctgatgttgaggatgataatggagggccagtatcagttttcctctccggagtgggatgatcgctcctctactgttaaggacctcattagccgccttcttcaggttgatccggaggctaggttaaccgcggagcaagcactgcaacaccccttcttcgaacgctgcgaagggtcacagccatggaacctcacgcctcgtcagagattccgcgtggcagtatggacagtcctggccgccggtcgggtcgccctgtctacccatcgagtgagaccccttacaaagaacgccctactgcgggatccttacgcactgcgaagtgttcgccacctgatcgacaactgcgcatttcggctgtacggacactgggtcaagaaaggcgagcagcagaatcgcgccgcacttttccaacatagacctcctggccctttcccaatcatgggacctgaggaagagggtgactctgcagctattacagaggacgaagcagtcctggtcctgggc

SEQ ID NO: 17999 - DNA, 1218 bp, synthetic construct
  misc_feature 1..1218: note = source = /note="Description of Artificial Sequence: Synthetic coding sequence"
  source 1..1218: mol_type = other DNA
atgacgttagacgtggggccagaggatgaacttcccgactgggccgccgctaaggagttttaccaaaagtacgatcctaaggatgtgatcggaagaggtgtgtcatccgtagtgagacggtgtgtgcaccgtgctacaggacacgagttcgccgttaagatcatggaggtgacagctgaaagactctctcccgaacagctagaagaagtgcgggaggctactcggcgcgagacccatattctgcgacaagtggccggccacccacacataatcacgctcatcgactcttacgagagctcatccttcatgttcctggttttcgatctgatgaggaagggagaactattcgattacttaactgagaaggtggcgctgagcgagaaagagacaaggtctatcatgcgctccctattggaggcggtgtcctttttgcacgcgaacaacattgtgcaccgggatttgaaacccgagaatatcctgctagacgataatatgcagatccgtctgtcagactttgggttcagctgccacctggagcccggcgagaagctgagggagctatgtgggactcctgggtacttggccccagagatcctgaaatgttccatggacgagacacaccccggttatggtaaagaggtggatctgtgggcttgcggcgtgatcttgttcacactgctggccggatcacctcccttttggcatagacgtcagatcctgatgctgcgcatgatcatggaggggcagtaccaatttagcagtcctgaatgggacgaccgatctagcactgttaaagatttgatctcaagactgcttcaagtcgatccagaggcacggctgacagccgagcaggccctgcagcatccctttttcgagcgatgcgagggaagtcagccttggaacctgacccctagacagaggttcagagtggctgtttggaccgtccttgctgccgggcgagtagctctttccacacaccgtgtgcggcccctaacaaagaacgccctgctgagggacccttatgcactgaggtcagtccggcatctaatagacaactgcgcatttcgactctatgggcactgggtgaagaagggcgaacagcagaatcgggctgcactgttccagcacaggcccccgggaccatttcctataatgggtcccgaggaggagggagattccgccgcaattacagaagacgaagccgtgctcgtcctgggc

SEQ ID NO: 18000 - DNA, 1218 bp, synthetic construct
  misc_feature 1..1218: note = source = /note="Description of Artificial Sequence: Synthetic coding sequence"
  source 1..1218: mol_type = other DNA
atgaccttagacgtaggtccagaggacgaactcccagactgggcggcagcgaaggagttctaccagaagtacgatccaaaggatgtgatcggccgcggtgtgagcagcgttgttcgccgttgtgtacaccgcgctactggtcatgagtttgctgtgaagattatggaggttaccgcggagcgcttgagccctgaacaactggaggaagtgagggaagcgacccgaagggagacccacatcttgcgacaagtggcaggtcaccctcatatcattaccctgattgattcgtatgaatcttcttccttcatgttcctggtgtttgatttgatgcgtaagggtgagctgtttgattatctgaccgagaaagtcgctcttagcgagaaggagacccgtagcatcatgcgcagtctgttagaagcggttagtttcctacatgccaataacattgtccaccgagatctgaaacctgaaaatatactgcttgacgacaacatgcagattcgactgtccgatttcggttttagctgtcatctggaaccaggtgaaaagctgcgagagttgtgcggcaccccgggctatcttgctccagaaatcctgaagtgttcaatggacgagacacacccaggatatggcaaggaggtggacctgtgggcgtgcggtgtcattctatttaccctgcttgcaggcagcccacccttttggcataggcgccagatcctcatgctgcgcatgatcatggaaggccaatatcagttcagcagcccagagtgggatgatagaagcagcaccgtgaaagatctgatttcccgcctgctccaggttgatccagaggcacgtttgaccgcggagcaagctctccagcacccgttttttgagagatgtgagggcagtcaaccttggaacctgacgccacgccagcgctttcgcgtggcagtttggactgttctggcagccggtcgcgtcgcgctgtcaacccatcgtgtgcgcccgctgactaaaaatgccctgctgcgcgacccctacgcgctgcgcagcgtccgtcacctcatcgacaactgcgccttccgcctgtacggacactgggttaaaaaaggcgagcaacagaatagagcggcattgttccaacatcgcccccctgggccgttccccatcatgggtcctgaggaggagggcgatagcgcagcgataactgaggacgaggcggttttggtgctgggc

SEQ ID NO: 18001 - DNA, 1218 bp, synthetic construct
  misc_feature 1..1218: note = source = /note="Description of Artificial Sequence: Synthetic coding sequence"
  source 1..1218: mol_type = other DNA
atgaccctggacgtgggacctgaggatgaactgccggattgggctgcagcgaaggagttttaccagaagtacgatccgaaggacgtgattggccggggcgtttcgtccgttgtgagaaggtgcgtgcacagggcaactggtcatgaattcgccgtcaagatcatggaggtcaccgcagagcgcctgtcaccagaacaacttgaagaagtgcgcgaggctacgcggagagaaacccatatcctgagacaagtggccggtcacccgcatatcattactttgatcgattcgtacgagtcgtcgtcatttatgtttctggtgtttgatcttatgcgaaagggggaactgttcgactacttgaccgaaaaggtggccttgagcgaaaaggaaacccgttcaattatgcgttcgcttttggaagcagtcagcttccttcatgcaaataacattgtccaccgagatctgaagcccgaaaacattcttctggatgataacatgcagataagactttcagatttcggattttcgtgccacctcgaaccaggtgaaaagctgagagaactgtgtggcactcctggctacttggcgcccgagattcttaaatgctccatggatgaaactcatccaggatacggtaaggaagtggacctctgggcctgtggtgtgattcttttcactctgcttgcaggatccccgcctttttggcatcgccgccagatcctcatgctccggatgattatggaagggcagtaccaatttagctcgcccgaatgggatgatcgttccagcactgtcaaggaccttatttcccggctcctccaggtggatccagaagcacggcttactgcagaacaggcccttcaacatccgtttttcgagagatgcgaagggagccagccttggaacctcactccacgtcaacggtttcgagtggcagtttggactgtgctcgcagcaggcagagtcgcactgtccacccatcgcgtgcgaccgctcactaagaacgcactgctgcgggacccatacgcacttcggagcgtgcgccatcttattgacaactgtgccttcaggctttacggccactgggtgaagaagggagaacaacaaaatcgggcagcactgttccagcatagaccacccggtccttttccaatcatgggaccagaagaggagggtgatagcgcagcaattaccgaggacgaggcagtcttggttcttggt

SEQ ID NO: 18002 - DNA, 1218 bp, synthetic construct
  misc_feature 1..1218: note = source = /note="Description of Artificial Sequence: Synthetic coding sequence"
  source 1..1218: mol_type = other DNA
atgactcttgacgtggggcctgaggacgaacttccagactgggcagcagcaaaagaattctaccaaaagtacgatcctaaggacgtcataggtcgaggtgtctcctcagtggtgcggcgatgcgtccacagagctactggacatgaattcgcagtgaagataatggaagtcaccgcagaaagattgtcgccagaacaactggaggaagttagagaggcaacgagaagggaaactcatatcctccggcaggtcgcagggcacccccatatcattaccctgatcgatagttacgagtcgtcgtcatttatgtttctcgtattcgacttgatgcggaagggagaacttttcgattacttgactgaaaaagtggcactttccgagaaggagactcgtagcatcatgcgaagcctgcttgaggcagtgtcctttctccacgccaacaatatcgtgcatagggacctgaagcctgagaatatcctgctggatgacaacatgcaaattcgactgtcagattttggattttcgtgtcatcttgaaccgggcgaaaaacttcgggaactgtgtgggacccctggatacttggctcctgaaattctgaagtgttcgatggatgagactcatcccggatacgggaaggaggtggatctgtgggcctgtggcgtgattctgtttacgctgcttgcgggcagcccaccattctggcatcgccggcagatcctcatgcttagaatgataatggagggtcaatatcaattttcatcccccgaatgggacgataggtcgtccactgtgaaagatctgataagcagactcctgcaggtggaccccgaagcacgactcactgcagaacaggcgctccagcatcctttctttgagcgatgcgaaggaagccagccttggaatctgaccccccgccaaaggtttagagtcgccgtgtggactgtcctggcagccggacgagtcgcactctcgacccaccgagtccgtcctctgacgaagaacgcccttctccgggatccatacgcactcaggtcggtgagacacttgattgataactgtgcgtttcggctctacggccattgggttaagaagggtgaacaacagaacagggcagcattgttccaacacaggccaccaggtccgttccctattatgggcccagaagaggaaggggattcggcagctattaccgaagatgaagctgtactggtgcttggg

SEQ ID NO: 18003 - DNA, 1218 bp, synthetic construct
  misc_feature 1..1218: note = source = /note="Description of Artificial Sequence: Synthetic coding sequence"
  source 1..1218: mol_type = other DNA
atgaccctcgacgtgggaccggaggacgaactgccggattgggcagctgccaaggagttctaccagaagtacgatccaaaggatgtgatcggccggggagtgtcctcagtcgtccgcagatgcgtccatagagcgacgggacacgagttcgctgtgaaaatcatggaagttactgccgagagactgtccccggaacaacttgaggaggtccgggaagcgactcggagagagactcatattctgagacaggtggccggacatccacacattatcactctcatcgacagctacgaatcctcgtcgttcatgttcctggtgttcgacctgatgcggaagggggagctgttcgattacctgactgaaaaagtcgcactctcggagaaagaaacgagatcgattatgcggtcactccttgaagccgtgagcttcctccacgcgaacaatatcgtccatcgcgaccttaagccagaaaacatcctcctggatgacaatatgcagatccgcctctcagactttggattcagctgccacctcgagccgggagagaagctccgcgagctctgtggcaccccgggatacctggcgccagaaatcctcaagtgttccatggacgaaacccatccgggttatggcaaggaagtggacttgtgggcttgcggagtgatcctgttcactctgctggcgggatcgccaccgttttggcaccgccggcagatcctgatgcttaggatgatcatggaagggcagtaccagtttagctcgccagaatgggatgaccgtagcagtaccgtgaaggatctgatctcccgacttcttcaggtcgacccggaagcgcgcctgaccgctgaacaagccctccagcacccattcttcgagagatgcgaagggagccagccttggaatctgaccccccgccaacggttcagagtggcggtgtggacggtcctcgctgcggggcgggtggcgctgtccacccatcgggtccgcccccttaccaagaatgctctcctccgcgacccatacgccctgcggtcagtcaggcacctcatagataactgcgccttccggctttacggccactgggtgaaaaaaggcgagcagcagaatcgggcggccctctttcagcacagaccgcctggtccattcccgatcatgggaccagaggaagaaggagatagcgccgctattaccgaggatgaagctgtgctggtgctcggg

SEQ ID NO: 18004 - DNA, 1218 bp, synthetic construct
  misc_feature 1..1218: note = source = /note="Description of Artificial Sequence: Synthetic coding sequence"
  source 1..1218: mol_type = other DNA
atgacactcgatgtcggtcccgaagacgaactcccggattgggctgccgctaaagaattttaccagaagtatgacccgaaagatgtgatcggacgaggcgtgagtagcgttgtgagaaggtgtgtgcatcgggctacggggcacgagtttgcggtgaagattatggaggtcacagccgaacgactgagtcccgagcaactcgaggaagtgagggaggctacaaggagggagactcacatattgcgacaggttgccggtcacccccatatcataactctcatcgattcctacgagtcctcatcattcatgtttctcgtgttcgaccttatgcgaaagggggagctgttcgattatcttactgagaaagtcgcactcagtgaaaaggagacccggtctatcatgaggtccctgctggaagctgtctcttttctccacgccaataatattgtccatcgagatctcaagcctgaaaatattctgcttgatgacaacatgcagataagactcagcgacttcggattctcatgtcacttggagccaggagagaagctgcgggaactgtgtggtacccccggttacctggccccggagattctgaagtgttccatggatgaaacccatccgggctatggtaaggaagtagacctctgggcttgtggtgtcattctctttacactcttggcagggtccccgcctttctggcatcgccgacaaatcctgatgttgaggatgatcatggagggccagtaccagttctctagtcccgagtgggacgaccgcagtagcacggtgaaagacctgatctcacggttgctgcaggtggatcccgaagcccgcctcacagccgagcaggccctccagcacccgttcttcgagcggtgcgagggatcccagccttggaatcttactccccgacagagattccgcgtagccgtttggacagtgcttgccgccggcagggtcgcactttcaacacaccgcgtgcgccccctgactaagaatgccctgttgcgggatccttatgcattgcgcagtgtccggcaccttatagataattgtgctttcaggttgtacggacactgggtcaagaagggtgaacagcagaaccgggctgcactgttccagcataggcccccagggcccttccctatcatgggccctgaggaagaaggcgattccgcggccattactgaggacgaggcggtgctggtcctggga

SEQ ID NO: 18005 - DNA, 1218 bp, synthetic construct
  misc_feature 1..1218: note = source = /note="Description of Artificial Sequence: Synthetic coding sequence"
  source 1..1218: mol_type = other DNA
atgacgctagatgtaggtccggaagatgaactaccggattgggcggcggcgaaagaattttatcaaaaatatgatccgaaagatgtaataggtcgtggtgtatcgtcggtagtacgacgatgtgttcatcgtgcgacgggtcatgaatttgcggttaaaataatggaagtaacggcggaacgtctatcgccggaacaattagaagaagttcgtgaagcgacgcgtcgtgaaacgcatatattacgacaagttgcgggtcatccgcatataataacgctaatagattcgtatgaatcgtcgtcgtttatgtttttagtatttgatttaatgcgtaaaggtgaattatttgattatctaacggaaaaagtagcgttatcggaaaaagaaacgcgatcgataatgcgttcgttactagaagcggtatcgtttttacatgcgaataatatagtacatcgagatctaaaaccggaaaatatactattagatgataatatgcaaatacgattatcggattttggtttttcgtgtcatctagaaccgggtgaaaaactacgtgaattatgtggtacgccgggttatttagcgccggaaatattaaaatgttcgatggatgaaacgcatccgggttatggtaaagaagtagatttatgggcgtgtggtgtaatattatttacgttattagcgggttcgccgccgttttggcatcgtcgtcaaatactaatgttacgaatgataatggaaggtcaatatcaattttcgtcgccggaatgggatgatcgatcgtcgacggttaaagatctaatatcgcgattattacaagttgatccggaagcgcgtttaacggcggaacaagcgttacaacatccgttttttgaacgatgtgaaggttcgcaaccgtggaatttaacgccgcgtcaacgatttcgagttgcggtttggacggtactagcggcgggtcgagtagcgttatcgacgcatcgagtacgtccgttaacgaaaaatgcgttattacgagatccgtatgcgctacgttcggtacgtcatttaatagataattgtgcgtttcgtttatatggtcattgggttaaaaaaggtgaacaacaaaatcgtgcggcgctatttcaacatcgtccgccgggtccgtttccgataatgggtccggaagaagaaggtgattcggcggcgataacggaagatgaagcggtattagtattaggt

SEQ ID NO: 18006 - DNA, 1218 bp, synthetic construct
  misc_feature 1..1218: note = source = /note="Description of Artificial Sequence: Synthetic coding sequence"
  source 1..1218: mol_type = other DNA
atgactctggacgtgggacctgaagatgagctccctgactgggcagcagccaaagaattctaccaaaagtatgatccaaaggatgtgattggtcgcggtgtgtcgtccgtggtgcgtcgctgtgtgcacagagcaaccgggcatgagttcgctgttaagattatggaagtcaccgcagagcgcctgtccccagaacagttggaagaggtgcgcgaagctacccgcagagagacgcacatcctccgccaggtggccggacatccccatatcattaccctgatagattcatacgagtcatcatcctttatgttcctggtgttcgatctgatgcggaagggtgagctgtttgattacctgaccgaaaaagtggcgctgtccgaaaaagaaactcgcagcattatgagatcgttgctcgaagcagtgtcgttcttgcatgccaacaatatcgtgcatcgagatttgaagcctgagaacattctgcttgatgacaatatgcaaattcgactttccgatttcggtttctcgtgtcatctcgaaccgggggaaaagctcagggaactctgcggcacccctggataccttgctcctgagattctgaaatgttcgatggacgagactcatccaggctacgggaaagaggtggatctgtgggcctgtggagtgattctttttaccctgcttgcaggaagcccaccattctggcatcggcgccaaatccttatgctcagaatgatcatggaaggtcagtaccagtttagctcgccagagtgggacgatagatcttccactgtgaaggaccttatctcccgccttcttcaagttgatcctgaagcgaggcttactgctgagcaagccctgcaacaccctttctttgagaggtgcgagggatcccaaccctggaacctcaccccacgtcagagatttcgggtggcagtgtggaccgtgctcgcagcaggaagggtggcgctcagcactcatcgggtccgccccctgaccaagaatgcactccttcgggatccatacgctcttagatcagtgcgccacctgatcgataattgtgcctttcgcctgtacggacattgggtaaagaagggagagcagcagaatagggcggcgcttttccaacatagaccaccaggaccatttcctatcatgggccctgaagaggaaggagattccgcagctattaccgaagatgaagcagtgcttgtcctcggg

SEQ ID NO: 18007 - DNA, 1218 bp, synthetic construct
  misc_feature 1..1218: note = source = /note="Description of Artificial Sequence: Synthetic coding sequence"
  source 1..1218: mol_type = other DNA
atgacactggacgttggcccagaggatgaactgccggactgggccgcagccaaagaattttatcagaagtacgacccgaaagatgttattggccgtggggttagttcggtagtgcgccgctgtgtacatagggctactggacacgaattcgccgttaagatcatggaggtcaccgccgagcggttatcacctgaacagctggaggaggttagagaagccactagaagggagactcacatccttaggcaagtggccggccatccgcatattatcaccctgatcgactcctacgagtcaagctccttcatgttcctggtgtttgatctgatgagaaagggagagcttttcgactacctgactgagaaggtggcactgagtgagaaagagacccgatccattatgcgctcactcctggaggcggtgtctttcctccacgcgaacaatattgtgcacagggacttgaagcctgagaacatcttactggacgacaatatgcagattagactgagcgatttcggcttctcctgccatctggaaccgggagaaaagttacgagagctgtgcggaactcctggatacctcgcccctgaaatccttaagtgtagtatggatgagactcatccaggttacggtaaagaggtggacctgtgggcgtgcggcgtcatccttttcaccttgctcgccgggtcacctcccttttggcatcgccgacagattctgatgctgcggatgatcatggaaggccagtatcagttctcctctccggagtgggatgatcggtctagcacggttaaagacttgatttcaaggctgctgcaggtagatccagaagccagactcactgccgagcaggcactgcagcacccattctttgagcgctgtgaggggtcgcagccctggaacctcactcccagacagcggttccgtgtagccgtctggaccgttctagcggcaggcagagtggcattgtctacgcatagagtgcggcccctcacaaagaacgctctgttgcgggatccctatgctctgcgcagtgtccggcatttaatcgataactgcgcctttcggttgtacggccattgggtgaagaaaggcgaacagcagaaccgggctgcactgttccagcatagacccccaggcccattccctatcatgggcccggaggaggagggagacagcgcagctatcaccgaggatgaggcggttcttgttttggga

SEQ ID NO: 18008 - DNA, 1218 bp, synthetic construct
  misc_feature 1..1218: note = source = /note="Description of Artificial Sequence: Synthetic coding sequence"
  source 1..1218: mol_type = other DNA
atgactctggacgttggtcctgaggacgaactgccagattgggccgccgctaaggagttctaccagaaatatgaccctaaggacgttattggacgcggcgtgtcttctgttgtccggaggtgcgttcatcgcgccactggtcatgagtttgcagtcaagatcatggaagtaactgccgagaggctgagcccagagcaattggaggaggtcagggaagccaccaggagagagacccacatcctgcgacaagtcgccgggcacccccacattatcactcttatcgactcatacgaatcttcttccttcatgtttctcgtcttcgatcttatgcggaagggcgagctgttcgattacctcaccgagaaagtggctttgtccgagaaagagacaagaagcataatgcgaagtcttctggaggccgtgtctttcttgcacgccaacaacattgtacacagagacctgaaaccagagaatatcctgctcgacgataacatgcagatccgcctgagcgacttcggattttcatgtcatctcgaacctggagagaagctgagagagctttgtggcaccccaggatatctcgcaccagaaatcctgaaatgttctatggatgagacccatcctggctacggcaaagaagtggacctgtgggcctgcggggtgatcctttttaccctcctggccggctctccacctttttggcatcggcgacagatattgatgctccgaatgataatggaagggcaatatcagttctctagccctgaatgggatgatcgctcttctactgtgaaggatctgattagcaggcttcttcaggttgatccagaagctagactgacggcagagcaagccctgcaacacccattcttcgaaaggtgcgagggctcccagccctggaatctgacgcccaggcagagattcagggtggcggtgtggacagtgcttgcagctggccgagtcgctttgagcacgcaccgagtacgccctcttactaagaatgccctgctgagggatccatacgcgctgcgctcagtcaggcatcttatcgacaattgcgccttccgcctgtacggccattgggtgaaaaaaggagagcaacagaacagggccgcactttttcagcatcgcccacctgggccattccctattatggggcctgaagaggaaggcgatagcgcagctatcactgaggacgaggcagtgctggtgttgggc

SEQ ID NO: 18009 - DNA, 1218 bp, synthetic construct
  misc_feature 1..1218: note = source = /note="Description of Artificial Sequence: Synthetic coding sequence"
  source 1..1218: mol_type = other DNA
atgactctggatgtaggcccagaggacgagctgccagattgggccgcggccaaggaattctatcagaagtatgaccctaaggacgtgatcggacggggagtgagctcagtggtgcgcagatgcgtgcatagagccaccggtcatgaattcgcagtgaagatcatggaggtgactgcggaacgactgtcgccagaacaactcgaagaggtgcgggaagccacccgccgggagacgcatattctgaggcaagtggccggacacccgcacattatcaccctgatcgattcttacgagtcgtcctcgttcatgtttctggtgttcgacctgatgcggaagggcgagttgtttgactacctgacggaaaaggtggctctgtcggaaaaggagactcggtcgatcatgcgctcgctgctcgaagcggtgtcgttcctccacgccaacaacatcgtgcatcgcgacctgaagccagaaaacatcctgctcgacgataacatgcaaatcagactgagcgacttcggcttcagctgtcatctcgaaccgggggagaagctgagggagctctgcggaacccctggatacctggcgccggaaatcttgaaatgctccatggatgagactcacccggggtacggcaaagaggtcgatttgtgggcttgcggagtgatcctctttactctgcttgcgggctcgcctccgttttggcatcgccgccaaatcctgatgctcagaatgatcatggaaggacaataccagttcagctcaccggaatgggacgacaggtcatccaccgtcaaggacctgatctcccggctgctgcaggtggacccggaggcacggctgactgccgaacaggccctccagcatccattcttcgagcggtgtgagggatcccagccatggaatctcactcctcgacagagattccgggtcgccgtgtggacggtgctcgcagcgggacgcgtggccctgtccactcatcgggtgcggccactcaccaagaacgctcttctccgggacccctacgcactccgctccgtgcgccacctcatcgataattgtgcctttcgcctttacggacactgggtgaagaagggcgaacagcagaacagggccgcgctgtttcaacaccggccgccgggaccctttccgatcatgggacctgaagaggagggagatagcgcggccatcactgaagatgaggccgtgctcgtgctggga

SEQ ID NO: 18010 - DNA, 1218 bp, synthetic construct
  misc_feature 1..1218: note = source = /note="Description of Artificial Sequence: Synthetic coding sequence"
  source 1..1218: mol_type = other DNA
atgacccttgacgtcggaccagaggacgagctgcccgattgggccgctgctaaggagttctaccagaaatacgacccaaaggacgtgatcggccggggagtgtcctctgttgtgcgccggtgcgtccaccgggccaccggacacgagttcgcggtcaagattatggaggtcaccgcagaacgcctgagcccggaacagctggaggaggtccgggaagcgaccaggcgcgagactcacatccttcggcaggtcgcgggacacccacacatcatcactctcatcgactcgtatgaatcatcgtcgttcatgtttctcgtgtttgaccttatgcggaagggtgagcttttcgactacttgactgaaaaggtagccctctcggaaaaggagacgaggtccattatgcgtagcttgctcgaagccgtgtccttcctgcacgcaaataacatcgtgcaccgggacctgaagccggagaacatcctgctggatgacaacatgcagattcgtttgagcgacttcggattctcgtgccatctggagccgggcgaaaagctgcgggaactgtgcggcactcctggatacctggcgccagaaatccttaagtgttcgatggacgagacgcatcccggctacggcaaggaggtggacctgtgggcctgcggtgttattctcttcactcttttggcaggatcgccgccgttttggcataggcgccaaatcctgatgctccggatgatcatggaagggcagtatcaattttcgtcccctgagtgggatgataggtcgtctactgtcaaggatctgatctcgagactgctgcaggttgacccggaagcgcgcctgactgccgagcaagctcttcagcaccctttcttcgaacggtgtgaagggagccagccctggaacctcaccccacgccagagattcagagtcgccgtgtggactgtgctggccgcaggacgcgtggctctctccacccaccgcgtgcggccattgactaagaatgccctgctgcgcgacccttacgccctgcgctccgtccgccatttgatcgacaactgtgcattccgcctgtacggacactgggtgaaaaaaggagaacagcagaatagggccgcactcttccagcatcgccccccaggaccatttccgataatgggcccggaggaggaaggagattcggcggccatcaccgaggacgaggcggtgttggttctcgga

SEQ ID NO: 18011 - DNA, 1218 bp, synthetic construct
  misc_feature 1..1218: note = source = /note="Description of Artificial Sequence: Synthetic coding sequence"
  source 1..1218: mol_type = other DNA
atgaccttggatgtcggtccagaagacgagctgccagattgggccgccgctaaggagttctatcagaagtatgatcccaaagacgtgatcggacggggggtcagcagtgtcgtaagacgctgtgtgcacagagcgactggacatgagtttgccgtgaagatcatggaggtgaccgccgaaaggctgtctcccgagcagctagaggaagtcagggaagcaacgagaagagagacccacattctaagacaggtcgccgggcacccccacattattacgctgatcgacagttatgaaagctcctcttttatgtttttggtgttcgatttgatgaggaagggcgagctatttgactatctgaccgagaaagtcgccctgagcgaaaaagaaacaaggagcatcatgcgctcattactggaggctgtgagtttcctgcacgccaataatatagtgcatagggatttaaaaccagaaaacattctgctggacgacaacatgcagatccgtctctctgactttgggttcagctgccacctcgaacctggtgaaaagctcagggaactctgcggaacccccggatacctggcccctgagatcctgaaatgctccatggatgagacgcacccgggctacggaaaggaggtcgacctgtgggcttgtggcgttatcctgttcaccctgttggccggctcgccacccttttggcatagacggcagattcttatgctccgaatgatcatggaggggcagtatcaattttcctctccagagtgggacgatcgatcctcgacggtgaaagatctgatcagtcgcctgttacaggtggatcccgaagccagattaacggccgagcaggcgctccagcatccttttttcgagcggtgtgaaggctcccagccttggaatttgacccctcgccagagattccgcgtggccgtgtggaccgtgttggccgccgggagggttgctttgagcacccacagggttagaccgctaaccaagaatgctctgctgagagacccttacgccttgcgttccgtcaggcaccttattgacaattgcgcatttcggctctatggacactgggtgaagaaaggggagcaacagaaccgggctgctctattccagcacaggccaccgggcccgtttcctattatgggacctgaggaggagggcgactccgcagctatcactgaggacgaggccgttctggtgctaggc

SEQ ID NO: 18012 - DNA, 1218 bp, synthetic construct
  misc_feature 1..1218: note = source = /note="Description of Artificial Sequence: Synthetic coding sequence"
  source 1..1218: mol_type = other DNA
atgacattggacgtgggccccgaggacgagctacctgactgggcagctgccaaggaattttaccagaaatatgatcccaaggacgtgatagggaggggcgtaagttccgtggtcagacgctgtgtacacagagctactgggcacgagttcgccgtgaagatcatggaggtcaccgcagagaggctgtctcccgagcagctagaggaggtgagggaggctacacgaagggaaacacatatcttgaggcaggttgctgggcacccccatattatcactctgatcgatagttatgaatcctcttcattcatgttccttgtgttcgacctaatgcgaaagggagaattgttcgactacctcactgaaaaggtcgcactttctgaaaaggaaactagatccatcatgcgatctctgctggaggccgtgagctttcttcatgccaacaatatcgtccatcgagatctcaagccagagaatatcctgctcgatgacaacatgcaaatcaggttgagcgattttggattctcctgccatctggagcccggtgaaaagctgagggagttgtgtggtaccccgggctatctggcacctgaaatcttgaaatgttctatggatgaaacacatccaggttacggcaaggaagtggacctctgggcttgcggcgttatcctctttaccctgctcgccggctcaccacccttttggcaccggcgacagatcctgatgttgcgaatgatcatggagggtcagtatcagttctcttcccccgaatgggatgacaggtcaagcactgtcaaagacctgatttcccggctcctgcaggtcgaccctgaagcgagactaacagccgagcaagcccttcagcacccattcttcgaaagatgcgagggttctcaaccctggaatctaaccccgcggcaacgttttagagtcgcagtgtggactgtcctcgccgccgggagggtggcactgagtactcacagagtaaggccactgactaagaatgcgctgctgcgagatccctacgccctcaggagcgtccgacatctcatcgataattgtgcgttccggttgtacggccactgggttaagaagggcgaacagcagaatcgagctgccctttttcagcaccgacctccagggccattccctatcatggggccagaagaggagggggactcggcggccatcacggaagacgaggcggtgcttgtcctggga

SEQ ID NO: 18013 - DNA, 1218 bp, synthetic construct
  misc_feature 1..1218: note = source = /note="Description of Artificial Sequence: Synthetic coding sequence"
  source 1..1218: mol_type = other DNA
atgacactcgatgtcggacccgaggatgaacttcctgattgggcagcggctaaagaattctatcagaagtacgatcctaaagatgtaattggacggggagtcagtagtgttgtaaggaggtgtgtgcaccgggccactggacacgaatttgccgtgaaaatcatggaagtcactgccgaaagactgtcccccgagcagctcgaggaagtacgagaagcaactagaagggaaacacatatactgaggcaggtagccggacatccgcacataataacgcttatagactcctatgaatcctcctcatttatgttccttgtgtttgatcttatgcggaaaggggaactgtttgactatctgacagagaaagtcgcattgtccgaaaaagaaactcgaagtataatgagatctctcctcgaagcagtgagttttcttcacgcaaacaatattgtgcatagggatctcaaaccagaaaacatcctcctggatgataatatgcagattaggctttctgacttcgggttttcttgccacctggaaccaggagaaaaactgcgggaactttgtggaacacctgggtacctcgcgccagaaatcctcaaatgttccatggatgaaacacatcccgggtatggaaaggaagtagacctatgggcctgtggggtaatcctcttcacactgctggccgggtctccaccgttttggcaccgcagacagatcctaatgctgaggatgataatggaagggcagtatcagttttcctccccagaatgggatgatcgctcctcaactgtcaaggaccttatctccaggctcctacaggttgaccccgaagcacggctaacagctgaacaggctttacagcatccattttttgaaagatgtgaagggtcgcagccttggaatcttacaccaaggcagcggttccgggttgccgtttggactgtcctggccgccggaagagtggccctttctacacacagagtaagaccccttactaaaaatgctctcctccgggacccttacgccctgaggtctgttaggcacctcatagacaactgcgcttttaggctctatggacactgggtaaagaaaggagaacagcaaaatagagcagctctatttcagcatagacctcccgggccattcccaatcatgggacccgaagaggaaggagattcggcggccatcacagaagatgaggctgtgttagttcttgga

SEQ ID NO: 18014 - DNA, 1218 bp, synthetic construct
  misc_feature 1..1218: note = source = /note="Description of Artificial Sequence: Synthetic coding sequence"
  source 1..1218: mol_type = other DNA
atgaccctcgacgtcggacctgaagatgaactgcccgactgggccgctgctaaggagttctatcaaaagtacgatccgaaggatgtgatcggtcgcggagtaagctccgtcgtgcggcgatgcgtgcatcgcgctaccggtcacgagttcgcggtcaagataatggaggtcaccgccgagcgtctctcccccgagcagttggaggaagttcgcgaggctacgcgtcgcgagacccacattctacgccaagtggctgggcacccccacatcattacccttattgatagctacgaaagtagcagcttcatgttcttggtcttcgacctgatgaggaagggcgagctgttcgactacttgaccgagaaggttgcgctctcggaaaaggagacccgctcaatcatgcggtccttgttggaggctgtttcgttcctgcatgctaacaatatagtccatagagacctgaagccggaaaacattcttttagacgacaacatgcaaatccgcctgtccgacttcggattcagttgtcaccttgagcctggagaaaagctccgcgagctttgtggcacgccaggctacctcgctcctgagatccttaagtgctccatggatgaaactcaccccggttacggaaaggaagtcgacctgtgggcctgtggtgtgatcctcttcacccttttagctggctcgcctccgttctggcaccgcagacagattctcatgctgcgtatgatcatggaaggccaataccagttctcgtcaccagagtgggacgaccgcagttccacagtcaaggacctaatttctcgcctgcttcaggtggaccccgaggcgcgtcttacagcggaacaggccctccagcaccctttcttcgagcggtgtgagggatcacagccgtggaatctcacccctcggcagcggttccgagttgctgtttggacggtcctcgcggccggtcgcgtggccttgtcaacccaccgggtccgccccttgactaagaatgctttgcttcgggacccctacgctcttaggagcgtccgccatctcatcgacaactgcgcgtttcgcctgtacggacactgggtgaaaaagggcgagcaacagaaccgtgccgcgttgttccagcaccgtccgcccggtcccttccctatcatgggcccggaagaggagggagactccgccgccattaccgaggacgaggctgttctggtccttggc

SEQ ID NO: 18015 - DNA, 1218 bp, synthetic construct
  misc_feature 1..1218: note = source = /note="Description of Artificial Sequence: Synthetic coding sequence"
  source 1..1218: mol_type = other DNA
atgaccctggatgtggggcctgaggacgagcttcctgattgggctgcagctaaggaattttaccagaaatacgaccctaaggatgttatagggcggggcgtgtccagcgtagtccggcgctgcgtccacagagctactggccatgagttcgccgttaagatcatggaagtgactgcggagcgcctgagccccgaacagctggaagaggtcagggaagcaacaaggcgcgaaacccatatcttgaggcaggttgcaggacaccctcatatcataaccttgattgactcctacgaatcttcatctttcatgtttcttgtattcgaccttatgcggaaaggagagctgttcgattatttgaccgagaaggtcgccttgtctgagaaagaaacgcgctctataatgcgaagcctgctggaggccgtgtcattcctgcatgctaacaatatcgtgcacagagacctgaaacctgaaaacatccttctggatgataacatgcagatccgattgagtgacttcggattttcttgccacctggagcccggcgaaaagctgagggagctttgcggcactccggggtacctggcgcccgaaatcctcaaatgcagcatggacgaaacacatcctggctacgggaaggaggtggacctttgggcttgtggagttatactgtttaccttgctggccgggtcccctccgttctggcatcgacgccagattctgatgctcagaatgattatggagggccaataccaattcagctcccccgagtgggacgaccgctccagcaccgttaaagaccttataagcagattgctgcaggtagaccccgaagcccgactcacagcagaacaagctctgcagcatccattttttgagaggtgtgagggatcacagccatggaatctgactccaaggcagaggtttcgcgtagctgtgtggactgttctggctgccggaagggtggcactgtctactcatcgcgtgcgcccgctgaccaagaacgccctgctgcgggacccttacgccctgcggagcgtccgacatttgattgataactgcgccttccggctttatggacactgggtgaagaagggggaacagcagaaccgcgcggctttgtttcagcacagaccacctggacctttccctataatggggcccgaggaagagggggactccgcagcaattacggaggacgaggctgtcctggtgctcgga

SEQ ID NO: 18016 - DNA, 1218 bp, synthetic construct
  misc_feature 1..1218: note = source = /note="Description of Artificial Sequence: Synthetic coding sequence"
  source 1..1218: mol_type = other DNA
atgaccctcgacgtcggtccagaggatgaactgcctgactgggcagctgccaaggaattctatcaaaagtatgacccaaaggatgtgataggaaggggtgtctcttccgttgtgagaaggtgcgtgcatagggctactggccatgaatttgccgtgaagataatggaagtaaccgccgagagattaagtcctgagcagctggaagaggtccgggaggccacaagacgcgaaacccatattctcagacaagtcgcaggccacccacatattatcaccctaatagactcctatgagagctccagcttcatgttccttgttttcgacctgatgagaaagggggagttgttcgattatctcacagagaaagtggcgctgtctgagaaggagacaagatcaattatgaggagcctgctcgaggcagtgtccttcttgcatgctaataacatcgtccatagagacctgaagcccgagaatatcctgttggatgacaacatgcagatcaggctaagtgattttggcttttcatgccatttggagcctggcgagaagctcagagagctatgcggcacacctggttatctggcacccgaaatcctcaagtgctctatggatgaaacccatcccggctatgggaaagaggtcgatttatgggcttgcggggttatcctctttacgctgttggcaggctcacctcccttttggcaccgccggcagatcctcatgctgcgaatgattatggaggggcagtaccagttcagctcccctgaatgggacgacaggagctcaaccgttaaagacctgataagtaggcttcttcaggtggatccagaggccaggttgactgccgagcaggctctgcagcaccctttttttgaaaggtgcgagggttcccagccatggaatttaacaccgcgtcagcgctttagagtggctgtgtggaccgtgcttgccgctggcagggtggcattgagcacccatagagtccgccccctgacaaagaacgctctgttgagggatccctacgccttgagatccgtgcgccaccttattgataattgtgcgttcagactgtacggacattgggtgaagaaaggggagcaacaaaatagagccgcactgtttcagcaccgacccccagggcccttccctatcatggggccagaggaggaaggggatagtgctgcaatcacagaggacgaagctgtccttgtgctgggt

SEQ ID NO: 18017 - DNA, 1218 bp, synthetic construct
  misc_feature 1..1218: note = source = /note="Description of Artificial Sequence: Synthetic coding sequence"
  source 1..1218: mol_type = other DNA
atgactctcgacgttggcccagaagacgagcttccagattgggccgctgcgaaggaattctatcagaaatacgatccaaaggacgttattggacgtggtgtgtcaagtgtggttcgcaggtgcgtccaccgtgccaccggacatgagtttgcggtcaagataatggaagtgacggccgaacggctgtcccccgaacagctcgaagaagtcagagaagccactaggcgagagacacacatccttcgtcaggtagctggccatccgcatatcatcacactaattgattcatatgaatctagcagtttcatgttcctggtgtttgatctgatgcggaagggtgaactgtttgactatctcaccgagaaggttgcgctctcggaaaaagagacgagatctattatgcgctctctgctggaggccgtttcctttctgcatgccaacaacatagtgcatagggacctcaagcccgaaaatatactcctggatgataacatgcagattagactgagtgattttggcttcagctgccatctggagccgggtgaaaaactgagagagctctgtgggacacccggctatctagcccccgagatactgaagtgttccatggatgaaacacacccaggctatggaaaggaagttgacctgtgggcctgcggtgtgatcctgttcaccttactcgccgggtcccctccattttggcaccgcaggcagattctgatgttgcgtatgataatggaaggtcagtatcaattttccagtcctgagtgggacgacaggtcaagcacggtgaaagatctcatcagccgcttgttgcaagtcgatcctgaagccaggcttaccgccgaacaggctttacagcacccctttttcgagcgctgtgagggatcccagccgtggaatttgacacccaggcagagatttcgtgtggccgtgtggactgtgttagccgccgggagagtagccctatctacgcatagggtgcggcctctgaccaaaaacgccctcttaagggacccgtatgcactccggagtgtacggcaccttatagacaactgcgcttttcggctgtacgggcactgggttaaaaaaggcgagcagcaaaaccgagcagccctgttccagcatcgccctcccggacctttccctatcatgggaccggaggaggaaggcgactccgcggccattactgaagacgaggcggtgctcgtgctgggg

SEQ ID NO: 18018 - DNA, 1218 bp, synthetic construct
  misc_feature 1..1218: note = source = /note="Description of Artificial Sequence: Synthetic coding sequence"
  source 1..1218: mol_type = other DNA
atgaccctcgacgtcggccctgaagacgagcttccagattgggccgccgccaaggaattttatcagaaatacgacccgaaggacgttatcggacgtggagtttcaagcgtggtccgtagatgcgtccatcgtgccaccggacatgaattcgcagtaaaaatcatggaggtgaccgcagagagactatcacctgaacaattggaagaagtgagggaggccaccaggcgagaaacccatatcctgcgtcaggtcgcaggccaccctcacatcatcacactcatagacagctacgaatcttctagttttatgtttctggtgtttgacttgatgaggaagggtgagttgtttgattatcttaccgagaaagtcgccctgtccgagaaggagacacgctcaatcatgcgctcattgctggaggctgtatcattcctgcacgcaaacaacattgtgcatcgagaccttaaacctgaaaatattctgctggacgataacatgcagatccggctgagcgatttcgggttcagctgtcacctggagccaggagaaaaactgcgcgaactctgcggcacaccaggatacctggctcctgagatccttaaatgcagcatggacgaaacccaccctggctacgggaaggaggtggacctgtgggcatgcggagtgatcctgtttactcttctagcggggagcccccctttttggcacagaaggcagattctgatgctgcgcatgatcatggaaggccaatatcaattcagtagccccgaatgggacgatcggtctagcaccgtgaaggacctgattagcaggttgctgcaagtcgacccggaagctcgactgaccgccgagcaagctttacaacatccatttttcgagcggtgtgagggatcccagccgtggaacttgaccccacgccagagatttagggtcgccgtatggaccgtgctggctgccggccgtgtcgcattatctacccatcgggtcagaccactgacgaaaaacgcactcctgagggatccctacgccttaaggagcgtcagacaccttatcgacaactgtgcctttcgactctacggacattgggtgaagaagggcgaacagcagaaccgggcggctcttttccagcatcgccctccaggcccatttcctatcatgggccccgaagaagaaggagattcagccgctatcacagaagatgaagccgtcctcgtccttggc

SEQ ID NO: 18019 - DNA, 1218 bp, synthetic construct
  misc_feature 1..1218: note = source = /note="Description of Artificial Sequence: Synthetic coding sequence"
  source 1..1218: mol_type = other DNA
atgactcttgacgttggccccgaggatgagctgcctgactgggcagccgccaaagagttctaccagaagtatgatcccaaggacgtgataggccggggtgtgtcgtcggtggtacgccgatgcgtccatcgagctacgggtcatgagtttgccgtgaagattatggaagtgaccgctgagcgactcagtcctgagcagctggaggaggttcgtgaagcaacgcgacgcgagacccacatcctgcgccaagttgcgggacaccctcacattataaccctgatcgattcttatgagtcgtccagtttcatgttccttgtgtttgaccttatgcgcaaaggtgaactgttcgactatctcaccgaaaaggtcgcccttagtgagaaggagactcggtccatcatgcgttccctgttggaagcggtgagctttctacatgcgaataatatagtgcaccgtgacctgaagcctgagaatattctgcttgatgacaacatgcaaatcagactgagtgactttggcttttcctgccatctcgagcccggcgagaagcttagggagctgtgcggtactccggggtatctggccccagagatcctgaagtgctcgatggatgagactcaccccggatacggaaaagaggtcgatctgtgggcctgtggagtgattctctttaccctgctggcgggatccccaccgttttggcaccggcgacagattctgatgctgaggatgataatggaaggacaatatcagttttcgagccctgagtgggatgatagatcgtccactgtgaaggacctgattagccggcttctacaggtcgacccagaggcccgcctgaccgcagagcaggccctccagcatcccttctttgaacgctgcgagggctctcaaccctggaacctaacgccccgccagcggtttagggtggcggtttggacagtgttggctgccggccgcgtagcgcttagcacccaccgtgtccgaccactgacaaaaaatgccctactacgggatccatatgcgctgcgatcagtgcgtcatctgatcgataactgtgcattccggttgtacggccattgggtgaagaagggggagcagcaaaaccgggcggccctgttccaacataggccccccggcccctttcccattatgggccctgaggaagaaggcgactcagctgccatcaccgaggatgaggcagtgctagtactgggc

SEQ ID NO: 18020 - DNA, 1218 bp, synthetic construct
  misc_feature 1..1218: note = source = /note="Description of Artificial Sequence: Synthetic coding sequence"
  source 1..1218: mol_type = other DNA
atgacgctggacgtcgggccggaggacgaacttcccgactgggcagccgcgaaggagttttaccagaaatatgatcccaaggacgtgatcgggcgcggtgtgagctcagtcgtgagacgctgcgtgcaccgcgcaaccggacatgaattcgcggtgaagatcatggaagtgaccgcagaacgcctctccccggagcagctcgaggaggttagggaagctacccgcagagaaacccatatcctgaggcaggtggccgggcatccgcacattatcaccctcatagactcgtacgaaagctcctccttcatgttcctggtgttcgatctcatgcgaaagggagaactgttcgactacctcactgaaaaagtggctctctcagaaaaggagactaggtcgattatgagatctctgctcgaagcagtctcgtttttgcacgctaataacatcgtgcacagagacttgaaaccagagaacatcttgctggacgataacatgcaaatccggctgtcagatttcggtttctcatgtcatcttgaaccgggggaaaagctgcgcgagctttgcggcactccgggatacctggcgccggagatcctcaaatgcagcatggacgagacgcatccgggatatggcaaggaagtcgatctgtgggcatgcggagtgatcctcttcaccctgttggctggctcaccgccattctggcatcggcgccaaatcctcatgctgagaatgattatggaaggacaataccaattcagctcaccggaatgggacgaccggtcatcgaccgtgaaggatctgatctccagactgctccaggtggaccctgaggcgagactcactgccgaacaggcgctgcaacacccgttcttcgaaaggtgcgaaggatcacagccgtggaatctgactccaagacagcggtttcgagtggccgtgtggaccgtcctcgcggccggacgggtcgccctctccacccaccgcgtgaggccgttgacgaagaatgcactcttgcgcgatccttacgcgctgagatcagtccgccaccttatcgataactgtgcctttcgactgtacggtcactgggttaagaaaggtgagcagcagaaccgcgccgcgctctttcagcaccggccaccgggtcccttcccaatcatgggaccagaggaggaaggggactcggccgctatcacggaggatgaggcggtgctggtgttggga

SEQ ID NO: 18021 - DNA, 1218 bp, synthetic construct
  misc_feature 1..1218: note = source = /note="Description of Artificial Sequence: Synthetic coding sequence"
  source 1..1218: mol_type = other DNA
atgactcttgatgtcggtccggaggacgaactcccagattgggctgcagctaaggagttttatcaaaagtacgaccctaaggatgtcatcggccgaggggtgtcctcggtggttcgccggtgtgttcatagagccaccggacacgagtttgcagttaagattatggaggtgacggcagaacgactttcaccagagcagctggaagaagtgcgcgaggcgacccgccgcgagactcatatcctcagacaagtggcggggcatccgcacatcattaccctcattgatagctacgagagctcgtccttcatgtttctcgtgttcgatctgatgagaaagggagaacttttcgactaccttaccgaaaaagtggcactctcggaaaaggaaaccagaagcatcatgcgaagcctccttgaagcggtgtcctttctgcacgcaaacaatatcgtccatagagatcttaagccagaaaacattctgctggacgacaacatgcagattcggctgtcagatttcggtttcagctgtcaccttgaacctggcgagaaactgagagaactttgcggcactcctggatacttggcaccggaaattctgaaatgttcgatggacgaaactcatccaggatatggcaaggaagtcgatctttgggcgtgcggcgtgattcttttcacgcttctggccggctcgcctcctttttggcacagaaggcaaatcctcatgctcagaatgattatggaaggacagtaccagttttcctcgcctgagtgggacgacagatcttcgacggtgaaggaccttatctccaggctgctccaagtcgatccagaggcacgccttaccgcggaacaggcccttcaacacccattctttgagcgctgtgagggctcacagccatggaacctgactccacgacaacgctttagagtggcagtgtggaccgtccttgccgcaggacgtgtggccctgtcgactcatcgggtgcgccccctgaccaaaaacgcgctgcttagagatccatacgcacttagaagtgtgagacatctgattgataattgtgctttccgattgtacggacattgggtgaagaaaggagagcagcaaaacagggcagcactgtttcaacacagaccacctggcccatttccaattatgggaccagaagaagaaggcgactccgcagcaatcacggaagatgaggcggtcctggtgctcggg

SEQ ID NO: 18022 - DNA, 1218 bp, synthetic construct
  misc_feature 1..1218: note = source = /note="Description of Artificial Sequence: Synthetic coding sequence"
  source 1..1218: mol_type = other DNA
atgacactcgatgttggccctgaagacgagcttcctgactgggctgccgccaaggagttttatcagaagtacgaccctaaggatgtgatcggccgtggagtgtccagcgtagtaagacgctgcgtccaccgcgctacaggccacgagttcgccgttaaaatcatggaggtaaccgccgagaggttgtctccagaacagctcgaggaagttagagaggctacaagacgtgaaactcacattctgcgccaggtggccggtcatcctcacattattactctgatcgacagttacgagagcagtagtttcatgttcctcgttttcgatctcatgagaaaaggcgagctgttcgactacctgaccgaaaaggtagccctgtctgagaaagaaacacgttcaattatgcgctctctgcttgaggcagtgtcctttctgcacgccaacaacattgtgcaccgtgacctgaagcctgagaatattttgctggatgacaatatgcaaatcaggctgagcgatttcggcttctcttgccatctcgaacccggtgaaaagttgcgtgagttgtgcggcaccccaggctacctcgccccagaaatcctgaaatgcagtatggatgagactcatcccggttacggcaaggaggtcgacctgtgggcatgtggtgtgatcttgttcacccttcttgctggttccccccctttctggcacagaagacagatcctcatgctcagaatgattatggaaggtcagtaccaattctcaagtcctgaatgggatgaccgctcatccactgtgaaggacctgatttctcgcctcttgcaggtggatcccgaagcacgcctgaccgccgaacaggccctgcagcacccatttttcgagcgctgcgagggatcccaaccctggaacctgaccccccgccagcgctttagagtcgctgtgtggacagtgctggccgccggaagagtagcactgtccacacaccgtgttcgcccactgactaaaaacgctctgctgagagacccctacgcactccgcagcgtcaggcacctcattgacaattgcgcctttaggctttacggtcattgggtcaagaaaggcgagcagcaaaatcgcgcagctctcttccagcaccgcccaccaggtccttttcccataatgggacccgaggaggaaggtgatagtgctgccatcactgaggacgaagctgtgctggtactgggc

SEQ ID NO: 18023 - DNA, 1218 bp, synthetic construct
  misc_feature 1..1218: note = source = /note="Description of Artificial Sequence: Synthetic coding sequence"
  source 1..1218: mol_type = other DNA
atgactttggacgtgggcccagaagatgaactgcccgattgggctgcggccaaagaattttatcaaaagtatgatcccaaagatgtgatcggacgcggggtctcaagtgtggtacgcagatgcgtccaccgggcgacagggcacgagttcgctgtgaaaatcatggaggtcacagccgaacgtctgtcccctgagcagctggaggaggtgagggaagctacccgccgggagacccacatcctcaggcaggtggctggacacccccacatcatcacgctgatagatagctacgagtccagttctttcatgtttcttgtgttcgaccttatgagaaagggtgagctgtttgactatctgaccgagaaagttgctctgagtgagaaggagactagaagtatcatgcgctccctgctggaagcggtgtccttcttgcacgcgaataacatcgtccatcgcgacctgaagcccgagaacatccttctcgacgacaatatgcagattcgcctgtccgacttcggtttctcctgtcacctggagccaggggagaagctgcgggagctgtgcgggacgccgggatacctcgcccccgagattctcaagtgctcaatggacgaaacgcaccctggctacggcaaagaggtggacctctgggcttgcggtgttatattatttactttgctggccgggagcccgcccttctggcacaggcgtcagatcctgatgctgcgcatgatcatggagggacagtaccagttctcctcccccgagtgggacgaccgctcaagcacggtcaaagacctgatcagtagactactgcaggtggatcctgaggcccggttgactgcagaacaagccctgcagcaccctttttttgagcgctgcgaagggagtcagccttggaacctgactcctaggcagcggtttcgtgtcgccgtctggacggttctcgccgctggaagagtagccctctctactcatcgcgtgcgcccattaaccaaaaacgcattgttgcgtgacccctacgcgctgcgctccgtccggcaccttattgacaactgtgccttccgcctttatggtcactgggtaaaaaaaggagaacagcagaatcgagcagctctcttccaacaccggccccccggaccctttcccattatggggcccgaagaggagggcgacagtgctgccatcacagaagatgaagctgtgctcgtgctcggg

SEQ ID NO: 18024 - DNA, 1218 bp, synthetic construct
  misc_feature 1..1218: note = source = /note="Description of Artificial Sequence: Synthetic coding sequence"
  source 1..1218: mol_type = other DNA
atgaccctcgatgttggaccagaggacgagctcccagactgggcggctgccaaggaattctaccagaagtacgatcctaaggatgtgatcggtagaggtgtcagcagcgtggtccggaggtgtgtgcaccgggccactgggcacgaatttgcagtgaagataatggaagtgactgcagaaagattgagccctgaacaactggaagaagtgagagaggcgactcgccgcgagactcatatccttcgccaggtcgcaggccacccacacataatcacccttatcgattcctatgaaagctcgtcgtttatgtttcttgtgtttgatctcatgcggaagggtgaactgtttgattatcttaccgaaaaagtggctctgtccgaaaaggaaactcgctccatcatgcgctcattgctggaagcagtgtccttcctccacgccaataacatcgtgcatagggatctgaagccagagaacattttgctggatgacaacatgcaaattcggctgtcagattttggtttttcgtgccacctggaacctggagagaaacttcgagaactttgtggtactccgggatacctggcacccgaaatcttgaagtgttccatggatgaaacccacccaggctacggtaaggaagtggatctctgggcctgtggagtgatactttttactcttctggcaggatcacctcctttttggcaccgcagacaaattcttatgctcaggatgataatggagggtcaataccaattttcatccccagaatgggatgacagaagctcgaccgtgaaggatctgatatccaggcttcttcaggtggatcctgaggcacgccttaccgcagaacaagcactgcagcatccttttttcgaaagatgtgagggctcgcagccctggaaccttactcctcgacagcgattccgcgtggccgtgtggaccgtgctcgcagcaggtcgggtggctctttctactcatagggtcaggccacttaccaagaacgcactgctgagggatccttacgctcttagatcggtccgacacctgatcgataactgcgcgttcagattgtacggacattgggtcaagaagggagagcagcagaatcgtgccgcactgttccaacacagacccccgggaccattccctattatggggccagaggaggagggtgatagcgcagccataactgaagatgaggcagtcctcgtgctgggt

SEQ ID NO: 18025 - DNA, 1218 bp, synthetic construct
  misc_feature 1..1218: note = source = /note="Description of Artificial Sequence: Synthetic coding sequence"
  source 1..1218: mol_type = other DNA
atgactctggatgtgggtcctgaggacgaactcccggattgggccgcggctaaagagttctaccagaaatacgaccccaaagatgttattggtcgcggggtgtcatccgtggtgaggcgctgcgttcaccgggcgacggggcatgagttcgctgtcaagatcatggaagtgaccgctgaaagactgtcgccagagcagctcgaagaagtgcgggaggcgactagacgggagactcatatcctgagacaggtggcaggccacccacacatcataaccctcatcgacagctacgagtcatcttcgtttatgttcttggtgttcgatctgatgcgcaaaggcgagctgtttgattacctcactgaaaaagtggccctgtcagaaaaggagactagatccatcatgcgctcgctcctggaagccgtgtccttcctgcacgccaacaatatcgtgcaccgcgacttgaaacctgagaatattctgctggatgacaatatgcaaattcgcctgagcgatttcggattctcatgccatctggagccaggggaaaagctccgcgagttgtgcggcacgccgggataccttgctccggaaatcctcaaatgctccatggatgaaacccatcctggatacggaaaggaagtggacttgtgggcgtgcggagttattctgttcaccctgctcgcaggatccccaccgttttggcaccgccggcaaatcctgatgctgcgcatgataatggaaggccagtaccagttctcctcccccgaatgggatgaccggagctcgactgtgaaggacctcatctcgcggctgctgcaggttgacccggaggcccggctcactgccgagcaggcacttcaacatccgttttttgaacggtgtgaaggcagccagccgtggaatctcaccccaagacaacggttccgcgtggcagtgtggactgttctggcggctggaagggtggcgctgtcgactcaccgggtgcgcccgctgactaagaacgccctgctgcgggacccatacgccctgcgttcagtcagacacctgatcgacaactgtgcgttccgcttgtacggtcattgggtgaaaaagggagaacaacagaatagggcagcgctcttccagcaccgcccacctggaccgttcccgatcatggggccagaagaagaaggagactcagccgccattactgaggacgaagcggtgctcgtgctggga

SEQ ID NO: 18026 - DNA, 1218 bp, synthetic construct
  misc_feature 1..1218: note = source = /note="Description of Artificial Sequence: Synthetic coding sequence"
  source 1..1218: mol_type = other DNA
atgactttggatgtggggcctgaagacgaattgcccgattgggctgctgccaaggagttctatcagaagtacgatcccaaggatgtaatcggtagaggtgtctcgtctgtggtgagaaggtgcgtccatcgagctacagggcacgagttcgcagttaagataatggaggttacggccgagaggctgtctccagaacagcttgaggaggtgagagaggccactagaagggaaacacatatattaaggcaggtggctggtcatccgcacattattacattgattgactcgtatgaaagctcgtctttcatgtttttggttttcgacttgatgagaaaaggagaactgttcgattacttaaccgaaaaggttgccctttcagagaaggagacccgcagcattatgcgctcccttctagaagcagtgtctttccttcatgctaataatatcgtgcatcgtgatttaaaaccagaaaacattttgttagatgacaacatgcaaatcaggctttcagattttggattctcttgtcatctggagcctggtgaaaaacttcgtgaactttgcggtacacccgggtatcttgcgcctgaaatcttgaagtgctcgatggacgagactcatcctggctacggaaaagaagttgacctgtgggcttgtggagttattctgtttactttgttagctggaagtcctcctttttggcacagaagacagattttaatgttgaggatgattatggaaggtcaatatcaatttagttcaccagagtgggatgaccgttcttccacagtgaaggatttgatctctcgattactccaggttgatcctgaggctaggttgactgctgaacaagcacttcaacatccattcttcgagcgttgcgagggatcacagccttggaacctaacccctcgccagagattcagggttgctgtttggactgtactcgctgctggccgtgttgcactatcgactcatagggtacgacctcttaccaagaacgcactccttcgggatccttacgctttgcgttcagtgcgtcatctgattgataactgcgcttttagactctacggccattgggtgaaaaagggagagcaacaaaatcgggcagctctctttcaacatcgacccccaggaccttttcctattatggggcctgaggaggaaggagattcagctgctattaccgaggatgaagcagtacttgttttggga

SEQ ID NO: 18027 - DNA, 1218 bp, synthetic construct
  misc_feature 1..1218: note = source = /note="Description of Artificial Sequence: Synthetic coding sequence"
  source 1..1218: mol_type = other DNA
atgaccctggacgttggccccgaggacgaactccctgattgggcggcagcaaaagaattctatcagaaatatgatccaaaggacgtgatcgggagaggcgtgtcctcggttgtacggcggtgcgtgcacagggctaccggtcatgagtttgcggttaaaattatggaggtgacagccgaaagactttcacccgagcagttggaggaggtgcgagaagccactcggagagagacccatatattgcgtcaggtggcggggcatccacacattatcacgctgatcgatagctacgagagctcaagcttcatgttcctcgtgtttgatttgatgcgcaagggagaactgttcgactatctcaccgagaaggtcgctctgagcgaaaaggagactagaagcattatgcgatccctgttggaggcagtgagcttcttgcacgccaataatatcgtgcaccgagacttaaaacctgagaacatcctcctggatgacaacatgcagatacgcttgagcgacttcgggtttagttgccacctggagccaggggagaagttacgggagctgtgcggaacacccggttatttggcgccagagattctgaaatgttccatggatgagactcacccaggttatggcaaagaggtggatctgtgggcctgcggggtaattctgtttaccctgttagcaggaagcccccccttctggcataggagacagatcctgatgttgagaatgatcatggaagggcagtaccagttctcatccccagagtgggacgataggagctccaccgttaaggacctgatcagtcgtctcctccaagtcgatccagaggcccgactaaccgccgagcaggctctgcagcacccttttttcgaacgttgcgaaggctctcaaccttggaatttgactccgcgacaaagattccgggtagcagtgtggacagtcctggccgcaggtagggtcgcactgagcacccaccgcgtgagaccacttacaaagaacgcgctgctacgcgacccatacgcccttaggtcagtgcggcacttgatagacaactgcgcctttagactctacggtcactgggttaagaagggagaacaacaaaaccgtgcagcgttgttccagcaccgcccacccggccccttcccaatcatgggaccggaagaggagggggacagtgctgccatcactgaagatgaagctgtgttagtgttaggt

SEQ ID NO: 18028 - DNA, 1218 bp, synthetic construct
  misc_feature 1..1218: note = source = /note="Description of Artificial Sequence: Synthetic coding sequence"
  source 1..1218: mol_type = other DNA
atgaccctcgacgtggggccagaagatgaactcccggattgggcggccgcaaaagaattctatcaaaagtacgaccccaaggatgtcatcggacgtggcgtgagtagcgtagtgcgccggtgtgtgcatcgggcaaccggccacgagtttgccgtcaaaatcatggaggtcacggcagagagactttctcctgaacaattggaagaagtgagagaagcaacccgcagggaaactcatattcttcgccaggtcgccggtcacccccacattatcacgcttatcgactcatacgagtctagcagcttcatgtttctggtctttgatttgatgcggaagggagaactttttgactaccttactgagaaggtcgcgctctctgaaaaggaaacccgttccattatgaggtccctgcttgaagcagtgtcgttccttcatgcaaataacattgtgcacagggacctgaagccagagaatatactcttggatgataacatgcaaattcgactgtccgatttcggttttagctgtcatctggagccaggtgagaaattgcgtgaactctgcggaacccctggatacctggctcccgaaatactgaaatgctcgatggacgaaacccatcctgggtacggcaaagaggtggacttgtgggcatgcggagttattctttttaccctgctcgctggctcaccgccattttggcaccgccgccagatccttatgctgaggatgattatggaaggacaataccagttcagcagccctgagtgggacgatcgaagctcgactgtcaaggatttgatctcgaggctcctgcaagtagatccggaggcacgattgactgcggagcaggcccttcaacatccttttttcgaacgttgtgaggggtcacagccttggaatcttaccccacgacaacgattcagagtggcagtgtggacggtgttggcagcgggtcgggtcgcactctcaactcaccgtgttcgtcctctgaccaagaacgcactgcttcgggacccttacgccctgcgctccgtcagacatcttattgataactgtgcttttcggctctacggacattgggtgaagaagggcgaacaacagaacagagcagccctcttccagcatcggccacctggaccttttcctatcatgggtccagaagaagaaggagattcggcagcgattactgaggatgaagcagtgctggtgctgggg

SEQ ID NO: 18029 - DNA, 1218 bp, synthetic construct
  misc_feature 1..1218: note = source = /note="Description of Artificial Sequence: Synthetic coding sequence"
  source 1..1218: mol_type = other DNA
atgactctcgacgtgggaccagaggacgaactgccggattgggcggccgcaaaggagttctaccaaaagtacgacccgaaagacgtcatcggccggggtgtctcctccgtggtgcgcagatgtgtgcatcgggctaccggccacgagtttgccgtgaaaatcatggaggtgaccgctgaaaggctgtcgccagagcaattggaggaggtccgcgaagcaacccggcgtgagacgcatatccttagacaggtggccggtcaccctcacatcattactctgattgactcgtatgaaagctcatcgttcatgttcttggtctttgatctgatgcgcaagggagagctctttgactatctcactgaaaaagtcgccctgtcggaaaaggaaactaggtcgataatgcgctcactcctcgaggcagtctcttttctgcacgccaacaacatcgtgcatcgcgatctgaaaccggagaacatcttgttggacgataacatgcagatccggctgtcagattttggcttttcgtgtcaccttgaacccggagagaagctgcgggaactgtgcgggaccccgggctacctggcccccgagatcctcaagtgctcgatggatgaaacccaccccggttacggaaaggaagtggatctgtgggcgtgcggtgtcattctgtttactctgctggcgggctcacccccgttctggcatcgcagacaaatcctcatgctgcgcatgatcatggaaggacaataccagttctccagccctgaatgggatgatcggtctagcaccgtgaaggatcttatctcccgcttgctgcaggtggaccctgaagctcgcttgaccgccgaacaggccctgcagcatccgttcttcgaacggtgcgagggtagccagccttggaatctgactccgaggcaacggttccgcgtggctgtctggacggtgctggccgccgggcgggtcgctctgagcacccaccgggttcgcccactgacgaagaatgcgcttcttagggacccttacgcgctgcgatctgttcgccatttgatcgataattgcgcgttccgcctttacggccactgggtgaagaaaggagaacaacagaaccgtgctgctcttttccagcaccgcccgccgggaccgttccctatcatggggccagaggaggaaggagactccgcggctatcaccgaggacgaagcagttctcgtgctcgga

SEQ ID NO: 18030 - DNA, 1218 bp, synthetic construct
  misc_feature 1..1218: note = source = /note="Description of Artificial Sequence: Synthetic coding sequence"
  source 1..1218: mol_type = other DNA
atgacattggatgtcggtccagaagacgaactgcccgattgggctgctgcaaaggagttttaccagaagtacgaccccaaggacgttatcggaagaggagtgtccagcgtcgtccgccgctgcgtgcatcgggcgacgggtcatgaattcgccgtcaagattatggaggtgacggcagagcgcctttctccggagcaactggaggaagtccgtgaagcaactcgacgcgagacacatatactgaggcaggttgccggccatccccacatcatcactcttatagactcttatgagtcatcttcgttcatgttcctggtgttcgatcttatgagaaaaggggaattatttgattacctaaccgagaaggtggctctgtcagagaaggagacacgaagcatcatgcggagcctgctcgaagcagtgtcattcttgcatgctaataacatcgtccacagagacctgaagcctgagaacattcttcttgatgataacatgcaaatccgtctaagtgactttggattctcttgccacctggagcccggagagaagcttcgcgaactgtgcggcaccccagggtacctcgcccccgaaatactgaaatgctctatggatgagactcatcctggctacgggaaggaggtggatctctgggcatgcggcgtcatcctgttcactctgcttgctggctcacctccattttggcaccggagacagattctgatgttgcggatgataatggagggccagtatcagtttagttctccagagtgggatgacaggtcttccacagtgaaggatttaattagccggctcctgcaagtagacccggaggccagactaacggccgaacaggccctgcagcaccccttctttgagcggtgcgagggttcacagccgtggaatttaaccccacgccagcgatttagagtggcggtatggactgttctagcagcaggacgggtcgctctgtctactcaccgggtccgacctctcacaaagaacgcactcctgcgggacccttacgcgctgcgaagcgtgaggcaccttattgacaattgcgcatttagactttatggccactgggtgaaaaaaggcgaacagcagaatcgcgctgctttgtttcagcaccggccaccaggcccatttcccatcatgggacctgaggaggagggcgattcagcagccataacggaggatgaggctgtgctcgtgctggga

SEQ ID NO: 18031 - DNA, 1218 bp, synthetic construct
  misc_feature 1..1218: note = source = /note="Description of Artificial Sequence: Synthetic coding sequence"
  source 1..1218: mol_type = other DNA
atgacactggacgtgggtccagaggatgaattgccggactgggctgccgccaaagagttctatcagaaatatgaccctaaggatgtgattggtcggggcgtgagcagtgtggttcgcagatgtgtgcatagagccacgggacacgaatttgccgtcaaaatcatggaggtgaccgcggagcgcctgagccctgagcagctggaagaggtcagggaggctacccgccgtgaaactcatatccttcgtcaagtcgccggacacccgcatattattacacttattgatagctacgagagtagctcatttatgttcctggtgtttgacttgatgaggaagggtgaactgtttgattatctgactgagaaagtggcactgagtgagaaagagaccagatctatcatgagatccttgcttgaggcagtgtcctttctgcacgcaaataacatcgtgcaccgggacttgaagcccgagaacattttattggacgacaacatgcagattcgcctgtctgatttcggtttttcttgccatctggaacctggggagaagctccgcgagctctgtggaactcccggctacttagcgcctgaaatattaaagtgctccatggacgagactcaccctggatacggtaaggaggtggatctctgggcctgcggagtgatactgttcaccctcctggcgggttccccacctttttggcaccgccggcagatactgatgctgcggatgatcatggaaggccagtatcagttttcttcccctgagtgggacgatcgctcctcaaccgtgaaagatctgatttccagactgctgcaggtggacccggaggctagactcaccgctgagcaagctctgcaacaccccttcttcgagaggtgtgaggggagtcagccttggaatctgacccctaggcagcggttccgcgtggccgtttggactgtgttggcagccggacgtgtcgcactctctacccatcgcgtgcggccccttacgaagaacgcactactccgcgacccttatgccctgagaagcgtcagacacctgatcgacaattgcgctttcagactctatggacactgggtcaagaagggggaacagcagaaccgcgcagctctattccagcataggccccctggcccatttcctataatgggccccgaagaggaaggggacagcgcagccattaccgaggatgaagctgtgctcgttctggga

SEQ ID NO: 18032 - DNA, 1218 bp, synthetic construct
  misc_feature 1..1218: note = source = /note="Description of Artificial Sequence: Synthetic coding sequence"
  source 1..1218: mol_type = other DNA
atgactcttgatgtgggaccagaagatgaacttcccgattgggcggcggctaaggagttttatcagaagtacgatcctaaagacgtcattggtcgcggtgtgtcgtcggtggtgcggaggtgtgtgcatagagcaactgggcacgaattcgcagtcaagattatggaggtgactgcagagagactttcccctgaacaactggaagaagtgagagaggcaactagaagggaaactcatattcttcggcaagttgcaggacacccccacattatcactcttattgattcctacgaaagctcatcgtttatgttcctcgtttttgatctcatgcgaaaaggagagctttttgattatctcaccgaaaaggtggcactgtcggagaaggaaactagatcaataatgcgctcccttctggaggcagtgtcatttctgcatgcaaataacatcgtccatcgtgatcttaagcccgaaaacattctcctcgatgacaacatgcaaatcagactttcggattttgggtttagctgtcacctggaacctggagagaagttgcgggagctttgcggcacccctgggtaccttgcacccgaaattctgaagtgtagcatggatgaaacccatcctggttacggaaaagaagttgacctctgggcctgcggagtcattctttttacccttcttgcaggatcgcctcctttctggcacaggcgccaaatcctgatgctccgcatgataatggaagggcaataccagttcagtagcccagagtgggatgatcgcagctccactgtcaaggacctgatctcgcggcttctgcaggttgaccctgaggctcgacttacggccgaacaggccctccaacatcctttctttgaaagatgtgaaggctcgcagccttggaaccttactccgcggcagagattccgtgtggcggtctggactgtccttgcggcaggccgagtcgcactctcgacccacagggtccggcctcttactaagaacgcactgctcagggacccatacgcactgcgttcagtgagacatcttatagacaactgcgcatttcggctttacggacattgggtgaaaaagggtgaacagcaaaaccgggccgcactttttcaacatagaccgcctggacccttcccaattatgggccccgaagaagagggtgactccgcagcaataactgaagatgaagccgtgctggtccttggg

SEQ ID NO: 18033 - DNA, 1218 bp, synthetic construct
  misc_feature 1..1218: note = source = /note="Description of Artificial Sequence: Synthetic coding sequence"
  source 1..1218: mol_type = other DNA
atgaccctggacgtgggtccagaggatgagttgccagactgggctgcagcaaaggagttctaccagaagtacgaccctaaagatgtgatagggcgtggtgtgagctcggtggttcgacgatgtgtgcatcgggccaccggacatgagtttgcagtcaagattatggaagtcaccgcagaaagattgtcccccgaacagctcgaggaggtcagagaggccacccgccgggaaactcacatcctccggcaggttgctgggcatccgcatatcattaccctgattgattcgtacgaaagcagctcatttatgtttctcgtgtttgacttgatgcgtaagggagaattgtttgactaccttaccgagaaggttgccctttcagaaaaggaaactcgttcgattatgcgcagccttcttgaagccgtgtcgtttctgcacgcgaataacatcgtgcaccgggacctcaagccagaaaacatacttcttgatgacaatatgcagattcgcctcagcgactttggcttctcgtgccatctggaaccgggagagaaacttcgagaactttgtggtaccccgggataccttgcccctgaaatcctgaagtgctcgatggatgaaactcatcctgggtacggtaaggaggtcgatctctgggcatgtggagtcattctcttcaccctgctcgcaggcagccccccattttggcaccgacgccaaattctgatgctgagaatgattatggagggtcagtaccaattctcaagccctgagtgggatgaccgaagttcgaccgttaaagaccttattagcaggctgctccaagtggaccctgaagcacgccttactgcagaacaagcgctgcaacatccatttttcgaaaggtgtgaggggtcccaaccgtggaaccttaccccacggcaacgttttcgcgtggcagtgtggactgtccttgcagcaggacgggtggccctctcgacccaccgtgtcaggcctctcaccaaaaatgcactgctgcgtgacccatacgcacttcgctcggtcaggcatcttattgataactgtgcgtttcggttgtatggtcattgggtgaaaaaaggagagcagcagaacagggctgcactgtttcaacacagaccacccggtccctttcctatcatgggccccgaagaagaaggagattccgctgcaataaccgaagatgaggcagtgttggtgcttggg

SEQ ID NO: 18034 - DNA, 1218 bp, synthetic construct
  misc_feature 1..1218: note = source = /note="Description of Artificial Sequence: Synthetic coding sequence"
  source 1..1218: mol_type = other DNA
atgactttggatgtgggaccagaggacgagctccctgactgggcggcggccaaagaattttatcagaagtacgatcctaaggacgtcatcggccgaggagtcagttctgtcgtccgcagatgcgtacatcgcgcgacagggcacgagttcgcggtgaagataatggaggtgacagcagagcgtctttcccccgagcagctagaggaagtacgggaggccactaggagggaaactcacatactgcgccaagtcgcaggccacccccacatcattacgctgatcgactcctatgagtcaagtagctttatgttcctcgtctttgatctgatgcggaaaggtgaattgttcgattatttgacagagaaggttgctctctctgaaaaggagacacgctccataatgaggagcctgctggaagcagtttcgttcctccatgctaataacatcgtgcatcgtgaccttaaaccagagaatatattactggacgataacatgcagatccggctttcagattttgggttctcttgccacctggaacctggcgaaaaattgagggagctatgcggcacaccgggttaccttgcaccagaaattctgaagtgcagcatggatgagactcaccccggctacggcaaagaggtggatctgtgggcctgcggagtgattctgtttacactgctggccggcagccctcctttctggcaccgtaggcagattctcatgctgcgcatgattatggagggccaatatcaattctccagcccagagtgggatgaccgtagttcgacggttaaagatctaatttcaaggctactccaggtagatcccgaggctagattgacagcagaacaagctctgcagcaccccttcttcgaaaggtgtgagggcagccaaccttggaatctgaccccacggcagaggttcagagtcgcagtctggaccgtcttggccgcagggcgggtggccctctccacgcatagggtaagaccgctgaccaaaaacgccctgctgcgcgacccctacgctctgagaagcgtccgacacctgatagacaactgcgccttccgcttgtatgggcactgggtgaagaagggtgaacaacagaaccgggcagctctgttccagcacagacccccaggcccttttccgatcatgggacctgaggaggagggagattccgctgcgataaccgaggatgaggctgtactggtgctcggt

SEQ ID NO: 18035 - DNA, 1218 bp, synthetic construct
  misc_feature 1..1218: note = source = /note="Description of Artificial Sequence: Synthetic coding sequence"
  source 1..1218: mol_type = other DNA
atgaccctcgacgtggggccagaggatgaattgcctgactgggccgcagcgaaggaattctaccaaaagtacgatccaaaagacgtgatcggacgaggtgtctcctcagtggtccggcgctgcgtgcatcgcgcaaccgggcacgaatttgctgtcaagattatggaagtgactgccgagcgcctgtcgccggagcaacttgaggaggtgcgcgaagcgaccaggcgggagactcacatcctccggcaggtggctggccatccacacatcatcaccttgatcgactcgtatgaaagttcctcattcatgttcctggtgttcgatctgatgcgcaaaggcgaattgttcgactacttgaccgaaaaagtggcgctgagcgagaaagagactagatctatcatgcgttcgctgctggaagccgtgtcattcctgcacgctaacaacatcgtccatcgcgatctgaagccggaaaatatcctgttggacgataacatgcaaatccgcctgtcagatttcgggttcagctgccatctcgaaccaggagagaaacttcgagaactctgcggtaccccgggatacctcgcccctgagatcctgaagtgctcgatggacgagacgcatcctggatacgggaaggaagtcgatctgtgggcttgcggagtcatcctgttcactcttcttgctggaagccctccattctggcacagacggcagatcttgatgctgcgaatgatcatggaaggacaatatcaatttagctccccggagtgggacgataggtcgtccactgtcaaggacctgatctcccgcctcctgcaagtggacccggaagcgcggttgaccgctgagcaggccctccagcacccgttcttcgaacgctgcgagggctcacagccgtggaatctgactccaagacagcggtttcgtgtggcggtgtggacggttctggccgcagggagggtggccctgtccactcatcgggtcaggccactgaccaagaacgctctgctgcgagatccctacgctctgcgctccgtcagacatctgatcgacaactgcgcattcagactctacggacactgggtgaaaaaaggggagcaacagaatagagcggcgctcttccaacacaggccaccaggcccattcccaattatgggtccggaagaggagggcgactcggcagccatcaccgaggatgaggcagtgcttgtgctgggt

SEQ ID NO: 18036 - DNA, 1218 bp, synthetic construct
  misc_feature 1..1218: note = source = /note="Description of Artificial Sequence: Synthetic coding sequence"
  source 1..1218: mol_type = other DNA
atgactctggatgtcggacccgaagatgaactcccggactgggcggccgcgaaggaattctaccagaaatatgatccaaaagacgtgatcggcagaggcgtgagctccgtcgtgcggcggtgcgtgcatcgggctaccggccacgagttcgccgtgaagattatggaggtgactgctgaaagattgtcgcccgagcagctcgaggaagtaagagaagcgacccgccgggaaactcacatcctccgccaagtcgccggccacccgcatatcatcaccctgatcgactcctacgaatcatcctcctttatgttcctggtgttcgatctgatgcggaaaggggaactgttcgattacttgactgagaaggttgctctctcggaaaaggagactcggtcaatcatgcgctcactgctcgaggcagtgtcgtttctgcacgcgaataacatagtgcacagagatctcaagccggaaaacatcctgttggatgataacatgcagatcaggttgagcgactttggattctcctgccatctcgaacccggggagaaacttcgggagctgtgcggcaccccaggatacctggctccagaaattctcaagtgcagcatggatgaaacccatccaggatatggaaaagaagtggacctgtgggcctgcggagtcatcctgttcactttgctcgcgggatcgccgccattctggcatcgccgccagatcttgatgctccgtatgatcatggaaggacagtatcagttctcatcgccggagtgggacgaccggtcgagcactgtgaaggatctgatcagccgcctgctccaagtcgatccagaagcgaggctcactgccgaacaggccctgcagcacccattctttgagagatgcgaaggatcgcagccatggaacttgacgcctagacagaggttccgggtcgcagtgtggacggtcctggccgccggacgggtggcactgtccacgcatagagtgcggccgctgaccaaaaacgccctcctccgggacccgtacgcactccgatcggtccgccacctgatcgacaattgcgccttccgactgtacggacactgggtgaagaaaggagagcagcagaatcgcgccgccctgttccagcatcggccacctggcccatttccgatcatgggtccggaggaagagggcgactccgcagccatcaccgaagatgaagccgtgctggtgctcggc

SEQ ID NO: 18037 - DNA, 1218 bp, synthetic construct
  misc_feature 1..1218: note = source = /note="Description of Artificial Sequence: Synthetic coding sequence"
  source 1..1218: mol_type = other DNA
atgaccctcgacgttggaccggaggacgagctcccagactgggcggctgcaaaggagttctaccagaagtacgatccgaaggacgtcataggcaggggcgtgtccagcgttgtgcggcggtgcgtccatcgcgcgactgggcacgaattcgccgtaaagatcatggaagtcaccgccgagagactctcgcctgaacagctcgaagaggtgagagaagcaacccgcagggaaactcacatcctgcggcaagtggcaggacatccgcacattatcaccttgatagactcctacgaatcctcgtcttttatgttcctggtgtttgacctcatgcggaagggagagttgttcgattaccttactgagaaagtggcattgtctgagaaggagactcgctcgatcatgcgctccttgctcgaggccgtgtcgtttctgcacgccaacaacattgtacatcgggacttgaagccagaaaacattttgctcgatgataacatgcaaatccggctttccgacttcggattttcctgccacctggaaccgggggagaaacttagagaactgtgcggaacccctggctacctggccccagaaatccttaagtgtagcatggacgaaactcaccctggttacggaaaggaagtcgacctctgggcttgcggagtcatcttgttcactctgctcgcgggcagcccaccgttctggcaccgacggcagatcttgatgcttagaatgatcatggagggacaatatcaattctcctcaccggaatgggacgatcgttcgtcgactgttaaggatctgatctcacggctgctgcaggtcgaccctgaggcgaggctgaccgccgaacaggccctgcaacatccgttcttcgagcggtgtgaaggcagccagccgtggaatctcacgccccgccagagattccgcgtcgctgtgtggaccgtgctggcagcggggcgcgtggcgctgtcaacccaccgtgtgcgcccattgaccaaaaatgccctcctgcgcgatccctacgcgcttcgctcagtccgtcatctgatcgacaattgcgcattcaggctttacgggcactgggtgaaaaagggtgaacagcagaaccgggctgccctgttccagcaccgtcccccgggaccgtttccaatcatgggaccagaggaagagggagattcggctgccatcacggaggacgaagccgtgctcgtcctgggg

SEQ ID NO: 18038 - DNA, 1218 bp, synthetic construct
  misc_feature 1..1218: note = source = /note="Description of Artificial Sequence: Synthetic coding sequence"
  source 1..1218: mol_type = other DNA
atgactctggacgtgggaccagaagatgagttaccggattgggccgctgcgaaagagttctatcagaaatatgaccctaaggatgtgataggtagaggggtgtctagcgtggtccgaagatgcgtccaccgcgctactggacatgaattcgctgtgaagattatggaggttacagccgaaaggctgtccccagagcagctggaggaagttagggaggccactcgtcgagaaacgcatatccttaggcaagtcgctggccaccctcacatcattaccctgatcgactcttacgagtctagttctttcatgtttctcgtgtttgacctgatgcggaagggcgaactgttcgattaccttacggaaaaagtcgccctctcagaaaaggagacacggtctattatgaggagtctcctggaggcagtatccttcctgcatgctaacaacatcgttcatcgcgacctgaaacctgaaaatatactgctggatgacaacatgcagatcaggttaagcgacttcgggttcagttgtcacttggaaccaggtgagaaacttagagagctttgtggaacaccaggttatctcgcacccgagatcctgaagtgctccatggatgagactcatcctggttacggcaaggaggtggacctatgggcatgtggggtgatccttttcaccctgctggctggctctccccccttttggcacagaagacagatcctgatgttgcggatgatcatggaagggcaataccagttctcctctcctgagtgggatgaccggagctctacagtaaaagacctaatttcaagactcctgcaggtagatccagaggctagactgacagcagagcaagctctgcagcatccattcttcgaacgctgtgaggggtcacaaccctggaatctgacccctaggcagcgttttcgggtggcagtgtggactgtgctggctgctgggcgggtcgctctgtccacccaccgggtaaggcccctgactaagaacgccctgttacgggacccttacgccttgcgttctgtacggcatcttattgacaattgtgcattcagactgtacggtcactgggtcaagaagggtgagcagcagaatcgcgcagctctgttccagcaccggcccccgggacctttccccattatgggtcctgaagaggagggcgactctgccgcgatcacggaggacgaggcggtcctggtcctcggt

SEQ ID NO: 18039 - DNA, 1218 bp, synthetic construct
  misc_feature 1..1218: note = source = /note="Description of Artificial Sequence: Synthetic coding sequence"
  source 1..1218: mol_type = other DNA
atgacactcgacgtcggtccggaggatgagttaccggattgggccgcagcaaaagagttctatcaaaagtacgatccaaaagatgttatcggcaggggggtcagctctgtcgtgcgccggtgtgtccaccgggcgacagggcacgaattcgccgttaagatcatggaagtcaccgcagagcggctctccccggagcagctcgaggaggttcgggaagccacacggcgcgaaacgcatatcttacggcaggttgccggccatccccacatcatcactttgatcgacagctatgagtcatctagttttatgttcctggtgttcgacctcatgcgaaagggagaactgttcgactatttgaccgaaaaagttgctctgtcagaaaaagagacgcggtccattatgcggagcctgttagaagccgtgagctttctgcatgctaacaatattgtccacagagacctaaagccagagaacatcttgctggacgacaacatgcaaatcagattgtcagatttcggtttcagttgtcacctggagccaggagagaagctcagggaattgtgtgggacccctggttatttagcccccgagattctgaagtgctctatggatgagacccatcctggatacggcaaggaggtggacttgtgggcatgtggcgtaatactcttcaccctgctagctggttctcctcccttctggcacaggcggcagatcctgatgctacggatgattatggaaggacagtaccagttttcctcacctgagtgggacgaccgaagtagtaccgtgaaagacctgatttcccgtctgttacaggtagacccagaagcacgcctcaccgccgaacaggctttgcagcacccgttcttcgagcggtgcgagggctctcaaccctggaacctcaccccgagacaacgttttagggttgccgtatggactgtcctagctgccgggcgtgtcgccctatccacacatcgcgtaagaccgctgactaagaacgcgttgctccgagacccttacgcgctcaggagcgtgcgccatctcatagataactgtgcttttagattgtacggccactgggttaagaagggagagcagcagaatagggctgcactcttccaacacagaccgcctggaccgttcccaattatgggccctgaagaagagggtgattccgccgcaatcacggaggatgaggccgttctggtccttggc

SEQ ID NO: 18040 - DNA, 1218 bp, synthetic construct
  misc_feature 1..1218: note = source = /note="Description of Artificial Sequence: Synthetic coding sequence"
  source 1..1218: mol_type = other DNA
atgactcttgacgtgggcccagaggatgaactcccagactgggccgccgctaaagagttctaccagaagtatgaccccaaggacgtgatcgggcgcggagtgtctagcgttgttaggagatgcgtgcaccgggccaccggccatgagttcgccgtgaagatcatggaagttactgcggagcgtctctcgccggagcagttggaagaagtccgggaggctacccggcgggagacgcacatcttacggcaggtggcaggccatccccacataatcacactaattgacagttacgagagcagttcgtttatgttccttgtgttcgacctgatgcggaaaggggagttattcgattacttgactgagaaagtggcgttgtcggagaaggagacaaggtccattatgaggagcctgctcgaagctgtgagcttcctgcacgccaacaatatcgtgcaccgagatctcaagcctgaaaatatactgctggatgacaacatgcaaattaggctcagtgatttcggcttcagctgtcacctggagccgggtgagaaacttcgggagttatgcggcacccccggttaccttgcccccgagatcctgaagtgttctatggacgaaacacaccctggttacggaaaggaggttgacctctgggcctgcggggtgatcctgtttacgcttctggccgggtctccaccattttggcaccggcgccagatacttatgttgcggatgattatggaaggccagtatcagttctcaagcccggagtgggacgaccgttcctctaccgtgaaggacttgatctcacggttgctgcaggtggatcctgaggcgcgcctgacagcggaacaggcccttcagcatccctttttcgaacggtgcgagggctcacaaccttggaacctgaccccccgccagcgctttagagtagcagtgtggactgtcctagcagcaggacgggtcgctctctcgacacatcgggttaggcccctgaccaaaaatgccttactacgagatccctatgcactccggtcagtcagacacttaatagacaactgcgccttccggctgtatggccattgggtaaagaagggtgagcagcagaacagggccgctttgtttcagcatcggccaccgggtcccttcccaatcatgggacccgaagaggagggtgactccgccgccatcaccgaggatgaggccgttttggtgcttggt

SEQ ID NO: 18041 - DNA, 1218 bp, synthetic construct
  misc_feature 1..1218: note = source = /note="Description of Artificial Sequence: Synthetic coding sequence"
  source 1..1218: mol_type = other DNA
atgactctggatgtgggtccagaagatgagctgccagactgggcagcagcaaaagaattctaccaaaagtacgaccccaaagatgtgataggccgcggggtgtcgtccgtcgtccgacggtgtgtccaccgtgcaactggtcatgaatttgctgtgaagattatggaagtcacggcagagagactttcaccagaacagcttgaggaagtcagagaggctacgagacgtgaaacccatattctgaggcaggtggcgggccatccacacattatcaccctcatcgacagctacgaatcgtcctccttcatgtttcttgtgtttgatttgatgcgaaaaggcgaactttttgactacctgactgaaaaggttgccctgtcggagaaagagactcggagcattatgagatccctcttggaagctgtctcgttccttcatgccaataacatcgtgcatcgcgatttgaaacccgagaatatactcctggatgataacatgcagatcaggttgtcagactttgggttttcatgtcacctggaacctggtgaaaagctgcgcgagctgtgcgggacccctggatacctcgcgccggaaattctgaagtgctcgatggacgaaactcatcctggttatgggaaggaggttgatctttgggcgtgtggagtcattctgtttacccttcttgctgggtcgccccctttttggcataggcggcaaatacttatgttgcgtatgatcatggaaggccaataccaattctctagccctgaatgggacgatcgctcaagcaccgtcaaggatctgatctcgcgtctgctgcaggtggatcccgaggcaaggttgaccgccgaacaggcactgcaacaccccttctttgaacgttgtgaaggaagccaaccctggaaccttaccccccgccagcggttccgcgtggctgtgtggacggttctcgcagcaggtagagtcgcgctttccacgcatcgggtcagaccgcttaccaagaacgcacttcttagagatccttacgctctgcgttcggtgagacatcttattgataactgtgccttccgactttacggtcactgggtgaaaaaaggcgaacaacaaaatagagcagcactcttccagcacagaccacctggtccatttccgattatgggccccgaagaggagggagatagcgcagcaatcactgaagatgaggcggtgctggtgcttgga

SEQ ID NO: 18042 - DNA, 1218 bp, synthetic construct
  misc_feature 1..1218: note = source = /note="Description of Artificial Sequence: Synthetic coding sequence"
  source 1..1218: mol_type = other DNA
atgactcttgacgtggggccagaggacgagcttccggattgggcagccgcaaaggaattttaccagaagtatgatcccaaagatgtcatcgggcgcggcgtgtccagtgtggtgaggcgatgtgttcacagggctacgggacatgagtttgcagtaaagattatggaagtgacagccgagcgcttgagtcccgagcagctcgaagaagttcgtgaggccacccggagggaaacccacatcctgcggcaggttgctggccaccctcatataatcacactgatcgacagttacgagagctcctcattcatgtttcttgtttttgatctgatgcgcaaaggagaattgttcgattacttgactgaaaaggtcgccctgagtgaaaaggaaacaaggtcaatcatgcgcagtctgcttgaagccgtttcattcctgcatgccaacaatatcgtgcaccgtgacctgaaaccggaaaacatcctgctggatgacaacatgcagatacgactcagtgatttcggctttagctgccacttagagccaggtgagaagctgcgggagttgtgcggcactcccggctacctagcgcccgagattttgaaatgttccatggacgaaacacatccagggtacggcaaagaagtggatctgtgggcttgtggcgtaatcctgttcacattgctggccgggagtccaccattctggcacaggcgccagatattgatgctccgcatgatcatggagggtcagtatcaatttagtagccccgagtgggacgatagatcatccacagttaaggatttgattagccggttactacaggtggaccctgaggcccgtctgacagcggagcaggctcttcagcaccccttctttgagaggtgcgaggggtctcagccatggaacctaacgcctcgccaaagattcagggttgcagtctggactgtgctagccgccgggcgggtagcactgagcactcacagggtgagacctctgaccaaaaacgcactgcttagagatccctatgccctgagatccgtgcgacacctgattgataattgtgcttttcgtctgtatggccattgggtaaaaaagggagagcagcagaatcgagcggccctcttccaacatcggccgcctggacccttcccgataatgggtccggaggaggagggagactccgctgccatcactgaggatgaggcggttctggttttgggc

SEQ ID NO: 18043 - DNA, 1218 bp, synthetic construct
  misc_feature 1..1218: note = source = /note="Description of Artificial Sequence: Synthetic coding sequence"
  source 1..1218: mol_type = other DNA
atgaccctggatgtgggtccagaggatgagctgcccgattgggcagcagcaaaagagttctaccagaaatacgatcctaaagatgtgataggtagaggagtgtcaagcgtcgttcgtaggtgtgtgcatagggcgactgggcatgaatttgcagtgaagataatggaagtgaccgccgagcgactgtcaccagaacaacttgaagaggtgagagaagcaactcggcgcgagactcatattctcagacaagtggctggacacccgcacatcattacccttattgatagctacgaatcctcgtcattcatgttccttgtgtttgacctgatgcggaagggggaactttttgattacctgaccgagaaggttgcactcagcgagaaagaaacccgcagcatcatgcggagcctcttggaggcagtgagcttccttcacgcaaacaatattgtgcaccgagatctgaagcccgaaaacatcctgctcgatgacaacatgcaaatcagacttagcgattttggattttcctgtcaccttgaaccgggtgaaaagctgagagaactgtgtgggacgcccggttacctggctcctgaaattctgaaatgcagcatggacgaaacccatccaggatacggaaaagaagtcgatctttgggcctgtggtgtgattctcttcaccctgcttgccggatccccacccttttggcatagaaggcagattctgatgctcaggatgatcatggaagggcaataccaattcagctcgcctgaatgggatgacaggtcgtcaactgtcaaggacctgattagcagactgttgcaagtcgaccctgaggcaaggctgaccgccgaacaggcacttcaacatccttttttcgaacggtgtgaaggctcccaaccttggaacctgacccctaggcagagatttcgtgtggcagtgtggactgtgcttgccgcaggaagagtcgcactgtcaacccaccgggtcagacctctcactaagaacgcacttctgcgtgatccttatgccctccgttcggtccggcatcttattgataactgcgccttccggctttacggacattgggtcaagaaaggtgaacagcagaatagagccgcactgtttcagcatcgtccaccaggcccattccctatcatgggccccgaggaagagggtgactcggcagccataactgaggatgaagccgtgttggtgctgggt

SEQ ID NO: 18044 - DNA, 1218 bp, synthetic construct
  misc_feature 1..1218: note = source = /note="Description of Artificial Sequence: Synthetic coding sequence"
  source 1..1218: mol_type = other DNA
atgactctcgacgttggacctgaagatgaactccctgactgggccgcagcaaaggaattctaccagaaatatgatcccaaagatgttatcgggcggggggtgtcttccgtcgttcgtaggtgtgtgcatagggccactgggcatgagtttgctgttaaaatcatggaggtaactgcagaaagactctctcccgaacagctggaagaagttcgggaagccactcgaagggaaacacacattttaaggcaggttgctggacacccccatatcatcactcttatagattcgtacgagtcatcatcttttatgtttctcgtgttcgatcttatgcggaagggggaactatttgattatctaacagaaaaagtagccctctctgaaaaagaaacacgatcaattatgcgatctctcctggaggcagtttcatttttacatgctaacaacattgtgcatagagatctcaaacccgaaaacatcctacttgacgataatatgcaaatacgccttagtgattttggattctcatgccacctcgaaccaggggaaaaactccgggaactctgcggaactcctggatatctggctcccgaaatcctgaagtgctccatggatgaaacacaccctggatatgggaaggaagttgatctgtgggcttgtggggtcatcctgttcactcttctcgcgggatcaccccccttctggcatcggaggcagatactaatgctccgaatgattatggaggggcagtatcagttttcttcaccagaatgggatgatcgaagtagtactgtgaaagacctgatttccaggctgctccaggtggatcctgaagcacgattaacagccgaacaggccctacagcatcccttttttgaaagatgcgaaggaagtcagccttggaatctcactccacggcagcggtttcgggtcgcagtgtggactgtgcttgctgccgggcgggtcgcgctcagtacacatagggtccggcctcttactaagaacgcactccttagagacccctacgcgttgaggagtgtcaggcatctcatagataattgtgcatttagactctatggacactgggtgaaaaaaggggagcaacagaatcgggctgccttatttcagcataggccacctggacctttccctataatggggcctgaagaggaaggagattccgctgcaatcactgaggacgaagcagtccttgtgctcgga

SEQ ID NO: 18045 - DNA, 1218 bp, synthetic construct
  misc_feature 1..1218: note = source = /note="Description of Artificial Sequence: Synthetic coding sequence"
  source 1..1218: mol_type = other DNA
atgacccttgatgtcggcccggaagatgaactgcctgattgggcagcggctaaggagttttaccaaaagtacgatcctaaggatgtcattggcagaggtgtgtctagcgtagtgagaaggtgtgtgcacagggcaaccggccacgaattcgcagtgaagattatggaagtcactgccgaaagactgtcacctgagcagctggaagaggttcgggaagcaaccagaagagaaacccatattctgaggcaagtggcaggacacccacatatcataacccttattgattcctacgaatcgtcgagctttatgtttttggtgtttgatctcatgagaaagggtgaactctttgattacctgacggagaaagtggccctgtccgagaaggaaacccgctcaatcatgcgctcgctgctcgaagcagtgtcctttcttcacgctaataacatcgttcacagagatctgaagccagaaaacattctgcttgacgataacatgcaaataagactgtcggattttgggttttcgtgtcacctggaacctggagaaaagttgcgggagctgtgtggaactcctggatacctggccccagaaatactgaagtgctccatggacgaaactcacccaggttacggcaaagaggtcgatctgtgggcatgcggggtcatactctttactcttttggcaggatcccctcctttttggcatagacgccagattcttatgcttcgaatgatcatggaaggacagtaccagtttagctccccagaatgggacgatcgctcgtcgaccgtgaaggacctgatctctcggcttctgcaagtcgatccagaggcacggctgaccgccgaacaggccctccaacatcccttttttgaacgatgtgagggaagccaaccatggaatctcactcccagacagcgcttcagagtggcggtgtggaccgtcttggctgccggcagagtcgctctgagcacccatcgggtcagaccacttaccaagaacgcactgcttcgtgatccttacgcccttaggtccgtgcgtcatctgatcgacaactgtgcattccgcctgtacggccattgggtgaagaagggggaacagcaaaacagggcagcactgtttcaacaccggccccctggacctttccctatcatggggcccgaagaagagggagatagcgccgctattactgaggatgaagcagtgctcgtcctgggc

SEQ ID NO: 18046 - DNA, 3705 bp, synthetic construct
  misc_feature 1..3705: note = source = /note="Description of Artificial Sequence: Synthetic coding sequence"
  source 1..3705: mol_type = other DNA
atgcgaagtcggtctaacagtggggtccggttggatgggtatgctaggctggttcagcagacaatcctttgttatcagaatccagttactgggctactgagtgcctcacatgaacagaaagatgcatgggtcagggataacatctactctatattagccgtgtgggggctcggaatggcttatcggaaaaatgctgacagggatgaagataaagccaaagcctatgaactggaacaaaatgtggtcaaactcatgcgagggctcctgcagtgtatgatgcggcaggtggccaaagtggaaaaattcaaacacacacagtctacaaaggattcactacacgccaaatataatacagcaacgtgtggaacagtagtgggggatgatcagtgggggcatctccaggtggacgctactagtttgttcttactatttctggctcagatgactgcgtccgggctccgaattatctttacacttgatgaagtggcattcatccagaacctggtgttttatattgaggcagcctataaggtagctgattatgggatgtgggaaagaggggataaaacaaatcaggggatcccggagctcaatgcctcatccgttggaatggcaaaagctgcactggaagctatcgatgaactggatctctttggagcccacggagggcggaagtcagttatacatgtccttcccgatgaggtggaacactgccaatctatcctcttctcaatgttaccaagggcatccacatccaaagaaattgatgctgggctccttagtatcatctcctttcctgccttcgctgttgaagacgtcaacctcgtcaacgttacaaaaaatgaaataatttctaaactgcagggacggtacgggtgctgtaggttcctccgcgatgggtataagactcccagagaggacccgaaccggctgcactacgatcctgcagaactaaaattatttgagaatattgagtgcgaatggcctgtgttctggacatattttattattgatggagtgttctccggggacgccgtgcaggtgcaggaatatagagaagccctcgaaggaatccttataagaggaaaaaatggaattcgtctcgtgcccgaactctatgctgtgccacctaataaagtggatgaagaatataagaacccccacacagttgatagagtacctatgggaaaagtaccacacctttggggacagtcgctttatatcctatcgagtctcctcgctgaagggttccttgctgctggagaaatagatccgctcaaccggagattctccacttccgtaaagcctgatgtggttgtgcaggttactgtgctcgcagagaataatcatattaaagatctgctccgaaaacatggggtaaacgtccagagtatcgctgatatccacccaatacaggtacagcctgggagaatactttcccatatctacgctaaactcggaagaaacaagaacatgaacctgtctgggcggccttatcgacatattggagtgcttgggacatctaaattatacgtgatacggaaccagatctttacattcacaccacagttcactgatcagcatcatttttacctagcactggacaatgagatgatcgtggaaatgctgcgtattgaactcgcctatctctgtacatgttggcggatgacaggaaggccaacactcacttttccgatctctaggactatgctgacaaacgacggatctgatatacattctgcagtcttgtctactattagaaagctagaagatggatactttgggggagctagagtgaaattaggaaacctgtcagaattcttgacaacatctttttatacgtatctgactttccttgatcctgattgtgatgaaaaactgtttgataatgcctccgaagggacattttcccccgacagtgattcagatcttgtggggtatctggaagatacatgtaatcaggaatcccaggatgaactcgatcactacataaatcacttattgcagtcaacatccctccgatcctatctgccaccactatgtaagaatacagaagatcggcacgtgttttccgctatacactctactagagatatcctatcagtcatggccaaagcgaaaggactcgaagtaccctttgtacctatgacactccctactaaggtactttctgctcatcgcaaatctctaaacctcgtggattcaccccagcctctgcttgaaaaagtgcccgaaagtgactttcagtggccccgcgatgatcacggagatgtcgattgtgagaaattagttgaacagctgaaagactgttcaaatctccaggaccaggctgatatcctatacatcctgtacgtaatcaaaggaccctcttgggatacaaacctgtcaggacagcacggggttacagtccagaacctgctcggagaactctatggaaaagctgggctgaaccaggaatgggggctcattcgctatatatccggactcctgcggaaaaaagttgaagttctagctgaagcgtgcacagatctactatctcatcagaaacagcttacagtgggacttccacccgaacccagggagaagattatatctgctcccttacctcccgaagaattgactaaactaatatacgaagcatcaggacaagatatttctatcgccgtgctcactcaggaaatagttgtgtatctggctatgtatgttcgagctcagccttccctcttcgtcgaaatgctgaggctccggatcggactgatcatccaggtcatggcaacggagctcgctagatccctgaactgctctggagaagaagcttcagagagtttaatgaacctatctccattcgatatgaaaaacctgctccatcatatactctcaggaaaagaatttggggtggaacgcagtgtacgacctatacacagttcaacaagtagtccaactatatccatccacgaagtcgggcatacaggagtgactaaaacagaaaggtcaggaataaatcggctccggtctgaaatgaaacagatgactcgccgcttctctgctgatgaacagttttttagtgtcggacaggccgccagttcttccgcccactcttcaaaatcggctcgatcttctacaccttcttccccaacaggaacttcatcatctgattcgggagggcaccatataggatggggagaacgacagggacagtggctgagaaggaggcgcttggatggggctataaatagagtgcccgtgggattttatcagagagtgtggaaaattctgcagaaatgccatgggctatctatcgatgggtacgtactaccctccagtacaactcgagagatgactccccacgaaattaaattcgctgtccatgtggaatctgtgctcaaccgcgtaccacagcctgaatatcggcagctcctagtggaagcaataatggtacttactttattatcagatactgagatgacatcgataggagggatcattcacgtcgatcaaatcgttcagatggcctcacagcttttcctgcaggatcaggtgtctatcggagccatggatacgctagaaaaagatcaggccactgggatctgccactttttctacgattctgctccatctggagcgtacgggacaatgacatatctcactagggccgtggccagttacctgcaggaactgctccccaattctgggtgtcaaatgcag

SEQ ID NO: 18047 - DNA, 3705 bp, synthetic construct
  misc_feature 1..3705: note = source = /note="Description of Artificial Sequence: Synthetic coding sequence"
  source 1..3705: mol_type = other DNA
atgcgatcacggtccaactcaggtgtccggcttgacggctacgctcgcctcgttcagcaaactatcctctgctaccaaaaccctgtgactgggctcctgtcggcctcacatgagcagaaggacgcctgggtgagggacaatatctacagcatcctggccgtgtggggactgggaatggcatacaggaagaatgcagacagggacgaggacaaggctaaggcctacgaactggaacagaacgtggtcaagctgatgagaggactcctgcaatgcatgatgaggcaggtggccaaggtggagaagttcaagcatactcagtccaccaaagactccttgcatgccaagtacaacactgcgacgtgcggtacggtggtgggcgatgatcagtgggggcaccttcaagtggacgcgacctcattgttcctgcttttcctggcacaaatgactgcttcggggctgcgcataatcttcaccctggacgaagtggcttttatccaaaatctcgtgttctacatcgaagccgcatacaaggtcgctgactacggaatgtgggaacgtggcgacaagactaaccagggaatcccggagctcaacgcctcatccgttggtatggcgaaggctgcactcgaggccattgatgagcttgatctgttcggtgcacatggtggtcggaaatcagtgatccacgtcctgccggatgaagtcgaacattgtcagtcgattctgttctcaatgctgccgcgggcttcaacctcgaaggagatcgatgcagggctgctctccatcatatcatttccggccttcgccgtcgaggacgtgaacctggtgaacgtcaccaagaacgagattatctccaagttgcagggccgctacggatgttgcaggttcttgcgagacggttacaagacgccgagagaagatccgaaccggcttcactatgatcccgccgaactgaagctgttcgagaatatcgaatgcgaatggccggtcttttggacctacttcatcatcgatggagtgttttctggagacgcggtgcaggtgcaggaataccgggaggcgctggaaggaatcctgatcagaggcaagaatggaattagattggtgccggaactgtacgctgtgccaccgaataaggtcgacgaggagtacaaaaatccacatactgtcgatcgcgtcccaatggggaaagtccctcacctttggggtcagagcctgtatatcctttcgagccttctcgcggaaggattcctcgctgccggagagatcgacccattgaaccggagattttccacttccgtgaagccggatgtggtggtccaagtcactgtgcttgctgagaataatcatatcaaagatctgttgcgcaaacacggggtgaacgtgcaatcgatcgccgacatccatccgatccaggtccagccaggccgaatcttgagccatatctacgcaaagctcgggcggaataagaatatgaacctctcgggtcgcccataccgccatattggagtgctgggcaccagcaaactctacgtgatccgaaaccaaatctttaccttcacgccacaatttactgaccaacatcacttttacttggccctggataacgaaatgatcgtggaaatgctcagaattgaacttgcctacctgtgtacttgctggaggatgaccgggcgcccgaccttgactttcccgatctcgcgcactatgctgaccaacgatggaagcgatatccattccgccgtcttgagcaccatcagaaagctggaagatggatacttcggaggggcccgcgtcaagctgggaaacttgtccgaattcctgaccacttcgttctacacctaccttactttcctcgacccggactgcgacgaaaagctgttcgataacgcgtccgagggaactttctcaccggactcggactccgatcttgtgggctacctcgaagatacttgtaaccaagagtcccaagatgagctggatcattacattaaccaccttctccagtcaaccagcctgaggtcatacctgccgccgctgtgcaagaataccgaggaccgccacgtgttctcggcaatccatagcactcgggacatcctgagcgtgatggccaaagcaaaaggattggaggtcccgttcgtgccgatgactctgcccacgaaggtcctctcagcacaccgcaaaagccttaatctcgtggactcgccgcagcctctgctcgagaaggtcccagaatctgacttccagtggccacgggatgaccacggagatgtggattgcgaaaaactggtggaacagctgaaggactgtagcaacctccaagaccaggcggacatcctgtacatcctttatgtgatcaaaggaccgagctgggataccaacttgtcgggacaacacggagtcaccgtgcagaacctcttgggcgaactctacggcaaggccggtctgaatcaagaatggggactgatcagatatatcagcggcctccttcgaaagaaggtggaagtcctggccgaggcgtgtactgatttgctgtcccaccagaaacagctcacggtgggcctgccgcccgagcctcgcgagaaaatcatctccgcgccgctcccacccgaagagcttaccaaactgatctacgaggcttcgggacaggatatttcaattgctgtcctgacccaggagattgtggtgtaccttgccatgtacgtccgcgcccagccgtccctgttcgtcgaaatgctccgcctgcgcatcggactgatcatccaggtgatggcgaccgaacttgcgagatccctcaactgcagcggagaggaagccagcgaaagcctgatgaacctgtcgccgttcgatatgaagaaccttttgcaccatatcttgtccggtaaagagtttggtgtggaacggtcggtgcgccccatccactcttcaacttcgtccccaactatctccatccacgaagtgggacataccggagtgactaagaccgagcgctccgggatcaaccgcctgagatcggagatgaagcaaatgacccggcgcttttccgccgacgagcagtttttctcggtcggacaggcagctagcagctccgcccattcttcgaagtcagccaggtcatcgacccctagcagccccactggaacctcctcctcggactcgggaggacaccacatcggctggggtgaacgccaaggccagtggctgcgacggcggaggttggacggagccatcaatcgggtgccggtcggattctaccagcgggtctggaagatccttcaaaagtgccacggcctgtcgatcgacggctacgttctgccttcttcaaccacccgcgaaatgactccgcacgagataaagtttgctgtccacgtggagtccgttctcaaccgggttccccagccagaatacagacagttgcttgtggaagcaatcatggtgctcacgttgttgagcgacaccgagatgacttcaatcggaggaatcatccacgtggaccagattgtgcagatggcttcccaactgttccttcaagaccaggtgtcgatcggagcaatggatacgttggaaaaagaccaggcaaccggaatctgccacttcttctacgatagcgcaccctccggagcgtacgggaccatgacctacctgactagagccgtggctagctacctccaagaactgctgcctaactcgggctgccagatgcag

SEQ ID NO: 18048 - DNA, 3705 bp, synthetic construct
  misc_feature 1..3705: note = source = /note="Description of Artificial Sequence: Synthetic coding sequence"
  source 1..3705: mol_type = other DNA
atgcgctcccggtcaaattcgggagtgagactcgacggatacgctcggctcgtccaacagactattctctgctaccagaatcctgtgaccgggttgctgtctgcgtcacacgaacagaaagacgcctgggtccgggataacatctactctatcctggcggtgtggggacttggaatggcctacagaaagaacgcggatagggatgaagataaggccaaggcctacgagctggaacaaaacgtcgtcaagctgatgcggggccttctccaatgcatgatgcggcaggtggccaaggtggagaagttcaaacatacccaatcaaccaaggactcgctccatgccaagtacaatactgctacctgtggaactgtagtcggagatgaccagtggggccatctccaggtggacgccacttcgctcttcctgctgttcctcgcacagatgactgcctcgggactcagaattatctttactctggatgaagtggccttcatccagaacctggtgttttacatcgaggcggcgtacaaggtggctgactacggaatgtgggaacgcggagacaaaactaatcaaggaatccccgaactcaacgcgtcctccgtcggaatggcgaaggctgcccttgaggctatcgatgagctcgatctgttcggagcgcacggcggccggaagtccgtgatccacgtactgcctgatgaagtcgagcactgccaaagcattctcttctctatgctccccagagcctccacttcgaaggagattgacgccggcctgttgtcgatcatcagctttccggccttcgccgtggaggacgtgaatctcgtgaacgtgaccaagaacgagatcatttcgaaactccaggggcgatatggatgctgccgcttcctgcgcgacggctacaagactcctcgcgaagatccgaacaggctgcattacgacccggcagaactcaaactgttcgagaatatcgaatgcgagtggcccgtgttctggacctacttcatcatcgatggcgttttttcgggtgatgccgtgcaagtccaggagtacagagaggcgctcgaaggcatcctcatccggggaaaaaacggaatcaggctggtgcccgagctctacgcggtcccgccaaataaggtggatgaagaatacaagaacccccacactgtcgaccgcgtgccaatgggaaaggtgccacatctgtggggacagagcctctacatcttgtccagtctgctggcagaaggattcctcgcggctggagagattgatccgctcaaccggcgcttcagcaccagcgtgaagccagatgtggtggtgcaggtgactgtgctggcagagaacaatcacataaaagacctgttgaggaagcacggtgtgaatgtgcagtcgatcgccgatatccacccgatccaggtgcagccaggacggatactgtcccacatctacgcgaaactcggacggaataagaacatgaatctgtcgggtcggccatatcgccacatcggagtcctcgggacctccaagctctacgtcattagaaatcagatcttcaccttcactccacagttcacggatcaacaccacttttaccttgccctggataacgaaatgattgttgaaatgctgcgaattgaactggcctacctgtgcacttgctggcgcatgactggccggccgaccctcaccttccccatctcgcgcactatgcttacgaacgacggatctgacatccactccgctgttctgtctactatcaggaaattggaggacggttacttcggcggcgcacgggtcaagctcggaaacctctcggagtttctgactacttccttttacacttatctgactttcttggacccggactgtgacgaaaagctgttcgacaacgcaagcgagggtaccttctcccctgattcggactccgatctggtgggatacctcgaggacacctgcaaccaagaatcacaagacgaactggaccattacatcaaccatctgctccagagcacctcattgcgatcgtaccttccgcccctgtgcaaaaacaccgaagatcggcacgtttttagcgcgatccactcgactcgcgacatcctgtccgtgatggccaaggcgaaagggctcgaagtgcctttcgtgccaatgaccctgccaacgaaggtcctgtccgcccaccgcaagagcctgaacctggtggacagcccgcagccactgctggaaaaggtgccggagtcggatttccagtggccccgcgatgaccatggagacgtggactgtgaaaagctggtggaacaacttaaggattgctcaaatcttcaggatcaggccgacatcttgtacatcctctacgtgatcaaaggaccatcctgggataccaacctgtcaggacaacacggagtgaccgtgcaaaacctcctgggcgaactctacggcaaggccgggctcaaccaagagtggggactgatcagatacatctcaggactgctccggaagaaggtcgaggtgctggccgaagcctgtaccgacctgttgtcccatcagaaacagctcaccgtcggactgccgccagagccgcgggagaaaatcatctcggcgccactccctcctgaagagctgacgaagctcatctacgaggcctcagggcaagacattagcattgccgtgctgacccaggagatcgtggtgtatctggctatgtacgtcagagcacagccgtcactgtttgtagaaatgctcaggctgcgcatcggtcttatcatccaagtcatggctaccgagctcgctcgctcactgaattgctcgggagaagaggcaagcgaatctcttatgaatctctcgccttttgacatgaagaacctgctgcatcacatcctgtcaggcaaggaattcggagtggaaagatcggtccggccaatccactcttcgaccagctccccgactatctctatccatgaagtaggccatactggagtgaccaaaactgaacggtccggcatcaatagactgagatcggaaatgaagcagatgaccaggcgcttctcggcagacgaacagtttttctcggtgggtcaggcagcttcctccagcgcacactccagcaaaagcgcgcggtccagcaccccctcatcccccacgggcactagctcaagcgactccggaggtcaccatatcggctggggtgagcgccaaggacagtggctcagaaggcgccgcctcgacggagcgatcaaccgcgtcccggtcggcttctaccagcgagtctggaagatcttgcagaagtgtcacggccttagtatagacggatatgtccttccatcatcgaccaccagggagatgacgccgcacgaaatcaaattcgccgtgcacgtggagtccgtgctgaatcgcgtcccacagcccgagtacaggcaattgcttgtcgaagccatcatggtgctcactctgctgtcagacaccgagatgacgtctatcggggggattatacatgtggaccaaatcgtgcagatggcctcccagcttttcttgcaggaccaggtgagcatcggagccatggataccctggaaaaggaccaggctactggcatctgtcatttcttttacgacagcgctccctcgggcgcttacggaaccatgacctacctgactcgcgctgtcgcatcgtaccttcaggaactgctgccgaactcgggatgccaaatgcaa

SEQ ID NO: 18049 - DNA, 3705 bp, synthetic construct
  misc_feature 1..3705: note = source = /note="Description of Artificial Sequence: Synthetic coding sequence"
  source 1..3705: mol_type = other DNA
atgcgctcccgatccaactctggcgtcagactcgacggctatgctcgcctcgtccaacagactattctttgttatcagaaccccgttacgggactcctgtctgcttctcatgagcaaaaggacgcctgggtccgagacaacatttactccatcttggcggtgtggggcctgggaatggcctaccgcaagaatgcagatcgagacgaagataaggcgaaggcctacgagctggagcagaacgtcgttaagctgatgcgcggacttcttcaatgcatgatgcgccaggtggctaaggtcgagaagtttaaacacacccagtccaccaaggactcattgcacgccaagtacaacacggcgacgtgcggcacggtcgtcggcgatgaccagtggggtcacctccaggtagatgctacttccctcttcttgttattcttggcacaaatgaccgcgagcggactacgtatcatcttcactctcgacgaggtggcgttcattcagaacctggtgttctacatcgaggcagcttacaaggtcgctgactacggaatgtgggagcggggagataagactaaccagggcattcccgagttgaatgcttcatccgtcggcatggctaaggccgctctggaggcaatcgacgagttggacctttttggggcccacggcggccgcaagagtgttatccacgtcctgcctgacgaagtagagcactgccagagcatcttgttctcaatgctgcctcgcgcctccactagtaaggagatcgacgctggactgctgagcatcatttcattccctgctttcgcggtggaggatgtgaatctggttaatgtcaccaagaacgagatcatttccaagctccagggccgctatggctgctgccgtttcctgagggatggatacaagaccccgcgtgaagatcctaaccggctccactatgatccggcagaattgaagctatttgagaacatcgagtgtgaatggcccgttttctggacatacttcatcatcgacggagtgttttcgggtgatgctgtccaggttcaggagtacagagaagctttggagggaatcctgatccgtggaaagaacggcatccgcctggtgcccgaactctatgctgttccaccgaataaggtcgatgaggagtataagaaccctcatacggtggatcgcgtccccatgggtaaggtgccccatctttggggtcagtccctctacatcctgtcgtccctgctggcggagggtttccttgccgctggcgagatcgaccccttgaatcgccgtttttcaacctccgtgaagccggatgtagtcgtgcaggttaccgttctggcggagaacaatcatatcaaggatctgctgaggaagcacggagtcaacgttcagtccatagcagatatccatcctattcaggtgcagcccggacgtattctgtcccacatctacgccaagctgggccgtaacaagaacatgaacctcagcggccgcccctaccgccacatcggcgtcctcggcacgtcgaagttgtacgttattcgcaaccagatattcactttcactccccaatttacggatcagcaccacttttacttagccctagataacgagatgatcgttgagatgctgcgcatcgagctggcctacctctgcacttgctggcggatgactggacgtccgaccctcacctttccgatctcgcgcaccatgttgaccaacgatggttctgatatccactccgctgttctgtctaccattcggaagctggaggacggttattttggaggagcccgcgtaaagctgggtaacttgagtgaattcctcacaactagcttttacacttacctcacgttcttggatcctgattgcgacgagaagctgttcgacaatgcctcggagggtacattttcaccggattctgatagcgacttggtgggttatttggaggacacgtgcaaccaggagagccaagatgagctcgatcactacatcaatcatctcctccaaagcacctcgctccgctcgtacctcccccccctctgcaagaacaccgaagaccgacacgtgttctcggccatccactctactcgcgatattctctcggtcatggcaaaggctaaggggctggaagtgccattcgtccccatgactctccccaccaaggtgctctctgcgcaccggaagagtttaaacctggtcgatagcccccagcccctcctcgagaaagttccggagtcggatttccagtggcctcgagacgatcacggtgatgtggattgtgaaaagctcgttgagcagctcaaggattgctccaacctccaggaccaggcggatatcctctacatcctgtacgtaatcaagggtccttcctgggacaccaacctgagcggtcagcacggtgtcactgtccagaacctcctcggagagttatacggaaaggccggattgaaccaggagtggggactaattaggtacattagtggactgcttaggaagaaggttgaagtgcttgcggaggcctgcacggaccttctgagccaccagaaacagctcacggtgggcctcccccccgagccccgggaaaagatcatctcggcgcctctgccgccggaggaattgacgaagcttatttacgaagcttcgggtcaggacatctcgatagcggtcctcacgcaggagatcgtagtctacctggccatgtacgtccgtgcacagccgtccctctttgtcgagatgcttcggcttagaattggcttgataatccaagttatggccacagagctcgcgcgcagcctgaactgtagcggggaggaggccagcgagagcctcatgaacctgtccccctttgatatgaagaacctgttgcatcatatcctctccggtaaggagttcggtgttgagcggtccgttcggcccattcatagcagcaccagctcccctacaatctctattcacgaggtgggtcacaccggcgttacgaagacggagcgttccggaattaaccgcctccggtccgagatgaaacaaatgacgcggcgcttctccgccgatgagcagttcttctcggtgggacaggctgccagctcctcggcccattcctcgaagtccgcgagatccagcactccctcttcccccaccggcacctcctcgtcggattccgggggccaccatattggatggggagagagacagggacaatggcttcgccgtcgtagactggacggcgcaatcaaccgcgttcccgtcgggttctatcaacgtgtttggaagatcctacagaagtgccacgggctgtccattgacggctacgtgctgcccagctccactacgcgcgagatgaccccccacgaaatcaagttcgctgtgcatgtcgagtcggtcttgaatcgggttcctcagccggaataccgccaactgctggttgaggctattatggtcttgaccctactgagtgatactgagatgacctctatcggaggcataatccacgtggaccagatcgtccaaatggctagccaattgtttttgcaggatcaggtgtctatcggagcgatggataccctcgagaaggaccaagccaccggcatctgccacttcttctatgatagcgcacccagtggagcctatggcaccatgacataccttactcgcgccgtcgccagttacttgcaggagctcctgcctaacagcggttgccagatgcag

SEQ ID NO: 18050 - DNA, 3705 bp, synthetic construct
  misc_feature 1..3705: note = source = /note="Description of Artificial Sequence: Synthetic coding sequence"
  source 1..3705: mol_type = other DNA
atgcggagccgctcgaattcgggagtcaggctggacggatacgcgcgcctggtgcagcagaccatcctgtgctaccagaatccggtgaccgggcttctgtcagcctcacacgaacagaaggacgcgtgggtccgcgacaacatctactccatcttggcggtgtggggactggggatggcctaccggaagaatgccgatagagacgaggacaaggcgaaggcctatgagctggagcagaacgtggtgaagctcatgcggggtcttttgcagtgtatgatgcgccaggtggccaaggtcgagaaattcaagcacacccaatccactaaagactcgctccacgccaagtacaacaccgccacgtgtggcaccgtggttggagatgatcagtggggacacctgcaagtggatgcgacttctctgttcctcttgttcctggcccagatgaccgcatcaggactgcgaatcatcttcaccctggacgaagtggcattcattcagaatctggtgttctatatcgaagcggcttacaaggtggcagattacgggatgtgggaaagaggagacaagacgaaccagggcatcccggagttgaatgccagctcggtgggaatggcgaaagctgcgcttgaagccatcgatgaactggatctgttcggcgcccacggtggacgcaagtcggtgatccacgtgctgcccgatgaagtcgaacactgccagtcgattctcttctcgatgctcccgagggcctccacctcaaaagagatcgatgccggtttgctcagcatcattagctttccggccttcgccgtggaggatgtgaatctggtgaacgtcaccaagaacgaaatcatctcaaaactgcagggacgatacggatgttgtcgcttcttgcgcgacggctacaagactcctcgggaggatccgaacaggctgcattacgacccggcagagcttaaactgtttgagaacatcgaatgcgaatggccggtgttttggacttacttcatcatcgacggagtgttcagcggggatgcagtgcaagtgcaagaatacagagaagctctggagggaatcctgatccggggaaagaacggaatccggctcgtcccagagctgtacgccgtcccgccaaacaaagtggacgaggagtacaaaaacccgcacactgtcgatcgcgtgcctatgggtaaggtgccgcacctctggggtcaatcactctacattctgtcgagcttgctggctgaaggattcctggcagcaggagaaattgacccgttgaaccgccgcttctcgacctcggtgaagccagacgtcgtggtgcaagtgactgtgttggcagaaaacaatcacatcaaggatctcctcagaaaacatggcgtgaacgtgcaatccatcgcagatattcacccgatccaggtccagccaggccgcatcctgtcccatatctatgcgaagttggggagaaacaaaaacatgaacttgtccggtaggccgtacagacatattggagttctgggcacctcgaaactctacgtgatcagaaaccagatcttcacctttaccccgcagtttaccgatcagcaccatttctatctggccctggataacgagatgatcgtcgaaatgctgaggattgaactcgcgtacctgtgcacctgctggagaatgactggccgtccgacccttacgtttccgatttcacggactatgctcaccaacgacggttcagatatccatagcgctgtcttgtctactatccgaaaacttgaggacggatatttcggcggtgcccgagtgaaacttggaaacctgtcggagttccttactacgtccttctacacttacctcactttcctggatccagattgcgacgagaagctgttcgataatgccagcgaggggactttcagccctgattccgattcggacctcgtcgggtatctcgaagatacgtgcaaccaagagtctcaggatgaattggatcattacatcaatcacctgctgcaatcgacctccttgcggtcctacctgccgccgctctgcaagaatactgaggatcgccacgtgttttcagcgatacacagcacccgggacattctgagcgtgatggccaaagccaaagggctcgaagttccgtttgtcccgatgactttgccgactaaagtcttgtctgcacatagaaagtcgctgaatctggtggactcaccgcaaccgctgctggaaaaagtgccagaatcagacttccagtggccgcgggacgaccatggagatgtggattgtgaaaaactggtggaacagctgaaagattgcagcaatctgcaagaccaagcggacatcctgtatatcctgtacgtcatcaaaggaccgtcatgggacaccaatctcagcggacagcacggagtcaccgtccagaacctcctgggtgaactgtacgggaaggccggcctcaaccaggagtgggggctgatcagatacatctctgggttgcttagaaagaaggtcgaggttcttgctgaggcttgcactgatctgctgtcgcaccaaaaacaactgactgttggacttcccccggagccgcgcgagaagatcatctcagccccgctccctccggaggagctgactaaactgatttacgaagctagcggtcaggacatctcaatcgccgtgctgacccaggagattgtggtgtacctggcgatgtacgtcagggctcagccgtcactgttcgtcgagatgctgcggctgagaatcggactgatcatccaggtgatggcgaccgaattggccagatctctcaactgcagcggagaagaagcgtccgagtccctgatgaatctttccccattcgacatgaagaatctgttgcaccatatcctctccggaaaggaattcggagtcgaacgctcggttagaccgatccactcaagcacctcgtcgccaaccatctcaattcacgaggtgggacacactggagtgactaagaccgaacgcagcggcatcaacaggctgcggtccgagatgaagcagatgactaggagattttcagctgatgagcagttcttttcggtgggacaggcggcatcgagctccgcccatagctccaagagcgcccgctcctccactccatcctcgccgactgggaccagctcctccgactccggcggccatcatatcggatggggcgagcggcagggacagtggctccgccgcagacggctggacggagcaattaacagagtgcctgtcggattttaccagagagtttggaagattctgcagaagtgccacggactgtcgatcgacggatacgtgctgccctcgtcgaccactcgggaaatgaccccgcacgaaatcaaatttgccgtgcacgtcgaatcagtcctcaatcgggtccctcagccggagtacagacaactgctcgtggaggcaatcatggtgctcacgctcttgtcggataccgaaatgacttccattggcggaatcatccacgtggaccagatcgtgcaaatggcgagccaactgttcctgcaagatcaggtgtccataggagcgatggatacgctggaaaaggaccaggccactggcatttgtcacttcttctacgactccgccccttccggcgcttatgggactatgacctacctgacgagagctgttgctagctacctgcaagagctgctgcctaacagtggctgccagatgcag

SEQ ID NO: 18051 - DNA, 3705 bp, synthetic construct
  misc_feature 1..3705: note = source = /note="Description of Artificial Sequence: Synthetic coding sequence"
  source 1..3705: mol_type = other DNA
atgcggagcaggtcaaactccggtgtgcgattggatggatacgctaggctggtgcagcaaactattttgtgctaccagaaccccgtgacggggctgctgtccgcatcccacgaacaaaaagatgcctgggtgagagacaacatttactcgattcttgcagtgtgggggttgggtatggcataccgcaagaatgccgatagggacgaagataaggcaaaggcatacgagctggaacagaacgtggtcaagctcatgcgcggactccttcagtgcatgatgaggcaagtggccaaagtggagaaattcaagcatacccagagcaccaaggattcccttcacgccaagtataacaccgcaacctgcgggaccgtggtgggagatgaccagtggggacatctccaagtggacgcaacctccctgtttctcctgttcttggcccaaatgaccgcttccggactgcggatcattttcaccctggatgaggtggcgtttattcaaaatctcgtcttttacatcgaggcggcatacaaggtggcggattacggaatgtgggaaagaggtgacaagactaaccaaggaattccggaactcaacgcatcctccgtgggtatggcaaaagcagcgttggaggcgattgatgagctcgatctgttcggagcccacggaggcaggaagtccgtgattcacgtgcttccagatgaagtggaacattgtcaaagcattttgttctcaatgcttccaagagcatcgacttccaaggagattgacgcaggacttctctcgattatctcattccctgcattcgcagtggaagatgtcaacctggtcaatgtgaccaagaatgaaatcatctccaagttgcaaggtcgttacggttgttgtaggttcctgcgggatggatacaagacccctagagaagatccgaacagattgcattacgatccagctgagcttaagctgtttgaaaacattgagtgtgaatggccagttttctggacttacttcattatagatggcgtgttttcgggggatgcggtgcaagtgcaagaataccgggaagcactcgaaggaattctgattcgtggcaagaacggtatcagacttgtgcctgaactgtacgcagtgccgccgaacaaagtcgatgaagagtacaaaaatcctcacacggtggatagggtgccaatgggtaaggtccctcatttgtggggacaaagcctgtacattctttcaagcctgctggcagaaggatttcttgccgcaggggagattgacccactcaatcggaggttttccacctccgtgaagccagacgtggtggtgcaggtgaccgtgctggcggaaaacaatcacattaaggacctgctgagaaagcatggggtgaacgtgcagtccatagcagacatccatcctattcaagtccaacctggacggattctctcacatatctacgcaaaactgggcagaaacaagaacatgaatctgagcggcagaccatacagacatattggagttctgggaacttccaaactgtacgtgatacggaaccaaatctttacttttacccctcaatttaccgatcagcaccatttctaccttgcactggataatgagatgattgtcgaaatgcttcggattgagctggcatacctctgtacttgctggcggatgactggtcggcctaccctgactttccctatatcccgcaccatgttgaccaacgacggatcggatatccattccgcagtcctgagcactattagaaagctggaggacgggtacttcggaggtgcacgggtcaaacttggtaatctttccgaatttctgaccacttcattctacacctaccttacttttcttgaccctgattgtgacgagaaactgtttgataacgcctccgaaggtacctttagccctgattccgatagcgatctcgtcggctaccttgaagatacgtgcaaccaggagagccaagatgaactggaccattacattaatcatctgctccagagcacctccctcagaagctacctgccacctctttgtaaaaacacggaggataggcatgtcttttccgcaattcactcaacgcgcgatatcttgtcggtgatggccaaggcaaaggggctggaagtgccgtttgttccgatgacccttccaaccaaagtgctctcagcccatcgcaagtcactgaatctggtggattccccacagccactgctggagaaggtacccgagtccgattttcaatggccaagagatgatcacggggatgtggattgtgagaaactggtcgaacaactcaaagattgctcgaaccttcaggatcaggcggatattctgtatatcctgtacgtgattaaggggcctagctgggacactaatctctcgggacaacatggagtcacggtgcaaaacctgctgggcgagctttacggcaaagctgggcttaaccaagagtgggggcttattagatacatttccggcctgctgcggaagaaggttgaagtcctggcggaagcctgtaccgatcttcttagtcatcagaagcaactgaccgtggggttgcctcccgaaccccgggagaagatcatttccgctccgcttcctccagaagagcttacgaagctgatatacgaagccagcggccaggatatatccattgcggtgcttactcaggaaattgtggtgtatctggctatgtacgtgagggcacagccctcactgtttgtggagatgctccggctgagaataggactgataattcaggtcatggcgactgaacttgcacgctcacttaactgctcgggagaagaggcatccgaatcactgatgaatctgagtccttttgacatgaagaatctccttcaccatatcctgagcggcaaagagtttggtgtggaacgctctgtccgccccatccattcgtccactagctcgccaactatttcgatccacgaggtcgggcataccggggtgactaagacggagcgctcaggaatcaaccgacttcgatcagagatgaagcagatgaccagacgattctccgcggatgaacagttcttttcggtcggacaagccgcaagctcttccgcccactcgtcgaaatccgctcgctcgagcactccctcctccccaaccggaacctcgtcatccgattccgggggtcaccacattggatggggcgagcgccagggacaatggctccggagaaggcggctcgatggagcaatcaatagggtgcctgtcggattttaccaaagagtctggaaaattctccagaagtgtcacgggctctccatcgatggctacgtgctgccgagctccaccaccagagaaatgacccctcatgagatcaagttcgcagtgcatgtggaatcggtgctgaatagggtcccccagccagaatatagacaactgcttgtggaagcaattatggtgcttaccctgctttcggatactgaaatgacgagcatcggaggaattatccatgtggatcaaatagtgcaaatggcttcgcaactgtttctgcaggaccaagtctcgattggtgcaatggacacgctcgagaaggatcaggcgactggtatctgtcacttcttttacgactcggccccgtcaggtgcatatggtaccatgacctacttgacccgagccgtggcgtcgtaccttcaagagttgctgcccaacagcggatgtcaaatgcag

SEQ ID NO: 18052 - DNA, 3705 bp, synthetic construct
  misc_feature 1..3705: note = source = /note="Description of Artificial Sequence: Synthetic coding sequence"
  source 1..3705: mol_type = other DNA
atgcgctcgcgctcgaactccggcgtgagattggacggatacgcccggctggtgcagcaaaccattctctgctaccaaaatcctgtgacgggacttttgtcagctagccatgaacaaaaggacgcatgggtcagagataacatttacagcatcctcgccgtctggggcctgggaatggcatatcgcaagaatgctgatcgggacgaagataaagcgaaagcatacgagctggaacagaacgtggtcaagctgatgcgcggcctcctccagtgcatgatgcgtcaggtcgccaaggtggagaagttcaaacacactcagtccaccaaagactcgctgcacgctaagtacaacaccgcgacttgtggaactgtggtcggagacgaccagtgggggcatcttcaagtggacgcgactagcctcttcttgctgttcctggcccaaatgaccgcctccggactccgcatcatctttaccctggacgaagttgcgtttatccagaacctggtgttctacatcgaagccgcttacaaggtcgcggactacggcatgtgggagcgcggtgataagaccaaccaaggtatcccggaactcaacgccagcagcgtcggaatggccaaagccgccctcgaggccattgacgaactcgaccttttcggagcacatggcgggcgcaaatccgtcatccacgtcttgccggacgaagtggaacattgtcaatcaatcctcttctcaatgctcccccgggcctcgacgtcaaaggagattgacgctggactcctctccatcatcagcttcccagctttcgctgtggaagatgtcaacctggtcaatgtcaccaagaacgagattatctcgaagctgcaggggcggtacggctgttgtcgctttctgagagacggatacaaaaccccacgggaggatccgaatcgcctccactacgacccagcggagctgaagctcttcgagaatatcgaatgtgaatggccagtgttttggacttacttcatcatcgacggagtgttctccggagacgcggtgcaggtgcaggaataccgcgaagccctggaagggattttgatacgcggtaagaatggcatccgcctcgtgcccgagctgtacgccgtgccgccgaacaaagtggacgaggagtacaaaaacccgcacactgtcgaccgggtcccgatgggaaaggtgcctcacctgtggggtcagagcctctacatcctctcctccctgttggccgagggcttcctggcagccggagagatcgaccccttgaaccggcgcttttcgacgtcggtcaagccagacgtggtggtgcaggtcaccgtcctggctgaaaacaaccatatcaaggacctgctcaggaaacacggagtcaacgttcaatcaatcgcggacatccatccgatccaagtgcagccaggccgcatcctttcccacatctatgcgaaactcggtaggaacaagaacatgaatttgagcggccggccttaccggcatatcggggtccttggaacctccaagctgtacgtgatccgcaatcagatcttcactttcactccgcaatttaccgatcagcaccacttctacctggcgctggacaatgaaatgattgttgagatgctgagaattgaactggcctatctttgcacttgctggcgcatgaccggacgcccaaccctgaccttcccgatctccagaaccatgctgactaatgacggaagcgatatccattccgctgttctgtcgaccatccggaaactggaagatgggtacttcggaggcgcccgggtcaagttgggcaatctttccgaattcctgacgacctcgttttacacttacttgactttcctcgacccggattgcgatgaaaagctgttcgacaatgcctcggagggtacttttagccccgactctgattccgatctggtgggatacctggaggacacttgcaaccaggagtcgcaagatgagctggatcactacatcaaccacttgctccagtcgacttcgctgcgctcgtacctcccaccactgtgtaagaacaccgaagataggcacgtgttctccgcaattcattcaactcgcgacatactctcagtgatggcgaaggccaagggactggaggtgccctttgtgccgatgaccttgccgactaaagtgctcagcgcccatcggaagtccctcaacttggtggattccccacagcctcttctggaaaaggtcccggaatccgacttccagtggccgcgggatgatcacggtgatgttgattgcgagaaactggtggaacagctcaaggactgcagcaatctccaggatcaggcagatatcctgtatatcctgtatgtcatcaagggaccgagctgggacaccaacctgtcggggcagcacggagttactgtgcagaatttgttgggcgagctctacggcaaggctggactgaaccaggagtggggactgatccgctacatctccggactgcttcgcaaaaaagtcgaggtgctcgccgaggcctgcactgacctgctgtctcaccaaaagcaacttaccgtgggactgccgcccgaaccgcgtgaaaagattatctccgctcctctccccccagaagaactgactaaactcatctacgaggcatccgggcaggatatcagcattgcagtcctgacgcaggagatcgtggtctacctcgccatgtatgtgcgggcccaaccttccctgttcgtcgagatgctgcgtctgagaatcgggctgatcattcaagtaatggcgactgagctggccagatcgctcaactgctctggagaagaggcctcggaaagcctcatgaacctgagcccatttgacatgaagaacctgcttcaccatatcttgtcaggtaaggagttcggagtcgaacgatcggttagaccgatccactcgtccaccagctcgcctaccatctccatccatgaagtcggacatactggcgtcactaagaccgaacggtccggcatcaatagactccgctcagaaatgaagcagatgacgcgcaggttttccgcagacgaacagttcttctcggtgggacaggcggcatcgagctcagcacatagctcgaagtcggccagatcctccaccccgtcatcgccgactggaactagctcctccgatagcggtggacatcatatcggatggggcgaacggcaggggcagtggctgcggaggcgccgcttggatggtgccatcaatcgcgtgcctgtggggttctaccagagggtgtggaagatacttcagaagtgtcacggactgtcaatcgacggatacgtgctgccttcatccactacccgcgaaatgaccccgcacgaaatcaagttcgctgtccatgtggagtccgtgctgaaccgcgtcccccagccggaataccggcaacttctggtggaagcaattatggtgctgacgctgctctccgacaccgaaatgacgtcgatcggaggcatcatccacgtggaccagatcgtgcagatggcctcccagttgttcctgcaggatcaagtcagcatcggtgccatggacacgttggaaaaagaccaagcgactggtatttgccatttcttctacgactccgcaccgtcaggggcttacggaaccatgacctaccttactagagcggtcgccagctacctgcaagaactgttgccgaactcggggtgccagatgcaa

SEQ ID NO: 18053 - DNA, 3705 bp, synthetic construct
  misc_feature 1..3705: note = source = /note="Description of Artificial Sequence: Synthetic coding sequence"
  source 1..3705: mol_type = other DNA
atgcgctcacggagcaactcgggcgtcagactcgacggctacgccagacttgtccaacaaaccatcctctgctaccagaacccggtcactggtctgctgagcgcgtcccacgaacagaaagatgcctgggtccgggacaatatctattcaattctcgcggtgtggggtctgggaatggcgtacagaaagaatgcagatcgcgacgaggacaaggcaaaggcctacgaactggaacaaaatgtggtcaagttgatgcgaggactgctccagtgcatgatgcggcaagtggcaaaggtggaaaagtttaagcatactcagagcaccaaggatagcttgcacgcaaagtacaacacggccacctgcggaaccgtcgtgggtgacgaccagtggggacatttgcaggtagacgccacttcgttgttcctcctcttccttgcgcaaatgacggcgtctggcctccgaatcatattcaccctggatgaagtggctttcattcaaaacctggtgttttacatcgaagcagcctacaaggtcgcagactacggaatgtgggaaaggggcgataaaaccaaccagggcatcccggagcttaacgcctcaagcgtgggaatggcaaaggcagcgctggaggcgatcgacgagttggacttgtttggagcccatggcggacgaaagtcagtcatccacgttctcccggatgaggtggaacactgccagtctatcctcttcagcatgcttccgcgggctagcacctcgaaggagattgatgctgggctcttgtctatcatctccttcccagctttcgccgtggaggacgtcaatctggtgaatgtcaccaagaacgagatcatctctaagctccaaggtagatacggctgttgcaggttcctgcgcgatggttacaagaccccacgcgaggaccctaaccgcctccactacgacccggcagaactgaagctgttcgaaaacattgagtgtgaatggcccgtattctggacctacttcatcatcgacggtgtgttcagcggagacgcagtccaggtgcaggaatacagagaagcgctggaaggaattctgatccggggaaagaacggtattcgcctcgtcccggagctgtacgccgtgccgcctaacaaggtcgacgaagagtacaagaatccccacaccgtggatcgtgtgccgatgggcaaagtcccgcacctctggggccaatcgctgtacattctgtcgtccttgctggccgaaggattcctggctgcgggcgagatcgacccgctcaatcggcgattctccacttccgtgaaaccagatgtggtggtccaggttactgtgctcgcggagaataaccacatcaaggatcttctgcgcaagcatggggtgaacgtgcagtcgatcgctgacattcatcctattcaagtgcaacctggacgcatcctctcccacatctacgctaaactgggacgcaacaagaacatgaacctctcgggtagaccgtatcggcatatcggagtcctcggaacgtcgaagctctacgtaatcaggaaccagattttcacttttaccccacagttcactgaccagcaccatttctacctcgccctcgataatgaaatgattgtagagatgctccggatcgagctcgcatacctgtgtacttgctggcggatgacggggcgccccaccctgacttttccgattagccgcaccatgctcaccaacgacggaagcgacatccactccgcggtcctgtccactataagaaaactggaggatggatacttcggaggggcacgcgtcaagctcgggaacctgtccgaatttctcactacttccttctacacttatctgacgtttctcgacccggactgcgatgagaaattgttcgacaacgcctccgagggaactttctcccctgactctgacagcgatctggtgggataccttgaggatacctgcaatcaggagtcacaagatgagcttgaccactacatcaatcatctgctgcaatcgactagcctgcggagctacctgcctccactgtgcaagaacaccgaagatcgtcacgtgttttctgccatccattccacccgcgacatcctttcggtgatggctaaagccaagggactggaagtgcctttcgtccctatgactctcccaacgaaggtgctctcagcacatcgcaagtcactgaacttggtggactctcctcagccgttgctggagaaggtgccagaatcggacttccaatggcccagagacgaccacggtgacgtggactgcgagaagctggtggaacagctcaaagactgttcgaacctgcaggaccaagctgatatcctttacatcctgtacgtcatcaagggaccgtcctgggataccaacctttccggacaacatggggtgaccgtccaaaaccttctgggagaactgtacggaaaagccggcctgaatcaggagtggggactcatccggtacatctctggtctgctgcggaagaaggtggaagtgctggccgaggcgtgcactgacctgctgtcgcaccaaaagcagctgacggtgggtctgccgccagaaccgagagagaaaatcatctccgccccgttgcccccggaagagctgaccaaattgatctacgaagcgtcgggacaagacattagcatcgctgttctgacccaggaaatcgtggtgtacctggccatgtacgttcgcgcccagccatccctctttgtcgaaatgcttagactgaggatcgggctgatcatccaggtgatggcgactgagctcgcacggtcgctcaattgctccggagaggaagcctctgaatcactgatgaatctgtctcctttcgacatgaaaaatcttctgcaccacatcttgtcgggcaaggaattcggcgtggaacggagtgtaagacccatacattcatcgacctccagccccactatctcgatccacgaagttgggcacaccggggttactaaaaccgaacggagtgggatcaaccgacttcggtcggaaatgaagcagatgacccgccgcttctcagccgatgagcagttcttttccgtgggccaggccgcgtccagctcagctcatagctcgaaaagcgccaggtcgtccaccccaagctcaccaacggggacttcatcaagcgattcagggggccaccatatcggatggggagagagacaaggacagtggctcaggcgccgccggctggatggggccatcaacagagtgccggtgggattctaccagcgcgtgtggaaaatacttcagaagtgtcatggcctcagcatcgatggctatgtcttgccttcgagcactacccgcgagatgaccccacacgaaatcaagtttgctgtgcacgtggagtcggtgctgaatcgggtgccacaaccggaatacaggcagttgctggtcgaagcaatcatggtgctgactttgctgtctgatacggagatgacttcaatcggaggaatcattcacgtggatcagatcgttcagatggcctcccaactgttcctgcaagaccaagtgtcgatcggagcgatggacaccctcgaaaaagaccaggccaccggcatttgccatttcttttacgattccgccccgagcggtgcatatggtactatgacctacctgactcgggcggtggcctcctatctgcaggaactgctgccgaacagcgggtgccagatgcag

SEQ ID NO: 18054 - DNA, 3705 bp, synthetic construct
  misc_feature 1..3705: note = source = /note="Description of Artificial Sequence: Synthetic coding sequence"
  source 1..3705: mol_type = other DNA
atgcgctctcgctcaaacagtggagtccgcctcgacggttacgcccgcctggtgcagcagaccatactttgctaccagaaccccgtgacaggcctgctttcagcatcccacgagcaaaaggacgcttgggttagggataacatctattcaatcctggcagtatggggtctgggaatggcctacagaaaaaacgccgaccgtgatgaagacaaggctaaagcctatgagttggaacagaatgtcgtcaaacttatgcgcggactgctgcaatgtatgatgcgccaagtggccaaagttgagaaattcaaacacactcagtcaacaaaggacagtctgcacgcaaagtacaataccgccacctgcggcaccgttgtgggcgacgatcaatggggccacctccaggtggacgccaccagcctgtttcttctgttcctggctcagatgacagcctccggactgagaatcatttttaccctggacgaagtggctttcatccagaatctggtgttctacatcgaggctgcatacaaagtcgccgactatggcatgtgggaacgtggtgacaagactaaccagggcattcctgaactgaacgcttcctccgttggcatggctaaagctgccttggaggctatcgacgaactggacctttttggcgctcatggtggcagaaagagtgtaattcacgttctgcccgatgaggtcgaacactgccagagcatcctcttctcaatgctcccacgtgcctctacctccaaagagatcgatgctggccttctgagtataatttcatttccagcttttgctgttgaagatgtcaaccttgtgaatgtaacaaagaacgagatcattagcaaactgcagggccgctacggctgctgccgcttcctccgtgacggctacaagacacctcgcgaggaccccaacagacttcactacgaccccgccgaattgaagttgtttgagaatatagagtgcgagtggcctgttttttggacctactttatcatcgacggtgtgttttctggagacgctgttcaggtccaagagtatcgtgaggctctggagggtattctgatcagaggaaagaatggcattcgtctggtacctgagctttacgcagtcccacccaacaaagtggatgaagaatataagaatcctcacactgttgaccgtgtaccaatgggaaaagttccacacctttggggacaatcactgtatatcctgagctcactgttggccgaaggcttcctggctgctggagaaatcgatcccttgaacagaaggtttagtactagtgtcaagccagatgtcgttgttcaggtgacagtccttgccgaaaataaccacataaaggacctgctgagaaaacacggagttaacgtgcaatccatagccgacattcaccccatacaggttcagcctggccgcattctttcccatatctatgccaagttgggcagaaataagaacatgaacctttccggacgtccctaccgtcatataggcgtgctgggaacttcaaagttgtacgtgatcaggaaccagatctttactttcactcctcaattcactgatcagcatcatttctatttggccctggacaacgagatgattgttgagatgctgagaatcgaactcgcatacttgtgtacatgctggagaatgaccggccgccctacactgacattccctatttctcgcactatgcttacaaatgacggttctgacatccattctgccgtcctctccacaattagaaagttggaagatggctacttcggcggcgcccgtgtaaagctcggcaacctctcagagttcctcaccacctctttttacacatatctcacatttttggatccagattgcgacgaaaagttgttcgacaacgcatccgaaggaacttttagccccgattccgatagcgacctggtaggttacctggaagatacttgcaaccaggagtcacaggatgagctggatcactacataaaccacctgctccagagcaccagtcttagaagctaccttcctcctctttgtaaaaacacagaggataggcatgtgttcagcgctatccattccacccgtgatatcctcagtgtcatggctaaagcaaaaggcttggaagtgccttttgtgcccatgacactcccaactaaagtcctttccgcacacaggaaatcattgaatttggtggatagcccccaacctttgttggagaaggtgccagaatccgacttccagtggcctagggacgaccacggcgatgtagactgcgaaaagctggttgagcaactgaaggactgtagcaatctgcaagaccaggccgacattttgtatatcctttacgttatcaagggcccttcttgggatacaaacctgtccggtcagcacggcgtcacagtgcagaaccttttgggagagttgtacggtaaggccggccttaatcaggagtggggcctgattaggtatatctccggcctgttgagaaagaaggtcgaagttcttgccgaagcttgcactgaccttctgtcccaccagaagcaactcactgtgggcctgccacccgagcctagagaaaaaatcatttccgctcccttgccccccgaagagcttacaaaactgatctacgaggcatccggccaagatatttctattgctgtattgacacaggagatcgttgtatacctggctatgtatgtccgtgcacagccttccctgtttgtagagatgctcaggttgcgcattggtctcatcatccaagtaatggctacagagctcgccagaagtctgaattgcagcggcgaggaagccagtgagtctctgatgaatctgagccccttcgacatgaagaacttgcttcaccatatcctgagcggaaaggaattcggcgttgagcgtagcgtacgcccaattcatagctccacatcatctcccaccatttccatccatgaggtgggtcacaccggtgtcacaaagactgagaggagtggcatcaataggctccgcagcgaaatgaagcaaatgacccgccgcttcagtgccgacgaacaattcttttccgtaggtcaagctgcttccagtagcgctcactctagcaaatcagcccgctcctccactccctcttcccccacaggaactagcagttctgacagcggtggtcatcacattggatggggagaaagacagggacagtggctgcgtagacgcaggctggacggcgctattaatcgtgtgccagttggattctaccaacgcgtctggaaaattctgcaaaagtgtcacggtttgtcaattgacggctatgtattgccatcctcaacaactcgcgagatgacacctcacgagatcaagttcgccgtgcacgtcgagtcagtcctgaacagagtgccacagcctgaatacaggcaactcctggtggaggccatcatggtgctgacattgctcagcgatacagagatgacttccattggaggcattatccacgtggaccagattgttcagatggctagtcaactcttcttgcaggaccaggtcagcatcggcgccatggataccttggaaaaggatcaggcaacaggtatctgccatttcttctacgatagtgcaccatctggagcatacggcacaatgacctacctgacacgtgctgtggcttcctatctccaggaactgctcccaaacagcggatgccaaatgcag

SEQ ID NO: 18055 - DNA, 3705 bp, synthetic construct
  misc_feature 1..3705: note = source = /note="Description of Artificial Sequence: Synthetic coding sequence"
  source 1..3705: mol_type = other DNA
atgcgttctcggtcgaatagtggagtgcgtctggacggttacgcacgattggtgcagcagactattctgtgttatcagaacccagtgaccggactgctgtctgcatcgcatgaacaaaaggacgcatgggtcagagataacatttactcaatacttgctgtgtggggtctgggaatggcataccgtaagaacgcggatagagatgaagataaggcgaaggcatacgaactcgaacagaacgtcgtgaaactgatgagaggcctgcttcaatgcatgatgagacaggtggccaaggtggaaaagttcaaacacacgcaatcgaccaaggactcgctgcatgcaaaatacaatactgcaacctgtgggactgtggtcggggatgatcaatggggtcaccttcaagtggacgcaacttcccttttcctgctttttctcgcacaaatgactgcctcgggactgagaattatcttcaccctcgacgaggtggcctttatacagaatcttgtgttttacattgaagcagcttacaaggtggctgattacggaatgtgggaaagaggagataagactaatcagggaattcccgagcttaatgccagctcagtggggatggcgaaggccgccctcgaagcaattgacgagctggatctttttggagcacatggtggtcgcaaatcggtgatccatgtgcttccggacgaggtggagcattgccaatcaattctcttttcaatgctgcctagagcatctacctcgaaggaaattgacgctggccttctttcgatcattagctttcctgcattcgcagtggaagatgtcaacctcgttaatgtgacgaagaatgagatcatctccaagctgcaaggaagatacggatgttgccgttttcttcgggatggatataagacccctcgagaagatcctaaccggctgcactacgaccctgcggaactgaaactttttgaaaacatagagtgtgaatggcctgtgttttggacctacttcattatcgatggcgtgttttcgggagatgctgtgcaagtgcaagaatacagagaagccctggaaggaatccttatacggggtaagaacgggatccgactggtccccgaactgtacgctgtgcctccaaacaaggtcgacgaggaatacaaaaatccacacaccgtcgatagggttcctatgggcaaggtgcctcatctctggggacagtcgctttacattctgtcatcgcttctggctgaaggttttctggcggcgggtgaaatcgatccacttaatcgcaggtttagcacctccgtgaagccagatgtggtcgtgcaggtgaccgtgcttgcggaaaacaaccatatcaaggacctcctgcgcaaacatggtgttaacgtacagtcgattgccgatatccatcctatacaggtgcagccgggacgtattctgtcacatatctacgccaagctgggtagaaacaagaatatgaacctttctggcagaccttacagacacattggagtcctgggaacctcgaagttgtacgtgatacgtaatcagatctttacgtttactcctcaattcactgatcagcatcatttctatctggccttggataacgaaatgatcgtggagatgctgagaatcgaacttgcatatttgtgcacctgctggagaatgacgggcagaccaactctgacctttcctatcagccgtaccatgctcaccaacgacggttcggatatccatagcgcagttctgtcgactattcgaaaactggaagatggatactttggaggtgcaagggtgaaactcggcaacctgtcggagttcctcactacctcattctacacttacctcacttttctggacccagactgtgacgaaaaactgtttgataacgcatccgaaggaacttttagcccagattcagatagcgatcttgtgggttacctggaggatacctgcaatcaggagtcgcaagacgaacttgaccattacataaaccacctgctgcaatccacctccctgagatcgtaccttcctccactgtgtaagaacaccgaggaccgacatgtgttctccgcaattcatagcaccagagatatcctttcagtcatggcaaaagcaaaaggactggaagtgccattcgtccctatgacccttccaactaaggtgttgtccgctcatagaaagtccttgaacctggtcgacagccctcagcccctcctcgaaaaggtgcctgagtcggatttccaatggccacgcgacgatcatggtgacgtggactgtgaaaaacttgtggaacaactgaaggattgctccaacctgcaagaccaagcagacatactttacatcctctacgtcataaagggtccctcctgggacactaaccttagcggacagcatggagtgaccgtgcagaacctgctgggcgaactgtacggtaaggcagggttgaatcaggagtgggggcttatcagatacatatcaggactgctgcgaaagaaggtggaagtgttggcagaagcatgtactgacctcctgtcccaccaaaaacaactgaccgtgggactccctccggaaccccgggaaaagattatctccgcaccactccccccagaagaactgactaaactcatttacgaggcatctggtcaagatatttccattgcggtgctgactcaagaaatcgtggtttacctggcaatgtacgtgcgtgctcagccatcactgtttgttgagatgctccgccttagaataggactcatcattcaggtgatggcaaccgagcttgcacgttcccttaactgttcaggtgaagaagcctcggagtcactgatgaacctttcccccttcgacatgaaaaaccttctgcatcatattctcagcggaaaggaattcggagtggaacgttccgtgcggccgatccattcatccacgtccagcccgacgatttcaatacatgaggtcggacatactggggtgacgaaaactgagaggtcaggaatcaaccgcctcaggtcagagatgaagcagatgacgcgcaggttttcagcagacgaacagttctttagtgtcggacaagcagctagcagcagcgctcacagctcaaaatccgcacggtcgagcactccatcatcgcctactggaactagctcgtccgacagcggaggtcatcatatcggatggggcgagagacaaggacaatggctgcgacgacgccgattggacggtgccatcaaccgcgtcccggtcggattttaccagcgcgtgtggaagatccttcaaaaatgtcatgggctttccattgatggttacgtcctcccatcgagcaccacccgggagatgacccctcacgagattaagtttgcggtgcatgtcgaaagcgtgctgaacagggtcccacaacctgaatataggcaacttctggtggaagcaatcatggtgctgaccttgctgagcgacacggaaatgaccagcattggtggcataattcacgtcgatcagattgtgcagatggcctcgcaactgttcctccaagatcaagtgagcattggagcaatggataccctcgaaaaagaccaggccactggcatctgtcatttcttttacgattcggctcctagcggtgcgtacggcaccatgacttatcttactcgcgcagtggcatcgtacctccaagaactccttcctaatagcggctgtcaaatgcag

SEQ ID NO: 18056 - DNA, 3705 bp, synthetic construct
  misc_feature 1..3705: note = source = /note="Description of Artificial Sequence: Synthetic coding sequence"
  source 1..3705: mol_type = other DNA
atgaggtctcgctctaacagcggcgtgcggctggacggttacgctcgtctcgtgcagcaaacaattctgtgttatcagaaccctgttactggcctgctgtcggctagccatgagcagaaggacgcatgggtccgcgacaacatttactccattctggccgtgtggggactggggatggcctatcgtaagaatgcagatcgggacgaggataaggctaaggcttacgagttggaacaaaacgtggtgaagctgatgagaggtctactacagtgcatgatgagacaggtagctaaggtggaaaagttcaaacatacccagtctaccaaggacagtctgcatgccaaatacaatacagctacgtgcgggaccgtggtcggcgatgaccagtggggacatcttcaagttgacgccacatccctcttcctgctcttcctcgcacagatgaccgcatcaggcctgagaatcatatttacccttgacgaagtggcctttattcagaatctggtcttctatatcgaggctgcctacaaagtagcagactatggaatgtgggagcgcggcgacaaaacaaaccagggcatccctgagttaaatgctagcagcgtaggcatggcaaaggctgctctggaggcaattgacgagttagacctctttggtgcccatgggggccggaaatctgtgatccacgtgttacctgatgaggtagaacactgccaatccattctgttttctatgctgccccgggccagcacctctaaggagatcgacgcaggactgttaagcatcatctcattccccgctttcgcagtagaggatgtaaatctcgtcaacgttaccaagaatgaaatcataagtaagctgcaaggccgctacggatgctgtcggtttctgcgggacggatacaagacgcccagggaggaccctaacaggctgcattatgaccctgccgaactgaaactgtttgagaatatcgagtgcgagtggccagtgttctggacttattttatcatcgacggagtcttctccggcgacgcggttcaagtgcaggaataccgggaggcccttgagggcattttgattaggggaaaaaacggcatccgcctcgtccccgaactgtacgccgtgccgccgaataaggtggatgaggagtacaagaatccccacaccgttgatcgagtcccgatgggtaaggtgccacacctgtggggccagagtctctacatcttgtcttccttacttgcagagggttttcttgccgccggtgagatcgatcctctgaacaggcgcttctcaacttccgttaagcccgacgtagtcgtgcaagtcacagttctggcggagaataaccacataaaagatcttcttaggaagcacggcgtgaacgtgcagagtatcgctgatatccatcccatccaagtgcagcccggcagaatcctgagtcacatctatgccaaattgggtcggaacaagaacatgaacctctctggacggccctacaggcatataggcgtactgggtactagcaagctgtatgtgattagaaaccagatctttacatttacccctcagtttacagatcagcaccatttttacttggcactcgacaacgagatgatcgttgagatgctcagaattgagctggcttacctctgtacttgctggcgcatgaccggccgtcccacactaacctttcccataagtaggactatgctgactaatgacgggtccgacatccacagcgcagttctgtccacaattagaaagctggaggatgggtactttgggggcgcacgcgtaaagctggggaatctgtctgagttcctgactacttcattctatacatatctgacttttctagacccagactgtgatgagaaactatttgacaatgcaagcgaggggacctttagccccgactcagattcagatctagtgggatacctggaggacacttgcaaccaggagtcacaggatgaactcgaccattatataaatcacttgctccagtctacgtcgcttcgaagttacctcccccccctttgcaaaaatacagaagataggcacgttttttcagcaatccattccaccagggacattttatccgtcatggccaaagcaaagggcctcgaagttccttttgtaccaatgactctgcccactaaggtgctttccgcccataggaagtccctgaacctggtagatagtccacaacctctcttggagaaagtcccggagtctgatttccaatggccgcgcgatgatcatggggacgtcgactgcgagaaattggtggaacagctcaaagattgtagcaatctgcaggaccaggccgacatcctttacattctctacgtaattaaggggcctagctgggatacaaatctctcgggacagcacggggtgacagtccagaatctgttaggggagctgtacggtaaggctggactcaatcaggagtggggactgatacggtacatttctgggctactgcggaaaaaagtggaggttcttgcagaagcttgcaccgatcttttgtctcaccagaaacaactgaccgtgggcctgccacctgaaccaagagagaaaatcatctctgcgccactgccaccggaggaactgaccaaactcatctacgaggccagtggacaggacatctcaattgcagtactcacacaggaaatcgttgtctatctggctatgtacgtcagagctcagccatccctcttcgtggaaatgctaaggctccgaatcggactgattatccaggtgatggcgaccgagctcgccagaagcctgaattgctccggagaagaggcttctgaaagccttatgaatctcagtccattcgacatgaagaatctattgcaccatattctgtctggcaaagaatttggtgtcgaaaggagcgttagacctatccactcttcgacatcctctcccacaataagtattcacgaggtgggacataccggggtaaccaagacagagagatccggcattaaccggctccgaagcgagatgaagcagatgactcgacgattttctgcagacgagcaatttttttcggtggggcaggcggccagcagctccgcacattcaagcaaatccgcgcgtagcagcaccccctctagtcccactggaacctcctcgtcagactctggtgggcatcatatcgggtggggagaacggcaaggacagtggctgaggcgacgccgcctcgacggagctattaatcgggtgccggtgggattttaccagcgcgtctggaagatactgcagaagtgccatggactttccattgatgggtatgtgctcccctcatctaccacgcgcgagatgactcctcacgagatcaagttcgcagttcacgtggaatcagttctgaaccgcgtccctcaacccgagtatcgccagttactcgttgaagcgattatggttttgaccctgctctccgacaccgagatgactagtattggaggcattatacatgttgaccagatcgttcaaatggcttcccaactattcttgcaggatcaggttagcatcggagctatggacacgcttgagaaggaccaagcgacaggcatttgccatttcttctacgattcagccccatccggtgcttacggtacaatgacgtaccttacccgcgccgtcgcatcttacctccaggaactccttcccaattcaggatgtcagatgcag

SEQ ID NO: 18057 - DNA, 3705 bp, synthetic construct
  misc_feature 1..3705: note = source = /note="Description of Artificial Sequence: Synthetic coding sequence"
  source 1..3705: mol_type = other DNA
atgagatcgcggtccaattcaggcgtgagactggatggctacgcaagacttgtccagcagaccattctctgctaccaaaacccggtgactggcctgctgagcgcatcgcacgagcagaaggatgcgtgggtgcgggacaatatctactctatcctcgctgtctgggggttgggcatggcctaccggaagaacgcggacagggatgaggacaaggccaaggcctacgagctcgagcagaatgtggtcaagctgatgcgcgggctgctccagtgcatgatgagacaagtcgcgaaggtcgaaaagtttaagcacacccaatcaaccaaggatagcttgcatgcgaagtacaatactgcgacctgtggaaccgtggtgggcgacgatcagtggggacatctccaggtggatgccactagcctgttcctcctgttcttggcccagatgaccgcgtcgggtctgcggatcattttcactctggatgaagtggcattcatacagaatctggtgttctacatcgaagcggcctataaggtcgccgattacggcatgtgggaacgcggagacaagaccaaccaggggattcctgaactgaacgcgagctccgtgggaatggcgaaggccgcactggaggccatcgatgaactcgacttgtttggagcccacggcgggcggaagtctgtgatccacgtcctgccggacgaagtggaacactgtcagagcatcctgttcagtatgctcccacgcgcatcaacctccaaggaaatcgatgcaggcttgttgagcatcatctcatttcctgccttcgcggtggaagatgtcaatttggtgaatgtcaccaaaaatgagatcatttcaaagttgcagggccgatacgggtgctgccgcttcctgcgcgatggatacaagaccccacgcgaagatccgaatcggctgcactacgatccagccgagctgaaacttttcgagaatatcgaatgtgaatggccggtgttttggacgtatttcatcatcgatggagtgttcagcggggacgccgtgcaggtgcaggagtatcgggaggcccttgaaggcattctgatcagagggaaaaatggcatcagactggttccggaactgtacgccgtcccgccgaataaagtggacgaggagtacaaaaatccacatactgtggatcgcgtgccgatggggaaggtgccgcacctgtggggccagagcctctacatcctgtcctccctgcttgcggaaggatttctggcagccggagaaattgaccctctcaatcgccgcttttcaacgtccgtcaagccagatgttgtggtccaggtgactgtgctggctgagaacaaccatatcaaggacctcctcagaaagcatggcgtgaatgtgcagtccattgctgatatccaccctattcaggtgcagcctggaaggattttgtcacatatctacgctaagttgggcagaaacaagaacatgaacctgagtggacgcccgtaccggcacattggcgtgctgggcacctcaaagctctacgtgatccgcaatcaaatcttcactttcactccccaattcactgaccagcaccacttctacctcgcactggacaacgaaatgatcgtggaaatgcttcgcatcgagctggcatacctgtgtacctgctggcggatgaccggcaggcccaccctgaccttcccaatctccaggaccatgctcactaacgacggttcggacatccactcggcagtgctttccaccatccggaaacttgaagatggatacttcggtggagcacgggtgaaactcggaaacctctccgaatttctgactacttccttttacacttacctcactttcctggacccggattgcgacgagaaactctttgacaatgcgagtgaaggtacgttcagccctgatagcgattcggatttggtcgggtaccttgaggacacctgcaaccaggagtcgcaagacgagctggaccactacatcaatcatcttctccagtccacgtcactgcgctcatacctcccaccgctgtgcaaaaacactgaggaccggcatgtgttctccgcaattcactcgaccagagacattctgtcggtgatggcaaaagccaaaggactggaagtgccgttcgtccccatgacccttccgaccaaggtcctgtcggctcaccgtaagtcgctgaacttggtggattccccgcagccactcctggagaaggtgccagagtccgactttcaatggccacgagacgatcacggcgatgtggactgcgaaaagctcgtggagcaactcaaggactgttcaaacctccaagaccaggcggatatcctgtacattctgtacgtgatcaagggcccatcgtgggacactaatctctccggacagcatggtgtgacggtgcaaaatctgctgggggaactgtacggtaaggcaggattgaaccaagagtggggcctcatcagatacatctcgggcctgctccgtaagaaggtcgaggtgctggccgaagcatgtactgatctgctctcgcatcagaagcaactgaccgttggactgcctccagaaccgcgggaaaagatcatctcagccccgcttccaccggaggaacttaccaaacttatctacgaagcatccggccaggatatcagcatcgccgttctcactcaggagatcgtggtctacctcgctatgtacgtgagggctcaaccgtccctgtttgtggaaatgctgcgcctgcggattggactgatcatccaggtgatggcaaccgagctggctcggtcattgaactgtagcggtgaagaagcctccgagtccctgatgaatctgagcccattcgacatgaagaacctgctgcatcacatcctgtcaggaaaggaattcggagtggaacggtctgtcagaccgatccatagcagcacttcgtcacctaccatctcgatccacgaggtcggccacaccggcgtgactaagactgaacgctccggaatcaacagacttagatcggaaatgaagcagatgactaggcgattctcagcagacgaacagtttttctccgtgggacaggccgcttcaagctccgcgcactccagcaagtcggccagatcctcaactcctagctcccctaccggcacctctagcagcgactcgggcggtcatcacatcggatggggagagcggcaaggacagtggctccggagacggagactcgatggagccataaaccgggtccccgtgggcttttaccaacgggtgtggaagatcctgcagaagtgccacggactgtcaattgatggctacgttctcccaagctcgaccacccgagaaatgaccccacacgagattaagttcgccgtgcatgtggaatccgtcttgaaccgagtgcctcagccggagtaccggcaactcctggtcgaagcgattatggtgctcactcttctgtcggacactgagatgactagcatcggaggaatcatccacgtggaccagatcgtgcagatggcgtcccagctgtttctgcaggaccaagtgagcatcggagcgatggatactttggaaaaggaccaggccactggcatctgccacttcttctatgacagcgccccatctggggcctacggaaccatgacctacctcactagggcagtggccagctacctgcaggaactgcttccgaactcaggatgtcaaatgcag

SEQ ID NO: 18058 - DNA, 3705 bp, synthetic construct
  misc_feature 1..3705: note = source = /note="Description of Artificial Sequence: Synthetic coding sequence"
  source 1..3705: mol_type = other DNA
atgagaagcaggtctaattcaggcgtgaggcttgatggctatgcaagactggtccagcaaactattctttgctaccagaatcctgttacgggtctgctgtccgcctctcacgagcagaaagatgcctgggtgcgcgataacatatactccatcctggccgtttggggcttgggtatggcgtacaggaagaacgctgacagggatgaagacaaggcaaaagcatatgagctggaacagaatgtcgtaaagctcatgaggggactgctgcagtgtatgatgcgccaagttgcgaaggttgagaagttcaaacacactcaatctaccaaagacagcctgcacgccaagtacaacactgccacctgcggcacagtcgtgggagacgaccagtggggccacttgcaggtggacgccacatccttgttcctgctgtttctggcccaaatgaccgctagtggactgagaatcatcttcaccctggatgaagtggccttcatccagaacttggtgttctacatagaagccgcgtacaaagtggccgactatggcatgtgggagagaggcgataaaacaaaccagggcatccctgaactcaatgcctcatcagtcggaatggcgaaggcagcccttgaagctatcgacgaactcgacttgtttggtgctcatggaggcagaaagtctgtcatccacgtactgccagacgaggtggagcattgccagtctatcttgttcagcatgctcccaagagcctccacaagcaaagagattgacgcgggcttgctgagtatcataagttttccagcatttgcagtagaggacgtcaatttggtaaacgtcaccaaaaacgaaattatctccaagcttcagggccgctatggatgttgtaggtttctcagggacggttacaagacccccagggaggatcccaaccgcctgcattacgaccccgccgagctcaaactgttcgagaatattgagtgtgagtggcctgtattttggacttactttatcatcgatggtgtgttcagcggcgacgctgtacaagtgcaggaatatagggaggctctggaaggaatcctcattcgcggtaagaatggtattcgcctggtgccggagctttatgccgtcccgcccaataaggtggatgaggagtacaaaaacccccacaccgtcgatagggtcccaatgggcaaggttccccacttgtggggtcaaagcttgtatatcttgtccagccttctggccgaaggattcctggctgcgggcgagatcgatccgcttaataggcgcttcagtacctccgtgaagccagacgtggtagtgcaagttaccgtattggctgaaaacaatcatatcaaagacttgcttcgcaagcatggagtcaacgtccaaagcattgccgacatccaccccattcaagtgcagcccggtagaatcctgtcccacatttacgccaagcttggacgcaataaaaacatgaacctgagcggccgcccgtatcgccacatcggcgtgctgggcacgagtaaactgtacgttatccgcaaccaaattttcactttcaccccgcaattcacggatcagcaccacttctatctcgccctcgataacgagatgatagtcgagatgcttaggatcgaattggcttatctttgcacctgttggaggatgactggccgccccacattgacgttcccgatctcaagaaccatgctcaccaacgatggatccgatattcactcagcagtactttctaccatcaggaagctcgaggacggctatttcggtggagcccgcgtcaagctgggaaatctgtccgaatttctgactactagcttttacacctacctgacattcctggacccagactgcgacgagaaattgttcgataatgcctcagaaggaaccttctcccctgactctgattctgacctcgtcggttacctggaggacacgtgtaatcaggagtctcaagatgagctcgatcactacattaaccatctgcttcaatctacctccctgagatcttacctcccgcccttgtgcaagaacacagaagatcgccacgttttctccgcgatccactctacaagagacatcctttccgtgatggccaaggccaagggactggaggttcctttcgtgcctatgaccctgcccacaaaggtgctgtctgcacacagaaagagcctgaacctcgtcgattctccccagccccttctggagaaggttcccgagtcagattttcagtggcctcgcgacgaccatggcgacgtggattgcgagaagcttgttgaacagcttaaagactgttcaaacctccaggaccaagccgatatcctgtacatcttgtatgtcatcaaaggcccttcttgggacaccaacctgtctggtcagcacggcgttactgtgcagaacctcctgggtgaactgtacggtaaagccggcttgaaccaagagtggggcctgattcgctatatctccggtttgctgaggaaaaaagtggaagttctggccgaggcctgtactgacttgttgtcccaccaaaagcagctgacagtgggcctcccacccgagcccagggaaaaaattatctctgcacctctgccgcccgaggaactcactaagctcatttacgaggcatctggtcaagacatctcaatagcggtcctcactcaggagatcgtggtctacttggcgatgtacgtaagagcgcagccatcactgttcgttgagatgttgagactcaggataggactcatcatccaggtgatggccacagaacttgcgaggtcactgaactgttctggagaggaagcctccgaatctctcatgaatctgtccccatttgatatgaagaacttgctccatcacatcctgtcaggaaaagagtttggcgtcgaaaggtcagtgagacccatccacagctcaacaagctctcctactattagcattcacgaagtcggacacaccggagtgacaaaaacagagaggtccggaatcaaccgcttgcgcagcgagatgaaacaaatgacaaggcgctttagcgcagatgaacagttcttcagcgtgggtcaagctgcgagttcaagcgcgcactctagtaagtcagctagatcttcaacaccttcctccccaacaggaaccagttctagtgattccggtggccatcatatcggctggggcgaaaggcagggacagtggcttaggagacgcaggctggacggagccatcaacagagtgccagtaggcttctaccagcgcgtctggaagatcctgcagaagtgccatggtctctccattgacggatacgtactcccttcttccactacacgcgagatgactcctcatgagatcaagtttgccgtgcacgtggaaagcgtgcttaacagggtgccacaacctgagtaccgccagttgctggttgaggcgatcatggtcctgacactgctctctgataccgaaatgacctctattggaggtattatacacgtcgaccagatagtgcagatggcgtcccagcttttcctgcaagaccaagtctccatcggcgctatggatacgctcgagaaagatcaggccacgggcatctgtcattttttctatgactctgcgccttcaggtgcatatggtacaatgacctacctgacaagggcggtagcctcctacctccaagaattgctccccaactcaggctgccagatgcag

SEQ ID NO: 18059 - DNA, 3705 bp, synthetic construct
  misc_feature 1..3705: note = source = /note="Description of Artificial Sequence: Synthetic coding sequence"
  source 1..3705: mol_type = other DNA
atgcgttcacggagcaattcaggtgtgcggctggacggttacgcccgactggtccagcagaccattctttgttaccagaatcccgttacgggtctgctaagcgctagtcatgaacagaaagatgcttgggttcgcgacaacatttacagcatcctggctgtgtggggtctgggaatggcctatcgcaagaatgccgaccgcgacgaagacaaagccaaagcgtacgaactcgagcagaacgtggtcaagctgatgcgcggtctgctgcaatgtatgatgcggcaggtggcaaaagtcgaaaaattcaagcacacacagagcaccaaggactcactgcatgcgaagtacaacactgcgacctgcggtaccgtggtgggtgacgaccagtgggggcacctgcaggttgatgcgacgagcctgtttctgctgtttctggctcagatgactgcaagcggcctgcgcattatttttaccctggatgaagttgcattcattcaaaatctagtgttctatatagaggccgcttataaagttgcggactatgggatgtgggagagaggtgacaagaccaatcaaggtattccagagttaaatgcgtccagcgtgggcatggccaaggccgccctggaagcgattgatgaactagatctgtttggagcgcacggcggacgcaaaagcgtgatacacgttctgcctgacgaggttgaacactgtcaaagcattctcttcagcatgctgcctcgcgcatcgacctcgaaggagatcgacgcgggactgctgagcatcattagctttccggcgttcgcagttgaggacgtgaacctggtgaatgtgacgaaaaatgagatcatcagtaaactgcaagggagatacgggtgttgtcgttttttgcgcgatggttacaagacacctcgcgaggacccaaatcgactgcactacgacccggctgagctgaagctgttcgaaaacattgagtgcgaatggccggtattctggacctattttatcattgatggcgttttttctggggacgccgttcaggtgcaggaatatcgcgaggctcttgaaggtatactgatccgtggtaagaatgggattcgtttggtgcctgaactgtacgctgtgccgccgaacaaggtggatgaggagtataaaaatcctcacacggttgatcgggttcctatgggtaaggtgccgcacctgtgggggcagagcctttacattctgtccagcttgctcgccgaaggttttctggccgcaggggagattgatcctctgaaccgccgcttttcaaccagcgtgaaaccggacgtggtcgttcaagtgacagttttggcggagaacaatcacatcaaggatttgctccgtaaacacggggttaatgttcagagcatcgcggatattcacccaatccaggtgcagcctggccgtattctgtcacacatttacgccaaactggggcgcaacaagaatatgaatcttagcggtcggccataccggcatatcggcgtcctgggaacctctaaactctatgttatccgaaaccagatttttacgtttactcctcagttcaccgatcagcaccacttttacttagccctggacaacgagatgatcgttgagatgctgcgcattgagcttgcctacctgtgcacttgctggcgcatgacgggacgccctaccctgacgtttccgatcagtcgcactatgctgaccaacgatggctccgacatccactcagcagtgctgtccacaattcgtaaactggaggatggttactttggaggtgcacgagttaaattggggaatctgtcagagttcctgactacctctttttatacctacttgacctttctggatccagactgcgatgagaagctgttcgacaacgctagcgagggtactttttcccctgattccgatagcgacctggttggctatctggaagatacttgcaaccaggagtcgcaggatgaactggatcattacatcaaccatctcttgcagagcacctcactgcgatcttatctgcctccactgtgtaaaaatactgaggatagacacgtcttcagcgcaatccatagcacccgtgacattctgagcgttatggccaaagcaaaagggctggaggtcccttttgtgccaatgacactgccgaccaaggttctgtctgcgcaccgcaagtctctgaacctggtggacagcccacagccactattggagaaggttccggaaagcgattttcaatggcctcgcgacgaccacggcgatgttgactgcgagaagcttgtggagcagctaaaggactgtagcaatctgcaggaccaggccgacatactctacatcctatacgttattaagggcccatcttgggacaccaatctgagcggtcaacatggagtaactgtccagaatctcctgggcgagctgtatggtaaggcgggcctgaatcaggagtggggtttaattaggtacataagcggcctgttgcgcaaaaaagtggaggttctggcagaggcctgtaccgacctgctgtcccatcaaaagcaattgaccgtgggtctgccacctgaaccgcgcgaaaagattatttctgccccactgcctccagaggagctgaccaagttgatctacgaagcttcgggccaggacatctccatcgcagtgctgacgcaggagatcgtggtttacctggctatgtacgtacgcgcgcagccaagcctgtttgttgagatgttaaggctgcgcattggtctgatcatacaggtgatggccacggagctggccagaagcttgaactgcagcggtgaagaagccagtgagtctctgatgaatctgagccctttcgatatgaagaatctgctgcaccacattctcagcggaaaggagttcggcgtcgagcgttctgtgagaccaatccacagctctacctccagcccgactatcagcatccatgaggtgggtcacaccggtgtcacaaaaacggaacgcagcggtatcaaccgcctgcgcagcgagatgaagcagatgacacgtcgttttagcgcagatgagcagttcttttctgttggccaggcggccagttcctctgcgcacagctctaaaagcgcacgaagctccacgccatcatctccgacgggaaccagctcctcggattccggaggtcatcatatcggctggggtgaacggcaaggtcaatggttacgacgtagacgactggacggtgcaattaaccgcgtgccggtcggtttttatcagcgcgtttggaagattctgcaaaaatgccacggtctgagcatcgatggctacgtgctgccaagcagcacgactcgcgaaatgacccctcatgagattaagtttgcggtgcatgtcgagagcgtgctgaatagagtcccgcagccggagtaccggcaattgctggtcgaggcaatcatggtgctgaccctgctgagcgacactgaaatgactagcatcggtgggattatacacgttgaccagattgtgcaaatggcaagccagttgttcctgcaggaccaggttagcatcggtgccatggatacccttgaaaaagatcaggccacaggcatttgccacttcttctatgactcagctcctagtggagcttatggcaccatgacctatctgacccgcgccgtagcatcataccttcaagagcttctgccaaactctggttgccagatgcaa

SEQ ID NO: 18060 - DNA, 3705 bp, synthetic construct
  misc_feature 1..3705: note = source = /note="Description of Artificial Sequence: Synthetic coding sequence"
  source 1..3705: mol_type = other DNA
atgcgctcccgctctaacagcggcgtcaggttggatggatacgcaagactcgtgcaacaaactatcctttgctaccaaaatcctgtcaccggacttctgtcggcatcacacgaacagaaggacgcctgggtgagagacaatatctactcgatccttgcagtctggggcctcgggatggcctaccgcaagaatgcagacagagatgaagataaggcaaaagcgtacgagctggagcagaacgtggtgaaactcatgaggggccttctccagtgtatgatgcgtcaggtggctaaagtggagaagtttaagcacactcagtccaccaaggactccctgcatgccaaatacaataccgcaacttgtggaactgtggtgggggatgatcaatggggacatctccaggtggatgcaaccagcctttttcttctgtttctggcgcagatgaccgcatcgggtctgagaatcatattcactctcgatgaggtcgcattcattcaaaacctggtgttttacatcgaagcagcgtacaaagtcgccgattacggcatgtgggaacgcggtgataagaccaatcagggtattcccgaacttaacgcgtcctccgtcggaatggccaaagcggcactcgaagccatcgacgaactggacctgtttggagcacatggaggccgcaagtccgtgatccatgtgcttcctgatgaagtggaacattgtcagagcattctgttttcgatgcttccgagagcatccactagcaaggaaatcgatgcgggtttgctgtctataatctcgtttcctgcttttgcagtcgaagatgtgaacctggtgaacgtcactaagaacgagatcatttccaagttgcagggtagatacggctgctgtagatttctcagagatggatacaagacccctagagaagatcccaaccggctgcattacgacccggctgaattgaagctgttcgaaaacatagaatgtgaatggcctgtgttctggacttactttatcatcgatggagtgttttccggagacgcggtccaggtgcaagagtatagagaggccctcgagggaattctcattcggggaaagaacggaattagactggtgcccgaactctacgccgtccctccaaacaaggtggatgaagagtacaagaatcctcatactgtggaccgagtcccaatgggaaaggtgcctcatctctggggccagagtctctacatcctgagcagcctgctggcagaaggctttctggcagcaggtgaaattgacccactgaataggcggttttccacgtctgtgaagccagatgtggtggtgcaagtgacggtccttgccgagaataatcatatcaaggacctgctgcggaaacacggagtgaacgttcagtcaattgcagatatccacccaatccaggtccagccgggcagaatcttgagccatatctatgccaagctggggaggaataagaacatgaatctgagcggacgtccgtaccggcatatcggcgtccttggaacctcgaaactgtacgtcatccggaaccagatctttacgtttaccccacaatttactgatcagcatcatttctacctggcactggataacgaaatgatagtggaaatgttgaggattgaattggcatacctgtgcacttgttggaggatgaccggcaggccgaccctcacctttcctatttcgagaaccatgcttaccaacgacggctcagatattcattccgcagtgctctcaaccataagaaagctggaggacggttactttggcggcgcccgtgtcaagctgggaaacctgtccgaattccttaccaccagcttttacacctaccttacctttctcgatccagattgcgatgaaaaactttttgataacgcctcggaaggcacctttagccccgattcggattcggatcttgtcgggtacctggaagatacttgtaatcaggaatcacaagacgagctggatcattacattaaccatcttctgcaatccacctcattgcggagctaccttccacctctgtgtaagaacaccgaggatcggcacgtgttttccgcaatccatagcactagagacattctttccgtcatggctaaggcaaagggacttgaggtgccattcgtccctatgaccctgcctacgaaggtgctcagcgcacatcggaagtcactgaatctggtcgattcaccacaaccactcctggaaaaggtgcccgaatccgattttcagtggccacgtgatgaccatggggacgtggattgcgagaagctcgtggagcaactcaaggactgttcgaaccttcaggaccaggcagacatcctttacattctttacgtgattaagggaccttcctgggacactaacctgtcaggtcaacacggagttacggtccagaatcttcttggggaattgtatggaaaagcaggtcttaaccaggaatggggattgattcggtacatcagcgggctgcttcgcaaaaaggttgaggttcttgccgaggcctgcaccgaccttctctcccaccaaaagcaactgactgtcggactgccgcccgaaccgcgagaaaagattatctcagccccactgcccccggaggaacttaccaaactgatttacgaagcgtcgggtcaagatatttctattgccgtgctgactcaagagatcgtggtgtacctggccatgtacgtcagggcacagccttcgctcttcgtagagatgctgcgactgcgaatcggactcataattcaggtgatggccaccgaactcgcccgttcactcaattgctcgggagaagaagcatcggagtcgcttatgaacctctcgccattcgacatgaagaacctcctgcatcatatccttagcggcaaggagtttggagttgaacgctccgtccgccctattcattccagcacgagttctcccactatctccatccatgaagtcggacacaccggtgtcactaaaaccgaacgatcaggtatcaatcgactcagatccgaaatgaagcagatgaccaggcgttttagcgcggacgaacaattcttttccgttgggcaagccgcatcgtcctctgcacattcgtccaaatcggcccggtcgtcaaccccttcgtcgcctactggcacctccagctcggactcgggaggtcatcatatcggatggggtgaacggcaaggccagtggcttcgcagaaggcgcctcgacggagccattaatcgggtccccgtgggtttttaccaacgggtgtggaagatcctccaaaaatgccacggtctgtccattgacggatatgtgctgccatcctccaccacccgagaaatgacccctcacgaaatcaaatttgcagtccacgtcgaaagcgtcctcaacagagtccctcagcctgaatacagacaactgcttgtggaagcaattatggtgcttactcttctctcagacaccgaaatgacttcaattggtggtatcattcatgtcgaccaaattgtgcagatggcaagccagctttttctgcaggatcaggtcagcattggagccatggatacgttggagaaggaccaggcaaccggaatatgccatttcttctatgattcggcaccttcgggagcctacggaactatgacgtacctgaccagggccgtggcatcgtaccttcaagaactcctcccaaactcgggttgccagatgcaa

SEQ ID NO: 18061 - DNA, 3705 bp, synthetic construct
  misc_feature 1..3705: note = source = /note="Description of Artificial Sequence: Synthetic coding sequence"
  source 1..3705: mol_type = other DNA
atgagatctagatccaacagcggagttcggctagatggatacgcgagactggtccagcagaccatactgtgctaccagaatccagttaccggactgctgtcagcttcccacgagcagaaggatgcttgggtgcgcgacaatatctactccatcctggccgtctgggggctgggaatggcctatcgcaaaaatgccgacagagacgaggataaagccaaggcctatgaactggaacagaacgttgtcaaactcatgagggggctactccaatgtatgatgcgccaagtggccaaagttgaaaaatttaaacatacccagagtacgaaggattccctgcacgctaaatacaatacggccacatgtggaaccgtggtaggggacgaccagtggggacacctgcaggtggacgccacgtcacttttcctgctttttctggctcagatgactgcgtcaggtctcaggatcatcttcaccctcgacgaggtggcctttatccagaacttggtgttctatattgaggccgcgtacaaggtggccgattacggtatgtgggagcggggcgacaaaacaaaccaaggtatccctgaactaaacgcctcttctgtggggatggctaaggcagctctggaagctatcgatgagctggacctatttggcgcacacgggggacggaagagtgtgatccatgtgttaccagatgaagtcgagcactgtcagtctatcctgttttcgatgctacccagagcatcaacttctaaagagattgatgcgggcctgctgtccataatcagttttccggccttcgcagttgaagacgttaatctcgttaacgtcactaaaaatgagattatctccaaacttcagggtaggtatggttgttgtagattcctgcgtgacggctacaagaccccacgagaggaccctaacaggctgcactacgaccccgcagagctcaaattatttgagaatatcgaatgcgagtggcccgtcttttggacatacttcatcatcgacggggtattcagcggagacgcagtacaagtgcaggagtacagggaagctttggaggggattctaatcagggggaagaacggaatacggctggtgcccgaactgtacgctgtgcctcccaacaaagttgatgaagagtataagaacccccacactgtggatcgagttcctatggggaaggtgccccatctgtggggccagagcctttacatactctccagcctgcttgctgagggatttctggccgccggcgaaatcgatccactgaatagacgattctccacctcagttaagcctgacgtcgtggtgcaagttaccgtactggccgaaaacaaccatatcaaagatctcttgagaaagcacggcgttaatgtgcagtctattgcggacattcatcctatacaggtgcagcccggtagaatcctgagccatatctacgctaaactgggacggaacaagaacatgaatctatcgggacgaccctatagacatattggtgtcctcggaacttcaaaattgtatgttattcgcaaccagatatttacgtttacacctcaattcactgatcagcaccacttttacctggccctcgataatgaaatgatcgtggagatgctacggattgaactggcctacctatgtacatgctggaggatgacagggagacccactctgactttccctatctcccggaccatgctgactaacgacggctcagacattcactctgccgtcctgtcaaccattcgaaagctggaagatggatactttggtggcgctagagtaaaattaggaaacctttcagagttcttgacgacttcattttacacctacttaacattcctggaccctgattgcgacgaaaagctcttcgataacgcctctgaggggaccttctcccccgattctgactccgatctggtaggctaccttgaagatacttgtaatcaggaatcacaggacgaactggaccactacattaatcaccttctgcagtcgacttctctccgctcctaccttccacctctatgcaagaatacagaggaccgccatgtgttttccgcgatccactcgacacgagacatcctgagcgtgatggctaaggcgaagggtctggaagtcccttttgtaccaatgaccctgcccacaaaagtgttatctgcacacaggaagtccctcaatctggtggacagtccccagcccttactggaaaaggtgcccgaatcggatttccagtggcctcgcgacgatcacggggacgtggactgcgagaagcttgtggaacagctcaaggattgctccaacctccaggatcaggccgacatcctttacattctctatgtgatcaagggcccgtcatgggacaccaacctgtctgggcagcatggtgtgaccgtgcaaaaccttttaggggagctctatggcaaggcaggcctcaaccaagagtggggtcttattcgttacatatcgggtctcttaagaaagaaggtggaggtgctggctgaggcctgtactgacctcctctcacaccagaagcagctcaccgtaggtctcccgcccgagccgcgagagaaaattatctcggccccgcttccgcccgaagaattaacgaagcttatatatgaagcgtcagggcaggacatatccatagccgtcttaacacaggagattgtagtgtaccttgccatgtatgtgcgcgcccaaccctccctgtttgtagagatgctgcgattgcgcataggacttattatccaagtcatggctaccgaactagcccgatcgctcaattgtagtggcgaggaggcaagcgagtcacttatgaatcttagtccctttgacatgaaaaacctgcttcaccatatcctaagcggcaaggaatttggagtggaacggtccgtgagacctatccatagcagtacttcctccccaactatctccatacacgaggtgggacatacaggagttacaaagaccgaacggagcggaattaaccggcttaggagcgagatgaaacagatgacacgaagatttagcgccgatgagcagttctttagcgttggccaggctgcctcttccagtgcccattcctctaagtcagctcgtagcagcacgcccagctcgcctactggaacttcatcctctgactctggaggacatcatattgggtggggtgaaaggcagggccagtggctgcggcggaggcggttggatggggcgattaaccgcgtacccgtgggcttttatcagcgggtctggaaaatccttcagaagtgccacggtctctcaatcgacggatacgttctaccttcctcgacgaccagagaaatgacgcctcacgaaattaagttcgcagttcacgtcgagagcgttctcaaccgggtgccccagcccgaatacaggcagctgctcgtggaagcaataatggttctaacgcttctgtctgacaccgagatgacatccatcggcggaattatccacgtggaccagatcgttcagatggcatcccagctcttcctgcaggaccaagtttctatcggagcaatggacacattggaaaaggaccaggctactgggatctgccacttcttttacgacagcgcaccctcgggtgcatatggcacaatgacctacttaacgcgggctgtcgcttcatacctgcaggagttactgcccaacagcgggtgccagatgcaa

SEQ ID NO: 18062 - DNA, 3705 bp, synthetic construct
  misc_feature 1..3705: note = source = /note="Description of Artificial Sequence: Synthetic coding sequence"
  source 1..3705: mol_type = other DNA
atgcgatctaggtccaatagtggcgtgcggcttgacggatatgcccggctggtgcagcagacgatcctgtgttaccagaaccccgtcacaggtctactgagcgccagccacgaacagaaagacgcctgggttcgagataatatctactccatacttgccgtgtggggtctgggcatggcctaccggaagaatgccgatcgtgatgaagacaaggccaaagcctacgagctagaacagaatgtggtaaagcttatgagaggactgctccagtgcatgatgcgtcaagtggccaaagtggagaagtttaaacatacacagagcacgaaagattcactgcacgccaagtacaacaccgccacttgcggtacagtagtcggcgatgaccaatggggacacctgcaagtggatgcgacatccttatttttgctctttttagctcagatgactgcctctggactgcggattatctttaccctcgatgaggtggctttcatccagaacctggtattttatatcgaggcggcctacaaggtagctgattacggcatgtgggagagaggggataagactaaccaggggatccccgagctcaacgctagctctgtgggaatggcaaaggctgccttagaagctatcgacgagcttgacttgttcggagcgcacgggggacgcaagtccgtaatccacgtactgccggacgaagtagagcactgtcaaagcatcctgttttctatgcttcctagagcgtccacgtcgaaagagatcgatgctggcctcctttcaataatcagttttcctgcgttcgctgtggaggacgtgaatctggtgaatgtgactaagaacgagatcatctccaagctccaggggaggtatggctgctgtagatttctgcgggatggttacaaaacgccccgggaggatcccaatcgattgcactacgatcctgcggagctgaagctcttcgagaacatcgaatgcgaatggccggtgttttggacttacttcattattgatggagtcttctcaggggacgccgtccaggtacaggagtaccgagaggcactagaggggatcttaattaggggaaaaaacggaatcagattggtcccagaattatatgcagtgccacccaacaaagtggacgaggagtataagaatccacacaccgttgaccgcgttccaatgggtaaagttccacacctgtggggtcagagtctctatatactttcaagcctgctggccgaaggcttcttggccgccggtgaaatcgacccccttaatcgacggttcagcacgagcgtaaaaccagacgtggtcgtgcaagtaacagtcctggccgaaaacaaccatataaaggaccttctcaggaaacatggcgtgaacgttcagtcaatcgccgatatacaccccatccaggttcagcccggccggattctctcgcacatttacgctaagctgggccgcaacaaaaacatgaacctctctggtagaccttatcgtcatatcggcgtgctgggcacttccaagctgtacgttattaggaaccaaattttcacattcacaccacagttcacggaccaacatcacttctatttagcccttgataatgaaatgatcgtagaaatgctgcgaatcgagttagcatacctgtgtacctgttggcggatgaccggtaggccaacattgacattccctatctcacgaacaatgctgaccaatgacgggagtgacatccattctgccgtactctcgactatccggaaactggaggatggctacttcggtggggcacgtgtaaagttgggcaatctctcggagtttctaaccacaagcttttacacttaccttacctttctggaccccgactgcgacgaaaagctgtttgacaacgcctcggagggtacgtttagccctgatagcgacagcgacctcgtcggatatcttgaagacacatgcaatcaggagtcacaggacgaactggaccactatatcaatcacctgttgcagtcgacatcactcagaagctatctgccgcctctgtgtaaaaataccgaagatagacacgttttctcagccattcactctaccagggacatcttgtcagttatggctaaagcgaaagggctagaggtcccgttcgtgcctatgaccctgccaaccaaggtgctctcggcgcataggaaatccctgaatctggtggactcaccccagccgctgctcgagaaggtccctgaaagcgatttccagtggccgagagatgaccatggagacgtggactgtgaaaagttggtcgagcagctaaaggactgtagcaacctccaggaccaggcggatattttgtacattctatacgttatcaaaggaccatcatgggatacaaatctcagcggacaacacggcgtcaccgttcagaatcttctgggagagctgtacggaaaagctggcctgaatcaagagtgggggctaatcagatacatctccggtttgctgcgaaagaaagttgaggtgctggccgaggcatgtacagatttgctcagtcaccagaagcagctgactgtgggcttgccccccgagccacgggagaagattatatccgctcccctaccaccagaggagctgaccaagttgatctacgaggccagtggtcaggatatttcaatcgccgtgttgacccaagagattgtcgtgtatcttgcaatgtatgttcgcgcccaaccttccctgtttgtggagatgctgcgcctccgtatcggactgattattcaggtgatggcaacagagttggcacgaagcctgaattgtagcggtgaagaagcctcagagagtttgatgaatcttagcccattcgatatgaagaatctcttgcatcacattctgtcaggcaaggagtttggggtggagagaagtgtgagaccaatccatagcagtacgagctcaccaacaatttccatacacgaagtcggccacacaggggtcaccaagactgagcgctccggaattaacagactccgtagcgaaatgaaacagatgacaaggaggttctcagccgatgagcagtttttctcagtgggccaggccgcctcctcctctgcccacagcagcaagtctgccaggtcaagcacacctagcagcccaaccggcacatccagctctgacagtggggggcaccatatcgggtggggagaaagacagggacagtggctccggcggagaagactggatggcgctattaatagggttcccgttggtttctaccagcgggtctggaagatcctgcagaaatgtcacggtctttccattgacgggtacgtattgccgtcctcaactactagagagatgacccctcatgagattaagtttgccgtgcacgttgaaagtgttctgaaccgcgtccctcagcctgagtaccggcagctattagtggaggccattatggtgctcaccttgctgtctgacacagagatgacttcaattggcgggataattcatgtcgatcaaatcgttcagatggcctcacagctgttcctgcaagatcaagtctcaatcggtgctatggacaccctggagaaagatcaggccacggggatttgccattttttttacgattctgctccaagtggcgcatatggaacaatgacctacctgacacgcgccgtcgcgtcctacctccaagaattgcttcctaactcggggtgccagatgcaa

SEQ ID NO: 18063 - DNA, 3705 bp, synthetic construct
  misc_feature 1..3705: note = source = /note="Description of Artificial Sequence: Synthetic coding sequence"
  source 1..3705: mol_type = other DNA
atgcggtcaaggtctaattcaggggttaggctcgatggatatgcaagactcgttcagcagacaattttgtgctaccagaatcccgtgactggattattatctgcttcccacgaacagaaagatgcctgggtgagagataacatatacagtatccttgctgtgtgggggcttggaatggcataccgaaagaatgcagatagagacgaagataaagctaaagcctatgaattggagcagaatgtagttaaactgatgcgggggcttctgcagtgcatgatgagacaggtggccaaggtcgaaaagtttaaacatacacagagtacaaaagattctctacacgctaaatacaatacagctacatgtggaacagttgttggagatgatcagtggggacacctccaggtcgatgctacatcactcttcctcttgttcctagcacagatgacagcctctggattgaggatcatctttacactcgatgaggtcgcattcatccagaacctagtgttttacattgaagcggcctataaagttgccgactatggaatgtgggaaagaggagataagactaaccagggaatccctgaacttaatgcatcctcagtgggaatggccaaggcagcgctcgaagcaatcgatgagcttgacctattcggagcccacgggggaaggaaatcggtcattcacgtgctccctgacgaagttgaacattgccagtctatcctcttctccatgttaccccgtgcttcaacaagtaaggaaattgacgcgggactgctctcaattatatcgtttccagcctttgcagtggaagatgtgaacctggttaacgtcacaaaaaacgaaataatctctaaactacagggacgatatggatgttgtagatttctcagggatgggtataaaactccccgagaggatcccaatagactgcactacgatccggccgaattaaaactcttcgaaaacatagagtgcgaatggcctgtattctggacatactttataatcgatggagtattttccggggatgccgtgcaggtgcaggagtatagagaagccctagaggggatccttattcgaggaaaaaatggaataaggctagtcccagaactctatgccgtcccccctaacaaagtcgatgaggaatataagaacccccacacagtcgatcgggtgcctatggggaaggtgccccacctttggggacagtcattgtacatcctgtcaagtcttctcgccgaagggttcctagctgcaggggaaatagatccactaaaccgccgattttcgacatcggttaaacccgatgtagttgtgcaggtgactgtgctcgccgaaaataaccacataaaagaccttctaagaaagcacggggttaatgttcagtctatcgccgacattcatccgatccaggtccagcccgggaggatcctttcccacatctacgcaaagctaggaaggaataagaacatgaatctctcaggaagaccataccggcacatcggagtccttgggactagtaaattgtatgtcatcaggaaccagatctttactttcacaccccagtttactgatcagcatcatttctatctcgcactggacaatgaaatgatagtcgaaatgttaaggatagaactcgcatacttatgtacttgttggcggatgacagggcggcctactctcacatttcccatatcaaggacaatgctcactaatgatggaagtgatatccactctgctgtgctttctacaatccggaaactcgaagatgggtattttggaggagcccgcgtaaaactcggaaacctgagtgagttcctcactacttctttttatacatatctgacattccttgatcctgattgtgacgaaaaattatttgataacgctagtgaggggacattttctccagattctgattcagatcttgtagggtacctggaggatacatgtaatcaggaatcccaggatgaactggatcattatatcaaccacctccttcagagtacatccttaaggtcttatttacctcccctctgcaaaaacactgaagataggcatgtcttttctgccatccactctacacgggatattctgagtgtgatggccaaagcgaaagggctcgaagtgcccttcgtacctatgactctccctactaaagtgttgtcagctcatcgaaaaagtctcaatctcgtagatagtcctcagccactactcgaaaaagtgccagaatctgattttcagtggccaagggatgaccatggagatgtagactgtgagaaactcgtggaacagttgaaagattgctccaacctacaggatcaagccgatatcctctacatcctgtatgtgataaaagggccatcttgggatacaaatctttctggacagcatggagtgacagtgcagaacctgctcggagaactgtacgggaaagccgggctcaatcaggaatgggggctaatcagatatatctctggacttttacggaaaaaggtggaagtattggctgaagcatgtactgatctcctctctcaccagaaacagctcacagtggggctgcctccagaaccaagagaaaaaatcatctctgctcccctccctcccgaagagcttacaaagttaatatatgaagcaagtggacaggatatctccatagctgtgctaacacaagaaatcgtggtgtacctcgctatgtatgtgagagcacagccctcattgttcgttgaaatgcttcggctaaggataggacttatcattcaagtgatggctacggaacttgcacgcagtctgaattgcagtggggaagaggcttctgagtccctcatgaacctgtccccttttgatatgaagaacttacttcaccacatattgtccggaaaagaatttggagtggaaaggtccgtacggccaatacattcatccacttcttccccaactatctccatacatgaggttgggcatacaggggtaactaaaacagaaagatccgggatcaatcggctcaggtccgagatgaagcagatgacacgaaggttctcagcagacgagcaatttttcagtgtgggacaggccgcctcttcctcagctcacagttcaaagtcagccagatctagtacaccttcatcacctactggaacatcctcctcagatagtggagggcaccacatcggatggggagaaagacaggggcagtggctccgcaggcggcgactagatggggctattaatagagtgccagtgggattttaccaacgggtttggaagatattgcagaaatgccatggattatccattgatggatatgtgttaccctcttctacaactagagaaatgacacctcatgaaattaaattcgcagtgcatgtcgagtctgtgctcaaccgggtacctcagccagaataccggcagcttctggtagaagcaataatggtgctgacacttctttccgatacagagatgacatcaattggggggattatccatgttgatcagatagtacaaatggcctcccagctgttcctgcaagatcaggtgagtatcggggcaatggatacactcgagaaagatcaggctactgggatctgccacttcttttatgatagtgccccatccggagcctatgggactatgacatatttaactagggcggtcgctagttacctgcaggaattgctccctaatagtgggtgccagatgcaa

SEQ ID NO: 18064 - DNA, 3705 bp, synthetic construct
  misc_feature 1..3705: note = source = /note="Description of Artificial Sequence: Synthetic coding sequence"
  source 1..3705: mol_type = other DNA
atgagatctagaagcaattctggggtccggctcgatggttacgctagactcgtgcagcagaccatcctgtgctatcagaacccggtaaccggcctgttatctgcgtcccatgagcagaaagatgcttgggtccgagataacatctattcaatcctagcggtgtgggggctcggcatggcctacagaaagaatgccgaccgtgacgaagacaaggctaaggcctacgaattggaacagaacgttgtcaagctgatgaggggccttctgcagtgtatgatgcgacaggtcgcgaaagttgagaagttcaaacatacccaatctactaaagattcactacacgccaaatataacaccgcaacctgcggaaccgtcgtaggggatgaccaatgggggcacttgcaggtggacgccacttccctgtttctcctttttctggcccaaatgaccgcctccggactgcggataattttcactctggatgaggtggcatttatccagaatctcgtgttctacatcgaagccgcgtacaaagtggcagattacggtatgtgggagaggggcgacaaaactaatcagggtattccggagctgaatgcatcctcagtgggtatggcaaaggcggccctggaggccattgatgagctggacctattcggagcccatggtggtcgaaagtcagtgattcacgttctacccgatgaggtggagcactgccagtcaattttgttttccatgctgcctcgagcctctacaagtaaagaaattgacgccggactgttgtccatcattagctttccagctttcgcggtggaggacgttaatctggtgaacgtgaccaaaaatgaaatcatatctaaattgcagggcaggtacgggtgctgcagatttcttcgagacggttacaagacccctagggaagacccaaacaggctacattacgaccccgctgaactcaaactgtttgagaacatcgaatgcgagtggccagtcttttggacctactttatcattgatggcgtgttttctggggacgcggtacaagtccaggagtacagggaggcgctggaaggcattctgatccgggggaagaacggaattaggttggtaccagagttgtatgctgtgcctccgaacaaggttgacgaggagtacaagaacccgcacactgtggacagggtccccatggggaaagtgcctcacctgtggggtcagagcctgtacattctctccagtttgctggctgaggggttcctggctgccggggagattgacccgctgaacagaagattctccactagcgtgaagcctgacgtggtggtgcaggtgactgtcttagccgagaacaaccacattaaggaccttctccgaaagcacggggtgaatgtgcagtctattgccgatattcatcctatccaggttcagcccgggagaatcttaagccatatttacgctaaactgggccggaataagaacatgaacctgtcaggcagaccctatagacacattggggtcctggggacatccaaattgtacgtcatcaggaaccagatttttacattcacccctcagttcactgatcagcaccacttttatctggcgctagacaatgaaatgattgtcgagatgctgagaattgaattggcttacttatgtacgtgctggaggatgacgggccggccgactctgacctttcccattagccgcaccatgctgacaaacgatggttcagacatacatagtgccgtcttgagcacaatcagaaagttggaggatggatacttcggcggcgccagggtgaagttgggaaatttgtcggagttcctgactacctccttctacacctacttaaccttccttgaccctgactgcgacgaaaagttgtttgacaatgcttcagaggggaccttctctcccgattcagattctgatctggttggttacctcgaagatacctgcaatcaggagtctcaggacgaacttgatcactacatcaaccatcttctgcagagcacctcactgcgctcttacctccctcccctttgcaagaacaccgaagacaggcatgtgttttcagcgattcacagtactagagatattctaagtgtgatggctaaggcaaagggactagaagttcccttcgtgcctatgactctgccgaccaaggtactgagtgcccatagaaagtccttgaacttggtggatagtccccagcccttgctcgaaaaggtacctgagagcgactttcagtggcctagggatgaccatggcgacgtggattgtgagaagctggtagaacagctcaaggactgttctaatctgcaggaccaggccgacatcctgtacattttatacgtgatcaaaggaccatcatgggataccaacctcagcggccagcatggagtgacagtgcagaatctcctgggggagctgtatgggaaggcaggacttaatcaagaatgggggcttatacggtacatttccggactgctgcggaagaaagtagaggtgctggcagaggcatgtacagacctgttgtctcaccagaaacagttgactgtagggctgcctcctgaaccccgggaaaagatcatatccgctcctctcccaccagaagagttgacgaaattgatttatgaagcttctggccaggatatttctattgccgtgctcactcaggaaattgtcgtttacctggctatgtacgtgcgggcccagccgtcgctgtttgtggagatgctgagactgcggataggactaattatccaagtcatggctaccgagctggctcgttctctgaactgctccggtgaggaggcatcagagagtctcatgaatctcagcccatttgacatgaagaacctcttacaccatatcctgagtgggaaggagttcggggtcgagagatctgtccgccccatccatagcagcactagctcacctaccatcagcatccatgaggtgggtcatacaggggtcaccaagactgaaagatccggcatcaacagacttcgatccgagatgaagcagatgaccagacgatttagtgccgacgagcagttcttttccgtgggccaggccgccagtagtagtgcccacagtagcaagtccgctagatcctctactcctagctcccccactgggacaagctcatctgacagtggcggtcaccatattggctggggggaaagacaaggtcagtggctgcgcagacggcgtttggacggcgcaataaacagggttccagtgggattttaccagagggtgtggaaaattctgcagaagtgtcacgggctgagtatagacggatacgtgctccctagcagcacgacacgcgaaatgacccctcacgaaataaagttcgcagtgcatgtggagagcgtcttgaaccgggtgccacagccggaatacaggcaactgttggtagaagctatcatggtgttaactctgttaagcgatactgaaatgacgtcaataggtggaatcatccacgtggatcagatcgttcagatggcttctcagctgtttctacaggaccaagtgtcaatcggagcgatggacactctagagaaggatcaggctacaggtatatgtcacttcttctatgatagtgctccaagtggggcctatgggactatgacctatctgacgagggcggttgcctcgtatctacaggagcttctgccaaactcgggctgccagatgcag

SEQ ID NO: 18065 - DNA, 3705 bp, synthetic construct
  misc_feature 1..3705: note = source = /note="Description of Artificial Sequence: Synthetic coding sequence"
  source 1..3705: mol_type = other DNA
atgcgttctcgctccaattcaggggtgcgtcttgacggttacgctagactcgtgcagcagaccatcctctgctaccaaaatccagtaacagggttgttaagtgcctctcacgagcagaaagatgcctgggtcagagataacatatacagcatcctcgcggtttgggggctcggcatggcttacagaaagaacgccgatcgagacgaggataaggctaaggcttacgaactggagcagaacgttgtaaagctgatgaggggccttttgcagtgtatgatgcggcaggtcgccaaggtagagaagttcaagcatacccagtcgacgaaggacagcctccacgcaaaatataatacagcaacctgcggcactgtcgtgggggacgatcagtggggacatttgcaagtcgatgcaacaagtttgtttttattgttcctcgctcagatgaccgcttcaggtttgagaattatctttacattggatgaggtggcattcatccagaacctggtgttctatatcgaggccgcttataaggtggccgattatggaatgtgggaacgcggggacaagacgaatcaaggaatcccagagctcaacgctagctcagtcgggatggcaaaggctgcactcgaagcgatcgatgagctcgacctcttcggcgcccatggcggccgcaagtccgtcatacatgtcctacccgatgaagtggaacattgccaatcaattctgttctctatgctacctagggccagcacatctaaagagattgacgccgggttgctatctattatctctttccctgctttcgcagtggaagatgtgaacctcgttaacgttacaaagaatgaaattatatccaaactgcaaggaagatatggttgttgtaggttccttcgggacggatacaaaacacctcgggaagaccctaatcgtttacactacgatcctgccgagctcaagttgttcgagaacatcgagtgcgaatggcccgttttctggacatatttcattatagacggggtgtttagcggggatgcagttcaggtccaagaatacagggaagcactggaggggatcctaattcggggcaaaaacggaataagactcgtgcctgaactgtacgctgtgccaccgaacaaagtggatgaagaatacaagaatccccatacagtggacagagttcccatgggcaaagtgccccatctgtggggccagagtctttacattctcagttctcttctagccgaagggttcctagccgccggcgaaatcgaccccctcaacaggagattctccacatctgtaaaacctgatgtggtggtgcaggtgaccgtgttagctgaaaataaccatatcaaagacctcctgaggaagcacggcgttaacgtgcagagcattgctgatattcaccctatccaggttcagcccggtcgaatcctgagtcacatttatgcaaaactcggacggaacaaaaatatgaacctctccggccggccatacaggcatatcggcgttttgggcacttctaaactgtacgtgatcaggaaccagatatttacgtttacccctcaatttacagatcagcaccacttttatcttgccctagacaacgagatgattgtggaaatgcttcgcatcgagctggcgtacttatgtacctgttggagaatgactgggcggccaaccctgaccttcccaatcagccggaccatgctcacgaacgacgggtctgatatccactctgccgtcctatcaacaattaggaaactagaggacggctacttcggcggtgcgcgcgtgaaactaggcaacctatccgaatttctgacaacttctttttacacttatctaaccttcctggaccccgattgtgatgaaaaactgttcgataacgcctcagaaggtacttttagtccagattcagattcagatctggtggggtatctcgaggatacttgcaaccaggaaagtcaggatgagttggatcactatatcaatcatctgctgcaatccacgtcattgaggtcctatttaccgcccctatgcaagaatacggaggaccgccatgtgttcagtgccatacattccaccagagacattttgtctgtcatggccaaggctaagggtctcgaagtgcctttcgtccccatgaccctccctaccaaggtgttgtctgctcatcggaagagccttaatttggttgatagcccacagccactgttggagaaggtacctgaaagtgacttccagtggccacgtgatgaccatggagatgtggattgcgagaagctcgtggaacagctcaaagattgttccaaccttcaggatcaggcagatattctttacatcttatatgtgataaagggcccctcctgggacacaaatctgagtgggcagcatggcgtgacagtgcagaatctcttgggagaactttatggaaaagctggcttgaaccaggaatgggggctcattagatatattagcggactcctgcgcaaaaaggtagaggtactggccgaggcttgcacagaccttctctctcaccagaagcagctcacagtgggactcccccctgagcctagggaaaagatcatatcagctccgctacctccagaagagctgacgaaactgatctacgaggctagtggccaggacattagcattgctgtcctcacgcaggaaatagtcgtctatctggcaatgtacgtgcgggctcagcccagtctgttcgttgagatgctcaggctgcgtatcgggctgattatacaggtcatggctaccgagctggcgcgcagtctgaattgctctggggaggaggctagtgaatctctaatgaatctgtcacccttcgacatgaagaaccttctccatcacattctttccggcaaggaattcggggtcgagcgctctgtacgaccgatccacagctcaacgtcatccccgactatatcgatccacgaggttgggcatactggagtcactaagacagagcgatcaggcattaacaggctgcggagtgagatgaagcaaatgacccgccggtttagtgccgatgagcagttcttttctgtgggacaggcggccagctccagcgcccattccagtaagagtgccaggagttccaccccatccagccccacaggtacgtcctctagtgacagcggtggacatcatattggctggggtgaacgccaaggacagtggctgcgtcggagacgccttgacggggcaattaaccgagtgccagttggtttctaccagcgtgtgtggaagatccttcaaaaatgccacgggttaagcattgacggctatgtgctcccgtcatctacaactcgggaaatgacgccacacgaaatcaaatttgccgttcatgttgaatccgtgctgaaccgagtgccacagcctgagtatagacagcttctggtcgaggccatcatggttttgactctgctgagcgacacagagatgacctctatcggcggcattatccacgtcgatcagatagtgcagatggctagccagttatttctgcaggatcaggtttcgatcggagcaatggacactttggagaaggatcaggctactggtatttgccattttttctacgattccgcgccatccggtgcctacggtacaatgacttacctcacccgggccgtcgcatcatacctgcaggagctgctgcccaactctggctgtcaaatgcag

SEQ ID NO: 18066 - DNA, 3705 bp, synthetic construct
  misc_feature 1..3705: note = source = /note="Description of Artificial Sequence: Synthetic coding sequence"
  source 1..3705: mol_type = other DNA
atgcggtcgagatctaattcgggcgtgagacttgacggatacgcgcgactcgtgcaacaaaccatactctgttaccaaaaccccgtgactgggcttctgtcggcctcccatgaacaaaaggacgcctgggtgcgcgataacatctactcgatactggccgtgtggggactcggaatggcatatcggaaaaatgccgacagagatgaagataaagcaaaggcctatgaattggaacagaacgtggtcaaactgatgcggggacttcttcaatgtatgatgcgtcaagtggccaaggtggagaagttcaagcatacccagtcgactaaggattccctccatgcaaagtacaataccgcaacttgcgggaccgtggtcggtgatgaccaatgggggcatcttcaggtggatgcaacttcactctttctgctgttcctggcccagatgacggcatcgggacttcgcattatctttacgctggatgaagtagcatttatccaaaacctcgtattctacattgaagcagcatacaaagtcgcagactacggcatgtgggaaagaggtgataagactaaccagggtattccagaacttaatgcaagctcggtggggatggcaaaggcggcactggaggcgatcgatgagctggatctgtttggagcacatggtggaagaaagtcggtcatccatgtcctcccggatgaggtggaacattgtcaatctatcctctttagcatgcttcctagggcatccactagcaaggaaattgacgccggtttgctgtcaattatcagttttcctgcatttgcagtcgaggatgtgaatttggtcaacgtgaccaagaacgaaatcattagcaaacttcagggacgttacggatgttgtcgatttttgcgagatggctacaagacccctagagaggacccaaatcggctgcactatgacccagctgagctgaaactgttcgagaatattgaatgcgaatggcctgtgttttggacctatttcatcattgatggggtgtttagcggggacgccgtgcaagtgcaggagtacagggaagcactcgaagggattctgatccgcggaaagaacggaatacggcttgtacctgaactgtacgcggtgcctcctaacaaggtcgatgaagaatacaagaatccacacaccgtggatcgcgtcccgatgggaaaagtgcctcatttgtgggggcagtcgctgtacatactctcctctcttctggcagaaggatttctcgcagcaggagaaattgatccgctgaaccggcgattttcaactagcgtcaaacctgatgtcgtggtgcaagtcacggtgttggcagaaaacaaccacattaaggatctccttaggaagcacggagtcaacgttcaatctattgcagatattcatccaattcaggtacagcctggtcgaatactgtcgcacatctacgcgaagctcggtcggaacaagaacatgaaccttagcggtagaccttaccgccatataggtgtccttggcacttcaaagctgtacgtgatacgaaatcagattttcacgttcactccacaatttaccgaccaacatcatttctatcttgccttggacaacgaaatgattgttgagatgttgcgaattgaattggcttacctttgtacttgctggcgcatgactggtcgccctactcttacgttcccaatttctaggactatgcttaccaacgacggttcagatattcactcggcagtcctgagcactatcaggaagctggaggacggatacttcggaggagcacgcgtcaagctcggcaatctgtctgaattcctgaccacttcattttacacgtacctgacctttctcgatcctgactgcgatgaaaaactttttgataacgcatccgaggggaccttctcgcctgatagcgatagcgatctggtgggatacctcgaagatacctgcaaccaggagtcacaggatgaacttgaccattacattaaccatctccttcaatcgacctcgctgcggtcgtacctccctccattgtgcaagaacactgaagatcgccatgtgtttagcgcaattcactcgactcgcgatatcctgtcagttatggcgaaggctaaaggtctggaagtcccatttgtgcccatgactctgccaactaaggtgctgtcggcacaccgaaaaagcctgaatcttgtcgactccccccagcctctgttggagaaagtgcctgagtccgactttcagtggccccgtgatgatcacggagatgtggattgtgaaaaactggtcgagcaactgaaggactgttcgaatctgcaagaccaagcagacatattgtacattctgtatgttatcaaaggcccttcatgggataccaacctgagcggtcaacacggagtgaccgtgcaaaacctgctcggagaactgtacggtaaggcaggcctgaatcaggaatggggactgattaggtacatcagcgggcttcttcggaagaaggtggaagtgcttgcggaagcatgcaccgaccttctgtcccaccagaagcaacttaccgtcggtctgccccctgaaccacgagaaaagatcattagcgcaccattgccacctgaagagcttactaaattgatttacgaagcaagcggtcaagacatcagcattgccgtgctgacccaagaaattgtggtctacctggcaatgtacgtgcgtgcccagccttcactgtttgtggagatgttgcgtcttagaattggtcttatcattcaggtgatggccacggaacttgccagatctctcaattgtagcggagaagaagcaagcgaatcgctgatgaatctctcaccattcgatatgaagaacctgcttcatcacatcctgagcggtaaggaatttggagtggagcggtcagtgcggcccatccattccagcacctcttccccgactatttcgattcacgaggtgggacatactggcgtgactaagactgagcggtcaggtattaacaggcttagaagcgaaatgaagcagatgacccgtcgcttctcggccgatgagcaattcttctcggtgggtcaggcagccagctcctccgcacactcgtcaaaatccgctcgctccagcactccaagttccccgacgggcacttcgtcgtccgattccggagggcatcatattggctggggagaacgtcagggacagtggttgcgcagaagaaggcttgacggcgccattaatcgagtgccagtcggattttaccagcgcgtctggaagatacttcaaaaatgtcacggcctctcaatagatggttacgtgcttccatcgtccaccacccgggaaatgaccccacatgagatcaagtttgcagtgcatgtggaatcggttctgaatagggtgccgcagcctgaatacaggcaactcctggtggaggccatcatggtgctgaccctcctgtcggacactgaaatgacctccatcggaggaatcatacatgtggaccaaatcgtccagatggcatcgcaactcttccttcaagatcaagtttcgatcggagctatggatacccttgagaaggatcaagctaccggcatctgccatttcttttacgacagcgcgccttccggagcatatggtaccatgacttatctgacgcgcgctgtggcgagctacctgcaagaactgctgccaaatagcggatgtcagatgcag

SEQ ID NO: 18067 - DNA, 3705 bp, synthetic construct
  misc_feature 1..3705: note = source = /note="Description of Artificial Sequence: Synthetic coding sequence"
  source 1..3705: mol_type = other DNA
atgcggagcagatcaaattcaggcgtgcgactggacggttatgccaggttggttcagcagacaatcctttgttaccagaaccccgtgacaggcttgttgtccgcctcgcatgagcagaaggacgcctgggttcgggacaacatctatagtattctggctgtgtggggcctgggcatggcgtaccgaaagaacgccgatcgggatgaagacaaagccaaagcctacgaactcgaacagaacgtggttaagctaatgagagggctactgcagtgtatgatgaggcaggtagccaaggttgaaaagtttaagcatactcaaagtacaaaggatagtctgcatgcaaaatataacactgctacttgtgggaccgtggtgggtgatgatcagtggggtcacttgcaggtggacgcgacttccctcttcctcctgttcctcgcgcagatgactgcttcaggcctgagaatcatattcaccctggatgaggtcgcctttattcaaaaccttgtgttctacattgaagctgcatacaaggttgccgactacggaatgtgggaacgaggtgataaaaccaaccaagggataccggaactcaacgcctcaagcgttgggatggcgaaggctgccctggaggccatagacgaactggaccttttcggagcacatggtggcagaaagtccgtgatccacgtcctgcccgatgaagtcgaacactgccagtcaattcttttcagcatgctgccccgggcctcaacttccaaagagattgatgcaggactactgagcatcatcagctttcccgctttcgcagttgaagacgtaaatctggttaatgttacaaagaacgaaatcatctccaaactgcagggcagatatggatgttgtagatttttacgcgacgggtacaagacaccgagagaggaccccaatcggttgcactacgatcccgccgaattgaaacttttcgagaacatagagtgcgagtggcccgtattttggacgtactttatcattgacggggtattcagtggcgacgcagtacaggttcaggagtacagggaagcattggaaggcatattgatcagaggaaaaaatgggatcagactcgtccctgaattgtatgccgtgccccctaacaaggtcgacgaggagtacaaaaaccctcacactgtggatcgggttcccatgggcaaggttccccatctgtgggggcagagcttatatatcttaagttctctgctggccgagggattcctggctgctggagagatcgatccattgaaccggagattttctacatcagtgaagcctgatgtggtggttcaggtgaccgtgcttgccgaaaacaaccatatcaaagatctgttacgcaagcacggtgtgaatgtgcaaagcatagcagacatacatccaatacaagtccagccaggccggatactgagccatatttatgcaaagctcggcaggaacaaaaacatgaacctgagcgggagaccgtacagacatataggggtgctaggcacctccaagttatatgttatcagaaaccagatatttaccttcacaccccagttcacggaccagcaccacttctacctggcccttgacaatgagatgattgttgaaatgctacgtatcgagctcgcttacctctgcacctgttggagaatgacaggcagacccaccctgacgtttcccatttctcgtactatgctgacgaacgatggcagcgacatccacagcgccgtcctttccaccataagaaaactcgaagatggatacttcggaggcgcccgggtgaagctcggtaatctgtccgagtttctgacaaccagtttctatacctatttgactttcctcgaccccgactgtgacgagaagctgttcgacaatgccagcgagggtacattttctcctgactccgacagtgatctggtgggttatctggaggatacttgcaatcaagagagccaggatgaattggatcattacataaatcacctgctgcaatccaccagcctcagatcctatctgccccccctgtgcaagaataccgaggataggcatgttttctctgccattcattcaacaagagacatattgagcgtcatggccaaggcaaaaggcttagaggtgccctttgtgcccatgactctccctacaaaggtgctctcagctcatcggaagagtttgaatttggtggattcaccacaacccttgctggagaaggtgcctgagagcgattttcaatggcctcgtgatgaccacggcgacgtggattgcgagaagctggttgaacagctgaaggactgctcgaacctccaggaccaggctgacattctttatatattgtacgtgataaagggcccatcttgggatacgaatctgtccggccagcacggtgtgaccgtgcagaaccttctgggggaactgtatggtaaggccggacttaaccaggagtgggggctcataagatatatctcaggcttactgaggaaaaaagttgaggtgctagcagaggcctgcactgacctgctgagccaccaaaaacagctcactgtgggcctgcctcctgaaccaagggaaaagatcatctccgcaccactgccccctgaggagttaactaagttgatttacgaggcctccggacaggatatcagcatcgccgtactgacgcaggagattgtggtttatcttgcgatgtatgtgagggctcagccttccctttttgtcgaaatgttgagactccgtatcgggttgatcattcaggtaatggctacggagcttgctcgcagccttaactgtagtggtgaagaggcatccgagtccctgatgaatctgagccccttcgatatgaagaacctgttgcatcacatcctgtctggaaaggagttcggcgtagagcgctcagtaaggccgattcactcttcgacctctagtcctaccatttcaatccacgaggttggacacactggggtgacgaaaactgaaagatccggtatcaataggctgcgctcggaaatgaagcagatgacacgccgattttcagcagacgaacagttcttttctgtagggcaagccgcttcctctagtgctcacagctccaaaagtgcccgcagctctactccttcaagtcctacgggcacttcctcttccgactctggtggccaccatattggatggggcgagcggcaaggacagtggctgcggcgccggcggctggatggggccattaaccgggttcctgtgggcttttatcagcgggtatggaaaatcctgcagaagtgccacggactgagcattgacggatatgtgcttccttctagcacgacccgcgagatgacaccacacgagattaagtttgccgtgcatgttgagagtgtcctgaatcgggtaccccagcctgagtatcggcagcttctggttgaggcaattatggtgctaaccttgctctccgataccgaaatgacatcaataggaggaattatccatgtcgaccagattgtccagatggcatctcagctgtttctgcaggaccaggtgtcaattggtgccatggacaccttagagaaggatcaggcaaccggaatttgtcatttcttttatgacagcgccccttcaggcgcatatggcaccatgacctacctcacacgggcagtcgcctcatatttgcaggagctcctccccaacagcggctgtcagatgcaa

SEQ ID NO: 18068 - DNA, 3705 bp, synthetic construct
  misc_feature 1..3705: note = source = /note="Description of Artificial Sequence: Synthetic coding sequence"
  source 1..3705: mol_type = other DNA
atgcgctctcgctcaaatagtggtgtgaggttggatggatacgcaaggttggtgcaacaaacaattctctgctaccagaatcccgtgaccggccttttgagcgcttcacacgagcagaaagatgcctgggtgagagacaacatctatagtatactcgcagtgtggggtctggggatggcctataggaagaatgcggaccgcgatgaggataaggccaaagcctatgaattggagcagaatgtagtcaaactgatgagagggctgctgcagtgcatgatgaggcaggtagccaaagtggagaagttcaagcacacgcaaagtaccaaagactcccttcacgctaagtacaacaccgcaacatgcgggactgtcgtgggggacgaccagtgggggcacttacaggtcgacgcaacgagcttgtttttactgtttctggctcaaatgactgctagcggactccgcataatttttactctggacgaggtcgccttcatccagaacttggtgttctatatcgaggccgcatataaggtggccgattacgggatgtgggaacgtggtgataagacaaaccagggaataccagagctgaatgcgtcatctgtgggaatggcgaaggctgcactggaggccattgacgaactagatttgtttggtgctcacggaggccggaagtccgtgatccatgtcctgcccgatgaagtggagcactgccagtcaattctgtttagtatgctgcctcgcgcttcaacctcgaaagagatcgatgccggactcctttcaatcattagtttcccagcgtttgctgtggaagacgtgaaccttgtcaacgtgacaaaaaacgagatcatctccaaactccaaggcagatacgggtgctgtcgatttttaagagatggttacaaaacaccaagagaggatcctaaccgtttacattacgacccagctgaattgaaactgtttgaaaatatagaatgcgagtggccggttttttggacttacttcatcatcgatggggtgttttccggcgacgctgtccaggtgcaggaatatagagaggcattagaaggcatcctgattcgtggcaaaaatgggattagactagtgccggagctatacgctgtgccccccaacaaggtcgatgaagaatataagaatcctcacacagtggatcgggtacctatggggaaggtgcctcacctgtggggacagtcactctatattctgagtagtctcttagctgaaggcttcttagccgccggcgaaattgatccactcaaccggaggttctctactagcgtgaaacccgacgtggtcgttcaggttacagtgctggctgaaaacaatcatattaaggacctgttgcggaagcacggggtcaatgtgcagtccattgcggatatacaccctatccaggtgcagccaggtcgcatactgagccatatctacgccaaactcggacgcaataagaatatgaacctctcaggccgaccctaccggcacattggggtgcttggaaccagcaagctgtacgtaattcgaaaccagatctttaccttcacgccacagttcactgatcaacatcacttctacctggcgcttgataatgagatgatcgttgaaatgctgcgaatagaactggcttatctgtgtacttgttggcgaatgacgggacgccctactttaacattccccatttctaggaccatgttgaccaatgatgggagtgatatacattccgcggttcttagtaccatccgcaaactggaggacgggtattttggcggggctcgcgtaaaactcggaaacctctctgagttcctgacaacatcattctacacatacctgacctttctagaccctgactgtgacgagaaactcttcgacaacgctagtgagggtacgttctctcccgattccgacagcgatctcgtgggctacttagaggatacttgcaatcaagagtcgcaggatgagttagaccactatatcaatcatcttctccaaagcacctctctgagaagctatctgcccccactatgcaagaacactgaagacagacatgtcttttccgcgatccactccacaagagatatattgtctgtgatggctaaagcaaaagggctagaggtcccatttgttcccatgactctacctactaaggttctgagcgcccatcggaaaagcctgaatttagtcgactcaccccagcccctgctggaaaaggttcccgaatcggactttcagtggcctcgggacgaccatggcgatgtggattgcgagaagctggtggaacagctgaaggattgttctaatttgcaggaccaggccgatatcttgtatattctgtatgttatcaagggccctagctgggatacaaatctcagtggccagcatggcgtaaccgtgcagaacctgctgggcgaactttacggaaaagctggccttaatcaggagtggggcctcattcggtacatctctggactgcttcggaagaaagtcgaagtcctcgccgaggcttgtaccgatttgttaagccaccagaagcaattgaccgtgggtctgcccccagagccgcgagagaaaatcatatctgcccccttacctcccgaggaactgacaaagttgatctacgaagcttccggccaagacatatcaatagcggtcttgactcaagaaatcgtggtttacctggcgatgtatgtgcgggcccagccttcgctgttcgtggaaatgttacgtcttcgaataggtctgatcattcaggtgatggccaccgagctggccagatccctaaattgcagcggggaggaagcgagtgagagtctgatgaacctgtcaccctttgatatgaagaatcttcttcaccatattctctcaggtaaagaattcggcgtggaacggtcagttagaccaatccactcctccacaagttcaccaaccattagcatccacgaagtagggcacacgggagtgaccaagacggaaagatctggaattaaccgattaaggagtgagatgaaacagatgacaagaagattttcggcagacgagcagtttttttccgtcggccaggctgcttctagcagcgctcacagcagtaagtccgcaagatcttccaccccaagttcccccactggtacatcctcttccgattccgggggccaccatatcggctggggcgagagacagggacagtggctccgcagacgccggctggatggagcgataaacagggttccagttggattctaccagcgcgtctggaagatcctacagaagtgtcacggactgtcgatcgacgggtacgtgttgccatcatccaccacccgtgagatgactccccacgaaattaaattcgccgtccacgtggagtcagtgcttaatagggttccccagccagagtaccgccaactgctcgtcgaagcaattatggtcctcaccttgctctctgacacagagatgacctctattggaggaattatacacgtggaccagatcgtgcagatggcgtcacagctgttcctccaagatcaggtatctatcggcgctatggacacactggaaaaagaccaggcaactggtatttgccactttttttatgactccgcccctagcggtgcctacgggactatgacgtacctgacccgggcagtggcttcttacctgcaggagttactgccgaacagcggctgtcaaatgcag

SEQ ID NO: 18069 - DNA, 3705 bp, synthetic construct
  misc_feature 1..3705: note = source = /note="Description of Artificial Sequence: Synthetic coding sequence"
  source 1..3705: mol_type = other DNA
atgcgctcgcgctcgaactcgggcgtccggctggacggctacgcgcgcctcgtgcaacaaacgatcttgtgctaccaaaacccggtgactggactcctctcagccagccacgaacaaaaagacgcttgggtgcgcgacaatatctactccatcctcgcagtctggggactgggtatggcataccggaagaacgcggatcgtgatgaagataaggcaaaggcgtacgaactcgagcaaaacgtggttaagctgatgagaggccttctgcaatgcatgatgaggcaggtggccaaggtcgaaaagttcaagcatacgcaatccactaaggactccctgcacgctaaatacaacaccgcgacttgtggaaccgtggtgggagacgaccaatgggggcatctgcaagtcgatgcaacctccctgttcctcctgtttttggcccaaatgaccgcttcaggactgcgcatcatcttcaccctggatgaagtcgcttttatccaaaacctcgtgttctacatcgaagccgcgtacaaggtggcggactatggaatgtgggagcgaggtgacaagaccaaccaagggatcccagagcttaacgcctcatccgtgggaatggcgaaagccgccctcgaggcgatcgacgaactggatctgttcggagcccacggcggtaggaaatcggtgatccacgtgctccctgacgaggtggaacactgtcagtcgatcctgttctcgatgctgccgagagctagcaccagcaaagagattgacgcaggactcctgtcaattatctccttcccggccttcgcagtcgaggacgtgaacctcgtgaatgtgactaagaacgaaatcatctcgaagctccagggccgctacggatgttgccgctttctgcgggacggatacaaaacgccgcgggaggacccgaaccggcttcactacgacccagccgaactgaagctgttcgaaaatatcgaatgcgagtggccggtcttttggacgtacttcatcatagacggcgtgttttccggagacgcggttcaggtgcaggagtacagagaagcgctggaaggaatcttgatcagaggaaagaacggtatccgcttggtccccgaattgtacgccgtgccaccgaacaaagtcgacgaagaatataagaacccccacactgtcgatcgagtcccgatgggcaaagtgcctcatttgtggggacagtcgctctacattctttcgtcgctgttggccgagggattcctggcagcaggagaaatcgatccgctcaacaggcgattttctactagcgtgaagcctgacgtggtggtgcaggtgactgtactggccgagaataatcacatcaaagatctgctgaggaaacatggggtcaacgtgcaatcaatcgcagatattcatccgatccaagtccagcctgggcggatcctcagccatatctacgcgaagctcggccggaataagaacatgaatctgtcggggaggccataccgccatatcggagtgctgggaactagcaagctgtacgtgatccgcaaccagatcttcacgttcaccccacagttcaccgaccaacatcacttctacttggccctggataatgagatgatcgtggaaatgctccggatcgaactggcctacctctgtacttgctggagaatgactggacgcccaacgctgacctttcccataagccgcactatgctcactaacgacggatccgatatccatagcgccgtgctgtctaccatcaggaagctggaagatggttacttcggcggggcaagagtcaagctgggaaatctctccgaatttctcactacctcattctacacttacctcactttcctggacccggactgcgatgaaaagctcttcgacaacgcttcggagggaaccttctcccctgatagtgactcggaccttgtcggctacctggaggatacttgcaatcaggaaagccaggatgagctggaccactacatcaatcatctgttgcagtcgacctccctgcggtcatatctgccgccactttgcaagaataccgaagatcggcacgtcttttcagctatccattcaacccgggatattctctcggtgatggccaaggccaaaggactggaagtgcccttcgtccctatgaccctcccgactaaggtgctgtccgcccatcggaagtctctgaaccttgtggactcccctcaaccgctcctggagaaagttccagagagcgacttccagtggccccgcgatgatcacggggatgtcgattgcgaaaaactggtcgaacagttgaaggactgttcgaacctgcaggatcaggctgatatcctctacatcctgtacgttatcaagggtccgtcttgggacactaatctgtccggccaacacggcgtgaccgtccagaaccttcttggggaactgtacggcaaggcgggactgaaccaggaatggggcctcatcagatacatcagcggactgttgcgtaaaaaggtggaagtgctggccgaggcttgcactgaccttctctcacaccagaagcagctcaccgtcggcctcccgcccgagccacgggaaaagattatttccgcgcctctgccacctgaggaacttactaaactgatctacgaggcctcaggccaggacatctcaattgcagtgctcactcaggagatcgtggtgtacctggcgatgtacgtcagagcacaaccgtccctctttgtggaaatgttgcggctgcgcatcggattgatcattcaagtgatggctactgagctcgcacgcagccttaattgcagcggagaggaggccagcgaatcactgatgaatctgagcccgtttgatatgaaaaacctgttgcatcacatcctgagcggtaaagaattcggcgtggagcggagcgtgcgcccgatccattcctcgacctccagcccaacgatctcgatccacgaggtgggtcacaccggagtgaccaagactgaaagatcgggaattaaccgcctgagatcagaaatgaagcagatgactcggcgattctccgccgacgaacaatttttctccgtgggtcaggccgcctcgtcctcagctcactcgtcaaagagtgcacgctcatcgaccccgtcgtcgccgaccggtactagcagctcggacagcggagggcaccatatcgggtggggagagaggcaggggcagtggctgagacggagacgcctcgatggagcgattaatagagtcccggtgggattctaccagcgcgtctggaagatccttcagaagtgccacggcctgtccatcgacggatacgtcctgccctcgtccacgacccgggagatgacccctcacgaaatcaagttcgcagtgcacgtcgaatctgtgctgaacagggtcccacagccagagtaccggcagctcctcgttgaggctattatggttctgactcttctgtccgacaccgaaatgacctccatcggcggaatcattcacgtggaccagatcgtgcagatggcctcacagctgttcttgcaggaccaggtgtcgattggagcgatggataccctggagaaggaccaggccaccggcatctgccacttcttctacgactcggccccatccggagcttacgggaccatgacttatctgacccgcgccgtggcgagctatctgcaagagctccttccgaacagcggatgccaaatgcag

SEQ ID NO: 18070 - DNA, 3705 bp, synthetic construct
  misc_feature 1..3705: note = source = /note="Description of Artificial Sequence: Synthetic coding sequence"
  source 1..3705: mol_type = other DNA
atgcgctcccgctcgaactccggcgtcaggcttgatggctacgcgagactggtgcaacaaactattctttgttaccaaaatcccgtgactggacttctctccgcgtcgcacgaacagaaagatgcctgggtccgggacaacatttactcgattctggcagtgtggggtctgggtatggcatatcggaagaacgctgacagggacgaagataaggctaaggcgtacgaactcgaacaaaatgtggtgaaactcatgaggggactgctgcagtgcatgatgcgtcaagtggccaaggtggaaaagtttaagcatacccaatctactaaagattcgcttcacgccaagtacaacaccgcaacctgtgggacggtcgtgggtgatgatcaatggggacatttgcaggtggatgctacttcgcttttcctgttgtttctggcccaaatgaccgcctccggacttaggatcattttcactcttgacgaagtcgccttcatacaaaatcttgtgttctacattgaggcagcgtataaggtcgcagattacggtatgtgggaacggggcgataaaactaatcagggaattccggagctgaacgcgtcgtccgtggggatggccaaagcggcgcttgaagcgatagacgagttggacctgtttggggcacacggtggccgtaaaagcgtgatccatgtgcttcctgatgaggtggagcactgccagtcaattttgttttccatgcttcctagggccagcacgtcgaaggagattgacgcaggtctgctttccattatcagctttcccgccttcgcagttgaggacgtcaatcttgtgaatgtgactaaaaacgaaatcataagcaagctgcagggaagatatggctgctgtcgctttctccgcgatggctataagacccctcgggaagatcctaatcggcttcattatgatcctgcagaattgaagctcttcgagaacattgaatgtgaatggcctgtgttctggacctactttatcattgatggagtgttttctggtgatgccgtccaggtgcaagaatacagggaggctcttgaaggaattctgataagggggaaaaatggaatccgcctggtgccagaactctacgcagtccctccaaataaggtggatgaagagtacaagaaccctcatacggtggatagagtgcctatgggtaaagtgccccacctctggggacaatccctgtacatcctgtcctcgcttctcgcagaaggatttcttgccgcaggggaaatcgatcctctgaaccggcggttttcgaccagcgtgaagccagatgtggtcgtgcaagtgaccgtcctcgccgaaaacaatcatatcaaggatctgcttcgcaagcatggagtcaatgtccaaagcatcgcggatattcatcctatccaggtgcaacccggacggatcctctcccacatctacgcgaagctcggaagaaacaaaaacatgaacctttccggtagaccctaccggcatattggagtcctgggaacctccaaactgtacgtcatccgtaaccaaatctttacttttacccctcaatttacggatcaacatcatttctacctcgcattggataacgaaatgatcgttgaaatgttgagaatagaactggcatacctttgcacttgttggcggatgaccggtcgtccaaccctgacgttccccatttcacgaactatgctgacgaacgatggttccgacattcattcggcagtgcttagcaccattagaaagctcgaggatggatactttgggggtgcaagagtgaagctcggtaacctgagcgaattcctgaccacgtccttttacacctatcttacctttctggaccccgactgtgacgaaaaactctttgataacgcatcagaaggcaccttcagccctgacagcgattccgacctggtggggtacctggaggacacttgtaaccaagaatcgcaggatgaactcgatcattacattaatcacctccttcagtcgacctcgctcagatcctacctcccgcctctttgcaagaacactgaggaccgtcatgtgttctcagcgatacactcgaccagagacattctgtccgtcatggcgaaggcaaagggcctggaagttcctttcgtgccaatgactctgcctaccaaggtgctgtcagcgcatagaaagtcactgaatctcgtcgattctccacaaccacttcttgaaaaggtgcctgagagcgattttcaatggccgagagacgatcacggagacgtggactgtgaaaagttggtggaacagctgaaggattgctcaaaccttcaagatcaggcagatatactttacatcttgtacgtcattaagggaccgtcttgggacacgaacctcagcggacagcacggcgtcaccgtgcagaacttgcttggagagctctacggaaaggcaggtcttaatcaggagtggggcctcatccggtacatttcaggactccttaggaagaaggtggaggtgcttgcggaagcatgcactgacctgctcagccatcaaaagcaactgactgtgggactcccacctgagccgcgagaaaagattatcagcgcacctctgccgcccgaagaactcaccaagctgatttacgaggcatcaggacaagatattagcatagcagtcctgacccaggagatcgtggtgtaccttgctatgtatgtgagagcacaacctagcttgtttgtggaaatgctgcggcttagaattggcctgattatccaggtgatggcgactgagctggcaaggtccctgaactgttcgggcgaagaagcatccgagtccctgatgaacctgtcccccttcgatatgaagaaccttctccatcatattctgtccggcaaggagtttggagtggaacggtcagtgcggccaattcacagctccacctcgtcgcctaccatttctattcacgaagtgggacataccggcgtgactaagactgaaagatccgggattaatcgccttagaagcgagatgaagcaaatgacccgtagattctctgcagacgagcagttctttagtgttggacaggcggcctcctcctccgcacattcgagcaaatccgcgcggagcagcaccccttcctcgccaactggtacctcatcatcggattcgggaggacatcatatcggctggggtgaaagacaggggcagtggctgaggcgccggcggctggatggggcaatcaatagagtcccagtgggtttctaccaaagagtctggaagatcctccagaagtgtcacggcctgtcaattgatggatatgtgttgccatcgagcacgactagagaaatgactccccatgaaatcaagttcgccgtgcatgtcgaaagcgtcctgaatagagtgccacaacctgaataccgccaattgcttgtggaagccatcatggtgcttaccctcctctccgacaccgagatgaccagcatcggaggaatcattcacgtcgatcagatcgtgcagatggcatcgcaactctttctccaggaccaagtgagcattggagcaatggacaccctcgaaaaggatcaggcaactggtatctgtcactttttctacgattcggcaccttcgggcgcatacggaactatgacctatctgacccgggccgtggcgtcgtacctgcaagagctcctccctaattctggatgtcaaatgcag

SEQ ID NO: 18071 - DNA, 3705 bp, synthetic construct
  misc_feature 1..3705: note = source = /note="Description of Artificial Sequence: Synthetic coding sequence"
  source 1..3705: mol_type = other DNA
atgagatccaggtccaacagcggcgtacgacttgatggttatgcaagactcgtccagcagacaatactgtgctatcagaacccagtaactggattgttgtcagcgtcgcatgaacagaaagacgcctgggtgagggacaatatctattccatcttagctgtatgggggctgggcatggcataccgaaagaatgccgaccgggacgaagacaaagccaaggcctatgagctcgaacagaatgtggtcaaactcatgagggggctgctgcaatgtatgatgagacaggtcgccaaggtagaaaaatttaagcacacccaatctactaaggatagccttcacgctaaatataacaccgcaacttgcggaactgttgtgggtgacgatcagtggggtcatctgcaggtggatgccacatcgctgttcctccttttcctggcccagatgaccgcctcaggcctccgtattatcttcaccctcgatgaggtcgcctttatccagaatctggtcttttacatagaagcagcctacaaggtggcggattatggcatgtgggagagaggtgacaaaacaaatcaaggcattcccgagctcaatgcgagcagcgttggcatggcgaaggccgcactggaagccatcgacgaattagatcttttcggagcgcacggcggccgcaagtctgtcatccatgttctgccggatgaagtggagcactgtcagtctatactgttctccatgctgccacgggcatccacttccaaagagattgatgctggcttgctctcaattatttcatttccagcgtttgccgtggaggacgtgaacttggtaaacgttaccaagaatgaaatcatttccaagctgcagggacgttatgggtgttgtagatttcttcgagatggttataagacgccccgcgaagatcccaatcgacttcactatgatcctgcagaactaaaactctttgaaaatattgagtgtgagtggccggtgttctggacctacttcatcatcgacggagttttcagcggcgacgccgtgcaggtgcaggagtatcgggaagctttggaggggattttaatcaggggcaagaatggcattagacttgtcccggagctctacgctgtgccacctaacaaagtggatgaggagtataagaacccacacaccgtcgaccgcgtgcccatggggaaagtgccacatctatggggacagtccctgtatattctgagttcactcttggctgagggctttcttgctgctggagaaatcgatccgttaaaccgtcgcttctctacaagtgtgaagcccgatgtggtcgtccaggtcaccgtgcttgcagaaaacaaccacatcaaggatctgttaaggaaacacggagtgaatgtgcagagcatagcagacatccaccccattcaagtacagccgggacggattctgagccacatatacgcaaagcttggacggaataagaacatgaacctgagtggcagaccctataggcacataggcgtgctgggcacaagtaaactgtatgttatacgcaatcaaatttttacttttactccccaattcacggatcagcatcatttctatctggctttagataacgagatgattgtagaaatgctgaggatcgagctggcatacttatgtacatgctggcgcatgacagggcgccccactctaacatttccaatcagcaggacaatgctgactaacgacgggtcggacatacactcggctgtactcagtactataagaaagttggaagacggctattttggaggagcgcgcgtgaagttgggaaaccttagtgagtttctgaccactagtttttatacatacctgacattcctcgatccagactgtgatgaaaaactctttgataatgcctctgaggggaccttttcccctgattctgacagtgatctggtcggatacctagaggatacttgtaatcaggagtcccaggacgaactggaccactacatcaaccacttactgcaaagcactagcctgaggtcctatctcccgcctttatgtaagaacacggaggatcgacacgtctttagcgcaatccacagcacacgggatatcctgtcagtgatggccaaggcaaaaggcctggaggtgccgttcgtgccaatgaccctgcctactaaagtattaagtgcccatcggaagagcctcaaccttgtggactcccctcagccactcttggagaaggtacctgaaagcgatttccagtggccacgggacgatcatggggatgtagattgtgaaaaacttgtggaacagctcaaggactgttccaatttgcaagatcaggctgacattttgtacatactgtacgtaattaagggcccatcttgggatacgaaccttagcggccagcacggcgtaaccgtacagaatttgttgggagagctttacggaaaggccggactaaaccaggaatggggtttgatccgctacatatcaggactgctccggaaaaaggttgaggttctcgcagaagcctgtacagatctgctgagtcaccagaagcagttgaccgtcggcctgccccctgaacctcgggaaaagatcattagtgcaccactcccccctgaagagctcaccaagctcatctacgaggcctctgggcaggacatttccatcgctgtgctaacccaagagattgtggtctacctggcaatgtacgtgagggctcagccctccctgtttgtggagatgttgaggttgcggatcggcctcataatccaggttatggccactgaattagcacgttccctcaattgttcaggcgaggaagcctccgagtccctaatgaaccttagccccttcgacatgaagaatctactgcatcatattctgtcaggaaaagagtttggcgtcgaaagatccgttcggcccatccactcttcaacatcaagtcccacaatctccatccacgaggttggccacactggcgtcaccaaaacggagcgtagcgggataaatcggttgagaagcgaaatgaaacagatgacacggaggttctcagccgatgagcaattcttttctgtgggacaggcagctagtagctccgcccactctagtaagtccgcaagaagtagtactccaagcagcccgacaggcacgagctccagtgacagcggaggccaccacatcggctggggcgagcgtcaggggcagtggctccggaggcgccggctggatggcgccattaaccgggtcccagtgggcttctaccagcgcgtgtggaagattctacaaaaatgccacgggctcagcatagatggctatgtactgcccagttccacaactcgagaaatgactccacatgagatcaaattcgcagtgcatgtggagtcagtgctgaaccgtgtaccacagccagagtatcgccagctcctggtcgaggccatcatggtgctgacactgctcagcgacacggagatgacctccataggcggtatcatccacgttgaccagattgtccagatggcctcacagctgttcctgcaagaccaggtgagcatcggcgcgatggacacgctggagaaggaccaggccacggggatatgccactttttttacgactctgctccctcaggggcctatggaacaatgacctaccttacccgggcggtcgccagctatctgcaggaactgcttccaaattctggctgccagatgcag

SEQ ID NO: 18072 - DNA, 3705 bp, synthetic construct
  misc_feature 1..3705: note = source = /note="Description of Artificial Sequence: Synthetic coding sequence"
  source 1..3705: mol_type = other DNA
atgaggtcacgttctaactcaggcgtacgcctggatgggtatgccagactggtacaacagaccatcctgtgttatcagaatcctgtaacaggccttctttctgcctcccacgagcagaaggatgcttgggtgcgggacaacatatatagtattctggccgtctggggcctcggtatggcctataggaaaaatgccgaccgtgacgaggataaagcgaaggcctacgaattggaacagaatgtcgtgaagttaatgcgtggcctgctacaatgcatgatgcggcaggtggctaaagtggagaagttcaagcacacgcagagcaccaaagactctcttcacgcgaagtataataccgcaacctgcgggaccgtggtgggcgatgatcagtggggccaccttcaggttgatgctacttccctgtttttgctctttcttgcacagatgacagccagcggacttagaattatctttacgctggacgaggtcgctttcatccagaatctggttttttacatagaggccgcgtacaaggttgctgactatggtatgtgggaaaggggcgataaaaccaaccaaggtattcctgaacttaacgcgagctctgtgggtatggcaaaggcagccctcgaagctatcgacgaattggatctgtttggcgcacatggaggcagaaagtccgtcatccatgtgctacccgacgaggtggagcactgccaaagcatcctatttagcatgctgccaagggcaagtacgagtaaagagatcgacgcgggactgctttccattatttcatttccagcctttgctgtggaggatgttaacctcgtaaacgtaaccaaaaatgagataatcagcaaactacagggaagatacgggtgctgtcgatttctacgggatgggtataagaccccccgcgaggacccaaatcgcttacactatgatccagcagaactgaagctgttcgagaacattgagtgcgagtggcctgtgttctggacatactttatcatcgacggcgtgttttccggcgatgccgtccaggtgcaagagtacagggaagccctggaggggatcctgatccgcggaaagaacggaatccgccttgtgccagagctgtatgctgtcccaccgaacaaggtggacgaagagtacaaaaatccgcacactgtggaccgggtcccaatgggcaaagtgccacacctatggggtcaatcactctacatcctaagtagcttgttggccgaaggtttcctggccgctggggagatcgaccctctgaaccgacgtttttcaacaagcgttaagcccgatgtcgtcgtgcaagtgaccgtgctggcagagaataatcatattaaagacctgcttagaaaacatggtgttaatgtacagagcatcgctgatatacaccccatccaagtccagccagggcggatcctgtcccatatatacgccaaattggggcgaaacaaaaatatgaatctgtcagggaggccatacaggcacatcggcgtgctgggcacctctaaactgtacgtcatccgaaaccagattttcacctttaccccacagtttacagatcagcaccatttttatctggctctcgacaacgaaatgatcgtggagatgcttcggatagaactggcatatctatgcacttgttggcgcatgacaggacggccaaccctgacttttcccattagcagaactatgctgacaaacgacggctcagatatccacagcgctgtcctttccacgattaggaaacttgaagacggctacttcggcggcgcccgggttaagctggggaatttgtcggagttccttacgacatctttttatacttacttgacctttctcgacccagactgtgatgagaagcttttcgacaatgcgtctgaggggacgttttccccagacagcgactcagacctagtgggttacctagaagacacatgcaaccaggagtctcaggacgaattggatcactacatcaatcatcttttgcaatctacatcattgcggagctatcttccacccctctgcaagaataccgaggaccggcatgtgttcagcgccattcacagcacccgagacatcctctccgtcatggccaaggctaagggcctggaggtgcctttcgttcccatgaccctgccgactaaggttctgtcagcccaccggaagagtcttaatcttgtggactccccacagcctctcctggagaaagtgccagaatcggactttcagtggcccagagacgatcatggggacgtggattgcgaaaagctggtggagcagctaaaggattgttccaacctacaggatcaggcagatattctatatatcctttatgtgattaaaggtccgtcctgggacacgaacctatcaggacagcacggggtgacggttcagaacctcctgggagagctgtatgggaaggcggggctcaatcaggagtggggcctcatacggtatatctccggtctgctgaggaaaaaggtagaagtactggctgaagcctgtactgacctattgtcacatcagaagcagcttacagtcggattgccgccagagccacgtgagaagattatctctgcccctctacctccagaggaactgaccaaactgatctatgaggcttctgggcaggatatttctatcgcagtgcttacccaggagatcgttgtgtatctggctatgtacgttagggctcagccaagtctgtttgtcgaaatgcttcgcctgcgcattgggcttataatccaggtgatggccacagagctcgcaagatccctgaattgctctggcgaagaggcctccgagagcttaatgaatctgagtccatttgatatgaaaaacctcttgcatcatattctgagtggcaaggagttcggcgtcgagcggtcagtaagacctatccattccagtacatcttcaccgaccatcagtatccacgaggtcgggcatactggagtcactaagacagagcgttcaggcatcaataggctccgaagtgagatgaagcagatgacgaggcggtttagcgccgacgagcagttctttagtgtggggcaggctgcgagcagctccgcccattcctcaaagtcagcacgctctagcacaccatcctcccctacgggcacgagttcctccgactccggtggacaccacatcgggtggggagaaagacaggggcagtggctgaggagacgcagactcgacggagcaattaatcgcgtcccggtggggttctatcagcgcgtgtggaaaattctacaaaaatgccacgggctgtcaattgacggctacgtgcttccctctagtacgactcgagagatgacgccacatgagatcaagttcgccgttcacgtcgaatctgtgctaaacagagttccccaacccgagtacagacagctgttggtggaagcaataatggtgttgacactcctgtcagacacagagatgacaagtattggaggaatcattcacgttgatcaaattgtacagatggcgagccagcttttcctccaggatcaagttagcataggggcaatggacacacttgaaaaggatcaggccacaggtatttgtcactttttctatgactccgcacccagtggggcgtacggaacgatgacatatctgaccagagccgtggcatcttatctgcaggaactcttgcccaattcaggttgccagatgcag

SEQ ID NO: 18073 - DNA, 3705 bp, synthetic construct
  misc_feature 1..3705: note = source = /note="Description of Artificial Sequence: Synthetic coding sequence"
  source 1..3705: mol_type = other DNA
atgcgttcgcgttcgaattcgggtgtacgtctagatggttatgcgcgattagtacaacaaacgatattatgttatcaaaatccggttacgggtttactatcggcgtcgcatgaacaaaaagatgcgtgggtacgtgataatatatattcgatattagcggtatggggtctaggtatggcgtatcgaaaaaatgcggatcgagatgaagataaagcgaaagcgtatgaattagaacaaaatgttgtaaaattaatgcgaggtttactacaatgtatgatgcgacaagttgcgaaagttgaaaaatttaaacatacgcaatcgacgaaagattcgctacatgcgaaatataatacggcgacgtgtggtacggtagtaggtgatgatcaatggggtcatttacaagtagatgcgacgtcgctatttctactatttttagcgcaaatgacggcgtcgggtttacgtataatatttacgttagatgaagttgcgtttatacaaaatctagtattttatatagaagcggcgtataaagtagcggattatggtatgtgggaacgaggtgataaaacgaatcaaggtataccggaattaaatgcgtcgtcggttggtatggcgaaagcggcgttagaagcgatagatgaattagatttatttggtgcgcatggtggtcgtaaatcggtaatacatgtattaccggatgaagtagaacattgtcaatcgatattattttcgatgctaccgcgtgcgtcgacgtcgaaagaaatagatgcgggtctattatcgataatatcgtttccggcgtttgcggtagaagatgtaaatctagttaatgtaacgaaaaatgaaataatatcgaaactacaaggtcgttatggttgttgtcgatttttacgagatggttataaaacgccgcgtgaagatccgaatcgtttacattatgatccggcggaattaaaactatttgaaaatatagaatgtgaatggccggtattttggacgtattttataatagatggtgtattttcgggtgatgcggtacaagtacaagaatatcgtgaagcgctagaaggtatactaatacgtggtaaaaatggtatacgactagttccggaattatatgcggtaccgccgaataaagtagatgaagaatataaaaatccgcatacggtagatcgagtaccgatgggtaaagtaccgcatttatggggtcaatcgctatatatactatcgtcgttattagcggaaggttttctagcggcgggtgaaatagatccgctaaatcgtcgattttcgacgtcggttaaaccggatgtagtagtacaagttacggttctagcggaaaataatcatataaaagatttattacgaaaacatggtgttaatgttcaatcgatagcggatatacatccgatacaagtacaaccgggtcgaatactatcgcatatatatgcgaaactaggtcgaaataaaaatatgaatttatcgggtcgtccgtatcgtcatataggtgttctaggtacgtcgaaattatatgtaatacgaaatcaaatatttacgtttacgccgcaatttacggatcaacatcatttttatctagcgttagataatgaaatgatagttgaaatgctacgtatagaattagcgtatctatgtacgtgttggcgaatgacgggtcgaccgacgctaacgtttccgatatcgcgtacgatgttaacgaatgatggttcggatatacattcggcggtattatcgacgatacgtaaattagaagatggttattttggtggtgcgcgtgttaaattaggtaatctatcggaatttttaacgacgtcgttttatacgtatctaacgtttttagatccggattgtgatgaaaaattatttgataatgcgtcggaaggtacgttttcgccggattcggattcggatctagttggttatctagaagatacgtgtaatcaagaatcgcaagatgaattagatcattatataaatcatctattacaatcgacgtcgctacgatcgtatttaccgccgctatgtaaaaatacggaagatcgtcatgttttttcggcgatacattcgacgcgtgatatactatcggtaatggcgaaagcgaaaggtctagaagtaccgtttgtaccgatgacgctaccgacgaaagttctatcggcgcatcgtaaatcgctaaatttagtagattcgccgcaaccgttattagaaaaagttccggaatcggattttcaatggccgcgtgatgatcatggtgatgtagattgtgaaaaactagttgaacaactaaaagattgttcgaatttacaagatcaagcggatatattatatatattatatgtaataaaaggtccgtcgtgggatacgaatctatcgggtcaacatggtgtaacggttcaaaatctactaggtgaattatatggtaaagcgggtttaaatcaagaatggggtttaatacgatatatatcgggtttattacgtaaaaaagtagaagtactagcggaagcgtgtacggatctattatcgcatcaaaaacaactaacggtaggtctaccgccggaaccgcgagaaaaaataatatcggcgccgttaccgccggaagaattaacgaaattaatatatgaagcgtcgggtcaagatatatcgatagcggtactaacgcaagaaatagtagtatatctagcgatgtatgtacgagcgcaaccgtcgctatttgtagaaatgctacgtttacgtataggtctaataatacaagtaatggcgacggaattagcgcgatcgctaaattgttcgggtgaagaagcgtcggaatcgttaatgaatttatcgccgtttgatatgaaaaatctactacatcatatattatcgggtaaagaatttggtgtagaacgatcggtacgtccgatacattcgtcgacgtcgtcgccgacgatatcgatacatgaagttggtcatacgggtgttacgaaaacggaacgatcgggtataaatcgtttacgatcggaaatgaaacaaatgacgcgtcgtttttcggcggatgaacaatttttttcggtaggtcaagcggcgtcgtcgtcggcgcattcgtcgaaatcggcgcgatcgtcgacgccgtcgtcgccgacgggtacgtcgtcgtcggattcgggtggtcatcatataggttggggtgaacgtcaaggtcaatggttacgtcgacgacgtttagatggtgcgataaatcgtgtaccggtaggtttttatcaacgtgtatggaaaatactacaaaaatgtcatggtctatcgatagatggttatgttctaccgtcgtcgacgacgcgagaaatgacgccgcatgaaataaaatttgcggtacatgtagaatcggtactaaatcgagttccgcaaccggaatatcgacaattactagtagaagcgataatggtattaacgctattatcggatacggaaatgacgtcgataggtggtataatacatgtagatcaaatagtacaaatggcgtcgcaattatttttacaagatcaagtatcgataggtgcgatggatacgttagaaaaagatcaagcgacgggtatatgtcattttttttatgattcggcgccgtcgggtgcgtatggtacgatgacgtatctaacgcgtgcggtagcgtcgtatttacaagaattattaccgaattcgggttgtcaaatgcaa

SEQ ID NO: 18074 - DNA, 3705 bp, synthetic construct; identical to SEQ ID NO: 18065
  misc_feature 1..3705: note = source = /note="Description of Artificial Sequence: Synthetic coding sequence"
  source 1..3705: mol_type = other DNA

SEQ ID NO: 18075 - DNA, 3705 bp, synthetic construct
  misc_feature 1..3705: note = source = /note="Description of Artificial Sequence: Synthetic coding sequence"
  source 1..3705: mol_type = other DNA
atgcgctcccggtccaactctggcgtcaggttggacggatacgcgcgccttgtccagcaaaccatcttgtgctatcaaaacccggtgaccggccttctgtcggccagccatgagcagaaagacgcctgggtcagagacaatatctactcaatcctggcggtgtggggccttggaatggcctaccgcaagaacgccgacagagacgaggacaaggccaaggcttacgaacttgagcagaacgttgtgaagctgatgaggggactgttgcagtgcatgatgcgccaagtcgcaaaggtggaaaagttcaaacacacccagtcgaccaaggattcgctgcatgccaaatacaacaccgcgacttgcggaactgtggtgggggatgaccaatggggtcatttgcaagtcgacgccacctcactgtttctgcttttcctcgcccagatgaccgcgtccggcctccgcatcatctttactctcgatgaagtcgcctttatccagaatctggtgttctacatcgaggcagcctacaaggtggcagattacggtatgtgggaaaggggagataaaacgaaccaaggtatcccggaactgaacgcttcatccgtgggcatggcgaaggcagccctcgaagcaatcgacgaactggatctctttggcgctcatggagggcgcaagagcgtgatccatgttctgcctgatgaagttgagcactgccagtcaattctcttttcgatgctgccgcgggcatcaacctcaaaggaaatcgacgccggcctcttgtcgatcatttcgttccctgccttcgccgtcgaggacgtgaacctcgtgaatgtcacgaagaacgagatcatcagcaaactccagggtcgctacggatgctgcagatttctgagagatggatacaagacccctcgcgaagatcctaatcggctgcattacgatccggcagaacttaagctgttcgaaaacatcgagtgtgaatggccggtgttctggacctacttcataatcgatggagtgttctccggcgatgctgtgcaggtgcaggaataccgggaagctctcgaaggaatcctgattcgcggtaaaaacggtatccgcttggtgccagagctgtacgccgtgccgccgaataaggtggatgaggagtacaaaaacccgcacaccgtggaccgcgtgcctatgggaaaggtcccgcacctctggggacaatcgctgtacattctgtcatctctgctggccgagggattcctcgccgccggagagatcgacccactgaaccgccggttctccacgtccgttaagcccgacgtggtcgtgcaagtgaccgtgctggccgaaaacaaccatatcaaggatctccttaggaaacacggtgttaatgtgcaaagcatcgcagatattcacccgatccaggtccaaccggggcgcatcttgtcgcacatctacgcgaagctgggacgcaacaagaatatgaatctctctggacgcccgtacagacatatcggagtgctcggaacgtcgaagctgtatgtgatccgcaatcaaatcttcaccttcaccccccagttcaccgatcagcaccacttctacctggcgcttgacaacgagatgatcgtggaaatgttgcggatcgaactggcctacctgtgtacgtgctggagaatgactggccggccgactctgactttcccaattagcaggaccatgctgaccaatgatgggtccgacatccactcggcggtcttgtccactatccggaagctcgaggacggctacttcggaggtgccagagtcaagctgggcaatctcagcgaattcctcaccacgagcttctacacctatctgacgtttctcgacccggactgcgatgagaagctgttcgacaatgcctctgagggcaccttctcgcccgactcggacagcgacctcgtcgggtacctcgaggacacttgcaaccaggaaagccaagatgagcttgaccactacatcaaccacttgctgcagtcgacttcgcttcgctcctacttgccacccctgtgcaagaatactgaagatcgccacgtcttttccgccatccactccactcgggacattttgtcggtcatggccaaggcaaaaggacttgaagtcccatttgtgcctatgactctcccgaccaaggtgctgtcggcgcacagaaagtcactgaacctggtggactcgccccagccattgctggaaaaggttccagaatctgactttcagtggcctcgggatgatcacggagatgttgactgtgagaaacttgtggagcagcttaaagactgttccaatctccaagatcaagctgacatcctgtatatcttgtacgtgatcaaaggaccatcctgggatacgaacctctcgggacaacacggagtgactgtgcagaacctgctcggcgagctctacgggaaggccggactgaatcaagagtgggggcttatccgctacatctcgggcctgctccggaaaaaagtggaagtcctggctgaagcctgcactgacctcctgtcacaccagaagcaactgactgtcgggctgccaccggaacctagagaaaagatcatctcagcacctctgccgccagaggaattgactaaactgatatacgaggcgtcggggcaagacatctccatcgcggtgctgacccaggagatagtcgtgtacctcgcaatgtacgtccgagctcaaccatcccttttcgtggaaatgctgcggctcagaattggcctcatcatccaggtgatggccacggaactggcacgatcacttaattgctccggagaagaggcatccgaatccctgatgaacctcagcccattcgatatgaagaatctgctccatcatattctgagcgggaaggagttcggtgtggagcggagcgtgcgaccaattcactccagcacttcgtcgcccactatttcgatccatgaggtgggtcatacgggagtcaccaagaccgagagatcgggcattaacaggctgcggtccgagatgaaacaaatgactaggcgcttctccgcggacgaacagttcttcagcgtcggacaggctgcatcatcatcggctcattcgtcgaagagcgctcggtcctcgactccaagctcacctacgggaaccagctcctcagattccgggggccaccacatcggatggggagagagacagggacagtggctccgacgccgccggttggacggggcgatcaaccgcgtgcctgttggattctaccagcgggtgtggaaaatcctccagaagtgccacggactgtcaatcgatggatacgtgttgccctcatccacgacccgggaaatgactccgcacgaaatcaaatttgcggtccacgtggaaagcgtcctcaatagggtgccgcagcccgagtaccgacagctgttggtggaagcgattatggtcctgactctgctgtcagacactgaaatgacttcaatcggaggcatcatacatgtggaccagatcgtccagatggcctctcagttgtttctgcaagaccaggtgtccatcggggctatggatactctggagaaggaccaggcgaccggaatttgtcatttcttctatgactccgccccgagcggagcttatggcactatgacctacctgacccgggctgtcgcatcttatctgcaagaactgctccccaacagcggttgccagatgcag

SEQ ID NO: 18076 - DNA, 3705 bp, synthetic construct
  misc_feature 1..3705: note = source = /note="Description of Artificial Sequence: Synthetic coding sequence"
  source 1..3705: mol_type = other DNA
atgaggagtaggtctaactcaggggtccgacttgatggctatgcgcgactggtgcagcagactattctttgttaccaaaacccagtcaccggtttgctaagcgcctctcacgaacagaaggatgcctgggtgcgagacaatatctatagtatcttggctgtctggggtctaggaatggcatatcgaaagaatgcagacagagacgaggacaaggcgaaggcttatgaacttgaacaaaatgtcgtcaagctgatgcgaggccttttgcagtgtatgatgaggcaagtggccaaagtagaaaagttcaagcatacccagtctaccaaagacagcttacatgcaaaatacaacactgcaacatgcggaacagtcgtgggggacgatcagtggggtcaccttcaggtggacgcaacctcactcttcctcctgtttctcgcccaaatgacagctagcggtctcagaattatttttacactggacgaagtggcgttcattcagaacctcgtgttctacattgaggcggcttacaaggttgcagactacgggatgtgggaaaggggggacaaaaccaaccagggcatccctgagctgaatgcaagctcagttggcatggccaaagccgctttagaagctattgacgagctcgatcttttcggagcgcatggaggccggaagtccgtgatccacgtactgcctgatgaggtggagcactgccagtcaatattattcagtatgctgccacgtgccagcacctctaaggaaatcgacgctggtctcctgtctattataagctttcccgcatttgcggtggaggatgttaacttggtgaacgtgacgaaaaacgaaattatatcaaaattacagggcagatacggctgttgtcgatttctgcgagatggatacaaaacaccgagggaggatcccaataggctgcactatgacccagcagaactgaagttatttgaaaatattgagtgcgaatggcccgttttctggacatatttcattattgatggcgtattctccggcgatgctgtgcaagtacaagaatatagggaagcacttgaaggtattctgatccgaggaaagaatgggattcgactggtccccgagctctacgcagtgccccccaataaggtcgacgaagaatataaaaatccccataccgtcgatcgtgtgccgatgggtaaggtccctcatctctggggacagagcctttacatcctgtcttcacttctagctgagggcttcctggccgctggagagatcgatccactgaatcggagattttccactagtgtgaagcctgatgtggtcgtgcaggtcacagtcctggccgagaacaatcacattaaagacttgttgcgaaaacacggggtgaacgtccagagcattgcagatatccaccccatccaggtacagcccggcaggatactgtcccatatttacgccaaactggggcgaaataaaaatatgaatctgagtggacggccctataggcatattggggtgttgggcaccagtaagttgtatgtgattaggaaccagatatttacatttaccccacagtttacagatcagcatcacttttacctggcactggataatgagatgattgttgaaatgcttagaatcgaactggcctacttgtgcacatgttggcgtatgacaggcaggccaactctgactttccctatttctagaaccatgctgaccaacgacggttctgatatccactctgctgtcttgagcacaatcaggaagctggaagacggttactttggtggcgcacgagtgaaactgggcaatctgagtgaattcctgactacatccttttacacatacctgacgtttttagaccctgattgtgacgaaaagctgttcgacaatgcatccgaaggcacctttagtcctgacagcgatagtgatcttgtcggatacttggaggacacctgtaaccaagaatcccaggacgagctcgatcactacattaatcacctgctgcagtcaacctctctgcgatcgtatttgccacctctctgcaagaacactgaagacagacacgtgtttagtgccattcattccacccgtgacattctctcagttatggctaaggcgaagggcctcgaagtgccctttgttccaatgacactacccacgaaagttctgtctgcccatagaaagagcctcaacctagtggactccccccagccgctcctcgaaaaagtacctgagtccgactttcagtggccccgggacgatcacggagacgtggactgcgagaagcttgtggagcagctgaaggattgttcaaacttgcaagatcaagcagatatcctgtatattctctatgtgatcaagggccctagttgggacactaatctgtctggtcagcacggagttactgtgcagaatttgcttggtgaactgtacggcaaagcagggttgaaccaggaatggggcctcattaggtatatctctggtcttctaaggaagaaagtggaggtgctagctgaggcttgtaccgatctgctatcccaccagaaacagctcacagtcggcctgcccccagaaccaagagagaaaattatcagcgcccccctgccgcctgaagagctaacaaagttaatatatgaagcaagcggacaggatatttccatagcagtgttaacacaggaaattgtagtttatttagctatgtatgtacgcgcccagccaagcctgtttgtggagatgctgcgtcttcgaattggtcttataattcaggtgatggccactgagttagccagaagtctgaattgttccggtgaagaggcctctgaaagcttaatgaacctttctccatttgacatgaagaatctgctgcaccacatcctcagcgggaaagagtttggggttgagcgtagtgtaagacctattcactcctccacatccagcccgacaatcagtatccacgaagtgggccatactggggtcacaaaaaccgaacgatccgggatcaatagactgcgcagcgaaatgaagcagatgactaggaggttctctgccgatgagcagttctttagcgtgggacaagctgccagcagctctgctcactcgtcaaagtccgccagaagctccaccccctcgtcccctaccgggacttcgagctccgattctggcgggcaccatattggatggggcgagagacaaggccagtggctgcgaaggagacgattggatggcgctatcaaccgagtaccagtgggcttctaccagagggtgtggaaaattcttcagaagtgccatggcttatctattgacgggtacgtgctgcctagctccaccacccgagaaatgaccccacacgagatcaagttcgctgtccatgttgaatccgtgctcaacagagtgccgcagcccgagtacaggcaactgctcgttgaggcgattatggtgcttacactcctcagtgacacagaaatgacctctattgggggcattattcacgtagaccaaatcgtgcagatggcatcccaacttttcctacaggaccaggtgagtatcggagcgatggacacacttgagaaagaccaagcgactggtatttgccatttcttttatgattcagcaccatcgggggcatatggtacaatgacctacctgacccgcgccgtggcctcataccttcaggaactgctccccaacagtggctgtcaaatgcaa

SEQ ID NO: 18077 - DNA, 3705 bp, synthetic construct
  misc_feature 1..3705: note = source = /note="Description of Artificial Sequence: Synthetic coding sequence"
  source 1..3705: mol_type = other DNA
atgaggtccaggtctaattctggcgtcagattagatgggtacgcccggttggtgcagcagactattctttgctatcaaaatcctgtgacaggccttctgagcgccagccacgaacagaaggacgcgtgggtccgtgataatatttatagcatattggcagtctggggactgggtatggcatacagaaagaatgccgatcgcgatgaagataaggccaaggcatatgagttggagcaaaatgtagtgaagcttatgagagggttgttgcaatgcatgatgcgacaagttgcgaaagtggagaaattcaaacacacccagagtacaaaggatagcctccatgccaaatataataccgcgacatgcggcacagtggtcggcgatgatcaatgggggcacctccaggttgacgccacttcgctgtttctgctctttctggcccaaatgacggcgagtgggttgaggattattttcactctggacgaggtggcatttatccagaacttggtcttttatatcgaggccgcctataaggttgcggactatggcatgtgggagagaggggacaagacaaatcagggcatcccagagctgaacgccagttcggtggggatggcgaaggctgccctggaggccatagacgagctggaccttttcggggcacatggggggaggaaatccgttatacatgtgctcccagacgaggtagaacactgtcagtccatcctgtttagtatgctaccacgcgcatcaacaagtaaagagatagacgctggattactgagtattatcagttttcctgccttcgccgtcgaagatgtaaatctggttaatgtaacaaagaacgagattatcagtaaactacaaggccgatacgggtgttgcaggtttctgcgggacggctacaagaccccgcgggaggaccccaatagactccattacgatccggccgagctcaaactctttgaaaacattgagtgtgagtggcccgtattctggacatactttatcattgacggcgtgttctctggcgacgctgtgcaagtccaggagtacagagaggcactggaaggtatattgatccggggaaaaaacgggatcaggctcgtgcccgagctgtatgccgtgcctccgaacaaggtcgatgaagagtacaaaaacccacatacagtggatagggttccaatgggcaaggtgcctcacctctggggtcagtccctgtatatcctgtcctccctcttagctgaggggttcctagcagcgggcgagatcgatcctctcaaccggagattttctacaagcgtaaaacctgatgtcgtggtccaagtcacagtacttgccgagaacaatcacattaaagacctgttgaggaagcacggggtgaacgtgcagtctatcgccgacatacatcccatccaagtccaacccggtcggattctaagtcatatctacgcgaagttgggacgtaacaagaatatgaatttatcaggtcggccctaccgccatatcggggtcctgggaacatccaagctgtacgtgatccgcaaccagattttcacattcacacctcagttcaccgaccaacatcacttttatttggccctcgacaatgaaatgattgtggaaatgctgaggattgagctagcctacctatgcacatgctggcgaatgacagggcgaccaactctcacgtttccaatctcccgcacaatgttgactaacgatggatcagacatccattcagctgtgctgagcactatcagaaaattggaagacggatactttggcggggccagagtgaagctcgggaatctaagcgagttcctcacgacaagcttctatacgtatttgacctttctcgaccccgattgtgacgagaagctgtttgataacgctagtgaagggactttttctcccgactccgactccgacttggtcggctatcttgaggatacatgtaaccaagagtcacaagacgaattggaccattacatcaatcatctcctccagtccacatctctgaggtcctacctgccacctctgtgcaagaacacagaggaccggcacgtatttagcgcaatccatagtactcgggacatccttagcgtaatggcaaaggctaagggactggaggtgcccttcgttccaatgacgttaccaacaaaggtgctctcagctcacaggaagagcctgaacctggtggactccccccagccattgctggagaaagtgccggagtcggattttcagtggcctcgtgacgatcatggggacgtggactgcgaaaagcttgtggaacagttgaaggactgttcaaacctgcaggaccaggctgatattctctatatcctctacgttattaaggggccttcatgggatacaaacttgagcggccaacacggcgtcaccgtccaaaacctactcggggagctatacggaaaggccgggcttaaccaggagtgggggttgatcagatatatttcaggacttttgcggaaaaaagtagaagtgctggccgaagcatgcaccgacctcttgagtcaccagaagcagctaaccgtgggcctgccaccagagccaagggagaagattatcagtgcccctctgccacctgaggagctgacaaaattgatctatgaggccagtggccaagacataagtatcgctgtcctgacacaggagattgtcgtctatctagcaatgtacgttagagcacaaccgagcctattcgtagagatgctgagactccgaatcggactgattatccaggtgatggccactgagctcgccagatcccttaattgcagcggcgaggaagctagcgagagtctgatgaatctctcaccatttgatatgaaaaaccttcttcaccatatccttagcggaaaggagttcggagttgagcgatctgttcgacctatacatagttcaacgagctctccaactatttctatccacgaggtcgggcatacgggggtgactaaaaccgagagatccggaattaatagactgaggtccgaaatgaagcagatgacaagaaggttcagcgcggacgaacagttcttcagcgttggccaggcagcttcctcctctgctcattccagcaaaagtgcccggtcatccaccccctccagtccaaccgggacatctagttcagattcaggaggccatcacatcgggtggggtgaacgtcaaggacaatggttaaggagaagaaggctggacggggcaatcaatagggtaccggtggggttttatcagcgcgtttggaaaatcctgcagaagtgccacggactcagtattgacgggtatgtcctcccgtccagcacaacccgggaaatgacaccacacgagattaagttcgctgtgcacgtggagagcgttctgaaccgagtgcctcagcctgaatatcggcagctcctggtggaggcgatcatggtccttactctgttgtccgatacagagatgacctccattggtggcataatccatgtggaccagatcgtacagatggcttcacagctgtttctccaggaccaggtaagtattggcgctatggacactctggagaaagaccaggctactggaatctgccacttcttttacgactccgccccgtctggcgcttacggcactatgacatatctgacccgggcagtagcgtcgtacctgcaggaactccttccaaattcggggtgtcagatgcag

SEQ ID NO: 18078 - DNA, 3705 bp, synthetic construct
  misc_feature 1..3705: note = source = /note="Description of Artificial Sequence: Synthetic coding sequence"
  source 1..3705: mol_type = other DNA
atgcggagccgatccaattccggtgtccggctggatggctatgcccgccttgtgcaacagacaatcttatgctaccaaaatccagtcactgggctattaagcgcttctcatgaacaaaaagacgcatgggtccgcgataatatatacagcatcctggcggtttgggggctgggtatggcctacaggaaaaatgccgatagagatgaagataaggcaaaggcatatgagctggagcagaatgttgttaagctgatgagagggcttctgcagtgtatgatgcgccaggttgcaaaggtggaaaagttcaagcacactcagtccactaaggactcactccacgcaaagtataacactgccacatgtggtacagtggtaggggacgaccagtgggggcacctgcaggtggacgcgacatcgctcttcctcctgttcttggcccaaatgaccgcctccgggcttagaataattttcacgctggacgaggtggcctttattcagaacctggtgttttatatcgaggccgcatacaaggtcgcagactatggcatgtgggagagaggagataagacaaaccagggtatcccagagctgaacgcctcatccgtggggatggcgaaggccgctctggaagcaatagatgaactggatctgtttggtgcacacggaggccgcaagagcgtcatacatgtcctgccagacgaggtggagcactgccagtctattctcttcagcatgttaccaagagccagtacctcaaaggagatcgacgccggattgttgtctattattagtttccccgcttttgccgtggaagatgtcaaccttgttaatgtaaccaagaacgagattattagcaaacttcagggccggtacggttgctgtaggttcctcagggacgggtataaaacccctagagaagaccccaaccgactgcattacgatcccgcggagctgaaactcttcgagaatatcgagtgtgaatggccagtgttttggacctactttattatagacggagtcttcagtggtgatgccgtgcaggtccaggaatatagggaagcactggaaggaatcctgataagggggaagaacggtatcaggctcgtgcctgagctttatgccgtgcctccaaataaggtagatgaggagtacaaaaaccctcacacggtggacagagtgcccatgggaaaggttccacacctgtggggacagtccctctacattcttagcagtctgctagccgaaggcttccttgccgccggggagattgatccgctaaatcgacgattcagtacctctgtgaagcctgacgtggtcgtccaggtaactgtcctggccgagaacaatcacataaaggaccttctgaggaaacacggcgttaacgttcagtctattgccgatattcacccaatccaggtccagccaggaagaattcttagccacatctatgctaagctgggtaggaacaagaacatgaatctttccggtcgaccttacagacatataggtgtccttggcacaagtaagctgtatgtcattcgcaaccagatattcacttttaccccccagttcacagatcaacatcatttctacctggcactggataacgaaatgatcgttgaaatgttgcggatcgagctggcatatctatgtacatgttggcgaatgactggtaggcctaccctcacattcccgatcagccggaccatgttgaccaatgatgggtcagatattcatagcgccgtgctctcaacaataaggaaactggaggacggctactttgggggtgcaagagtgaagctcgggaatctgtcagagttcctgactacaagcttctacacctacctgaccttcctcgaccccgattgtgacgaaaaactcttcgataacgcctccgagggaactttctcccctgactccgactctgatctcgtggggtaccttgaggacacgtgcaatcaggagtcccaggacgagctggatcattacattaatcacctactacaaagcacctccctcaggagctatcttcccccgctgtgtaagaatacggaagacagacatgtcttttccgcgattcatagtacccgggatattctgtcggtgatggccaaagcgaaaggcttggaggtccctttcgtacctatgactcttccgaccaaagtcctgagcgctcacaggaagagcctgaacttggttgatagtcctcagccgttgctcgaaaaagtgccagagtccgatttccagtggcccagagacgatcacggcgacgtcgattgcgagaaattggttgaacagctcaaggactgctcaaacttacaggaccaggcggacatactctatattctctatgtcatcaagggtcctagctgggatacaaacttgagcggccagcatggggtgaccgtgcagaatttgcttggcgaattgtatggcaaggcgggtctgaatcaggaatggggcttaatcagatacatttccggcttgctccgaaaaaaggtagaagtgcttgcagaagcttgcacagatctgctctctcaccagaagcaattaacagtagggctcccgccagagcctagagagaaaattatctctgcccctctgccccctgaggaacttactaagctgatatatgaggcttctggtcaggacatctccatcgctgtgttaacacaggagatcgtggtttatcttgccatgtacgtgcgggctcagcctagcctattcgtggaaatgctgcggctccgtatcggtctgatcattcaagtgatggctactgaattggctcggtccctaaactgtagcggagaagaggcgtcagagtccctgatgaatctctccccatttgacatgaaaaacttgctacaccacatcctttcaggaaaagaatttggggtggagcgaagtgtgcggcccattcattctagcaccagctcgcctacaatttcaatccacgaagtgggacacactggtgttaccaaaacagagagaagcggtatcaataggctcaggtcggaaatgaaacaaatgacacgccgtttttctgcggacgaacagttcttttctgtcggccaagccgccagttctagtgctcacagttctaaatccgctcgtagctcgaccccatcaagcccgactggcacatcaagctctgatagcggcggccaccatattggctggggggaacgacagggccagtggttacgtcgcaggcgcctggacggagccattaatcgcgtcccagtaggcttttatcagcgggtgtggaagattctgcaaaagtgccacggcttgtccatcgacggttacgtcctccctagctccactactcgggagatgacacctcacgaaatcaagttcgccgtgcacgttgagtcagttctgaacagggtgccacaacccgagtacagacagcttctggttgaagcaataatggttcttactctcctcagcgataccgaaatgacaagcatcggtggcattatccacgtggaccagatcgtgcagatggcgagtcaacttttcctgcaagaccaggtaagcataggggccatggacactctcgagaaagaccaggccacaggcatatgccattttttctacgacagcgccccaagcggtgcctacggaacgatgacctatctcacccgagcggtcgcatcctacctccaggagttactgcccaactctggatgccagatgcag

SEQ ID NO: 18079 - DNA, 3705 bp, synthetic construct
  misc_feature 1..3705: note = source = /note="Description of Artificial Sequence: Synthetic coding sequence"
  source 1..3705: mol_type = other DNA
atgagatcaagaagcaattccggagtgcggctggatggctacgcccgcctggtccagcagaccatcctctgctaccaaaacccggtgaccggactgctgtcagcatcgcatgagcaaaaggatgcgtgggtgagggacaatatctattccatcctcgcagtctgggggctgggaatggcctatcggaagaacgcagaccgggatgaggacaaggcgaaggcctacgaactggaacaaaacgtggtgaagctgatgcgcggcctgctgcagtgcatgatgaggcaggtcgctaaggttgaaaagttcaaacatacccagagcactaaagacagcctgcacgcgaaatacaacacggcgacttgtgggactgtggtcggagatgaccaatgggggcaccttcaagttgacgcgacctcgctcttcctcctgttcctcgctcaaatgaccgcttccggtcttagaatcattttcactctggacgaagttgcgttcatccaaaacctcgtgttctacatcgaagctgcctacaaagtggcagactacggcatgtgggaaaggggagataagactaaccagggaattccggagctgaacgcgtccagcgtagggatggccaaggctgccctcgaagcgatcgatgagctggaccttttcggagctcatggcggaagaaaaagcgtgatccacgtccttccggacgaggtggaacattgccagagcatcctgttcagcatgctccctcgggcatcgacttcgaaagaaatcgatgccgggcttcttagcatcatctcatttcctgccttcgccgtcgaggatgtgaaccttgtgaacgtgactaagaacgaaatcatctccaagctgcagggacgctacggttgctgcagattcctgcgcgacggttacaagactcctcgggaggacccaaaccgcctgcactacgatcctgccgagctcaaactcttcgagaatattgagtgtgaatggcccgtgttctggacttacttcattatcgacggcgtgttttcgggcgacgccgtgcaggtgcaggagtaccgagaagctctggaaggaatcctgatccgcggaaagaacgggatccggctggtcccggaactgtacgccgtgccgccaaacaaagtcgatgaggagtacaaaaacccgcatacggtggatagggtcccaatgggaaaagtgccacacctgtggggtcagtccctgtacatcctctcaagcctgctggccgaaggattcctggccgccggcgagatcgatccgctgaatcgtaggttctccactagcgtgaagcccgacgtggtggtgcaagtgaccgtcctggccgaaaacaaccatatcaaagaccttcttagaaagcatggagtgaatgtgcagagcattgccgacatccatccgattcaggtccaaccgggacggatcctctcgcatatctacgctaagctcggacgcaacaagaacatgaatctctcaggtcgcccctacagacacatcggtgtgctggggacttccaaactttacgtgattcggaatcaaatcttcactttcacgccacagttcactgatcaacatcacttctacctcgcactggataacgagatgatcgtcgagatgttgcgcattgaattggcgtacctttgcacttgctggagaatgactggccgcccgaccctgacgttccctatctcaagaaccatgctgactaacgacgggtccgacatccattcagccgtgttgtccactattcgcaagctggaggacggctacttcgggggcgcccgggtcaagctcggaaacctttcagaattcctgaccactagcttctacacgtacctgactttcctggacccagattgcgacgaaaagctgttcgacaacgcctccgagggaactttcagccccgactctgattccgatctggtgggctaccttgaagatacttgcaaccaggagtctcaggacgagctcgatcactacataaaccatctgctgcagtcgacttcactcagatcgtaccttcctccactctgcaaaaacactgaggatcggcacgttttctccgccatccactccactcgcgatattctgtctgttatggctaaagctaagggactggaggtaccgtttgtcccaatgactctgccgactaaagtcctttcggcccaccgcaaatcgctgaatctcgtcgattcgccacagccgctcctcgagaaggtgcctgagtcagactttcagtggccacgcgacgatcacggagacgtcgactgtgaaaagctggtcgaacagctcaaggattgtagcaacctgcaagaccaggccgacatcctctacatcctgtacgtgatcaagggtccttcctgggataccaacctctccggacaacacggagtcactgtgcagaacctgctgggtgaactctacggaaaagccggactcaatcaggagtggggacttatccgatacatctcgggactgctgcgaaagaaggtggaagtcctcgccgaagcctgcaccgatctcctctctcaccagaagcagctgaccgtgggactccctccagagcctagagagaagatcatctccgcacccctcccaccagaagaactgactaaactcatctacgaggcttcagggcaagatatctccatcgccgtgttgacccaagaaatcgtcgtgtacctggctatgtacgtccgcgcacaaccctcattgttcgtcgagatgctgcgcctgcggatcggactgattatccaggttatggcaaccgagctggccagatcgctcaactgctcgggcgaggaagcctcggaatctctcatgaatctgagccctttcgatatgaagaacctgctccaccacattctgtcaggaaaggaattcggtgtggaaaggagcgtccggccaatccactcctcaacttcatcgccaactatctcaattcatgaagtgggccacacgggggtgacgaaaaccgaaaggtctggcatcaatcggctgaggagcgaaatgaagcagatgacgcggaggttttcagcagacgaacagtttttctcagtgggtcaagccgcgtcctcgtccgctcactcaagcaagtcggcgcgcagcagcacgccttcgtcccctactggaaccagcagctccgacagcggggggcaccatatcggatggggcgaaagacaaggacagtggctgagacgccgccggctcgacggcgccattaacagagtgccagtggggttctaccaacgagtgtggaaaatcctgcagaagtgccatggactcagcatcgacggatacgtccttccgtcgtccactacccgagaaatgaccccgcacgagataaagtttgccgtccacgtggagagcgtgttgaatcgcgtgccgcagccagaatacagacaactgttggtcgaggccatcatggtgctgactctcctcagcgacaccgagatgacttccattggggggattatccatgtcgaccagatcgtccagatggcctcgcagttgttcttgcaggaccaggtgagcatcggagctatggataccctcgaaaaggaccaggcgaccgggatctgtcatttcttttatgacagcgcaccttccggtgcctacggtaccatgacctatctgactcgcgctgtggcctcatacttgcaagaacttctgccaaactcgggatgtcagatgcag

SEQ ID NO: 18080 - DNA, 3705 bp, synthetic construct
  misc_feature 1..3705: note = source = /note="Description of Artificial Sequence: Synthetic coding sequence"
  source 1..3705: mol_type = other DNA
atgagatctagatcaaattcaggagtcaggctagatggatatgctagattggttcaacaaacaatcttatgttatcagaatccggtgactggcttgctttccgccagtcatgaacaaaaagatgcatgggttagagataatatttattcgatcctcgcagtttggggtttgggaatggcctaccgaaagaatgcggatagagatgaagataaggcaaaggcttacgaactcgagcaaaacgttgttaaacttatgcgaggtctcctccaatgtatgatgcgacaggttgctaaagtagagaaattcaaacatactcaatctacaaaagattctcttcatgcaaagtataatactgcaacatgtggcacggtggtgggagatgaccaatggggacacctacaagtggatgcgacatcgctgttcttattgtttctggcccaaatgaccgctagtggactgcgaattatattcacactggatgaggtcgccttcattcaaaacttggtcttttacatagaagctgcttataaggttgctgattacggaatgtgggaacgaggagataaaactaatcaaggaatcccagaactgaatgcttcaagtgtcggaatggccaaagcagctctagaagcgatcgacgaattggatctctttggagctcatggaggacgaaaaagtgtgattcacgtcttaccagatgaagtcgagcattgccagtcaattttgttttctatgctaccaagagcatcaactagcaaggaaattgacgcaggtctactttcgatcatttcttttccagcttttgctgtggaggacgttaatttggtgaatgtgacgaagaatgaaatcatctcaaagttgcaaggacgatacggttgttgtagatttttacgagatggatataaaactccaagagaggatccgaaccgcttgcactatgatccagctgaacttaaattatttgagaatattgaatgcgagtggccagtgttttggacatactttattatagatggggtgttctctggagatgctgttcaagttcaggagtaccgagaagcacttgagggaattttaatcagaggaaaaaatggaatccgtctcgttccggaattatacgccgtgccgccaaataaggtggatgaggaatacaaaaatccacatacggtagatagagtgccaatgggaaaggtcccccatctatggggacaatcactgtacattttatcttctcttcttgccgaaggattccttgctgccggggaaatagacccattgaatcggagattctcaacgagtgttaagccagatgttgtcgtgcaggtcacagtgcttgctgaaaacaaccacatcaaagatcttttgagaaaacatggagttaacgtgcaatccatagctgacatccacccaattcaagtccagccaggtcgcattttgtcgcacatttacgcgaagctggggcgcaacaagaatatgaatttgtcgggaagaccttataggcacatcggagttttgggaacctctaaactgtatgtcataagaaaccaaatcttcacatttactccgcaattcacggatcagcaccacttttacttggctctagataacgaaatgattgttgagatgcttcgtattgagttggcatatttgtgtacttgctggcgtatgaccggtcgtcctactctcacctttcctatttcgagaacgatgttgaccaacgatggatcggatattcattcagctgtattgtcaaccattagaaagctcgaagatggctactttggaggggcgagggttaaactcggtaatttgtctgagtttcttaccacctctttctatacgtatctaacgtttttagatccggactgcgatgaaaaacttttcgataatgcttcggaaggcacgtttagtccagattctgattcggatcttgtgggatatttggaggatacctgcaaccaggagtcgcaggacgagcttgatcattatataaatcacttgttacaaagtacgtctctaagatcttacctgccaccgctctgcaagaatacagaagaccggcacgtctttagtgccatccattcaacccgtgatatactctcagttatggctaaagcaaaaggacttgaagttccattcgtgccaatgacactaccgactaaggttctatcagctcatcgaaaatcacttaatttggtagatagtccacaaccactacttgaaaaagttccagaaagcgattttcaatggccacgtgacgatcatggagatgttgactgcgagaaacttgtggaacaactcaaggattgctccaatctgcaggaccaagcggacatactatatattttatacgtaatcaagggcccgagttgggacactaatttgtcaggacagcacggagttacagtccagaatttgcttggtgaactctacggaaaggcaggattgaatcaagagtggggactcatacgttatatctccggtctcctcagaaaaaaagtagaggttttggctgaagcgtgtacggacctactttcccatcagaaacaattgacggtaggactaccaccagagccaagggaaaaaatcatctctgcaccattgccaccggaagagctcacgaaactgatctatgaagcatcgggacaagatatttcgattgctgtactcacacaggaaatcgtcgtctatcttgcaatgtacgttcgcgcacagccaagtttattcgtcgagatgctaaggctgagaattggcctgattattcaagtcatggctacggagcttgctcgatctttgaattgttcaggagaagaggcaagtgagtcccttatgaacctaagcccttttgatatgaagaatctgttacaccatattctttcaggaaaagagttcggagtagagagaagtgtccgtccaattcattccagtacttcctcgcctacgatctcgatacacgaagtcgggcacaccggagtaacgaaaactgagaggtctggaattaatcgacttaggtcggaaatgaagcaaatgacgcgaaggttctcagctgatgagcaattcttcagtgtgggacaggccgcgtcgtctagtgctcactcatcaaagtcagcccgttcatcgacgccaagctcgccaactggcacctcttcatcagattcaggtggacatcatattggatggggagagagacaaggacaatggctaaggcggagacgactcgacggcgctattaatagagtgccagtaggtttttatcagcgtgtatggaaaattttgcaaaagtgtcacggacttagtatcgacggctacgtattaccatcgagtacaacgcgtgaaatgactccacacgagattaagttcgctgtacacgttgaatcagttcttaatagagtaccgcaacctgaatatcgtcaactgctggtcgaagcaataatggtattgaccttactttcagatacggaaatgaccagtattggaggaattatacatgtggatcaaattgtgcagatggctagccagctttttttgcaggatcaagtgtcaattggcgcgatggatactttggagaaggatcaggccacaggcatttgtcattttttttatgattcagcaccaagtggtgcctatggaacaatgacttacctaacacgcgctgttgcatcttaccttcaggaacttttaccaaacagtggatgtcaaatgcaa

SEQ ID NO: 18081 - DNA, 3705 bp, synthetic construct
  misc_feature 1..3705: note = source = /note="Description of Artificial Sequence: Synthetic coding sequence"
  source 1..3705: mol_type = other DNA
atgcgctccagaagtaattctggggttaggctggacggttacgccagattggtacagcagaccattctgtgctatcagaacccggtgacaggtctactgagcgcatcacacgagcagaaggatgcttgggttagagataacatatattctattctcgccgtgtggggcctcgggatggcctatcgtaaaaacgccgatcgcgacgaggataaagccaaagcctacgaactcgagcagaacgtggtgaaacttatgcgaggactactacaatgcatgatgcgccaggtggccaaggttgagaaattcaagcatacccagagcaccaaggatagccttcacgcgaaatacaatacagccacctgtggcacggtggtaggggacgatcagtggggtcaccttcaggtggacgctaccagcttatttcttctgtttctggctcagatgacagccagcggcctccgaattatattcacattagacgaggttgcctttatccagaacctggtgttttatattgaggccgcctataaggtagccgactacgggatgtgggagcgcggcgacaagacaaaccaggggatccctgagttgaatgcctcatcagtaggaatggccaaggccgccctggaagcaatagatgagctggacctcttcggagcccacggaggtcgaaaatccgtgattcacgttttaccggacgaggttgaacattgtcaaagcatcctgttttccatgttgccgcgagcatcaacaagtaaggaaatagatgctggcctactgtccataattagcttccccgcctttgcagtggaggatgtaaatttagttaatgtgaccaaaaatgagataattagtaagttgcagggccgatacggttgctgcagattcctgcgcgacggctataaaacccctagggaagatcccaaccgtttacactacgaccccgcagaactcaaactgttcgaaaatatcgaatgtgaatggccggtgttttggacatactttataatcgacggcgtcttttctggcgatgctgtccaggtccaggaatatagagaagcactggaaggtatcctaatccgaggcaagaatggcatccggcttgttcctgaactctatgcagtcccaccaaacaaggtggatgaagaatacaaaaatcctcatactgtcgatcgagtccctatgggcaaggtcccccacttatggggtcaatctttatacatactatctagcttgttagcggaaggctttctggctgccggggaaatagaccctctcaataggcgatttagtacctccgttaagcccgatgtggtcgtccaagttactgtacttgcagaaaacaatcacatcaaagatttacttcggaaacacggagtcaacgtgcaatccattgccgatattcaccctatccaggttcagcccggtcgaattctctctcatatttacgctaagctaggaaggaataagaacatgaacctgagcggaaggccctaccggcatattggtgtgctgggaacaagtaagctctacgttataagaaaccagatttttactttcacacctcagttcactgaccaacaccatttttatctggctctggacaatgagatgattgtggagatgttaaggatcgaactggcttacttatgtacatgttggcgaatgacaggtcggccaacgcttacgttccccatctcacggaccatgctgactaacgacgggtctgatattcatagtgctgtgctctcaaccattcgaaaattggaagatggatactttggcggggcaagagtcaaactggggaatctgagtgagtttctgactacatccttttacacttacctgacattccttgaccccgattgtgatgaaaagttatttgacaatgcatccgaaggcaccttctctcccgattctgattcagaccttgtgggttatttggaggatacctgcaaccaagagtcgcaggatgaactagaccattatatcaaccatctcttgcagagcacttccctccgtagctatctgcctcccttgtgcaagaatacagaggaccgccatgtgttcagtgccatccattccactcgcgatattctgagtgtaatggccaaagccaagggtctagaggttccattcgtgcccatgacgttgcccaccaaggtcctcagtgcccacagaaagagtctcaatctggtggacagtccacaacccctattggagaaagtgccagagtccgatttccagtggcccagggatgaccatggcgatgtggattgcgaaaagctggtagagcagcttaaggactgtagcaacttgcaggaccaggctgacattctttatatcctatacgtgatcaaggggccctcatgggatactaatctctccgggcagcacggcgtgacagtgcagaacctgctgggggagctatatggcaaggcgggattgaaccaagaatggggactcatacgttacatctcaggactcctgcggaaaaaagtcgaggtgctggcagaggcctgtaccgaccttctatctcatcagaaacagctcacagtcggactgccgccggaaccccgcgaaaaaatcatctctgctccattgccacccgaggaacttaccaagctgatctatgaggcctcaggccaggatatttccatagccgtgttaacacaggagatcgttgtgtacctggccatgtacgtgcgcgcccaaccaagcctgttcgtggaaatgctgcgtctgagaattggcctgattattcaggtgatggcaacggagttagcccggtccttgaattgtagtggagaggaggcatctgaatctttgatgaacctcagtccctttgatatgaaaaacctattgcatcatattctgtcggggaaagaatttggtgtggagcgcagcgtgcggccgatccactcatctacaagctctcccaccatcagcattcacgaggtcggccacaccggcgtgaccaaaaccgagaggtcgggtatcaataggctgcgcagcgagatgaagcagatgactaggcgctttagcgccgatgagcagttcttcagtgtcggacaggccgcctcgtccagtgcccattccagtaagagcgcccgttcaagtacaccctcctcgccaactggtacatcttcatccgatagtggaggtcaccatattggttggggagagcgacaagggcagtggctgagaaggcgtcgcctggatggagccatcaaccgcgtgcccgtgggcttttaccagcgggtctggaagatcctccaaaagtgccacggattgagtattgacggctatgttctaccatccagtacaactagggagatgacgccgcatgaaattaaattcgcagttcacgtggagtccgtactgaatcgggtacctcagcccgagtaccggcagttgcttgtcgaagcaattatggttctgactctcctgtccgataccgaaatgacatcaatcggcgggattatccatgtcgatcaaatcgtccagatggcctctcagctgttcctgcaggatcaggtgtcaataggagccatggacacactggagaaagaccaggcgacagggatctgtcactttttttacgactccgcaccctctggcgcttatggaactatgacctatcttacacgtgccgttgcttcctacctccaggaactcctgcccaatagtggatgccagatgcag

SEQ ID NO: 18082 - DNA, 3705 bp, synthetic construct
  misc_feature 1..3705: note = source = /note="Description of Artificial Sequence: Synthetic coding sequence"
  source 1..3705: mol_type = other DNA
atgcgcagcagaagtaacagcggcgtgagactggacggatatgctcgcctggtccagcaaacaattctgtgctaccagaatcccgtgaccggcttattgagcgcatctcacgaacagaaagatgcatgggttagggacaacatttacagcatcctcgcagtatggggacttggaatggcctacaggaaaaacgccgaccgggatgaagacaaagcaaaggcctatgagctagagcagaacgtagtcaagctcatgcgcggactgctgcagtgcatgatgcgccaagtcgctaaagtggaaaagtttaaacatacacagtcgaccaaggattcactgcatgccaaatacaataccgcaacctgcgggacggtggtgggagatgatcaatggggccatctccaagttgatgccacaagcctgttcttgttattccttgctcagatgactgcaagcggcctcaggatcatcttcactctggatgaggtcgcatttatccaaaacctcgtgttttatatcgaagcagcatataaagtagctgattatggaatgtgggaacgtggggacaaaactaaccaaggaatcccagagctgaacgcttccagcgtaggaatggctaaagcagctctcgaggcaattgacgagttggatctgttcggggctcacggaggcagaaaatccgtcatccatgtgttgccagatgaagtcgagcattgccaatctatcttgttcagtatgcttcctcgggccagcacttcgaaggaaatcgatgctggtctgctcagtattatatcattcccggcctttgccgttgaagacgttaatcttgtcaatgtcaccaagaacgagattatctcgaagttacaggggaggtacgggtgttgccgctttctcagggacggatataaaaccccaagggaggatcccaacaggctccactatgaccctgctgaactcaagctgtttgagaacatcgagtgtgaatggcccgttttctggacctatttcatcattgacggagtttttagcggagacgcggtccaggtgcaagaatacagggaagctctggaaggcatccttatccgggggaagaatggcatccgtttggtgccggaactgtacgccgtgccccccaataaagtggacgaagagtacaaaaacccacacacagtggatagagtccctatggggaaggtcccacatctgtggggccagtcactctatatcctttcgagtctcctggcagagggcttcctggccgcaggggagatcgatcccctgaacaggagattctcaaccagtgtgaaaccagacgtggtggtccaagtgaccgtattagcagaaaacaatcatatcaaggatctgctccgaaagcacggggtgaacgttcagtctattgccgacattcacccaattcaggtccaacccggccgaatcctttctcacatctacgccaaacttgggaggaataaaaacatgaacctgtccgggagaccttacagacacattggcgtgctggggacttccaaactgtacgtgatccgtaaccagatatttacgtttacccctcagttcaccgaccaacaccacttctatttagctctcgacaacgagatgatcgtggaaatgctccgcatcgaattggcgtacttatgtacatgctggagaatgacaggtaggccgacactgacatttccaattagcagaaccatgcttaccaatgacggctcagacatacacagtgcggtgttgtccactatcaggaaactggaggacggctactttggtggcgcaagagtgaaactcgggaaccttagtgaattccttaccacttctttctacacataccttacatttctggatccggactgcgacgagaaactcttcgacaatgcttctgaaggaacatttagtcctgatagcgacagcgacctggtgggctatttagaagatacctgcaaccaggaatcacaagatgagctagatcattatataaatcatctgctgcaaagtaccagcctgcgaagctacctcccacctctgtgcaaaaataccgaggacagacacgtattttccgcaatccattctacccgagatatcctgagcgtaatggctaaggcaaaaggactggaggtgccattcgtacccatgacgctgcctactaaagtcctttccgcccacagaaagtcactcaaccttgtggatagcccccagccactgctggaaaaggtgccagagtccgactttcagtggcctcgcgacgaccacggagatgtagattgcgaaaagcttgttgaacagttaaaagactgctccaacctccaggatcaagctgacattctgtacatcttgtatgtgataaagggaccctcttgggataccaatctctcaggccaacacggcgtgacagtgcagaatctgctcggggagttgtatggcaaagccgggcttaaccaagaatggggattgattaggtatatcagcggactcctccgcaaaaaggtagaagtactggccgaagcttgcacagatctgctcagtcaccaaaaacagcttaccgtcgggctgccccccgagcccagggaaaaaatcattagcgcaccgctcccacccgaggagctgactaaactgatctacgaggcctccggccaggatatctcgattgcagtgttgacccaggagatcgtggtatacctggctatgtacgtgagagcccagccaagcctgttcgtggagatgcttagactgaggattgggcttatcatacaagttatggccactgagttggctaggagtctgaactgttccggtgaagaagctagcgagtctcttatgaacttgtcaccctttgatatgaagaatttgctgcaccacatcttgagcggaaaagaattcggagtcgagcggagtgtccggccaatccattcaagtacaagcagccctacaatctctatccacgaggtgggtcacaccggcgtgaccaagacagaaagatcgggaatcaacaggttgcgttctgagatgaaacagatgacacggcggtttagtgctgatgagcagtttttttctgtaggccaggccgcttccagttctgcccactcaagtaagtcggccaggtcatctacgccaagctcaccgaccgggactagctcgtcagattcaggcggacaccatattggatggggggaacgccaaggacagtggcttaggagaagacgcctggatggagctatcaatcgcgtccccgtcggattctaccagcgcgtctggaaaatccttcaaaaatgccatggccttagcatcgacgggtatgtactgcccagttccaccacccgcgagatgaccccacacgagatcaaatttgcagtccacgtggagtccgtgttgaatagagttccacagccagaataccgtcaacttcttgttgaggccattatggtgcttacccttctgtctgacaccgaaatgacctctattggaggaattatccacgttgatcaaattgtgcagatggcttcacaactgttcctgcaagatcaggttagtatcggagccatggatactcttgaaaaggatcaggcgactgggatctgccacttcttttacgattcagcgcctagtggggcttacggcactatgacatacttgactcgcgcagttgcgtcttatctgcaggaattgttgccaaacagcggatgtcagatgcag

SEQ ID NO: 18083 - DNA, 3705 bp, synthetic construct
  misc_feature 1..3705: note = source = /note="Description of Artificial Sequence: Synthetic coding sequence"
  source 1..3705: mol_type = other DNA
atgcggagccggagtaactccggtgtcagactcgacggttacgcccgccttgtccaacaaaccatcctgtgttaccagaaccctgtcactggactcctgagcgcatcgcacgaacaaaaggatgcatgggtccgagacaacatttactcaattctggctgtgtgggggctgggtatggcgtaccgcaagaacgccgaccgggatgaggataaggcaaaggcctatgaactggaacaaaatgtcgttaaactgatgcgaggtcttttgcagtgtatgatgcgacaggtggctaaagtggagaaattcaagcatactcagtccaccaaggacagcctgcatgcaaagtacaacactgcaacgtgtggtactgtggtcggagatgatcagtggggtcacctccaggttgatgcaacgtccctttttcttctgtttctggcgcaaatgacggcttccggcctccggatcatctttacccttgacgaagtggcatttatccaaaacctcgtattctacattgaagcagcctacaaggtggcagactacggtatgtgggagagaggtgacaagaccaaccagggcatccctgagctgaacgccagctccgtcggaatggcaaaggcagcgcttgaggcaattgatgaacttgatctctttggggcacacggtggacgtaagtccgtgatacatgtcctgcctgatgaggtggagcactgccaatcgattcttttttcgatgcttccaagagcgagcacctcaaaggaaatagacgccggcctgctgtccatcattagctttccagcgttcgcggtcgaagatgttaatctcgtcaacgtcacgaagaatgagatcatatcaaaacttcagggccggtacggttgctgccgtttcctcagagatgggtacaagactccaagagaagatccgaaccgccttcactacgacccggctgaactcaagttgttcgagaatatcgaatgtgaatggcccgtgttttggacttacttcattatagatggcgtttttagtggagatgccgttcaagtgcaagagtacagagaagcacttgaaggtatcctcatacgcggcaaaaatggcataaggcttgtgcctgagttgtacgcagtgccccccaacaaggtcgatgaagaatacaaaaaccctcataccgtcgatagggtccctatgggcaaggtgccccatctgtgggggcagtcgttgtacatcctgtcctcacttctggccgaaggatttttggcggccggtgaaattgacccccttaatcgcaggttctcaacttcggtgaagcctgacgtggtcgtgcaggtgacggtgcttgcagagaataaccacattaaggatcttctgaggaagcatggagttaacgtccagtcaatcgcagacatacaccctattcaggtgcaaccgggcagaatcctgtcacatatctacgcaaagctgggcagaaataagaacatgaatctgagcggaaggccttaccgccatattggagtgctggggacttcgaaactgtatgtgattagaaatcagattttcacttttactccccagtttaccgatcaacatcatttctacctcgcgctggataatgaaatgatcgtggaaatgcttcgcattgaactggcttacctttgtacctgctggcggatgactggtcgacctactctcactttccctatttcccgtaccatgttgaccaatgatggatccgatatccactccgcagtgctgtccactattaggaagctggaggacggttactttggtggggcccgggttaaactcgggaatctgtcagaatttcttaccacctccttctacacctacctcacttttctggatccggattgcgatgagaaactctttgataacgcgtccgagggtaccttttcccctgattccgactcagatctggtgggataccttgaggacacctgtaaccaagaaagccaagacgagctggatcattacatcaaccacttgcttcaatcgaccagcctcagaagctatttgccacccctttgcaaaaacaccgaggatcgacatgtgttttcagcaattcatagcacgcgcgacatcttgtctgtcatggcaaaagcaaaggggctggaagttccatttgtcccaatgactctgccaactaaggtgttgtcggcacatcgcaaatcactgaatcttgtggattcgcctcaacctcttctggaaaaggtccctgaatccgatttccagtggcctcgggatgatcacggagacgtggactgtgagaaacttgttgaacaacttaaggattgcagcaaccttcaagatcaagctgatatcctgtatattctgtacgtcatcaaaggccctagctgggacaccaacctcagtggtcagcacggagtgacggtgcaaaacctcttgggggaactttacggaaaggccggtctgaaccaggagtgggggcttattcgatacataagcggattgcttcgcaagaaagtggaagtgttggcagaagcatgtactgaccttctgtcacatcagaagcaactgactgtgggactgcctcctgagcctcgcgagaagatcatttcggcgcctcttccaccggaggagcttactaaactcatttatgaggcctcaggacaggacattagcatcgccgtgctcacccaagaaatcgtggtctacctcgcaatgtatgtccgggcacaaccttccctctttgtcgaaatgctgcggctccgtattgggctcattatccaagtgatggccaccgaactcgcgagatccctgaattgttcgggtgaagaagctagtgaatcattgatgaacctgtcgccgtttgatatgaaaaacctgctccatcatattctttcggggaaggaatttggagtggaaaggagtgtcaggcctattcacagcagcacctcgagccccaccatttcaatacatgaagtggggcacactggggtgactaagactgagaggtctggcattaacagactcagaagcgaaatgaaacaaatgaccaggcgctttagcgctgatgagcagttcttttccgtggggcaagcagcatcctcgtccgcgcatagctccaaatccgcccgatcgtcaacgcctagctcccctaccggcacctcgtcctccgactcggggggccaccatattggatggggcgaaagacaaggacagtggctgcgaagaaggagacttgatggagccataaaccgtgtgcctgtcggcttctaccagcgagtgtggaagatcctgcaaaagtgtcatggactttcgatagatggatacgtgctgccaagctccaccaccagggaaatgaccccgcacgaaatcaagttcgcagtacatgtggaaagcgtgctgaaccgggtccctcagcctgaatacagacaacttttggtcgaggctatcatggtgctgactcttctctccgacaccgaaatgacctcgattggaggaataatccacgtcgatcagattgtgcagatggcctcacagttgtttcttcaggatcaagtcagcattggtgcaatggacactcttgagaaggatcaggcaacggggatttgtcatttcttttacgattctgcaccatcgggcgcgtacgggactatgacttacctcaccagggccgtggcatcttacctgcaagaactgcttcctaattcaggttgtcaaatgcag

SEQ ID NO: 18084 - DNA, 3705 bp, synthetic construct
  misc_feature 1..3705: note = source = /note="Description of Artificial Sequence: Synthetic coding sequence"
  source 1..3705: mol_type = other DNA
atgaggtccagaagcaacagcggagtgaggctggacgggtacgcgaggttggtgcagcaaaccatcctatgttaccagaatccagtcaccggccttcttagcgctagtcatgagcaaaaagacgcttgggtgagggataatatttattcgatccttgcagtctgggggttagggatggcatatcgtaaaaacgctgatcgagatgaggataaggccaaagcatacgaacttgaacaaaatgtcgtcaaactaatgagaggacttcttcagtgtatgatgcgccaagttgcaaaggttgagaaattcaaacatacccagtcaactaaggatagcctgcacgccaaatataacacagcaacctgtggcactgtggttggagacgaccaatgggggcatctacaagtggacgcaacctccctgttccttcttttcctggcccagatgaccgcgtctggacttaggattatctttaccttggatgaagtcgcctttatccagaaccttgtcttctatattgaagctgcttacaaggttgccgattacggaatgtgggagagaggagacaaaaccaatcaagggattcctgaactgaacgcctctagcgttggaatggctaaagccgctctggaggcaatcgacgagctggatctctttggcgctcacggcgggaggaagtctgtgatacacgtcctcccggacgaggtcgagcattgtcagagcatactttttagtatgctgcctagggcgagcacatctaaagagattgacgccggcctgctttctatcattagctttccagcattcgccgtggaggacgtaaacctcgtcaacgtgaccaaaaacgagataatcagcaaactgcagggacggtacggatgttgcagatttctgcgcgatgggtacaagacccctcgcgaagacccaaacaggctgcactacgacccagccgagctgaaactctttgagaacatcgagtgcgagtggcctgtgttttggacatattttatcatcgatggcgttttcagcggcgacgctgtgcaggtccaggaatatagagaggctctcgaaggaattttgatcagagggaagaatggaatcagacttgtgcccgagctgtatgctgtgcctccaaacaaagtcgacgaagagtacaaaaacccccatactgtggatagagtgccaatggggaaagttcctcatctctggggacagagcctgtacatcctgtcttctctcctggcagagggcttccttgctgcaggcgaaatcgaccctcttaataggaggttctccacttctgtgaaacccgacgttgttgtccaggttactgtgcttgctgaaaacaatcatatcaaagatctcctgagaaagcacggcgtcaacgtacaatctatcgctgatattcaccctatacaagtccagcctggacggatactcagtcacatctacgcgaagttgggtcgaaataagaacatgaacctgagcggtcgtccgtacaggcatattggcgtcttgggaacatcaaagctgtacgtgattcgcaatcaaatcttcactttcacgccacaattcaccgatcagcaccatttctacctggctcttgataacgagatgatagtggagatgctccgcatcgagcttgcgtacttatgcacctgttggcgcatgaccggcaggcctacattgacctttcctatctctcggactatgctgacaaacgacggaagcgacatacacagcgccgttctgagcaccattcgcaagctggaggacgggtactttgggggggctagagttaagctggggaatcttagcgaatttctgactacatccttttacacctacctcacctttctggacccagattgcgacgaaaagctgtttgataatgctagcgagggcacattcagcccagatagtgacagcgaccttgtgggttatcttgaagacacgtgtaaccaagagtcccaagacgaacttgatcactacatcaatcatcttctccagtccacgtcccttcgcagttaccttcctccgctgtgcaagaataccgaggataggcatgtttttagcgcaatccacagcaccagggacatattgtccgtcatggcgaaagctaaaggcctggaggtgccatttgtgcctatgacccttcccactaaagttttgtcagcccatcgcaagagtcttaacctcgttgactctccccagccactcctagagaaggtcccggaatcggactttcagtggccacgtgatgatcatggcgatgtggattgcgagaaactcgttgagcagctcaaggactgctctaacttgcaagaccaggctgatatactatacatcctctacgtgattaaaggcccctcctgggacaccaacttgagtggacaacacggggtcaccgtccaaaacttgctcggtgaactctacggaaaagctggcctgaaccaggaatggggacttatcaggtatatctctggtcttctgaggaagaaggtcgaggtgctcgccgaagcctgcaccgatctactgtcacatcaaaagcagcttacagtgggactgccccccgaaccacgcgaaaaaataatttccgccccattgcctcctgaagaattgaccaaactcatctacgaggcatcgggtcaggacatttctatcgctgtactgacccaagaaatcgtagtatacctggctatgtacgtgcgtgcacagcctagcctgttcgtggagatgctccgtctcagaatcgggctgatcatacaagtaatggcaactgagctggccaggagcctcaattgctctggcgaggaggcaagtgagagtttgatgaatctttcacctttcgacatgaagaatctgctccatcatattttgtcaggtaaggagttcggagtggaaagatctgtgagacccattcacagcagtactagctcaccaacaatcagcatccatgaagtaggacatacaggagtgaccaaaaccgagaggagcggaatcaaccgcctgcgcagtgagatgaagcagatgaccaggaggttcagcgctgatgagcaatttttttctgtgggacaagctgcatcatctagtgcccatagcagcaagagcgcacgcagcagcacaccctcctccccgaccggcactagttccagcgacagtggaggtcaccatatcggatggggcgagcgccagggccagtggctgagaagaaggcggcttgacggggccatcaaccgagtaccagtcgggttctatcagcgagtctggaaaattcttcaaaagtgtcatggcctgagtatcgacggctacgtgcttcctagctctacgactagggagatgactccacacgaaattaaatttgctgtgcacgtggaatcagttttgaacagagtcccgcagcctgaatacagacagctgcttgtggaggctattatggtgttgactcttctgagtgacaccgaaatgacgtctattggcggaatcatccatgtggatcagatcgtgcagatggcatcccagctgtttctgcaagaccaggtttccattggagcaatggacaccttagagaaagaccaggcaactggaatatgtcactttttttatgatagtgctccgtccggcgcttacggcacaatgacctaccttacgcgggctgttgcttcctatctccaagagctgcttccgaactccgggtgtcaaatgcaa

SEQ ID NO: 18085 - DNA, 3705 bp, synthetic construct
  misc_feature 1..3705: note = source = /note="Description of Artificial Sequence: Synthetic coding sequence"
  source 1..3705: mol_type = other DNA
atgcgcagcagaagcaactccggagtccggcttgatggatacgctagacttgtgcaacaaactatactttgctaccaaaacccagtcaccggtttgctgtcggcctctcatgagcagaaggacgcatgggtccgcgacaacatttacagcatactcgcagtgtggggtctgggcatggcatacagaaagaacgccgaccgcgatgaggacaaggcgaaggcatacgaactcgaacaaaatgtggtgaaactgatgagaggtttgctgcaatgcatgatgagacaagtggcaaaggtggagaaattcaaacatacccagtcaaccaaggacagccttcatgcaaagtacaacaccgcaacgtgtgggactgtggtgggagatgatcaatggggtcacctgcaagtggatgcgacgtccctctttctcttgttcttggctcaaatgactgcatcggggctcagaatcattttcactcttgacgaagtcgcgtttatccaaaaccttgtgttctacatcgaggcagcatataaggtcgcggactacggtatgtgggaacgtggtgataaaaccaaccagggaattccagagttgaacgcctcgagcgttggcatggccaaggctgcccttgaagctattgatgagctcgatctttttggtgctcacggaggtcggaagagcgtgattcatgtcttgcctgacgaagtcgaacattgtcagagcatcctcttcagcatgctgccacgtgcatcgacctcgaaggaaatagacgctggattgctttcgattatctcgtttccagcatttgcggtggaagatgtcaaccttgtgaacgtcaccaaaaatgaaatcatttcgaagttgcaaggaagatatggatgctgtcgattcctcagggatggatacaagacccctcgggaagatcctaatcgactccattacgaccctgccgaactcaagctgtttgaaaacattgagtgcgaatggcccgtgttctggacttacttcatcatcgatggagtcttttcgggagatgccgtgcaagtgcaggaataccgcgaagcactggagggcattcttatcagaggtaagaatggaattagactcgtgccggaactgtatgccgtcccaccaaacaaggtcgatgaagagtacaaaaatccacataccgttgaccgcgtcccaatgggtaaagtcccacatctgtggggtcaatccctgtacatcctgtcctcgcttctggcagaaggctttctggccgcaggcgaaattgatcctcttaatagacggttctcgacttccgtgaagcctgatgttgtcgtgcaggtcactgtgctggcagaaaacaatcacatcaaagacctgcttaggaagcacggtgtcaacgtgcaaagcattgctgatatccatccgattcaggtgcagcccgggcggatcctttcgcacatctacgcaaagctgggccgtaataagaatatgaacctgtccggaaggccctacagacacattggtgtgctcggtaccagcaaactctacgtgatccgcaaccagatattcacgtttacgccgcaatttactgaccagcatcacttttacctggcattggataatgaaatgattgtggagatgcttaggattgaacttgcgtacctttgtacttgttggcgaatgaccggacggccgaccctgacgtttcccatctcgcgtaccatgctgactaacgatggctcggatatacattcggcggtcctttctactattagaaagttggaggatgggtacttcggtggcgccagagtcaaacttggtaatctgagcgagtttttgactaccagcttttacacttatctcaccttcctggaccccgattgtgatgaaaagttgtttgataacgcctccgaaggaacctttagccctgactcggactcagacctcgtcggatacctggaggatacctgtaaccaggagtcacaggatgaacttgaccattacattaaccacttgctgcagagcacgtcgctgcgctcctacctcccacccctctgtaaaaacacggaggacagacacgttttctcggcaattcactctactcgggatattctgagcgtaatggcaaaggccaagggacttgaggtgccgtttgtgcctatgacgctgccaaccaaggtcttgagcgcacataggaagtccctcaatcttgtggattcgcctcaacctctgcttgaaaaggtgccagaatccgattttcagtggccacgcgatgatcacggagatgtggactgtgagaaacttgtggaacaacttaaggattgctcaaaccttcaagatcaagccgatatactctacatcctgtacgtgattaagggcccttcatgggatactaacctcagcggccaacacggagtcacggtccagaatcttctgggagagctgtacggtaaggcgggactgaaccaggagtggggccttatccggtacatctccggattgcttagaaagaaagtagaagtcctggctgaggcctgtacggacctcctttcacaccaaaagcaactcaccgtgggactcccgcccgagcctcgggagaaaatcataagcgctcctttgcctccagaggaactgacgaagctgatctatgaagcatcgggacaggatatatccatagcagtgctgacccaagaaatcgtggtctacctcgccatgtacgtgcgcgcacagccttctctttttgtggaaatgttgcgactgcggatcggattgattattcaagtgatggccactgagcttgccagatcacttaactgctctggtgaagaagcatcagaatcgttgatgaacctttcccctttcgatatgaaaaatctgcttcatcatatcctttctgggaaggaatttggcgtggagcgatccgtgcggcctattcattcatcaacctcgtcccctactatcagcattcatgaagtcggccataccggtgtcaccaaaactgagcgttcgggaatcaatcgcctgcgttccgagatgaaacagatgactcggcggtttagcgcggatgagcagttcttttccgtcggtcaagcggcaagctcctccgcacattcatccaagtcagcacgctcctctaccccatcgagccctactggaacttccagctccgactccgggggacaccatatcgggtggggagaacgccagggccaatggctgcgtcgcagacgcttggacggtgccataaaccgggtgcccgtgggattttaccagcgagtctggaaaattctccagaagtgccatggcctttccattgacggatacgtgttgccctcgtcgactaccagagaaatgactcctcatgagattaagtttgccgtgcacgtggaatcggtgctgaatagagtgccgcagcccgaataccggcaactcctggttgaggcaattatggtgctgacccttttgtctgatactgaaatgacttcgattggcggcattatacatgttgatcagatcgttcagatggcgagccaattgtttctgcaggatcaggtgtcgattggcgccatggacaccctggaaaaggatcaagcaaccggaatttgtcatttcttctacgactcagctccatccggtgcctacggcactatgacttacctcacccgggctgtggcatcttacctgcaggagctgctgcccaacagcggatgtcaaatgcag

SEQ ID NO: 18086 - DNA, 3705 bp, synthetic construct
  misc_feature 1..3705: note = source = /note="Description of Artificial Sequence: Synthetic coding sequence"
  source 1..3705: mol_type = other DNA
atgcgctcacggagcaactccggagtgcgtttggacggttacgcgagactcgtgcaacaaactattctttgttaccaaaaccctgtgacgggtctgctctctgcgtcgcacgaacaaaaagacgcctgggtccgcgacaacatttactccattcttgcagtgtggggacttggaatggcctaccgcaaaaacgccgatcgggacgaagataaggcaaaggcatacgaactggaacaaaatgttgtgaagctgatgcgtggactgcttcagtgcatgatgagacaggtggcaaaagtggaaaagttcaagcatacccagtcaactaaagatagccttcacgcaaagtacaacaccgcaacctgtgggactgtcgtcggggacgaccagtggggacatctccaggtggatgcaacctcattgtttctgctctttcttgcgcagatgaccgcttccgggctgaggataatctttactctggatgaggtggccttcattcagaacctggtgttctacatcgaggccgcttataaggtggcagactacggtatgtgggagagaggcgacaagaccaatcaaggcattcccgaacttaacgcgagctcagtgggaatggcaaaggccgcacttgaagctattgatgaacttgacctttttggcgctcatggcggccggaaatcagtgatccatgtccttccagacgaggtcgaacactgccaatccatccttttctcgatgctgcctagagcgagcacttcaaaggaaattgacgcaggcctgctgagtatcatttcatttcccgcctttgcagttgaagatgtgaaccttgtcaatgtgacgaagaatgaaatcatttcgaaactgcaggggagatacggctgctgccgtttccttcgggatggctacaaaaccccacgggaagatccgaatcgccttcattacgatccagcagagctgaaacttttcgaaaacattgagtgcgagtggccggtcttttggacctactttatcatcgacggtgtgttttccggagatgccgtccaggtgcaggaatacagagaagcactggagggaatcctcataagaggtaaaaacggtattaggctggtgcctgaattgtacgcagtccctcctaataaggtggatgaggaatacaagaacccccacaccgtggacagagtgcccatgggaaaggtcccgcatctctggggacaatccttgtacatcctcagctcccttctggcagagggatttcttgctgccggtgagatcgaccctctgaatcgacgattttcaacctccgtcaagcctgacgtggtggtgcaagtcactgtccttgcagagaacaatcacattaaggacctgttgcgcaagcatggcgtgaacgtgcagtctattgcagatatccatccaatccaagtgcaacccggcagaattctttcgcacatatacgcaaaacttggacgaaacaagaatatgaatctttcaggcagaccttaccggcacatcggagtgctcggcaccagcaagctgtacgtcatccgcaatcagattttcacttttacgccccagtttactgatcaacatcacttttacctcgcacttgataacgagatgattgtcgagatgttgcgcatcgaactggcctatctttgtacctgctggcgaatgaccgggcgtcctactctgacctttcctatctcaaggactatgctcaccaacgacggatccgatatacactcggccgtcctgtccaccattcggaagctggaagatggttactttggaggagcgagagtgaagctcggaaacctgtccgaattccttactacttcgttttacacctaccttacttttctcgacccagattgtgacgagaagctctttgataacgcatcggaaggaactttctccccggattcagactcagacctggtgggctaccttgaggacacctgtaatcaagagagccaagatgagttggatcactacattaaccatttgctgcaatcaacctcacttagatcgtacctcccacctctttgcaagaataccgaagatcgtcatgtgttcagcgcaatacattcaacgagagacattctctccgtcatggcaaaggcaaaaggactggaggtcccattcgtgccaatgactttgcctaccaaggttctttcagctcatagaaaatcactgaacctcgtggactcgcctcagccactgctcgaaaaggtgcctgaaagcgattttcagtggccacgtgatgatcatggagacgtggattgcgagaagctcgttgaacagcttaaagattgcagcaatcttcaagatcaagcagatatactctacatcctgtacgtgattaagggaccatcctgggatactaacttgagcggccaacatggagtgactgtccagaatctgctgggggaactctatgggaaggcgggacttaatcaggaatggggattgattcgatacatttcaggacttctccggaagaaggtggaggtgctggcggaagcatgtactgatctcctttcgcaccaaaaacagcttaccgtgggtctgccaccagagcctagggagaagatcatttccgctccactccctcctgaggaattgaccaagttgatttacgaagcatccggtcaggatatttctattgctgtcctgactcaggaaattgtggtctacctggcgatgtacgtgcgggcacagccgagcctctttgtcgagatgctgcgtcttagaattgggctgattatccaggtcatggcaactgaattggctcggtcgctgaactgttcaggagaagaagcgtcagaatcgctgatgaatttgagcccttttgatatgaagaacttgctccatcacattcttagcgggaaagaatttggagtcgaaaggtcagtgcggccaattcatagcagtacctcgtcacccactatatcaattcacgaagtgggacacactggcgttactaaaaccgaaagatcgggaataaaccgtctgaggtcagagatgaagcagatgacccgccggttttcagcagatgaacagtttttctccgttggtcaagcagcctcgtcatctgcacactcctcaaaatcggcacgaagctccactccatcatcgcccaccggaacttcatcgtcggattcaggcggacatcatataggttggggcgaaaggcaaggtcagtggcttcggagacgacgcctggatggtgcgataaacagagttcctgtgggattctaccaacgtgtttggaaaattctgcagaaatgtcatgggttgagcatcgatggatacgtccttcccagctcgaccactcgcgagatgactccccacgagattaagtttgccgtgcatgtggagagcgtgcttaatagagtgccacagcctgaataccggcagctgctcgtcgaggcaattatggtgctgactttgctttccgatactgagatgaccagcattggaggcattatccatgtcgatcaaattgtgcagatggccagccagctgttccttcaggatcaagtgtccattggagcaatggacaccctggaaaaggaccaagcaaccggaatctgtcacttcttttacgactccgcaccatcgggagcatacgggaccatgacctatctcaccagagcagtggcgtcttacctccaggagctccttcccaactcgggatgccaaatgcaa

SEQ ID NO: 18087 - DNA, 3705 bp, synthetic construct
  misc_feature 1..3705: note = source = /note="Description of Artificial Sequence: Synthetic coding sequence"
  source 1..3705: mol_type = other DNA
atgagatcccgcagcaacagcggagtgcggctggatggctacgcacgcctcgtacaacagactatcctgtgctaccaaaaccccgtcacaggactcctctccgccagccacgagcagaaggatgcatgggttcgcgacaatatttattctatcttggccgtttggggtctgggaatggcataccgcaaaaacgccgacagggacgaggataaggctaaggcctatgagcttgaacagaatgtagtaaaactcatgcgaggactgcttcaatgtatgatgcgccaggtcgctaaggttgaaaagtttaagcatactcagtcaacaaaagactctcttcacgccaagtataatactgccacatgcggcaccgtggtcggagacgaccagtggggtcacctccaagtggacgctacatcactgttcctcctgttcctggcccagatgaccgccagcggcctgagaattatttttacacttgatgaggtggccttcatccagaatctcgtgttttatattgaggctgcttacaaagtggctgattacgggatgtgggaacggggggataagacgaatcagggtattccggaactcaatgcctcttccgtgggaatggccaaggctgctctcgaagccattgatgagttggacttgttcggagctcatggtggacggaaatcagtcatccacgtgcttccagacgaagtggaacactgccagtcaatactcttttctatgctgccacgcgccagtacaagcaaagagatcgacgcgggcctcttgtccattatcagcttcccagcttttgccgttgaagacgtgaatctggttaacgtgactaagaacgagattatctcaaaactgcagggccggtacggctgttgtcgctttcttagagacggatataagacgccacgggaagatcccaataggctgcattatgacccagctgagctgaagcttttcgagaacattgaatgcgaatggcctgttttctggacttacttcatcatcgacggagtcttcagtggcgatgcggtgcaggttcaggaataccgagaggcactcgaaggtatattgattagaggaaagaatggaatccggctggtcccagagctttatgctgtcccgcccaataaagttgatgaggagtacaaaaatcctcacacggtagatagagttccgatgggaaaagtgccccacctgtggggtcaaagcctctacatactgagtagtcttctggcagaaggcttcctggctgccggggagattgaccccctgaatcgcagattttccacatccgtcaaaccagacgtggttgtccaggtgactgtgctggccgagaataaccacatcaaggatctcctgagaaagcatggggtcaacgtccaaagcattgccgatatccacccgatccaggtgcagcccggcagaatcctctcacacatctatgccaaactcggcagaaacaagaacatgaacctctccggcaggccatacaggcatattggagtactgggtactagtaagctgtatgtaatccgcaaccagatatttacgtttaccccacagtttaccgaccagcatcacttttacctggcactggacaacgaaatgatcgtggagatgcttaggattgaactcgcctacctgtgcacttgctggcgcatgaccggcagaccgaccctgacattccccattagtaggacgatgctcactaatgatggaagcgacatacattctgcggttctgtcaactatccggaagctggaggacgggtactttgggggggctcgagtaaagctggggaatctgagtgaattcctgacaactagtttctatacatatctgactttcttggaccccgattgtgacgaaaagctgtttgacaatgcttctgagggcacatttagtcctgattccgacagcgatctcgtcggctacctggaggatacatgcaaccaggaatctcaagacgagttggaccattatataaatcatcttttgcagtccactagcctcaggtcttacttgccccccctctgcaagaacacagaagacaggcacgtgttttcagcaatccactctacgcgcgacattctgtctgtcatggcaaaggctaagggacttgaggtgcctttcgtccccatgacgcttcctacgaaggttctgtccgcgcaccggaagagtcttaacctggtagattctccccagcccctcctggagaaagtccccgagtctgactttcagtggccacgggatgatcacggggacgttgactgcgagaagctggtcgaacagttgaaggactgttcaaatctccaggatcaggccgatatcctgtacatactctacgtgattaagggccccagctgggatacaaacttgagcgggcagcacggtgtgaccgtgcaaaacttgttgggcgaactctatggcaaggccgggctgaatcaggaatggggcctcatcagatacatatccggcttgcttcgcaagaaggttgaagtgctggctgaggcctgtaccgatctcctgagtcaccagaagcaattgactgtgggacttcctcccgagccaagggagaagattatcagtgcaccactgccacccgaagagctgacgaagttgatctacgaggcctccggacaagacatatcaatagccgtcctgacacaagaaattgtggtgtatctggcaatgtacgtgcgggcccagccatctctctttgtggagatgctccggctgagaattggtctcattatccaggtgatggctaccgagctcgcaagatcattgaactgttctggggaggaagctagtgagtccctgatgaatctgagtccgtttgatatgaaaaatctgctccaccatatactgagcggcaaggaattcggagtggagagatctgttcgaccgatacacagctctacatcttcccccacaattagcatccatgaagtcggacatacaggagtgacaaagacagagcgctccggtatcaacagactgaggtccgagatgaaacaaatgacccggcgattcagcgcagatgaacagtttttttccgtgggccaggccgcatcatcaagtgcacacagcagtaaaagcgctagaagcagcactccaagctctcctaccgggacctcaagcagtgattcaggaggacatcacattggatggggcgaaagacaaggccagtggttgagacggcgaaggctggacggcgctattaaccgagtgcctgtggggttttaccagagggtgtggaagatccttcagaagtgccatgggttgtccatcgatgggtatgtcctgcccagctcaaccaccagggaaatgactccgcacgaaatcaagttcgctgtacatgtcgagtcagtcctgaaccgcgtgccgcagcctgagtaccgccagcttctggtggaagcaattatggtgctcaccctcctgagcgacaccgaaatgacttctatcggcggcataatacacgtcgaccagattgtgcagatggcatctcagctctttctgcaggaccaggtctccatcggggctatggataccctcgaaaaggaccaggcaacaggcatttgccactttttctatgactcagcgccgtctggggcatacggtaccatgacctatctgacgcgggccgttgccagttacctgcaagagctgctgcccaacagtggatgccagatgcag

SEQ ID NO: 18088 - DNA, 3705 bp, synthetic construct
  misc_feature 1..3705: note = source = /note="Description of Artificial Sequence: Synthetic coding sequence"
  source 1..3705: mol_type = other DNA
atgcggagtagatcaaattccggtgtccgattggatggatatgcccgactggttcaacaaaccatcctatgttatcagaatcctgtgacaggtcttttgtcagcctctcatgagcagaaggatgcctgggtcagggacaatatctatagtattcttgcagtgtggggattggggatggcttatcgtaaaaacgctgatagagacgaagacaaagcaaaagcatacgaattggagcagaacgtggtgaagctcatgagaggacttttgcagtgtatgatgcgtcaagtagctaaagttgagaagtttaagcatacacaaagcaccaaggatagtctccacgctaaatataataccgctacttgcgggacggtggtaggagatgatcagtggggccatttacaagttgatgctactagcctctttcttttgttcctcgcacaaatgacggcttccggccttagaataatctttaccctcgacgaagttgcctttatacagaacttggttttctacatagaagctgcttacaaggtcgcggactatggtatgtgggaacgtggtgataagaccaatcaggggattcctgaattgaacgctagctcagttggaatggcaaaggcagcacttgaagccatcgatgaactcgatctctttggggctcacggtggaagaaaatctgttattcacgtccttcctgacgaagttgagcattgccagtctattctcttcagcatgcttcctagagcatcaacctccaaggaaattgatgcgggattgctatcaattatttctttccctgctttcgctgtcgaagatgtgaacttggtaaacgttaccaaaaatgagatcattagcaaacttcagggtcgatacggctgttgtcgttttcttagggatggatataaaaccccaagagaagaccctaatcgcttgcactatgatccggcagagttgaagttatttgagaatatcgagtgtgaatggcccgttttctggacgtacttcattattgatggtgtcttttccggcgacgcggtccaagtacaagagtacagggaagctcttgagggtattttgatcaggggtaagaatggtattaggcttgtcccggaactctatgctgtccccccgaacaaggtggatgaagaatataaaaatcctcatacggttgatcgggttcccatgggaaaggtccctcatctgtgggggcagtctctctatattttgagttcactgctggccgagggtttcctggccgctggggaaattgatcctttgaatcgtaggttctccacttctgttaagcccgacgtggtcgttcaagtaactgtccttgctgagaacaaccatattaaagatctcctcaggaaacacggagttaacgtacaaagcatcgcagatattcatcctattcaggttcaacctgggcgtattttgtctcatatatatgcaaagctcggacgcaataaaaacatgaaccttagcggaagaccatacaggcatattggtgttttaggtacaagtaagttatatgtgatccgaaatcaaatatttacttttactccgcagtttacagatcagcatcatttttatttggctttggataatgagatgatcgtggaaatgctcaggatcgaacttgcgtacttgtgcacctgttggcgtatgaccggtcgaccaactcttacctttcccatctcccgtacaatgttgactaatgatggctctgatattcattcggctgtactttccacaattcgaaagttggaggatgggtattttggtggagccagagttaagctcgggaacttgtctgaattcctcacgaccagtttctacacttacctgaccttcctggatcctgattgcgacgagaagctttttgataatgcctctgaggggacatttagcccagactctgactccgacctagttggttatctagaggacacatgcaatcaggaaagtcaggatgaactcgatcattatattaaccatcttctacaaagcacatcactcaggtcttacttaccaccgctctgcaagaatactgaagatagacacgttttctcagcaatacattctacacgggatatactgtctgttatggccaaagctaagggcttagaagtcccttttgttcctatgactcttccgactaaagtactctctgctcatcgcaagtcacttaacttggtggatagtcctcaacctttgcttgaaaaggttcctgagtccgattttcagtggccaagggatgaccatggggatgtcgattgcgagaagttggttgagcagctgaaggattgttcgaatttacaggatcaggctgacattctctacatactttacgtgataaagggcccaagttgggacactaacttgagcggacagcatggtgttaccgttcagaaccttcttggagagttgtatgggaaggcaggactcaaccaagaatggggtttgattcgttacattagtggcctcctgagaaagaaagttgaagttctagccgaggcatgcactgacttgctttcccatcaaaagcaactcacagtggggttgcctcctgaacctcgggaaaaaattatttctgccccactacctcctgaggagttgaccaagctgatctacgaagcttccgggcaagacatctctattgcagtcttgacccaagagatcgtggtatacttagctatgtatgttagggctcagccaagcctgttcgttgaaatgttgcgccttcgcataggtcttatcatacaggtgatggccacagaacttgctcggtccctcaactgctcaggagaggaagccagcgaatctctaatgaacctcagccccttcgatatgaaaaaccttcttcaccatattctttcaggtaaggaatttggagttgagcgatcagttaggcccatccactcatctacaagttctcctactattagcattcatgaagtaggtcatactggagtaacaaagactgaacgtagtgggatcaaccgtcttcgttccgagatgaaacaaatgaccaggaggttttctgctgacgaacaattcttcagcgttggccaagcggcatcctcctctgcacatagcagtaagtctgccagaagttcaacgccttcttctcccacaggtacttctagtagcgattccggagggcatcacattggctggggagagaggcaaggacaatggttgcgcagaagaaggcttgatggggcgataaaccgagtacccgtaggtttttaccaacgtgtttggaagattctacaaaagtgtcacggactgagcattgatgggtacgtgcttccaagctctactactcgcgaaatgactccccatgagataaagttcgctgttcatgttgagtccgttcttaatcgggtccctcaacctgaatacagacaactcttggtggaagcgattatggttttgactctgttatcagatactgagatgactagcatcggcggcatcattcacgtagatcagattgttcagatggcttcccaacttttcctgcaagatcaagtttctatcggggcaatggacacccttgagaaggatcaagccacaggaatctgtcatttcttctacgattcggccccttcaggtgcatacggaactatgacttatctcactagggctgttgcatcatacttacaggagctattacctaacagcgggtgccaaatgcaa

SEQ ID NO: 18089 - DNA, 3705 bp, synthetic construct
  misc_feature 1..3705: note = source = /note="Description of Artificial Sequence: Synthetic coding sequence"
  source 1..3705: mol_type = other DNA
atgagaagccgttccaatagcggagtgaggttggacgggtatgcccgtctggttcaacaaacaatcctctgctaccagaatcccgtcaccggactgctttccgctagtcatgaacagaaagacgcatgggtcagggacaacatctattccatcctggcagtctggggcctggggatggcgtatcgcaagaatgcagatcgggatgaggacaaggcaaaagcttatgagctagaacaaaacgtcgtcaaacttatgcgcggactactccagtgcatgatgcgacaggtggcgaaagtcgagaagttcaaacatactcagtctacaaaagacagcctgcatgctaaatataacacagccacatgcggaaccgtggttggtgacgatcagtgggggcatctccaagtcgatgccacatctctattcctcttgttcctcgcacagatgacagcgagcggactgagaatcattttcacactggatgaagttgcattcattcagaatctcgtgttttatatcgaggcagcttacaaggtcgcagactacggcatgtgggagaggggcgataagacaaaccagggtattcccgagttgaatgcgagtagtgtggggatggcgaaggccgctctggaggccatcgatgagctggacctcttcggggctcatgggggacggaaaagcgtcatacatgtgctcccagatgaggttgaacactgtcaatccatcctcttctctatgctgccacgggcttcaacttctaaagaaattgacgcaggtctgctatccataatttccttcccggccttcgcagtggaagacgtaaatctggtaaacgtgacaaaaaatgaaatcatcagcaaattgcaggggcgctatggctgttgccggtttttgagagatgggtacaaaacacctcgcgaggatcctaatcgattgcattatgatccagccgagctaaaacttttcgagaatattgagtgtgagtggcctgtcttttggacctattttattattgatggcgtgttttcaggcgacgcagtgcaggtacaggagtaccgcgaagctttagaaggtatcctgatacgaggtaaaaacggtattcgtctggtacccgagttatacgcagtaccccccaacaaggttgacgaggagtataagaatcctcacactgtcgacagggtcccaatgggtaaggtgccccatctgtggggtcagagcctctatattctgagcagcctgctggccgagggcttccttgctgctggcgagatcgacccgctgaataggcgattttccacctccgtcaagccagacgtggttgtgcaggtcaccgtgctcgccgaaaataatcacattaaagatttgctgcgtaagcacggtgttaacgtacaatccatcgcagatatccaccccattcaagtacagccgggacggatactgagccatatttacgccaaactgggcaggaacaaaaacatgaacttaagtggacgaccttaccgccacattggcgtgctgggaaccagcaagctgtatgtcatcagaaaccagatattcacattcaccccgcagtttaccgatcagcaccacttctatctggcccttgataatgaaatgattgtggagatgctaagaattgagctcgcttacctatgcacatgttggcggatgaccggtcgccccactttgacctttccaatatctcgaactatgctgaccaatgacggatcagatatccattccgccgttctctctaccattcggaagctggaggacggttattttggcggagctagagttaagctggggaacctaagtgagttcctaacaacctctttctacacataccttaccttcctggatccagattgcgacgagaaactgttcgacaatgcttctgaggggacattttcacccgattccgattctgatctggtgggctatttggaggacacctgtaaccaagaatctcaagatgagcttgatcactatatcaatcatctcctgcagagtacctccttgcggtcataccttccccccctctgtaagaacacagaggatcgacacgtgttctcagccatccacagcacacgagatatactttccgtgatggccaaggcaaagggcctggaagtgcccttcgtgcctatgacgctgcctacgaaagtgctgagtgcccataggaagtctttaaacctggtggacagtccacaaccgcttctggaaaaggtgcccgagagtgacttccagtggcccagagacgaccacggtgatgtcgactgtgaaaagctggtcgaacagctgaaggactgctctaatctgcaggaccaggccgacattctctatatcctgtacgtaatcaaggggccctcttgggacacgaatctgagtggtcagcatggcgttacagtgcagaacttattgggagaattgtacgggaaagcagggctaaatcaggaatggggtttaatacggtacatctctgggctgctgcggaagaaggtagaggtgttagccgaggcttgtacagacttgctttcccatcagaagcaattgaccgttggtctgccccccgagcctcgggagaaaatcatctccgctcccctgcccccggaggaattgaccaaactcatctacgaagcctccggacaggatatctcaatcgccgtgttgacacaggaaatcgttgtctatctcgcaatgtacgtacgcgcgcagccctccctttttgtggagatgttgcggttacgcatcggattaatcattcaggttatggcaaccgagctggcgaggagccttaactgttccggggaagaagcttccgagtcactgatgaatctgtccccttttgacatgaaaaacctgctacatcatattctgtcaggcaaggagtttggcgtcgaacggtcagtaagaccaatccacagttccacgagttcgcccaccatcagtatccacgaggttggacacacaggagtgacgaagactgagcgtagcgggataaacagattgcgctctgaaatgaagcagatgactagacggttctccgcggacgaacagttcttctcagtagggcaggccgcttccagctccgcccattcctccaaatccgccagatcctctactccttcctcccctactgggacatccagctcagatagcggggggcaccacatcggatggggggaaaggcaggggcagtggcttcgccgtaggcgcctggatggcgctattaatcgggtcccagtcggattctatcagagggtctggaagattctgcagaagtgtcacggcttatcgattgatgggtatgtgctgccgagctcaaccactagagaaatgactccccacgagattaagttcgccgtgcacgtcgagtccgtgctcaacagggtcccccagccagaatataggcagttgctagtggaggccataatggtgctgaccttgctctccgacacggagatgactagcattggcggaatcattcacgtggaccagatcgtccagatggcttcacagctctttctgcaggaccaggtcagcattggagccatggatacattagagaaagaccaagcaacggggatctgtcattttttctatgacagtgctccctcaggcgcttatggaaccatgacctacttgactagggcagtcgctagctacctgcaagagctcctgccaaatagcggatgtcagatgcaa

SEQ ID NO: 18090 - DNA, 3705 bp, synthetic construct
  misc_feature 1..3705: note = source = /note="Description of Artificial Sequence: Synthetic coding sequence"
  source 1..3705: mol_type = other DNA
atgcgctcccggtcgaattcgggagtgaggttggatggatacgcgaggcttgttcaacagactattttgtgctaccaaaaccccgtcactggtctgctgtctgcatcccatgaacagaaggatgcatgggtgagggacaacatttacagcattctggcagtgtggggactgggtatggcataccggaaaaacgctgacagggacgaggataaggcaaaagcctacgaactggaacagaatgtggtgaagctgatgcgcgggcttctccagtgcatgatgagacaagtggcaaaggtcgaaaagttcaagcacacccaatccaccaaagacagcttgcacgcaaagtataacacggcaacctgcgggactgtcgtcggtgacgatcaatggggccatctccaggtggatgcgacctccctttttctgctttttcttgcgcaaatgactgcatcaggacttagaatcatctttactctcgatgaggtggctttcattcaaaacttggtcttttacatcgaagcagcctacaaggtggcagattacggcatgtgggaacgcggagataagacgaaccaagggattcccgaacttaacgcatccagcgtgggaatggcaaaggcggcactggaagcgattgacgaactggatttgttcggtgcacatggcggacgcaagtcagtgatacacgtgctgcctgatgaagtagagcattgccaaagcatccttttttccatgcttcctcgggcctccacttcaaaggagatcgatgctggactgctgagcataatcagctttcctgcattcgcagtggaagatgtcaacctggtgaacgttactaaaaacgaaatcatctccaaacttcaaggacgttacggatgttgtcgctttctgcgggatggatacaaaacccctagagaggacccaaacaggctgcattacgacccagccgaactcaagctctttgagaatattgagtgtgagtggcccgtgttctggacttacttcataatcgacggcgtgtttagcggcgacgcagtccaggtgcaggaatacagggaggcactggaaggaattctcattcggggaaagaacggtattcgtcttgtccccgaattgtacgcagttccccccaataaggtggatgaagaatacaaaaaccctcataccgtggatagagtcccaatgggaaaagtgccgcatctctggggccagtccttgtatattctttcaagcctgctggccgagggatttttggcagccggtgaaattgatcctctcaatagaagattttcaaccagtgttaaaccagacgtcgtcgtgcaggtgaccgtccttgccgaaaacaatcacatcaaggacctgctccggaagcatggcgtgaacgtgcaatccattgcagatatacatccaattcaggtccaacctggacgtatcctttcccacatctacgcgaaacttgggcggaataagaacatgaatctgtcgggacgcccatacaggcatattggcgtgcttggaacttccaagctctacgtgatcagaaaccagatctttacgtttacccctcaattcaccgaccaacatcacttttatctggctttggacaacgaaatgattgtggaaatgcttagaatcgagctcgcctacctgtgtacgtgttggcgaatgactggacgccccactctgactttccctatttcaagaactatgctgactaacgacggttcagatattcactccgcagttctttctactatcagaaaattggaggatggttactttggtggcgctagagtcaaactcgggaatctttccgagtttctcaccaccagcttttacacctacctcacctttttggaccctgattgtgatgaaaagctcttcgataacgcatccgaaggaacttttagccctgattccgacagcgacctcgtgggctaccttgaggacacctgcaaccaagaatcgcaggacgaacttgatcattacatcaatcacctgcttcaatctaccagcctgaggtcttaccttccaccattgtgtaagaatactgaagatcgccatgtctttagcgccattcattccactcgggatattctctccgtgatggcaaaggcaaagggattggaggtgccatttgtccctatgacccttcctaccaaggtgctttccgcacatcggaagtcactcaacctcgtggactcaccacagccactcctggaaaaggtgcctgaaagcgacttccaatggccaagggacgaccatggagatgtggattgcgaaaaactggtggagcaactgaaggactgctccaaccttcaggatcaagccgatatcctgtacattttgtacgtcattaagggcccttcgtgggatactaacctgagcgggcaacatggagtgaccgtccagaacctgcttggagagctctacgggaaggcaggacttaatcaagagtgggggctcattaggtacatatccggtctgcttaggaagaaggtggaagtgctcgctgaagcgtgtaccgacctgcttagccaccaaaagcagctgaccgtgggattgccgcctgaacctagggaaaagatcatttcggcacctctcccacctgaagaacttacgaagctcatctatgaagcatcgggtcaagatatttccattgctgtgcttacccaggaaatcgtcgtctaccttgcaatgtacgtgagagcacaaccatccctctttgtcgagatgctccgccttagaatcggtcttatcatacaggtgatggcgactgagctggccaggtccctgaattgttcaggtgaggaagcctcagagtcgcttatgaatctttcaccatttgatatgaagaacctgcttcatcacatccttagcggaaaggaatttggagtggagagatccgtccggcctatccattcctccacctcaagccctactattagcatccacgaagtcggtcacacgggagtcaccaagacggaaagaagcggcattaacagactcagaagcgaaatgaagcagatgactagaaggttttcagcagatgagcaattcttctcagtcggacaagccgcgagcagctccgcccattcatcgaagagtgcaaggtcatccaccccgagctcaccaaccggcacgtcatcgagcgattcgggaggccatcacattggctggggagagaggcagggtcagtggcttcggaggagacgtctggacggtgccattaatcgcgtgcccgtgggtttttaccaaagagtgtggaagatactccaaaagtgtcacggactctccatcgacggatacgtgctgccatcgtccaccactagagaaatgaccccacatgaaatcaagtttgcagtgcatgttgagtccgtgctgaacagggtgcctcaaccggaatacagacaactccttgtcgaagcaatcatggttctgactctcctgtcggatactgaaatgacctcgatcgggggcatcattcacgtggaccagattgtgcaaatggcatcccaactctttcttcaggaccaagtgtcaatcggtgctatggacactctggaaaaggatcaagccaccgggatctgccatttcttctacgactccgccccgtccggtgcatacggcacgatgacttatcttactcgagccgtcgcgtcatacctgcaggaactgcttcctaacagcgggtgccagatgcaa

SEQ ID NO: 18091 - DNA, 3705 bp, synthetic construct
  misc_feature 1..3705: note = source = /note="Description of Artificial Sequence: Synthetic coding sequence"
  source 1..3705: mol_type = other DNA
atgcgcagcagatctaattcgggagtcaggttagatggctatgctagactggtccagcaaaccatactttgttaccagaatcctgtcacaggattgttgtcagcttcccacgaacaaaaggacgcatgggtcagagacaatatttactcaatcttagccgtatggggattaggcatggcttatcgcaagaacgcagatcgcgacgaagataaagcgaaagcgtatgagttagagcaaaacgtcgtgaaactaatgaggggtctgctccagtgcatgatgagacaggtagccaaagttgaaaagtttaaacatacccagtctacgaaggattcacttcacgcaaaatacaatacggccacgtgcggtacggttgtcggcgatgaccagtggggacatcttcaggtcgatgccacgtcactgtttctcttgtttctggcgcaaatgaccgcttcaggattaaggattatctttaccttggatgaggttgcttttattcagaatttagtgttttatattgaggcagcgtataaagttgctgattacggaatgtgggaaagaggcgataagactaatcaaggcatcccggagttaaatgcgtcgtccgtgggcatggcgaaagcagcccttgaagcaattgatgaactcgacttattcggggctcatgggggccgtaagtctgttatccacgtgctaccagatgaagtagaacactgccaatcaattttattttccatgcttcccagagcttctacgagcaaagaaatcgatgctggcctgctttcaattatatcctttcctgcattcgctgtagaggatgttaaccttgtaaacgtgacaaaaaacgaaatcatttccaagttacagggaagatatggatgttgcaggtttctcagagacgggtacaagacgccgcgcgaagacccgaatcgtttacattatgacccagcggaacttaaattatttgaaaatattgaatgtgagtggccagttttctggacatatttcatcattgatggcgtgttttcgggagatgccgtccaagttcaggaatatagggaagcactcgaaggaattcttatcaggggcaagaacgggatacgcttagtgccggaactttatgccgtccctccaaataaagttgatgaggaatataagaatccacacacagtagatcgcgtgcctatgggaaaggttccgcatctctggggacagagcctgtatattttgagctccttactcgcggaaggttttcttgccgcgggcgaaattgatcccctgaatagaagattttcgacgtcagtaaagcctgatgttgtggttcaagtgactgtcttggctgagaacaatcacattaaagatcttctgcgtaaacatggagtcaatgtacaatccatcgccgatattcatccgatccaagtgcaaccaggccgtatccttagccatatttatgcaaagttagggaggaacaaaaatatgaacttaagcggccggccgtatcgtcacatcggtgtgctaggcacgtctaaattgtacgttattagaaatcagatattcacatttactccgcaatttacagatcaacatcatttttatcttgctttggacaacgaaatgattgttgaaatgttacgtatcgaattggcctacctttgcacatgctggcgcatgacggggcgtcctacacttacttttccgattagccggacaatgcttacaaacgacggttctgatatccactccgcggtcttgtcaaccattcgaaaacttgaagatggatattttgggggagccagggtcaaactgggaaacctgtctgagtttttaacaacatctttttacacatatctgacatttcttgatccggactgcgatgagaaactttttgataatgcttccgaaggaacatttagcccggacagcgatagtgatttggttggctacctggaagacacttgcaatcaggaaagtcaagacgaattggatcactatatcaatcatctgcttcaatcaacgtccttacgttcatatttgccgccactctgtaagaatactgaagatcgtcacgtgttttcggcgatccatagcaccagagatattctttcggtcatggcaaaagcgaaagggcttgaggtccctttcgttcctatgacgctacctactaaagttcttagcgctcaccgtaagagcttaaatctcgtcgatagccctcagccattgttagaaaaagtacctgagtcagactttcaatggcctcgcgacgatcacggagatgtggactgtgaaaaattggttgagcaactgaaagattgcagcaatcttcaagatcaagcggatattctttatattctgtatgttattaaaggaccatcgtgggacacaaacctgtccgggcagcatggggttactgtgcagaacctgcttggggaactttatggcaaagcgggattgaatcaggaatggggcttgattaggtatatctctggactgttaagaaaaaaagttgaggtgctggctgaagcctgtacggatctgttgtcccatcaaaaacaactgacggttgggttaccaccggaaccaagagaaaaaatcatctcggcgccactgccgccagaggaactgactaaacttatctatgaggcgtcagggcaagatatctctatcgcagtattaacacaggagattgtagtctatttggctatgtatgttcgcgctcaaccgtctctgtttgtcgaaatgctgcgcttaagaataggccttattatccaagtgatggcaaccgaacttgcacgttctcttaactgctcaggggaagaagcgtctgagtcactgatgaacctgtcaccattcgatatgaagaacttacttcaccacattctttctgggaaggaatttggtgttgaaaggtccgtccggcctattcattctagcacaagcagccctacaataagtatacatgaggtgggacatacgggcgtaacgaaaacggaacggagcggcatcaaccgtctgagatcagaaatgaaacagatgacaagaaggttttccgcagatgaacagttttttagcgtaggtcaagctgccagtagcagcgcacattcttccaagtctgctagatccagtacgccatcctcccctacgggaacgagcagcagcgattcaggcgggcaccatattggctggggagaacggcaaggtcaatggcttcgccggagacgcctagatggcgccatcaatagggttcctgtgggtttttatcagcgggtatggaaaattcttcaaaagtgtcacggtctgtctattgatggatatgtgctcccgagctccacaacacgagaaatgacgccacatgaaatcaaatttgccgtccatgtagaaagcgtgcttaatcgggttccgcaaccagaataccggcagctacttgtcgaagcaattatggtgctcacactgctgtcagacacagaaatgacttctattggcggcattatccacgttgatcagattgttcagatggcatcacagttatttcttcaggatcaggtgtccattggagcaatggacacactggaaaaggaccaagcaactggtatctgccattttttctatgactcagcaccgtctggtgcgtatggcacaatgacatacttaacacgagcggtcgcctcttatctgcaagaattactgccgaattccgggtgccaaatgcaa

SEQ ID NO: 18092 - DNA, 3705 bp, synthetic construct
  misc_feature 1..3705: note = source = /note="Description of Artificial Sequence: Synthetic coding sequence"
  source 1..3705: mol_type = other DNA
atgaggtctcgctctaatagcggtgtgcggctggatggctacgcacggttggtgcagcagaccatcctgtgctatcaaaaccccgtcactgggctgttgtctgcctctcacgagcaaaaagatgcctgggtgagggataatatttacagcatactggcagtctgggggttgggcatggcctataggaaaaatgccgatcgcgacgaggataaggcgaaggcgtacgaactggaacagaacgtagtcaagctgatgcggggtctgctgcagtgcatgatgaggcaagttgcaaaggttgaaaagtttaaacatacacagtccacaaaggatagtttgcacgccaaatacaacacagcgacgtgcggtacagtcgtgggagatgatcaatggggccacctccaggtcgacgcaacatctctttttttgcttttcctcgcgcagatgaccgccagtggcttgcggattatctttactttagacgaagtcgccttcattcagaacctcgtgttctatattgaggccgcctacaaggtggcagattatgggatgtgggaacgcggagataaaaccaatcagggtatccccgaattaaacgcaagctccgtaggtatggctaaggccgccttggaggccatcgatgaacttgatctgttcggcgcacatgggggaaggaaatcagtgatacacgtgttacccgatgaagtggagcattgtcagtcgatcttattctcaatgctgccaagggcgagcaccagcaaagagatagacgccgggttgctgtcgataattagctttcccgcgttcgcggttgaggacgtgaatctggtgaatgtgacgaagaatgagattatctctaagctccaaggacggtatggctgctgccgctttctgagggacgggtataaaacaccacgagaagatccaaaccgtctgcattacgaccctgctgagttgaagctctttgaaaacattgagtgcgagtggccggttttttggacctactttatcatcgatggcgtgttcagcggagatgccgtgcaggtacaggaataccgggaggctcttgaagggatactaatcagagggaaaaacggtattaggctggtccctgagttatacgcagttccgcctaataaggttgacgaggagtataagaaccctcacactgtagaccgcgtgccaatgggcaaggtgccacacttatggggtcagtcactttacattctcagcagcctgctggcagaaggttttctcgctgctggtgagatagacccgctgaaccgccgtttttccacttcagtgaagcctgacgtggtcgtacaggtgaccgttctcgcagagaataaccatatcaaggacttgctgcggaagcatggagtgaatgtccagagcatagccgatatacacccgattcaggtccagccaggaagaatccttagtcacatttatgcaaagctggggcgcaacaagaacatgaatttatcgggccgcccgtaccgccatataggagtgctcggcacatcaaaactatatgtcatcagaaaccagatattcacattcactccccagtttacagaccaacatcatttttacctagcacttgataacgagatgattgttgagatgctccgcatagagctagcttacttatgcacttgctggcggatgacggggagaccaacattgacatttcccatttccagaacaatgttaactaacgacggctcggacattcactcggccgtactgtcaacaatccgcaaactggaggatggatacttcgggggcgcaagggtgaaattgggaaatctgtccgaatttttgactacatcattctatacctatttaaccttcctggacccagattgtgatgagaaattgttcgacaatgcatcagagggtacgttctctcctgacagtgatagcgacttagtgggctatttggaagatacttgcaatcaggagtcacaagacgagttggatcactatataaaccatctgctgcagtccactagtctccgcagttatctgccacccctatgtaaaaataccgaagatcggcacgtgttctccgcaattcactcaactcgcgatattctcagcgttatggcgaaagccaaaggccttgaggttcctttcgtgcctatgacactgcctactaaggttctctccgcccatagaaaatcactcaatcttgtggacagtccacagccactcctggagaaggtgcctgaaagtgattttcagtggccacgcgatgaccatggggatgttgattgcgagaagctcgtagaacagctcaaggactgtagcaacttacaggaccaagcagatatcctgtacatcctttacgtgatcaagggacccagctgggatactaacctgtcaggtcagcatggcgtgactgtgcagaacctcctgggagaattgtacggaaaggcaggcctaaaccaggaatggggtctcattcggtatatctcgggactccttcgtaaaaaggtagaggttttggccgaagcctgcaccgatctgctgagccaccaaaaacagctgaccgtcggactgccaccggaaccacgcgaaaaaattatctcagcccccttgcctcccgaggaactgaccaaattgatatacgaagcgtcaggccaggatatttctatcgccgtcctgacacaagaaattgttgtctaccttgcaatgtatgttagagcccagccatctctgttcgtggagatgctgcgtttgaggataggactgataatccaggtgatggcaactgagctcgctcgctctttaaattgttccggggaagaggcctctgaatctcttatgaacctcagtccatttgacatgaagaatctcctgcaccacattctctctggcaaggagtttggagtcgaaaggtccgttcgcccgatccattctagcacttcctccccgacaattagcatacatgaggtcggtcataccggcgtaaccaagaccgaaagatcaggaatcaatcgtctgaggtctgaaatgaaacagatgactcggcgctttagcgctgacgagcaatttttctcagtaggtcaggctgcttcttcttctgcccacagttctaagtctgccaggtcctctacaccttctagtccaactggcacctcttcatctgactcggggggccatcacatcgggtggggcgaacggcagggccagtggttgagacggagacgactcgacggtgcaattaatcgggtcccggttggtttttaccagcgcgtgtggaaaatcctacagaaatgtcatggtctgtctatcgacggctatgttcttccctccagtaccacaagggagatgacgccccacgagatcaaattcgccgtccacgtcgagtccgttttgaaccgcgtaccgcagcctgagtaccgtcaattgcttgttgaagcaatcatggtgttaactcttctctctgatactgagatgaccagcataggcggaatcatccacgtggatcagatagtccagatggcctcacagcttttccttcaggaccaggtctccatcggagccatggatacgctggaaaaagaccaggcgaccggaatctgccactttttctacgactctgctcctagtggggcttatggtaccatgacgtatctgacccgcgcggtggccagctatctccaggaactgcttcctaacagcggctgccaaatgcag

SEQ ID NO: 18093 - DNA, 3705 bp, synthetic construct
  misc_feature 1..3705: note = source = /note="Description of Artificial Sequence: Synthetic coding sequence"
  source 1..3705: mol_type = other DNA
atgagatccaggtccaactccggcgtgcgccttgacggatacgccaggctcgtgcagcagaccatcctgtgctatcaaaaccctgtgactggactcctctcggcatcccatgaacagaaagatgcttgggttcgcgacaacatctatagtattctggctgtctggggactgggcatggcctaccggaagaatgcagatcgcgacgaagataaggcaaaggcgtacgaactcgaacaaaatgtcgtgaagttgatgagaggacttctgcaatgcatgatgcgccaagtggccaaggtggagaagttcaagcacacccagtccaccaaggatagcctgcacgctaaatacaacaccgccacttgtggtactgtggtcggcgacgaccagtgggggcacctgcaggtcgatgccaccagcctcttcctgctgttcctggcgcagatgactgcgagcggactgagaatcatcttcactcttgatgaagtggcctttattcagaacctcgtcttttacatcgaagccgcttacaaggtggctgattacggaatgtgggaacgcggggacaaaactaaccagggaatcccggaactgaacgcctcctcggtgggaatggcaaaagccgcactcgaagccatcgacgaactggacctgttcggagcgcatggcgggaggaaatccgttatccatgtgctgccggatgaggtggaacattgccagtcgatcctcttttcgatgctgccgcgggcgtccacgtcaaaggaaatcgacgcgggcttgctctcaatcatctccttccccgccttcgcagtggaggacgtcaacctggttaacgtgacgaagaatgaaatcatctccaaactccagggacggtacggatgctgccggtttctgagggatggatacaaaactccgagggaagatcctaaccgcctgcactatgaccccgccgagctcaaattgtttgagaacattgaatgtgaatggccagttttctggacttacttcatcatcgacggcgtgtttagcggagacgctgttcaggtgcaagagtaccgcgaggcgcttgaagggatcctcatcaggggaaagaatggcatcagactcgtgccggagctgtatgcggtgccaccgaacaaggtcgatgaggaatacaaaaacccccacaccgtggatagagtccctatgggaaaggtgccacacctgtggggacagtcactgtacatcttgagcagcctgcttgccgagggtttcctggcagcgggagaaattgacccgctgaataggcgcttctcaacctcggtgaagccagacgtggtggtgcaggtcaccgtccttgcagaaaacaatcatatcaaggacctgctccgcaagcacggagtgaatgtgcaatccatcgcagacatccatccgatccaggtgcagccggggcgaatcctcagccatatctacgccaagctgggacgcaacaagaacatgaacctgtccggccgcccataccgccacatcggcgtcttgggaactagcaaactttacgtcatccgcaatcagatctttactttcaccccgcagtttacggatcaacatcatttctacttggcgctggataacgaaatgatcgtggaaatgctcagaatcgaactcgcctacctgtgcacgtgctggcgcatgaccggcagaccgaccctgaccttcccaatcagccggaccatgctgactaacgatggctcggacattcatagcgccgtgctgtccaccatcagaaaattggaggacggatacttcggcggagccagagtgaagctgggaaacctctcggagttcctcactacctccttttacacttatctgactttcctggaccctgactgtgacgaaaagctctttgacaacgctagtgaaggaaccttctcccctgactcggactccgatttggtggggtacctggaagatacgtgcaatcaagagagccaggatgaacttgaccattacatcaatcacttgctgcagtccaccagcctgcggtcgtatctgccacctctctgcaagaacactgaagatagacacgtgttcagcgcaatccactcgactcgggatatcctcagcgttatggccaaagccaaaggacttgaagtgccgttcgtcccaatgaccctgccaactaaggtgttgtcagcccatagaaaatccctgaaccttgtggatagcccgcaacctctcctcgaaaaagtgcctgaaagcgactttcagtggcctcgcgacgaccatggcgatgtggactgtgaaaaactggtggaacagctgaaagattgctcgaacctccaggaccaagccgacattctctacatcctttacgtgatcaaaggaccatcctgggacacgaatttgtcagggcagcacggcgtcaccgtgcagaatctgctgggagagctttacggaaaagctggtctgaaccaggaatggggacttatcaggtacatttcaggcctcctgcggaagaaggtggaggtcctggccgaagcgtgcactgaccttttgtcgcaccaaaagcagctgaccgtgggtttgccgcccgagccacgtgagaaaatcatctcagcccctctcccaccggaggaactcacgaaacttatctacgaagcctcgggacaagacatctccatcgccgtgctcacccaggagatcgttgtctacctggccatgtacgtgcgagcacagccgagcctcttcgtggagatgctgcggctgaggatcggactcatcatccaagtgatggcgactgaactggcacgcagcctgaattgctcaggagaagaggcctcggaatcgctgatgaacttgtcgcccttcgatatgaagaatctgctgcatcacattctgagtggaaaggagttcggggtcgaaaggtccgtgcggccgatccactcatcgactagctcccctacgattagcatccacgaagttggacacactggagtgaccaagaccgaacgctcaggaatcaataggctccggtcagaaatgaaacaaatgactcggagattctcggccgatgaacaattcttctcggtgggacaagcggcctcgtccagcgcccattcatcaaagtcagcccgatcctcaacccctagctcacctaccggcacgtccagctccgattcggggggccaccacatcggctggggcgaacgccaggggcagtggcttcgtagacgacggctggatggcgcaatcaaccgggtgccggtgggattctaccaacgggtgtggaagatcctgcagaagtgccatggtctgagcatcgacggctatgtcctcccgtcgtccaccactagagagatgactccacatgaaatcaaattcgcggtgcacgtcgagtccgtgctgaaccgggtgcctcagccggagtaccgtcagctcttggtggaggcaatcatggtgctgaccctgctgagcgataccgagatgaccagcatcggggggattatccacgtggaccagatcgtccagatggccagccaactgttccttcaagatcaagtgtccattggagccatggatactctggaaaaggaccaggctaccgggatctgccactttttctacgatagcgcaccgtcgggcgcgtacgggaccatgacctaccttacccgcgccgtggcgtcttacctgcaggagttgcttccgaattccggatgccagatgcaa

SEQ ID NO: 18094 - DNA, 3705 bp, synthetic construct
  misc_feature 1..3705: note = source = /note="Description of Artificial Sequence: Synthetic coding sequence"
  source 1..3705: mol_type = other DNA
atgaggagtcggtctaactcaggagtacgactggacggctatgcccgtctggtacaacaaaccattctgtgttatcagaatcccgtgacaggtctcctttcagcctcgcatgagcagaaggacgcctgggtgcgggataatatttacagcattttggctgtctgggggctgggaatggcttatcgtaaaaatgcagatcgggacgaagacaaggcgaaggcttatgaactggagcagaacgtggtgaagcttatgcgcgggctgttacaatgtatgatgaggcaggtggcgaaagtggagaaattcaaacatacgcagtcgaccaaagacagcctccatgcgaaatataacacggccacttgtggtacagtggtcggggatgaccaatggggccacttgcaggtggatgccacctccctgtttctactattcctcgcccagatgaccgccagcggcctgcgtattatcttcacactggacgaggttgcctttattcagaaccttgttttctacatcgaagccgcttataaggtggccgattacggaatgtgggaacggggcgataagacaaatcaggggattccagaattaaacgcatcctcagtaggtatggcgaaggcggccctggaagccattgatgagttggaccttttcggcgcgcatggcggtcgcaagtctgtgatccatgtgttgccagacgaagtggagcactgccagagcatattgttcagtatgctccctagagcctctacgtccaaggaaatcgatgcaggtttgttatccatcatctcatttccagcgtttgcggtcgaggacgtgaatctcgttaatgtgactaagaatgagatcatcagtaaacttcaaggacgctacggttgctgtcgctttctgagggatggctataagacccctcgggaggaccccaacaggctgcattacgaccccgcggaactgaagctgttcgagaacatcgaatgcgaatggccagttttttggacgtacttcatcatcgacggagtcttctctggggacgccgtgcaggtgcaggaatatcgcgaggccctggaagggattctgatccgcggtaagaatggaataaggcttgtacctgagctgtacgcagtgccccctaacaaggttgacgaagagtacaaaaatcctcacacagtggaccgcgtcccgatggggaaagtcccacacttgtggggacagagtctgtacatcctaagcagcctcctcgccgaaggcttcctcgcagctggggagattgaccccttgaatcggcgattttcaacgagcgtgaaacctgacgtcgtggtacaggtgaccgtgctggccgagaacaatcatataaaagacctgcttcggaagcatggagtaaatgtgcaaagcatcgccgatatccatcccatccaagtgcagcctggaagaatcctcagccacatttatgcaaaactcgggaggaacaaaaacatgaacctgtctggtcggccctaccgacatatcggtgttctcgggacatccaagctgtacgtgatcaggaatcaaatctttaccttcacacctcagttcaccgaccagcaccacttctatcttgccctggacaatgagatgattgtggaaatgctgcgcattgagctcgcatacttatgtacctgctggcgtatgaccgggcggcccaccctgacgtttcccatcagccgcaccatgcttaccaatgatggttctgatattcatagcgccgtcctctctacaatccggaaacttgaggacggttacttcggcggagcccgggtcaaactcgggaacctcagcgagttcctgaccactagcttctacacatatcttaccttcctggaccctgattgcgatgagaagttgttcgacaacgccagcgaaggcactttctcccctgactccgactctgacctggtggggtaccttgaagacacatgtaatcaggagagccaggacgaactggaccattatataaatcatcttctgcaaagtacctccttgagaagctatttgccccccttatgtaagaatactgaagaccgtcacgtgttctctgccatccacagcactagagacatcctctccgttatggctaaggccaaaggcctagaagtcccctttgttcctatgactctgccaactaaggtgctttccgcgcaccgaaagtctctgaatttagtggatagcccccagcctttgctcgagaaggtgccggaatctgacttccagtggcctagggacgatcacggcgatgtcgattgtgaaaaactcgtcgaacagctgaaagactgcagcaatctccaggaccaggctgacatcctgtatatcttatatgttataaaggggcctagctgggataccaatctcagcgggcagcacggtgtgacggtccagaatttattgggtgagctttatggaaaggccggccttaaccaagagtggggtctcataagatacatctctggattgttacggaagaaggttgaggtccttgccgaggcctgtaccgacttgcttagccatcagaagcagttaactgtggggctgccccccgagccgcgggaaaaaatcatttccgcaccactgcctccagaggagttgacaaagctgatttatgaagcaagtggccaagacatcagcattgccgtgctgacccaggagattgtggtgtatctggccatgtacgtgcgggcgcaaccgagcctgtttgtcgagatgctgaggcttcgcatcggtcttatcatacaggtgatggctaccgagcttgctcgatcgctgaactgttcaggcgaggaagcttctgaaagcctgatgaacctgagtccattcgatatgaagaatctactccaccatatcctgagtggaaaagaatttggggtggaacggtcggtgcgtcccatccacagctctacttcctcccccactatctccatccacgaggtggggcacacaggagttacgaagacagaacggtccggtatcaaccgcttgcggtctgaaatgaagcagatgaccagacgcttcagcgcggatgaacaattttttagtgtagggcaggcagcttctagctccgcccactcctccaagagcgctagaagctccacccccagctcacctacaggcacctccagtagcgacagcgggggccaccatatcggatggggcgagaggcaggggcagtggcttcgtcgtcggcgactggatggcgccataaatcgggtgccagttggcttttatcagagagtttggaaaattctgcagaagtgtcacggcctttccattgacggttatgtcctgccatcttctactacaagagaaatgacaccacacgagattaaattcgcggtgcacgtggagagcgtgctaaatcgcgtgccccaacccgagtaccggcagcttctggtggaggccattatggtgctgacacttctatcagacactgaaatgacctctatcggcggaatcatacatgtggatcagatcgtgcagatggcgagccaactgttcctgcaggaccaagtgagtatcggagcaatggacaccttggagaaggatcaggctactgggatctgccacttcttttatgactccgcccctagcggggcgtatggaactatgacatacctcactagagccgtggcatcctacctgcaggagttactgccaaattcaggctgccagatgcag

SEQ ID NO: 18095 - DNA, 3705 bp, synthetic construct
  misc_feature 1..3705: note = source = /note="Description of Artificial Sequence: Synthetic coding sequence"
  source 1..3705: mol_type = other DNA
atgcgctcgcggtcgaattcaggagtgcgcctggacggctacgcacgacttgtgcaacaaaccattctttgttaccaaaatccagtgaccggacttctttcagcaagccatgagcagaaggacgcatgggtgagagataacatttactccatactggccgtctgggggctgggcatggcttaccgcaagaatgcagatcgcgacgaagataaggcaaaggcatacgaacttgagcagaacgtggtgaaacttatgcgaggccttttgcagtgtatgatgcggcaggtggcaaaggttgaaaagtttaagcatacccagtcgaccaaagatagcctgcatgctaagtacaatactgcaacctgtggaactgtggtgggtgatgaccaatggggacatcttcaggtcgacgctactagcctcttcctgcttttcctggcacaaatgacggcttccggccttcggattatcttcaccctggacgaagtggcgtttattcaaaaccttgtcttttacatagaagcagcgtacaaggtcgcagattacggaatgtgggaacgaggagacaagactaatcagggaatcccggaacttaatgcaagctcggtgggtatggcgaaagccgcactggaagccattgacgagctggatctgttcggggctcatggaggccggaagtccgtaattcacgtgttgccggacgaagtggagcattgtcagtcgatcctcttcagcatgctgcccagagcatcaacgtcaaaagagattgacgcgggactgctttcaatcatttcctttcctgcatttgctgtggaagatgtcaacttggtcaacgtcaccaagaacgagattatctctaagctgcaaggtagatacggctgttgtcgtttccttcgcgatggatataagaccccccgtgaggatcctaaccgactgcattacgatccagcggagcttaagttgttcgaaaacattgaatgtgagtggccagttttttggacctacttcatcatagatggggtgttttccggcgatgccgttcaggtgcaggagtatagggaagcactggaagggattctgattagaggtaagaacggaattcgccttgtcccagagctttacgccgtgcccccaaataaggttgatgaggaatacaagaacccccacactgtggatagagttccaatgggaaaggtccctcatctgtggggacaatcgctgtacatcctgtcatcccttcttgcagaaggattcctcgctgcaggggaaatcgatccacttaatagacggtttagcacctcggtgaagcctgatgtggtcgtccaggtgactgtcctcgcggagaataatcatatcaaagatctgctgcgtaaacatggtgtcaacgtccagagtatagcggatatccaccccatccaagtgcaaccgggccgtattttgtcgcacatctacgccaaactcggtagaaacaaaaacatgaacttgtctggtcggccttaccgccatattggtgtgctcgggacttccaagttgtacgtgataaggaaccagatcttcacctttaccccacaatttactgatcagcatcacttttacctggcgcttgacaacgaaatgatagtggaaatgctcaggattgagttggcctacctttgtacttgctggagaatgaccggtagacctaccctcacttttcccattagcagaactatgctcactaatgacggttccgacatccattcggccgtcctgtccaccataagaaaattggaggacggctactttggtggggcacgcgtgaagctcgggaacctgtcggaattccttacgactagcttttacacctacctcacttttctcgacccggattgtgatgagaaattgttcgacaatgcatcggaaggtacttttagccctgatagcgatagtgatcttgtgggataccttgaggacacgtgcaaccaagaatcccaagatgaacttgatcactacatcaaccatcttctgcaatcaacctcgctccgaagttatctgcctcctctgtgcaagaacactgaagatagacatgtatttagtgccattcactctactagggacattctgtccgtcatggcaaaggcgaaggggctggaagtgcctttcgtgcctatgaccctcccaacgaaggtgctttcggcacatcgcaagagcctgaatctggtcgattcgcctcaacctcttctggaaaaagtgcccgaatctgacttccaatggccaagagatgaccacggagatgtcgattgtgagaaacttgtagaacagcttaaagattgctcgaatctgcaagatcaggcagatatcctctatattctctatgtgataaaggggccgtcctgggatacgaacttgtcgggacagcatggcgtgactgtgcaaaacctcctgggagaactctacggtaaggctggccttaaccaagagtggggactgatacgatacatatcaggtctgttgaggaaaaaagtggaagtgctcgcagaggcttgcaccgatctgttgtcccaccagaaacagcttaccgtgggcctgccacctgaacccagagagaagatcatttctgcacctttgccgcccgaagagctgaccaagctcatttacgaagcatcgggacaagatatttccatagcagtgctgactcaagaaatcgtcgtctaccttgcaatgtacgtgcgagcgcagccatcactttttgtcgaaatgctgaggctgaggatcggcctcattatccaagtgatggcaaccgaacttgcacggtcactgaactgctcaggtgaagaagcctccgagtccctcatgaatctgtccccttttgacatgaagaatcttcttcaccacatcctctccggaaaggaatttggtgtggagcggtccgtgaggccaattcacagcagcacttcatcaccaactattagcatccatgaagtgggccacaccggggtgactaagaccgaacgctccgggatcaaccgtctcagaagcgaaatgaaacaaatgactcggagatttagcgcagatgagcaattcttctctgtcgggcaagcggcctcgtcatcagcacactcgtccaagtccgctcggtcctcgactccatcatcgccaaccggaactagctcgtcggacagcggaggtcatcatattgggtggggtgaacgtcaaggtcagtggctgcgtcgcagacggcttgatggtgcaattaaccgggtccctgtcggattttaccaaagggtgtggaagatacttcagaagtgtcatggtttgtcgatcgacggatacgtcctcccctcttcgaccacccgggagatgaccccgcatgagatcaagtttgccgtgcatgtcgaatcggtgctgaacagagtgccccaacctgaatacagacaactgctggtggaggcaattatggtactgaccctcctgagcgatactgaaatgacgtccattggtgggatcattcatgtagaccagattgtgcaaatggcgtcacagctttttctgcaagaccaggtttctatcggcgccatggacacgctggaaaaggaccaggcaaccggaatttgtcactttttctacgatagtgccccttccggggcctacgggactatgacctatctcaccagagcagtggcaagctacttgcaggagctgctgcctaactcaggatgccagatgcaa

SEQ ID NO: 18096 - DNA, 3705 bp, synthetic construct
  misc_feature 1..3705: note = source = /note="Description of Artificial Sequence: Synthetic coding sequence"
  source 1..3705: mol_type = other DNA
atgcgcagccggtcaaattcaggagtgagactcgatgggtacgcgcgcctggtgcaacaaacgattctgtgctaccaaaaccccgtcaccgggctcctgtccgcctcccacgaacagaaagacgcatgggtgcgcgacaatatctactcgatcctggctgtgtggggcctgggcatggcctaccgcaaaaacgcggatcgggatgaggataaggccaaggcctacgagctggagcagaacgtggttaaactgatgcggggactcctgcagtgcatgatgaggcaggtcgctaaggtcgaaaagtttaaacatacccaatctactaaagactcactgcatgcgaaatacaatactgccacctgcggtaccgtggtgggagatgaccaatggggtcatctgcaggttgacgccacctcgctgttcctgctctttctggcccaaatgaccgcgtccggtctgcgaatcatcttcaccctggacgaagtggctttcatccagaacctggtgttctacatcgaggccgcttacaaggtggccgactacggaatgtgggaacgcggagataagactaatcaaggaatcccggagctcaacgcttccagcgtgggaatggctaaggccgcactcgaagcaatagatgagctggacttgttcggggcacatggaggaagaaagtccgtgatccatgtgctccccgacgaggtggaacactgccaatccattcttttctcgatgctgcctcgggcctcaaccagcaaggagatcgacgccggactgctgtccattatctccttcccggccttcgcggtggaggacgtcaatctcgtgaacgtgaccaagaacgaaatcatctcgaaacttcagggaagatacggatgctgcagattcttgcgcgacggatacaagacgcccagagaggacccgaaccggttgcattacgacccggccgaactcaaactgttcgaaaacatcgagtgtgagtggccagtgttctggacttacttcatcatcgacggcgtgttttccggagacgcggtgcaggtgcaggaatacagggaagcgctggaaggaatccttatcagaggcaagaacgggatcagactcgtgccggaactgtacgccgtcccacccaacaaggtcgatgaagagtacaagaatcctcatacggtggaccgcgtgccaatgggaaaagtgccgcacctgtggggacagtcactgtacatcctgtcgtcactgctggccgagggattcctcgccgcaggtgagattgacccattgaaccggcgcttttcgacttcggtcaaaccggacgtcgtcgtgcaggtgaccgtgcttgcagaaaacaatcacattaaggatctgctgcgcaaacacggagtcaatgtgcaatctatcgcagacattcacccaatccaggtccagccaggacgtatcctttcgcacatctatgcgaagttggggaggaataagaacatgaatttgtccggcagaccataccggcatatcggagtgctggggacttcgaagctgtacgtgattcgcaaccaaatcttcacctttaccccccagttcaccgaccagcaccacttctacctggccctggacaacgaaatgattgtggagatgctccgcatcgagctggcttacctgtgcacttgctggcggatgaccggacggccaactctgacttttcccatctcgcgcacgatgctgactaatgacggatccgacatccacagcgcagtgctctcgactatcaggaaactcgaggacggatacttcggaggagcgcgcgtgaagctgggaaacttgtcagaattcctgaccacttccttctacacctacctgaccttcctggatccagactgcgacgagaaattgtttgacaatgcatcggagggaacctttagccccgattctgattcagatctggtcggatacctcgaagatacctgcaaccaagaatcgcaggatgagcttgaccactatatcaatcacctgctccagtccacttcattgaggtcatacctccctccactctgcaagaacaccgaggatcggcacgtctttagcgccatccattcgacccgcgacatcctgtccgtgatggctaaagccaaaggactggaggtgccattcgtgcctatgacgctgcctactaaggtgcttagcgcccaccggaaaagcctgaacctggtggactcgccgcaaccgctgctcgaaaaggtgccggagtccgatttccagtggccacgcgacgatcacggcgacgtggactgtgaaaagctggtggaacagctcaaagactgcagcaatttgcaggatcaggctgacatcctgtatatcctgtacgtgatcaagggaccttcatgggatacgaacctttcgggtcaacacggcgtcaccgtgcaaaatctgttgggggaactttacggcaaagccgggctcaaccaggagtggggactgatccgctacatttcaggcctcctccgaaaaaaggtggaggtgctcgcggaggcatgcactgacctcctgtcgcaccaaaagcagctgaccgtggggttgccgccggagccgcgcgaaaagatcatttcggcccctctgccgccagaagagctgactaagctgatctacgaggcaagcggccaagatatctctatcgcggtgctcacccaggaaatcgtggtgtacctggcaatgtatgtgcgcgcccaaccttcactcttcgtggaaatgctccgcctgcgcatcggtctgatcatccaagtgatggccaccgagttggctaggtcattgaactgctcaggagaggaggcgtccgagtcgctgatgaacctgagcccttttgatatgaagaacctgctgcatcacatcctgtcaggcaaggagtttggagtggaacggtcggtgcgcccgatccatagctccacctccagccctaccatctcgatccacgaagtcggacacactggggttaccaaaactgagaggtccgggattaatcggttgcgctccgagatgaagcaaatgactcggagattctccgccgatgaacaattcttctcggtgggacaggccgcttcctcgtccgcacacagctcgaaatccgcgcggtcctcaactccatcgtcgccgaccggaacttcgtcgtctgattcgggaggacaccacattggatggggcgaacgtcagggccagtggctgcgccgcagacgattggacggggctatcaacagagtgccggtgggattttaccagagggtgtggaagatcctgcaaaagtgccacggactgtccattgacggctacgtgctgccgtcctcgaccacccgcgaaatgactccgcacgaaatcaaattcgcggtgcatgtcgaatcggtgctgaaccgcgtgccgcagcctgagtaccggcagctcttggtggaagctatcatggttcttacgcttctctcagataccgagatgactagcatcggcggaatcatccatgtggatcagatcgtccagatggcctcgcagttgttccttcaggatcaggtcagtattggagccatggatacccttgaaaaggaccaggcgactggaatatgccatttcttctacgactccgcccctagcggagcctacgggacgatgacctaccttacgcgggcagtggcaagctaccttcaggagctgctgcccaacagcggctgtcagatgcaa

SEQ ID NO: 18097 - DNA, 3705 bp, synthetic construct
  misc_feature 1..3705: note = source = /note="Description of Artificial Sequence: Synthetic coding sequence"
  source 1..3705: mol_type = other DNA
atgcggagtcgaagcaactccggcgtccggctcgacggttacgccaggctggtacagcaaaccatcctgtgctatcagaatccagttactggactgctgtcagctagtcatgagcagaaggacgcttgggtccgggacaatatatattcaatcctggccgtttggggcctcgggatggcctatcgtaagaatgcggatcgtgacgaagataaggctaaggcctacgagctggaacagaacgtggtgaagctgatgaggggtttgctacaatgtatgatgcggcaagtggctaaagttgagaagtttaagcatacccagtccaccaaggatagcttgcacgctaaatacaataccgctacctgtggaactgtcgtgggcgacgatcagtgggggcatctgcaggtcgatgctaccagcctgttcctgttgtttcttgctcagatgacagcctccggactgaggatcatcttcacgctcgatgaggtggcattcattcagaatctggttttctacattgaagcggcgtacaaagtcgcggattacggcatgtgggaaagaggagataagacaaatcagggtatacccgagcttaatgcatcttccgtgggcatggccaaagcagccttggaagccatcgatgagctcgatttgtttggagctcatggaggcagaaaaagtgtgattcacgtcttacccgacgaggtggagcattgtcagtccatcctgttcagcatgctgcctcgcgcatcaacgagtaaggagattgacgcaggcctgttgtctatcatctccttccccgcctttgctgtggaggatgtgaatctggtgaatgtaacgaagaacgagattatctctaagcttcagggtaggtacggctgttgccgcttcctgcgggacggctacaagacaccccgagaagatcccaaccgtctgcattatgatcccgcggagcttaaattgttcgaaaatatagagtgcgaatggcctgtgttttggacttacttcatcattgacggagtcttctctggcgatgctgtgcaggtccaggagtacagggaggctctcgaaggcatcctgattcgtggaaagaatggaatcagacttgtgccagagctttacgctgtcccccccaacaaggttgacgaagagtacaaaaatccacacacagttgaccgggtacctatgggcaaggtgccccatctgtggggacagagcctttatatcctgtcctcactgctggcggaagggtttttggccgccggcgagatagatcctctaaatcgccgattctccacttctgtgaagccggatgtagtagtccaggtcacagtcttagcagagaataatcatatcaaggacttgctgcggaagcatggtgtcaacgtccagtctatcgccgatatacaccctattcaggtgcaaccaggccgcatcctctcccatatctacgccaaactgggccgtaataagaacatgaacctgagcggcagaccctatagacacattggcgtcctgggaactagcaagctgtacgttatacgaaatcaaatctttaccttcactcctcaattcacagatcagcaccacttttatctcgcgttagacaatgaaatgatcgtagaaatgctgaggatcgagttggcttatctgtgcacgtgttggcgaatgaccggtcgccccacgctgacctttcctatctccaggactatgttaaccaacgacggaagtgatatccactccgctgtactgtccacaattaggaagttagaggatggatattttggtggagccagggttaaacttgggaacttgtctgagtttcttactacaagcttttacacctatttgacattccttgaccccgactgtgatgaaaagttatttgacaacgcttccgagggcacattcagtcccgattcagacagcgatctcgtggggtaccttgaggatacgtgtaatcaagaaagccaggacgagctggaccattacataaatcatcttctccagagtacatcgctgcgcagctatctacccccactatgcaagaataccgaggaccgacacgttttcagtgccatacactctaccagggatatcctaagtgtgatggccaaagctaaaggcttggaagtaccattcgtgcctatgaccctcccgaccaaagtgctgagcgcccatagaaagtcacttaacctggtggatagcccacaacctcttctagaaaaagtccctgaatctgattttcagtggcccagggatgatcacggagatgtcgattgcgagaagctggtcgaacagcttaaggattgctctaacctgcaggatcaggcagatatcctgtacatcctctatgtgatcaaggggccaagctgggacaccaatctgagcggccaacatggcgtgactgtgcagaacttacttggagagctgtatggcaaggccgggctaaaccaggaatggggattgatccgatatataagcggcctgcttagaaaaaaggtagaggtcctggccgaggcttgcaccgacctgctgtcccaccaaaaacagttgactgtcggcctcccaccagagccgagggaaaaaataatatccgcacctctacctccagaagagttgaccaaactcatctacgaggcctctgggcaggatatttcaattgctgtgcttactcaagaaattgttgtttatctggccatgtacgtgcgggcacagccaagcctgtttgtagaaatgcttcggctgcggattggcctgatcatccaggttatggctaccgagctcgccagatcactgaactgttcaggggaggaggccagcgagtctttgatgaacctaagtccatttgatatgaagaatttattgcatcacatactgtctggcaaggaatttggggtcgagcgcagtgtaagacccatccacagctcaacctcttccccaacgatcagtattcatgaggtggggcacactggagtgaccaaaacagagcgcagcggaatcaataggctgagaagtgagatgaagcagatgacgaggcgcttctccgccgacgagcagttcttcagtgtcggccaggctgccagcagcagcgctcattcctccaagtctgccaggagtagcaccccctcttccccaactggcacttcctcaagcgatagtgggggacaccatatcggatggggagaacgccagggtcagtggctgcgccgccggagattagacggcgccataaatcgggtgcctgtcgggttctatcagcgggtgtggaagattttacaaaagtgccatgggctatcaatcgacgggtatgtcctccctagtagcaccactcgagagatgactccccatgagattaaatttgccgtgcatgtggagagcgtgctcaatagggtgccgcagccggagtatcggcagctgctggtggaagctattatggttctgacattgctcagcgacaccgagatgacctccatcggcggaattatccatgtcgaccagatagtccaaatggcctctcagctgttcctacaggaccaggtttccatcggtgcgatggacacactggaaaaagaccaggcgacagggatttgtcattttttttacgactcagcgccatccggagcttacggtacaatgacctacctcactcgggcagtagcctcttacctgcaggagctcctcccaaatagcgggtgtcaaatgcaa

SEQ ID NO: 18098 - DNA, 3705 bp, synthetic construct
  misc_feature 1..3705: note = source = /note="Description of Artificial Sequence: Synthetic coding sequence"
  source 1..3705: mol_type = other DNA
atgagatccagatcgaactcaggcgtgcggttggacgggtacgcgcgtttggtgcagcaaaccatcttgtgttaccagaacccggtgacgggacttctgtcagcctcgcatgaacaaaaggatgcatgggtgagagataacatttactccattctggcagtgtggggcctgggtatggcgtacagaaagaatgcggatagagacgaagataaagcaaaggcctatgaactggagcagaacgtggttaagctgatgagaggattgctgcagtgcatgatgcgacaagtcgccaaagtggaaaagtttaaacatacccagtccaccaaggattcactgcacgcaaagtacaacaccgcaacctgtggcactgtagtgggggacgaccagtggggacatctgcaggtggatgcgacttcgctcttcctcctgtttcttgcacagatgaccgcatccggtttgagaatcatctttactctggatgaagttgcattcatccagaaccttgtgttctacattgaggcagcatacaaggtggcggattacgggatgtgggagcgtggagataagaccaaccaggggattcctgagctgaacgcctcctcagtgggtatggcaaaggctgcactggaggcgatcgacgaactcgatctttttggtgcccatggtgggcgaaagtccgtcattcacgtccttccggatgaggtggagcattgccaatcgatcctgttcagcatgctgcctcgagcgtcaacctccaaagaaattgatgccggcctcctttcgataatctcttttcctgcctttgcagtcgaagatgtcaacctggtgaacgtgaccaaaaatgagatcatatcaaaacttcaaggcaggtacgggtgctgtaggttcctgagagacggatacaagactcctcgagaggatcctaacaggctgcattatgatcctgcagagctgaagctcttcgaaaacattgaatgtgagtggccggtcttttggacctacttcatcattgacggcgtcttttcaggtgacgcagtgcaagtacaagaataccgcgaagccctcgaaggtatactgatcagaggtaagaacgggattaggctcgtgccagagctgtacgcagtcccgcccaacaaggtcgatgaagaatacaagaacccacatactgtcgacagggtccccatgggtaaggtccctcatctttggggtcagtcgctctacatattgtcctcgcttctggcagagggcttcctcgctgctggagaaatagatccactgaaccgaaggtttagcactagcgtgaagccagatgtggtcgtgcaggtgaccgtcctggccgaaaacaaccacattaaggatcttcttagaaaacacggtgtgaatgtccaaagcattgcggatattcatccaatccaggtgcaaccaggaagaattctttcccatatctacgctaaacttggtcgtaataagaatatgaacctgtcgggacgaccttacagacacattggtgtccttggaacctcgaagctgtacgtgatacggaaccagattttcactttcaccccccagtttacggaccagcatcacttctatttggcacttgataacgagatgatcgtggaaatgctgagaatcgaactggcatacctctgcacttgttggcgaatgacgggtaggccaactctcacttttccgatttcacgcaccatgttgactaatgatggttcggatattcactcggcagtgctcagcaccattcggaaacttgaagatggttactttggaggtgcacgcgtcaagctcggtaacctgtccgaatttctgaccacctccttttacacttacctcacttttctcgaccccgattgtgacgaaaaacttttcgataatgcatccgaagggacctttagcccggatagcgattccgatttggttggataccttgaggatacctgcaaccaggagtcccaagatgaactcgatcattacattaaccacctcctccaatccacctcactgagaagctatttgcctcccttgtgtaagaatactgaagatcgacatgtgttcagcgccattcactcgacccgcgatatactttccgtgatggcaaaagcgaagggactggaagtccctttcgtgccaatgacccttccaactaaggtgctgtctgctcacagaaaatcgcttaacctcgtggattcgcctcagcctctcctggaaaaggtgcctgagagcgacttccagtggccaagagatgaccacggtgacgtggactgtgaaaaacttgtggaacagctgaaggattgttccaacctccaagaccaagcagacattctgtacatcttgtatgttatcaaaggacctagctgggatactaacttgtcaggccagcatggcgtgaccgtgcaaaaccttcttggagagctgtacggaaaggccggtttgaaccaagaatggggacttattcggtacatttcaggcctcctcaggaaaaaggtggaagtgctggcagaagcgtgcacggacctcctttcgcatcagaagcagctgactgtcggactccctccagagcctagggaaaagattatctcggcccctctgcccccagaggaactgacgaagctgatatacgaagcatcgggacaggatatctcaatagccgtgcttactcaggaaattgtggtttacctcgcaatgtacgtaagagcacagccttcgctgtttgtggaaatgctcaggctgagaattggtctgataatccaagtcatggcaaccgaattggcaaggtcactgaactgttcgggagaggaagcaagcgaatccctgatgaatctgtcgccgtttgacatgaagaatctcctccaccacattctgtcagggaaggagtttggagtggaacgctcagttagaccgattcattcctctacgtcgtcgccaaccatttctatacacgaggtgggtcacaccggggtgactaagaccgagagatcgggcatcaatcggcttaggtcggaaatgaagcaaatgactcgtcgtttttcggcagacgaacagtttttcagtgtggggcaagcagcgtcgtcgtccgcccactcgtcgaaaagcgcccgaagctcaaccccttcgagtcccactggcacgagctcgtccgacagcggcggtcaccatatcgggtggggggaacggcagggacaatggctgcggaggcgtagattggacggagccattaatcgcgtgcctgtgggattttaccaaagagtgtggaagattctgcagaagtgtcatggactttcgatcgacggatacgtgcttccatcatccaccactcgtgaaatgaccccacacgagattaagttcgctgtccatgtggagtcggtcctgaacagggtgccgcaacccgaatacagacagctccttgtggaagcaataatggtgctgactctgctgagcgatactgaaatgacttcgatcggcgggattatacacgtggaccaaatcgtgcaaatggcatcccaactttttcttcaggaccaagtgtccattggcgcaatggacaccctggagaaagatcaggccactggaatttgtcatttcttctatgattcggcaccaagcggagcatacggcaccatgacctacctgactcgcgccgtggcgtcgtaccttcaggagctccttccaaactccggttgtcagatgcag

SEQ ID NO: 18099 - DNA, 3705 bp, synthetic construct
  misc_feature 1..3705: note = source = /note="Description of Artificial Sequence: Synthetic coding sequence"
  source 1..3705: mol_type = other DNA
atgcgctcccggtcaaattccggggtccggctcgatggctatgcccggcttgttcagcaaaccatcttgtgctatcaaaatccggttaccggactgctctcggcctcgcacgagcaaaaggacgcttgggtccgggataacatctatagcatcctggcagtttgggggctggggatggcgtacagaaaaaatgctgatcgggatgaagacaaggctaaagcctacgaactggagcagaatgtggttaagctgatgcggggactgctgcagtgtatgatgcggcaggtggccaaggtggagaagttcaagcacacccaatccaccaaggactccctgcatgcgaagtacaacacggctacctgcggaacggtggtgggagacgatcagtggggtcacctgcaagttgatgcgacctccttgttcttgctgttcctggcccaaatgactgcctcgggactcaggatcatcttcactctcgacgaggtggccttcatccagaaccttgtattttacatcgaggcagcctacaaggtggccgactacggcatgtgggagcgcggtgataagacgaatcagggtatccctgagctgaatgcaagctcggtgggtatggcaaaagccgcactcgaagctatcgacgaactggacctgtttggagctcacggaggtcgcaaatcggtgatccacgtcctccctgatgaggtcgagcactgccaatccattctgttctcgatgctgccgagggcgtcgacctccaaagagatcgatgctggactgctgagcatcatctccttcccggcattcgccgtggaagacgtgaacctggtgaacgttacgaaaaatgagataatctccaagctgcagggccggtacggatgctgtcggttcctgcgagacggctacaagaccccgcgcgaagacccgaacaggctgcattacgaccctgctgagctgaagttgttcgaaaacatcgaatgcgaatggcccgtgttctggacttactttatcattgatggcgtgttctccggcgacgcagtccaagtccaagaatacagagaggcactcgaaggaattctgatccgcgggaagaacgggatccgcctggtgccggagctttacgccgtgccaccaaataaagtggatgaagagtataagaacccgcacactgtggatcgggtgccaatgggcaaggtgccgcacctgtggggccagtcgctgtatatactcagctcgctgctggccgaaggattcctggcagctggcgaaatcgatccgctcaaccgccgcttcagcacttcggtgaagccagacgtggtggtgcaggtcactgtgctggcggagaacaaccatatcaaagacctgcttcgaaaacacggagtcaacgtgcaatcgatcgcggatatccatccgattcaggtgcagccgggacgcatcctgtctcacatttacgctaaactcgggcggaacaagaacatgaacctttcgggcagaccataccggcacatcggtgtgctgggaacttcgaagctgtacgtaatccggaatcaaatcttcacctttactcctcagtttactgaccagcaccatttttacttggcactcgataacgaaatgatcgtggaaatgctgcgcattgaactggcgtacctgtgcacttgctggcggatgaccggacgtccaaccctgactttcccgatatcccgcaccatgctgaccaacgatggatcagacatccactcggcagtcctcagcaccatccgcaaactggaggatgggtactttggtggcgcccgggtgaagctgggcaacctctcggagtttctgactacttctttctatacctacctgaccttccttgaccccgactgtgatgaaaagctctttgacaatgcatcggaaggcaccttctcacctgactcggactccgaccttgtgggatacctggaggacacctgtaaccaagaaagccaagacgaactggatcattacatcaatcatttgctgcagtcgacttccctgcggagctacctgccgcctttgtgcaaaaataccgaggaccgccatgtcttctcggcaattcactcgactcgggatattctgtccgtaatggccaaggccaagggtctggaggtgccattcgtcccgatgactctccctactaaggtgctgagcgcgcatagaaagtctctgaatttggtcgacagtccacagccgctgctggagaaagtgccagaatcagacttccaatggccgcgcgatgatcatggggacgtggactgcgagaagttggtggaacagctcaaagactgctcaaacttgcaggaccaagcggacatcctgtacattttgtacgtgatcaagggtccatcgtgggacacgaacctctccggccagcacggagtgaccgtgcagaatctgcttggagaactttacggtaaggcgggattgaaccaggagtggggattgatcagatacatcagcggactgctcagaaagaaggtcgaggtgctcgctgaagcctgcaccgacctcttgtcgcatcagaagcaactcactgtcggactgccgcccgagccgcgggagaagatcatctccgcacctctcccgccagaagagctcaccaagctgatttacgaagcctcgggacaggatatctcgatcgccgtcctcacgcaggaaatcgtggtctacttggcaatgtacgtcagagcacagccgagcctgtttgtggagatgctgcgtctcagaatcggtctgatcatccaagtgatggccaccgaactggcacgatcgctcaactgttcaggagaagaggcttcagaatcgctgatgaacctctcgccattcgacatgaaaaatctgttgcaccacattctgtcgggtaaagagttcggagtggagcgctcagtcaggccgattcattcatcaacctcatcccccacgatctcgatccacgaagtgggacatacgggcgttaccaagaccgagcggtcgggaatcaaccgcctgcgttcggagatgaaacagatgactagacggttctccgcggacgaacaattcttctcggtcgggcaagcagccagctcctccgcccattcttccaagtcagcgcggtcaagcactccttcgtcgcctaccggaacctcatcatcggactcaggagggcaccatatcggatggggagaaagacagggccaatggctccgccgccggcgcctcgacggagcgatcaacagggtcccggtgggtttctaccaacgcgtctggaaaatcttgcagaaatgccatggactctctatcgatggttacgtgctgccttcttcaaccacgcgggagatgacgccacacgaaatcaagttcgcagtgcacgtcgaatccgtcttgaaccgcgtgccgcaacccgaataccgccaacttctcgtggaggccatcatggtgctgactctcctctcagacaccgaaatgacgtccatcggaggcatcatccacgtcgaccagatcgtccagatggcctcgcagttgtttcttcaagaccaagtttccatcggagccatggatacgctggaaaaggatcaggcgacggggatctgccacttcttttacgatagcgccccctcgggagcttacggaactatgacctacctgacgcgcgcggtggcctcctacctgcaagaactccttccgaattcgggttgccagatgcag

SEQ ID NO: 18100 - DNA, 3705 bp, synthetic construct
  misc_feature 1..3705: note = source = /note="Description of Artificial Sequence: Synthetic coding sequence"
  source 1..3705: mol_type = other DNA
atgagatctcgcagcaacagtggagtaagactggatggatatgcccggttggtccaacagaccatcctgtgctaccagaaccccgtaactggactcttgtccgctagccacgaacagaaggatgcttgggtcagagataatatctattccatcctggcagtttggggtctgggtatggcttataggaaaaacgccgaccgagatgaagataaagcaaaagcgtatgaactggagcagaacgtggtcaagcttatgcggggcctgctgcagtgtatgatgaggcaggtcgccaaggttgagaaattcaaacacacccaaagtacgaaggatagcctacacgccaagtacaacaccgcgacatgcgggacagtggtgggtgacgaccagtggggccacctacaggtggacgcaaccagtttatttctgctgttcttagctcagatgacagccagtggccttcggatcatcttcacgctggatgaggttgctttcatccagaacttggtgttctacatcgaagccgcttacaaggtggccgattacggcatgtgggaacggggtgacaagacgaaccagggcattccagagctgaacgcgtcctccgtgggcatggccaaagccgctctcgaggcgatcgacgagctcgatttgtttggcgctcatggagggcgaaaatccgtgattcatgtgctcccggacgaagtggagcactgtcagagtatccttttctcgatgttgccaagggctagcacgtctaaagaaattgacgctggcctccttagtatcatttctttcccagccttcgcagtggaagacgtgaacctcgtcaatgtgacgaagaacgaaatcatttccaagctgcaaggcaggtatggttgttgcaggttccttcgcgatggatataaaaccccacgagaggatcccaaccgacttcactatgaccctgccgaactgaagctcttcgagaacatcgagtgtgagtggcccgttttctggacctatttcattattgatggcgtgttctctggcgacgcagtccaggttcaggaataccgcgaagcgctggagggaattttgatccgcgggaagaacggcatccggttggtccccgagttgtacgccgtgccgcccaataaggtcgacgaagaatataaaaacccacacactgtcgatcgagtccccatgggcaaagtccctcatctgtgggggcaaagcctgtacattctgtccagtctgctcgccgaggggttcctggcagccggagaaatcgaccccctgaatcggcgattctctactagcgtgaagcccgacgtggtcgtgcaggtaaccgtgcttgcagagaataaccatattaaggatctgctgcgcaaacacggagttaacgtacagtccattgctgatatccatcccatccaagtccagccagggcgcatcctgagccatatctatgctaagcttgggaggaataaaaacatgaacctgagtggccgaccctacaggcacataggggtgttaggaacctccaaactgtatgttattcgcaatcaaatatttaccttcactccacagtttaccgaccagcaccacttttacctggccctcgataatgagatgatcgtggaaatgctacgcattgagctggcgtacctgtgcacctgttggcggatgacaggccgccctacactcacctttcccattagtcggactatgctgacaaatgacgggtcagacatccacagtgctgtgctgtccacaatccgcaagctggaagatggatactttgggggcgcccgcgtgaaactcggcaacttaagtgaatttctgacgaccagcttttacacatatctgacctttttggatccggactgcgatgaaaaactgtttgataacgcctctgagggaactttcagcccagactcggattcagatctagttggatatctggaagacacctgtaaccaagaatctcaagacgagctggatcattacatcaaccacctcctgcagagcacatctttacgcagttatctcccacctctgtgcaagaacactgaggatcgccacgtgttttcggcgatccacagcacccgcgacatcctgtccgtgatggctaaggccaagggcctggaagtgcccttcgtccccatgacgctccctacgaaggtcctttccgctcaccgtaagagtctcaatctggtcgattctccccagcctcttttggagaaagtgcctgagtccgattttcaatggcccagagatgatcatggtgacgtggactgcgaaaaactggtggagcaattgaaagattgttcgaacctgcaagatcaagcagatatcctttacatcctgtatgtgattaagggtccttcatgggacactaacctctccggccagcatggggtcacagtgcagaatcttctgggcgagttatacggcaaagcaggcctcaatcaggagtggggcttgattcgttacatcagtgggttgctcaggaagaaggtggaggtgcttgcagaggcctgcactgacctgctatcccaccaaaaacagctcaccgtcggattacccccagagcccagagagaagatcatttccgcccctctccccccggaggagttaacaaagctgatttacgaggcatcggggcaggacattagcattgccgtgctaacccaggaaatcgtagtgtatttggcaatgtacgtgcgagctcagccttctttgttcgtagaaatgctgagattacgtattggactaattatccaggtcatggccactgaactggcccggtccctgaactgctccggagaggaagcatctgaatctctgatgaacctgagcccttttgatatgaaaaatctgctgcatcacatcctctccggcaaggagtttggcgtcgagagatcagtgcgccctatccattcatcgacctcttcccccaccataagtattcatgaggttggacataccggggtcaccaagaccgaacgcagtgggatcaacaggttaaggagcgaaatgaaacagatgacacgccggttttctgctgatgagcagttcttttcggttggacaggccgccagctcaagtgctcattctagcaaatcagccaggtcaagtacaccatctagtccaacgggtacctccagctccgatagcgggggacaccatattggctggggagagcggcagggtcagtggcttcgcaggcggagattggacggcgctatcaatagagtccccgtgggcttttaccagcgggtgtggaagattttacaaaaatgtcacgggctctccattgatggctacgtcttgccctcttcaacgaccagggagatgaccccccatgagatcaagttcgctgtgcacgtagagtcggtgctgaaccgggtaccacagcctgagtatcggcagcttctggtggaagcgatcatggtgctgactctcctctctgacactgaaatgaccagcatcgggggcatcatccacgtggaccaaatagttcaaatggccagtcagttgtttttgcaggatcaggtctccatcggagctatggacacattggaaaaggaccaggcgacaggtatctgccacttcttctacgatagtgccccctccggagcttacgggaccatgacatatctcactcgggccgtggcgtcctatctgcaggagcttctacccaatagcggatgtcagatgcag

SEQ ID NO: 18101 - DNA, 3705 bp, synthetic construct
  misc_feature 1..3705: note = source = /note="Description of Artificial Sequence: Synthetic coding sequence"
  source 1..3705: mol_type = other DNA
atgcggtcccggagcaattccggcgtgagacttgatggttacgctcggctggtccagcagacaatactttgttaccagaaccccgtgaccggactgctttctgccagccacgagcaaaaagacgcatgggttcgagataacatttactctattttagccgtgtggggcttgggaatggcatatcgaaaaaacgccgatcgcgatgaggataaggccaaagcctacgaactggagcagaatgtggtgaagttgatgcgcggactacttcagtgcatgatgcgccaggtggcgaaggtcgagaaattcaagcacacgcagagcactaaagatagcctgcacgcaaaatacaatacagcgacgtgcggcaccgtagtgggtgatgatcagtggggccacttgcaagtcgatgccactagcctattcctgctgtttctggcccagatgacggctagtgggctacggattatcttcacgttagatgaggtggcattcatccaaaacctggtattttacatcgaggcagcctacaaggtggcggactatggcatgtgggaacgtggcgataagacgaatcaaggaatcccagaactcaatgcttcctccgtcggcatggcgaaagccgcactggaggccattgatgagcttgatctgttcggtgcccacggaggcagaaagtctgtaattcacgtgcttccggacgaggttgagcattgccagtcgatcctgttctccatgctgccacgcgcctctacgtcgaaggagatcgacgccggcctcctttcgatcatatcgttccccgcgttcgctgtggaggacgtgaatctggtgaatgtgacgaagaatgaaataatctccaagctgcaggggcggtacggatgctgtaggtttttacgtgatgggtataagacgccgcgagaggatccaaatcgtctgcactatgatcccgctgagctgaagctgttcgagaatattgagtgcgaatggcccgtgttttggacctacttcatcattgatggcgtcttcagtggcgatgcagtccaggtgcaggagtaccgcgaggccttggagggaatactgatcaggggaaagaacggaatccggctggtaccggagctgtacgcggtacccccaaacaaggttgacgaagagtacaagaaccctcacaccgtggatcgtgttcctatgggtaaagttccgcatctttgggggcaatccttgtatatcctgtccagtctactggccgaaggattcctggcggccggagagattgacccgctgaaccgtcggttctcgacaagtgtgaaacctgacgtcgtggtgcaggtcacagtcttagccgagaacaaccacatcaaggacctgttgcgcaagcacggcgtgaacgttcagtctatagcggatattcatccaatccaggtccaacccggcagaattctgagtcacatctacgccaaactgggtcgcaataagaacatgaacctgagcggccgtccctaccgccatattggcgttttggggacaagcaagctttatgttattcggaaccagatcttcacttttacaccccagtttacggaccagcatcacttctatttagctctggacaacgagatgatcgtggagatgcttcgcattgagctggcctacctgtgcacctgctggcgtatgacgggcaggccgacactgacctttccgatctcccgcaccatgcttaccaacgacgggtccgacatccacagcgcggtgctttctaccatccgcaagctggaagacggctactttggcggcgcacgcgtcaaattggggaacctgtccgagtttctcacaacatccttctatacctacctgaccttcctagacccggattgcgatgagaagctttttgacaatgcttcggagggaacgtttagcccagactcggacagtgatctggtgggctacctggaggacacgtgcaatcaagagagccaggatgagttggatcactacataaatcacctactccagtctaccagcctgcgtagctaccttcctccgctgtgtaagaacactgaagatagacatgtgtttagcgcgattcatagtacaagggatattctgtcagtgatggccaaggcaaagggtttggaggtgccctttgttccgatgactcttcccactaaggttttgtcagcccaccgcaagtcgcttaacctagtggatagtccgcagccgctcctagagaaggtccccgagtccgatttccaatggccacgggatgatcatggagatgttgattgtgagaagctagtggagcaactcaaggattgctccaacctgcaggatcaagcggatattctgtacatcctttacgtaattaagggcccaagctgggacaccaacctgtctggacagcatggcgtgacggtccagaatctgcttggtgagctgtacggtaaggccggcctgaatcaggagtggggtctaatacggtatatctctggtctgctacgtaagaaagtagaggtgttagccgaagcctgcacagacctgctgtcgcatcagaaacagctcactgttggactgccgccagagcccagggagaaaattattagcgcaccactgccacccgaggagcttaccaagctgatctacgaggcctccggccaagatatctccattgccgttctgactcaagagatcgtcgtgtatttagccatgtacgtgcgggcccagccctcactcttcgtagaaatgctgcgactgcgtattggactgatcatccaagtgatggccacggagttggcgcgctcgctaaattgctcaggcgaggaggcttctgagtcgctgatgaatctctctcctttcgacatgaagaacctgttgcatcacattttaagcggtaaggagtttggcgtagaacggtcggtgcgaccgatacacagctccacgagcagtccgaccatctcgatccacgaggtgggccacactggagtcactaagacggagcgcagcggcatcaacagactgcgctccgagatgaagcagatgacgcgacgcttctcggcagacgagcagtttttttcggtggggcaggctgcatcctcctcggcgcacagtagcaaatcggctcggtcatctacgccgtccagtccaactggaacatcgagctctgacagcggtggccatcacattggctggggcgaaaggcagggccagtggctccgtcgccggcgcctcgacggcgccattaatcgcgttccagtgggattctatcagcgagtatggaagattctgcaaaagtgtcacgggctatccatcgatgggtacgttctacctagctcgacaacaagggagatgacgccacacgagataaagttcgcggtgcacgtggaatccgttctgaaccgggtcccacagccagagtaccgccaacttctggtcgaagccatcatggttctgacgcttctgagtgacacggagatgaccagcatcggtggcatcattcatgtggaccagattgtccagatggcgtcccaactgttcctgcaagaccaggtgagtatcggagccatggatactctggaaaaggatcaagcaaccggaatctgccacttcttttacgactcggcaccgagtggtgcatacggcactatgacctacctcactagggcagtcgcttcttacctccaggaattgctgccaaactcaggttgccagatgcaa

SEQ ID NO: 18102 - DNA, 3705 bp, synthetic construct
  misc_feature 1..3705: note = source = /note="Description of Artificial Sequence: Synthetic coding sequence"
  source 1..3705: mol_type = other DNA
atgaggtcccgcagtaactctggcgtgcgactcgacggatatgcaaggttggtgcagcagacaattctttgctaccaaaaccccgtgaccggtcttctgtccgccagccacgaacaaaaagacgcctgggttagagataacatttattctatcctggctgtgtggggcctgggaatggcctatcgaaagaatgctgaccgggacgaagacaaagccaaggcttacgaactggaacagaatgttgtgaagctgatgagaggactgctgcagtgtatgatgagacaagtggcgaaggttgaaaaatttaagcatacccagagtactaaggatagcttgcacgcaaaatataacaccgctacatgtggcaccgtggtgggtgatgaccagtggggacacctgcaggtcgacgctacctccctgtttctgctgtttcttgcccagatgaccgcaagcggacttaggatcatcttcactctcgatgaagtggccttcattcaaaacctggtgttctatattgaggccgcctataaggtcgctgattatggaatgtgggagaggggcgataagaccaatcagggaatccccgaactgaatgcatcttcagtgggaatggccaaagccgcactcgaggcgatagatgagctcgatctgttcggggcccacggtggtcgaaagagtgtcatccacgttctccccgatgaggtagaacactgccagagcatcctcttcagcatgctgcctcgcgcatctacatccaaggagatcgacgccggtctcctcagtatcatctccttccccgccttcgcggtagaagatgtgaatctggtgaacgtcaccaagaatgaaattataagcaagttgcaggggcggtacggttgttgtcgcttcctgagggatgggtacaaaacgcccagggaagaccccaacaggctgcattacgaccccgctgagctgaagctgttcgagaacatagaatgtgagtggcccgtgttctggacatactttatcatcgatggcgtgtttagtggcgatgccgttcaggtgcaagagtaccgcgaggcactcgaaggtattctgatccgaggaaaaaacggaatcaggttggtccctgagctttacgcagttccccccaacaaggtggatgaagagtataagaacccgcacaccgtcgatagagtgcccatgggcaaggttcctcacctgtggggacagtctctgtatatcctgtcttcattgctggctgaggggttcctcgcagctggtgaaatagatcctctgaatcgccggttttctacatctgtgaaaccagacgtagttgttcaggtaactgtgctggccgaaaataaccatattaaagatctgctgcgcaaacacggggtgaacgtgcagtctatcgccgacatccatcctattcaggtacagcctggcagaatattgtctcacatttatgcaaagctggggcggaacaagaacatgaatctgtccggacggccgtacaggcacatcggagtactcggtacatcaaaactgtacgtgattcgcaaccagatctttaccttcaccccacaattcaccgatcaacaccatttctacctggctctggataacgaaatgatcgttgagatgcttaggatcgagctggcctatctctgcacatgctggagaatgacaggccgccctactctgacatttcctatctcccgaaccatgctgacaaacgatggtagcgacatccacagtgcagtactgtccactatccgaaagctggaggacgggtatttcggaggcgcaagggtaaagcttggaaatctctcagagttcctgactacctcattttacacttacctcacatttctcgaccctgactgtgatgaaaaacttttcgataatgcttccgaaggaaccttctctcctgactccgactcagacctcgtaggctacctggaggatacttgcaaccaggagagccaggacgagctggatcattatattaatcacctcctccaaagtacaagcctcagatcctacctgcctccattgtgcaagaatactgaggatcgccacgtgttctctgccatccactccactagagatatccttagtgttatggcaaaggctaaaggcctggaggtcccttttgttcctatgacactgcctaccaaagtcctctccgctcaccgcaaatctctgaatcttgtcgacagcccgcagccactgctggaaaaggtgcccgaatccgatttccagtggcctagagatgaccatggggacgtagactgcgaaaaacttgtggagcagctgaaggattgcagtaatttgcaagaccaggccgacatcctgtacatactgtacgtgattaaaggtccaagttgggatacaaacctgtcaggtcagcacggcgtgaccgtgcaaaacttgctgggcgaactttatgggaaagccggactgaatcaggaatggggccttatcaggtacatctccggactgctccggaagaaagtcgaggtgctcgccgaggcctgcaccgacttgctgtcacaccagaagcagctgaccgtcggacttccgccagaacctagggagaagatcattagcgctccattgccccccgaggagctgaccaagcttatttatgaggcatcaggacaagacatctctatagccgtgctcactcaggaaatcgtagtgtacctcgccatgtacgtcagagcgcagccatcactgttcgttgaaatgctgagactccgaatcgggcttatcattcaggtgatggcaaccgagctggccagatccctgaactgttccggtgaagaggcatctgaatccctcatgaacttgtctcccttcgacatgaagaatctgcttcaccacatcctgtctggtaaggagtttggcgtggagcggagtgtgaggcccatccactcttctactagcagccccacgatctcaatacacgaggtgggacacaccggcgtgaccaagaccgagagatccggcattaatcggcttaggagcgaaatgaagcagatgaccagacggttcagtgccgatgagcagttttttagcgttggccaggctgcctcttcttccgcacatagcagcaaatccgccaggagcagtacaccatctagcccgaccggcacgagcagcagtgactccggcgggcaccacatagggtggggcgagcgccaggggcaatggctgaggaggagacgcctggacggagccataaatcgcgtgcctgtgggcttttatcagcgggtctggaaaatactgcagaagtgccacggactgagtattgacggctatgttctcccctcttctacaacgagggagatgaccccccatgaaataaaattcgcagttcacgtggaatcagtcttgaacagggtgcctcaaccagagtaccgccagctgctggtggaagcaattatggtgctgaccttgctgtctgataccgagatgacaagcatcggcggaattatccacgtagatcaaattgtccagatggcgtctcagctgttccttcaggaccaggtgagtatcggcgctatggataccttggagaaagatcaggccacgggaatctgtcacttcttctatgacagcgctccaagcggtgcttatgggactatgacctacctgacccgcgctgtagcctcatacctccaggagctgcttcccaatagcggatgccaaatgcag

SEQ ID NO: 18103 - DNA, 3705 bp, synthetic construct
  misc_feature 1..3705: note = source = /note="Description of Artificial Sequence: Synthetic coding sequence"
  source 1..3705: mol_type = other DNA
atgagatcgaggagcaattccggtgtgcggctggatggctatgctcgcctggtccagcagacaatcctgtgctaccaaaaccccgtgacaggtctgctgtccgcgagccatgagcagaaggatgcttgggtccgcgacaacatctactccatcctggctgtatggggactgggtatggcatatcgcaaaaacgccgaccgagacgaggacaaggcgaaggcctacgaattggagcagaacgtggtcaagctgatgagaggtttgcttcagtgcatgatgcgccaagtggctaaggttgagaagtttaaacatacccaatcaaccaaagattccttgcatgccaagtacaatactgccacgtgtgggacagtcgtgggggacgatcagtggggtcacctgcaggtggacgctacctctctttttctcttatttctagcccagatgacagcatcagggcttcggattatattcacactggacgaagtggcttttattcagaatctcgtgttctacatagaagcagcttacaaagtggccgattacggcatgtgggaacgcggagataagaccaaccaagggatcccagaattgaacgccagctccgtagggatggcgaaagccgctctggaggcaatcgatgagctggacctgttcggtgctcacgggggacggaagtccgtaattcatgtcctgcccgacgaggtcgagcattgccaatcaatactgttctcgatgctgccacgggcttccacatctaaagagatcgacgccggcctgctgagtattatctcctttcctgccttcgctgtggaggatgtcaacctggtgaatgtaacaaaaaacgagattatttcaaagctgcagggccgctacgggtgttgtcgattccttcgcgacgggtacaaaactccccgggaagacccaaatagactgcactacgatcctgccgagctcaagcttttcgagaacatcgagtgtgagtggccagtgttctggacatacttcatcatagatggggtgttttcaggagacgccgtgcaggtacaggaatatagagaggcgctagaggggatcctgattcgtggtaagaatgggatccggctggtgcccgagctgtatgcagtgccaccaaataaagtagatgaggaatataagaatccgcacactgtcgatcgggtccccatgggcaaggtaccccatctctgggggcagtctctgtacattctgtcttccttgctggcagagggctttttggcagccggggagattgaccccctcaaccggcgctttagtacgagtgtcaagccggacgtagttgtgcaggtgacggtcttagccgaaaacaaccacatcaaagacctgttgcggaagcatggtgtcaatgtacagtcaattgcagacatccatccaatccaggtgcagcctggacggatcctgagccacatttatgccaagctgggtaggaacaaaaatatgaatctgtctggaagaccatatcggcatatcggggtgctggggacctccaaactctacgtgattcgcaatcagattttcacattcacgcctcagttcactgatcagcaccacttttacttggccctcgataacgagatgattgtggaaatgctcaggatcgaactggcttacctgtgcacgtgttggcgtatgactgggagaccaactctcacgttcccaatcagcaggaccatgctgacgaacgacggttccgatatccattccgcggtgttgtcaacaatcagaaaactagaagatggctacttcggcggtgccagagtcaaacttggcaacctcagcgaatttctgacgacgtctttctatacataccttacttttctcgatccagactgcgatgagaaactgtttgacaatgctagtgaaggaacctttagtcctgattctgacagtgatcttgtcggttacttggaagatacatgtaatcaggaatcgcaggacgagcttgatcactacatcaatcaccttctacagtcaacctctctgcgttcgtatcttcctccgctgtgcaaaaacactgaggaccgccatgtgttctcagctatacattccactcgcgatatcctgtcagttatggcaaaagctaagggtcttgaagtgccttttgtgcctatgacgttgcccacaaaagtactgtcagctcaccgcaagagcttaaatctggtggacagcccccaaccccttctggaaaaagttcctgaaagcgatttccagtggcccagggacgatcatggcgatgtggattgcgagaagctggtggagcagctgaaagattgttcgaatctccaagatcaggctgatatcttgtacattctgtatgtcatcaagggaccttcttgggacaccaatctgtctggccagcacggcgttactgtgcagaaccttttaggggagctgtacgggaaagcagggctcaaccaggagtggggcctgatccgatatatttctggtctcctgcgcaagaaagttgaggtgctggcagaggcatgcacagatctcctctcccaccaaaaacagctgactgtgggtctcccacccgagcctcgagagaagatcatctctgcgccattgcccccagaggagttgaccaagctaatctacgaggctagcggccaagacatatctattgccgtgctgactcaagaaatcgtcgtgtatcttgcaatgtatgtgcgcgcccagccctccctttttgtagagatgctcagacttcggattggccttattatccaggtaatggccaccgagttggctcgctcactcaattgttccggggaggaagcctccgagagcttgatgaacctcagcccttttgatatgaagaaccttttgcaccacatcctgtccggcaaagagttcggcgtagaacgaagcgttcgcccaattcatagtagtacctcctctcctaccatttctatccatgaagtgggacacaccggggttacaaagaccgagagatcgggaatcaatcgtctaaggtccgagatgaagcagatgactagacgattttccgctgacgagcagtttttctctgtgggacaggcagccagttccagcgcgcactcttccaagtctgccaggagctcaactccgtcctctccgaccggcacctccagtagtgatagtggaggacaccacatcgggtggggggagcgtcagggccagtggcttcggcgacggcgcctagacggcgccatcaaccgcgttccagttggcttttatcaaagagtgtggaagatcctgcagaagtgccacggcttgagtattgacggctatgtcctcccatcttcgacaacacgggagatgacacctcacgaaatcaagtttgctgtgcacgtggagtccgtgctaaatagggttcctcagcctgagtatcgtcaactgctggtggaagcgataatggtcctcacactgctgtccgatacggaaatgacatccatcgggggcattatccatgtcgatcaaatcgtccagatggcctctcagcttttcctccaagatcaggtctcaataggtgctatggacacactcgagaaggaccaggccactgggatttgccatttcttttacgactctgcccccagtggcgcttacggaacaatgacttatctaacccgcgccgtggcttcctatctgcaggaacttctgcccaattctgggtgccagatgcag

SEQ ID NO: 18104 - DNA, 3705 bp, synthetic construct
  misc_feature 1..3705: note = source = /note="Description of Artificial Sequence: Synthetic coding sequence"
  source 1..3705: mol_type = other DNA
atgcgatcccggagtaacagtggggtacggctcgacggctacgcccgcctcgtgcagcagacaatcctgtgctaccagaacccggtaaccggactgctatcagcctctcacgaacaaaaagatgcgtgggtgagagacaacatttatagcatactggcagtatggggtctggggatggcatacagaaaaaatgcagacagggatgaagacaaagcaaaagcgtacgaactggagcagaacgtggtgaagctgatgcgcggtctgctgcagtgcatgatgcgtcaggtggccaaagtggagaagttcaaacacacccaatctaccaaagactctttgcatgctaagtacaacacagccacttgtgggactgttgtgggagacgaccagtggggccaccttcaagtggatgcaacatcgttgttcctgctctttcttgcgcaaatgaccgcatcaggtctgcggatcatttttaccctcgacgaggtcgccttcattcaaaatttagtattctatattgaggccgcgtataaggtagccgactatgggatgtgggaaagaggggacaagacaaaccaaggcatccctgagctcaacgcatcctcggtgggcatggctaaggctgctctcgaggccatcgacgagctggacctattcggagctcacggaggacgtaagtctgttatccatgtgctgcccgatgaggtggagcactgtcagtctattctgttttccatgctgcccagggccagcacaagtaaggaaatcgatgcaggcctgctgtctatcatctcttttcctgcctttgccgttgaggatgttaatctcgtgaatgttactaagaacgagattatctctaaactgcagggccgatatggctgctgcagattcctgagggatggctataaaacaccacgcgaggaccccaaccggctgcattatgacccagctgaactcaaactgttcgagaatattgaatgtgagtggcccgttttttggacctattttatcatcgatggggtgttttctggtgatgcggtacaagtgcaagagtaccgcgaggccctagaagggatcctgatcagagggaaaaatggcatccgcctggtgcctgagctgtatgctgtgcctcccaacaaagtggatgaggaatacaagaacccccatacggtagaccgggtgccaatgggaaaagtgccccatttgtggggacagtcactgtacattctgtcgtccctactagcagagggtttcctggctgctggtgagatagacccgctcaatcggcggttctcaacgagtgtgaagcccgatgttgtagtccaggttacggtcctggccgagaataaccatataaaggatcttttgagaaagcatggagtgaacgtgcagtcaatcgccgacatacatccaattcaggtgcagccaggtaggatcctttctcatatttacgccaaactcggccgtaataagaacatgaacctgagtgggaggccctatcgccatatcggtgtgctgggcacctccaaattgtacgtaatccgcaaccagatttttacattcacaccacagttcacagaccagcatcatttttacctagcgctggataacgagatgatcgtagaaatgttgcgcatcgaactggcttacctctgcacatgctggaggatgacaggacgccccacattgaccttccccatctcacgtacgatgctgaccaacgacgggtccgatatccacagcgctgtcctttctaccattcgcaaactggaggacggctactttggcggggctcgagtgaagctgggcaacctgagcgaattcctgactacaagtttttacacatacctgacttttttggatccagattgcgatgaaaaactcttcgataacgcgagtgagggcacatttagtccagatagtgacagcgatctcgtgggctaccttgaggacacctgtaatcaagagtcccaggacgaactggatcactatattaaccatctcttacagagcacgagcctgcggtcttatttgccacccttatgtaaaaataccgaggatagacacgtgttcagtgctatccattctacacgagatatcctctctgtcatggccaaagcgaagggcctggaagtcccgttcgtgcccatgaccctgcccaccaaggtactgtccgcccaccgcaaatccctaaatctggtcgacagcccgcagcctctcctagagaaggttcccgagagtgacttccagtggccacgcgacgaccacggggacgtggactgcgaaaagctggtggagcagctgaaagattgctccaaccttcaggatcaggcggacatcctctacattctatatgtgattaagggccccagttgggatactaatctctctgggcagcacggtgttacagtgcagaatctgttaggagagctttacgggaaagccggactcaaccaagagtggggactcatccggtatatcagcgggctgttgaggaagaaggtggaggttctggccgaggcgtgcacagatctcctcagtcatcagaaacaactcacggttggcctgccacctgagcctagagaaaagatcatctccgccccacttcccccagaagaactgacaaaactgatctacgaagccagtggccaggacatctcaatcgcagtgctgacccaagaaatcgtcgtctatctggccatgtacgtaagggctcagccgtcactgttcgttgaaatgcttcgactgagaatcggtctcataattcaggtgatggccacagaactggctcgctcactcaactgtagtggagaggaggcatctgagagcctgatgaaccttagtccattcgacatgaagaatttgcttcaccacattctgtctggcaaggagtttggcgtggaaaggagcgtcaggcccattcattcgtcaacctcctcgcccaccatcagcatacatgaggtgggccacacaggtgtgactaagacagaacgatccggaataaaccgtttaagaagcgagatgaaacagatgacgcgacgcttctccgccgatgagcagttcttcagcgtggggcaagcagcgtcaagcagcgctcatagcagtaaatcggccagaagcagtacccctagctcacccacagggacctcatcttctgattcaggtgggcaccatattggctggggtgagcgacagggccagtggctgaggcgcaggcgtcttgatggtgcaattaacagagttcccgtggggttctatcaaagggtttggaaaatccttcagaaatgtcatggactgagtatcgatggctacgtgctaccctcttctacgacccgagagatgactccccacgagatcaaattcgccgtgcacgtcgaatccgtcctgaaccgcgtcccacagccggagtaccgacagctcctggtggaggccatcatggttttaacattgctcagcgataccgaaatgacaagcatcggcggcatcatccacgtcgaccagatcgtccagatggccagccaactgttcctgcaagatcaggtgtccattggtgctatggacacattggagaaggatcaggcgacagggatctgtcacttcttttatgactccgcaccgagcggcgcttatgggacgatgacttatctcacccgcgcggtcgccagctatctccaggaactactgcccaattcaggttgccaaatgcaa

SEQ ID NO: 18105 - DNA, 3705 bp, synthetic construct
  misc_feature 1..3705: note = source = /note="Description of Artificial Sequence: Synthetic coding sequence"
  source 1..3705: mol_type = other DNA
atgagatcacggagcaactccggagtccggctggatgggtacgccagactggtacaacagactattttgtgctaccagaaccctgtgaccggactactctccgcctctcacgaacagaaggatgcctgggtgcgtgacaatatatattccatcctggccgtgtggggtcttggaatggcttaccgcaaaaatgccgaccgggatgaagataaggcaaaagcttacgaattagagcaaaacgtggtgaaattaatgcgaggattactacagtgcatgatgcgacaggtggccaaggtggagaagttcaaacatacacagtctacaaaagatagcctgcacgctaagtataataccgctacatgcggcaccgttgtgggcgatgatcagtggggccacctgcaggtggacgctacaagcttattcttactctttcttgcccagatgaccgcctccggacttcggattatctttacactggacgaggtggcttttatccagaacctggtcttctatatcgaggccgcctataaggttgctgattacggcatgtgggagcgtggggataagactaatcagggaattcccgaactaaacgcctctagtgtgggaatggctaaagctgctctggaagcaattgacgagctggacctgtttggtgcccacggagggagaaagtcagtgattcacgtgctgcccgatgaagtggaacattgccaatctatcctgttcagcatgctgcccagggcctccaccagtaaggaaattgacgcaggtctgctgtcaataatctccttcccagcttttgctgtggaggacgtgaacctggtgaatgtcaccaagaacgaaatcattagcaaactgcagggaagatacgggtgttgtcggttcctgcgcgacggttataagacccctagagaggacccaaatagactgcattacgatcccgctgagctgaagctcttcgagaatatagaatgcgaatggcctgtgttctggacctactttatcattgacggcgtgttcagtggcgatgccgtccaggtacaggagtacagggaggccttagagggaatactgatccggggaaagaacggcatcagattagtgcccgagctgtacgccgtgccacctaacaaggtcgacgaagaatacaagaatcctcatacagttgaccgcgtgcccatgggcaaggtacctcacctttggggacagtccctgtacatcctgtcttcactactggccgaaggattcctagccgccggggagatagatcctctcaatagacggttctctacatctgtaaaaccagacgtggtggtgcaagtcactgtgctggccgagaataaccatatcaaagatctgctaagaaagcatggtgtgaatgtgcagtcaatcgctgatatacatcccatacaggtgcagccaggccggatcctcagccacatttacgccaaactggggcggaacaagaacatgaacctgagcggccgcccatacaggcatataggagttctcggaacctctaagctgtatgtgattaggaaccagatcttcacatttactccacagttcaccgatcagcaccacttttacctggccttagataacgagatgattgtggaaatgctgaggattgaactcgcatacttatgcacctgttggagaatgaccggccggcctacactgacctttcctatcagccggacaatgctgaccaatgatggaagtgacatccattcagctgtgctgtccacaatcagaaaactggaggacgggtatttcgggggcgccagagtgaaactgggcaacctgtcagaatttttaaccaccagtttttatacctaccttactttcctagacccagattgtgacgaaaagctgtttgacaacgctagtgaaggcactttctctcctgactccgatagcgatctagtggggtatctcgaagatacatgcaatcaggagtctcaagacgaactggaccattatattaatcacttgttacaatcaacttccctgaggtcctacctacctcccctatgtaagaacacagaagatcggcacgtgttcagtgccatccacagtactagagatatcctgagcgtgatggccaaggctaagggcttagaagtcccattcgttcccatgactctgcctacaaaggtgctgagcgcacacaggaagagtctcaatttagtcgattccccccaacctcttctggagaaggtgccagaaagcgattttcaatggccaagagatgatcacggcgacgtcgactgtgagaaacttgtagagcaactgaaagactgctctaatctgcaggaccaagccgacattctgtatatattgtacgtgattaaaggcccttcttgggatacaaatttatctggccagcatggtgtgactgtgcaaaatctactcggcgagctttacggcaaagccggccttaatcaggagtggggactgatccggtacatctctggcctgctgaggaagaaggtcgaggtgctggcagaggcatgtacagatttactgagccatcagaaacaactgacagtggggctgccacccgagccaagagagaaaattattagcgcaccactgccaccagaggaacttactaagttaatatacgaagcttccgggcaggatatctccattgccgtgttaacacaggaaatcgtggtttacctggctatgtatgttcgggcccaaccttctctctttgtggaaatgttacgcctacgtataggccttataattcaggtgatggctacagaactggctcgcagtctgaactgctctggggaggaagccagtgagtcattaatgaatctgtctcctttcgacatgaaaaatctgttacaccacatactgtccggcaaagagttcggcgttgaacgtagcgtgaggccaattcactcctccactagcagtcccaccatatcaatacacgaggtgggacacacaggcgtaacaaaaaccgaaaggagcggaataaatagactgcggtcagagatgaaacagatgactaggcgtttctccgctgatgagcagtttttcagcgtcggccaggcagcatcttcctctgcccattcttccaagtccgcccgcagctctacccctagcagccccactgggacttctagttctgactcaggcggtcatcacattggttggggcgagcgtcaaggtcagtggttgcggaggcggagattagatggtgccattaaccgggtgccagtcgggttttaccagcgtgtctggaaaatcctacagaaatgccatggtttatctattgacggatacgttctgccctcaagcacaaccagggaaatgactccacacgagataaagtttgcagtgcatgtcgagtcagtactcaatagggttcctcagcccgagtatcggcaactcctcgtcgaggccatcatggttctgacactactgagcgacactgagatgacaagcattggcggtatcatccatgtggaccagatcgttcaaatggcaagtcagctgtttcttcaggaccaggtttccataggggccatggacaccctggagaaagaccaggccactggcatctgccattttttctacgattccgccccaagcggcgcatatggaacaatgacctacctaaccagggcagtggcatcctatctgcaggagttattacctaattctggatgccaaatgcag

SEQ ID NO: 18106 - DNA, 3705 bp, synthetic construct
  misc_feature 1..3705: note = source = /note="Description of Artificial Sequence: Synthetic coding sequence"
  source 1..3705: mol_type = other DNA
atgcggagccggagcaattctggtgtgcgcctcgacggttacgcgcggctagtgcagcaaactatcctgtgctaccagaacccggtcacgggactgctgtctgctagccatgaacagaaggacgcttgggtcagagacaatatctattcaattcttgctgtgtggggcctggggatggcatacagaaagaacgcagaccgggatgaggacaaggcgaaggcgtacgaactggaacaaaacgtcgtcaagctaatgcgaggactcctgcagtgtatgatgcggcaggtcgctaaggtggagaagttcaagcacacccagtcgacaaaagacagtctgcacgccaagtataacacggccacatgcggaaccgtcgtgggtgacgatcagtgggggcacttgcaggtggacgccactagcttatttctgctctttctggcccagatgactgctagtggcctgcggattatcttcaccctcgatgaggtcgccttcattcagaatttggttttctatatagaagcggcgtacaaagtcgcagactatggaatgtgggaaagaggggataagacaaatcaaggcatcccagaactgaatgcctcttctgtaggaatggccaaggccgcccttgaggctatcgatgaattggatctgtttggggcgcacggtgggagaaagagcgtgatccatgtgttgcccgacgaggtagagcattgccagagcattctgttctctatgctcccccgagcatcaaccagcaaggagatcgacgccgggcttttgagtatcattagcttccccgccttcgccgtggaggatgtgaatctggtaaacgttacaaagaatgaaataatttccaaattgcaggggcggtacggctgctgccgctttttgcgggacggctataaaactcccagagaagatcccaatagactgcattatgatccggcggagttaaagctgttcgaaaacattgagtgtgagtggccagtgttttggacgtatttcattatcgacggggttttttcaggcgacgccgtgcaggtgcaggagtaccgcgaggctctggaaggcatactgatacgcggcaagaatgggattcgcctagtccctgagttgtatgctgtacctcctaacaaggttgacgaggagtacaaaaacccgcacactgtggatcgagttccaatgggcaaggttcctcacctgtggggacagtctttatatatcctgtcaagtcttttagctgagggatttttagccgctggagagattgaccccctgaaccggcgcttttccacgtctgtcaaaccagacgttgtggtgcaggtgactgttttagctgagaataaccatatcaaagatcttcttcgaaagcatggcgtgaatgtgcaaagtatcgcggatattcatccaattcaggttcagccaggccggattctatcacatatttacgccaagctgggccggaataagaacatgaatttatcgggcaggccctataggcacatcggtgtgctagggacctccaaactgtacgttatcagaaaccagatcttcacgttcacaccccagttcaccgatcagcaccatttttatttggctctcgacaatgaaatgatcgtggaaatgctgaggattgagctagcttatctctgcacttgctggcgcatgaccggtcgccctacattgacttttcctatctcacggactatgcttaccaatgacgggtctgacatccactccgcagtactgtccactattcgaaaattagaggatggttacttcgggggggcgcgcgtaaaactgggcaacttgagcgaatttctgacaacttctttttacacgtacctgacctttctggaccccgactgcgacgagaagctcttcgacaacgcttcggaagggaccttctctcctgacagcgacagtgatctggttgggtatctagaggacacgtgtaaccaagagtcacaagatgagctcgatcactacatcaatcatcttctccagtccacttccctccgatcttatctacctccactgtgcaaaaatacagaagataggcatgtgttctccgctatccattcgacccgagacattctatcggtcatggcaaaagcaaagggactggaagtgcctttcgttccgatgacactgccaaccaaggtgctctcagcccaccggaagagtctcaatttagtcgactccccacaacccctactcgagaaggtgccagagtctgatttccagtggccacgggacgaccatggcgacgtcgattgtgaaaagctggtagagcagcttaaagactgctctaacctccaggaccaagccgacatcttgtatattctttacgtaattaagggaccgtcttgggacaccaacctcagcggccagcatggcgtgacagtgcagaacctgctaggcgaactttacgggaaagccgggctcaatcaggagtggggactgatcaggtacatctctggccttcttcgcaaaaaggtggaggtcctcgcggaggcgtgcactgaccttttgtctcaccagaaacaactaactgtgggcttgccccccgaaccacgcgagaagattatttcagcccctttgccacccgaagaactgactaagcttatttacgaggccagtgggcaggacatcagcatagccgtacttacccaggagatcgtggtttatctggctatgtatgttagggcacagccatccctgtttgttgagatgctccgtcttcgcatcggcttaattattcaggttatggcaactgagttagcccgcagcctcaattgttccggtgaggaagcctccgagtcgttgatgaatctttctccattcgatatgaaaaatctgttacaccatatccttagcggcaaggaattcggggtggaaaggtcagtcaggccgatccacagtagtacaagtagtcccactatttccatccacgaggttgggcatactggtgtaacaaaaaccgagaggtcgggcatcaatagactgagaagtgaaatgaagcagatgacacgacgcttttccgctgacgagcaattcttctccgtgggccaagcagcgagttctagtgcgcactcatctaagtccgccagaagcagcacaccttctagcccaaccggaacaagtagttccgattccggcggacatcacatcggatggggtgagaggcaggggcagtggcttaggcgacgacgactggacggagccattaatagagtccctgtcggattctatcagcgtgtgtggaaaatactgcagaaatgccacggactgagcatcgatgggtatgtgctgccaagttccaccacacgggagatgaccccccatgagatcaaattcgcagtccatgttgagtcggtacttaatcgggtgcctcagcctgagtataggcagctgctggtggaagctatcatggtgctgacactgctgtctgatactgagatgaccagtatcggcgggatcattcatgtcgaccaaatagtgcagatggcatcccagctttttctgcaggatcaggtctccatcggtgccatggacacactcgaaaaggaccaggccacaggaatatgtcatttcttttatgattccgctcccagtggcgcttacggcactatgacatatttgacgcgggcagtggcttcgtacctgcaggagctgctgccaaactctggatgtcaaatgcaa

SEQ ID NO: 18107 - DNA, 3705 bp, synthetic construct
  misc_feature 1..3705: note = source = /note="Description of Artificial Sequence: Synthetic coding sequence"
  source 1..3705: mol_type = other DNA
atgcgcagtcgcagcaacagcggggtacgactggatggatacgctaggttggtccagcagaccatactttgttatcaaaaccctgtgaccggactgctgagtgctagccacgagcaaaaggacgcctgggtgagagataatatttacagcattttagctgtttggggactgggcatggcctatcggaagaatgccgaccgcgatgaggataaggcaaaagcatatgaactcgagcaaaatgtagtaaaacttatgagaggattactgcaatgcatgatgcggcaggtcgcgaaggttgagaagtttaagcatactcagtcaaccaaagactcactccatgctaagtataatactgcgacatgcgggaccgtggttggggacgatcagtggggtcacctgcaggtggatgccacttcattgttcctcttgtttctagctcaaatgaccgccagtgggctgcggattatcttcactctcgacgaagtagctttcatccagaatctcgttttttatatcgaagcagcctacaaggtggccgactatggaatgtgggagcgcggcgacaaaacaaaccaaggtatccccgaactgaacgcttcttctgtagggatggcaaaagctgcattggaggccatagatgaattagatctgttcggtgcccacggcggaagaaagagtgtcatccatgtgctgccagacgaggtggagcactgtcagtccatcctgttctcaatgctgccacgagcctccacctcaaaggagatagatgctgggctcctgagtatcatcagctttcctgcctttgcggtggaagatgtgaacctggttaacgttaccaaaaacgagattatttccaagcttcaaggccgttatggttgctgccggtttctgagggacgggtacaaaaccccccgagaagatccaaatagattacactatgacccagcggagctgaagctgtttgagaacatcgaatgtgagtggcccgtgttctggacgtactttatcatagacggcgtctttagcggagatgcagtacaggtccaggaataccgagaagcacttgaggggatcttgattagaggcaaaaacggcatacgtctggtgcctgaactgtatgccgtgccacccaacaaggttgacgaggagtataagaatccccacacggtggaccgggtgccgatgggcaaggtgccccacctgtggggtcagtccctatacatcctgtcgagtttgctggcagaaggctttctggcagcgggagagattgatcccctgaatagaagatttagtacttcagtgaagccagatgtggtggtgcaggtgacagtactagctgaaaataaccatataaaggatctccttaggaagcacggagttaacgtccagtccatcgccgatatacatccaattcaggtgcagcctggacgtatcctcagtcacatttacgccaaattgggcaggaataagaatatgaacctgtccggcaggccttatcggcacattggggtgctaggcacatccaagctgtacgtgatcagaaatcagatctttactttcaccccacaatttactgaccaacatcacttctacctcgcgctcgacaacgagatgatagttgaaatgcttcggatcgagctcgcatacctttgtacctgttggaggatgaccgggaggcccaccttaacgttccctatttctaggactatgctgaccaatgacgggtccgatatccactcagctgtgctgagcacaatcagaaaattggaggacggatactttggcggtgccagagttaagctcggtaatctatcagaattcctgaccacatccttctacacctacctgacctttctggacccagactgtgacgagaaactcttcgataatgctagcgaagggaccttctcacctgattcagattccgatctcgtgggctacttggaggacacatgcaaccaggagtcccaggacgaattggatcattacattaaccacctgctccagagcacctccctgcggagctacctaccgcctctgtgtaagaatactgaggacaggcacgtcttcagtgctatccactccaccagggatatactgagtgtgatggcaaaggctaaaggactagaggttccctttgttcctatgacacttccaactaaggtactctctgcacatcgaaagagtctcaatctagtggactctccccagcctctgctcgaaaaagtccccgaatctgacttccaatggccgagggacgaccatggtgatgtggactgcgaaaaattggttgaacaactgaaagactgttctaacttacaggaccaagccgatatcctgtacatcctgtacgtaatcaagggaccgtcctgggacactaacctttccggccagcatggggtgactgtgcagaacttgcttggtgagctctacgggaaggcaggattaaaccaagaatggggtctgattcgttatataagtggcctactgcggaaaaaagtcgaagtcctcgcagaggcttgcacggacctactgagccaccagaaacagttgaccgtcggactgcccccagaacctcgcgaaaaaatcatcagcgctccactgcctccggaggagctgactaaattgatatatgaggcatctgggcaagatatatctattgccgtgttgacacaggaaatcgttgtctacctggcaatgtacgtgcgtgcccaaccctctctttttgtggaaatgctgcgcctgagaatcggtctgatcattcaggtcatggccaccgagctcgcccggagcttgaattgctcgggagaagaagccagcgaaagcctgatgaacctctctccatttgatatgaagaatctgctacatcacattctatccgggaaggagttcggcgtggagcgaagcgtgcgaccaatacacagttcaacgtcgagcccgaccattagcatccacgaggtaggtcatactggagtgaccaagacggaacgcagtggcatcaacagacttcggtcagagatgaaacagatgacacggcgcttttccgccgatgagcagtttttcagcgtgggacaagctgccagctcctcagcccacagctccaaatcggctcggagtagcacccctagctcaccaactgggacgtcaagcagcgactccgggggccaccatatcggatggggggagcggcagggacagtggctgaggcggaggagactggatggagccattaatagggtgcccgtaggattctatcagcgagtctggaaaatcttacagaagtgtcacgggttaagcatcgatgggtacgtgcttccgtctagtacgaccagagaaatgaccccccacgagattaaattcgccgtgcacgtcgaatcggtgctcaaccgtgtgccccaaccggagtacaggcagttgctggtggaagccatcatggtgctgactctgcttagtgatacggaaatgacttccatcggcgggatcattcacgtggaccaaatagttcagatggccagccaattgttcttgcaggaccaggtttccatcggtgccatggatactctggaaaaggatcaggcgacgggaatctgccacttcttctacgattcagccccctccggagcctacggcacgatgacatatcttactcgcgccgttgcttcttatctccaggagctcctgccaaattcgggatgtcaaatgcag

SEQ ID NO: 18108 - DNA, 3705 bp, synthetic construct
  misc_feature 1..3705: note = source = /note="Description of Artificial Sequence: Synthetic coding sequence"
  source 1..3705: mol_type = other DNA
atgagatcgcgatccaactcaggagtccgactggatggttacgccagactcgttcagcagaccattctttgctaccagaatcccgtgactggtctgctttccgcatcgcatgaacaaaaagatgcatgggtcagagacaatatctattcaattctggcggtgtggggacttggtatggcttataggaagaatgcagatcgcgatgaagataaggcaaaggcctacgaattggaacaaaacgtggtcaagctgatgcgcggacttctgcagtgtatgatgaggcaagtggcaaaggtcgaaaagttcaagcatacccaatcgacgaaggattcgctgcacgccaagtacaacactgcaacctgtggtactgtggtgggagacgaccaatggggccatcttcaagtcgatgccacctccctcttccttctctttcttgctcagatgaccgcttcgggacttcggattatcttcactctggacgaggtcgcgtttatccagaacttggtcttttacatcgaggcagcatacaaggtggccgattacggaatgtgggaacgcggagataaaactaaccaaggtattcctgaactcaacgcatcgtcggtgggaatggccaaggcagctctggaggccatagatgaattggatctgtttggagctcacggtggtcggaagagcgtgattcatgtgctgcccgatgaagtggagcattgtcaatccatccttttttccatgctgccaagggcgagcacctcgaaggaaatcgatgcaggacttttgtcgattatctcttttccagcttttgcggtggaagatgtgaatcttgttaacgtgaccaagaacgagatcatttcaaagctccagggaagatacgggtgttgccggtttctgcgggacggatacaaaaccccacgggaggaccctaataggctccattatgatcccgcagagctgaaattgttcgagaacattgagtgcgaatggcccgtgttttggacctacttcatcatcgacggcgtgtttagcggtgacgccgtgcaggtgcaggaataccgtgaagctctggaaggaattctgatacgtgggaagaacggtatccgtcttgtcccagagctctacgctgtcccacctaataaggtcgatgaagaatacaaaaatccacataccgtggatagagtgccaatgggcaaggtgcctcatctttgggggcagtccctgtacatactttcttcactgctcgcagaaggatttttggccgctggagaaattgatcctctgaatcggagattctcaacctctgtgaagcccgacgtcgtcgtccaagtgactgtgcttgcagaaaacaatcacattaaagacctgcttcgaaagcacggggtgaacgtccaatccatcgccgatatccatcctattcaggtccaacctggtcggatcctgtcccacatctacgcaaagctcggcagaaacaaaaacatgaacctgtccggacgcccttacagacatataggtgtgctcgggacctcgaagctctacgtgattcgcaaccagatctttacctttacgccacaattcaccgaccagcaccacttctaccttgcactggacaacgagatgatcgtggaaatgctcagaatcgaactggcatacctttgcacttgttggcggatgactggccgcccaacccttacttttcccatatcgcgcactatgcttacgaacgatggaagcgatatccatagcgcggtcctttcgacgattcgcaagctggaagatggatactttggaggcgcacgcgtgaagctcggcaatctctccgaattccttactacttcgttttacacgtatcttacgttcctggatccagattgtgatgaaaagctctttgataacgcatcggagggtactttttctccagacagcgactctgatctcgtcgggtacttggaagatacctgtaaccaagagagccaagatgaacttgatcattacattaaccaccttctgcagagcacttcactcagatcataccttccccctctttgcaaaaacaccgaggatcgacatgtgttttcggcaattcactccacccgcgatattctttcggtgatggcgaaagcgaaaggacttgaggtcccttttgtccctatgacgctcccaactaaggtcctgtcagcacatagaaagtcgcttaatctcgtcgattcccctcagccccttttggaaaaggtccctgaatctgattttcagtggccgagagatgatcatggagatgttgactgcgaaaagctggtcgaacaactgaaggattgctccaatctgcaagaccaggcagacatactgtacattctgtacgtcattaaggggccctcatgggataccaacctctcggggcagcacggagtcaccgtgcagaacctgctgggagaactgtacggtaaggcagggttgaaccaagagtggggccttatcaggtacatttcggggctcctccggaaaaaagtggaggtgctggcagaagcatgtactgacctcctttcccatcaaaagcagttgaccgtgggtctgcccccggaaccacgtgaaaagataatctcggctccacttcccccagaagaactgactaagttgatatacgaagcatcaggacaagatatctcaattgcagtgcttactcaagaaattgtggtgtacctggcaatgtatgtgagggcccaaccaagcctttttgttgagatgttgcggctgcgtatcggcctcatcatccaggtgatggcaacggaacttgcccgttccttgaattgtagcggtgaagaagcctcggagtcactgatgaacctttcccctttcgatatgaaaaatcttctgcatcatattctttccggaaaagaatttggggtggaacgttcggtgcggccaatccattcctccacctcctccccaactatttctatccacgaagtgggacacaccggagtgaccaagaccgaacgatcgggaattaacaggcttcggtccgagatgaagcaaatgaccagaaggttttcggcagatgagcagttcttctcagtgggtcaggcggcatcgtcctccgcccattcgagcaaatcggcacggtcgtcgactccatccagcccgaccggcacctcttcatcggatagcggtggtcatcacatcgggtggggtgaacggcaaggccagtggcttaggagacggaggctggatggggcaatcaacagagtgccggtgggcttctaccaaagagtgtggaagatacttcagaagtgtcatggactctccattgatggatatgtgctgccttcctcgaccaccagagagatgacccctcatgagattaagtttgctgtgcacgtggagtcagttcttaacagggtgcctcaacccgaataccgccaactgctcgtggaagccataatggtgcttactctgctcagcgataccgaaatgacttcaattggcggtatcattcacgtggatcaaatagtgcagatggcatcgcagctttttctgcaagatcaggtgtcgattggagcgatggatactctggaaaaggaccaagcaacgggaatttgtcatttcttctacgactcggcaccatctggtgcatacggcactatgacctaccttactcgggccgtcgcaagctatctgcaagagcttttgcctaacagcggttgtcaaatgcag

SEQ ID NO: 18109 - DNA, 3705 bp, synthetic construct
  misc_feature 1..3705: note = source = /note="Description of Artificial Sequence: Synthetic coding sequence"
  source 1..3705: mol_type = other DNA
atgcggtcgcgctctaattcaggagtgcggctcgatgggtacgcacgcctggtccagcagaccattctctgctatcagaaccccgtgactggcttgctgtccgcctctcacgaacaaaaggacgcctgggtgagagacaatatctactcgatcctggctgtgtggggcctgggaatggcataccggaagaacgctgaccgggacgaagataaggctaaggcatacgagctcgagcaaaacgtggtcaaactcatgcggggtctgctgcagtgcatgatgcgtcaggtggcaaaggtcgaaaagttcaagcatacccagtcgactaaggatagcttgcacgcgaaatacaacaccgctacctgcggtacggtcgtgggcgatgaccagtggggacatctgcaagtggacgcgacttccctgttcctgctctttcttgctcagatgaccgcctcgggcctgcgcatcatcttcacgctggacgaggtcgcgtttatacagaaccttgtgttctacatcgaagcagcctacaaagtcgccgattacggaatgtgggagcggggagacaaaaccaatcaggggatcccggaactcaatgctagcagcgtgggaatggcgaaggccgccctggaagccatcgacgaactcgacctgtttggcgctcacggcggaaggaagtcggtcatccacgtgctccctgacgaggtcgaacattgtcaatcgattttgttctccatgcttccacgcgcctccacttccaaggagatcgatgcaggactgctgagcatcatctcattcccggccttcgccgtggaggatgtgaatctggtcaacgtgactaagaatgaaatcatctcgaaacttcaaggtcggtacggatgctgtcgcttcctcagagatggatacaaaactccgagagaggatccaaatcggctgcactacgatcccgcggagttgaagctcttcgaaaacattgagtgcgaatggccggtgttctggacttactttatcatcgatggagtgttctcgggggatgcagtgcaggtacaggagtaccgggaagcactggagggcatcctgattcggggcaaaaatggaatcaggttggtaccggaactgtacgcagtgcctcccaacaaagtggatgaagagtacaaaaacccccacaccgtggatagagtccctatgggcaaggtgcctcatctgtggggacaaagcctgtacatcctctcgtcgttgctggcggagggattcctcgcggccggcgagatcgaccctctgaaccgccgcttctcaacctcggtcaagccagacgttgtggtccaggtgactgtgctggcggaaaacaaccacataaaagacctgctccgcaagcacggagtgaatgtgcagtccatcgctgacatccacccaatccaagtgcaaccaggaagaatactcagtcacatctatgccaagctgggaagaaacaagaacatgaacctgtccggcaggccataccggcatatcggtgtcctcggtacttcgaagctgtatgtgatcaggaaccagatctttaccttcactccgcagtttactgatcagcatcacttctacctcgccctcgataacgaaatgattgtggagatgctgcgaatcgaattggcatacctgtgcacttgctggagaatgacgggccgaccgactcttacttttccgatcagccggacgatgctgaccaacgatggctcggacatccacagcgcagtgctctcgaccatcagaaagctcgaggacggctacttcggtggggcaagggtcaaactgggcaacctgtccgagtttctcaccacctccttttacacgtacctgactttcctggatcctgattgcgatgaaaagctcttcgataatgcatccgaagggaccttctcgccggatagcgacagcgacctggtgggatacctcgaagatacctgcaatcaggaatcgcaggatgaactggatcattacatcaatcacttgctgcagagcactagcctccggtcctacctgccgccgctttgcaagaacactgaggaccgccacgtgttctctgccatccattccacccgggacatcctctccgtgatggccaaggcgaaagggttggaagtcccattcgtgcccatgaccttgcctactaaggtgctttcggcacataggaaatcgctgaatctcgtggacagcccgcagccgctgctcgaaaaggtaccagaatcggactttcagtggccgagagacgaccatggagatgtcgactgtgagaaattggtggaacaactgaaggactgtagcaacttgcaagaccaggcggacattctgtatatcctttacgtgattaagggcccatcctgggataccaatctcagcggacaacacggcgtcacggtgcagaacctgctgggggaactgtacggaaaggcaggtctgaaccaagagtggggactgatcagatacatttccgggctgctgcgaaaaaaggtcgaggtgcttgccgaggcgtgtaccgaccttcttagccaccaaaagcagttgaccgtcgggcttccccctgagccacgtgagaaaatcattagcgctccgctcccaccggaagaactcaccaaactgatctacgaagcctctggccaggacatcagcatcgcggtgctgacccaagagattgtggtctatctggccatgtacgtgcgtgcccaaccgtccctcttcgttgaaatgctgagacttcgcatagggctcattatacaggtgatggccactgagttggctcgatctctcaactgcagcggagaagaggctagcgagtcgttgatgaacctctcgccgttcgacatgaagaatctgctgcatcacatcctgtcaggaaaggaattcggagtggaaaggtcagttaggcctatccattcatcaacctcctcaccaaccatctccatccacgaggtgggacacaccggcgttactaagaccgagcgctccggtatcaacagactgcggtccgaaatgaagcaaatgacccgccggttctctgccgacgaacagttcttctccgttggacaggccgcgtcgtcatcggcccattcttccaagtcagcacgctcctctactccgtcgagtcccactggtacttcgtcatcggattcgggcgggcaccacatcggatggggggagcgccaggggcagtggttgcggaggcgccgcctcgacggggctatcaaccgcgtgcctgtgggcttttaccagagggtctggaaaatcctccagaagtgccatggactctccattgacggctacgtcctgccgtcatccactacgcgcgaaatgacgccgcacgagattaagttcgctgtccatgtggaatcagtcctcaaccgggtcccacaaccggaatataggcagctcctcgtggaggctatcatggtgctcaccctgctctccgacactgagatgacgagcatcgggggaatcatccacgtggaccagatcgtgcaaatggcctcacagctcttcctccaagaccaagtgagcataggagcgatggacaccttggagaaggaccaagcgactggaatctgccacttcttttacgactcagccccgtccggagcctacggaaccatgacctacctgactcgggctgtcgcgagctacctgcaagaactgctccccaattcgggatgtcagatgcag

SEQ ID NO: 18110 - DNA, 3705 bp, synthetic construct
  misc_feature 1..3705: note = source = /note="Description of Artificial Sequence: Synthetic coding sequence"
  source 1..3705: mol_type = other DNA
atgagatcgcgtagcaattccggagtgcggctggatgggtacgcacggctcgtccaacagaccatcctttgttaccaaaacccagtgaccggcctcctttccgcgtcgcatgagcaaaaggacgcgtgggtcagagataacatatactcgatactggccgtctggggtcttggaatggcttaccgcaagaacgcggaccgagatgaggataaggctaaggcctacgaacttgagcagaatgtcgtcaagctgatgcggggcctgctccaatgcatgatgagacaggtggctaaggtggaaaagttcaagcacacccaatccaccaaggactcgctgcatgcgaagtacaacaccgcaacgtgtggaaccgtggtgggcgacgaccagtggggacacctccaagtggatgccaccagcctctttcttctctttctcgctcaaatgaccgcgtccggactgagaatcattttcactcttgacgaggtggcattcatacagaaccttgtgttctatattgaagcggcttacaaagttgcggactacggaatgtgggaaagaggtgacaagactaatcagggtattcctgaacttaatgcgtcatccgtgggcatggccaaggccgccctcgaggcaattgatgagctggatctgttcggcgcccatggaggacgcaagtccgtgattcatgtcctgccagatgaagtcgagcattgccagtcaattctgttttcaatgttgccacgtgcatcgacttctaaagaaattgatgcaggactcctctcgattatctccttcccagcatttgcagtcgaggacgtgaatctcgtcaacgtgactaaaaacgaaatcataagcaaactgcaggggcggtacggatgttgccgctttcttagagacggttacaagaccccaagagaggatccaaataggctccattacgatcctgccgaacttaagctctttgaaaacattgagtgtgagtggcccgtcttttggacgtacttcatcattgacggcgtgttttctggtgatgcagtgcaggtgcaagaatacagggaagcgctcgaaggtatcctgattcgaggaaagaatgggattagactcgtgccagaattgtacgccgtgccgccgaataaggtggatgaagagtacaagaacccgcataccgtcgaccgcgtgccaatgggtaaagtgccccacctctgggggcaatcactttacatcctctcgtcactgctggctgaaggttttcttgcagccggtgagattgatccactcaaccgacggttcagcacctctgtgaaaccggatgtagtggtgcaagtgacggtgcttgcagaaaacaaccatatcaaggacttgctgcggaaacacggggtcaacgtgcaatcgatcgcagacattcatcctatccaagtgcaacctggaagaatcttgtcccacatttatgcaaaacttggccgaaacaagaatatgaacttgagcggtagaccttaccgtcatatcggtgttcttggtacgtcaaaactttatgtgattaggaatcagatctttaccttcacccctcagtttacggatcagcaccacttttacctcgcacttgacaacgaaatgatcgtcgagatgctgaggatagaacttgcctacctgtgtacctgttggaggatgactggacgtcctacccttaccttcccgattagcaggactatgcttactaatgacggaagcgacatccattccgcagtgttgtcaactatccgtaaacttgaggacggttacttcggtggcgcacgggtgaagctgggcaacttgtcggagtttcttaccacttcattttacacgtacctcacttttcttgatccagactgtgacgagaagctgtttgataatgcaagcgagggaactttttccccagattccgattcggatctggtgggatatctggaagatacctgtaatcaggagtcgcaggatgaactggaccattacattaatcacttgctccaatctaccagcctgagatcgtacctcccgccactgtgcaagaacactgaagatagacacgtgttttccgcaatacactcgaccagagatatcctgtccgtgatggcaaaagcaaagggactggaagtgccctttgtgcctatgaccctgcctactaaggtcctgtcagcgcaccgcaaatctctcaatctcgtcgattcacctcagcctcttcttgagaaggtgcctgaatcagattttcagtggcctcgcgatgatcacggtgatgtggactgtgagaagctggtcgagcaattgaaagactgtagcaacctgcaggaccaggccgacattctttacattctctacgtgattaagggaccctcgtgggataccaacctcagcggacagcatggcgtgaccgtgcaaaatctgctgggcgagctgtacggtaaggcaggcctgaatcaggaatggggacttattcgctacatatcagggttgctccggaaaaaggtcgaggtgttggccgaagcctgtacggacctgctttcgcaccagaagcaactgactgtgggcctgccgccggaacctcgggaaaagattatcagcgctccgctgccaccggaggagctgactaagctcatctacgaggcatcaggtcaggatatttctattgcggtgcttacccaagaaatcgtcgtctaccttgccatgtatgttagagcccaaccttcgctcttcgtggaaatgcttagattgcgaatcggcctcattatccaagtgatggcaaccgaactggcgcggtcgctgaattgctccggtgaagaggcgagcgaatcacttatgaatctctctcctttcgacatgaaaaaccttctgcaccacattctgagcggcaaggaattcggcgtggaacgctcggtgcggcctatccatagctcaacttcgagccccaccatttccattcacgaagtcggacataccggcgtcactaagaccgagagaagcggtattaaccggctgagatcagagatgaagcaaatgaccagaagattttccgcagatgaacagtttttctcggtcggacaagctgcatcctcatcggcacactcttccaaatcggcacgtagctctaccccgtcctcgcctaccggaaccagctcaagtgattctggaggtcaccatatcggatggggagaacggcaaggacagtggctgagacgtcgtagactcgatggagcaatcaatcgcgtgcctgtggggttttaccagcgcgtgtggaagatcctgcaaaaatgtcatggactgagtatcgatggttacgttctgccatcctcaaccactcgtgaaatgactccacatgaaatcaagtttgcagtgcatgtcgaatcagttcttaatcgggtccctcaacccgaatacagacagctgctggtggaagcaattatggtgctcactttgctgagcgacaccgaaatgacctcgattggtgggataattcatgttgatcagattgtgcaaatggcatcacaactttttcttcaggatcaagtcagtatcggagcaatggacacccttgagaaagatcaagctaccgggatttgccatttcttctacgacagcgccccctcgggtgcctacgggaccatgacctaccttacccgcgccgtcgcttcgtacctccaggaacttctccctaattccggctgccaaatgcag

SEQ ID NO: 18111 - DNA, 3705 bp, synthetic construct
  misc_feature 1..3705: note = source = /note="Description of Artificial Sequence: Synthetic coding sequence"
  source 1..3705: mol_type = other DNA
atgcgtagcagatctaattcgggagtgagactggacggctacgcccgcctcgtccagcaaaccatactctgctaccaaaacccggtcaccggactcctctctgcgagccacgaacaaaaggacgcgtgggtcagagataacatctactccatcctggctgtgtggggtcttgggatggcgtaccgcaaaaacgccgatcgcgatgaggacaaggcaaaagcctacgagctggagcagaatgtggtgaaactcatgcggggactcctccaatgcatgatgcggcaggtggctaaagtggaaaagtttaagcacactcagtcgaccaaggactccctccatgcaaagtacaacaccgccacttgcggtacggtagtcggtgacgaccagtggggacatctccaggtagatgctacgtcgctcttcctgctgttcttggctcagatgacggcatccggtttgcggattatctttactctcgatgaggtggccttcattcagaacctggtgttctacattgaggctgcttacaaggtggcagactacggaatgtgggaaagaggggacaagactaatcagggcatcccggagctgaacgcctcctctgtgggaatggccaaggcggccctggaggcgatcgacgaactcgacctgttcggagcgcatggcggacggaagtccgtgatccatgttctgccggacgaggtggaacactgtcaatccatcctcttctccatgctgcctcgggcatcgacctctaaagaaatcgacgccggacttctctcaatcatctcgttccctgcgttcgccgtggaagatgtcaatctggtgaacgtgaccaaaaacgagatcatttcgaagctgcagggacgctacggctgctgtcggtttcttcgcgacggctacaagactccgcgcgaagatcctaaccgcctccactacgacccggcggagctgaagctgttcgaaaacatcgagtgcgagtggccggtgttttggacttacttcattatcgacggggtcttttcaggcgacgctgtgcaggtgcaggaataccgcgaggccctggagggtattcttatcaggggtaaaaacggcatccgcctggtgccggaactctacgcagtgccgccgaacaaagtggatgaagaatacaaaaacccccacactgtagatagagtgccaatgggaaaggtgccgcatctttggggacagtccttgtatatcctgtcaagccttctggccgaaggattccttgcagccggagagatcgatccgctgaaccgcagattttcaacttccgtgaagccggatgtcgtggtgcaagttaccgtgcttgcggagaacaaccacatcaaggacttgctgagaaaacacggagtcaacgtccaatcaatcgcagacatccacccgatccaggtccagccaggccgcatcctgtcccacatctacgcaaaactgggacggaataagaacatgaatctgtcgggacggccatatcggcatatcggcgtcctgggaacctcaaagttgtacgtcatcagaaaccagatcttcaccttcactccacagttcaccgaccagcaccacttctacctcgcgctggacaacgagatgatcgtagagatgctccggatcgaactggcttacctgtgcacgtgctggcgtatgactggcaggcctaccttgactttccctatcagcagaacgatgctgactaacgatggaagcgatatccacagcgctgtcctttcgactattcggaagctggaggacgggtactttgggggtgcccgtgttaaactgggaaatttgagcgaattcctgaccaccagcttctacacttacctcacttttctcgacccggattgtgatgaaaagttgttcgacaatgcatccgaaggcactttctcccccgattccgactcagacctggtggggtacctggaagatacctgcaatcaagagtcccaggacgaactggaccattacatcaaccaccttctgcagagcacgtccctgcggtcctacctcccgcccctttgtaagaataccgaggaccgccacgtgttttcggcgatccattcgactagagatatcctgtccgtcatggcgaaggcaaagggcctggaagtgccgtttgtgccaatgacccttccaaccaaggtcctgtcggctcataggaagagccttaaccttgtggattccccgcaaccgctgctcgagaaggtcccagaaagcgatttccaatggccacgcgatgatcacggtgacgtggactgcgagaagctcgtggaacagctgaaagattgctctaacttgcaggatcaagccgacattctctatatcctgtatgtgatcaaaggaccctcgtgggacaccaatttgagcggacagcatggagtgactgtgcagaacctcctgggagaactgtatgggaaagccggattgaaccaagagtggggattgattcgctacatctccggactcctgagaaagaaggtggaagtgctcgccgaagcatgcaccgatcttcttagccaccaaaagcagttgactgtgggcttgccaccggaaccgcgggaaaagatcatctcggcccccctgccgcctgaggagctgactaagctcatctacgaagcatccggacaagacatctcgatcgccgttctcacccaggaaatcgtcgtgtacctcgccatgtacgtgcgggcgcagccttcactgtttgtagagatgctgcgtctcaggatcggccttatcattcaggtgatggctaccgaactggcgagatcactcaactgctccggggaagaggcgtccgaatcactgatgaacctgtcgccattcgacatgaaaaatctgctccaccatattctgtcgggaaaggaattcggtgtggaacgcagcgtgcgaccaatccactcgtccacctcgtcgcctacgatttcaatccatgaggtcggtcacactggcgtgaccaagaccgaacgcagcggtatcaataggttgcggagtgagatgaagcaaatgactagacgattctcggcggacgagcaattctttagcgtcggccaggccgcctcatcctcggcgcacagtagcaagtccgcccgcagttctaccccgtcatcgcccaccggaacctcatcgagtgacagcggtggacatcatatcggatggggggaacgccaggggcagtggctgcggaggcggcggctcgatggagcgataaatcgggttcctgtcgggttctaccaaagggtgtggaaaattctgcaaaaatgtcacggcttgtccatcgacggatacgtgctcccttcaagcaccactcgcgagatgaccccccatgaaatcaagttcgccgtccacgttgagagcgtcttgaatcgggttccacagccagagtacaggcaacttctggtcgaagcaatcatggtgctgactctcctgtcggatacggaaatgacctcgatcggcggcatcatccatgtcgaccaaattgtgcagatggccagccagcttttcctgcaagatcaagtgtcgattggagcgatggacaccctcgaaaaggaccaggcaaccggaatctgccacttcttctacgattcagctccgtcgggggcctacggaactatgacttatctgacccgcgccgtcgccagctacctgcaggaactgctgccaaatagtggatgccagatgcag

SEQ ID NO: 18112 - DNA, 3705 bp, synthetic construct
  misc_feature 1..3705: note = source = /note="Description of Artificial Sequence: Synthetic coding sequence"
  source 1..3705: mol_type = other DNA
atgcggagccgatctaactccggcgtgagactggatggatacgctaggcttgtccaacaaacaattctgtgttaccagaatccggtgacgggactgctgtcagcttcacacgaacagaaggacgcatgggtgagggacaacatatattcaatcctcgccgtgtgggggctgggcatggcgtacagaaagaacgcggacagagacgaggacaaagcaaaggcctatgaacttgagcagaacgttgtgaagttgatgcgcggtctactccaatgcatgatgcgacaggtagccaaagtagaaaagttcaagcacacacagagcactaaggactcattacatgccaagtataacaccgccacttgcggcactgtggttggagatgatcagtgggggcacctgcaggtcgacgccacttccctcttcctgctttttctggcccagatgaccgcctctggactcaggatcatatttaccctcgatgaggtggcgtttatacagaacctggttttttatattgaggccgcatacaaggtagctgattacggcatgtgggaacgcggagacaaaaccaatcaaggcatcccagaactcaacgcctccagcgtcggtatggccaaagctgcgttggaggctatagacgagctggacctgttcggagcacatggcgggcggaaaagcgtgatccacgtcctgccagatgaggtagagcactgccagtccatcttattttccatgctccccagggcctccactagcaaagagatcgatgctggcctcctctctatcatcagcttcccggcctttgctgtggaggatgttaatttagtgaacgtgaccaagaacgagatcatatcgaagctccagggccgatatgggtgctgccgtttcctcagggacggctacaagacgccccgagaagaccccaatcggctccattacgaccctgcggagctgaaactcttcgagaatatcgaatgtgagtggccagtcttttggacctacttcataattgacggcgtttttagtggcgacgccgttcaggtgcaagaatatagggaagccctggagggaatacttatccgggggaaaaacggaattcgcctggtccccgagctgtatgcagttccccccaacaaggtcgatgaagagtataagaacccccacaccgtggatcgcgtacctatgggcaaggtgcctcacctctggggtcagagtttgtacatcctttccagcctgctcgctgaaggattcctggctgcaggtgaaatcgacccactgaacaggcgcttctccacaagcgtaaagcctgatgtggtcgtgcaggttacggtcctggcggagaataaccatataaaggacctgctgcgtaaacacggtgttaacgttcagagtatagctgacattcaccccatacaggtgcagcctggacgcatcttgtctcacatttatgcgaaactggggcgcaataaaaatatgaacctctctgggaggccctaccggcatattggagtacttgggacatccaaactgtatgtcatacggaaccaaatctttacattcaccccccagttcacagatcagcaccacttctatctggccctagacaacgaaatgattgtggagatgttgcggatcgagctggcctacctgtgcacctgttggcggatgaccggtcgcccgacattgacattcccaataagccggaccatgcttaccaacgatggtagcgacattcattcagctgtgctgtccaccatcagaaagctggaggatgggtattttggaggtgcccgggttaaactgggcaaccttagtgaattccttactacgtccttctacacatatttaacctttctagaccccgattgtgacgagaagttgttcgataacgcaagcgagggcactttctctccagactctgactccgatctcgtgggctatctcgaggatacatgcaaccaggaatcgcaggatgagctggatcactacataaatcatttgttgcagtccacatcgctccggtcttatttaccacccctgtgtaagaacacagaggataggcatgtgtttagcgccatccactcaaccagggatatcttgtcagtaatggctaaggccaagggtctggaagtcccgttcgtgcctatgactttacccacaaaagtcctgtccgcgcaccgaaagtctctgaatttagtggatagtcctcaacctttgttagagaaggtgccagagagtgactttcaatggccccgcgatgaccacggagatgttgattgcgaaaagctggtggagcagcttaaggattgttctaacctgcaggaccaggccgatatactgtatattctctacgtgataaaaggcccatcatgggacacaaacctgtcgggccagcatggcgtgaccgtgcagaacctcctaggggagctgtatggcaaggcaggtctgaatcaggaatggggactgattcgatacatatcaggattgctccgtaagaaggtggaggtcctggctgaagcatgcactgatcttctgtcgcatcaaaaacaacttaccgtggggctgccccctgagccaagggagaagatcatcagcgctcctctccccccagaggagttaactaaattaatttacgaagctagtggtcaggacatcagcattgctgttctcacacaggaaatcgtcgtgtacctcgcaatgtacgtcagggcccagcctagcctgttcgtcgagatgctgcgtcttcgtatcggcctgatcattcaggtgatggctacggagttggcacggagcctgaactgctccggagaagaggcatcagagagcctcatgaacctttcacccttcgacatgaagaatctgcttcaccacatcctatcaggcaaagagttcggggtggaaagatcagttagaccaatccactcatccaccagttcacctactatttcaattcacgaagtggggcatactggagttacaaagaccgagagaagtggaattaaccggctcaggagtgaaatgaagcagatgacacggaggtttagcgccgatgaacagttcttctctgttgggcaggctgcctcaagttccgctcacagcagcaaatcagcacgttcttcgacaccgtcatctcctacaggaacatcaagctctgactctggagggcaccacataggctggggagagaggcagggccagtggcttcgccgtcgacggctcgacggagccataaatcgcgtccccgttggcttttaccagcgggtctggaaaatcctgcagaaatgccacggcttgtccattgatggttatgtgcttccatcaagcacaactcgagagatgactcctcacgaaatcaagttcgccgtccatgtggaaagtgttctgaatagggtgccccagcctgaatatcgacaactgctagttgaggcaatcatggttctgacattactgtcagacactgagatgacaagcataggtggaatcattcatgtagaccagatcgtccagatggcctcccagctctttctgcaggatcaagtcagcatcggggctatggatactctagagaaggaccaggcgaccggaatatgtcacttcttctacgacagtgccccttctggggcttacgggaccatgacctatcttaccagggcggtcgcttcatatttacaagaacttctgccaaactctggctgtcaaatgcag

SEQ ID NO: 18113 - DNA, 3705 bp, synthetic construct
  misc_feature 1..3705: note = source = /note="Description of Artificial Sequence: Synthetic coding sequence"
  source 1..3705: mol_type = other DNA
atgcgctcacgatcaaactccggggttcggttggacggttatgctagactggtgcaacaaactattctgtgctatcagaaccctgtgactgggctcctgtccgcgtcccacgaacaaaaggatgcatgggtcagggacaatatttactccatactcgcggtttggggcctgggtatggcataccggaagaacgccgaccgcgacgaggataaggccaaagcctatgaactcgaacaaaacgtcgttaagctcatgcgaggacttctgcagtgtatgatgcgccaggtggcaaaagtggagaagttcaaacacacgcagagcactaaggactctctccatgcgaaatacaatactgctacctgcggcactgtcgtgggtgacgaccagtggggccacctgcaggtggatgctacctccctgttcctgctctttctcgctcagatgacggccagtggactgaggattatattcacactggatgaagtagccttcattcagaacctggttttctacattgaggccgcctataaggtcgcagactacggcatgtgggaaagaggagataagaccaatcagggtatccccgaactgaacgcatcaagcgtcggaatggccaaggctgcgctcgaggctatcgatgaacttgatttgttcggagcccatggcggcagaaagagcgtcatacacgtgttgcccgacgaggtcgaacactgtcagtccattctgttttctatgctgcccagggccagcacatctaaggagatcgacgcagggctgcttagcataatttctttcccagccttcgctgtagaagacgtcaacctggtgaatgtgaccaagaatgagataatctcaaagctccaaggtcgatacggctgttgtcgcttcttgcgcgacggatataagactcccagagaggatccaaacaggttgcactatgacccagcagagcttaagctctttgagaacatcgagtgcgaatggccggttttttggacctacttcattatcgacggcgtattctccggggacgctgtccaggtgcaggaatacagagaggccttggaggggattttgatccggggcaaaaatggaattcgccttgtgcctgaactctacgctgttccacctaataaagtcgacgaagaatataaaaatccacataccgtggacagagtgcctatgggaaaggtgccccacctctggggtcagtccctgtacatcctgtcctccctgttggctgagggctttctcgcagctggtgagattgaccctctcaaccgacggttctccaccagcgtgaagcccgatgttgttgtccaggtgaccgttttggccgagaataatcacatcaaggacctcctgcgaaagcacggagtgaacgtccagtcaattgccgacatccatcctattcaggtccagcccggcagaatcctttctcacatttatgctaagctgggtcgaaacaagaacatgaacctgtctggcaggccctatagacatattggagtattgggcaccagcaaactctacgtgatccgcaaccagatattcactttcaccccacaattcacagaccagcaccacttctacttggccctcgataatgaaatgatagtggaaatgcttcgaatcgagctggcttatctctgcacgtgttggcggatgaccggtagacctacgctgacatttcctatctctcgcaccatgcttacaaatgacgggagcgatatccatagcgccgtgctgtccactatacgaaagctcgaagacggctactttggcggtgcacgagtcaagcttgggaatttgagcgagttcctgacgacatccttctacacctatctgaccttcctcgatcccgattgtgatgaaaagctctttgataacgcctccgagggcacattttctccagatagcgacagcgacctcgtcgggtaccttgaggacacctgtaaccaagagagtcaggatgagctcgatcactacatcaaccacctcctgcaaagcaccagcctgcgctcttacctgcccccgctctgcaagaatactgaagaccggcacgtgttcagcgcaattcactctaccagagacattctttcagtgatggctaaggccaaaggactggaggtcccttttgtgccaatgacactcccaactaaagtgctgagtgcacacaggaagtctctcaacctggttgatagtcctcagccacttctggagaaggtgcccgagtctgatttccaatggccacgagatgaccacggagatgtggattgcgagaaactggtggagcaactcaaggactgtagcaatctccaggaccaggccgacattctgtatatactttatgtgataaagggacccagttgggataccaacctcagcggacagcatggtgtgacagtgcagaaccttctgggggagctctacggcaaagctggcctgaatcaggagtggggattgatacggtacatatccggcctgctgcgcaaaaaggtggaggtcctggccgaagcttgcacggatctgctcagccaccagaagcagctcacagtgggacttcccccagagcctagagagaagattatctctgcaccactccccccagaggagttgacgaaactcatttacgaggcctcaggtcaggacatctccatcgcggtgctcacacaagaaattgtagtatatcttgccatgtatgtgagagcccagcccagtcttttcgttgaaatgctgcgactgcgcatcgggctcattattcaggtgatggcaactgagctggcccgaagccttaactgctctggcgaagaggcaagtgagtcactgatgaatctctctccattcgatatgaagaacctcctccaccacatcctcagcgggaaagagtttggagtggagaggtccgttcgcccaatccatagctctacatcaagccccaccatttcaatacacgaggtcgggcatactggggtcacaaaaactgagaggtctggcattaaccgcttgaggagcgaaatgaaacagatgaccagaaggtttagcgccgatgaacaattcttctccgtgggtcaggcagcgtcaagttcagctcacagcagcaaatcagcaagaagcagcacgccgtcttcccccaccggtacaagttctagcgacagcggtggccatcacatcggttggggtgaaaggcaggggcaatggcttagacgcagaagactcgacggggccatcaaccgggttcctgttggattttaccagagagtctggaagatcctccagaaatgccatggactctctattgacggctatgttttgccttctagtacaaccagagagatgacacctcatgagatcaaattcgccgtccacgttgagtctgtcctgaatagagtaccccagcctgaataccggcaactcttggtcgaggctatcatggtgctgactctcctctctgataccgaaatgacgtctatcggcggcatcatccatgttgaccagatcgtacagatggcaagccaacttttcttgcaggaccaagtgagcatcggtgccatggacactctggagaaggaccaggccactgggatctgccacttcttctatgactccgcccccagtggcgcctacgggactatgacctacttgactagagctgttgctagctacctgcaagaactgcttcccaactctgggtgccagatgcag

SEQ ID NO: 18114 - DNA, 3705 bp, synthetic construct
  misc_feature 1..3705: note = source = /note="Description of Artificial Sequence: Synthetic coding sequence"
  source 1..3705: mol_type = other DNA
atgagatcaagatcaaattctggagtacgtttagacggatatgcaagattagttcaacaaacaattttgtgttatcaaaatccagtaacaggtttattatcagcttctcatgaacaaaaagacgcatgggttcgagataatatttattcaatcttagccgtttggggtcttggaatggcttatagaaagaatgctgatagagatgaggataaagctaaagcctatgaattagaacaaaacgttgttaagttaatgcgaggattacttcaatgtatgatgagacaagttgcaaaagttgaaaaatttaaacatacacaatctactaaagattcattacatgctaaatataatactgcaacatgtggaacagttgttggtgatgatcaatggggtcatttacaagttgatgcaacttctctttttcttttgtttcttgctcaaatgacggcttctggattacgtatcatttttactcttgatgaagttgctttcatacagaatcttgttttttatattgaagctgcatataaagttgcagattatggaatgtgggaaagaggagataaaacaaatcagggtattccagaattaaatgcttcaagtgttggaatggcaaaagctgctttagaagctatagatgaacttgatttatttggagctcatggaggaagaaagagtgttatacatgttctcccagatgaagttgaacattgtcaatcaattctttttagtatgttaccaagagcttctacatctaaagaaattgatgctggtttattatcaataataagtttcccagcttttgcagttgaagatgttaatttggtaaacgttactaaaaatgaaattattagtaaattacaaggaagatatggttgttgtagatttttaagagatggatataaaacaccaagagaggatccaaatagattacattatgatcctgctgaattaaaactattcgaaaatattgaatgtgaatggccagtattttggacttatttcattattgacggagtattctcaggagatgctgttcaagttcaagaatacagagaagcccttgaaggtattttaataagaggaaaaaacggtattagattagttccagaattatatgctgttccaccaaataaagttgacgaagaatacaaaaacccacacacagtagatagagttccaatgggtaaagtacctcatttatggggacaatcactttatattttaagttctcttttagctgaaggattccttgctgctggagaaatagatccattaaatagaagattctctacttctgtcaagccagatgttgtagttcaagtcactgttttggctgaaaataatcatattaaagatcttcttagaaaacatggtgttaatgttcaatcaattgctgatattcatcctattcaagttcaaccaggaagaatattgagtcatatttatgcaaaactaggacgtaataaaaatatgaatttatcaggacgaccatatagacatattggagtattagggacatcaaaattgtatgttattagaaatcaaatttttacatttacaccacaattcactgaccaacaccacttttatcttgcattagataatgaaatgatagttgagatgttacgaattgaattagcttatctttgtacttgttggagaatgacaggaagaccaacattaacattcccaatttcaagaactatgttaactaatgatggatctgatattcactcagcagttttatcaacaattagaaaattagaagatggttatttcggtggagcaagagttaaattaggaaatttgagtgaatttcttactacatcattttatacttatcttactttcttagatccagattgtgatgaaaaattatttgataatgcttcagaaggtactttttctccagattctgattctgatcttgtaggatatttagaggatacatgtaatcaagaatcacaagatgaattagatcattatattaatcatcttttacaatcgacttctcttcgttcttatctcccaccactttgtaaaaacacagaagatcgacatgtttttagtgctatacattccactagagatatactttcagttatggcaaaagcaaaaggacttgaagttccattcgtaccaatgacacttcctactaaggttttaagcgctcatagaaaatctttaaatttagttgattctccacaaccacttcttgaaaaggttcctgaaagtgattttcaatggccaagagatgatcatggagatgttgactgtgagaaactagttgaacaattaaaggattgttcaaatttacaagatcaggctgatattctttatattttatatgtcattaaagggccaagttgggatacaaatttatcaggacaacatggagtaacagttcaaaatcttttaggagaattatatggaaaagcaggacttaatcaagaatggggattgattagatatatttcaggattacttagaaaaaaagttgaagttttagcagaagcatgtacagatttactttcacatcaaaagcaacttacagttggacttccacctgagccaagagaaaagataatttcagctccattacctccagaagaattaactaagttaatttatgaagctagtggacaagatatttctattgctgttttaacacaagaaattgttgtgtatttagctatgtatgttagggcacaaccatctttgtttgttgaaatgttaagattaagaattggtcttataattcaagttatggctacagaacttgcacgaagtttaaattgttctggtgaagaagctagtgaaagtttaatgaatctttcaccatttgatatgaaaaatttacttcatcatattctttctggaaaagaatttggtgtggaaagatcagttagaccaatacatagtagtacttcatctccaactatttccattcatgaagttggtcatacaggtgttactaaaactgaaagatcaggaattaatagacttagatcagaaatgaaacaaatgacaagaagattttcagcagatgaacaatttttttcagttggacaagcagcatcttctagtgcacattcatccaagagtgcaaggtcatcaacaccttcatcgccaactggaacttcatcttcagattctggtggacatcatattggatggggtgaaaggcaaggacaatggttacgaagaagaagacttgatggagctattaatagggttccagttggattttatcaaagagtttggaagattttacaaaaatgtcatggactttcaattgatggttatgttcttcctagttctacaacaagagaaatgactcctcatgaaattaagtttgcagttcatgtagaatcagttttgaatagagttcctcaaccagaatatcgtcagctattagtagaagcaattatggttttaactctattatcagatactgaaatgacttcaattggaggaattattcatgtagaccaaattgttcaaatggcaagtcaattatttttacaagaccaagtttctattggtgcaatggatacactagaaaaggatcaagcaacaggaatttgtcattttttttatgattcagcaccttcaggagcatatggaactatgacatatttaacaagagctgttgcatcatatttacaagaattgcttcctaactctggttgtcaaatgcaa

SEQ ID NO: 18115 - DNA, 3705 bp, synthetic construct
  misc_feature 1..3705: note = source = /note="Description of Artificial Sequence: Synthetic coding sequence"
  source 1..3705: mol_type = other DNA
atgaggtcgagatcaaattccggagtccgcctcgacggatacgcccggctcgtgcagcaaaccatcctgtgctaccagaaccccgtgactggactcctgtccgccagccatgagcagaaggacgcctgggtgcgggacaacatttactcgatccttgcagtgtggggactgggaatggcctatagaaagaatgccgaccgcgacgaagataaggctaaggcctatgagttggagcagaacgtcgtcaaactgatgagaggactgctgcaatgcatgatgcggcaagtggctaaagtggagaagtttaagcatacgcagtccacgaaggactccctgcacgccaaatacaacacggccacgtgcggaaccgtcgtgggggatgatcagtggggccacctgcaggttgatgcgacctcgctgttccttcttttcctcgctcagatgactgcgagcggacttcgaatcatcttcaccctggacgaggtggccttcatccaaaatctcgttttctacatcgaggcagcgtacaaggtcgccgactatgggatgtgggaacggggtgacaagactaaccaaggaattccagagctgaacgctagcagcgtggggatggccaaagcggcattggaggcgatcgatgaactggatctgttcggcgcccacggaggacgtaagtcagtgatccacgtccttccggatgaagttgaacactgtcagtcgatactgttctcgatgctgccccgcgcgtccacctcgaaggagattgatgcgggattgttgagcatcatctcattcccggcttttgcggtcgaggatgtcaatctggtgaatgtcacgaaaaacgagatcatctctaagttgcagggccgctacggatgttgccgcttcctcagggatgggtacaagaccccgcgggaagatcctaaccgcttgcactatgatcctgcggaactgaagttgttcgaaaacatcgagtgcgaatggccagtgttttggacctacttcatcatcgacggggtgttctcgggagacgccgtgcaggtgcaggaatacagagaagccctggagggcatccttattcggggcaagaatggcatccgattggtccctgagctgtacgccgtcccgccgaataaagtcgatgaagagtataagaaccctcacaccgttgatcgcgtgccgatgggaaaagtgccccacctctggggccaaagcctgtacatcctgtcgtcactgttggctgaaggattcctggcggccggggaaatcgacccgctgaatagacggttttccacttccgtgaaaccggatgtggtggtgcaggtgaccgtgctggccgagaataaccatatcaaggaccttttgagaaagcatggagtgaatgtccaatccattgcagacatccacccaatccaggtgcaaccaggacggatcctcagccacatttacgcgaaacttggacggaacaagaacatgaacctctcaggacgcccataccgccacattggggtgctcgggacctcgaagctctacgtcatccgaaatcagatcttcaccttcactccgcagtttaccgatcagcatcatttctacctcgccctggacaacgagatgatcgtcgaaatgttgagaatcgaactggcctacctgtgcacctgctggagaatgactggaaggcctactctcaccttcccaatctcacgcactatgttgactaacgacggatcggacatccattcggctgtgctgtcgaccatccgcaaacttgaggatggttacttcggcggtgcccgcgtgaagctgggcaacttgtcagaattcctgaccacctcgttctacacttacctcacgttccttgatccggactgcgacgagaaattgtttgataatgcctcggaaggaacgttctcgcctgacagcgactcggacttggtcggatatcttgaagatacctgcaaccaggaatcgcaagatgagttggaccactacatcaaccatctgctgcagtcgaccagccttcgttcatacctgcccccgctgtgtaagaacactgaagatcgccacgtcttttcagcgattcacagcacgagagatatcctgtcggtgatggcgaaggccaagggcctggaagtcccattcgtgccgatgactctcccaaccaaagtcctgagtgcgcaccgcaagtcactcaacctggtggattccccacagccactgttggagaaggtccctgagtcggacttccaatggcctagggatgatcacggcgacgtggactgcgaaaagctggtcgagcagcttaaagactgttcgaacctccaggaccaggcggacatcctttacatcctgtacgtgatcaaaggaccgtcgtgggacactaacctgagcggacaacacggagtgacggtccagaaccttctcggagaactctatggcaaagcgggactgaaccaggagtggggactgataaggtacatctcgggactgctgcgcaaaaaggtggaagtccttgctgaagcctgcaccgacctcctctcccaccagaagcagctgaccgttggccttcccccggagccgagggaaaagatcatttccgcccctctgccgcctgaagaactgactaaactgatctacgaggcgagcggacaggacatctccatcgccgtcttgacccaagagatcgtggtctacctcgctatgtacgtgcgcgcgcaaccgtccctgttcgtggaaatgctgaggctccggattggactcatcatccaagtgatggcaaccgaactggcccgctcactgaactgctccggagaggaagcatcagagagcctgatgaatctgtcacctttcgacatgaagaacctgctgcaccacatactgtccggaaaggaattcggagtggagcgatcggtgcggcccatccacagctccactagctcccctaccatctcgatccatgaggtgggtcataccggagttaccaagaccgagcggtcaggaatcaacagactgagatcagagatgaagcaaatgaccagaaggttttcggcggacgaacagtttttcagcgtggggcaagccgccagctcctccgcgcattcgtctaagtcggcccggtcgagcaccccctcttcgccgactggtacttcgagctcagattccgggggacaccatatcggatggggtgagcgccagggtcagtggttgcggagaaggcggctcgacggcgcaatcaatcgggtgcccgttgggttctaccagagagtttggaaaatactgcagaagtgccacggactttcaatcgacggatatgtgctgcctagctcgaccaccagggagatgaccccgcacgagatcaagttcgcggtgcacgtggagtccgtgctcaatcgcgtgccacaaccggaataccggcaactgctggtggaggcaattatggtccttaccctgctctctgacaccgagatgacctccatcggaggaatcatccacgtggaccaaatcgtgcagatggcatcccagctgtttctccaagatcaggtttccatcggcgcgatggacactctggagaaggaccaggccactggaatctgtcacttcttttacgactcggcgccaagcggcgcatacggcaccatgacctaccttacgagagccgtggccagctacctgcaagaattgctgccgaacagcggctgtcaaatgcag

SEQ ID NO: 18116 - DNA, 3705 bp, synthetic construct
  misc_feature 1..3705: note = source = /note="Description of Artificial Sequence: Synthetic coding sequence"
  source 1..3705: mol_type = other DNA
atgcggtcgcggtcgaattcaggtgtccgcctcgatggatacgcgagactggtgcagcaaactatcctgtgctaccagaacccggtcactggcctgctctcggcatcgcacgagcagaaggatgcgtgggtgcgggataacatctattcgatcttggcagtgtggggactcggcatggcataccggaagaacgcggacagggatgaggacaaggccaaagcatacgaactggaacagaacgtggtgaaacttatgagaggcttgctgcagtgtatgatgcggcaggttgcaaaagtggagaagttcaagcacactcaatccactaaggacagcctgcatgctaaatacaatactgccacttgtggaactgtggtgggggacgaccagtggggacatctgcaggtggacgccacctccctgtttctgcttttcctcgcccagatgaccgcttccggactgcggatcattttcaccctggacgaagtggctttcatccagaatctcgttttctacatcgaagccgcttacaaggtcgctgactatggcatgtgggaacgaggagataagactaatcagggaattccagagttgaacgcgtcctcggtcgggatggctaaagctgcactcgaggcaatcgacgagctggacctgtttggggcacatggtggtcgcaagtcggtgattcacgtactgccagatgaagtggagcattgccaatccatcctcttctcgatgctccctcgcgcctcgacttccaaagaaattgacgctggcctgctgtcaatcatctccttcccggccttcgcggtggaagatgtgaacctggtcaacgtcactaagaatgagatcatctcaaagctgcaaggccggtatggctgctgcagattcctgagagatgggtacaagactccgagagaagatccgaatcgcctccactacgacccggccgaactcaagctgttcgagaatatagagtgcgaatggccggtgttttggacttatttcatcatcgatggggtcttttctggggatgccgtgcaagtccaggaatatcgcgaagccttggaggggatcctgatccgggggaagaatggaatcaggctcgtgcctgaactctacgccgtgccaccgaacaaggtggacgaggagtacaagaacccacacactgtcgaccgggtgccaatggggaaggtgccccatctctgggggcaatcgctctacatcctttcctccctgctggcagagggattcctcgcagccggagagatcgatccactgaatcggcgcttctccaccagcgtcaagccggacgtggtggtgcaagtcaccgtgcttgcagagaataaccacatcaaggacctcctccgcaagcacggcgtcaatgtgcaatccatcgctgacatccacccgatccaggtccagccaggtcgcattctgtcgcatatctacgccaagttgggacggaacaagaacatgaatctttccggtcgtccatacagacacattggagtgttggggacctccaaactctatgtcatcagaaatcaaatcttcacttttaccccgcagtttacggaccagcaccacttctacctcgcactggataacgagatgattgtcgaaatgctgagaatcgagttggcatacctgtgcacttgttggaggatgactggcagaccgaccctgacgttcccgatctcgcgcaccatgctgaccaacgatggatcagatatccactcagccgtgctgtcaaccatcagaaaactggaagatggctattttggaggcgctcgggtgaaactcggaaacctctcggagttcctcactaccagcttctacacttacttgacctttctggacccagactgcgacgagaaattgttcgataacgcatctgaaggaaccttcagcccggactcggattcagacctggtggggtacctggaggatacgtgtaaccaagaatcccaggacgagttggatcactacatcaatcacctgctgcagagcacttccctgcggagctatctgccgcccctttgcaaaaacacggaagatagacacgtgttctcggccatccattcaactagagatattctgagtgtgatggcgaaagcgaaaggactggaagtgccgttcgtgcctatgaccctcccaactaaagtcctctcggctcacagaaagtcgctgaaccttgtggactccccgcaacctctgctggaaaaggtgccggaaagcgactttcaatggccacgggacgatcacggagatgtcgactgtgagaaactggtcgaacaactcaaagactgctcgaacctccaagaccaggccgacatcttgtacatcctttacgtgattaagggaccctcctgggataccaatctgtcggggcagcacggagtgactgtgcagaatctcctcggagagttgtacggaaaggccggcctgaatcaagagtgggggctcatcaggtacatctcgggactgctgagaaagaaggtggaggttctggccgaggcatgtaccgatctgcttagccaccaaaaacaactcactgtcggactgccgccagaaccgcgcgaaaagatcatttcggccccgctgccgcctgaggaactgactaagctcatctacgaagcctcaggacaggacatttcaattgccgtgctgacgcaagagattgtggtgtacctggcgatgtacgtgcgcgctcaaccgtcgctctttgtggagatgctgcggctgcgcatcggcctcattattcaagtgatggcaacggagttggcccgctcgctgaactgttctggagaggaagcatcagagtccctgatgaacctgagccccttcgatatgaaaaatctgctccatcacatccttagcgggaaagaattcggcgtggaaagatccgttcggccaatccattcatcaaccagctcccctaccatctcaatccacgaggtgggccacactggtgtgactaaaactgagcgcagcggtatcaacaggctgaggtcagaaatgaagcagatgaccaggcggttctcagctgatgaacagttcttctcagtcggacaggcagctagcagctccgcgcactcaagcaaatcggcccgctccagcactccttccagccccaccggtacgagcagcagtgattctggtggacaccatatcggatggggagagcgccagggacaatggcttcgcagaaggagactggacggcgctatcaaccgggtgccggtcggattctaccagcgggtgtggaaaattctgcagaagtgccacggactttccatcgacggatacgtcctgccatcatcaaccacgagggaaatgactcctcatgaaatcaagttcgcagtgcatgtcgaaagcgtcctgaatcgggtcccccaaccggagtaccggcagctcctcgtggaagctattatggtgctgaccctgctctctgacaccgaaatgacctccatcgggggtatcatccacgttgaccagatcgtgcaaatggcttcccagctgttcctgcaggaccaagtcagcatcggtgccatggacactctggaaaaggatcaggcaaccgggatttgccactttttctacgattcagctccatcaggcgcctacggcaccatgacgtaccttactcgcgcggtggcgtcatatttgcaggagttgctgcctaactccgggtgccaaatgcaa

SEQ ID NO: 18117 - DNA, 3705 bp, synthetic construct
  misc_feature 1..3705: note = source = /note="Description of Artificial Sequence: Synthetic coding sequence"
  source 1..3705: mol_type = other DNA
atgcgctccagatcaaacagcggtgtgaggctggacggttacgccagattggtccagcagactattctgtgctaccagaacccagtgaccggtttgctttcagcgagccatgagcaaaaggacgcatgggtccgagataacatttactcgatactcgcagtgtggggtcttggaatggcttatcggaagaatgcagatagagatgaggacaaggccaaagcgtacgaactcgaacaaaacgtggtcaagctcatgagaggtttgctgcaatgtatgatgcgccaggtggccaaagtggaaaagtttaaacatactcagtcgactaaggatagccttcatgcgaaatacaacactgcaacttgtgggaccgtggtgggagatgaccagtggggacatctgcaagtggatgccacgagcctgtttctcctttttctcgcacaaatgaccgcgtcaggacttcggatcatattcaccctggatgaagtggccttcatccaaaacctggtcttttacatcgaagccgcctacaaagtggccgattacgggatgtgggagaggggggacaaaactaaccaaggcatacctgaattgaacgcttcctccgtgggcatggcgaaggccgctctggaagcaatcgatgagctggatctttttggagcgcacggaggaagaaaatcggtgatccacgtccttccagacgaagtcgaacattgccaatcaattctgttcagcatgcttcctcgtgcatcgacttccaaggagattgacgcgggactgctttcaatcatttcctttccggcattcgcagtggaagatgtgaatctggtgaacgtgactaagaatgagattatctccaaacttcagggtaggtacggttgttgccgtttcctgcgcgatggctacaagacccctagagaggatcccaaccgccttcactacgacccggcagaactcaagctgtttgagaatatagaatgtgaatggcctgtgttttggacgtacttcatcatagacggagtgttctccggtgacgcagtgcaggtgcaagagtatcgggaagcactcgaaggcattctgattcggggtaagaacgggatccggctcgttccagaactctacgcagtcccacccaacaaggtggacgaagaatacaaaaatccacatacggtggaccgggtgccaatgggaaaggtcccacatctgtggggccagtccctttacatactttcgagcctcctggctgagggatttcttgcggcaggagagatcgaccccctgaaccgtagattttcgacgtcagtcaaacccgatgtcgtggtccaagtgacggtgcttgctgagaataaccacattaaggatttgctgcgaaaacacggggtgaacgtccaatcaattgccgacattcatcctattcaggtccaacccgggagaattctgtcccacatttatgccaagctcggacgaaataagaatatgaaccttagcgggcggccttacagacacattggtgtcctcggtacctcgaagctgtacgtgatcaggaaccagatctttacttttactcctcaattcactgaccagcatcatttctaccttgcattggataacgaaatgattgtcgaaatgctgagaattgagttggcttacctttgcacctgttggcgcatgacgggaaggccaaccctgacttttcctatttcgagaaccatgctgaccaatgatggctccgatatacattcggcagtcctctcaactatccgtaaacttgaagatggttactttgggggcgcacgtgtcaaattgggaaatctgtccgagtttctgacgaccagcttttacacttatcttaccttccttgatccagattgcgacgaaaagctgtttgacaacgcatcggaaggcaccttttccccagattccgacagcgaccttgtgggttacctcgaagatacgtgtaaccaagagagccaggatgaactggatcattacatcaatcacctgctgcaatccacttcactcagaagctaccttccacctctgtgcaagaacactgaggatcggcatgtcttttcggcaatccactcgactcgagatatactcagcgttatggccaaagcaaagggactggaggtgcccttcgtgcccatgacgctccccactaaggtcctgtctgcccacagaaagtccctgaaccttgttgattcaccgcagcccctcctcgaaaaggtccctgagtcggactttcaatggcccagagatgatcatggcgacgtcgactgcgagaaattggtggaacagcttaaggattgttcaaacttgcaagatcaggccgatattctgtacattctttacgtgattaagggtccgtcgtgggataccaatttgtcgggacagcatggggtgactgtgcagaatcttctcggagaactttacggaaaggcaggactcaatcaggaatggggacttatacgctatatctcaggacttctcagaaaaaaggtcgaagtgctggcagaggcctgtactgatctgctgtcacatcagaagcaattgaccgtggggttgcccccagaacctagggagaagatcatcagcgcaccactcccaccagaagaactgacgaaacttatctacgaagcgtcggggcaagatatatcaattgctgtgcttactcaggagattgtcgtgtacctggcgatgtacgtccgagcacaaccatcgttgtttgttgaaatgctcagacttcgtataggtttgataattcaggtgatggcaaccgaacttgctagatcgttgaattgttctggcgaagaggcttcagaatccttgatgaacctgagccctttcgacatgaagaatttgcttcaccacattctgtccggtaaggaatttggcgtggaacgctcagtccgtcctattcactcctcgacttcaagcccaaccatttcgattcatgaagtgggtcataccggtgtgaccaagacggagcggagcgggattaaccgcctgagatccgagatgaagcaaatgacccgacgcttttcggcagatgagcagttctttagcgtgggccaagcggcatcatcgtccgcacatagcagcaagtcggcccggtcctcgactcctagctcgccgaccggtacttcctcatcggactccggggggcaccatatcggatggggcgaaaggcagggacagtggcttcggcggagaaggctcgacggggccataaaccgcgtgccggttggattctaccagcgggtctggaaaattctgcaaaaatgtcatggcctgtccatagatggatacgtccttccctcgtcaacgactcgtgaaatgacgcctcacgagataaagtttgctgtccatgtggagtctgtgctgaatagagtgccccaaccagaataccgacaacttcttgtggaagcgattatggtcctgaccctcctttcggataccgaaatgacctccatcggtggcataatccacgtcgaccaaatcgtccaaatggcctcgcaacttttcctccaagatcaagtgtccattggtgcaatggatactctggaaaaggaccaagcaaccggtatttgtcatttcttctatgattccgcaccgagcggggcatacggaactatgacctacctcactcgcgcagtggcttcctacttgcaagaacttcttccaaactcgggatgtcagatgcaa

SEQ ID NO: 18118 - DNA, 3705 bp, synthetic construct
  misc_feature 1..3705: note = source = /note="Description of Artificial Sequence: Synthetic coding sequence"
  source 1..3705: mol_type = other DNA
atgaggagtcgcagcaacagtggcgtgcgtctcgatggttacgccagactcgttcaacaaactatcctgtgttatcagaacccggtcaccgggctcctctcggcctcacacgaacagaaagatgcttgggtaagggataatatttatagtattctggccgtatggggattaggcatggcatatcgtaaaaacgcagacagggatgaggacaaggccaaggcttacgagttagagcaaaacgtggtgaagctaatgcgaggcctccttcagtgcatgatgcgtcaagttgcaaaggtggaaaaatttaaacatacccagtctactaaggattcgcttcacgcgaaatataacactgcaacctgtggcaccgtggtgggcgatgatcagtggggccacttacaagtggacgcgactagcctgttcctcctcttccttgcgcaaatgaccgcctctggtctgaggattatttttactttagacgaagtagctttcatccagaacctggtattttacatcgaagccgcctacaaggtggccgattatggtatgtgggagagaggtgacaaaactaaccagggaatcccagagctaaacgcatcctccgtgggtatggcgaaagctgcgctggaagcaatagatgagctggacctgttcggagctcacgggggccgtaagtctgtgatccatgtgctgccagatgaagtcgagcactgccagtctattctgttctctatgttgccccgcgcatctactagcaaggagatcgacgctggcctgctctctatcatttcgttcccggcctttgctgtggaggatgtcaacctagttaatgttacaaaaaatgagattataagtaagctgcaggggaggtatgggtgctgtagatttttacgggatggatataagaccccgagggaagatcctaaccgcttacactacgaccccgcggagttaaaattgttcgaaaatatcgaatgcgaatggcccgttttttggacctacttcattatagacggggtcttctccggagatgccgtccaggtgcaggaatatagggaggctcttgagggaatcttgatccgtggtaagaatgggattcgtctggtccccgagctttacgccgttcccccaaataaggtggatgaggaatacaaaaatccacatacagtagacagagtgcctatgggcaaggtgccccatctgtgggggcagtcactctacattctgtcttccctcctggcagaggggttcctggccgccggggagatcgaccctttaaaccggaggttctcaaccagtgtcaagccagacgtggtcgtgcaggtgacagtgctagcagaaaataatcacattaaagacttactacgtaaacatggtgtgaacgtgcaatcgattgccgatattcacccgatccaggttcagccaggtaggatcctgagtcacatttatgcaaaactagggaggaacaagaacatgaacctttcaggaagaccctataggcatattggggtgttgggcacaagcaagttgtatgtgatacgcaaccagatttttacattcacaccccaatttactgatcagcaccatttctacctggccctggataacgagatgatcgtggaaatgctacgaattgagttggcctacctgtgtacctgttggaggatgacaggcagaccgactctcacgtttcccatctctcgaactatgctcacgaacgacgggagtgatattcacagcgccgttctgtcgacaattagaaagctggaagatggttattttggaggagctcgggtgaaactgggaaacctatccgagtttttaacgacttccttctatacttatctgactttcttggaccctgactgcgacgaaaaattgttcgataacgcgtcagagggcactttcagcccagatagcgactctgacctggtgggctatttagaagacacttgcaaccaggaatcgcaggatgagctcgaccactacattaatcacctcctgcagagcacatctctgcgctcatatctgcctcctctttgtaaaaacaccgaagatcggcacgtgttttctgctatacattcgacccgggatatcctgagcgtaatggctaaagcgaaaggccttgaagtcccgttcgttccaatgacccttccgacaaaagttctgagtgcccatagaaagagccttaatttggtcgactcgccccagcccctgctcgagaaggtgcctgaaagtgacttccagtggccaagggacgaccatggggatgttgactgtgaaaagctcgttgagcaactgaaggactgctccaatttgcaggaccaggccgatattctttacatcctctacgtaataaagggcccatcctgggacactaacctgagcgggcagcacggcgtaactgtacaaaatttattgggggagctctacggcaaagcaggactgaatcaagagtggggattaatacgctacatttctgggctgcttagaaagaaagtcgaggtgcttgcagaggcctgtacagatctgctgtcgcaccaaaagcagctaaccgtgggcctgccacctgagccacgcgaaaagatcatatccgcacctctcccccctgaggagctcactaaattaatctatgaagcaagcggacaggacatctcaatcgccgttctgactcaggaaatcgtggtatatcttgccatgtacgtgagagcacaaccaagcctgtttgtggagatgctgcgcttgagaatcggcctgatcatccaggtgatggcaaccgaacttgccaggagcctgaactgctctggtgaggaagcctcagagtctcttatgaatctgagtccgtttgacatgaagaaccttcttcaccatatcttaagcggcaaggaattcggggtggaaaggagcgtcagaccgattcacagctcaacttctagtccaacaatcagtatacacgaggttggccataccggcgtgaccaaaacagaacggtcagggatcaataggttgcgcagcgaaatgaaacagatgacgagaagatttagcgccgacgaacaattcttctctgtggggcaagccgcatcaagttcagcccacagcagcaaatctgctagaagcagtacccccagttctcccactgggaccagcagctccgactcaggaggccaccatatcggttggggagaaagacaggggcagtggctccgtagaaggcgtctcgatggcgcaatcaaccgcgtgcccgtcggcttttaccagcgagtctggaaaatcttgcagaagtgtcacgggctttcaatagatggctatgtgctgccgtcttctacaactcgtgagatgaccccccacgagattaagtttgccgtgcacgtggagtctgtgctgaatagggtcccgcagccagaataccggcagctgctggtcgaagctatcatggttctgaccctgttgagcgatactgaaatgaccagcatcggaggaatcattcacgtcgaccagatcgtccaaatggctagtcagctgtttctccaggatcaagtctctataggagctatggacaccctggagaaggaccaagccactggaatttgccattttttttacgatagcgccccttcgggggcatacggtacgatgacatacctcactcgtgcggttgcaagctacctgcaagaacttctacccaacagcggttgtcaaatgcag

SEQ ID NO: 18119 - DNA, 3705 bp, synthetic construct
  misc_feature 1..3705: note = source = /note="Description of Artificial Sequence: Synthetic coding sequence"
  source 1..3705: mol_type = other DNA
atgcgctctcgatctaacagtggggttcggttagatgggtacgcgcggcttgtgcagcagactatcctgtgctatcagaaccccgttacaggcctcctgagcgctagccatgagcagaaggacgcctgggtgagggacaatatttactcaatcctggcagtgtggggtttgggcatggcttacaggaaaaacgctgacagagacgaagacaaagccaaggcgtacgagttggagcagaacgtggtgaagctcatgaggggcctgctgcagtgtatgatgagacaggtcgcaaaggtcgaaaaatttaagcacacccaatccaccaaggactcactacacgctaaatacaacacagctacatgcggtacagtagttggggacgatcagtggggtcatctgcaggtggatgccacaagcctcttcctactcttccttgctcaaatgactgcaagtggcctaagaattatcttcacactggatgaggtagcattcattcagaaccttgttttctatatagaagctgcctacaaggtggccgattatggaatgtgggagagaggggacaaaaccaaccagggaatcccagaactgaatgccagctcagtgggcatggccaaggccgccctggaagctatcgacgaactcgacctatttggcgcccatgggggacggaaatctgtgatccatgttctccctgacgaggttgagcattgccagtccattctattttccatgctgccccgagcatccacgagcaaggagattgatgccgggctcctttctattataagctttccagcgttcgcagttgaggacgtaaacttggtgaatgtcacaaagaacgaaattatcagtaagcttcaagggaggtatggttgttgcagattccttagggacggatacaagacgccacgagaggacccaaatcgcctgcactacgaccctgccgagttgaagttgtttgagaacattgaatgcgagtggcccgtgttctggacttatttcataattgacggagtgttttctggagacgccgttcaggtgcaggagtacagagaggccctagaggggattttgatccgcggtaaaaatgggatacggctggtccccgagttgtacgccgtcccacccaataaagtcgatgaggagtataagaacccacacactgttgacagagttcctatggggaaggtcccccacttgtgggggcaatctctgtacattctgtctagtctacttgccgaaggcttcttggctgcaggagaaattgaccctctgaaccggcggttttctacatcagtgaaacctgacgttgtggtccaggtgactgtgctcgccgagaacaatcacatcaaagatcttctgcgcaagcacggagtgaacgtccagagtatcgccgacatccaccccatacaggtgcagcctgggcgcattctcagccatatctacgctaagctcggtcgcaataaaaacatgaatctttcggggcggccctatagacacatcggagtcctgggaacatccaagctgtatgtgatccgcaaccagattttcaccttcacccctcaattcaccgaccagcatcatttttacctggcgctggataatgagatgattgtggagatgctgcgcatcgaactggcctacttgtgtacttgttggcgaatgaccggtagaccaacactcaccttccccatttcacggactatgcttacgaacgatggtagcgacatccactcagctgtactgagtaccattaggaaactggaggatgggtatttcgggggggcacgtgtcaagctgggcaacctgagcgaattcttaaccacgtcattctacacctaccttacctttctagaccctgattgtgatgagaagctctttgacaatgccagtgaaggcactttcagccctgatagcgacagtgatctcgtaggctacctagaagatacctgcaatcaggaaagtcaggacgagttggaccactacatcaaccacttactgcagtccaccagtttaagaagctacttaccgcctctgtgtaagaataccgaggacagacacgttttctctgcaatccactccacaagggacatcctgtccgtgatggccaaggcaaaaggcctggaagttccattcgtccccatgacattgcccaccaaagtgctgtctgcacatcgtaagagcctgaacctggtggatagcccacagccattactggagaaggtgccggaaagcgacttccagtggcctcgagacgatcacggagacgtcgattgtgaaaagctagtagagcagctcaaagattgttctaatctccaggaccaggccgacatattgtacatcctatacgtgatcaaaggaccatcctgggacaccaatctgtctggccagcacggtgtcaccgtacagaatctgctcggcgagctgtatggcaaagcaggcctgaatcaagaatggggtctcataaggtatattagtggactgctgcgaaaaaaggtggaagtcctagctgaggcatgcacagacctgctctcccaccaaaaacaactcaccgttggtttgccacccgagccccgggaaaagattatcagcgctcccctgccccccgaagagctcacgaaactgatctacgaggctagtggacaggacatttccattgccgtgctgacacaggaaatcgtggtgtacctcgcaatgtacgtgcgtgctcaaccgagcctgttcgttgagatgctcaggcttagaatcgggctgatcatccaagtgatggctaccgagctagcccggtctctcaactgtagcggagaagaagcctcagaatcactcatgaacctgagtcccttcgacatgaagaacttactgcatcacattctttcggggaaagaatttggcgtcgagcgctccgtgagaccaattcacagctcaacctctagccctaccatatccatacacgaggtgggacacacgggtgtaacaaaaaccgaacgcagtggaattaaccgcttgagatcagagatgaaacagatgacacgccggttttctgctgacgagcagttcttcagtgtcggacaggcggcttcctcatccgctcactcctcaaagtccgcacgatcctccaccccaagttcaccaactggcaccagctcctcagactctggagggcatcacattggctggggcgagaggcaggggcagtggctccggcggaggcggctggatggggccatcaacagggtgccggtgggtttttaccaaagagtttggaagattttacagaagtgccatggactttccattgacgggtacgtcctaccaagcagtaccaccagagagatgactccacatgagattaagtttgcagtgcacgtagagagtgtcctgaaccgggtcccccagccagagtacaggcagctactagttgaagccatcatggtcttgactttactatcagataccgaaatgacttctataggtggcattatccatgtagatcaaatcgttcaaatggcctctcagttatttctccaagatcaagtgagcatcggggcgatggacactctcgaaaaggatcaggcgacggggatctgccactttttctatgattccgctccatcaggtgcatacggaactatgacctatctaacacgggcagtggcctcgtacctgcaggaactcctacccaactctggatgtcagatgcag

SEQ ID NO: 18120 - DNA, 3705 bp, synthetic construct
  misc_feature 1..3705: note = source = /note="Description of Artificial Sequence: Synthetic coding sequence"
  source 1..3705: mol_type = other DNA
atgagaagccggagcaatagcggcgtgaggttggatggttatgccaggctggtgcagcagactattctttgctatcagaaccccgtcaccggactgctgtcagcgagtcacgaacaaaaggatgcttgggttcgggataacatctattcaattctggccgtttggggcttgggcatggcttaccgcaaaaatgcggatagggacgaagataaagcaaaggcgtacgagctcgagcagaacgtggtcaagctgatgcgcgggctgctgcaatgcatgatgcgtcaagttgctaaggtggaaaaattcaaacatactcagtcaactaaggactccctccatgcaaagtacaacaccgcaacatgcgggacggtggtcggggatgatcaatggggacatctccaagtggacgcgactagtttgtttctcctgtttctggctcagatgactgcgagcgggctgcgcatcatctttacgctcgatgaggtagcttttattcagaacctagtgttctatattgaggccgcctacaaagtggcggactacggtatgtgggagagaggggacaaaactaatcaaggaattccggagctgaatgcctccagtgtgggaatggcgaaggctgcactcgaggccatcgatgagctcgacctctttggggcacacggaggacgaaaatccgtcatccacgttctccctgacgaggttgagcattgccagagcatcttattctcaatgctcccccgggcctcgacatccaaagaaatagatgctggccttctgtctatcatatctttcccagcgttcgcggtggaggacgtcaacctggttaacgtgacgaagaatgaaatcatatctaagcttcagggcagatacggatgctgcaggtttctccgggatggttataagaccccacgagaggatccaaaccggctccattatgatccagctgagctgaagcttttcgaaaatattgaatgcgagtggccggtgttctggacatactttatcatagatggggtattttcaggggacgctgtgcaggtgcaagagtatcgggaggctctcgagggaatcctgattcgcgggaagaatggtatccgattggtgcctgagctgtacgcggtgccacctaacaaagttgacgaagagtacaagaacccacacacagtggatcgcgtacctatggggaaggtaccacatctgtggggccagtccctgtacattttaagcagccttttagcagaggggttcttggccgccggagagatcgatcccctgaaccgacgtttcagcacctcggtgaagccagatgtggtggtacaagtcactgtgctcgccgagaataaccatattaaagacctactccgtaaacacggtgtaaatgtgcagagtatcgccgatatacatcctattcaagtgcaacctggaagaatcttgagtcacatatatgcaaaactggggcggaataaaaacatgaatctctccggcaggccataccgccacatcggggtactggggacctccaaactctacgtcatcaggaaccagatcttcaccttcacccctcagttcactgatcaacaccacttctatctggctctggataatgagatgatcgtggaaatgctgcgtatcgagttagcctacctttgtacatgctggcggatgactggtcggccaactctgacctttcctatttccagaactatgctcaccaacgatggctctgacattcactcagccgttctaagtaccattaggaagctcgaggacggctactttggcggggcccgagttaagctagggaacttatcagaattcttaacaacctcattctatacctacctcacgtttcttgacccggattgcgacgaaaagctttttgacaacgcgtccgaaggcacattctccccagatagtgattcagacttggtgggatacctcgaggatacgtgcaatcaggaaagtcaagatgagcttgaccattacattaaccacctgcttcaatccacttcgctgcgatcttatctgcccccactgtgcaaaaacactgaggaccgacatgttttctcagccattcactccacgcgagatatcctgagtgttatggcaaaggccaagggattggaagtgccctttgtccccatgactctcccaacgaaggtgctgtcagcccaccgcaagtccttgaacctggtggatagtccccaacccttactagagaaggttccggagagcgactttcagtggcctcgggatgaccacggggacgtagactgtgagaaactcgttgagcagttgaaggactgtagcaacttgcaagaccaagcagacatactgtatatattgtatgtgataaaaggaccctcgtgggacaccaatctgagcggccagcatggtgtgacagtgcagaatttgctcggtgagctttatgggaaagctggcctgaaccaggagtggggcttgattcgttatatctcagggttgcttcggaaaaaggtcgaggtgctggcggaagcatgtaccgacctactcagccaccagaaacagcttacagtgggactgcctccagagcctcgggagaaaataataagtgcccctcttccacctgaagaattaacaaaactgatctatgaagcctcgggacaagacataagtatcgccgttctaacccaggagatcgttgtataccttgcaatgtatgttagggcccagccctctctgtttgtcgagatgctgcgcctgcgaatcgggctgatcatccaggtaatggccacggaactggcgaggagtctaaactgcagcggagaggaggccagcgaatcattgatgaacttgtccccattcgacatgaaaaatctcctgcaccacatcctgtccggcaaggagttcggggtggagagatctgtccggcctattcatagtagcacgtcttccccaactatctccatccatgaggtcggccacaccggagttactaagacagaacgctccggtatcaaccggttgcgcagcgagatgaagcaaatgaccagacgctttagtgccgacgagcagtttttttcagttgggcaggctgcctctagctccgcccactctagtaagagcgctcgctcaagcactccttcatcgccaaccggtactagctcgagtgactccggaggtcatcatatagggtggggggagaggcagggccagtggctgagaaggcgaagactggacggggctattaatcgggtgccagtgggattttaccagcgggtgtggaaaattctgcagaagtgtcatggtctgagtatagatgggtatgtattgccgtcatcaaccacccgggaaatgaccccccacgaaattaagtttgctgtgcacgtggaatcagtgctgaaccgggtgcctcagcccgagtaccgccagctgttggttgaggccatcatggtgctgacccttctgagtgataccgaaatgacgtcaattgggggaataatccacgtcgaccagatcgtgcaaatggccagccagctctttctccaggaccaggtctcaattggagcgatggacactctcgaaaaggaccaggcaaccggaatctgccattttttttatgactctgccccatccggggcctatggcactatgacgtacctgacccgcgctgtagccagctatttacaagaactgctccccaatagtgggtgccagatgcaa

SEQ ID NO: 18121 - DNA, 3705 bp, synthetic construct
  misc_feature 1..3705: note = source = /note="Description of Artificial Sequence: Synthetic coding sequence"
  source 1..3705: mol_type = other DNA
atgcgctccaggagcaattccggggtaaggctggacgggtacgcacggttggtacagcagacgatcctttgttaccagaatccggtcactggtttgctgagtgctagccacgagcaaaaggatgcgtgggtgagagacaacatttatagtatcttggccgtctggggcctggggatggcctaccgaaagaacgctgacagagatgaagacaaggccaaagcatacgagctcgagcagaatgtggttaagttgatgcgtggactgctccagtgtatgatgcgccaggtggccaaggtggagaagttcaagcacacccagagcaccaaagacagcttgcacgccaagtacaatactgccacctgcggcactgtggtcggcgatgaccagtggggtcatctgcaggtggacgctacctccctttttttgctgtttctcgctcaaatgaccgcgagtggactgcggattatctttaccctagatgaagtggccttcatccaaaacctggtcttctatattgaagccgcctataaagtggcagattacggtatgtgggagagaggagacaagaccaaccaaggcatacctgagctgaatgcctcctcagtcggcatggctaaagccgctctggaagccatagacgagctggatctttttggcgcacatggaggccggaaatctgtaattcacgtgttacccgatgaggtggagcactgccaatccatcctgttctctatgctgccaagagcttctacaagtaaagagattgacgccgggctgctgtccattattagtttcccagccttcgctgtagaggatgtgaacctggtcaacgtgaccaaaaatgagataatcagcaagctccagggtaggtatgggtgctgtagattccttagggatgggtacaagactccacgggaggatcccaatcgtttgcattatgaccctgccgagctcaaactcttcgagaacatcgagtgcgagtggcctgtattctggacttattttattattgacggggtattctctggcgatgctgtccaggttcaggagtacagagaggcactggaaggaatcctgatccgcggaaagaacggtatcaggcttgttcccgagttatacgccgtacccccaaacaaggtggatgaagaatacaagaacccccatactgtggacagggtaccgatgggaaaggtaccacatttatggggtcagtcgctgtacatcctctccagtctcctggcagaggggtttttggctgcgggagagatcgacccactgaacaggcggttcagcacgtccgtcaaacccgacgtcgtggtgcaggtgaccgtgttggccgaaaacaaccatatcaaggaccttctaagaaagcatggggtgaatgtccaatccatagctgacattcatcccatccaggtccagccaggacgaattctcagccatatctacgctaaacttggcagaaataagaacatgaatctgtcaggtagaccatatcggcacattggcgtgctcgggaccagcaagttgtatgttatccgtaaccagatctttacattcaccccgcaattcaccgaccagcatcacttctacctggccctggataacgaaatgatcgttgaaatgttgcggatcgagctcgcctacctgtgtacctgttggagaatgacgggacgtccgactcttacctttcctattagccgcaccatgctcacaaatgatggttccgacattcatagcgctgtcttgtccactattcgcaagcttgaggacgggtactttggcggcgcccgcgtcaagctaggaaacctgagtgagttcctgacaacttccttctacacctacttgacattcctggatcctgactgtgatgagaaactgttcgacaacgcctcagaggggacattcagcccagattcagacagcgacctggtgggatatctggaggacacctgtaaccaggagtcccaggacgagctggaccactatatcaatcacctgcttcagagtacaagcctgcgctcctacttgccccccttatgcaagaatacagaggatcgacatgtattttccgcgattcactccacacgcgacatactgtcagtgatggctaaagcgaagggtttggaagttccatttgttcccatgacacttcccacgaaggtcttatctgcccaccggaagagccttaatttggtggactcgccccagcccttgttggagaaggtccctgaatcggactttcagtggccacgggacgaccacggagatgtcgattgtgaaaaacttgtggagcagttgaaggattgttcaaatttacaggaccaggccgatatcttatacatcctatatgtgataaaagggcctagctgggatactaatttatcaggacaacacggcgtcaccgtgcagaatctgctgggagaactgtacggcaaggcaggcctcaaccaggaatggggactaatccgctatatatccggcctcctgaggaagaaggtggaggtgttggccgaggcttgcactgacctcctgagtcatcaaaagcaattaacagttgggctgccacccgagccccgggaaaagattatatctgctccgctgccaccggaggaattaacaaagttgatttacgaagctagcggccaggatattagcatagccgtactgacacaggaaattgttgtgtacttggccatgtacgtgagagcccagccttctttgttcgtggagatgctgaggctgagaatcggattgattatccaggtaatggccacggaactcgctaggagtctcaactgctccggcgaggaggcctccgagagcctgatgaacctatcacctttcgacatgaagaacttgttgcaccatattctgagtggtaaggaattcggcgtggagcgcagtgtgcgacccatccatagtagtacgtcttcccctactatatcaatacatgaggtgggccatactggggttaccaaaacagaaagaagcggcataaaccggctaagaagcgagatgaagcagatgactcgccgcttcagcgcagacgagcagttttttagtgtagggcaggctgcctccagctccgcccacagctccaagtcagctagaagctccaccccaagtagtccaacaggcaccagtagcagcgattccggaggacaccatatcggatggggggagcgtcaggggcagtggctgagaagaaggcgcctagatggcgctataaatcgtgtgcccgtcggcttctaccagcgagtttggaagatactgcagaaatgtcatggcctgtcaattgacggctatgtactgcccagtagcactactagagagatgacaccccacgagataaaatttgctgttcacgtggagtccgtcctcaacagagtcccccaaccagagtatcggcagttactcgtggaggctatcatggtgttgacccttttgagcgacacagagatgacctctatcgggggtataattcatgtggaccagatagtgcagatggcgagccagttattcctgcaggaccaggtgtccataggggcgatggacaccctggaaaaagatcaagcaactgggatctgtcacttcttttatgacagcgcacccagtggcgcctacgggaccatgacttatctaacccgcgcagtggcgtcctatctacaagagctgttgccaaatagcggttgtcagatgcag

SEQ ID NO: 18122 - DNA, 3705 bp, synthetic construct
  misc_feature 1..3705: note = source = /note="Description of Artificial Sequence: Synthetic coding sequence"
  source 1..3705: mol_type = other DNA
atgaggagccgaagtaattccggcgttagactcgacgggtatgccaggctggtccagcagacgattctgtgctaccagaatccagttacaggactcttgtccgcttcacatgaacaaaaagatgcatgggtaagagacaacatttattccattcttgcagtatgggggttgggaatggcctacagaaaaaacgctgatagagacgaggataaggccaaggcctatgagctggagcaaaatgttgtgaagctgatgcgcggcttgttgcagtgcatgatgaggcaggtcgcaaaggtcgagaaattcaagcatactcagagtaccaaagactccctgcacgctaaatacaatactgctacttgcggtaccgttgttggagatgatcagtgggggcacttgcaggtcgatgcaactagtttgtttctgctcttcctggcccagatgactgcgtcaggtctcagaattatcttcactctggatgaggtggcctttatccagaacttggttttctacatcgaggccgcttataaggtggccgattatggaatgtgggagaggggggataaaacaaatcaaggcatccccgaactgaatgctagctcggttgggatggccaaggctgccctggaggcgattgacgagttggatctctttggagcacatggcggcaggaaatccgtgatccacgtgcttcctgatgaagtggagcactgccagagtatcttgttctctatgctgcctagggcctccacatcaaaagagattgacgctggactacttagtatcatctctttccctgctttcgcggtggaagatgtcaatctcgtgaatgtgactaaaaacgaaatcatcagcaagctccaggggcgatacggatgttgcaggttcctaagggacgggtacaaaacaccccgcgaagaccctaaccgcttgcactacgatcccgctgagctaaagttgtttgagaatatcgagtgcgaatggcctgtattttggacgtattttatcatcgatggggtcttcagtggggatgcagttcaagtgcaggagtacagggaggcactggaaggcatcttaatcaggggaaaaaacggcatacgactggtgcctgaactctatgccgttcctcctaacaaggtggatgaggaatataagaacccacataccgtggatcgagtgccgatgggaaaagtgccacacctctggggtcagtctctgtacattctgagttccctgctggctgaaggttttctggctgctggagaaatcgatcccctcaacaggagatttagtacctctgtcaagcctgatgtggtggtgcaggtaacagtgctggcggaaaataaccacatcaaagacttgctgagaaagcatggcgtaaatgttcagtctatcgctgacattcaccccattcaggtccagccaggaagaattctgtctcatatttatgccaaactaggccgaaacaagaacatgaatttgagtggccgtccataccgacatattggcgtgctggggacatctaaactttacgtgatcagaaaccaaatatttacattcactccccaattcaccgaccaacatcatttctatctggccctggacaacgaaatgatcgtggagatgctgcgtatagaacttgcatatctgtgtacttgttggagaatgacgggtcgacccactttgactttcccaatatccaggaccatgctaaccaatgacggctcggatatccacagtgcagtactgtcgaccataagaaagctcgaggacggctactttggaggagcacgtgttaagctggggaacctgtcggaatttctgacaacaagtttctatacctatctgacgtttcttgaccccgattgtgacgagaagctgtttgataatgccagcgaaggtacgttctcgccagactctgactctgaccttgtgggctacctggaggatacatgtaaccaggaatctcaggatgaattagaccattatattaaccacttattgcagtcgacgagccttcgctcttatctgcctcctctttgcaagaacactgaagacaggcacgtgttctctgctattcattcaaccagggatatactatcagtgatggccaaagcgaagggactggaagttccattcgtccctatgaccctgccaaccaaagtgctgtcggcacacagaaaatccctgaaccttgtggactcgccacagcccctgttagagaaagtgccggaatccgactttcagtggccacgcgacgatcacggggacgtcgactgcgagaagcttgtagagcagctaaaggactgcagtaacctccaggatcaggctgatatcttatacatactgtacgttatcaaaggcccctcgtgggatactaatctttcaggacagcatggcgtcaccgttcagaacttattgggggagctgtacggaaaggcaggcctgaaccaggaatgggggctaatacgatatatcagcggtctattgcgtaagaaagtggaggtgctagcagaggcatgtaccgatctgctctctcatcagaaacagctgactgtggggttgccccccgaaccccgtgagaagattatttcagcccctctgcctccggaagagcttactaagctgatttacgaggcgtctggacaggacatctctatcgcagttctcacacaggagatcgtcgtgtatctagcgatgtacgtaagggcccaaccctccctgttcgttgagatgctgcgcctcagaatcggacttataatccaggtgatggcgactgaactggcgagatctttaaattgctcaggggaagaggcttccgagtcactgatgaatctgtcacctttcgatatgaaaaacctccttcatcacattctcagcggcaaggagtttggtgttgaaagatccgttagaccaatccattcatcaacctcctctccaaccatctcaatccacgaagtgggacacacgggtgtaactaagacagagcggtccggcattaatcgattacgatccgagatgaagcagatgacccgacgattttcagccgatgaacagttcttttccgtagggcaggcggcttcatcttccgcccacagcagcaagtctgctcgatcctcaaccccatctagccccacgggaacgagtagctcagattctggtggccatcatatcggctggggcgagagacagggccaatggttgcgccgtcgaaggctcgatggagccattaaccgagtcccagttggattctatcagcgagtctggaaaatcctgcagaagtgtcatggcctgagcatcgacggatacgtgctgccaagctcgaccacaagagagatgactcctcacgagatcaagtttgcagttcatgtggaatcggtgttgaatcgagtgccccagcccgagtacagacagctgctcgttgaagccatcatggtgctcaccctccttagcgatactgagatgacaagtatcggtggcataattcacgttgatcagatcgtacagatggcgagtcagctcttcttacaggatcaggtttcaatcggcgctatggataccctggaaaaggatcaagcaacaggaatttgccattttttttatgactctgcgcctagcggggcgtatggcaccatgacctatttaacccgagcggtcgcctcctacctccaggaactcctcccaaattctgggtgccagatgcag

SEQ ID NO: 18123 - DNA, 3705 bp, synthetic construct
  misc_feature 1..3705: note = source = /note="Description of Artificial Sequence: Synthetic coding sequence"
  source 1..3705: mol_type = other DNA
atgcgcagcagatccaactcaggagtgagacttgatggctacgctaggcttgtgcaacaaacgattctgtgttaccaaaacccggtgactgggcttctgtcagccagccatgaacagaaggacgcctgggtgagggataacatttactcgatacttgcagtgtggggacttgggatggcttaccgtaagaatgcagaccgagatgaggataaggcgaaggcatacgagctggaacagaacgtggtcaaacttatgagaggactgctccaatgcatgatgaggcaagtggccaaggtggaaaagtttaagcacactcaaagcaccaaggactcgctgcatgctaagtacaacactgcgacgtgtggcactgtcgtgggagacgatcaatggggacacctgcaggtcgacgcaacttcactgttcctcctcttcctggcacaaatgacggcatccggacttagaatcatattcacgctggacgaggtggctttcatccaaaatctcgtgttttacattgaggcagcatacaaggttgccgattacggtatgtgggagcgaggggacaaaaccaatcagggcattccggagcttaatgcatcaagcgtcggaatggcgaaggccgcacttgaggcaatcgatgagctggacctttttggagcacatggcggtcggaaatcggtgattcatgtgctcccagatgaggtcgagcactgccaatccattctcttttccatgctcccgagggcaagcacctcgaaggagattgacgcaggacttctgtcaatcattagttttcctgcattcgcggtcgaggatgtcaacttggtgaatgtgaccaagaacgagatcatctctaagttgcagggaagatacggttgttgccgctttctgagggatggatacaagacgccacgggaggaccctaacagacttcattacgaccctgccgagctgaaactttttgaaaacattgagtgtgagtggccagtgttctggacttacttcattattgatggagtgttctccggcgacgcagtgcaggtgcaggaatacagagaagcactggaaggaatcctcataaggggtaagaacggaatcagattggtgccggaactttacgcggtgccccccaacaaggtggatgaagaatacaagaaccctcatactgtggacagagtgcccatgggtaaggtacctcatctgtggggccaatcgctgtacatcctttcgtcgctgcttgccgagggctttctggccgcgggagaaattgatccactgaaccgcaggttttccacttccgtcaagcctgacgtggtcgtccaggtgaccgtgctcgcagagaacaaccatatcaaggacctgcttagaaagcacggagtgaacgtccaatctatcgcagatatccatccaatccaagtgcagccgggaagaattctgagccacatatatgcaaaactgggaaggaacaagaacatgaacctctcgggtcgaccatacagacatataggggttctgggtactagtaagctgtacgtgatcaggaaccaaatctttaccttcactcctcagtttacggatcaacaccatttctacctggcactggacaacgagatgatcgtcgagatgcttaggattgagcttgcctacctctgcacctgctggcggatgactggtagacctactcttactttccccatctcgaggacgatgctcaccaatgacggatccgatatccattccgcggtcttgagcactatcaggaagttggaagatggctattttggaggcgcaagagttaaacttggaaacctctcagagtttctgactacttcgttttacacttacctcacgtttctggatccggattgtgacgaaaaactctttgataacgcatccgaaggaacctttagccccgactctgactcggacttggtgggatacctggaagatacctgcaaccaggaatcgcaggatgaacttgaccactacatcaaccatttgcttcagtcgactagcctgagatcatacctcccacctctgtgcaaaaacactgaggatcggcacgtctttagcgcgattcactcgacccgtgatatactgtccgtgatggctaaggcaaagggccttgaagtgccatttgtgcccatgacgctccctactaaagtcctgtcggcacatcgaaagagcttgaatctggtggactcgccacaacccctgctggaaaaggtccctgaatcggacttccaatggcctcgggatgaccatggcgacgtggattgtgaaaaactcgtcgaacaacttaaggattgttcgaatttgcaagatcaggccgatatactttacatcctttacgtgattaaaggtccgtcgtgggataccaacctgagcggacaacacggagtgactgtccagaaccttctcggagaattgtacggaaaggctggtttgaaccaagaatggggcctgattcgctacatatccgggcttctccggaaaaaggtggaggtcctggccgaagcgtgtaccgaccttctctcccaccaaaaacaactgacggtgggacttccacccgagcctagggaaaagatcatctccgcacctcttccacccgaagaactcaccaagctcatttacgaagcatcagggcaggacattagcattgccgtgctcacccaagaaatagtggtgtatctcgcgatgtacgtgagagcacagccatccctctttgtcgaaatgcttcgcctgcgcatcggactgattatccaggtcatggcaacggagctggcacgctcactcaactgctctggggaggaagcctccgaatccttgatgaacctgagccctttcgacatgaaaaacctgcttcatcacattctgtcaggtaaagaatttggagtcgaacgctcagtgcggcctatccattcctccaccagctcgccaaccatatcgatccatgaggtcggtcacactggagtcactaaaacggaaaggtcagggatcaacaggctgaggtcggagatgaagcagatgacccgtagatttagtgcagatgaacaattcttttctgtgggccaggcggcctcaagctccgcacactcctccaagtccgcacgttcatccactccttcatcacccactggaacctcgtcgtcggatagcggagggcaccatattggctggggggaacggcagggtcaatggctgcgccgtcgacgcctggacggagccattaaccgggtgcctgtgggtttctatcaaagagtgtggaagattcttcagaaatgtcacggactgtctattgatggttatgtcctccccagctcgactacccgcgagatgaccccccatgagattaagtttgctgtgcacgtggagagcgtcttgaaccgcgtcccacagcctgaatataggcaattgctcgtggaagctatcatggtgctgacccttctgagcgataccgaaatgaccagcattggagggattatccatgtcgaccagattgtgcaaatggcttcccaactttttcttcaagaccaggtgagcattggtgcaatggatacccttgaaaaagaccaggccaccggaatctgtcacttcttttatgattccgcaccttcaggtgcatacggaacgatgacctacctcacccgggcagtggcatcatacctgcaggaactgcttccaaacagcggatgtcaaatgcag

SEQ ID NO: 18124 - DNA, 3705 bp, synthetic construct
  misc_feature 1..3705: note = source = /note="Description of Artificial Sequence: Synthetic coding sequence"
  source 1..3705: mol_type = other DNA
atgaggagtcgttcgaacagtggggtgaggctggacggctacgcacgtctggtgcagcagacgatactctgttatcagaacccagtgaccggcctgctcagtgcctctcacgagcaaaaggacgcttgggtcagggacaatatatatagcatccttgccgtctggggtctaggtatggcttaccgcaagaatgcagatagggacgaagataaggcgaaagcctacgagttggaacagaacgtagtcaagttgatgaggggacttctccagtgcatgatgcgccaggttgcaaaagtggaaaagtttaagcatacgcagagcaccaaagattccctacacgcaaaatataatacagcgacatgcggtactgtggtcggtgatgatcaatggggccatctgcaggttgacgctacatcgctattccttctttttctcgcgcagatgaccgctagtggactgcggattattttcacgttggacgaggtcgcattcatccagaatttggttttctacatcgaggccgcttacaaggttgccgactacggcatgtgggaaaggggagacaaaactaatcagggcattcccgagctgaatgcttcctctgtgggcatggccaaagctgcgctggaggcgatcgacgagctggatctgtttggcgctcacggcggacggaaatccgtgattcacgtgctgccggatgaggtggaacattgccagtccatcctctttagcatgcttccaagagcctctacgtcaaaggagatcgatgctgggcttctgtccattatctcctttcccgccttcgctgtagaggatgttaacttggtgaatgtgaccaaaaatgagatcatatccaagcttcaggggcggtatggttgttgccggtttctgcgggatggatacaagaccccaagggaggacccaaataggctccattacgatcctgctgagctgaagctattcgaaaacattgagtgtgagtggcccgtcttttggacctacttcatcattgatggggtctttagtggcgacgccgtgcaagtgcaggagtaccgtgaagcattggaaggtatattgattaggggaaagaacggcataaggctggtccccgagctgtatgcggttccacctaataaagtcgatgaggagtacaagaacccacacactgtggatcgcgtccccatgggaaaggtaccccacctgtgggggcagagcctttacattttgtccagtctgctcgccgaggggttcttggccgccggggagatcgacccactgaatcggaggttttccacaagcgtgaagccggacgtcgtggttcaggtaacagtgctcgctgagaataaccacatcaaagatctcttaaggaaacatggggtgaacgtgcagtctattgctgacatacatcctatccaagtacaacccggtcgcattctgagccacatctacgcaaaactcggccggaacaaaaacatgaatttgagtggcaggccgtacagacatatcggagtgctgggcaccagcaaattatacgtgatacgaaatcagatcttcactttcaccccccagtttacggaccagcaccatttttacctcgcacttgataatgaaatgatcgtcgaaatgcttcgcatagagctggcctacctatgtacatgctggcgcatgactgggcgccctacactgacctttcccatctcaaggacaatgctcaccaacgatggtagcgatattcattctgcagtactctccactattagaaagctcgaagacggttactttgggggtgcaagagtaaaattgggtaacctgtctgagtttctgacaacatcattttatacctacctcacatttctcgacccagactgcgatgaaaagctgtttgataacgcttcagaggggactttcagccctgatagtgattccgatctagtaggatatctggaggacacctgcaaccaagagtcccaggatgagctagatcactatatcaatcatctccttcagtccactagcctgcgaagctacctgccccccctgtgcaagaataccgaagaccgtcacgttttctctgccattcactccacccgcgacatactgtccgtaatggctaaggctaaaggtttggaggtgcccttcgtgccaatgactctgccaactaaggtgctgagtgcccatcggaagagcctgaacctggtagattctccacagccactcttggaaaaggtaccagagagtgatttccagtggcctagagacgaccatggagatgtagactgcgagaagctcgtggagcagctgaaggactgctccaatctccaggaccaggctgacattctctatatactgtacgtgatcaaaggtccctcctgggatacaaacctttcaggccaacatggggtgactgtccagaatttgctaggcgagctgtacgggaaggccggtcttaatcaggaatggggactcatccgttatatcagcggtctcctaaggaaaaaagtggaagttttggctgaggcctgtactgatctgctcagccatcagaagcaactgaccgtgggcctcccacccgagccccgcgagaagattatcagtgcaccgcttccaccggaagaactcactaagctgatctatgaggcctctggtcaggatattagcatcgccgttttgacacaggagattgttgtgtatctagctatgtatgtgcgtgcacagccgtccttgtttgtggaaatgcttcgcttgagaatcggtctgattattcaggtgatggcaaccgaactggctcgctccctgaattgttccggagaagaggcctccgagtccctgatgaatctgagtcccttcgacatgaagaacctgctccaccacatcctcagcggtaaggagttcggcgtagagcggtccgtgaggccaatacacagcagtaccagctcccccacaatcagtatccatgaagtcggccacaccggggttacaaagacagagcgtagtgggatcaatcgattaaggtcagagatgaaacagatgactcggagattctcagctgacgagcaattttttagtgtggggcaggccgcgtcatccagtgctcactcaagcaagtccgcccggagtagtacgccatcttcacctactgggacatcatcttctgatagcggtggccatcacatcggctggggggagaggcaaggacagtggctgaggcgcaggcggctcgacggtgctattaacagggtaccagtgggcttttaccagagggtatggaagattttgcaaaagtgccacgggctctcgatcgacggatatgttttaccgtcaagcacaactcgcgaaatgacaccccatgaaattaagttcgctgtccacgtggagagcgtgctaaatcgggtgccacagcccgaataccgccaactgcttgtcgaggcgattatggtactgaccctcctatcggacactgagatgacctcaatcggaggaataatccatgtagatcagatcgtacaaatggcgagccagctgttcctgcaggatcaggtgtctattggcgcgatggatacactggagaaggaccaagcaaccggaatctgtcacttcttctacgacagcgctccaagcggtgcatatggaacgatgacctatttgacacgtgcggtggcgtcctatctgcaggagctcctgcctaactctggctgtcagatgcag
